United States Patent Application Publication US 2022/0267394 A1 - sequence listing, part 2

SEQ ID NO: 2675 - protein, 38 aa, Artificial Sequence
  GFR-binding peptide
  MOD_RES (2), (4), (38): Xaa is C or S
  MOD_RES (16), (17), (18), (19), (20): Xaa is A or G
  MOD_RES (21), (22), (23), (24): Xaa is A or G or is absent
HXGXAKVVMNRYKKLXXXXXXXXXFYLVSIANLKTPAX

SEQ ID NO: 2676 - protein, 37 aa, Artificial Sequence
  GFR-binding peptide
  MOD_RES (31), (32): Xaa is C or S
RVVMNRHKRLIVNSSDDYYLVSTASLQTPAXXPKPVT

SEQ ID NO: 2677 - protein, 36 aa, Artificial Sequence
  GFR-binding peptide
  MOD_RES (1), (3), (36): Xaa is C or S
  MOD_RES (14), (15), (16), (17), (18): Xaa is A or G
  MOD_RES (19), (20), (21), (22): Xaa is A or G or is absent
XKXSKVIMQYNKLXXXXXXXXXLYLISIASLDQSVX

SEQ ID NO: 2678 - protein, 38 aa, Artificial Sequence
  GFR-binding peptide
  MOD_RES (34), (35): Xaa is C or S
  MOD_RES (12), (13), (14), (15), (16): Xaa is A or G
  MOD_RES (17), (18), (19), (20): Xaa is A or G or is absent
ARVVMNRHKRLXXXXXXXXXYYLVSTASLQTPAXXPKP

SEQ ID NO: 2679 - protein, 35 aa, Artificial Sequence
  GFR-binding peptide
  MOD_RES (1), (1): Xaa is C or S
  MOD_RES (14), (15), (16), (17), (18): Xaa is A or G
  MOD_RES (19), (20), (21), (22): Xaa is A or G or is absent
XEAVSMGERHKRLXXXXXXXXXYYLVSTASLKTPV

SEQ ID NO: 2680 - protein, 35 aa, Artificial Sequence
  GFR-binding peptide
  MOD_RES (1), (3), (35): Xaa is C or S
XGXGEVVMDQYNKLVVKENEDLYLMSIASLETPVX

SEQ ID NO: 2681 - protein, 36 aa, Artificial Sequence
  GFR-binding peptide
  MOD_RES (32), (33): Xaa is C or S
GEVVMDQYNKLVVKENEDLYLMSIASLETPVXXAKP

SEQ ID NO: 2682 - protein, 35 aa, Artificial Sequence
  GFR-binding peptide
  MOD_RES (1), (33), (34): Xaa is C or S
XGEVVMDRHKRLVVKENEDYYLMSTASLETPVXXA

SEQ ID NO: 2683 - protein, 35 aa, Artificial Sequence
  GFR-binding peptide
  MOD_RES (32), (32): Xaa is C or S
SRVVMNQYNKLIVNSSDDLYLVSIASLKTPAXTPK

SEQ ID NO: 2684 - protein, 42 aa, Artificial Sequence
  GFR-binding peptide
  MOD_RES (2), (36): Xaa is C or S
  MOD_RES (14), (15), (16), (17), (18): Xaa is A or G
  MOD_RES (19), (20), (21), (22): Xaa is A or G or is absent
GXSRVVMNRHKRLXXXXXXXXXYYLVSTASLKTPAXTPKTVH

SEQ ID NO: 2685 - protein, 36 aa, Artificial Sequence
  GFR-binding peptide
  MOD_RES (1), (3), (35): Xaa is C or S
XGXSRVVMNYHYKLIVNSSDDKYLVSIPSLKTPAXT

SEQ ID NO: 2686 - protein, 36 aa, Artificial Sequence
  GFR-binding peptide
  MOD_RES (1), (1): Xaa is C or S
XALHDELTYHYKLFIPKKRVIEKYLVSIPSLQVQTP

SEQ ID NO: 2687 - protein, 38 aa, Artificial Sequence
  GFR-binding peptide
  MOD_RES (34), (35): Xaa is C or S
  MOD_RES (12), (13), (14), (15), (16): Xaa is A or G
  MOD_RES (17), (18), (19), (20): Xaa is A or G or is absent
AKVVMNYHYKLXXXXXXXXXKYLVSIPSLKTPAXXAKP

SEQ ID NO: 2688 - protein, 40 aa, Artificial Sequence
  GFR-binding peptide
  MOD_RES (2), (34): Xaa is C or S
GXSRVVMNRYKKLIVNSSDDFYLVSIANLKTPAXTPKTVH

SEQ ID NO: 2689 - protein, 38 aa, Artificial Sequence
  GFR-binding peptide
  MOD_RES (1), (33), (34): Xaa is C or S
XSRVVMNYHYKLIVNSSDDKYLVSIPSLKTPAXXPKPV

SEQ ID NO: 2690 - protein, 37 aa, Artificial Sequence
  GFR-binding peptide
  MOD_RES (2), (4), (36), (37): Xaa is C or S
HXGXSRVVMNRYKKLIVNSSDDFYLVSIANLKTPAXX

SEQ ID NO: 2691 - protein, 38 aa, Artificial Sequence
  GFR-binding peptide
  MOD_RES (2), (4), (37), (38): Xaa is C or S
  MOD_RES (15), (16), (17), (18), (19): Xaa is A or G
  MOD_RES (20), (21), (22), (23): Xaa is A or G or is absent
SXKXSRVIMYHYKLXXXXXXXXXKYLISIPSLAQPVXX

SEQ ID NO: 2692 - protein, 36 aa, Artificial Sequence
  GFR-binding peptide
  MOD_RES (2), (4): Xaa is C or S
  MOD_RES (15), (16), (17), (18), (19): Xaa is A or G
  MOD_RES (20), (21), (22), (23): Xaa is A or G or is absent
SXKXSKVVMRHKRLXXXXXXXXXYYLISTASLDQPV

SEQ ID NO: 2693 - protein, 34 aa, Artificial Sequence
  GFR-binding peptide
  MOD_RES (34), (34): Xaa is C or S
  MOD_RES (12), (13), (14), (15), (16): Xaa is A or G
  MOD_RES (17), (18), (19), (20): Xaa is A or G or is absent
AKVVMNRHKRLXXXXXXXXXYYLVSTASLKTPAX

SEQ ID NO: 2694 - protein, 32 aa, Artificial Sequence
  GFR-binding peptide
  MOD_RES (31), (32): Xaa is C or S
EVVMDYHYKLVVKENEDKYLMSIPSLETPVXX

SEQ ID NO: 2695 - protein, 36 aa, Artificial Sequence
  GFR-binding peptide
  MOD_RES (32), (33): Xaa is C or S
AKVVMNRYKKLIVNNSSDFYLVSIANLKTPAXXAKP

SEQ ID NO: 2696 - protein, 43 aa, Artificial Sequence
  GFR-binding peptide
  MOD_RES (1), (3), (38), (39): Xaa is C or S
  MOD_RES (16), (17), (18), (19), (20): Xaa is A or G
  MOD_RES (21), (22), (23), (24): Xaa is A or G or is absent
XGXEAVSMGERYKKLXXXXXXXXXFYLVSIANLKTPVXXAKGV

SEQ ID NO: 2697 - protein, 41 aa, Artificial Sequence
  GFR-binding peptide
  MOD_RES (1), (35), (36): Xaa is C or S
  MOD_RES (13), (14), (15), (16), (17): Xaa is A or G
  MOD_RES (18), (19), (20), (21): Xaa is A or G or is absent
XGEVVMEQYNKLXXXXXXXXXLYLMSIASLETPVXXAKPIS

SEQ ID NO: 2698 - protein, 34 aa, Artificial Sequence
  GFR-binding peptide
  MOD_RES (2), (4): Xaa is C or S
SXKXSKVVMQYNKLVKPTRGVLYLISIASLDQPV

SEQ ID NO: 2699 - protein, 36 aa, Artificial Sequence
  GFR-binding peptide
  MOD_RES (2), (35), (36): Xaa is C or S
  MOD_RES (13), (14), (15), (16), (17): Xaa is A or G
  MOD_RES (18), (19), (20), (21): Xaa is A or G or is absent
KXSKVVMRHKRLXXXXXXXXXYYLISTASLDQPVXX

SEQ ID NO: 2700 - protein, 35 aa, Artificial Sequence
  GFR-binding peptide
  MOD_RES (33), (34): Xaa is C or S
  MOD_RES (11), (12), (13), (14), (15): Xaa is A or G
  MOD_RES (16), (17), (18), (19): Xaa is A or G or is absent
EVVMEYHYKLXXXXXXXXXKYLMSIPSLETPVXXA

SEQ ID NO: 2701 - protein, 39 aa, Artificial Sequence
  GFR-binding peptide
  MOD_RES (1), (38): Xaa is C or S
  MOD_RES (14), (15), (16), (17), (18): Xaa is A or G
  MOD_RES (19), (20), (21), (22): Xaa is A or G or is absent
XALHDELTRHKRLXXXXXXXXXYYLVSTASLQVQTPRXQ

SEQ ID NO: 2702 - protein, 34 aa, Artificial Sequence
  GFR-binding peptide
  MOD_RES (2), (33), (34): Xaa is C or S
KXSKVIMYHYKLIKPTKGIKYLISIPSLDQSVXX

SEQ ID NO: 2703 - protein, 30 aa, Artificial Sequence
  GFR-binding peptide
SKVVMRYKKLVKPTRGVFYLISIANLDQPV

SEQ ID NO: 2704 - protein, 35 aa, Artificial Sequence
  GFR-binding peptide
  MOD_RES (33), (33): Xaa is C or S
  MOD_RES (11), (12), (13), (14), (15): Xaa is A or G
  MOD_RES (16), (17), (18), (19): Xaa is A or G or is absent
RVVMNRHKRLXXXXXXXXXYYLVSTASLKTPAXTP

SEQ ID NO: 2705 - protein, 35 aa, Artificial Sequence
  GFR-binding peptide
  MOD_RES (2), (34), (35): Xaa is C or S
GXGEVVMEQYNKLVVKDYEDLYLMSIASLETPVXX

SEQ ID NO: 2706 - protein, 37 aa, Artificial Sequence
  GFR-binding peptide
  MOD_RES (34), (35): Xaa is C or S
  MOD_RES (12), (13), (14), (15), (16): Xaa is A or G
  MOD_RES (17), (18), (19), (20): Xaa is A or G or is absent
GEVVMDRHKRLXXXXXXXXXYYLMSTASLETPVXXAK

SEQ ID NO: 2707 - protein, 37 aa, Artificial Sequence
  GFR-binding peptide
  MOD_RES (33), (34): Xaa is C or S
  MOD_RES (11), (12), (13), (14), (15): Xaa is A or G
  MOD_RES (16), (17), (18), (19): Xaa is A or G or is absent
RVVMNRHKRLXXXXXXXXXYYLVSTASLQTPAXXPKP

SEQ ID NO: 2708 - protein, 37 aa, Artificial Sequence
  GFR-binding peptide
  MOD_RES (1), (3), (36), (37): Xaa is C or S
  MOD_RES (14), (15), (16), (17), (18): Xaa is A or G
  MOD_RES (19), (20), (21), (22): Xaa is A or G or is absent
XKXSRVIMYHYKLXXXXXXXXXKYLISIPSLAQPVXX

SEQ ID NO: 2709 - protein, 34 aa, Artificial Sequence
  GFR-binding peptide
  MOD_RES (1), (1): Xaa is C or S
  MOD_RES (13), (14), (15), (16), (17): Xaa is A or G
  MOD_RES (18), (19), (20), (21): Xaa is A or G or is absent
XGEVVMEQYNKLXXXXXXXXXLYLMSIASLETPV

SEQ ID NO: 2710 - protein, 39 aa, Artificial Sequence
  GFR-binding peptide
  MOD_RES (1), (3), (35), (36): Xaa is C or S
XGXGEVVMEQYNKLVVKDYEDLYLMSIASLETPVXXAKP

SEQ ID NO: 2711 - protein, 33 aa, Artificial Sequence
  GFR-binding peptide
  MOD_RES (33), (33): Xaa is C or S
  MOD_RES (11), (12), (13), (14), (15): Xaa is A or G
  MOD_RES (16), (17), (18), (19): Xaa is A or G or is absent
SRVIMRHKRLXXXXXXXXXYYLISTASLAQPVX

SEQ ID NO: 2712 - protein, 32 aa, Artificial Sequence
  GFR-binding peptide
  MOD_RES (11), (12), (13), (14), (15): Xaa is A or G
  MOD_RES (16), (17), (18), (19): Xaa is A or G or is absent
HDELTRYKKLXXXXXXXXXFYLVSIANLQVQT

SEQ ID NO: 2713 - protein, 32 aa, Artificial Sequence
  GFR-binding peptide
  MOD_RES (11), (12), (13), (14), (15): Xaa is A or G
  MOD_RES (16), (17), (18), (19): Xaa is A or G or is absent
RVVMNRHKRLXXXXXXXXXYYLVSTASLQTPA

SEQ ID NO: 2714 - protein, 34 aa, Artificial Sequence
  GFR-binding peptide
  MOD_RES (34), (34): Xaa is C or S
  MOD_RES (12), (13), (14), (15), (16): Xaa is A or G
  MOD_RES (17), (18), (19), (20): Xaa is A or G or is absent
GEVVMEQYNKLXXXXXXXXXLYLMSIASLETPVX

SEQ ID NO: 2715 - protein, 34 aa, Artificial Sequence
  GFR-binding peptide
  MOD_RES (1), (34): Xaa is C or S
XEAVSMGEQYNKLTPVGMDDLYLVSIASLKTPVX

SEQ ID NO: 2716 - protein, 37 aa, Artificial Sequence
  GFR-binding peptide
  MOD_RES (33), (34): Xaa is C or S
  MOD_RES (11), (12), (13), (14), (15): Xaa is A or G
  MOD_RES (16), (17), (18), (19): Xaa is A or G or is absent
KVVMNYHYKLXXXXXXXXXKYLVSIPSLKTPAXXAKP

SEQ ID NO: 2717 - protein, 34 aa, Artificial Sequence
  GFR-binding peptide
  MOD_RES (31), (31): Xaa is C or S
RVVMNYHYKLIVNSSDDKYLVSIPSLKTPAXTPK

SEQ ID NO: 2718 - protein, 39 aa, Artificial Sequence
  GFR-binding peptide
  MOD_RES (1), (3), (37), (38): Xaa is C or S
  MOD_RES (15), (16), (17), (18), (19): Xaa is A or G
  MOD_RES (20), (21), (22), (23): Xaa is A or G or is absent
XGXAKVVMNQYNKLXXXXXXXXXLYLVSIASLKTPAXXA

SEQ ID NO: 2719 - protein, 35 aa, Artificial Sequence
  GFR-binding peptide
  MOD_RES (34), (35): Xaa is C or S
  MOD_RES (12), (13), (14), (15), (16): Xaa is A or G
  MOD_RES (17), (18), (19), (20): Xaa is A or G or is absent
GEVVMEQYNKLXXXXXXXXXLYLMSIASLETPVXX

SEQ ID NO: 2720 - protein, 40 aa, Artificial Sequence
  GFR-binding peptide
  MOD_RES (2), (4), (38), (39): Xaa is C or S
  MOD_RES (16), (17), (18), (19), (20): Xaa is A or G
  MOD_RES (21), (22), (23), (24): Xaa is A or G or is absent
HXGXSRVVMNRHKRLXXXXXXXXXYYLVSTASLKTPAXXP

SEQ ID NO: 2721 - protein, 35 aa, Artificial Sequence
  GFR-binding peptide
  MOD_RES (2), (35): Xaa is C or S
  MOD_RES (13), (14), (15), (16), (17): Xaa is A or G
  MOD_RES (18), (19), (20), (21): Xaa is A or G or is absent
KXSKVIMRHKRLXXXXXXXXXYYLISTASLDQSVX

SEQ ID NO: 2722 - protein, 37 aa, Artificial Sequence
  GFR-binding peptide
  MOD_RES (1), (35), (36): Xaa is C or S
  MOD_RES (13), (14), (15), (16), (17): Xaa is A or G
  MOD_RES (18), (19), (20), (21): Xaa is A or G or is absent
XGEVVMDRHKRLXXXXXXXXXYYLMSTASLETPVXXA

SEQ ID NO: 2723 - protein, 33 aa, Artificial Sequence
  GFR-binding peptide
  MOD_RES (32), (33): Xaa is C or S
SRVVMNRYKKLIVNSSDDFYLVSIANLKTPAXX

SEQ ID NO: 2724 - protein, 44 aa, Artificial Sequence
  GFR-binding peptide
  MOD_RES (1), (3), (40): Xaa is C or S
XKXALHDELTRYKKLFIPKKRVIEFYLVSIANLQVQTPRXQVNR

SEQ ID NO: 2725 - protein, 39 aa, Artificial Sequence
  GFR-binding peptide
  MOD_RES (2), (4), (37), (38): Xaa is C or S
  MOD_RES (15), (16), (17), (18), (19): Xaa is A or G
  MOD_RES (20), (21), (22), (23): Xaa is A or G or is absent
SXKXSKVIMYHYKLXXXXXXXXXKYLISIPSLDQSVXXP

SEQ ID NO: 2726 - protein, 42 aa, Artificial Sequence
  GFR-binding peptide
  MOD_RES (2), (4), (38), (39): Xaa is C or S
  MOD_RES (16), (17), (18), (19), (20): Xaa is A or G
  MOD_RES (21), (22), (23), (24): Xaa is A or G or is absent
HXGXSRVVMNRHKRLXXXXXXXXXYYLVSTASLKTPAXXPKP

SEQ ID NO: 2727 - protein, 39 aa, Artificial Sequence
  GFR-binding peptide
  MOD_RES (1), (3), (35): Xaa is C or S
XGXSRVVMNRHKRLIVNSSDDYYLVSTASLKTPAXTPKT

SEQ ID NO: 2728 - protein, 36 aa, Artificial Sequence
  GFR-binding peptide
  MOD_RES (2), (35), (36): Xaa is C or S
  MOD_RES (13), (14), (15), (16), (17): Xaa is A or G
  MOD_RES (18), (19), (20), (21): Xaa is A or G or is absent
KXSKVIMQYNKLXXXXXXXXXLYLISIASLDQSVXX

SEQ ID NO: 2729 - protein, 41 aa, Artificial Sequence
  GFR-binding peptide
  MOD_RES (1), (38): Xaa is C or S
XALHDELTRHKRLFIPKKRVIEYYLVSTASLQVQTPRXQVN

SEQ ID NO: 2730 - protein, 34 aa, Artificial Sequence
  GFR-binding peptide
  MOD_RES (34), (34): Xaa is C or S
  MOD_RES (12), (13), (14), (15), (16): Xaa is A or G
  MOD_RES (17), (18), (19), (20): Xaa is A or G or is absent
SRVVMNRHKRLXXXXXXXXXYYLVSTASLKTPAX

SEQ ID NO: 2731 - protein, 36 aa, Artificial Sequence
  GFR-binding peptide
  MOD_RES (1), (3), (35), (36): Xaa is C or S
XGXARVVMNYHYKLIVNSSDDKYLVSIPSLQTPAXX

SEQ ID NO: 2732 - protein, 38 aa, Artificial Sequence
  GFR-binding peptide
  MOD_RES (2), (2): Xaa is C or S
  MOD_RES (15), (16), (17), (18), (19): Xaa is A or G
  MOD_RES (20), (21), (22), (23): Xaa is A or G or is absent
KXALHDELTRHKRLXXXXXXXXXYYLVSTASLQVQTPR

SEQ ID NO: 2733 - protein, 37 aa, Artificial Sequence
  GFR-binding peptide
  MOD_RES (33), (34): Xaa is C or S
  MOD_RES (11), (12), (13), (14), (15): Xaa is A or G
  MOD_RES (16), (17), (18), (19): Xaa is A or G or is absent
RVVMNRYKKLXXXXXXXXXFYLVSIANLKTPAXXPKP

SEQ ID NO: 2734 - protein, 36 aa, Artificial Sequence
  GFR-binding peptide
  MOD_RES (2), (34), (35): Xaa is C or S
GXGEVVMEQYNKLVVKDYEDLYLMSIASLETPVXXA

SEQ ID NO: 2735 - protein, 36 aa, Artificial Sequence
  GFR-binding peptide
  MOD_RES (2), (34), (35): Xaa is C or S
GXSRVVMNQYNKLIVNSSDDLYLVSIASLKTPAXXP

SEQ ID NO: 2736 - protein, 32 aa, Artificial Sequence
  GFR-binding peptide
  MOD_RES (31), (32): Xaa is C or S
EVVMDQYNKLVVKENEDLYLMSIASLETPVXX

SEQ ID NO: 2737 - protein, 39 aa, Artificial Sequence
  GFR-binding peptide
  MOD_RES (2), (4), (35), (36): Xaa is C or S
SXKXSRVIMRHKRLVKPKRGVYYLISTASLAQPVXXPAA

SEQ ID NO: 2738 - protein, 30 aa, Artificial Sequence
  GFR-binding peptide
RVVMNQYNKLIVNSSDDLYLVSIASLKTPA

SEQ ID NO: 2739 - protein, 40 aa, Artificial Sequence
  GFR-binding peptide
  MOD_RES (2), (4), (36), (37): Xaa is C or S
RXGXGEVVMDQYNKLVVKENEDLYLMSIASLETPVXXAKP

SEQ ID NO: 2740 - protein, 33 aa, Artificial Sequence
  GFR-binding peptide
  MOD_RES (32), (33): Xaa is C or S
ARVVMNQYNKLIVNSSDDLYLVSIASLQTPAXX

SEQ ID NO: 2741 - protein, 33 aa, Artificial Sequence
  GFR-binding peptide
  MOD_RES (1), (33): Xaa is C or S
XGEVVMDQYNKLVVKENEDLYLMSIASLETPVX

SEQ ID NO: 2742 - protein, 38 aa, Artificial Sequence
  GFR-binding peptide
  MOD_RES (1), (33), (34): Xaa is C or S
XGEVVMERHKRLVVKDYEDYYLMSTASLETPVXXAKPI

SEQ ID NO: 2743 - protein, 31 aa, Artificial Sequence
  GFR-binding peptide
  MOD_RES (31), (31): Xaa is C or S
KVVMNQYNKLIVNNSSDLYLVSIASLKTPAX

SEQ ID NO: 2744 - protein, 41 aa, Artificial Sequence
  GFR-binding peptide
  MOD_RES (1), (3), (36), (37): Xaa is C or S
XGXEAVSMGERHKRLTPVGMDDYYLVSTASLKTPVXXAKGV

SEQ ID NO: 2745 - protein, 35 aa, Artificial Sequence
  GFR-binding peptide
  MOD_RES (1), (33), (34): Xaa is C or S
XAKVVMNRYKKLIVNNSSDFYLVSIANLKTPAXXA

SEQ ID NO: 2746 - protein, 31 aa, Artificial Sequence
  GFR-binding peptide
  MOD_RES (1), (1): Xaa is C or S
XSKVVMRYKKLVKPTRGVFYLISIANLDQPV

SEQ ID NO: 2747 - protein, 39 aa, Artificial Sequence
  GFR-binding peptide
  MOD_RES (1), (34), (35): Xaa is C or S
  MOD_RES (12), (13), (14), (15), (16): Xaa is A or G
  MOD_RES (17), (18), (19), (20): Xaa is A or G or is absent
XSRVIMQYNKLXXXXXXXXXLYLISIASLAQPVXXPAAS

SEQ ID NO: 2748 - protein, 36 aa, Artificial Sequence
  GFR-binding peptide
  MOD_RES (1), (3), (34), (35): Xaa is C or S
XKXSRVIMRHKRLVKPKRGVYYLISTASLAQPVXXP

SEQ ID NO: 2749 - protein, 33 aa, Artificial Sequence
  GFR-binding peptide
  MOD_RES (33), (33): Xaa is C or S
  MOD_RES (11), (12), (13), (14), (15): Xaa is A or G
  MOD_RES (16), (17), (18), (19): Xaa is A or G or is absent
EVVMERHKRLXXXXXXXXXYYLMSTASLETPVX

SEQ ID NO: 2750 - protein, 39 aa, Artificial Sequence
  GFR-binding peptide
  MOD_RES (33), (34): Xaa is C or S
EAVSMGERHKRLTPVGMDDYYLVSTASLKTPVXXAKGVK

SEQ ID NO: 2751 - protein, 41 aa, Artificial Sequence
  GFR-binding peptide
  MOD_RES (2), (4), (37), (38): Xaa is C or S
  MOD_RES (15), (16), (17), (18), (19): Xaa is A or G
  MOD_RES (20), (21), (22), (23): Xaa is A or G or is absent
SXKXSKVIMRYKKLXXXXXXXXXFYLISIANLDQSVXXPSA

SEQ ID NO: 2752 - protein, 39 aa, Artificial Sequence
  GFR-binding peptide
  MOD_RES (2), (4), (35), (36): Xaa is C or S
SXKXSRVIMYHYKLVKPKRGVKYLISIPSLAQPVXXPAA

SEQ ID NO: 2753 - protein, 39 aa, Artificial Sequence
  GFR-binding peptide
  MOD_RES (33), (34): Xaa is C or S
  MOD_RES (11), (12), (13), (14), (15): Xaa is A or G
  MOD_RES (16), (17), (18), (19): Xaa is A or G or is absent
RVVMNQYNKLXXXXXXXXXLYLVSIASLKTPAXXPKPVY

SEQ ID NO: 2754 - protein, 36 aa, Artificial Sequence
  GFR-binding peptide
  MOD_RES (2), (4): Xaa is C or S
RXGXEAVSMGEQYNKLTPVGMDDLYLVSIASLKTPV

SEQ ID NO: 2755 - protein, 37 aa, Artificial Sequence
  GFR-binding peptide
  MOD_RES (1), (33), (34): Xaa is C or S
XSRVVMNRYKKLIVNSSDDFYLVSIANLKTPAXXPKP

SEQ ID NO: 2756 - protein, 37 aa, Artificial Sequence
  GFR-binding peptide
  MOD_RES (2), (35), (36): Xaa is C or S
GXEAVSMGERYKKLTPVGMDDFYLVSIANLKTPVXXA

SEQ ID NO: 2757 - protein, 33 aa, Artificial Sequence
  GFR-binding peptide
  MOD_RES (1), (33): Xaa is C or S
XARVVMNRYKKLIVNSSDDFYLVSIANLQTPAX

SEQ ID NO: 2758 - protein, 40 aa, Artificial Sequence
  GFR-binding peptide
  MOD_RES (1), (3), (37), (38): Xaa is C or S
  MOD_RES (15), (16), (17), (18), (19): Xaa is A or G
  MOD_RES (20), (21), (22), (23): Xaa is A or G or is absent
XGXAKVVMNYHYKLXXXXXXXXXKYLVSIPSLKTPAXXAK

SEQ ID NO: 2759 - protein, 37 aa, Artificial Sequence
  GFR-binding peptide
  MOD_RES (32), (33): Xaa is C or S
AKVVMNRHKRLIVNNSSDYYLVSTASLKTPAXXAKPV

SEQ ID NO: 2760 - protein, 43 aa, Artificial Sequence
  GFR-binding peptide
  MOD_RES (1), (3), (40): Xaa is C or S
  MOD_RES (16), (17), (18), (19), (20): Xaa is A or G
  MOD_RES (21), (22), (23), (24): Xaa is A or G or is absent
XKXALHDELTYHYKLXXXXXXXXXKYLVSIPSLQVQTPRXQVN

SEQ ID NO: 2761 - protein, 37 aa, Artificial Sequence
  GFR-binding peptide
  MOD_RES (1), (35), (36): Xaa is C or S
  MOD_RES (13), (14), (15), (16), (17): Xaa is A or G
  MOD_RES (18), (19), (20), (21): Xaa is A or G or is absent
XGEVVMEYHYKLXXXXXXXXXKYLMSIPSLETPVXXA

SEQ ID NO: 2762 - protein, 36 aa, Artificial Sequence
  GFR-binding peptide
  MOD_RES (2), (2): Xaa is C or S
  MOD_RES (15), (16), (17), (18), (19): Xaa is A or G
  MOD_RES (20), (21), (22), (23): Xaa is A or G or is absent
KXALHDELTYHYKLXXXXXXXXXKYLVSIPSLQVQT

SEQ ID NO: 2763 - protein, 33 aa, Artificial Sequence
  GFR-binding peptide
  MOD_RES (31), (32): Xaa is C or S
RVVMNRYKKLIVNSSDDFYLVSIANLKTPAXXP

SEQ ID NO: 2764 - protein, 40 aa, Artificial Sequence
  GFR-binding peptide
  MOD_RES (1), (3), (37): Xaa is C or S
  MOD_RES (15), (16), (17), (18), (19): Xaa is A or G
  MOD_RES (20), (21), (22), (23): Xaa is A or G or is absent
XGXSRVVMNYHYKLXXXXXXXXXKYLVSIPSLKTPAXTPK

SEQ ID NO: 2765 - protein, 37 aa, Artificial Sequence
  GFR-binding peptide
  MOD_RES (2), (2): Xaa is C or S
  MOD_RES (15), (16), (17), (18), (19): Xaa is A or G
  MOD_RES (20), (21), (22), (23): Xaa is A or G or is absent
KXALHDELTRYKKLXXXXXXXXXFYLVSIANLQVQTP

SEQ ID NO: 2766 - protein, 37 aa, Artificial Sequence
  GFR-binding peptide
  MOD_RES (1), (35), (36): Xaa is C or S
  MOD_RES (13), (14), (15), (16), (17): Xaa is A or G
  MOD_RES (18), (19), (20), (21): Xaa is A or G or is absent
XARVVMNRYKKLXXXXXXXXXFYLVSIANLQTPAXXP

SEQ ID NO: 2767 - protein, 37 aa, Artificial Sequence
  GFR-binding peptide
  MOD_RES (2), (4): Xaa is C or S
  MOD_RES (16), (17), (18), (19), (20): Xaa is A or G
  MOD_RES (21), (22), (23), (24): Xaa is A or G or is absent
HXGXSRVVMNRHKRLXXXXXXXXXYYLVSTASLKTPA

SEQ ID NO: 2768 - protein, 41 aa, Artificial Sequence
  GFR-binding peptide
  MOD_RES (1), (3), (35), (36): Xaa is C or S
XGXAKVVMNYHYKLIVNNSSDKYLVSIPSLKTPAXXAKPVA

SEQ ID NO: 2769 - protein, 40 aa, Artificial Sequence
  GFR-binding peptide
  MOD_RES (1), (34), (35): Xaa is C or S
  MOD_RES (12), (13), (14), (15), (16): Xaa is A or G
  MOD_RES (17), (18), (19), (20): Xaa is A or G or is absent
XSKVVMRYKKLXXXXXXXXXFYLISIANLDQPVXXPSASA

SEQ ID NO: 2770 - protein, 36 aa, Artificial Sequence
  GFR-binding peptide
  MOD_RES (1), (1): Xaa is C or S
XALHDELTQYNKLFIPKKRVIELYLVSIASLQVQTP

SEQ ID NO: 2771 - protein, 32 aa, Artificial Sequence
  GFR-binding peptide
  MOD_RES (11), (12), (13), (14), (15): Xaa is A or G
  MOD_RES (16), (17), (18), (19): Xaa is A or G or is absent
RVVMNQYNKLXXXXXXXXXLYLVSIASLKTPA

SEQ ID NO: 2772 - protein, 37 aa, Artificial Sequence
  GFR-binding peptide
  MOD_RES (1), (33), (34): Xaa is C or S
XGEVVMDRHKRLVVKENEDYYLMSTASLETPVXXAKP

SEQ ID NO: 2773 - protein, 33 aa, Artificial Sequence
  GFR-binding peptide
  MOD_RES (1), (33): Xaa is C or S
XGEVVMEQYNKLVVKDYEDLYLMSIASLETPVX

SEQ ID NO: 2774 - protein, 44 aa, Artificial Sequence
  GFR-binding peptide
  MOD_RES (2), (4), (38), (39): Xaa is C or S
  MOD_RES (16), (17), (18), (19), (20): Xaa is A or G
  MOD_RES (21), (22), (23), (24): Xaa is A or G or is absent
RXGXGEVVMEYHYKLXXXXXXXXXKYLMSIPSLETPVXXAKPIS

SEQ ID NO: 2775 - protein, 33 aa, Artificial Sequence
  GFR-binding peptide
  MOD_RES (1), (3): Xaa is C or S
XKXSKVIMRHKRLIKPTKGIYYLISTASLDQSV

SEQ ID NO: 2776 - protein, 40 aa, Artificial Sequence
  GFR-binding peptide
  MOD_RES (2), (4), (35), (36): Xaa is C or S
SXKXSKVVMRHKRLVKPTRGVYYLISTASLDQPVXXPSAS

SEQ ID NO: 2777 - protein, 35 aa, Artificial Sequence
  GFR-binding peptide
  MOD_RES (2), (35): Xaa is C or S
  MOD_RES (13), (14), (15), (16), (17): Xaa is A or G
  MOD_RES (18), (19), (20), (21): Xaa is A or G or is absent
KXSRVIMYHYKLXXXXXXXXXKYLISIPSLAQPVX

SEQ ID NO: 2778 - protein, 44 aa, Artificial Sequence
  GFR-binding peptide
  MOD_RES (2), (4), (41): Xaa is C or S
  MOD_RES (17), (18), (19), (20), (21): Xaa is A or G
  MOD_RES (22), (23), (24), (25): Xaa is A or G or is absent
EXKXALHDELTQYNKLXXXXXXXXXLYLVSIASLQVQTPRXQVN

SEQ ID NO: 2779 - protein, 41 aa, Artificial Sequence
  GFR-binding peptide
  MOD_RES (1), (35), (36): Xaa is C or S
  MOD_RES (13), (14), (15), (16), (17): Xaa is A or G
  MOD_RES (18), (19), (20), (21): Xaa is A or G or is absent
XAKVVMNRHKRLXXXXXXXXXYYLVSTASLKTPAXXAKPVA

SEQ ID NO: 2780 - protein, 37 aa, Artificial Sequence
  GFR-binding peptide
  MOD_RES (1), (34), (35): Xaa is C or S
  MOD_RES (12), (13), (14), (15), (16): Xaa is A or G
  MOD_RES (17), (18), (19), (20): Xaa is A or G or is absent
XSRVIMRYKKLXXXXXXXXXFYLISIANLAQPVXXPA

SEQ ID NO: 2781 - protein, 34 aa, Artificial Sequence
  GFR-binding peptide
  MOD_RES (2), (33), (34): Xaa is C or S
KXSKVVMYHYKLVKPTRGVKYLISIPSLDQPVXX

SEQ ID NO: 2782 - protein, 32 aa, Artificial Sequence
  GFR-binding peptide
  MOD_RES (32), (32): Xaa is C or S
ARVVMNRYKKLIVNSSDDFYLVSIANLQTPAX

SEQ ID NO: 2783 - protein, 39 aa, Artificial Sequence
  GFR-binding peptide
  MOD_RES (1), (38): Xaa is C or S
XALHDELTRHKRLFIPKKRVIEYYLVSTASLQVQTPRXQ

SEQ ID NO: 2784 - protein, 42 aa, Artificial Sequence
  GFR-binding peptide
  MOD_RES (2), (37), (38): Xaa is C or S
  MOD_RES (15), (16), (17), (18), (19): Xaa is A or G
  MOD_RES (20), (21), (22), (23): Xaa is A or G or is absent
GXEAVSMGERHKRLXXXXXXXXXYYLVSTASLKTPVXXAKGV

SEQ ID NO: 2785 - protein, 35 aa, Artificial Sequence
  GFR-binding peptide
  MOD_RES (2), (4): Xaa is C or S
HXGXSRVVMNRYKKLIVNSSDDFYLVSIANLKTPA

SEQ ID NO: 2786 - protein, 41 aa, Artificial Sequence
  GFR-binding peptide
  MOD_RES (1), (3), (37), (38): Xaa is C or S
  MOD_RES (15), (16), (17), (18), (19): Xaa is A or G
  MOD_RES (20), (21), (22), (23): Xaa is A or G or is absent
XGXGEVVMEQYNKLXXXXXXXXXLYLMSIASLETPVXXAKP

SEQ ID NO: 2787 - protein, 33 aa, Artificial Sequence
  GFR-binding peptide
  MOD_RES (32), (33): Xaa is C or S
SRVVMNRHKRLIVNSSDDYYLVSTASLKTPAXX

SEQ ID NO: 2788 - protein, 41 aa, Artificial Sequence
  GFR-binding peptide
  MOD_RES (37), (37): Xaa is C or S
ALHDELTYHYKLFIPKKRVIEKYLVSIPSLQVQTPRXQVNR

SEQ ID NO: 2789 - protein, 35 aa, Artificial Sequence
  GFR-binding peptide
  MOD_RES (33), (34): Xaa is C or S
  MOD_RES (11), (12), (13), (14), (15): Xaa is A or G
  MOD_RES (16), (17), (18), (19): Xaa is A or G or is absent
SKVVMRYKKLXXXXXXXXXFYLISIANLDQPVXXP

SEQ ID NO: 2790 - protein, 35 aa, Artificial Sequence
  GFR-binding peptide
  MOD_RES (2), (4), (35): Xaa is C or S
SXKXSKVIMYHYKLIKPTKGIKYLISIPSLDQSVX

SEQ ID NO: 2791 - protein, 37 aa, Artificial Sequence
  GFR-binding peptide
  MOD_RES (1), (3), (34), (35): Xaa is C or S
XKXSRVIMQYNKLVKPKRGVLYLISIASLAQPVXXPA

SEQ ID NO: 2792 - protein, 36 aa, Artificial Sequence
  GFR-binding peptide
  MOD_RES (32), (33): Xaa is C or S
GEVVMDRYKKLVVKENEDFYLMSIANLETPVXXAKP

SEQ ID NO: 2793 - protein, 39 aa, Artificial Sequence
  GFR-binding peptide
  MOD_RES (37), (37): Xaa is C or S
  MOD_RES (13), (14), (15), (16), (17): Xaa is A or G
  MOD_RES (18), (19), (20), (21): Xaa is A or G or is absent
ALHDELTRYKKLXXXXXXXXXFYLVSIANLQVQTPRXQV

SEQ ID NO: 2794 - protein, 32 aa, Artificial Sequence
  GFR-binding peptide
  MOD_RES (31), (32): Xaa is C or S
SKVVMQYNKLVKPTRGVLYLISIASLDQPVXX

SEQ ID NO: 2795 - protein, 43 aa, Artificial Sequence
  GFR-binding peptide
  MOD_RES (2), (4), (38), (39): Xaa is C or S
  MOD_RES (16), (17), (18), (19), (20): Xaa is A or G
  MOD_RES (21), (22), (23), (24): Xaa is A or G or is absent
HXGXAKVVMNRYKKLXXXXXXXXXFYLVSIANLKTPAXXAKPV

SEQ ID NO: 2796 - protein, 34 aa, Artificial Sequence
  GFR-binding peptide
  MOD_RES (31), (32): Xaa is C or S
RVVMNRHKRLIVNSSDDYYLVSTASLKTPAXXPK

SEQ ID NO: 2797 - protein, 33 aa, Artificial Sequence
  GFR-binding peptide
  MOD_RES (1), (33): Xaa is C or S
XSRVVMNRHKRLIVNSSDDYYLVSTASLKTPAX

SEQ ID NO: 2798 - protein, 39 aa, Artificial Sequence
  GFR-binding peptide
  MOD_RES (1), (33), (34): Xaa is C or S
XAKVVMNYHYKLIVNNSSDKYLVSIPSLKTPAXXAKPVA

SEQ ID NO: 2799 - protein, 42 aa, Artificial Sequence
  GFR-binding peptide
  MOD_RES (1), (3), (37), (38): Xaa is C or S
  MOD_RES (15), (16), (17), (18), (19): Xaa is A or G
  MOD_RES (20), (21), (22), (23): Xaa is A or G or is absent
XGXAKVVMNYHYKLXXXXXXXXXKYLVSIPSLKTPAXXAKPV

SEQ ID NO: 2800 - protein, 40 aa, Artificial Sequence
  GFR-binding peptide
  MOD_RES (2), (4), (37), (38): Xaa is C or S
  MOD_RES (15), (16), (17), (18), (19): Xaa is A or G
  MOD_RES (20), (21), (22), (23): Xaa is A or G or is absent
SXKXSRVIMYHYKLXXXXXXXXXKYLISIPSLAQPVXXPA

SEQ ID NO: 2801 - protein, 34 aa, Artificial Sequence
  GFR-binding peptide
  MOD_RES (2), (34): Xaa is C or S
GXARVVMNRYKKLIVNSSDDFYLVSIANLQTPAX

SEQ ID NO: 2802 - protein, 37 aa, Artificial Sequence
  GFR-binding peptide
  MOD_RES (33), (34): Xaa is C or S
EAVSMGERYKKLTPVGMDDFYLVSIANLKTPVXXAKG

SEQ ID NO: 2803 - protein, 34 aa, Artificial Sequence
  GFR-binding peptide
  MOD_RES (1), (3): Xaa is C or S
XGXAKVVMNRHKRLIVNNSSDYYLVSTASLKTPA

SEQ ID NO: 2804 - protein, 34 aa, Artificial Sequence
  GFR-binding peptide
  MOD_RES (1), (33), (34): Xaa is C or S
XAKVVMNYHYKLIVNNSSDKYLVSIPSLKTPAXX

SEQ ID NO: 2805 - protein, 36 aa, Artificial Sequence
  GFR-binding peptide
  MOD_RES (2), (33), (34): Xaa is C or S
KXSKVIMYHYKLIKPTKGIKYLISIPSLDQSVXXPS

SEQ ID NO: 2806 - protein, 41 aa, Artificial Sequence
  GFR-binding peptide
  MOD_RES (1), (3), (37): Xaa is C or S
  MOD_RES (15), (16), (17), (18), (19): Xaa is A or G
  MOD_RES (20), (21), (22), (23): Xaa is A or G or is absent
XGXSRVVMNYHYKLXXXXXXXXXKYLVSIPSLKTPAXTPKT

SEQ ID NO: 2807 - protein, 36 aa, Artificial Sequence
  GFR-binding peptide
  MOD_RES (1), (33): Xaa is C or S
XSRVVMNYHYKLIVNSSDDKYLVSIPSLKTPAXTPK

SEQ ID NO: 2808 - protein, 40 aa, Artificial Sequence
  GFR-binding peptide
  MOD_RES (2), (4), (36), (37): Xaa is C or S
HXGXAKVVMNRHKRLIVNNSSDYYLVSTASLKTPAXXAKP

SEQ ID NO: 2809 - protein, 40 aa, Artificial Sequence
  GFR-binding peptide
  MOD_RES (1), (35), (36): Xaa is C or S
  MOD_RES (13), (14), (15), (16), (17): Xaa is A or G
  MOD_RES (18), (19), (20), (21): Xaa is A or G or is absent
XGEVVMERYKKLXXXXXXXXXFYLMSIANLETPVXXAKPI

SEQ ID NO: 2810 - protein, 35 aa, Artificial Sequence
  GFR-binding peptide
  MOD_RES (32), (33): Xaa is C or S
GEVVMDRYKKLVVKENEDFYLMSIANLETPVXXAK

SEQ ID NO: 2811 - protein, 36 aa, Artificial Sequence
  GFR-binding peptide
  MOD_RES (2), (36): Xaa is C or S
  MOD_RES (14), (15), (16), (17), (18): Xaa is A or G
  MOD_RES (19), (20), (21), (22): Xaa is A or G or is absent
GXGEVVMERYKKLXXXXXXXXXFYLMSIANLETPVX

SEQ ID NO: 2812 - protein, 33 aa, Artificial Sequence
  GFR-binding peptide
  MOD_RES (1), (1): Xaa is C or S
  MOD_RES (12), (13), (14), (15), (16): Xaa is A or G
  MOD_RES (17), (18), (19), (20): Xaa is A or G or is absent
XSRVIMRYKKLXXXXXXXXXFYLISIANLAQPV

SEQ ID NO: 2813 - protein, 34 aa, Artificial Sequence
  GFR-binding peptide
  MOD_RES (33), (34): Xaa is C or S
  MOD_RES (11), (12), (13), (14), (15): Xaa is A or G
  MOD_RES (16), (17), (18), (19): Xaa is A or G or is absent
RVVMNRHKRLXXXXXXXXXYYLVSTASLQTPAXX

SEQ ID NO: 2814 - protein, 34 aa, Artificial Sequence
  GFR-binding peptide
  MOD_RES (34), (34): Xaa is C or S
  MOD_RES (12), (13), (14), (15), (16): Xaa is A or G
  MOD_RES (17), (18), (19), (20): Xaa is A or G or is absent
ARVVMNQYNKLXXXXXXXXXLYLVSIASLQTPAX

SEQ ID NO: 2815 - protein, 39 aa, Artificial Sequence
  GFR-binding peptide
  MOD_RES (2), (4), (38): Xaa is C or S
  MOD_RES (16), (17), (18), (19), (20): Xaa is A or G
  MOD_RES (21), (22), (23), (24): Xaa is A or G or is absent
HXGXSRVVMNRHKRLXXXXXXXXXYYLVSTASLKTPAXT

SEQ ID NO: 2816 - protein, 34 aa, Artificial Sequence
  GFR-binding peptide
  MOD_RES (1), (3), (34): Xaa is C or S
XKXSKVVMRHKRLVKPTRGVYYLISTASLDQPVX

SEQ ID NO: 2817 - protein, 38 aa, Artificial Sequence
  GFR-binding peptide
  MOD_RES (2), (36), (37): Xaa is C or S
  MOD_RES (14), (15), (16), (17), (18): Xaa is A or G
  MOD_RES (19), (20), (21), (22): Xaa is A or G or is absent
GXSRVVMNQYNKLXXXXXXXXXLYLVSIASLKTPAXXP

SEQ ID NO: 2818 - protein, 36 aa, Artificial Sequence
  GFR-binding peptide
  MOD_RES (2), (4), (36): Xaa is C or S
HXGXSRVVMNRHKRLIVNSSDDYYLVSTASLKTPAX

SEQ ID NO: 2819 - protein, 33 aa, Artificial Sequence
  GFR-binding peptide
  MOD_RES (32), (33): Xaa is C or S
GEVVMDRYKKLVVKENEDFYLMSIANLETPVXX

SEQ ID NO: 2820 - protein, 41 aa, Artificial Sequence
  GFR-binding peptide
  MOD_RES (2), (4), (38), (39): Xaa is C or S
  MOD_RES (16), (17), (18), (19), (20): Xaa is A or G
  MOD_RES (21), (22), (23), (24): Xaa is A or G or is absent
HXGXAKVVMNRHKRLXXXXXXXXXYYLVSTASLKTPAXXAK

SEQ ID NO: 2821 - protein, 32 aa, Artificial Sequence
  GFR-binding peptide
  MOD_RES (11), (12), (13), (14), (15): Xaa is A or G
  MOD_RES (16), (17), (18), (19): Xaa is A or G or is absent
RVVMNRHKRLXXXXXXXXXYYLVSTASLKTPA

SEQ ID NO: 2822 - protein, 36 aa, Artificial Sequence
  GFR-binding peptide
  MOD_RES (1), (3), (34), (35): Xaa is C or S
XKXSKVIMYHYKLIKPTKGIKYLISIPSLDQSVXXP

SEQ ID NO: 2823 - protein, 39 aa, Artificial Sequence
  GFR-binding peptide
  MOD_RES (33), (34): Xaa is C or S
  MOD_RES (11), (12), (13), (14), (15): Xaa is A or G
  MOD_RES (16), (17), (18), (19): Xaa is A or G or is absent
EVVMDYHYKLXXXXXXXXXKYLMSIPSLETPVXXAKPIK

SEQ ID NO: 2824 - protein, 33 aa, Artificial Sequence
  GFR-binding peptide
  MOD_RES (31), (32): Xaa is C or S
SKVVMYHYKLVKPTRGVKYLISIPSLDQPVXXP

SEQ ID NO: 2825 - protein, 40 aa, Artificial Sequence
  GFR-binding peptide
  MOD_RES (1), (35), (36): Xaa is C or S
  MOD_RES (13), (14), (15), (16), (17): Xaa is A or G
  MOD_RES (18), (19), (20), (21): Xaa is A or G or is absent
XGEVVMDYHYKLXXXXXXXXXKYLMSIPSLETPVXXAKPI

SEQ ID NO: 2826 - protein, 32 aa, Artificial Sequence
  GFR-binding peptide
  MOD_RES (11), (12), (13), (14), (15): Xaa is A or G
  MOD_RES (16), (17), (18), (19): Xaa is A or G or is absent
KVVMNRHKRLXXXXXXXXXYYLVSTASLKTPA

SEQ ID NO: 2827 - protein, 32 aa, Artificial Sequence
  GFR-binding peptide
  MOD_RES (1), (32): Xaa is C or S
XSKVIMRHKRLIKPTKGIYYLISTASLDQSVX

SEQ ID NO: 2828 - protein, 32 aa, Artificial Sequence
  GFR-binding peptide
  MOD_RES (31), (32): Xaa is C or S
SKVVMYHYKLVKPTRGVKYLISIPSLDQPVXX

SEQ ID NO: 2829 - protein, 39 aa, Artificial Sequence
  GFR-binding peptide
  MOD_RES (2), (4), (37), (38): Xaa is C or S
  MOD_RES (15), (16), (17), (18), (19): Xaa is A or G
  MOD_RES (20), (21), (22), (23): Xaa is A or G or is absent
SXKXSRVIMQYNKLXXXXXXXXXLYLISIASLAQPVXXP

SEQ ID NO: 2830 - protein, 40 aa, Artificial Sequence
  GFR-binding peptide
  MOD_RES (1), (3), (37), (38): Xaa is C or S
  MOD_RES (15), (16), (17), (18), (19): Xaa is A or G
  MOD_RES (20), (21), (22), (23): Xaa is A or G or is absent
XGXAKVVMNQYNKLXXXXXXXXXLYLVSIASLKTPAXXAK

SEQ ID NO: 2831 - protein, 39 aa, Artificial Sequence
  GFR-binding peptide
  MOD_RES (1), (3), (34), (35): Xaa is C or S
XKXSRVIMRHKRLVKPKRGVYYLISTASLAQPVXXPAAS

SEQ ID NO: 2832 - protein, 38 aa, Artificial Sequence
  GFR-binding peptide
  MOD_RES (1), (35), (36): Xaa is C or S
  MOD_RES (13), (14), (15), (16), (17): Xaa is A or G
  MOD_RES (18), (19), (20), (21): Xaa is A or G or is absent
XGEVVMDYHYKLXXXXXXXXXKYLMSIPSLETPVXXAK

SEQ ID NO: 2833 - protein, 37 aa, Artificial Sequence
  GFR-binding peptide
  MOD_RES (1), (36), (37): Xaa is C or S
  MOD_RES (14), (15), (16), (17), (18): Xaa is A or G
  MOD_RES (19), (20), (21), (22): Xaa is A or G or is absent
XEAVSMGEQYNKLXXXXXXXXXLYLVSIASLKTPVXX

SEQ ID NO: 2834 - protein, 39 aa, Artificial Sequence
  GFR-binding peptide
  MOD_RES (2), (4), (36), (37): Xaa is C or S
HXGXSRVVMNYHYKLIVNSSDDKYLVSIPSLKTPAXXPK

SEQ ID NO: 2835 - protein, 33 aa, Artificial Sequence
  GFR-binding peptide
LHDELTRHKRLFIPKKRVIEYYLVSTASLQVQT

SEQ ID NO: 2836 - protein, 35 aa, Artificial Sequence
  GFR-binding peptide
  MOD_RES (2), (34), (35): Xaa is C or S
GXAKVVMNRHKRLIVNNSSDYYLVSTASLKTPAXX

SEQ ID NO: 2837 - protein, 42 aa, Artificial Sequence
  GFR-binding peptide
  MOD_RES (1), (3), (37), (38): Xaa is C or S
  MOD_RES (15), (16), (17), (18), (19): Xaa is A or G
  MOD_RES (20), (21), (22), (23): Xaa is A or G or is absent
XGXGEVVMDRHKRLXXXXXXXXXYYLMSTASLETPVXXAKPI

SEQ ID NO: 2838 - protein, 36 aa, Artificial Sequence
  GFR-binding peptide
  MOD_RES (33), (34): Xaa is C or S
  MOD_RES (11), (12), (13), (14), (15): Xaa is A or G
  MOD_RES (16), (17), (18), (19): Xaa is A or G or is absent
SKVIMRHKRLXXXXXXXXXYYLISTASLDQSVXXPS

SEQ ID NO: 2839 - protein, 39 aa, Artificial Sequence
  GFR-binding peptide
  MOD_RES (2), (4), (39): Xaa is C or S
  MOD_RES (17), (18), (19), (20), (21): Xaa is A or G
  MOD_RES (22), (23), (24), (25): Xaa is A or G or is absent
RXGXEAVSMGERHKRLXXXXXXXXXYYLVSTASLKTPVX

SEQ ID NO: 2840 - protein, 38 aa, Artificial Sequence
  GFR-binding peptide
  MOD_RES (1), (3), (36), (37): Xaa is C or S
XGXEAVSMGEYHYKLTPVGMDDKYLVSIPSLKTPVXXA

SEQ ID NO: 2841 - protein, 39 aa, Artificial Sequence
  GFR-binding peptide
  MOD_RES (1), (3), (34), (35): Xaa is C or S
XKXSRVIMYHYKLVKPKRGVKYLISIPSLAQPVXXPAAS

SEQ ID NO: 2842 - protein, 35 aa, Artificial Sequence
  GFR-binding peptide
  MOD_RES (34), (35): Xaa is C or S
  MOD_RES (12), (13), (14), (15), (16): Xaa is A or G
  MOD_RES (17), (18), (19), (20): Xaa is A or G or is absent
GEVVMDRHKRLXXXXXXXXXYYLMSTASLETPVXX

SEQ ID NO: 2843 - protein, 34 aa, Artificial Sequence
  GFR-binding peptide
  MOD_RES (33), (34): Xaa is C or S
  MOD_RES (11), (12), (13), (14), (15): Xaa is A or G
  MOD_RES (16), (17), (18), (19): Xaa is A or G or is absent
SKVVMYHYKLXXXXXXXXXKYLISIPSLDQPVXX

SEQ ID NO: 2844 - protein, 34 aa, Artificial Sequence
  GFR-binding peptide
  MOD_RES (34), (34): Xaa is C or S
  MOD_RES (12), (13), (14), (15), (16): Xaa is A or G
  MOD_RES (17), (18), (19), (20): Xaa is A or G or is absent
AKVVMNYHYKLXXXXXXXXXKYLVSIPSLKTPAX

SEQ ID NO: 2845 - protein, 38 aa, Artificial Sequence
  GFR-binding peptide
  MOD_RES (2), (4), (36): Xaa is C or S
HXGXSRVVMNYHYKLIVNSSDDKYLVSIPSLKTPAXTP

SEQ ID NO: 2846 - protein, 37 aa, Artificial Sequence
  GFR-binding peptide
  MOD_RES (1), (32), (33): Xaa is C or S
XSKVVMRHKRLVKPTRGVYYLISTASLDQPVXXPSAS

SEQ ID NO: 2847 - protein, 40 aa, Artificial Sequence
  GFR-binding peptide
  MOD_RES (2), (36): Xaa is C or S
  MOD_RES (14), (15), (16), (17), (18): Xaa is A or G
  MOD_RES (19), (20), (21), (22): Xaa is A or G or is absent
GXSRVVMNRYKKLXXXXXXXXXFYLVSIANLKTPAXTPKT

SEQ ID NO: 2848 - protein, 33 aa, Artificial Sequence
  GFR-binding peptide
  MOD_RES (1), (3): Xaa is C or S
XKXSRVIMQYNKLVKPKRGVLYLISIASLAQPV

SEQ ID NO: 2849 - protein, 34 aa, Artificial Sequence
  GFR-binding peptide
  MOD_RES (1), (1): Xaa is C or S
  MOD_RES (13), (14), (15), (16), (17): Xaa is A or G
  MOD_RES (18), (19), (20), (21): Xaa is A or G or is absent
XGEVVMEYHYKLXXXXXXXXXKYLMSIPSLETPV

SEQ ID NO: 2850 - protein, 40 aa, Artificial Sequence
  GFR-binding peptide
  MOD_RES (1), (3), (37), (38): Xaa is C or S
  MOD_RES (15), (16), (17), (18), (19): Xaa is A or G
  MOD_RES (20), (21), (22), (23): Xaa is A or G or is absent
XGXARVVMNRYKKLXXXXXXXXXFYLVSIANLQTPAXXPK

SEQ ID NO: 2851 - protein, 39 aa, Artificial Sequence
  GFR-binding peptide
  MOD_RES (1), (35), (36): Xaa is C or S
  MOD_RES (13), (14), (15), (16), (17): Xaa is A or G
  MOD_RES (18), (19), (20), (21): Xaa is A or G or is absent
XSRVVMNRHKRLXXXXXXXXXYYLVSTASLKTPAXXPKP

SEQ ID NO: 2852 - protein, 38 aa, Artificial Sequence
  GFR-binding peptide
  MOD_RES (32), (33): Xaa is C or S
GEVVMERHKRLVVKDYEDYYLMSTASLETPVXXAKPIS

SEQ ID NO: 2853 - protein, 43 aa, Artificial Sequence
  GFR-binding peptide
  MOD_RES (1), (3), (37), (38): Xaa is C or S
  MOD_RES (15), (16), (17), (18), (19): Xaa is A or G
  MOD_RES (20), (21), (22), (23): Xaa is A or G or is absent
XGXGEVVMERYKKLXXXXXXXXXFYLMSIANLETPVXXAKPIS

SEQ ID NO: 2854 - protein, 37 aa, Artificial Sequence
  GFR-binding peptide
  MOD_RES (1), (3): Xaa is C or S
XKXALHDELTRYKKLFIPKKRVIEFYLVSIANLQVQT

SEQ ID NO: 2855 - protein, 38 aa, Artificial Sequence
  GFR-binding peptide
  MOD_RES (2), (4), (36), (37): Xaa is C or S
RXGXGEVVMERYKKLVVKDYEDFYLMSIANLETPVXXA

SEQ ID NO: 2856 - protein, 35 aa, Artificial Sequence
  GFR-binding peptide
  MOD_RES (1), (3), (35): Xaa is C or S
XGXGEVVMDRHKRLVVKENEDYYLMSTASLETPVX

SEQ ID NO: 2857 - protein, 40 aa, Artificial Sequence
  GFR-binding peptide
  MOD_RES (2), (35), (36): Xaa is C or S
  MOD_RES (13), (14), (15), (16), (17): Xaa is A or G
  MOD_RES (18), (19), (20), (21): Xaa is A or G or is absent
KXSRVIMRHKRLXXXXXXXXXYYLISTASLAQPVXXPAAS

SEQ ID NO: 2858 - protein, 38 aa, Artificial Sequence
  GFR-binding peptide
  MOD_RES (1), (3), (35), (36): Xaa is C or S
XGXGEVVMEQYNKLVVKDYEDLYLMSIASLETPVXXAK

SEQ ID NO: 2859 - protein, 37 aa, Artificial Sequence
  GFR-binding peptide
  MOD_RES (1), (33), (34): Xaa is C or S
XGEVVMDQYNKLVVKENEDLYLMSIASLETPVXXAKP

SEQ ID NO: 2860 - protein, 36 aa, Artificial Sequence
  GFR-binding peptide
  MOD_RES (1), (1): Xaa is C or S
  MOD_RES (14), (15), (16), (17), (18): Xaa is A or G
  MOD_RES (19), (20), (21), (22): Xaa is A or G or is absent
XALHDELTQYNKLXXXXXXXXXLYLVSIASLQVQTP

SEQ ID NO: 2861 - protein, 35 aa, Artificial Sequence
  GFR-binding peptide
  MOD_RES (13), (14), (15), (16), (17): Xaa is A or G
  MOD_RES (18), (19), (20), (21): Xaa is A or G or is absent
ALHDELTYHYKLXXXXXXXXXKYLVSIPSLQVQTP

SEQ ID NO: 2862 - protein, 40 aa, Artificial Sequence
  GFR-binding peptide
  MOD_RES (1), (3), (37), (38): Xaa is C or S
  MOD_RES (15), (16), (17), (18), (19): Xaa is A or G
  MOD_RES (20), (21), (22), (23): Xaa is A or G or is absent
XGXSRVVMNRYKKLXXXXXXXXXFYLVSIANLKTPAXXPK

SEQ ID NO: 2863 - protein, 35 aa, Artificial Sequence
  GFR-binding peptide
  MOD_RES (2), (4), (35): Xaa is C or S
SXKXSKVVMQYNKLVKPTRGVLYLISIASLDQPVX

SEQ ID NO: 2864 - protein, 44 aa, Artificial Sequence
  GFR-binding peptide
  MOD_RES (2), (4), (38): Xaa is C or S
  MOD_RES (16), (17), (18), (19), (20): Xaa is A or G
  MOD_RES (21), (22), (23), (24): Xaa is A or G or is absent
HXGXSRVVMNRYKKLXXXXXXXXXFYLVSIANLKTPAXTPKTVH

SEQ ID NO: 2865 - protein, 36 aa, Artificial Sequence
  GFR-binding peptide
  MOD_RES (2), (35), (36): Xaa is C or S
  MOD_RES (13), (14), (15), (16), (17): Xaa is A or G
  MOD_RES (18), (19), (20), (21): Xaa is A or G or is absent
KXSRVIMYHYKLXXXXXXXXXKYLISIPSLAQPVXX

SEQ ID NO: 2866 - protein, 37 aa, Artificial Sequence
  GFR-binding peptide
  MOD_RES (1), (3): Xaa is C or S
  MOD_RES (16), (17), (18), (19), (20): Xaa is A or G
  MOD_RES (21), (22), (23), (24): Xaa is A or G or is absent
XGXEAVSMGEQYNKLXXXXXXXXXLYLVSIASLKTPV

SEQ ID NO: 2867 - protein, 42 aa, Artificial Sequence
  GFR-binding peptide
  MOD_RES (1), (36), (37): Xaa is C or S
  MOD_RES (14), (15), (16), (17), (18): Xaa is A or G
  MOD_RES (19), (20), (21), (22): Xaa is A or G or is absent
XEAVSMGERHKRLXXXXXXXXXYYLVSTASLKTPVXXAKGVK

SEQ ID NO: 2868 - protein, 39 aa, Artificial Sequence
  GFR-binding peptide
  MOD_RES (33), (34): Xaa is C or S
  MOD_RES (11), (12), (13), (14), (15): Xaa is A or G
  MOD_RES (16), (17), (18), (19): Xaa is A or G or is absent
SRVIMRHKRLXXXXXXXXXYYLISTASLAQPVXXPAASA

SEQ ID NO: 2869 - protein, 38 aa, Artificial Sequence
  GFR-binding peptide
  MOD_RES (1), (36), (37): Xaa is C or S
  MOD_RES (14), (15), (16), (17), (18): Xaa is A or G
  MOD_RES (19), (20), (21), (22): Xaa is A or G or is absent
XEAVSMGERHKRLXXXXXXXXXYYLVSTASLKTPVXXA

SEQ ID NO: 2870 - protein, 39 aa, Artificial Sequence
  GFR-binding peptide
  MOD_RES (1), (34), (35): Xaa is C or S
  MOD_RES (12), (13), (14), (15), (16): Xaa is A or G
  MOD_RES (17), (18), (19), (20): Xaa is A or G or is absent
XSKVIMRYKKLXXXXXXXXXFYLISIANLDQSVXXPSAS

SEQ ID NO: 2871 - protein, 35 aa, Artificial Sequence
  GFR-binding peptide
  MOD_RES (1), (34), (35): Xaa is C or S
  MOD_RES (12), (13), (14), (15), (16): Xaa is A or G
  MOD_RES (17), (18), (19), (20): Xaa is A or G or is absent
XSKVVMRYKKLXXXXXXXXXFYLISIANLDQPVXX

SEQ ID NO: 2872 - protein, 33 aa, Artificial Sequence
  GFR-binding peptide
  MOD_RES (33), (33): Xaa is C or S
  MOD_RES (11), (12), (13), (14), (15): Xaa is A or G
  MOD_RES (16), (17), (18), (19): Xaa is A or G or is absent
EVVMEYHYKLXXXXXXXXXKYLMSIPSLETPVX

SEQ ID NO: 2873 - protein, 39 aa, Artificial Sequence
  GFR-binding peptide
  MOD_RES (2), (4): Xaa is C or S
  MOD_RES (17), (18), (19), (20), (21): Xaa is A or G
  MOD_RES (22), (23), (24), (25): Xaa is A or G or is absent
EXKXALHDELTRYKKLXXXXXXXXXFYLVSIANLQVQTP

SEQ ID NO: 2874 - protein, 39 aa, Artificial Sequence
  GFR-binding peptide
  MOD_RES (1), (34), (35): Xaa is C or S
  MOD_RES (12), (13), (14), (15), (16): Xaa is A or G
  MOD_RES (17), (18), (19), (20): Xaa is A or G or is absent
XSKVVMRHKRLXXXXXXXXXYYLISTASLDQPVXXPSAS

SEQ ID NO: 2875 - protein, 34 aa, Artificial Sequence
  GFR-binding peptide
  MOD_RES (1), (32), (33): Xaa is C or S
XSKVVMYHYKLVKPTRGVKYLISIPSLDQPVXXP

SEQ ID NO: 2876 - protein, 34 aa, Artificial Sequence
  GFR-binding peptide
  MOD_RES (32), (33): Xaa is C or S
AKVVMNRYKKLIVNNSSDFYLVSIANLKTPAXXA

SEQ ID NO: 2877 - protein, 33 aa, Artificial Sequence
  GFR-binding peptide
  MOD_RES (32), (33): Xaa is C or S
SRVVMNQYNKLIVNSSDDLYLVSIASLKTPAXX

SEQ ID NO: 2878 - protein, 33 aa, Artificial Sequence
  GFR-binding peptide
  MOD_RES (2), (2): Xaa is C or S
GXSRVVMNRHKRLIVNSSDDYYLVSTASLKTPA

SEQ ID NO: 2879 - protein, 37 aa, Artificial Sequence
  GFR-binding peptide
  MOD_RES (2), (36), (37): Xaa is C or S
  MOD_RES (14), (15), (16), (17), (18): Xaa is A or G
  MOD_RES (19), (20), (21), (22): Xaa is A or G or is absent
GXGEVVMDQYNKLXXXXXXXXXLYLMSIASLETPVXX

SEQ ID NO: 2880 - protein, 33 aa, Artificial Sequence
  GFR-binding peptide
  MOD_RES (1), (33): Xaa is C or S
XSRVVMNQYNKLIVNSSDDLYLVSIASLKTPAX

SEQ ID NO: 2881 - protein, 31 aa, Artificial Sequence
  GFR-binding peptide
GEVVMERHKRLVVKDYEDYYLMSTASLETPV

SEQ ID NO: 2882 - protein, 37 aa, Artificial Sequence
  GFR-binding peptide
  MOD_RES (2), (33), (34): Xaa is C or S
KXSRVIMYHYKLVKPKRGVKYLISIPSLAQPVXXPAA

SEQ ID NO: 2883 - protein, 40 aa, Artificial Sequence
  GFR-binding peptide
  MOD_RES (2), (4), (38), (39): Xaa is C or S
  MOD_RES (16), (17), (18), (19), (20): Xaa is A or G
  MOD_RES (21), (22), (23), (24): Xaa is A or G or is absent
HXGXSRVVMNRYKKLXXXXXXXXXFYLVSIANLKTPAXXP

SEQ ID NO: 2884 - protein, 43 aa, Artificial Sequence
  GFR-binding peptide
  MOD_RES (2), (4), (37), (38): Xaa is C or S
  MOD_RES (15), (16), (17), (18), (19): Xaa is A or G
  MOD_RES (20), (21), (22), (23): Xaa is A or G or is absent
SXKXSKVIMRHKRLXXXXXXXXXYYLISTASLDQSVXXPSASA

SEQ ID NO: 2885 - protein, 41 aa, Artificial Sequence
  GFR-binding peptide
  MOD_RES (37), (37): Xaa is C or S
  MOD_RES (13), (14), (15), (16), (17): Xaa is A or G
  MOD_RES (18), (19), (20), (21): Xaa is A or G or is absent
ALHDELTQYNKLXXXXXXXXXLYLVSIASLQVQTPRXQVNR

SEQ ID NO: 2886 - protein, 36 aa, Artificial Sequence
  GFR-binding peptide
  MOD_RES (1), (3), (35), (36): Xaa is C or S
XGXSRVVMNRYKKLIVNSSDDFYLVSIANLKTPAXX

SEQ ID NO: 2887 - protein, 40 aa, Artificial Sequence
  GFR-binding peptide
  MOD_RES (2), (4), (38), (39): Xaa is C or S
  MOD_RES (16), (17), (18), (19), (20): Xaa is A or G
  MOD_RES (21), (22), (23), (24): Xaa is A or G or is absent
RXGXGEVVMDYHYKLXXXXXXXXXKYLMSIPSLETPVXXA

SEQ ID NO: 2888 - protein, 34 aa, Artificial Sequence
  GFR-binding peptide
  MOD_RES (1), (3): Xaa is C or S
XGXGEVVMDYHYKLVVKENEDKYLMSIPSLETPV

SEQ ID NO: 2889 - protein, 36 aa, Artificial Sequence
  GFR-binding peptide
  MOD_RES (1), (3), (35): Xaa is C or S
XGXSRVVMNRYKKLIVNSSDDFYLVSIANLKTPAXT

SEQ ID NO: 2890 - protein, 41 aa, Artificial Sequence
  GFR-binding peptide
  MOD_RES (2), (4), (38), (39): Xaa is C or S
  MOD_RES (16), (17), (18), (19), (20): Xaa is A or G
  MOD_RES (21), (22), (23), (24): Xaa is A or G or is absent
HXGXAKVVMNYHYKLXXXXXXXXXKYLVSIPSLKTPAXXAK

SEQ ID NO: 2891 - protein, 32 aa, Artificial Sequence
  GFR-binding peptide
  MOD_RES (11), (12), (13), (14), (15): Xaa is A or G
  MOD_RES (16), (17), (18), (19): Xaa is A or G or is absent
KVVMNQYNKLXXXXXXXXXLYLVSIASLKTPA

SEQ ID NO: 2892 - protein, 39 aa, Artificial Sequence
  GFR-binding peptide
  MOD_RES (1), (34), (35): Xaa is C or S
  MOD_RES (12), (13), (14), (15), (16): Xaa is A or G
  MOD_RES (17), (18), (19), (20): Xaa is A or G or is absent
XSKVVMQYNKLXXXXXXXXXLYLISIASLDQPVXXPSAS

SEQ ID NO: 2893 - protein, 39 aa, Artificial Sequence
  GFR-binding peptide
  MOD_RES (2), (35), (36): Xaa is C or S
  MOD_RES (13), (14), (15), (16), (17): Xaa is A or G
  MOD_RES (18), (19), (20), (21): Xaa is A or G or is absent
KXSKVVMYHYKLXXXXXXXXXKYLISIPSLDQPVXXPSA

SEQ ID NO: 2894 - protein, 37 aa, Artificial Sequence
  GFR-binding peptide
  MOD_RES (2), (35), (36): Xaa is C or S
  MOD_RES (13), (14), (15), (16), (17): Xaa is A or G
  MOD_RES (18), (19), (20), (21): Xaa is A or G or is absent
KXSRVIMRYKKLXXXXXXXXXFYLISIANLAQPVXXP

SEQ ID NO: 2895 - protein, 39 aa, Artificial Sequence
  GFR-binding peptide
  MOD_RES (1), (36), (37): Xaa is C or S
  MOD_RES (14), (15), (16), (17), (18): Xaa is A or G
  MOD_RES (19), (20), (21), (22): Xaa is A or G or is absent
XEAVSMGEYHYKLXXXXXXXXXKYLVSIPSLKTPVXXAK

SEQ ID NO: 2896 - protein, 37 aa, Artificial Sequence
  GFR-binding peptide
  MOD_RES (2), (4), (35), (36): Xaa is C or S
SXKXSKVVMRYKKLVKPTRGVFYLISIANLDQPVXXP

SEQ ID NO: 2897 - protein, 36 aa, Artificial Sequence
  GFR-binding peptide
  MOD_RES (1), (35), (36): Xaa is C or S
  MOD_RES (13), (14), (15), (16), (17): Xaa is A or G
  MOD_RES (18), (19), (20), (21): Xaa is A or G or is absent
XAKVVMNRYKKLXXXXXXXXXFYLVSIANLKTPAXX

SEQ ID NO: 2898 - protein, 34 aa, Artificial Sequence
  GFR-binding peptide
  MOD_RES (1), (1): Xaa is C or S
  MOD_RES (13), (14), (15), (16), (17): Xaa is A or G
  MOD_RES (18), (19), (20), (21): Xaa is A or G or is absent
XGEVVMDRHKRLXXXXXXXXXYYLMSTASLETPV

SEQ ID NO: 2899 - protein, 41 aa, Artificial Sequence
  GFR-binding peptide
  MOD_RES (2), (4), (36): Xaa is C or S
HXGXSRVVMNRYKKLIVNSSDDFYLVSIANLKTPAXTPKTV

SEQ ID NO: 2900 - protein, 42 aa, Artificial Sequence
  GFR-binding peptide
  MOD_RES (2), (36), (37): Xaa is C or S
  MOD_RES (14), (15), (16), (17), (18): Xaa is A or G
  MOD_RES (19), (20), (21), (22): Xaa is A or G or is absent
GXGEVVMDQYNKLXXXXXXXXXLYLMSIASLETPVXXAKPIK

SEQ ID NO: 2901 - protein, 35 aa, Artificial Sequence
  GFR-binding peptide
  MOD_RES (1), (35): Xaa is C or S
  MOD_RES (13), (14), (15), (16), (17): Xaa is A or G
  MOD_RES (18), (19), (20), (21): Xaa is A or G or is absent
XARVVMNYHYKLXXXXXXXXXKYLVSIPSLQTPAX

SEQ ID NO: 2902 - protein, 41 aa, Artificial Sequence
  GFR-binding peptide
  MOD_RES (37), (37): Xaa is C or S
  MOD_RES (13), (14), (15), (16), (17): Xaa is A or G
  MOD_RES (18), (19), (20), (21): Xaa is A or G or is absent
ALHDELTRHKRLXXXXXXXXXYYLVSTASLQVQTPRXQVNR

SEQ ID NO: 2903 - protein, 34 aa, Artificial Sequence
  GFR-binding peptide
  MOD_RES (33), (34): Xaa is C or S
  MOD_RES (11), (12), (13), (14), (15): Xaa is A or G
  MOD_RES (16), (17), (18), (19): Xaa is A or G or is absent
EVVMDQYNKLXXXXXXXXXLYLMSIASLETPVXX

SEQ ID NO: 2904 - protein, 32 aa, Artificial Sequence
  GFR-binding peptide
  MOD_RES (32), (32): Xaa is C or S
ARVVMNQYNKLIVNSSDDLYLVSIASLQTPAX

SEQ ID NO: 2905 - protein, 44 aa, Artificial Sequence
  GFR-binding peptide
  MOD_RES (2), (4), (38), (39): Xaa is C or S
  MOD_RES (16), (17), (18), (19), (20): Xaa is A or G
  MOD_RES (21), (22), (23), (24): Xaa is A or G or is absent
RXGXGEVVMERHKRLXXXXXXXXXYYLMSTASLETPVXXAKPIS

SEQ ID NO: 2906 - protein, 32 aa, Artificial Sequence
  GFR-binding peptide
  MOD_RES (32), (32): Xaa is C or S
SRVVMNRYKKLIVNSSDDFYLVSIANLKTPAX

SEQ ID NO: 2907 - protein, 31 aa, Artificial Sequence
  GFR-binding peptide
  MOD_RES (31), (31): Xaa is C or S
RVVMNYHYKLIVNSSDDKYLVSIPSLKTPAX

SEQ ID NO: 2908 - protein, 38 aa, Artificial Sequence
  GFR-binding peptide
  MOD_RES (2), (4), (36), (37): Xaa is C or S
HXGXSRVVMNYHYKLIVNSSDDKYLVSIPSLKTPAXXP

SEQ ID NO: 2909 - protein, 38 aa, Artificial Sequence
  GFR-binding peptide
  MOD_RES (2), (4), (37), (38): Xaa is C or S
  MOD_RES (15), (16), (17), (18), (19): Xaa is A or G
  MOD_RES (20), (21), (22), (23): Xaa is A or G or is absent
SXKXSRVIMRHKRLXXXXXXXXXYYLISTASLAQPVXX

SEQ ID NO: 2910 - protein, 36 aa, Artificial Sequence
  GFR-binding peptide
  MOD_RES (2), (4): Xaa is C or S
  MOD_RES (15), (16), (17), (18), (19): Xaa is A or G
  MOD_RES (20), (21), (22), (23): Xaa is A or G or is absent
SXKXSKVVMYHYKLXXXXXXXXXKYLISIPSLDQPV

SEQ ID NO: 2911 - protein, 35 aa, Artificial Sequence
  GFR-binding peptide
  MOD_RES (31), (32): Xaa is C or S
RVVMNQYNKLIVNSSDDLYLVSIASLKTPAXXPKP

SEQ ID NO: 2912 - protein, 39 aa, Artificial Sequence
  GFR-binding peptide
  MOD_RES (33), (34): Xaa is C or S
  MOD_RES (11), (12), (13), (14), (15): Xaa is A or G
  MOD_RES (16), (17), (18), (19): Xaa is A or G or is absent
EVVMDQYNKLXXXXXXXXXLYLMSIASLETPVXXAKPIK

SEQ ID NO: 2913 - protein, 42 aa, Artificial Sequence
  GFR-binding peptide
  MOD_RES (2), (4), (37), (38): Xaa is C or S
  MOD_RES (15), (16), (17), (18), (19): Xaa is A or G
  MOD_RES (20), (21), (22), (23): Xaa is A or G or is absent
SXKXSKVVMRYKKLXXXXXXXXXFYLISIANLDQPVXXPSAS

SEQ ID NO: 2914 - protein, 38 aa, Artificial Sequence
  GFR-binding peptide
  MOD_RES (1), (3), (37), (38): Xaa is C or S
  MOD_RES (15), (16), (17), (18), (19): Xaa is A or G
  MOD_RES (20), (21), (22), (23): Xaa is A or G or is absent
XGXGEVVMDQYNKLXXXXXXXXXLYLMSIASLETPVXX

SEQ ID NO: 2915 - protein, 38 aa, Artificial Sequence
  GFR-binding peptide
  MOD_RES (37), (37): Xaa is C or S
  MOD_RES (13), (14), (15), (16), (17): Xaa is A or G
  MOD_RES (18), (19), (20), (21): Xaa is A or G or is absent
ALHDELTRYKKLXXXXXXXXXFYLVSIANLQVQTPRXQ

SEQ ID NO: 2916 - protein, 40 aa, Artificial Sequence
  GFR-binding peptide
  MOD_RES (1), (3), (36), (37): Xaa is C or S
XGXEAVSMGEQYNKLTPVGMDDLYLVSIASLKTPVXXAKG

SEQ ID NO: 2917 - protein, 33 aa, Artificial Sequence
  GFR-binding peptide
  MOD_RES (33), (33): Xaa is C or S
EAVSMGERYKKLTPVGMDDFYLVSIANLKTPVX

SEQ ID NO: 2918 - protein, 35 aa, Artificial Sequence
  GFR-binding peptide
  MOD_RES (33), (34): Xaa is C or S
  MOD_RES (11), (12), (13), (14), (15): Xaa is A or G
  MOD_RES (16), (17), (18), (19): Xaa is A or G or is absent
EVVMERYKKLXXXXXXXXXFYLMSIANLETPVXXA

SEQ ID NO: 2919 - protein, 40 aa, Artificial Sequence
  GFR-binding peptide
  MOD_RES (1), (35), (36): Xaa is C or S
  MOD_RES (13), (14), (15), (16), (17): Xaa is A or G
  MOD_RES (18), (19), (20), (21): Xaa is A or G or is absent
XSRVVMNRYKKLXXXXXXXXXFYLVSIANLKTPAXXPKPV

SEQ ID NO: 2920 - protein, 37 aa, Artificial Sequence
  GFR-binding peptide
  MOD_RES (32), (33): Xaa is C or S
ARVVMNRYKKLIVNSSDDFYLVSIANLQTPAXXPKPV

SEQ ID NO: 2921 - protein, 41 aa, Artificial Sequence
  GFR-binding peptide
  MOD_RES (2), (35), (36): Xaa is C or S
GXEAVSMGEQYNKLTPVGMDDLYLVSIASLKTPVXXAKGVK

SEQ ID NO: 2922 - protein, 39 aa, Artificial Sequence
  GFR-binding peptide
  MOD_RES (2), (4), (38), (39): Xaa is C or S
  MOD_RES (16), (17), (18), (19), (20): Xaa is A or G
  MOD_RES (21), (22), (23), (24): Xaa is A or G or is absent
HXGXAKVVMNRYKKLXXXXXXXXXFYLVSIANLKTPAXX

SEQ ID NO: 2923 - protein, 41 aa, Artificial Sequence
  GFR-binding peptide
  MOD_RES (2), (4), (39), (40): Xaa is C or S
  MOD_RES (17), (18), (19), (20), (21): Xaa is A or G
  MOD_RES (22), (23), (24), (25): Xaa is A or G or is absent
RXGXEAVSMGEQYNKLXXXXXXXXXLYLVSIASLKTPVXXA

SEQ ID NO: 2924 - protein, 40 aa, Artificial Sequence
  GFR-binding peptide
  MOD_RES (2), (4), (37), (38): Xaa is C or S
  MOD_RES (15), (16), (17), (18), (19): Xaa is A or G
  MOD_RES (20), (21), (22), (23): Xaa is A or G or is absent
SXKXSKVIMRYKKLXXXXXXXXXFYLISIANLDQSVXXPS

SEQ ID NO: 2925 - protein, 37 aa, Artificial Sequence
  GFR-binding peptide
  MOD_RES (1), (3): Xaa is C or S
  MOD_RES (16), (17), (18), (19), (20): Xaa is A or G
  MOD_RES (21), (22), (23), (24): Xaa is A or G or is absent
XGXEAVSMGERHKRLXXXXXXXXXYYLVSTASLKTPV

SEQ ID NO: 2926 - protein, 39 aa, Artificial Sequence
  GFR-binding peptide
  MOD_RES (2), (36), (37): Xaa is C or S
  MOD_RES (14), (15), (16), (17), (18): Xaa is A or G
  MOD_RES (19), (20), (21), (22): Xaa is A or G or is absent
GXGEVVMEYHYKLXXXXXXXXXKYLMSIPSLETPVXXAK

SEQ ID NO: 2927 - protein, 42 aa, Artificial Sequence
  GFR-binding peptide
  MOD_RES (2), (37), (38): Xaa is C or S
  MOD_RES (15), (16), (17), (18), (19): Xaa is A or G
  MOD_RES (20), (21), (22), (23): Xaa is A or G or is absent
GXEAVSMGEQYNKLXXXXXXXXXLYLVSIASLKTPVXXAKGV

SEQ ID NO: 2928 - protein, 40 aa, Artificial Sequence
  GFR-binding peptide
  MOD_RES (2), (4), (35), (36): Xaa is C or S
SXKXSKVIMYHYKLIKPTKGIKYLISIPSLDQSVXXPSAS

SEQ ID NO: 2929 - protein, 40 aa, Artificial Sequence
  GFR-binding peptide
  MOD_RES (1), (3), (34), (35): Xaa is C or S
XKXSKVVMQYNKLVKPTRGVLYLISIASLDQPVXXPSASA

SEQ ID NO: 2930 - protein, 40 aa, Artificial Sequence
  GFR-binding peptide
  MOD_RES (1), (3), (38), (39): Xaa is C or S
  MOD_RES (16), (17), (18), (19), (20): Xaa is A or G
  MOD_RES (21), (22), (23), (24): Xaa is A or G or is absent
XGXEAVSMGEQYNKLXXXXXXXXXLYLVSIASLKTPVXXA

SEQ ID NO: 2931 - protein, 37 aa, Artificial Sequence
  GFR-binding peptide
  MOD_RES (2), (4): Xaa is C or S
  MOD_RES (16), (17), (18), (19), (20): Xaa is A or G
  MOD_RES (21), (22), (23), (24): Xaa is A or G or is absent
HXGXARVVMNRYKKLXXXXXXXXXFYLVSIANLQTPA

SEQ ID NO: 2932 - protein, 35 aa, Artificial Sequence
  GFR-binding peptide
  MOD_RES (1), (34), (35): Xaa is C or S
XEAVSMGEQYNKLTPVGMDDLYLVSIASLKTPVXX

SEQ ID NO: 2933 - protein, 36 aa, Artificial Sequence
  GFR-binding peptide
  MOD_RES (2), (2): Xaa is C or S
KXALHDELTRYKKLFIPKKRVIEFYLVSIANLQVQT

SEQ ID NO: 2934 - protein, 38 aa, Artificial Sequence
  GFR-binding peptide
  MOD_RES (2), (34), (35): Xaa is C or S
GXSRVVMNRHKRLIVNSSDDYYLVSTASLKTPAXXPKP

SEQ ID NO: 2935 - protein, 37 aa, Artificial Sequence
  GFR-binding peptide
  MOD_RES (2), (4), (37): Xaa is C or S
  MOD_RES (15), (16), (17), (18), (19): Xaa is A or G
  MOD_RES (20), (21), (22), (23): Xaa is A or G or is absent
SXKXSKVIMQYNKLXXXXXXXXXLYLISIASLDQSVX

SEQ ID NO: 2936 - protein, 36 aa, Artificial Sequence
  GFR-binding peptide
  MOD_RES (34), (35): Xaa is C or S
  MOD_RES (12), (13), (14), (15), (16): Xaa is A or G
  MOD_RES (17), (18), (19), (20): Xaa is A or G or is absent
AKVVMNRYKKLXXXXXXXXXFYLVSIANLKTPAXXA

SEQ ID NO: 2937 - protein, 41 aa, Artificial Sequence
  GFR-binding peptide
  MOD_RES (1), (3), (35), (36): Xaa is C or S
XGXGEVVMERHKRLVVKDYEDYYLMSTASLETPVXXAKPIS

SEQ ID NO: 2938 - protein, 37 aa, Artificial Sequence
  GFR-binding peptide
  MOD_RES (1), (33), (34): Xaa is C or S
XAKVVMNRYKKLIVNNSSDFYLVSIANLKTPAXXAKP

SEQ ID NO: 2939 - protein, 35 aa, Artificial Sequence
  GFR-binding peptide
  MOD_RES (1), (3), (34), (35): Xaa is C or S
XKXSKVVMRHKRLVKPTRGVYYLISTASLDQPVXX

SEQ ID NO: 2940 - protein, 38 aa, Artificial Sequence
  GFR-binding peptide
  MOD_RES (2), (34), (35): Xaa is C or S
GXAKVVMNYHYKLIVNNSSDKYLVSIPSLKTPAXXAKP

SEQ ID NO: 2941 - protein, 38 aa, Artificial Sequence
  GFR-binding peptide
  MOD_RES (34), (35): Xaa is C or S
  MOD_RES (12), (13), (14), (15), (16): Xaa is A or G
  MOD_RES (17), (18), (19), (20): Xaa is A or G or is absent
SRVVMNYHYKLXXXXXXXXXKYLVSIPSLKTPAXXPKP

SEQ ID NO: 2942 - protein, 40 aa, Artificial Sequence
  GFR-binding peptide
  MOD_RES (2), (4), (38), (39): Xaa is C or S
  MOD_RES (16), (17), (18), (19), (20): Xaa is A or G
  MOD_RES (21), (22), (23), (24): Xaa is A or G or is absent
HXGXSRVVMNYHYKLXXXXXXXXXKYLVSIPSLKTPAXXP

SEQ ID NO: 2943 - protein, 35 aa, Artificial Sequence
  GFR-binding peptide
  MOD_RES (32), (33): Xaa is C or S
SRVVMNQYNKLIVNSSDDLYLVSIASLKTPAXXPK

SEQ ID NO: 2944 - protein, 38 aa, Artificial Sequence
  GFR-binding peptide
  MOD_RES (34), (35): Xaa is C or S
  MOD_RES (12), (13), (14), (15), (16): Xaa is A or G
  MOD_RES (17), (18), (19), (20): Xaa is A or G or is absent
SRVVMNRHKRLXXXXXXXXXYYLVSTASLKTPAXXPKP

SEQ ID NO: 2945 - protein, 38 aa, Artificial Sequence
  GFR-binding peptide
  MOD_RES (2), (4): Xaa is C or S
  MOD_RES (17), (18), (19), (20), (21): Xaa is A or G
  MOD_RES (22), (23), (24), (25): Xaa is A or G or is absent
RXGXEAVSMGEYHYKLXXXXXXXXXKYLVSIPSLKTPV

SEQ ID NO: 2946 - protein, 37 aa, Artificial Sequence
  GFR-binding peptide
  MOD_RES (2), (4), (36), (37): Xaa is C or S
RXGXGEVVMDQYNKLVVKENEDLYLMSIASLETPVXX

SEQ ID NO: 2947 - protein, 34 aa, Artificial Sequence
  GFR-binding peptide
  MOD_RES (1), (1): Xaa is C or S
  MOD_RES (13), (14), (15), (16), (17): Xaa is A or G
  MOD_RES (18), (19), (20), (21): Xaa is A or G or is absent
XARVVMNRYKKLXXXXXXXXXFYLVSIANLQTPA

SEQ ID NO: 2948 - protein, 34 aa, Artificial Sequence
  GFR-binding peptide
  MOD_RES (2), (4): Xaa is C or S
SXKXSKVVMYHYKLVKPTRGVKYLISIPSLDQPV

SEQ ID NO: 2949 - protein, 38 aa, Artificial Sequence
  GFR-binding peptide
  MOD_RES (2), (4), (35), (36): Xaa is C or S
SXKXSKVVMRHKRLVKPTRGVYYLISTASLDQPVXXPS

SEQ ID NO: 2950 - protein, 35 aa, Artificial Sequence
  GFR-binding peptide
  MOD_RES (1), (33), (34): Xaa is C or S
XSRVVMNRYKKLIVNSSDDFYLVSIANLKTPAXXP

SEQ ID NO: 2951 - protein, 39 aa, Artificial Sequence
  GFR-binding peptide
  MOD_RES (2), (36): Xaa is C or S
  MOD_RES (14), (15), (16), (17), (18): Xaa is A or G
  MOD_RES (19), (20), (21), (22): Xaa is A or G or is absent
GXSRVVMNRYKKLXXXXXXXXXFYLVSIANLKTPAXTPK

SEQ ID NO: 2952 - protein, 38 aa, Artificial Sequence
  GFR-binding peptide
  MOD_RES (1), (34), (35): Xaa is C or S
  MOD_RES (12), (13), (14), (15), (16): Xaa is A or G
  MOD_RES (17), (18), (19), (20): Xaa is A or G or is absent
XSRVIMRYKKLXXXXXXXXXFYLISIANLAQPVXXPAA

SEQ ID NO: 2953 - protein, 32 aa, Artificial Sequence
  GFR-binding peptide
  MOD_RES (11), (12), (13), (14), (15): Xaa is A or G
  MOD_RES (16), (17), (18), (19): Xaa is A or G or is absent
KVVMNYHYKLXXXXXXXXXKYLVSIPSLKTPA

SEQ ID NO: 2954 - protein, 41 aa, Artificial Sequence
  GFR-binding peptide
  MOD_RES (1), (3), (35): Xaa is C or S
XGXSRVVMNRHKRLIVNSSDDYYLVSTASLKTPAXTPKTVH

SEQ ID NO: 2955 - protein, 40 aa, Artificial Sequence
  GFR-binding peptide
  MOD_RES (1), (34), (35): Xaa is C or S
  MOD_RES (12), (13), (14), (15), (16): Xaa is A or G
  MOD_RES (17), (18), (19), (20): Xaa is A or G or is absent
XSKVIMYHYKLXXXXXXXXXKYLISIPSLDQSVXXPSASA

SEQ ID NO: 2956 - protein, 31 aa, Artificial Sequence
  GFR-binding peptide
  MOD_RES (31), (31): Xaa is C or S
SRVIMQYNKLVKPKRGVLYLISIASLAQPVX

SEQ ID NO: 2957 - protein, 41 aa, Artificial Sequence
  GFR-binding peptide
  MOD_RES (1), (3), (35), (36): Xaa is C or S
XGXARVVMNRHKRLIVNSSDDYYLVSTASLQTPAXXPKPVT

SEQ ID NO: 2958 - protein, 39 aa, Artificial Sequence
  GFR-binding peptide
  MOD_RES (2), (34): Xaa is C or S
GXSRVVMNRHKRLIVNSSDDYYLVSTASLKTPAXTPKTV

SEQ ID NO: 2959 - protein, 31 aa, Artificial Sequence
  GFR-binding peptide
  MOD_RES (31), (31): Xaa is C or S
RVVMNQYNKLIVNSSDDLYLVSIASLKTPAX

SEQ ID NO: 2960 - protein, 41 aa, Artificial Sequence
  GFR-binding peptide
  MOD_RES (2), (4), (36): Xaa is C or S
HXGXSRVVMNRHKRLIVNSSDDYYLVSTASLKTPAXTPKTV

SEQ ID NO: 2961 - protein, 35 aa, Artificial Sequence
  GFR-binding peptide
  MOD_RES (31), (32): Xaa is C or S
RVVMNYHYKLIVNSSDDKYLVSIPSLKTPAXXPKP

SEQ ID NO: 2962 - protein, 39 aa, Artificial Sequence
  GFR-binding peptide
  MOD_RES (1), (3), (36), (37): Xaa is C or S
  MOD_RES (14), (15), (16), (17), (18): Xaa is A or G
  MOD_RES (19), (20), (21), (22): Xaa is A or G or is absent
XKXSRVIMRHKRLXXXXXXXXXYYLISTASLAQPVXXPA

SEQ ID NO: 2963 - protein, 37 aa, Artificial Sequence
  GFR-binding peptide
  MOD_RES (1), (35): Xaa is C or S
  MOD_RES (13), (14), (15), (16), (17): Xaa is A or G
  MOD_RES (18), (19), (20), (21): Xaa is A or G or is absent
XSRVVMNYHYKLXXXXXXXXXKYLVSIPSLKTPAXTP

SEQ ID NO: 2964 - protein, 35 aa, Artificial Sequence
  GFR-binding peptide
  MOD_RES (2), (4): Xaa is C or S
HXGXSRVVMNRHKRLIVNSSDDYYLVSTASLKTPA

SEQ ID NO: 2965 - protein, 36 aa, Artificial Sequence
  GFR-binding peptide
  MOD_RES (1), (3): Xaa is C or S
  MOD_RES (15), (16), (17), (18), (19): Xaa is A or G
  MOD_RES (20), (21), (22), (23): Xaa is A or G or is absent
XGXGEVVMERHKRLXXXXXXXXXYYLMSTASLETPV

SEQ ID NO: 2966 - protein, 34 aa, Artificial Sequence
  GFR-binding peptide
  MOD_RES (32), (33): Xaa is C or S
AKVVMNQYNKLIVNNSSDLYLVSIASLKTPAXXA

SEQ ID NO: 2967 - protein, 36 aa, Artificial Sequence
  GFR-binding peptide
  MOD_RES (33), (34): Xaa is C or S
  MOD_RES (11), (12), (13), (14), (15): Xaa is A or G
  MOD_RES (16), (17), (18), (19): Xaa is A or G or is absent
SKVVMQYNKLXXXXXXXXXLYLISIASLDQPVXXPS

SEQ ID NO: 2968 - protein, 41 aa, Artificial Sequence
  GFR-binding peptide
  MOD_RES (2), (4), (36), (37): Xaa is C or S
HXGXARVVMNQYNKLIVNSSDDLYLVSIASLQTPAXXPKPV

SEQ ID NO: 2969 - protein, 32 aa, Artificial Sequence
  GFR-binding peptide
  MOD_RES (11), (12), (13), (14), (15): Xaa is A or G
  MOD_RES (16), (17), (18), (19): Xaa is A or G or is absent
RVVMNYHYKLXXXXXXXXXKYLVSIPSLKTPA

SEQ ID NO: 2970 - protein, 37 aa, Artificial Sequence
  GFR-binding peptide
  MOD_RES (2), (36), (37): Xaa is C or S
  MOD_RES (14), (15), (16), (17), (18): Xaa is A or G
  MOD_RES (19), (20), (21), (22): Xaa is A or G or is absent
GXARVVMNRHKRLXXXXXXXXXYYLVSTASLQTPAXX

SEQ ID NO: 2971 - protein, 37 aa, Artificial Sequence
  GFR-binding peptide
  MOD_RES (1), (34), (35): Xaa is C or S
XEAVSMGERHKRLTPVGMDDYYLVSTASLKTPVXXAK

SEQ ID NO: 2972 - protein, 37 aa, Artificial Sequence
  GFR-binding peptide
  MOD_RES (35), (35): Xaa is C or S
  MOD_RES (11), (12), (13), (14), (15): Xaa is A or G
  MOD_RES (16), (17), (18), (19): Xaa is A or G or is absent
HDELTRYKKLXXXXXXXXXFYLVSIANLQVQTPRXQV

SEQ ID NO: 2973 - protein, 32 aa, Artificial Sequence
  GFR-binding peptide
  MOD_RES (31), (32): Xaa is C or S
EVVMEYHYKLVVKDYEDKYLMSIPSLETPVXX

SEQ ID NO: 2974 - protein, 40 aa, Artificial Sequence
  GFR-binding peptide
  MOD_RES (2), (34), (35): Xaa is C or S
GXARVVMNYHYKLIVNSSDDKYLVSIPSLQTPAXXPKPVT

SEQ ID NO: 2975 - protein, 33 aa, Artificial Sequence
  GFR-binding peptide
  MOD_RES (33), (33): Xaa is C or S
  MOD_RES (11), (12), (13), (14), (15): Xaa is A or G
  MOD_RES (16), (17), (18), (19): Xaa is A or G or is absent
SRVIMYHYKLXXXXXXXXXKYLISIPSLAQPVX

SEQ ID NO: 2976 - protein, 38 aa, Artificial Sequence
  GFR-binding peptide
  MOD_RES (2), (4), (37), (38): Xaa is C or S
  MOD_RES (15), (16), (17), (18), (19): Xaa is A or G
  MOD_RES (20), (21), (22), (23): Xaa is A or G or is absent
SXKXSRVIMQYNKLXXXXXXXXXLYLISIASLAQPVXX

SEQ ID NO: 2977 - protein, 35 aa, Artificial Sequence
  GFR-binding peptide
  MOD_RES (33), (34): Xaa is C or S
EAVSMGEYHYKLTPVGMDDKYLVSIPSLKTPVXXA

SEQ ID NO: 2978 - protein, 36 aa, Artificial Sequence
  GFR-binding peptide
  MOD_RES (33), (34): Xaa is C or S
  MOD_RES (11), (12), (13), (14), (15): Xaa is A or G
  MOD_RES (16), (17), (18), (19): Xaa is A or G or is absent
SKVIMYHYKLXXXXXXXXXKYLISIPSLDQSVXXPS

SEQ ID NO: 2979 - protein, 38 aa, Artificial Sequence
  GFR-binding peptide
  MOD_RES (36), (36): Xaa is C or S
  MOD_RES (12), (13), (14), (15), (16): Xaa is A or G
  MOD_RES (17), (18), (19), (20): Xaa is A or G or is absent
LHDELTRHKRLXXXXXXXXXYYLVSTASLQVQTPRXQV

SEQ ID NO: 2980 - protein, 40 aa, Artificial Sequence
  GFR-binding peptide
  MOD_RES (34), (35): Xaa is C or S
  MOD_RES (12), (13), (14), (15), (16): Xaa is A or G
  MOD_RES (17), (18), (19), (20): Xaa is A or G or is absent
GEVVMEYHYKLXXXXXXXXXKYLMSIPSLETPVXXAKPIS

SEQ ID NO: 2981 - protein, 38 aa, Artificial Sequence
  GFR-binding peptide
  MOD_RES (36), (36): Xaa is C or S
  MOD_RES (12), (13), (14), (15), (16): Xaa is A or G
  MOD_RES (17), (18), (19), (20): Xaa is A or G or is absent
LHDELTYHYKLXXXXXXXXXKYLVSIPSLQVQTPRXQV

SEQ ID NO: 2982 - protein, 39 aa, Artificial Sequence
  GFR-binding peptide
  MOD_RES (1), (3), (36), (37): Xaa is C or S
  MOD_RES (14), (15), (16), (17), (18): Xaa is A or G
  MOD_RES (19), (20), (21), (22): Xaa is A or G or is absent
XKXSKVIMRHKRLXXXXXXXXXYYLISTASLDQSVXXPS

SEQ ID NO: 2983 - protein, 40 aa, Artificial Sequence
  GFR-binding peptide
  MOD_RES (1), (3), (34), (35): Xaa is C or S
XKXSRVIMRYKKLVKPKRGVFYLISIANLAQPVXXPAASA

SEQ ID NO: 2984 - protein, 36 aa, Artificial Sequence
  GFR-binding peptide
  MOD_RES (2), (34), (35): Xaa is C or S
GXAKVVMNRHKRLIVNNSSDYYLVSTASLKTPAXXA

SEQ ID NO: 2985 - protein, 34 aa, Artificial Sequence
  GFR-binding peptide
  MOD_RES (2), (2): Xaa is C or S
GXEAVSMGEYHYKLTPVGMDDKYLVSIPSLKTPV

SEQ ID NO: 2986 - protein, 30 aa, Artificial Sequence
  GFR-binding peptide
RVVMNRYKKLIVNSSDDFYLVSIANLQTPA

SEQ ID NO: 2987 - protein, 39 aa, Artificial Sequence
  GFR-binding peptide
  MOD_RES (34), (34): Xaa is C or S
  MOD_RES (12), (13), (14), (15), (16): Xaa is A or G
  MOD_RES (17), (18), (19), (20): Xaa is A or G or is absent
SRVVMNQYNKLXXXXXXXXXLYLVSIASLKTPAXTPKTV

SEQ ID NO: 2988 - protein, 36 aa, Artificial Sequence
  GFR-binding peptide
  MOD_RES (1), (32), (33): Xaa is C or S
XSRVIMYHYKLVKPKRGVKYLISIPSLAQPVXXPAA

SEQ ID NO: 2989 - protein, 40 aa, Artificial Sequence
  GFR-binding peptide
  MOD_RES (1), (35), (36): Xaa is C or S
  MOD_RES (13), (14), (15), (16), (17): Xaa is A or G
  MOD_RES (18), (19), (20), (21): Xaa is A or G or is absent
XARVVMNRYKKLXXXXXXXXXFYLVSIANLQTPAXXPKPV

SEQ ID NO: 2990 - protein, 37 aa, Artificial Sequence
  GFR-binding peptide
  MOD_RES (2), (4): Xaa is C or S
  MOD_RES (16), (17), (18), (19), (20): Xaa is A or G
  MOD_RES (21), (22), (23), (24): Xaa is A or G or is absent
HXGXSRVVMNYHYKLXXXXXXXXXKYLVSIPSLKTPA

SEQ ID NO: 2991 - protein, 40 aa, Artificial Sequence
  GFR-binding peptide
  MOD_RES (1), (3), (37), (38): Xaa is C or S
  MOD_RES (15), (16), (17), (18), (19): Xaa is A or G
  MOD_RES (20), (21), (22), (23): Xaa is A or G or is absent
XGXAKVVMNRHKRLXXXXXXXXXYYLVSTASLKTPAXXAK

SEQ ID NO: 2992 - protein, 37 aa, Artificial Sequence
  GFR-binding peptide
  MOD_RES (2), (36), (37): Xaa is C or S
  MOD_RES (14), (15), (16), (17), (18): Xaa is A or G
  MOD_RES (19), (20), (21), (22): Xaa is A or G or is absent
GXAKVVMNRHKRLXXXXXXXXXYYLVSTASLKTPAXX

SEQ ID NO: 2993 - protein, 41 aa, Artificial Sequence
  GFR-binding peptide
  MOD_RES (1), (3), (40): Xaa is C or S
XKXALHDELTQYNKLFIPKKRVIELYLVSIASLQVQTPRXQ

SEQ ID NO: 2994 - protein, 32 aa, Artificial Sequence
  GFR-binding peptide
  MOD_RES (32), (32): Xaa is C or S
ARVVMNRHKRLIVNSSDDYYLVSTASLQTPAX

SEQ ID NO: 2995 - protein, 33 aa, Artificial Sequence
  GFR-binding peptide
  MOD_RES (1), (32), (33): Xaa is C or S
XSKVVMRYKKLVKPTRGVFYLISIANLDQPVXX

SEQ ID NO: 2996 - protein, 38 aa, Artificial Sequence
  GFR-binding peptide
  MOD_RES (33), (34): Xaa is C or S
  MOD_RES (11), (12), (13), (14), (15): Xaa is A or G
  MOD_RES (16), (17), (18), (19): Xaa is A or G or is absent
RVVMNYHYKLXXXXXXXXXKYLVSIPSLKTPAXXPKPV

SEQ ID NO: 2997 - protein, 37 aa, Artificial Sequence
  GFR-binding peptide
  MOD_RES (36), (36): Xaa is C or S
LHDELTRHKRLFIPKKRVIEYYLVSTASLQVQTPRXQ

SEQ ID NO: 2998 - protein, 30 aa, Artificial Sequence
  GFR-binding peptide
KVVMNQYNKLIVNNSSDLYLVSIASLKTPA

SEQ ID NO: 2999 - protein, 38 aa, Artificial Sequence
  GFR-binding peptide
  MOD_RES (2), (4), (38): Xaa is C or S
  MOD_RES (16), (17), (18), (19), (20): Xaa is A or G
  MOD_RES (21), (22), (23), (24): Xaa is A or G or is absent
HXGXARVVMNQYNKLXXXXXXXXXLYLVSIASLQTPAX

SEQ ID NO: 3000 - protein, 38 aa, Artificial Sequence
  GFR-binding peptide
  MOD_RES (1), (35), (36): Xaa is C or S
  MOD_RES (13), (14), (15), (16), (17): Xaa is A or G
  MOD_RES (18), (19), (20), (21): Xaa is A or G or is absent
XARVVMNQYNKLXXXXXXXXXLYLVSIASLQTPAXXPK

SEQ ID NO: 3001 - protein, 37 aa, Artificial Sequence
  GFR-binding peptide
  MOD_RES (2), (4), (35), (36): Xaa is C or S
SXKXSRVIMRHKRLVKPKRGVYYLISTASLAQPVXXP

SEQ ID NO: 3002 - protein, 37 aa, Artificial Sequence
  GFR-binding peptide
  MOD_RES (2), (34), (35): Xaa is C or S
GXGEVVMEYHYKLVVKDYEDKYLMSIPSLETPVXXAK

SEQ ID NO: 3003 - protein, 39 aa, Artificial Sequence
  GFR-binding peptide
  MOD_RES (2), (34), (35): Xaa is C or S
GXGEVVMEYHYKLVVKDYEDKYLMSIPSLETPVXXAKPI

SEQ ID NO: 3004 - protein, 35 aa, Artificial Sequence
  GFR-binding peptide
  MOD_RES (1), (34), (35): Xaa is C or S
  MOD_RES (12), (13), (14), (15), (16): Xaa is A or G
  MOD_RES (17), (18), (19), (20): Xaa is A or G or is absent
XSRVIMRYKKLXXXXXXXXXFYLISIANLAQPVXX

SEQ ID NO: 3005 - protein, 36 aa, Artificial Sequence
  GFR-binding peptide
  MOD_RES (33), (33): Xaa is C or S
  MOD_RES (11), (12), (13), (14), (15): Xaa is A or G
  MOD_RES (16), (17), (18), (19): Xaa is A or G or is absent
RVVMNQYNKLXXXXXXXXXLYLVSIASLKTPAXTPK

SEQ ID NO: 3006 - protein, 36 aa, Artificial Sequence
  GFR-binding peptide
  MOD_RES (2), (4), (36): Xaa is C or S
RXGXGEVVMDYHYKLVVKENEDKYLMSIPSLETPVX

SEQ ID NO: 3007 - protein, 39 aa, Artificial Sequence
  GFR-binding peptide
  MOD_RES (1), (3), (35), (36): Xaa is C or S
XGXARVVMNRHKRLIVNSSDDYYLVSTASLQTPAXXPKP

SEQ ID NO: 3008 - protein, 37 aa, Artificial Sequence
  GFR-binding peptide
  MOD_RES (1), (35), (36): Xaa is C or S
  MOD_RES (13), (14), (15), (16), (17): Xaa is A or G
  MOD_RES (18), (19), (20), (21): Xaa is A or G or is absent
XGEVVMEQYNKLXXXXXXXXXLYLMSIASLETPVXXA

SEQ ID NO: 3009 - protein, 41 aa, Artificial Sequence
  GFR-binding peptide
  MOD_RES (1), (3), (37), (38): Xaa is C or S
  MOD_RES (15), (16), (17), (18), (19): Xaa is A or G
  MOD_RES (20), (21), (22), (23): Xaa is A or G or is absent
XGXGEVVMDRHKRLXXXXXXXXXYYLMSTASLETPVXXAKP

SEQ ID NO: 3010 - protein, 34 aa, Artificial Sequence
  GFR-binding peptide
  MOD_RES (2), (2): Xaa is C or S
GXEAVSMGERHKRLTPVGMDDYYLVSTASLKTPV

SEQ ID NO: 3011 - protein, 36 aa, Artificial Sequence
  GFR-binding peptide
  MOD_RES (2), (34), (35): Xaa is C or S
GXGEVVMDQYNKLVVKENEDLYLMSIASLETPVXXA

SEQ ID NO: 3012 - protein, 39 aa, Artificial Sequence
  GFR-binding peptide
  MOD_RES (2), (36), (37): Xaa is C or S
  MOD_RES (14), (15), (16), (17), (18): Xaa is A or G
  MOD_RES (19), (20), (21), (22): Xaa is A or G or is absent
GXGEVVMDYHYKLXXXXXXXXXKYLMSIPSLETPVXXAK

SEQ ID NO: 3013 - protein, 33 aa, Artificial Sequence
  GFR-binding peptide
  MOD_RES (2), (2): Xaa is C or S
GXGEVVMERYKKLVVKDYEDFYLMSIANLETPV

SEQ ID NO: 3014 - protein, 37 aa, Artificial Sequence
  GFR-binding peptide
  MOD_RES (1), (3), (37): Xaa is C or S
  MOD_RES (15), (16), (17), (18), (19): Xaa is A or G
  MOD_RES (20), (21), (22), (23): Xaa is A or G or is absent
XGXGEVVMDQYNKLXXXXXXXXXLYLMSIASLETPVX

SEQ ID NO: 3015 - protein, 36 aa, Artificial Sequence
  GFR-binding peptide
ALHDELTRYKKLFIPKKRVIEFYLVSIANLQVQTPR

SEQ ID NO: 3016 - protein, 35 aa, Artificial Sequence
  GFR-binding peptide
  MOD_RES (1), (32), (33): Xaa is C or S
XSRVIMYHYKLVKPKRGVKYLISIPSLAQPVXXPA

SEQ ID NO: 3017 - protein, 34 aa, Artificial Sequence
  GFR-binding peptide
  MOD_RES (32), (33): Xaa is C or S
SRVVMNRHKRLIVNSSDDYYLVSTASLKTPAXXP

SEQ ID NO: 3018 - protein, 38 aa, Artificial Sequence
  GFR-binding peptide
  MOD_RES (34), (35): Xaa is C or S
  MOD_RES (12), (13), (14), (15), (16): Xaa is A or G
  MOD_RES (17), (18), (19), (20): Xaa is A or G or is absent
ARVVMNQYNKLXXXXXXXXXLYLVSIASLQTPAXXPKP

SEQ ID NO: 3019 - protein, 37 aa, Artificial Sequence
  GFR-binding peptide
  MOD_RES (33), (34): Xaa is C or S
  MOD_RES (11), (12), (13), (14), (15): Xaa is A or G
  MOD_RES (16), (17), (18), (19): Xaa is A or G or is absent
RVVMNYHYKLXXXXXXXXXKYLVSIPSLQTPAXXPKP

SEQ ID NO: 3020 - protein, 43 aa, Artificial Sequence
  GFR-binding peptide
  MOD_RES (2), (4), (37), (38): Xaa is C or S
  MOD_RES (15), (16), (17), (18), (19): Xaa is A or G
  MOD_RES (20), (21), (22), (23): Xaa is A or G or is absent
SXKXSKVIMQYNKLXXXXXXXXXLYLISIASLDQSVXXPSASA

SEQ ID NO: 3021 - protein, 35 aa, Artificial Sequence
  GFR-binding peptide
  MOD_RES (1), (34), (35): Xaa is C or S
  MOD_RES (12), (13), (14), (15), (16): Xaa is A or G
  MOD_RES (17), (18), (19), (20): Xaa is A or G or is absent
XSKVIMRHKRLXXXXXXXXXYYLISTASLDQSVXX

SEQ ID NO: 3022 - protein, 38 aa, Artificial Sequence
  GFR-binding peptide
  MOD_RES (2), (34): Xaa is C or S
GXSRVVMNRHKRLIVNSSDDYYLVSTASLKTPAXTPKT

SEQ ID NO: 3023 - protein, 33 aa, Artificial Sequence
  GFR-binding peptide
  MOD_RES (31), (32): Xaa is C or S
SKVIMRHKRLIKPTKGIYYLISTASLDQSVXXP

SEQ ID NO: 3024 - protein, 37 aa, Artificial Sequence
  GFR-binding peptide
  MOD_RES (32), (32): Xaa is C or S
SRVVMNRHKRLIVNSSDDYYLVSTASLKTPAXTPKTV

SEQ ID NO: 3025 - protein, 40 aa, Artificial Sequence
  GFR-binding peptide
  MOD_RES (2), (4), (37), (38): Xaa is C or S
  MOD_RES (15), (16), (17), (18), (19): Xaa is A or G
  MOD_RES (20), (21), (22), (23): Xaa is A or G or is absent
SXKXSKVVMRYKKLXXXXXXXXXFYLISIANLDQPVXXPS

SEQ ID NO: 3026 - protein, 35 aa, Artificial Sequence
  GFR-binding peptide
  MOD_RES (1), (3), (35): Xaa is C or S
XGXSRVVMNQYNKLIVNSSDDLYLVSIASLKTPAX

SEQ ID NO: 3027 - protein, 35 aa, Artificial Sequence
  GFR-binding peptide
  MOD_RES (34), (35): Xaa is C or S
  MOD_RES (12), (13), (14), (15), (16): Xaa is A or G
  MOD_RES (17), (18), (19), (20): Xaa is A or G or is absent
ARVVMNRHKRLXXXXXXXXXYYLVSTASLQTPAXX

SEQ ID NO: 3028 - protein, 35 aa, Artificial Sequence
  GFR-binding peptide
  MOD_RES (32), (33): Xaa is C or S
ARVVMNQYNKLIVNSSDDLYLVSIASLQTPAXXPK

SEQ ID NO: 3029 - protein, 38 aa, Artificial Sequence
  GFR-binding peptide
  MOD_RES (35), (36): Xaa is C or S
  MOD_RES (13), (14), (15), (16), (17): Xaa is A or G
  MOD_RES (18), (19), (20), (21): Xaa is A or G or is absent
EAVSMGEQYNKLXXXXXXXXXLYLVSIASLKTPVXXAK

SEQ ID NO: 3030 - protein, 39 aa, Artificial Sequence
  GFR-binding peptide
  MOD_RES (36), (36): Xaa is C or S
LHDELTYHYKLFIPKKRVIEKYLVSIPSLQVQTPRXQVN

SEQ ID NO: 3031 - protein, 35 aa, Artificial Sequence
  GFR-binding peptide
  MOD_RES (1), (34), (35): Xaa is C or S
  MOD_RES (12), (13), (14), (15), (16): Xaa is A or G
  MOD_RES (17), (18), (19), (20): Xaa is A or G or is absent
XSKVIMQYNKLXXXXXXXXXLYLISIASLDQSVXX

SEQ ID NO: 3032 - protein, 40 aa, Artificial Sequence
  GFR-binding peptide
  MOD_RES (2), (4), (35), (36): Xaa is C or S
SXKXSRVIMRHKRLVKPKRGVYYLISTASLAQPVXXPAAS

SEQ ID NO: 3033 - protein, 35 aa, Artificial Sequence
  GFR-binding peptide
  MOD_RES (2), (33), (34): Xaa is C or S
KXSKVIMQYNKLIKPTKGILYLISIASLDQSVXXP

SEQ ID NO: 3034 - protein, 38 aa, Artificial Sequence
  GFR-binding peptide
  MOD_RES (35), (36): Xaa is C or S
  MOD_RES (13), (14), (15), (16), (17): Xaa is A or G
  MOD_RES (18), (19), (20), (21): Xaa is A or G or is absent
EAVSMGERHKRLXXXXXXXXXYYLVSTASLKTPVXXAK

SEQ ID NO: 3035 - protein, 35 aa, Artificial Sequence
  GFR-binding peptide
  MOD_RES (33), (33): Xaa is C or S
  MOD_RES (11), (12), (13), (14), (15): Xaa is A or G
  MOD_RES (16), (17), (18), (19): Xaa is A or G or is absent
RVVMNRYKKLXXXXXXXXXFYLVSIANLKTPAXTP

SEQ ID NO: 3036 - protein, 41 aa, Artificial Sequence
  GFR-binding peptide
  MOD_RES (2), (4), (36), (37): Xaa is C or S
RXGXGEVVMEYHYKLVVKDYEDKYLMSIPSLETPVXXAKPI

SEQ ID NO: 3037 - protein, 42 aa, Artificial Sequence
  GFR-binding peptide
  MOD_RES (2), (4), (36), (37): Xaa is C or S
RXGXGEVVMDRHKRLVVKENEDYYLMSTASLETPVXXAKPIK

SEQ ID NO: 3038 - protein, 36 aa, Artificial Sequence
  GFR-binding peptide
  MOD_RES (1), (34), (35): Xaa is C or S
  MOD_RES (12), (13), (14), (15), (16): Xaa is A or G
  MOD_RES (17), (18), (19), (20): Xaa is A or G or is absent
XSKVVMYHYKLXXXXXXXXXKYLISIPSLDQPVXXP

SEQ ID NO: 3039 - protein, 39 aa, Artificial Sequence
  GFR-binding peptide
  MOD_RES (2), (35), (36): Xaa is C or S
  MOD_RES (13), (14), (15), (16), (17): Xaa is A or G
  MOD_RES (18), (19), (20), (21): Xaa is A or G or is absent
KXSKVVMQYNKLXXXXXXXXXLYLISIASLDQPVXXPSA

SEQ ID NO: 3040 - protein, 40 aa, Artificial Sequence
  GFR-binding peptide
  MOD_RES (2), (39): Xaa is C or S
KXALHDELTYHYKLFIPKKRVIEKYLVSIPSLQVQTPRXQ

SEQ ID NO: 3041 - protein, 38 aa, Artificial Sequence
  GFR-binding peptide
  MOD_RES (1), (3), (35): Xaa is C or S
XGXSRVVMNQYNKLIVNSSDDLYLVSIASLKTPAXTPK

SEQ ID NO: 3042 - protein, 35 aa, Artificial Sequence
  GFR-binding peptide
  MOD_RES (32), (33): Xaa is C or S
GEVVMERYKKLVVKDYEDFYLMSIANLETPVXXAK

SEQ ID NO: 3043 - protein, 37 aa, Artificial Sequence
  GFR-binding peptide
  MOD_RES (2), (2): Xaa is C or S
KXALHDELTYHYKLFIPKKRVIEKYLVSIPSLQVQTP

SEQ ID NO: 3044 - protein, 37 aa, Artificial Sequence
  GFR-binding peptide
  MOD_RES (2), (33), (34): Xaa is C or S
KXSKVVMRHKRLVKPTRGVYYLISTASLDQPVXXPSA

SEQ ID NO: 3045 - protein, 37 aa, Artificial Sequence
  GFR-binding peptide
  MOD_RES (1), (1): Xaa is C or S
  MOD_RES (14), (15), (16), (17), (18): Xaa is A or G
  MOD_RES (19), (20), (21), (22): Xaa is A or G or is absent
XALHDELTYHYKLXXXXXXXXXKYLVSIPSLQVQTPR

SEQ ID NO: 3046 - protein, 37 aa, Artificial Sequence
  GFR-binding peptide
  MOD_RES (2), (33), (34): Xaa is C or S
KXSKVVMQYNKLVKPTRGVLYLISIASLDQPVXXPSA

SEQ ID NO: 3047 - protein, 35 aa, Artificial Sequence
  GFR-binding peptide
  MOD_RES (35), (35): Xaa is C or S
  MOD_RES (13), (14), (15), (16), (17): Xaa is A or G
  MOD_RES (18), (19), (20), (21): Xaa is A or G or is absent
EAVSMGEYHYKLXXXXXXXXXKYLVSIPSLKTPVX

SEQ ID NO: 3048 - protein, 35 aa, Artificial Sequence
  GFR-binding peptide
  MOD_RES (34), (35): Xaa is C or S
  MOD_RES (12), (13), (14), (15), (16): Xaa is A or G
  MOD_RES (17), (18), (19), (20): Xaa is A or G or is absent
SRVVMNYHYKLXXXXXXXXXKYLVSIPSLKTPAXX

SEQ ID NO: 3049 - protein, 41 aa, Artificial Sequence
  GFR-binding peptide
  MOD_RES (2), (4), (35), (36): Xaa is C or S
SXKXSKVVMQYNKLVKPTRGVLYLISIASLDQPVXXPSASA

SEQ ID NO: 3050 - protein, 41 aa, Artificial Sequence
  GFR-binding peptide
  MOD_RES (37), (37): Xaa is C or S
  MOD_RES (13), (14), (15), (16), (17): Xaa is A or G
  MOD_RES (18), (19), (20), (21): Xaa is A or G or is absent
ALHDELTYHYKLXXXXXXXXXKYLVSIPSLQVQTPRXQVNR

SEQ ID NO: 3051 - protein, 44 aa, Artificial Sequence
  GFR-binding peptide
  MOD_RES (2), (4), (38), (39): Xaa is C or S
  MOD_RES (16), (17), (18), (19), (20): Xaa is A or G
  MOD_RES (21), (22), (23), (24): Xaa is A or G or is absent
HXGXAKVVMNQYNKLXXXXXXXXXLYLVSIASLKTPAXXAKPVA

SEQ ID NO: 3052 - protein, 39 aa, Artificial Sequence
  GFR-binding peptide
  MOD_RES (1), (35), (36): Xaa is C or S
  MOD_RES (13), (14), (15), (16), (17): Xaa is A or G
  MOD_RES (18), (19), (20), (21): Xaa is A or G or is absent
XSRVVMNQYNKLXXXXXXXXXLYLVSIASLKTPAXXPKP

SEQ ID NO: 3053 - protein, 43 aa, Artificial Sequence
  GFR-binding peptide
  MOD_RES (2), (4), (38), (39): Xaa is C or S
  MOD_RES (16), (17), (18), (19), (20): Xaa is A or G
  MOD_RES (21), (22), (23), (24): Xaa is A or G or is absent
RXGXGEVVMDQYNKLXXXXXXXXXLYLMSIASLETPVXXAKPI

SEQ ID NO: 3054 - protein, 38 aa, Artificial Sequence
  GFR-binding peptide
  MOD_RES (1), (3), (36), (37): Xaa is C or S
  MOD_RES (14), (15), (16), (17), (18): Xaa is A or G
  MOD_RES (19), (20), (21), (22): Xaa is A or G or is absent
XKXSKVVMRYKKLXXXXXXXXXFYLISIANLDQPVXXP

SEQ ID NO: 3055 - protein, 33 aa, Artificial Sequence
  GFR-binding peptide
  MOD_RES (32), (33): Xaa is C or S
AKVVMNYHYKLIVNNSSDKYLVSIPSLKTPAXX

SEQ ID NO: 3056 - protein, 38 aa, Artificial Sequence
  GFR-binding peptide
  MOD_RES (1), (3), (37), (38): Xaa is C or S
  MOD_RES (15), (16), (17), (18), (19): Xaa is A or G
  MOD_RES (20), (21), (22), (23): Xaa is A or G or is absent
XGXGEVVMEYHYKLXXXXXXXXXKYLMSIPSLETPVXX

SEQ ID NO: 3057 - protein, 37 aa, Artificial Sequence
  GFR-binding peptide
  MOD_RES (34), (35): Xaa is C or S
  MOD_RES (12), (13), (14), (15), (16): Xaa is A or G
  MOD_RES (17), (18), (19), (20): Xaa is A or G or is absent
ARVVMNRYKKLXXXXXXXXXFYLVSIANLQTPAXXPK

SEQ ID NO: 3058 - protein, 40 aa, Artificial Sequence
  GFR-binding peptide
  MOD_RES (2), (4), (38), (39): Xaa is C or S
  MOD_RES (16), (17), (18), (19), (20): Xaa is A or G
  MOD_RES (21), (22), (23), (24): Xaa is A or G or is absent
HXGXAKVVMNRYKKLXXXXXXXXXFYLVSIANLKTPAXXA

SEQ ID NO: 3059 - protein, 40 aa, Artificial Sequence
  GFR-binding peptide
  MOD_RES (1), (3), (37): Xaa is C or S
  MOD_RES (15), (16), (17), (18), (19): Xaa is A or G
  MOD_RES (20), (21), (22), (23): Xaa is A or G or is absent
XGXSRVVMNQYNKLXXXXXXXXXLYLVSIASLKTPAXTPK

SEQ ID NO: 3060 - protein, 36 aa, Artificial Sequence
  GFR-binding peptide
  MOD_RES (2), (34): Xaa is C or S
GXSRVVMNRHKRLIVNSSDDYYLVSTASLKTPAXTP

SEQ ID NO: 3061 - protein, 32 aa, Artificial Sequence
  GFR-binding peptide
  MOD_RES (11), (12), (13), (14), (15): Xaa is A or G
  MOD_RES (16), (17), (18), (19): Xaa is A or G or is absent
EVVMDRYKKLXXXXXXXXXFYLMSIANLETPV

SEQ ID NO: 3062 - protein, 37 aa, Artificial Sequence
  GFR-binding peptide
  MOD_RES (33), (34): Xaa is C or S
  MOD_RES (11), (12), (13), (14), (15): Xaa is A or G
  MOD_RES (16), (17), (18), (19): Xaa is A or G or is absent
SKVIMYHYKLXXXXXXXXXKYLISIPSLDQSVXXPSA

SEQ ID NO: 3063 - protein, 41 aa, Artificial Sequence
  GFR-binding peptide
  MOD_RES (1), (38): Xaa is C or S
  MOD_RES (14), (15), (16), (17), (18): Xaa is A or G
  MOD_RES (19), (20), (21), (22): Xaa is A or G or is absent
XALHDELTRHKRLXXXXXXXXXYYLVSTASLQVQTPRXQVN

SEQ ID NO: 3064 - protein, 35 aa, Artificial Sequence
  GFR-binding peptide
  MOD_RES (32), (33): Xaa is C or S
SRVVMNRYKKLIVNSSDDFYLVSIANLKTPAXXPK

SEQ ID NO: 3065 - protein, 40 aa, Artificial Sequence
  GFR-binding peptide
  MOD_RES (2), (34), (35): Xaa is C or S
GXSRVVMNYHYKLIVNSSDDKYLVSIPSLKTPAXXPKPVY

SEQ ID NO: 3066 - protein, 39 aa, Artificial Sequence
  GFR-binding peptide
  MOD_RES (2), (33), (34): Xaa is C or S
KXSKVVMYHYKLVKPTRGVKYLISIPSLDQPVXXPSASA

SEQ ID NO: 3067 - protein, 42 aa, Artificial Sequence
  GFR-binding peptide
  MOD_RES (2), (4), (41): Xaa is C or S
  MOD_RES (17), (18), (19), (20), (21): Xaa is A or G
  MOD_RES (22), (23), (24), (25): Xaa is A or G or is absent
EXKXALHDELTQYNKLXXXXXXXXXLYLVSIASLQVQTPRXQ

SEQ ID NO: 3068 - protein, 45 aa, Artificial Sequence
  GFR-binding peptide
  MOD_RES (2), (4), (41): Xaa is C or S
  MOD_RES (17), (18), (19), (20), (21): Xaa is A or G
  MOD_RES (22), (23), (24), (25): Xaa is A or G or is absent
EXKXALHDELTQYNKLXXXXXXXXXLYLVSIASLQVQTPRXQVNR

SEQ ID NO: 3069 - protein, 36 aa, Artificial Sequence
  GFR-binding peptide
  MOD_RES (1), (3): Xaa is C or S
  MOD_RES (15), (16), (17), (18), (19): Xaa is A or G
  MOD_RES (20), (21), (22), (23): Xaa is A or G or is absent
XGXSRVVMNRHKRLXXXXXXXXXYYLVSTASLKTPA

SEQ ID NO: 3070 - protein, 36 aa, Artificial Sequence
  GFR-binding peptide
  MOD_RES (2), (34), (35): Xaa is C or S
GXSRVVMNRYKKLIVNSSDDFYLVSIANLKTPAXXP

SEQ ID NO: 3071 - protein, 38 aa, Artificial Sequence
  GFR-binding peptide
  MOD_RES (34), (34): Xaa is C or S
  MOD_RES (12), (13), (14), (15), (16): Xaa is A or G
  MOD_RES (17), (18), (19), (20): Xaa is A or G or is absent
SRVVMNRHKRLXXXXXXXXXYYLVSTASLKTPAXTPKT

SEQ ID NO: 3072 - protein, 39 aa, Artificial Sequence
  GFR-binding peptide
  MOD_RES (1), (33), (34): Xaa is C or S
XSRVVMNYHYKLIVNSSDDKYLVSIPSLKTPAXXPKPVY

SEQ ID NO: 3073 - protein, 35 aa, Artificial Sequence
  GFR-binding peptide
  MOD_RES (2), (2): Xaa is C or S
  MOD_RES (14), (15), (16), (17), (18): Xaa is A or G
  MOD_RES (19), (20), (21), (22): Xaa is A or G or is absent
GXAKVVMNYHYKLXXXXXXXXXKYLVSIPSLKTPA

SEQ ID NO: 3074 - protein, 31 aa, Artificial Sequence
  GFR-binding peptide
  MOD_RES (31), (31): Xaa is C or S
SKVIMRYKKLIKPTKGIFYLISIANLDQSVX

SEQ ID NO: 3075 - protein, 41 aa, Artificial Sequence
  GFR-binding peptide
  MOD_RES (2), (37), (38): Xaa is C or S
  MOD_RES (15), (16), (17), (18), (19): Xaa is A or G
  MOD_RES (20), (21), (22), (23): Xaa is A or G or is absent
GXEAVSMGERYKKLXXXXXXXXXFYLVSIANLKTPVXXAKG

SEQ ID NO: 3076 - protein, 40 aa, Artificial Sequence
  GFR-binding peptide
  MOD_RES (1), (3), (36), (37): Xaa is C or S
  MOD_RES (14), (15), (16), (17), (18): Xaa is A or G
  MOD_RES (19), (20), (21), (22): Xaa is A or G or is absent
XKXSKVIMRHKRLXXXXXXXXXYYLISTASLDQSVXXPSA

SEQ ID NO: 3077 - protein, 32 aa, Artificial Sequence
  GFR-binding peptide
  MOD_RES (31), (32): Xaa is C or S
SKVIMRHKRLIKPTKGIYYLISTASLDQSVXX

SEQ ID NO: 3078 - protein, 34 aa, Artificial Sequence
  GFR-binding peptide
  MOD_RES (33), (34): Xaa is C or S
  MOD_RES (11), (12), (13), (14), (15): Xaa is A or G
  MOD_RES (16), (17), (18), (19): Xaa is A or G or is absent
SKVIMRYKKLXXXXXXXXXFYLISIANLDQSVXX

SEQ ID NO: 3079 - protein, 41 aa, Artificial Sequence
  GFR-binding peptide
  MOD_RES (2), (36), (37): Xaa is C or S
  MOD_RES (14), (15), (16), (17), (18): Xaa is A or G
  MOD_RES (19), (20), (21), (22): Xaa is A or G or is absent
GXARVVMNRHKRLXXXXXXXXXYYLVSTASLQTPAXXPKPV

SEQ ID NO: 3080 - protein, 38 aa, Artificial Sequence
  GFR-binding peptide
  MOD_RES (2), (4): Xaa is C or S
  MOD_RES (17), (18), (19), (20), (21): Xaa is A or G
  MOD_RES (22), (23), (24), (25): Xaa is A or G or is absent
EXKXALHDELTRYKKLXXXXXXXXXFYLVSIANLQVQT

SEQ ID NO: 3081 - protein, 41 aa, Artificial Sequence
  GFR-binding peptide
  MOD_RES (1), (3), (40): Xaa is C or S
XKXALHDELTRHKRLFIPKKRVIEYYLVSTASLQVQTPRXQ

SEQ ID NO: 3082 - protein, 35 aa, Artificial Sequence
  GFR-binding peptide
  MOD_RES (1), (33), (34): Xaa is C or S
XARVVMNQYNKLIVNSSDDLYLVSIASLQTPAXXP

SEQ ID NO: 3083 - protein, 40 aa, Artificial Sequence
  GFR-binding peptide
  MOD_RES (2), (4), (38), (39): Xaa is C or S
  MOD_RES (16), (17), (18), (19), (20): Xaa is A or G
  MOD_RES (21), (22), (23), (24): Xaa is A or G or is absent
RXGXGEVVMERHKRLXXXXXXXXXYYLMSTASLETPVXXA

SEQ ID NO: 3084 - protein, 35 aa, Artificial Sequence
  GFR-binding peptide
  MOD_RES (1), (1): Xaa is C or S
  MOD_RES (14), (15), (16), (17), (18): Xaa is A or G
  MOD_RES (19), (20), (21), (22): Xaa is A or G or is absent
XALHDELTRYKKLXXXXXXXXXFYLVSIANLQVQT

SEQ ID NO: 3085 - protein, 35 aa, Artificial Sequence
  GFR-binding peptide
  MOD_RES (31), (32): Xaa is C or S
EVVMDYHYKLVVKENEDKYLMSIPSLETPVXXAKP

SEQ ID NO: 3086 - protein, 34 aa, Artificial Sequence
  GFR-binding peptide
  MOD_RES (1), (3): Xaa is C or S
XGXARVVMNRHKRLIVNSSDDYYLVSTASLQTPA

SEQ ID NO: 3087 - protein, 34 aa, Artificial Sequence
  GFR-binding peptide
  MOD_RES (1), (32), (33): Xaa is C or S
XSRVIMRYKKLVKPKRGVFYLISIANLAQPVXXP

SEQ ID NO: 3088 - protein, 38 aa, Artificial Sequence
  GFR-binding peptide
  MOD_RES (1), (32), (33): Xaa is C or S
XSRVIMRYKKLVKPKRGVFYLISIANLAQPVXXPAASA

SEQ ID NO: 3089 - protein, 38 aa, Artificial Sequence
  GFR-binding peptide
  MOD_RES (35), (35): Xaa is C or S
  MOD_RES (11), (12), (13), (14), (15): Xaa is A or G
  MOD_RES (16), (17), (18), (19): Xaa is A or G or is absent
HDELTQYNKLXXXXXXXXXLYLVSIASLQVQTPRXQVN

SEQ ID NO: 3090 - protein, 38 aa, Artificial Sequence
  GFR-binding peptide
  MOD_RES (2), (4), (38): Xaa is C or S
  MOD_RES (16), (17), (18), (19), (20): Xaa is A or G
  MOD_RES (21), (22), (23), (24): Xaa is A or G or is absent
HXGXARVVMNRHKRLXXXXXXXXXYYLVSTASLQTPAX

SEQ ID NO: 3091 - protein, 40 aa, Artificial Sequence
  GFR-binding peptide
  MOD_RES (1), (3), (36), (37): Xaa is C or S
  MOD_RES (14), (15), (16), (17), (18): Xaa is A or G
  MOD_RES (19), (20), (21), (22): Xaa is A or G or is absent
XKXSRVIMRHKRLXXXXXXXXXYYLISTASLAQPVXXPAA

SEQ ID NO: 3092 - protein, 33 aa, Artificial Sequence
  GFR-binding peptide
  MOD_RES (12), (13), (14), (15), (16): Xaa is A or G
  MOD_RES (17), (18), (19), (20): Xaa is A or G or is absent
ARVVMNQYNKLXXXXXXXXXLYLVSIASLQTPA

SEQ ID NO: 3093 - protein, 39 aa, Artificial Sequence
  GFR-binding peptide
  MOD_RES (2), (4), (38), (39): Xaa is C or S
  MOD_RES (16), (17), (18), (19), (20): Xaa is A or G
  MOD_RES (21), (22), (23), (24): Xaa is A or G or is absent
HXGXSRVVMNQYNKLXXXXXXXXXLYLVSIASLKTPAXX

SEQ ID NO: 3094 - protein, 38 aa, Artificial Sequence
  GFR-binding peptide
  MOD_RES (1), (38): Xaa is C or S
  MOD_RES (14), (15), (16), (17), (18): Xaa is A or G
  MOD_RES (19), (20), (21), (22): Xaa is A or G or is absent
XALHDELTRYKKLXXXXXXXXXFYLVSIANLQVQTPRX

SEQ ID NO: 3095 - protein, 40 aa, Artificial Sequence
  GFR-binding peptide
  MOD_RES (2), (36), (37): Xaa is C or S
  MOD_RES (14), (15), (16), (17), (18): Xaa is A or G
  MOD_RES (19), (20), (21), (22): Xaa is A or G or is absent
GXGEVVMDYHYKLXXXXXXXXXKYLMSIPSLETPVXXAKP

SEQ ID NO: 3096 - protein, 39 aa, Artificial Sequence
  GFR-binding peptide
  MOD_RES (2), (4), (36): Xaa is C or S
HXGXSRVVMNRYKKLIVNSSDDFYLVSIANLKTPAXTPK

SEQ ID NO: 3097 - protein, 32 aa, Artificial Sequence
  GFR-binding peptide
  MOD_RES (11), (12), (13), (14), (15): Xaa is A or G
  MOD_RES (16), (17), (18), (19): Xaa is A or G or is absent
RVVMNYHYKLXXXXXXXXXKYLVSIPSLQTPA

SEQ ID NO: 3098 - protein, 39 aa, Artificial Sequence
  GFR-binding peptide
  MOD_RES (2), (35), (36): Xaa is C or S
  MOD_RES (13), (14), (15), (16), (17): Xaa is A or G
  MOD_RES (18), (19), (20), (21): Xaa is A or G or is absent
KXSRVIMYHYKLXXXXXXXXXKYLISIPSLAQPVXXPAA

SEQ ID NO: 3099 - protein, 37 aa, Artificial Sequence
  GFR-binding peptide
  MOD_RES (31), (31): Xaa is C or S
RVVMNRYKKLIVNSSDDFYLVSIANLKTPAXTPKTVH

SEQ ID NO: 3100 - protein, 41 aa, Artificial Sequence
  GFR-binding peptide
  MOD_RES (2), (39): Xaa is C or S
KXALHDELTRHKRLFIPKKRVIEYYLVSTASLQVQTPRXQV

SEQ ID NO: 3101 - protein, 37 aa, Artificial Sequence
  GFR-binding peptide
  MOD_RES (1), (3), (35), (36): Xaa is C or S
XGXGEVVMDRYKKLVVKENEDFYLMSIANLETPVXXA

SEQ ID NO: 3102 - protein, 40 aa, Artificial Sequence
  GFR-binding peptide
  MOD_RES (34), (35): Xaa is C or S
  MOD_RES (12), (13), (14), (15), (16): Xaa is A or G
  MOD_RES (17), (18), (19), (20): Xaa is A or G or is absent
SRVVMNQYNKLXXXXXXXXXLYLVSIASLKTPAXXPKPVY

SEQ ID NO: 3103 - protein, 40 aa, Artificial Sequence
  GFR-binding peptide
  MOD_RES (1), (38): Xaa is C or S
  MOD_RES (14), (15), (16), (17), (18): Xaa is A or G
  MOD_RES (19), (20), (21), (22): Xaa is A or G or is absent
XALHDELTRYKKLXXXXXXXXXFYLVSIANLQVQTPRXQV

SEQ ID NO: 3104 - protein, 37 aa, Artificial Sequence
  GFR-binding peptide
  MOD_RES (31), (32): Xaa is C or S
RVVMNRYKKLIVNSSDDFYLVSIANLKTPAXXPKPVY

SEQ ID NO: 3105 - protein, 37 aa, Artificial Sequence
  GFR-binding peptide
  MOD_RES (33), (34): Xaa is C or S
  MOD_RES (11), (12), (13), (14), (15): Xaa is A or G
  MOD_RES (16), (17), (18), (19): Xaa is A or G or is absent
SKVIMRHKRLXXXXXXXXXYYLISTASLDQSVXXPSA

SEQ ID NO: 3106 - protein, 36 aa, Artificial Sequence
  GFR-binding peptide
  MOD_RES (1), (3), (35), (36): Xaa is C or S
XGXGEVVMDRHKRLVVKENEDYYLMSTASLETPVXX

SEQ ID NO: 3107 - protein, 40 aa, Artificial Sequence
  GFR-binding peptide
  MOD_RES (1), (3), (34), (35): Xaa is C or S
XKXSKVIMQYNKLIKPTKGILYLISIASLDQSVXXPSASA

SEQ ID NO: 3108 - protein, 37 aa, Artificial Sequence
  GFR-binding peptide
  MOD_RES (34), (35): Xaa is C or S
  MOD_RES (12), (13), (14), (15), (16): Xaa is A or G
  MOD_RES (17), (18), (19), (20): Xaa is A or G or is absent
GEVVMDQYNKLXXXXXXXXXLYLMSIASLETPVXXAK

SEQ ID NO: 3109 - protein, 40 aa, Artificial Sequence
  GFR-binding peptide
  MOD_RES (1), (34), (35): Xaa is C or S
  MOD_RES (12), (13), (14), (15), (16): Xaa is A or G
  MOD_RES (17), (18), (19), (20): Xaa is A or G or is absent
XSKVIMRHKRLXXXXXXXXXYYLISTASLDQSVXXPSASA

SEQ ID NO: 3110 - protein, 39 aa, Artificial Sequence
  GFR-binding peptide
  MOD_RES (1), (3), (35), (36): Xaa is C or S
XGXSRVVMNRYKKLIVNSSDDFYLVSIANLKTPAXXPKP

SEQ ID NO: 3111 - protein, 36 aa, Artificial Sequence
  GFR-binding peptide
  MOD_RES (32), (33): Xaa is C or S
ARVVMNYHYKLIVNSSDDKYLVSIPSLQTPAXXPKP

SEQ ID NO: 3112 - protein, 35 aa, Artificial Sequence
  GFR-binding peptide
  MOD_RES (1), (3): Xaa is C or S
  MOD_RES (14), (15), (16), (17), (18): Xaa is A or G
  MOD_RES (19), (20), (21), (22): Xaa is A or G or is absent
XKXSKVVMYHYKLXXXXXXXXXKYLISIPSLDQPV

SEQ ID NO: 3113 - protein, 30 aa, Artificial Sequence
  GFR-binding peptide
KVVMNRHKRLIVNNSSDYYLVSTASLKTPA

SEQ ID NO: 3114 - protein, 38 aa, Artificial Sequence
  GFR-binding peptide
  MOD_RES (2), (36): Xaa is C or S
  MOD_RES (14), (15), (16), (17), (18): Xaa is A or G
  MOD_RES (19), (20), (21), (22): Xaa is A or G or is absent
GXSRVVMNRHKRLXXXXXXXXXYYLVSTASLKTPAXTP

SEQ ID NO: 3115 - protein, 35 aa, Artificial Sequence
  GFR-binding peptide
  MOD_RES (33), (34): Xaa is C or S
EAVSMGERHKRLTPVGMDDYYLVSTASLKTPVXXA

SEQ ID NO: 3116 - protein, 41 aa, Artificial Sequence
  GFR-binding peptide
  MOD_RES (2), (36), (37): Xaa is C or S
  MOD_RES (14), (15), (16), (17), (18): Xaa is A or G
  MOD_RES (19), (20), (21), (22): Xaa is A or G or is absent
GXAKVVMNRHKRLXXXXXXXXXYYLVSTASLKTPAXXAKPV

SEQ ID NO: 3117 - protein, 40 aa, Artificial Sequence
  GFR-binding peptide
  MOD_RES (2), (36), (37): Xaa is C or S
  MOD_RES (14), (15), (16), (17), (18): Xaa is A or G
  MOD_RES (19), (20), (21), (22): Xaa is A or G or is absent
GXSRVVMNQYNKLXXXXXXXXXLYLVSIASLKTPAXXPKP

SEQ ID NO: 3118 - protein, 37 aa, Artificial Sequence
  GFR-binding peptide
  MOD_RES (33), (34): Xaa is C or S
  MOD_RES (11), (12), (13), (14), (15): Xaa is A or G
  MOD_RES (16), (17), (18), (19): Xaa is A or G or is absent
SKVVMQYNKLXXXXXXXXXLYLISIASLDQPVXXPSA

SEQ ID NO: 3119 - protein, 34 aa, Artificial Sequence
  GFR-binding peptide
  MOD_RES (31), (32): Xaa is C or S
RVVMNYHYKLIVNSSDDKYLVSIPSLKTPAXXPK

SEQ ID NO: 3120 - protein, 37 aa, Artificial Sequence
  GFR-binding peptide
  MOD_RES (33), (34): Xaa is C or S
  MOD_RES (11), (12), (13), (14), (15): Xaa is A or G
  MOD_RES (16), (17), (18), (19): Xaa is A or G or is absent
RVVMNYHYKLXXXXXXXXXKYLVSIPSLKTPAXXPKP

SEQ ID NO: 3121 - protein, 39 aa, Artificial Sequence
  GFR-binding peptide
  MOD_RES (2), (35), (36): Xaa is C or S
  MOD_RES (13), (14), (15), (16), (17): Xaa is A or G
  MOD_RES (18), (19), (20), (21): Xaa is A or G or is absent
KXSRVIMQYNKLXXXXXXXXXLYLISIASLAQPVXXPAA

SEQ ID NO: 3122 - protein, 34 aa, Artificial Sequence
  GFR-binding peptide
  MOD_RES (32), (32): Xaa is C or S
SRVVMNYHYKLIVNSSDDKYLVSIPSLKTPAXTP

SEQ ID NO: 3123 - protein, 33 aa, Artificial Sequence
  GFR-binding peptide
  MOD_RES (2), (2): Xaa is C or S
GXAKVVMNQYNKLIVNNSSDLYLVSIASLKTPA

SEQ ID NO: 3124 - protein, 37 aa, Artificial Sequence
  GFR-binding peptide
  MOD_RES (2), (4), (37): Xaa is C or S
  MOD_RES (15), (16), (17), (18), (19): Xaa is A or G
  MOD_RES (20), (21), (22), (23): Xaa is A or G or is absent
SXKXSKVVMRYKKLXXXXXXXXXFYLISIANLDQPVX

SEQ ID NO: 3125 - protein, 40 aa, Artificial Sequence
  GFR-binding peptide
  MOD_RES (1), (34), (35): Xaa is C or S
  MOD_RES (12), (13), (14), (15), (16): Xaa is A or G
  MOD_RES (17), (18), (19), (20): Xaa is A or G or is absent
XSKVIMQYNKLXXXXXXXXXLYLISIASLDQSVXXPSASA

SEQ ID NO: 3126 - protein, 38 aa, Artificial Sequence
  GFR-binding peptide
  MOD_RES (1), (34), (35): Xaa is C or S
  MOD_RES (12), (13), (14), (15), (16): Xaa is A or G
  MOD_RES (17), (18), (19), (20): Xaa is A or G or is absent
XSKVIMYHYKLXXXXXXXXXKYLISIPSLDQSVXXPSA

SEQ ID NO: 3127 - protein, 41 aa, Artificial Sequence
  GFR-binding peptide
  MOD_RES (2), (36): Xaa is C or S
  MOD_RES (14), (15), (16), (17), (18): Xaa is A or G
  MOD_RES (19), (20), (21), (22): Xaa is A or G or is absent
GXSRVVMNYHYKLXXXXXXXXXKYLVSIPSLKTPAXTPKTV

SEQ ID NO: 3128 - protein, 37 aa, Artificial Sequence
  GFR-binding peptide
  MOD_RES (2), (36), (37): Xaa is C or S
  MOD_RES (14), (15), (16), (17), (18): Xaa is A or G
  MOD_RES (19), (20), (21), (22): Xaa is A or G or is absent
GXSRVVMNQYNKLXXXXXXXXXLYLVSIASLKTPAXX

SEQ ID NO: 3129 - protein, 35 aa, Artificial Sequence
  GFR-binding peptide
  MOD_RES (33), (34): Xaa is C or S
  MOD_RES (11), (12), (13), (14), (15): Xaa is A or G
  MOD_RES (16), (17), (18), (19): Xaa is A or G or is absent
EVVMERHKRLXXXXXXXXXYYLMSTASLETPVXXA

SEQ ID NO: 3130 - protein, 40 aa, Artificial Sequence
  GFR-binding peptide
  MOD_RES (1), (3), (36), (37): Xaa is C or S
  MOD_RES (14), (15), (16), (17), (18): Xaa is A or G
  MOD_RES (19), (20), (21), (22): Xaa is A or G or is absent
XKXSKVVMYHYKLXXXXXXXXXKYLISIPSLDQPVXXPSA

SEQ ID NO: 3131 - protein, 37 aa, Artificial Sequence
  GFR-binding peptide
  MOD_RES (2), (34), (35): Xaa is C or S
GXAKVVMNYHYKLIVNNSSDKYLVSIPSLKTPAXXAK

SEQ ID NO: 3132 - protein, 38 aa, Artificial Sequence
  GFR-binding peptide
  MOD_RES (1), (35): Xaa is C or S
  MOD_RES (13), (14), (15), (16), (17): Xaa is A or G
  MOD_RES (18), (19), (20), (21): Xaa is A or G or is absent
XSRVVMNRYKKLXXXXXXXXXFYLVSIANLKTPAXTPK

SEQ ID NO: 3133 - protein, 35 aa, Artificial Sequence
  GFR-binding peptide
  MOD_RES (34), (35): Xaa is C or S
  MOD_RES (12), (13), (14), (15), (16): Xaa is A or G
  MOD_RES (17), (18), (19), (20): Xaa is A or G or is absent
ARVVMNQYNKLXXXXXXXXXLYLVSIASLQTPAXX

SEQ ID NO: 3134 - protein, 39 aa, Artificial Sequence
  GFR-binding peptide
  MOD_RES (2), (39): Xaa is C or S
  MOD_RES (15), (16), (17), (18), (19): Xaa is A or G
  MOD_RES (20), (21), (22), (23): Xaa is A or G or is absent
KXALHDELTQYNKLXXXXXXXXXLYLVSIASLQVQTPRX

SEQ ID NO: 3135 - protein, 32 aa, Artificial Sequence
  GFR-binding peptide
  MOD_RES (31), (32): Xaa is C or S
EVVMDRHKRLVVKENEDYYLMSTASLETPVXX

SEQ ID NO: 3136 - protein, 36 aa, Artificial Sequence
  GFR-binding peptide
  MOD_RES (1), (3): Xaa is C or S
  MOD_RES (15), (16), (17), (18), (19): Xaa is A or G
  MOD_RES (20), (21), (22), (23): Xaa is A or G or is absent
XGXAKVVMNQYNKLXXXXXXXXXLYLVSIASLKTPA

SEQ ID NO: 3137 - protein, 37 aa, Artificial Sequence
  GFR-binding peptide
  MOD_RES (1), (3), (35), (36): Xaa is C or S
XGXARVVMNQYNKLIVNSSDDLYLVSIASLQTPAXXP

SEQ ID NO: 3138 - protein, 38 aa, Artificial Sequence
  GFR-binding peptide
  MOD_RES (34), (35): Xaa is C or S
  MOD_RES (12), (13), (14), (15), (16): Xaa is A or G
  MOD_RES (17), (18), (19), (20): Xaa is A or G or is absent
GEVVMDRYKKLXXXXXXXXXFYLMSIANLETPVXXAKP

SEQ ID NO: 3139 - protein, 32 aa, Artificial Sequence
  GFR-binding peptide
  MOD_RES (11), (12), (13), (14), (15): Xaa is A or G
  MOD_RES (16), (17), (18), (19): Xaa is A or G or is absent
SKVIMQYNKLXXXXXXXXXLYLISIASLDQSV

SEQ ID NO: 3140 - protein, 38 aa, Artificial Sequence
  GFR-binding peptide
  MOD_RES (2), (33), (34): Xaa is C or S
KXSKVVMYHYKLVKPTRGVKYLISIPSLDQPVXXPSAS

SEQ ID NO: 3141 - protein, 37 aa, Artificial Sequence
  GFR-binding peptide
  MOD_RES (36), (36): Xaa is C or S
  MOD_RES (12), (13), (14), (15), (16): Xaa is A or G
  MOD_RES (17), (18), (19), (20): Xaa is A or G or is absent
LHDELTRYKKLXXXXXXXXXFYLVSIANLQVQTPRXQ

SEQ ID NO: 3142 - protein, 41 aa, Artificial Sequence
  GFR-binding peptide
  MOD_RES (2), (39): Xaa is C or S
KXALHDELTQYNKLFIPKKRVIELYLVSIASLQVQTPRXQV

SEQ ID NO: 3143 - protein, 35 aa, Artificial Sequence
  GFR-binding peptide
  MOD_RES (35), (35): Xaa is C or S
  MOD_RES (11), (12), (13), (14), (15): Xaa is A or G
  MOD_RES (16), (17), (18), (19): Xaa is A or G or is absent
HDELTRYKKLXXXXXXXXXFYLVSIANLQVQTPRX

SEQ ID NO: 3144 - protein, 33 aa, Artificial Sequence
  GFR-binding peptide
  MOD_RES (33), (33): Xaa is C or S
  MOD_RES (11), (12), (13), (14), (15): Xaa is A or G
  MOD_RES (16), (17), (18), (19): Xaa is A or G or is absent
SRVIMQYNKLXXXXXXXXXLYLISIASLAQPVX

SEQ ID NO: 3145 - protein, 32 aa, Artificial Sequence
  GFR-binding peptide
  MOD_RES (1), (32): Xaa is C or S
XSRVIMRHKRLVKPKRGVYYLISTASLAQPVX

SEQ ID NO: 3146 - protein, 32 aa, Artificial Sequence
  GFR-binding peptide
  MOD_RES (31), (32): Xaa is C or S
SRVIMRHKRLVKPKRGVYYLISTASLAQPVXX

SEQ ID NO: 3147 - protein, 34 aa, Artificial Sequence
  GFR-binding peptide
  MOD_RES (31), (32): Xaa is C or S
RVVMNQYNKLIVNSSDDLYLVSIASLKTPAXXPK

SEQ ID NO: 3148 - protein, 33 aa, Artificial Sequence
  GFR-binding peptide
  MOD_RES (1), (3): Xaa is C or S
XKXSKVVMRHKRLVKPTRGVYYLISTASLDQPV

SEQ ID NO: 3149 - protein, 31 aa, Artificial Sequence
  GFR-binding peptide
  MOD_RES (31), (31): Xaa is C or S
SRVIMRYKKLVKPKRGVFYLISIANLAQPVX

SEQ ID NO: 3150 - protein, 39 aa, Artificial Sequence
  GFR-binding peptide
  MOD_RES (1), (3), (36), (37): Xaa is C or S
XGXEAVSMGEYHYKLTPVGMDDKYLVSIPSLKTPVXXAK

SEQ ID NO: 3151 - protein, 36 aa, Artificial Sequence
  GFR-binding peptide
  MOD_RES (2), (4), (35), (36): Xaa is C or S
SXKXSRVIMRHKRLVKPKRGVYYLISTASLAQPVXX

SEQ ID NO: 3152 - protein, 38 aa, Artificial Sequence
  GFR-binding peptide
  MOD_RES (2), (4), (38): Xaa is C or S
  MOD_RES (16), (17), (18), (19), (20): Xaa is A or G
  MOD_RES (21), (22), (23), (24): Xaa is A or G or is absent
HXGXAKVVMNYHYKLXXXXXXXXXKYLVSIPSLKTPAX

SEQ ID NO: 3153 - protein, 38 aa, Artificial Sequence
  GFR-binding peptide
  MOD_RES (2), (34), (35): Xaa is C or S
GXGEVVMEYHYKLVVKDYEDKYLMSIPSLETPVXXAKP

SEQ ID NO: 3154 - protein, 38 aa, Artificial Sequence
  GFR-binding peptide
  MOD_RES (1), (3), (37), (38): Xaa is C or S
  MOD_RES (15), (16), (17), (18), (19): Xaa is A or G
  MOD_RES (20), (21), (22), (23): Xaa is A or G or is absent
XGXSRVVMNYHYKLXXXXXXXXXKYLVSIPSLKTPAXX

SEQ ID NO: 3155 - protein, 34 aa, Artificial Sequence
  GFR-binding peptide
  MOD_RES (31), (32): Xaa is C or S
EVVMDRHKRLVVKENEDYYLMSTASLETPVXXAK

SEQ ID NO: 3156 - protein, 38 aa, Artificial Sequence
  GFR-binding peptide
  MOD_RES (1), (32), (33): Xaa is C or S
XSKVIMYHYKLIKPTKGIKYLISIPSLDQSVXXPSASA

SEQ ID NO: 3157 - protein, 38 aa, Artificial Sequence
  GFR-binding peptide
  MOD_RES (32), (33): Xaa is C or S
ARVVMNQYNKLIVNSSDDLYLVSIASLQTPAXXPKPVT

SEQ ID NO: 3158 - protein, 38 aa, Artificial Sequence
  GFR-binding peptide
  MOD_RES (2), (35), (36): Xaa is C or S
  MOD_RES (13), (14), (15), (16), (17): Xaa is A or G
  MOD_RES (18), (19), (20), (21): Xaa is A or G or is absent
KXSKVVMYHYKLXXXXXXXXXKYLISIPSLDQPVXXPS

SEQ ID NO: 3159 - protein, 38 aa, Artificial Sequence
  GFR-binding peptide
  MOD_RES (2), (4): Xaa is C or S
EXKXALHDELTQYNKLFIPKKRVIELYLVSIASLQVQT

SEQ ID NO: 3160 - protein, 36 aa, Artificial Sequence
  GFR-binding peptide
  MOD_RES (1), (3): Xaa is C or S
  MOD_RES (15), (16), (17), (18), (19): Xaa is A or G
  MOD_RES (20), (21), (22), (23): Xaa is A or G or is absent
XGXARVVMNYHYKLXXXXXXXXXKYLVSIPSLQTPA

SEQ ID NO: 3161 - protein, 44 aa, Artificial Sequence
  GFR-binding peptide
  MOD_RES (2), (4), (41): Xaa is C or S
EXKXALHDELTQYNKLFIPKKRVIELYLVSIASLQVQTPRXQVN

SEQ ID NO: 3162 - protein, 33 aa, Artificial Sequence
  GFR-binding peptide
  MOD_RES (12), (13), (14), (15), (16): Xaa is A or G
  MOD_RES (17), (18), (19), (20): Xaa is A or G or is absent
GEVVMDQYNKLXXXXXXXXXLYLMSIASLETPV

SEQ ID NO: 3163 - protein, 37 aa, Artificial Sequence
  GFR-binding peptide
  MOD_RES (33), (34): Xaa is C or S
  MOD_RES (11), (12), (13), (14), (15): Xaa is A or G
  MOD_RES (16), (17), (18), (19): Xaa is A or G or is absent
EVVMDYHYKLXXXXXXXXXKYLMSIPSLETPVXXAKP

SEQ ID NO: 3164 - protein, 38 aa, Artificial Sequence
  GFR-binding peptide
  MOD_RES (2), (4), (36), (37): Xaa is C or S
RXGXGEVVMERHKRLVVKDYEDYYLMSTASLETPVXXA

SEQ ID NO: 3165 - protein, 34 aa, Artificial Sequence
  GFR-binding peptide
  MOD_RES (1), (3), (34): Xaa is C or S
XKXSKVIMRHKRLIKPTKGIYYLISTASLDQSVX

SEQ ID NO: 3166 - protein, 40 aa, Artificial Sequence
  GFR-binding peptide
  MOD_RES (2), (36), (37): Xaa is C or S
  MOD_RES (14), (15), (16), (17), (18): Xaa is A or G
  MOD_RES (19), (20), (21), (22): Xaa is A or G or is absent
GXGEVVMERHKRLXXXXXXXXXYYLMSTASLETPVXXAKP

SEQ ID NO: 3167 - protein, 37 aa, Artificial Sequence
  GFR-binding peptide
  MOD_RES (2), (34), (35): Xaa is C or S
GXSRVVMNRHKRLIVNSSDDYYLVSTASLKTPAXXPK

SEQ ID NO: 3168 - protein, 38 aa, Artificial Sequence
  GFR-binding peptide
  MOD_RES (33), (34): Xaa is C or S
  MOD_RES (11), (12), (13), (14), (15): Xaa is A or G
  MOD_RES (16), (17), (18), (19): Xaa is A or G or is absent
RVVMNRHKRLXXXXXXXXXYYLVSTASLKTPAXXPKPV

SEQ ID NO: 3169 - protein, 37 aa, Artificial Sequence
  GFR-binding peptide
  MOD_RES (2), (4), (36): Xaa is C or S
HXGXSRVVMNYHYKLIVNSSDDKYLVSIPSLKTPAXT

SEQ ID NO: 3170 - protein, 35 aa, Artificial Sequence
  GFR-binding peptide
  MOD_RES (1), (3): Xaa is C or S
  MOD_RES (14), (15), (16), (17), (18): Xaa is A or G
  MOD_RES (19), (20), (21), (22): Xaa is A or G or is absent
XKXSKVVMRYKKLXXXXXXXXXFYLISIANLDQPV

SEQ ID NO: 3171 - protein, 36 aa, Artificial Sequence
  GFR-binding peptide
  MOD_RES (2), (4), (35), (36): Xaa is C or S
SXKXSKVVMRYKKLVKPTRGVFYLISIANLDQPVXX

SEQ ID NO: 3172 - protein, 40 aa, Artificial Sequence
  GFR-binding peptide
  MOD_RES (2), (4), (37), (38): Xaa is C or S
RXGXEAVSMGERYKKLTPVGMDDFYLVSIANLKTPVXXAK

SEQ ID NO: 3173 - protein, 33 aa, Artificial Sequence
  GFR-binding peptide
  MOD_RES (2), (33): Xaa is C or S
KXSKVVMYHYKLVKPTRGVKYLISIPSLDQPVX

SEQ ID NO: 3174 - protein, 34 aa, Artificial Sequence
  GFR-binding peptide
  MOD_RES (1), (32), (33): Xaa is C or S
XSRVIMQYNKLVKPKRGVLYLISIASLAQPVXXP

SEQ ID NO: 3175 - protein, 33 aa, Artificial Sequence
  GFR-binding peptide
  MOD_RES (33), (33): Xaa is C or S
  MOD_RES (11), (12), (13), (14), (15): Xaa is A or G
  MOD_RES (16), (17), (18), (19): Xaa is A or G or is absent
EVVMEQYNKLXXXXXXXXXLYLMSIASLETPVX

SEQ ID NO: 3176 - protein, 38 aa, Artificial Sequence
  GFR-binding peptide
  MOD_RES (2), (4), (35), (36): Xaa is C or S
SXKXSRVIMRHKRLVKPKRGVYYLISTASLAQPVXXPA

SEQ ID NO: 3177 - protein, 34 aa, Artificial Sequence
  GFR-binding peptide
  MOD_RES (2), (34): Xaa is C or S
GXGEVVMDRHKRLVVKENEDYYLMSTASLETPVX

SEQ ID NO: 3178 - protein, 34 aa, Artificial Sequence
  GFR-binding peptide
  MOD_RES (1), (34): Xaa is C or S
  MOD_RES (12), (13), (14), (15), (16): Xaa is A or G
  MOD_RES (17), (18), (19), (20): Xaa is A or G or is absent
XSRVIMRHKRLXXXXXXXXXYYLISTASLAQPVX

SEQ ID NO: 3179 - protein, 39 aa, Artificial Sequence
  GFR-binding peptide
  MOD_RES (1), (3), (36), (37): Xaa is C or S
  MOD_RES (14), (15), (16), (17), (18): Xaa is A or G
  MOD_RES (19), (20), (21), (22): Xaa is A or G or is absent
XKXSKVIMQYNKLXXXXXXXXXLYLISIASLDQSVXXPS

SEQ ID NO: 3180 - protein, 34 aa, Artificial Sequence
  GFR-binding peptide
  MOD_RES (2), (34): Xaa is C or S
GXSRVVMNYHYKLIVNSSDDKYLVSIPSLKTPAX

SEQ ID NO: 3181 - protein, 37 aa, Artificial Sequence
  GFR-binding peptide
  MOD_RES (2), (4), (36), (37): Xaa is C or S
HXGXAKVVMNRYKKLIVNNSSDFYLVSIANLKTPAXX

SEQ ID NO: 3182 - protein, 36 aa, Artificial Sequence
  GFR-binding peptide
  MOD_RES (1), (34), (35): Xaa is C or S
XEAVSMGERYKKLTPVGMDDFYLVSIANLKTPVXXA

SEQ ID NO: 3183 - protein, 42 aa, Artificial Sequence
  GFR-binding peptide
  MOD_RES (1), (3), (40): Xaa is C or S
  MOD_RES (16), (17), (18), (19), (20): Xaa is A or G
  MOD_RES (21), (22), (23), (24): Xaa is A or G or is absent
XKXALHDELTQYNKLXXXXXXXXXLYLVSIASLQVQTPRXQV

SEQ ID NO: 3184 - protein, 34 aa, Artificial Sequence
  GFR-binding peptide
  MOD_RES (1), (1): Xaa is C or S
  MOD_RES (13), (14), (15), (16), (17): Xaa is A or G
  MOD_RES (18), (19), (20), (21): Xaa is A or G or is absent
XAKVVMNRYKKLXXXXXXXXXFYLVSIANLKTPA

SEQ ID NO: 3185 - protein, 41 aa, Artificial Sequence
  GFR-binding peptide
  MOD_RES (2), (4), (38): Xaa is C or S
  MOD_RES (16), (17), (18), (19), (20): Xaa is A or G
  MOD_RES (21), (22), (23), (24): Xaa is A or G or is absent
HXGXSRVVMNQYNKLXXXXXXXXXLYLVSIASLKTPAXTPK

SEQ ID NO: 3186 - protein, 36 aa, Artificial Sequence
  GFR-binding peptide
  MOD_RES (1), (3): Xaa is C or S
  MOD_RES (15), (16), (17), (18), (19): Xaa is A or G
  MOD_RES (20), (21), (22), (23): Xaa is A or G or is absent
XGXGEVVMEYHYKLXXXXXXXXXKYLMSIPSLETPV

SEQ ID NO: 3187 - protein, 36 aa, Artificial Sequence
  GFR-binding peptide
  MOD_RES (2), (36): Xaa is C or S
  MOD_RES (14), (15), (16), (17), (18): Xaa is A or G
  MOD_RES (19), (20), (21), (22): Xaa is A or G or is absent
GXSRVVMNRYKKLXXXXXXXXXFYLVSIANLKTPAX

SEQ ID NO: 3188 - protein, 36 aa, Artificial Sequence
  GFR-binding peptide
  MOD_RES (34), (35): Xaa is C or S
  MOD_RES (12), (13), (14), (15), (16): Xaa is A or G
  MOD_RES (17), (18), (19), (20): Xaa is A or G or is absent
GEVVMEYHYKLXXXXXXXXXKYLMSIPSLETPVXXA

SEQ ID NO: 3189 - protein, 36 aa, Artificial Sequence
  GFR-binding peptide
  MOD_RES (1), (3), (35), (36): Xaa is C or S
XGXGEVVMERYKKLVVKDYEDFYLMSIANLETPVXX

SEQ ID NO: 3190 - protein, 42 aa, Artificial Sequence
  GFR-binding peptide
  MOD_RES (2), (4), (38), (39): Xaa is C or S
  MOD_RES (16), (17), (18), (19), (20): Xaa is A or G
  MOD_RES (21), (22), (23), (24): Xaa is A or G or is absent
HXGXAKVVMNRYKKLXXXXXXXXXFYLVSIANLKTPAXXAKP

SEQ ID NO: 3191 - protein, 39 aa, Artificial Sequence
  GFR-binding peptide
  MOD_RES (34), (34): Xaa is C or S
  MOD_RES (12), (13), (14), (15), (16): Xaa is A or G
  MOD_RES (17), (18), (19), (20): Xaa is A or G or is absent
SRVVMNRHKRLXXXXXXXXXYYLVSTASLKTPAXTPKTV

SEQ ID NO: 3192 - protein, 34 aa, Artificial Sequence
  GFR-binding peptide
  MOD_RES (1), (34): Xaa is C or S
  MOD_RES (12), (13), (14), (15), (16): Xaa is A or G
  MOD_RES (17), (18), (19), (20): Xaa is A or G or is absent
XSRVIMQYNKLXXXXXXXXXLYLISIASLAQPVX

SEQ ID NO: 3193 - protein, 35 aa, Artificial Sequence
  GFR-binding peptide
ALHDELTYHYKLFIPKKRVIEKYLVSIPSLQVQTP

SEQ ID NO: 3194 - protein, 38 aa, Artificial Sequence
  GFR-binding peptide
  MOD_RES (34), (35): Xaa is C or S
  MOD_RES (12), (13), (14), (15), (16): Xaa is A or G
  MOD_RES (17), (18), (19), (20): Xaa is A or G or is absent
AKVVMNRHKRLXXXXXXXXXYYLVSTASLKTPAXXAKP

SEQ ID NO: 3195 - protein, 41 aa, Artificial Sequence
  GFR-binding peptide
  MOD_RES (1), (3), (36), (37): Xaa is C or S
  MOD_RES (14), (15), (16), (17), (18): Xaa is A or G
  MOD_RES (19), (20), (21), (22): Xaa is A or G or is absent
XKXSKVVMRYKKLXXXXXXXXXFYLISIANLDQPVXXPSAS

SEQ ID NO: 3196 - protein, 38 aa, Artificial Sequence
  GFR-binding peptide
  MOD_RES (1), (3): Xaa is C or S
  MOD_RES (16), (17), (18), (19), (20): Xaa is A or G
  MOD_RES (21), (22), (23), (24): Xaa is A or G or is absent
XKXALHDELTRYKKLXXXXXXXXXFYLVSIANLQVQTP

SEQ ID NO: 3197 - protein, 39 aa, Artificial Sequence
  GFR-binding peptide
  MOD_RES (2), (4): Xaa is C or S
  MOD_RES (17), (18), (19), (20), (21): Xaa is A or G
  MOD_RES (22), (23), (24), (25): Xaa is A or G or is absent
EXKXALHDELTYHYKLXXXXXXXXXKYLVSIPSLQVQTP

SEQ ID NO: 3198 - protein, 37 aa, Artificial Sequence
  GFR-binding peptide
  MOD_RES (1), (3), (35), (36): Xaa is C or S
XGXGEVVMERHKRLVVKDYEDYYLMSTASLETPVXXA

SEQ ID NO: 3199 - protein, 38 aa, Artificial Sequence
  GFR-binding peptide
  MOD_RES (2), (37), (38): Xaa is C or S
  MOD_RES (15), (16), (17), (18), (19): Xaa is A or G
  MOD_RES (20), (21), (22), (23): Xaa is A or G or is absent
GXEAVSMGEYHYKLXXXXXXXXXKYLVSIPSLKTPVXX

SEQ ID NO: 3200 - protein, 34 aa, Artificial Sequence
  GFR-binding peptide
  MOD_RES (2), (2): Xaa is C or S
  MOD_RES (13), (14), (15), (16), (17): Xaa is A or G
  MOD_RES (18), (19), (20), (21): Xaa is A or G or is absent
KXSRVIMYHYKLXXXXXXXXXKYLISIPSLAQPV

SEQ ID NO: 3201 - protein, 42 aa, Artificial Sequence
  GFR-binding peptide
  MOD_RES (1), (3), (37): Xaa is C or S
  MOD_RES (15), (16), (17), (18), (19): Xaa is A or G
  MOD_RES (20), (21), (22), (23): Xaa is A or G or is absent
XGXSRVVMNQYNKLXXXXXXXXXLYLVSIASLKTPAXTPKTV

SEQ ID NO: 3202 - protein, 36 aa, Artificial Sequence
  GFR-binding peptide
  MOD_RES (2), (33), (34): Xaa is C or S
KXSKVVMYHYKLVKPTRGVKYLISIPSLDQPVXXPS

SEQ ID NO: 3203 - protein, 38 aa, Artificial Sequence
  GFR-binding peptide
  MOD_RES (33), (34): Xaa is C or S
EAVSMGERYKKLTPVGMDDFYLVSIANLKTPVXXAKGV

SEQ ID NO: 3204 - protein, 33 aa, Artificial Sequence
  GFR-binding peptide
LHDELTYHYKLFIPKKRVIEKYLVSIPSLQVQT

SEQ ID NO: 3205 - protein, 40 aa, Artificial Sequence
  GFR-binding peptide
  MOD_RES (2), (4), (36), (37): Xaa is C or S
HXGXAKVVMNYHYKLIVNNSSDKYLVSIPSLKTPAXXAKP

SEQ ID NO: 3206 - protein, 33 aa, Artificial Sequence
  GFR-binding peptide
  MOD_RES (2), (33): Xaa is C or S
KXSRVIMRHKRLVKPKRGVYYLISTASLAQPVX

SEQ ID NO: 3207 - protein, 39 aa, Artificial Sequence
  GFR-binding peptide
  MOD_RES (34), (35): Xaa is C or S
  MOD_RES (12), (13), (14), (15), (16): Xaa is A or G
  MOD_RES (17), (18), (19), (20): Xaa is A or G or is absent
ARVVMNRYKKLXXXXXXXXXFYLVSIANLQTPAXXPKPV

SEQ ID NO: 3208 - protein, 34 aa, Artificial Sequence
  GFR-binding peptide
  MOD_RES (33), (34): Xaa is C or S
  MOD_RES (11), (12), (13), (14), (15): Xaa is A or G
  MOD_RES (16), (17), (18), (19): Xaa is A or G or is absent
RVVMNRYKKLXXXXXXXXXFYLVSIANLQTPAXX

SEQ ID NO: 3209 - protein, 40 aa, Artificial Sequence
  GFR-binding peptide
  MOD_RES (2), (4), (36), (37): Xaa is C or S
HXGXSRVVMNQYNKLIVNSSDDLYLVSIASLKTPAXXPKP

SEQ ID NO: 3210 - protein, 34 aa, Artificial Sequence
  GFR-binding peptide
  MOD_RES (33), (34): Xaa is C or S
EAVSMGEYHYKLTPVGMDDKYLVSIPSLKTPVXX

SEQ ID NO: 3211 - protein, 37 aa, Artificial Sequence
  GFR-binding peptide
  MOD_RES (1), (35): Xaa is C or S
  MOD_RES (13), (14), (15), (16), (17): Xaa is A or G
  MOD_RES (18), (19), (20), (21): Xaa is A or G or is absent
XSRVVMNQYNKLXXXXXXXXXLYLVSIASLKTPAXTP

SEQ ID NO: 3212 - protein, 40 aa, Artificial Sequence
  GFR-binding peptide
  MOD_RES (2), (39): Xaa is C or S
  MOD_RES (15), (16), (17), (18), (19): Xaa is A or G
  MOD_RES (20), (21), (22), (23): Xaa is A or G or is absent
KXALHDELTRYKKLXXXXXXXXXFYLVSIANLQVQTPRXQ

SEQ ID NO: 3213 - protein, 43 aa, Artificial Sequence
  GFR-binding peptide
  MOD_RES (2), (37), (38): Xaa is C or S
  MOD_RES (15), (16), (17), (18), (19): Xaa is A or G
  MOD_RES (20), (21), (22), (23): Xaa is A or G or is absent
GXEAVSMGEYHYKLXXXXXXXXXKYLVSIPSLKTPVXXAKGVK

SEQ ID NO: 3214 - protein, 43 aa, Artificial Sequence
  GFR-binding peptide
  MOD_RES (2), (4), (37), (38): Xaa is C or S
  MOD_RES (15), (16), (17), (18), (19): Xaa is A or G
  MOD_RES (20), (21), (22), (23): Xaa is A or G or is absent
SXKXSRVIMYHYKLXXXXXXXXXKYLISIPSLAQPVXXPAASA

SEQ ID NO: 3215 - protein, 39 aa, Artificial Sequence
  GFR-binding peptide
  MOD_RES (2), (34), (35): Xaa is C or S
GXAKVVMNRHKRLIVNNSSDYYLVSTASLKTPAXXAKPV

SEQ ID NO: 3216 - protein, 34 aa, Artificial Sequence
  GFR-binding peptide
  MOD_RES (34), (34): Xaa is C or S
  MOD_RES (12), (13), (14), (15), (16): Xaa is A or G
  MOD_RES (17), (18), (19), (20): Xaa is A or G or is absent
SRVVMNYHYKLXXXXXXXXXKYLVSIPSLKTPAX

SEQ ID NO: 3217 - protein, 41 aa, Artificial Sequence
  GFR-binding peptide
  MOD_RES (2), (35), (36): Xaa is C or S
  MOD_RES (13), (14), (15), (16), (17): Xaa is A or G
  MOD_RES (18), (19), (20), (21): Xaa is A or G or is absent
KXSKVIMRHKRLXXXXXXXXXYYLISTASLDQSVXXPSASA

SEQ ID NO: 3218 - protein, 35 aa, Artificial Sequence
  GFR-binding peptide
  MOD_RES (1), (34), (35): Xaa is C or S
XEAVSMGERYKKLTPVGMDDFYLVSIANLKTPVXX

SEQ ID NO: 3219 - protein, 40 aa, Artificial Sequence
  GFR-binding peptide
  MOD_RES (1), (3), (35), (36): Xaa is C or S
XGXAKVVMNRYKKLIVNNSSDFYLVSIANLKTPAXXAKPV

SEQ ID NO: 3220 - protein, 39 aa, Artificial Sequence
  GFR-binding peptide
  MOD_RES (35), (35): Xaa is C or S
  MOD_RES (11), (12), (13), (14), (15): Xaa is A or G
  MOD_RES (16), (17), (18), (19): Xaa is A or G or is absent
HDELTQYNKLXXXXXXXXXLYLVSIASLQVQTPRXQVNR

SEQ ID NO: 3221 - protein, 37 aa, Artificial Sequence
  GFR-binding peptide
  MOD_RES (2), (4), (36), (37): Xaa is C or S
HXGXAKVVMNRHKRLIVNNSSDYYLVSTASLKTPAXX

SEQ ID NO: 3222 - protein, 37 aa, Artificial Sequence
  GFR-binding peptide
  MOD_RES (2), (36), (37): Xaa is C or S
  MOD_RES (14), (15), (16), (17), (18): Xaa is A or G
  MOD_RES (19), (20), (21), (22): Xaa is A or G or is absent
GXGEVVMEQYNKLXXXXXXXXXLYLMSIASLETPVXX

SEQ ID NO: 3223 - protein, 37 aa, Artificial Sequence
  GFR-binding peptide
  MOD_RES (2), (4), (36), (37): Xaa is C or S
HXGXARVVMNRYKKLIVNSSDDFYLVSIANLQTPAXX

SEQ ID NO: 3224 - protein, 35 aa, Artificial Sequence
  GFR-binding peptide
LHDELTYHYKLFIPKKRVIEKYLVSIPSLQVQTPR

SEQ ID NO: 3225 - protein, 39 aa, Artificial Sequence
  GFR-binding peptide
  MOD_RES (2), (35), (36): Xaa is C or S
  MOD_RES (13), (14), (15), (16), (17): Xaa is A or G
  MOD_RES (18), (19), (20), (21): Xaa is A or G or is absent
KXSKVIMYHYKLXXXXXXXXXKYLISIPSLDQSVXXPSA

SEQ ID NO: 3226 - protein, 35 aa, Artificial Sequence
  GFR-binding peptide
  MOD_RES (2), (2): Xaa is C or S
  MOD_RES (14), (15), (16), (17), (18): Xaa is A or G
  MOD_RES (19), (20), (21), (22): Xaa is A or G or is absent
GXSRVVMNRHKRLXXXXXXXXXYYLVSTASLKTPA

SEQ ID NO: 3227 - protein, 41 aa, Artificial Sequence
  GFR-binding peptide
  MOD_RES (2), (4), (35), (36): Xaa is C or S
SXKXSKVVMYHYKLVKPTRGVKYLISIPSLDQPVXXPSASA

SEQ ID NO: 3228 - protein, 36 aa, Artificial Sequence
  GFR-binding peptide
  MOD_RES (2), (35), (36): Xaa is C or S
GXEAVSMGERHKRLTPVGMDDYYLVSTASLKTPVXX

SEQ ID NO: 3229 - protein, 43 aa, Artificial Sequence
  GFR-binding peptide
  MOD_RES (2), (4), (37), (38): Xaa is C or S
  MOD_RES (15), (16), (17), (18), (19): Xaa is A or G
  MOD_RES (20), (21), (22), (23): Xaa is A or G or is absent
SXKXSKVVMQYNKLXXXXXXXXXLYLISIASLDQPVXXPSASA

SEQ ID NO: 3230 - protein, 36 aa, Artificial Sequence
  GFR-binding peptide
  MOD_RES (31), (32): Xaa is C or S
EVVMERHKRLVVKDYEDYYLMSTASLETPVXXAKPI

SEQ ID NO: 3231 - protein, 42 aa, Artificial Sequence
  GFR-binding peptide
  MOD_RES (2), (4), (36), (37): Xaa is C or S
RXGXGEVVMDRYKKLVVKENEDFYLMSIANLETPVXXAKPIK

SEQ ID NO: 3232 - protein, 39 aa, Artificial Sequence
  GFR-binding peptide
  MOD_RES (1), (33), (34): Xaa is C or S
XGEVVMDYHYKLVVKENEDKYLMSIPSLETPVXXAKPIK

SEQ ID NO: 3233 - protein, 34 aa, Artificial Sequence
  GFR-binding peptide
  MOD_RES (33), (34): Xaa is C or S
  MOD_RES (11), (12), (13), (14), (15): Xaa is A or G
  MOD_RES (16), (17), (18), (19): Xaa is A or G or is absent
SKVVMRHKRLXXXXXXXXXYYLISTASLDQPVXX

SEQ ID NO: 3234 - protein, 34 aa, Artificial Sequence
  GFR-binding peptide
  MOD_RES (1), (1): Xaa is C or S
  MOD_RES (13), (14), (15), (16), (17): Xaa is A or G
  MOD_RES (18), (19), (20), (21): Xaa is A or G or is absent
XGEVVMDQYNKLXXXXXXXXXLYLMSIASLETPV

SEQ ID NO: 3235 - protein, 39 aa, Artificial Sequence
  GFR-binding peptide
  MOD_RES (1), (3), (36), (37): Xaa is C or S
  MOD_RES (14), (15), (16), (17), (18): Xaa is A or G
  MOD_RES (19), (20), (21), (22): Xaa is A or G or is absent
XKXSKVVMYHYKLXXXXXXXXXKYLISIPSLDQPVXXPS

SEQ ID NO: 3236 - protein, 39 aa, Artificial Sequence
  GFR-binding peptide
  MOD_RES (2), (4), (38): Xaa is C or S
  MOD_RES (16), (17), (18), (19), (20): Xaa is A or G
  MOD_RES (21), (22), (23), (24): Xaa is A or G or is absent
HXGXSRVVMNYHYKLXXXXXXXXXKYLVSIPSLKTPAXT

SEQ ID NO: 3237 - protein, 33 aa, Artificial Sequence
  GFR-binding peptide
  MOD_RES (32), (33): Xaa is C or S
ARVVMNRHKRLIVNSSDDYYLVSTASLQTPAXX

SEQ ID NO: 3238 - protein, 42 aa, Artificial Sequence
  GFR-binding peptide
  MOD_RES (2), (4), (38), (39): Xaa is C or S
  MOD_RES (16), (17), (18), (19), (20): Xaa is A or G
  MOD_RES (21), (22), (23), (24): Xaa is A or G or is absent
HXGXARVVMNQYNKLXXXXXXXXXLYLVSIASLQTPAXXPKP

SEQ ID NO: 3239 - protein, 42 aa, Artificial Sequence
  GFR-binding peptide
  MOD_RES (2), (39): Xaa is C or S
  MOD_RES (15), (16), (17), (18), (19): Xaa is A or G
  MOD_RES (20), (21), (22), (23): Xaa is A or G or is absent
KXALHDELTRHKRLXXXXXXXXXYYLVSTASLQVQTPRXQVN

SEQ ID NO: 3240 - protein, 35 aa, Artificial Sequence
  GFR-binding peptide
  MOD_RES (34), (35): Xaa is C or S
  MOD_RES (12), (13), (14), (15), (16): Xaa is A or G
  MOD_RES (17), (18), (19), (20): Xaa is A or G or is absent
AKVVMNYHYKLXXXXXXXXXKYLVSIPSLKTPAXX

SEQ ID NO: 3241 - protein, 33 aa, Artificial Sequence
  GFR-binding peptide
  MOD_RES (1), (32), (33): Xaa is C or S
XSKVVMQYNKLVKPTRGVLYLISIASLDQPVXX

SEQ ID NO: 3242 - protein, 31 aa, Artificial Sequence
  GFR-binding peptide
  MOD_RES (1), (1): Xaa is C or S
XSRVIMYHYKLVKPKRGVKYLISIPSLAQPV

SEQ ID NO: 3243 - protein, 38 aa, Artificial Sequence
  GFR-binding peptide
  MOD_RES (1), (32), (33): Xaa is C or S
XSKVIMRHKRLIKPTKGIYYLISTASLDQSVXXPSASA

SEQ ID NO: 3244 - protein, 33 aa, Artificial Sequence
  GFR-binding peptide
  MOD_RES (33), (33): Xaa is C or S
EAVSMGEQYNKLTPVGMDDLYLVSIASLKTPVX

SEQ ID NO: 3245 - protein, 36 aa, Artificial Sequence
  GFR-binding peptide
  MOD_RES (1), (3), (34), (35): Xaa is C or S
XKXSKVIMRHKRLIKPTKGIYYLISTASLDQSVXXP

SEQ ID NO: 3246 - protein, 41 aa, Artificial Sequence
  GFR-binding peptide
  MOD_RES (2), (35), (36): Xaa is C or S
  MOD_RES (13), (14), (15), (16), (17): Xaa is A or G
  MOD_RES (18), (19), (20), (21): Xaa is A or G or is absent
KXSRVIMRHKRLXXXXXXXXXYYLISTASLAQPVXXPAASA

SEQ ID NO: 3247 - protein, 40 aa, Artificial Sequence
  GFR-binding peptide
  MOD_RES (2), (4), (38), (39): Xaa is C or S
  MOD_RES (16), (17), (18), (19), (20): Xaa is A or G
  MOD_RES (21), (22), (23), (24): Xaa is A or G or is absent
RXGXGEVVMEYHYKLXXXXXXXXXKYLMSIPSLETPVXXA

SEQ ID NO: 3248 - protein, 33 aa, Artificial Sequence
  GFR-binding peptide
  MOD_RES (31), (32): Xaa is C or S
SKVVMQYNKLVKPTRGVLYLISIASLDQPVXXP

SEQ ID NO: 3249 - protein, 34 aa, Artificial Sequence
  GFR-binding peptide
  MOD_RES (2), (33), (34): Xaa is C or S
KXSRVIMRHKRLVKPKRGVYYLISTASLAQPVXX

SEQ ID NO: 3250 - protein, 33 aa, Artificial Sequence
  GFR-binding peptide
  MOD_RES (31), (32): Xaa is C or S
SRVIMRYKKLVKPKRGVFYLISIANLAQPVXXP

SEQ ID NO: 3251 - protein, 36 aa, Artificial Sequence
  GFR-binding peptide
  MOD_RES (34), (35): Xaa is C or S
  MOD_RES (12), (13), (14), (15), (16): Xaa is A or G
  MOD_RES (17), (18), (19), (20): Xaa is A or G or is absent
SRVVMNRHKRLXXXXXXXXXYYLVSTASLKTPAXXP

SEQ ID NO: 3252 - protein, 43 aa, Artificial Sequence
  GFR-binding peptide
  MOD_RES (2), (4), (41): Xaa is C or S
  MOD_RES (17), (18), (19), (20), (21): Xaa is A or G
  MOD_RES (22), (23), (24), (25): Xaa is A or G or is absent
EXKXALHDELTQYNKLXXXXXXXXXLYLVSIASLQVQTPRXQV

SEQ ID NO: 3253 - protein, 32 aa, Artificial Sequence
  GFR-binding peptide
  MOD_RES (1), (1): Xaa is C or S
XAKVVMNYHYKLIVNNSSDKYLVSIPSLKTPA

SEQ ID NO: 3254 - protein, 35 aa, Artificial Sequence
  GFR-binding peptide
  MOD_RES (31), (32): Xaa is C or S
EVVMDQYNKLVVKENEDLYLMSIASLETPVXXAKP

SEQ ID NO: 3255 - protein, 41 aa, Artificial Sequence
  GFR-binding peptide
  MOD_RES (1), (3), (37), (38): Xaa is C or S
  MOD_RES (15), (16), (17), (18), (19): Xaa is A or G
  MOD_RES (20), (21), (22), (23): Xaa is A or G or is absent
XGXGEVVMDYHYKLXXXXXXXXXKYLMSIPSLETPVXXAKP

SEQ ID NO: 3256 - protein, 32 aa, Artificial Sequence
  GFR-binding peptide
  MOD_RES (2), (2): Xaa is C or S
KXSRVIMQYNKLVKPKRGVLYLISIASLAQPV

SEQ ID NO: 3257 - protein, 35 aa, Artificial Sequence
  GFR-binding peptide
  MOD_RES (1), (35): Xaa is C or S
  MOD_RES (13), (14), (15), (16), (17): Xaa is A or G
  MOD_RES (18), (19), (20), (21): Xaa is A or G or is absent
XAKVVMNRYKKLXXXXXXXXXFYLVSIANLKTPAX

SEQ ID NO: 3258 - protein, 37 aa, Artificial Sequence
  GFR-binding peptide
  MOD_RES (2), (4), (37): Xaa is C or S
  MOD_RES (15), (16), (17), (18), (19): Xaa is A or G
  MOD_RES (20), (21), (22), (23): Xaa is A or G or is absent
SXKXSRVIMYHYKLXXXXXXXXXKYLISIPSLAQPVX

SEQ ID NO: 3259 - protein, 39 aa, Artificial Sequence
  GFR-binding peptide
  MOD_RES (1), (3), (36), (37): Xaa is C or S
  MOD_RES (14), (15), (16), (17), (18): Xaa is A or G
  MOD_RES (19), (20), (21), (22): Xaa is A or G or is absent
XKXSRVIMQYNKLXXXXXXXXXLYLISIASLAQPVXXPA

SEQ ID NO: 3260 - protein, 38 aa, Artificial Sequence
  GFR-binding peptide
  MOD_RES (1), (3), (35), (36): Xaa is C or S
XGXSRVVMNRYKKLIVNSSDDFYLVSIANLKTPAXXPK

SEQ ID NO: 3261 - protein, 36 aa, Artificial Sequence
  GFR-binding peptide
  MOD_RES (2), (4), (36): Xaa is C or S
HXGXARVVMNQYNKLIVNSSDDLYLVSIASLQTPAX

SEQ ID NO: 3262 - protein, 32 aa, Artificial Sequence
  GFR-binding peptide
  MOD_RES (2), (2): Xaa is C or S
KXSKVIMRHKRLIKPTKGIYYLISTASLDQSV

SEQ ID NO: 3263 - protein, 36 aa, Artificial Sequence
  GFR-binding peptide
  MOD_RES (1), (33), (34): Xaa is C or S
XAKVVMNYHYKLIVNNSSDKYLVSIPSLKTPAXXAK

SEQ ID NO: 3264 - protein, 32 aa, Artificial Sequence
  GFR-binding peptide
  MOD_RES (11), (12), (13), (14), (15): Xaa is A or G
  MOD_RES (16), (17), (18), (19): Xaa is A or G or is absent
RVVMNQYNKLXXXXXXXXXLYLVSIASLQTPA

SEQ ID NO: 3265 - protein, 37 aa, Artificial Sequence
  GFR-binding peptide
  MOD_RES (1), (3), (37): Xaa is C or S
  MOD_RES (15), (16), (17), (18), (19): Xaa is A or G
  MOD_RES (20), (21), (22), (23): Xaa is A or G or is absent
XGXAKVVMNRHKRLXXXXXXXXXYYLVSTASLKTPAX

SEQ ID NO: 3266 - protein, 37 aa, Artificial Sequence
  GFR-binding peptide
  MOD_RES (35), (35): Xaa is C or S
  MOD_RES (11), (12), (13), (14), (15): Xaa is A or G
  MOD_RES (16), (17), (18), (19): Xaa is A or G or is absent
HDELTRHKRLXXXXXXXXXYYLVSTASLQVQTPRXQV

SEQ ID NO: 3267 - protein, 40 aa, Artificial Sequence
  GFR-binding peptide
  MOD_RES (1), (35), (36): Xaa is C or S
  MOD_RES (13), (14), (15), (16), (17): Xaa is A or G
  MOD_RES (18), (19), (20), (21): Xaa is A or G or is absent
XAKVVMNRHKRLXXXXXXXXXYYLVSTASLKTPAXXAKPV

SEQ ID NO: 3268 - protein, 30 aa, Artificial Sequence
  GFR-binding peptide
EVVMERHKRLVVKDYEDYYLMSTASLETPV

SEQ ID NO: 3269 - protein, 42 aa, Artificial Sequence
  GFR-binding peptide
  MOD_RES (2), (4), (36), (37): Xaa is C or S
HXGXSRVVMNQYNKLIVNSSDDLYLVSIASLKTPAXXPKPVY

SEQ ID NO: 3270 - protein, 35 aa, Artificial Sequence
  GFR-binding peptide
  MOD_RES (2), (4): Xaa is C or S
RXGXGEVVMDYHYKLVVKENEDKYLMSIPSLETPV

SEQ ID NO: 3271 - protein, 42 aa, Artificial Sequence
  GFR-binding peptide
  MOD_RES (1), (3), (37), (38): Xaa is C or S
  MOD_RES (15), (16), (17), (18), (19): Xaa is A or G
  MOD_RES (20), (21), (22), (23): Xaa is A or G or is absent
XGXGEVVMDQYNKLXXXXXXXXXLYLMSIASLETPVXXAKPI

SEQ ID NO: 3272 - protein, 42 aa, Artificial Sequence
  GFR-binding peptide
  MOD_RES (2), (4), (36), (37): Xaa is C or S
RXGXGEVVMERYKKLVVKDYEDFYLMSIANLETPVXXAKPIS

SEQ ID NO: 3273 - protein, 37 aa, Artificial Sequence
  GFR-binding peptide
  MOD_RES (33), (33): Xaa is C or S
  MOD_RES (11), (12), (13), (14), (15): Xaa is A or G
  MOD_RES (16), (17), (18), (19): Xaa is A or G or is absent
RVVMNYHYKLXXXXXXXXXKYLVSIPSLKTPAXTPKT

SEQ ID NO: 3274 - protein, 38 aa, Artificial Sequence
  GFR-binding peptide
  MOD_RES (1), (3), (37), (38): Xaa is C or S
  MOD_RES (15), (16), (17), (18), (19): Xaa is A or G
  MOD_RES (20), (21), (22), (23): Xaa is A or G or is absent
XGXSRVVMNRYKKLXXXXXXXXXFYLVSIANLKTPAXX

SEQ ID NO: 3275 - protein, 33 aa, Artificial Sequence
  GFR-binding peptide
  MOD_RES (12), (13), (14), (15), (16): Xaa is A or G
  MOD_RES (17), (18), (19), (20): Xaa is A or G or is absent
AKVVMNRHKRLXXXXXXXXXYYLVSTASLKTPA

SEQ ID NO: 3276 - protein, 35 aa, Artificial Sequence
  GFR-binding peptide
  MOD_RES (33), (34): Xaa is C or S
  MOD_RES (11), (12), (13), (14), (15): Xaa is A or G
  MOD_RES (16), (17), (18), (19): Xaa is A or G or is absent
RVVMNQYNKLXXXXXXXXXLYLVSIASLQTPAXXP

SEQ ID NO: 3277 - protein, 39 aa, Artificial Sequence
  GFR-binding peptide
  MOD_RES (1), (33), (34): Xaa is C or S
XGEVVMEYHYKLVVKDYEDKYLMSIPSLETPVXXAKPIS

SEQ ID NO: 3278 - protein, 41 aa, Artificial Sequence
  GFR-binding peptide
  MOD_RES (2), (35), (36): Xaa is C or S
GXEAVSMGERYKKLTPVGMDDFYLVSIANLKTPVXXAKGVK

SEQ ID NO: 3279 - protein, 40 aa, Artificial Sequence
  GFR-binding peptide
  MOD_RES (2), (36), (37): Xaa is C or S
  MOD_RES (14), (15), (16), (17), (18): Xaa is A or G
  MOD_RES (19), (20), (21), (22): Xaa is A or G or is absent
GXARVVMNRHKRLXXXXXXXXXYYLVSTASLQTPAXXPKP

SEQ ID NO: 3280 - protein, 32 aa, Artificial Sequence
  GFR-binding peptide
  MOD_RES (1), (1): Xaa is C or S
XSRVVMNRYKKLIVNSSDDFYLVSIANLKTPA

SEQ ID NO: 3281 - protein, 33 aa, Artificial Sequence
  GFR-binding peptide
  MOD_RES (2), (33): Xaa is C or S
KXSRVIMRYKKLVKPKRGVFYLISIANLAQPVX

SEQ ID NO: 3282 - protein, 41 aa, Artificial Sequence
  GFR-binding peptide
  MOD_RES (2), (35), (36): Xaa is C or S
  MOD_RES (13), (14), (15), (16), (17): Xaa is A or G
  MOD_RES (18), (19), (20), (21): Xaa is A or G or is absent
KXSKVVMRHKRLXXXXXXXXXYYLISTASLDQPVXXPSASA

SEQ ID NO: 3283 - protein, 35 aa, Artificial Sequence
  GFR-binding peptide
  MOD_RES (1), (35): Xaa is C or S
  MOD_RES (13), (14), (15), (16), (17): Xaa is A or G
  MOD_RES (18), (19), (20), (21): Xaa is A or G or is absent
XARVVMNRYKKLXXXXXXXXXFYLVSIANLQTPAX

SEQ ID NO: 3284 - protein, 34 aa, Artificial Sequence
  GFR-binding peptide
  MOD_RES (31), (32): Xaa is C or S
SKVVMRHKRLVKPTRGVYYLISTASLDQPVXXPS

SEQ ID NO: 3285 - protein, 37 aa, Artificial Sequence
  GFR-binding peptide
  MOD_RES (1), (3), (36), (37): Xaa is C or S
  MOD_RES (14), (15), (16), (17), (18): Xaa is A or G
  MOD_RES (19), (20), (21), (22): Xaa is A or G or is absent
XKXSRVIMRHKRLXXXXXXXXXYYLISTASLAQPVXX

SEQ ID NO: 3286 - protein, 35 aa, Artificial Sequence
  GFR-binding peptide
  MOD_RES (1), (3), (34), (35): Xaa is C or S
XKXSRVIMYHYKLVKPKRGVKYLISIPSLAQPVXX

SEQ ID NO: 3287 - protein, 39 aa, Artificial Sequence
  GFR-binding peptide
  MOD_RES (1), (35), (36): Xaa is C or S
  MOD_RES (13), (14), (15), (16), (17): Xaa is A or G
  MOD_RES (18), (19), (20), (21): Xaa is A or G or is absent
XAKVVMNRHKRLXXXXXXXXXYYLVSTASLKTPAXXAKP

SEQ ID NO: 3288 - protein, 36 aa, Artificial Sequence
  GFR-binding peptide
  MOD_RES (2), (4), (36): Xaa is C or S
HXGXSRVVMNQYNKLIVNSSDDLYLVSIASLKTPAX

SEQ ID NO: 3289 - protein, 37 aa, Artificial Sequence
  GFR-binding peptide
  MOD_RES (1), (33), (34): Xaa is C or S
XARVVMNRHKRLIVNSSDDYYLVSTASLQTPAXXPKP

SEQ ID NO: 3290 - protein, 42 aa, Artificial Sequence
  GFR-binding peptide
  MOD_RES (2), (36), (37): Xaa is C or S
  MOD_RES (14), (15), (16), (17), (18): Xaa is A or G
  MOD_RES (19), (20), (21), (22): Xaa is A or G or is absent
GXARVVMNRHKRLXXXXXXXXXYYLVSTASLQTPAXXPKPVT

SEQ ID NO: 3291 - protein, 32 aa, Artificial Sequence
  GFR-binding peptide
  MOD_RES (1), (1): Xaa is C or S
XSRVVMNYHYKLIVNSSDDKYLVSIPSLKTPA

SEQ ID NO: 3292 - protein, 41 aa, Artificial Sequence
  GFR-binding peptide
  MOD_RES (1), (3), (36), (37): Xaa is C or S
  MOD_RES (14), (15), (16), (17), (18): Xaa is A or G
  MOD_RES (19), (20), (21), (22): Xaa is A or G or is absent
XKXSKVIMRYKKLXXXXXXXXXFYLISIANLDQSVXXPSAS

SEQ ID NO: 3293 - protein, 42 aa, Artificial Sequence
  GFR-binding peptide
  MOD_RES (2), (4), (38), (39): Xaa is C or S
  MOD_RES (16), (17), (18), (19), (20): Xaa is A or G
  MOD_RES (21), (22), (23), (24): Xaa is A or G or is absent
RXGXGEVVMDRHKRLXXXXXXXXXYYLMSTASLETPVXXAKP

SEQ ID NO: 3294 - protein, 33 aa, Artificial Sequence
  GFR-binding peptide
  MOD_RES (2), (33): Xaa is C or S
KXSRVIMYHYKLVKPKRGVKYLISIPSLAQPVX

SEQ ID NO: 3295 - protein, 35 aa, Artificial Sequence
  GFR-binding peptide
  MOD_RES (1), (1): Xaa is C or S
XALHDELTQYNKLFIPKKRVIELYLVSIASLQVQT

SEQ ID NO: 3296 - protein, 36 aa, Artificial Sequence
  GFR-binding peptide
  MOD_RES (1), (35), (36): Xaa is C or S
  MOD_RES (13), (14), (15), (16), (17): Xaa is A or G
  MOD_RES (18), (19), (20), (21): Xaa is A or G or is absent
XAKVVMNYHYKLXXXXXXXXXKYLVSIPSLKTPAXX

SEQ ID NO: 3297 - protein, 37 aa, Artificial Sequence
  GFR-binding peptide
  MOD_RES (2), (4): Xaa is C or S
  MOD_RES (16), (17), (18), (19), (20): Xaa is A or G
  MOD_RES (21), (22), (23), (24): Xaa is A or G or is absent
RXGXGEVVMDQYNKLXXXXXXXXXLYLMSIASLETPV

SEQ ID NO: 3298 - protein, 39 aa, Artificial Sequence
  GFR-binding peptide
  MOD_RES (1), (36), (37): Xaa is C or S
  MOD_RES (14), (15), (16), (17), (18): Xaa is A or G
  MOD_RES (19), (20), (21), (22): Xaa is A or G or is absent
XEAVSMGEQYNKLXXXXXXXXXLYLVSIASLKTPVXXAK

SEQ ID NO: 3299 - protein, 35 aa, Artificial Sequence
  GFR-binding peptide
  MOD_RES (2), (2): Xaa is C or S
  MOD_RES (14), (15), (16), (17), (18): Xaa is A or G
  MOD_RES (19), (20), (21), (22): Xaa is A or G or is absent
GXSRVVMNRYKKLXXXXXXXXXFYLVSIANLKTPA

SEQ ID NO: 3300 - protein, 41 aa, Artificial Sequence
  GFR-binding peptide
  MOD_RES (1), (3), (37), (38): Xaa is C or S
  MOD_RES (15), (16), (17), (18), (19): Xaa is A or G
  MOD_RES (20), (21), (22), (23): Xaa is A or G or is absent
XGXSRVVMNRHKRLXXXXXXXXXYYLVSTASLKTPAXXPKP

SEQ ID NO: 3301 - protein, 36 aa, Artificial Sequence
  GFR-binding peptide
  MOD_RES (2), (34), (35): Xaa is C or S
GXARVVMNQYNKLIVNSSDDLYLVSIASLQTPAXXP

SEQ ID NO: 3302 - protein, 37 aa, Artificial Sequence
  GFR-binding peptide
  MOD_RES (31), (31): Xaa is C or S
RVVMNQYNKLIVNSSDDLYLVSIASLKTPAXTPKTVH

SEQ ID NO: 3303 - protein, 43 aa, Artificial Sequence
  GFR-binding peptide
  MOD_RES (2), (39): Xaa is C or S
KXALHDELTQYNKLFIPKKRVIELYLVSIASLQVQTPRXQVNR

SEQ ID NO: 3304 - protein, 32 aa, Artificial Sequence
  GFR-binding peptide
  MOD_RES (11), (12), (13), (14), (15): Xaa is A or G
  MOD_RES (16), (17), (18), (19): Xaa is A or G or is absent
EVVMDRHKRLXXXXXXXXXYYLMSTASLETPV

SEQ ID NO: 3305 - protein, 31 aa, Artificial Sequence
  GFR-binding peptide
  MOD_RES (31), (31): Xaa is C or S
EVVMEYHYKLVVKDYEDKYLMSIPSLETPVX

SEQ ID NO: 3306 - protein, 36 aa, Artificial Sequence
  GFR-binding peptide
  MOD_RES (1), (3), (34), (35): Xaa is C or S
XKXSKVVMRHKRLVKPTRGVYYLISTASLDQPVXXP

SEQ ID NO: 3307 - protein, 41 aa, Artificial Sequence
  GFR-binding peptide
  MOD_RES (35), (36): Xaa is C or S
  MOD_RES (13), (14), (15), (16), (17): Xaa is A or G
  MOD_RES (18), (19), (20), (21): Xaa is A or G or is absent
EAVSMGEQYNKLXXXXXXXXXLYLVSIASLKTPVXXAKGVK

SEQ ID NO: 3308 - protein, 41 aa, Artificial Sequence
  GFR-binding peptide
  MOD_RES (2), (4), (38), (39): Xaa is C or S
  MOD_RES (16), (17), (18), (19), (20): Xaa is A or G
  MOD_RES (21), (22), (23), (24): Xaa is A or G or is absent
HXGXARVVMNYHYKLXXXXXXXXXKYLVSIPSLQTPAXXPK

SEQ ID NO: 3309 - protein, 34 aa, Artificial Sequence
  GFR-binding peptide
  MOD_RES (1), (34): Xaa is C or S
XEAVSMGERHKRLTPVGMDDYYLVSTASLKTPVX

SEQ ID NO: 3310 - protein, 38 aa, Artificial Sequence
  GFR-binding peptide
  MOD_RES (1), (3): Xaa is C or S
XKXALHDELTRHKRLFIPKKRVIEYYLVSTASLQVQTP

SEQ ID NO: 3311 - protein, 37 aa, Artificial Sequence
  GFR-binding peptide
  MOD_RES (31), (32): Xaa is C or S
RVVMNRHKRLIVNSSDDYYLVSTASLKTPAXXPKPVY

SEQ ID NO: 3312 - protein, 40 aa, Artificial Sequence
  GFR-binding peptide
  MOD_RES (1), (35), (36): Xaa is C or S
  MOD_RES (13), (14), (15), (16), (17): Xaa is A or G
  MOD_RES (18), (19), (20), (21): Xaa is A or G or is absent
XSRVVMNYHYKLXXXXXXXXXKYLVSIPSLKTPAXXPKPV

SEQ ID NO: 3313 - protein, 38 aa, Artificial Sequence
  GFR-binding peptide
  MOD_RES (2), (4): Xaa is C or S
EXKXALHDELTRYKKLFIPKKRVIEFYLVSIANLQVQT

SEQ ID NO: 3314 - protein, 43 aa, Artificial Sequence
  GFR-binding peptide
  MOD_RES (1), (3), (37), (38): Xaa is C or S
  MOD_RES (15), (16), (17), (18), (19): Xaa is A or G
  MOD_RES (20), (21), (22), (23): Xaa is A or G or is absent
XGXARVVMNRHKRLXXXXXXXXXYYLVSTASLQTPAXXPKPVT

SEQ ID NO: 3315 - protein, 37 aa, Artificial Sequence
  GFR-binding peptide
  MOD_RES (32), (33): Xaa is C or S
AKVVMNYHYKLIVNNSSDKYLVSIPSLKTPAXXAKPV

SEQ ID NO: 3316 - protein, 34 aa, Artificial Sequence
  GFR-binding peptide
  MOD_RES (2), (2): Xaa is C or S
GXEAVSMGERYKKLTPVGMDDFYLVSIANLKTPV

SEQ ID NO: 3317 - protein, 43 aa, Artificial Sequence
  GFR-binding peptide
  MOD_RES (1), (3), (37): Xaa is C or S
  MOD_RES (15), (16), (17), (18), (19): Xaa is A or G
  MOD_RES (20), (21), (22), (23): Xaa is A or G or is absent
XGXSRVVMNRYKKLXXXXXXXXXFYLVSIANLKTPAXTPKTVH

SEQ ID NO: 3318 - protein, 43 aa, Artificial Sequence
  GFR-binding peptide
  MOD_RES (1), (3), (40): Xaa is C or S
  MOD_RES (16), (17), (18), (19), (20): Xaa is A or G
  MOD_RES (21), (22), (23), (24): Xaa is A or G or is absent
XKXALHDELTRYKKLXXXXXXXXXFYLVSIANLQVQTPRXQVN

SEQ ID NO: 3319 - protein, 33 aa, Artificial Sequence
  GFR-binding peptide
  MOD_RES (1), (1): Xaa is C or S
XEAVSMGERHKRLTPVGMDDYYLVSTASLKTPV

SEQ ID NO: 3320 - protein, 30 aa, Artificial Sequence
  GFR-binding peptide
SKVIMRHKRLIKPTKGIYYLISTASLDQSV

SEQ ID NO: 3321 - protein, 40 aa, Artificial Sequence
  GFR-binding peptide
  MOD_RES (1), (3), (37), (38): Xaa is C or S
  MOD_RES (15), (16), (17), (18), (19): Xaa is A or G
  MOD_RES (20), (21), (22), (23): Xaa is A or G or is absent
XGXGEVVMDRYKKLXXXXXXXXXFYLMSIANLETPVXXAK

SEQ ID NO: 3322 - protein, 37 aa, Artificial Sequence
  GFR-binding peptide
  MOD_RES (1), (3), (37): Xaa is C or S
  MOD_RES (15), (16), (17), (18), (19): Xaa is A or G
  MOD_RES (20), (21), (22), (23): Xaa is A or G or is absent
XGXSRVVMNQYNKLXXXXXXXXXLYLVSIASLKTPAX

SEQ ID NO: 3323 - protein, 36 aa, Artificial Sequence
  GFR-binding peptide
  MOD_RES (2), (4), (36): Xaa is C or S
HXGXAKVVMNQYNKLIVNNSSDLYLVSIASLKTPAX

SEQ ID NO: 3324 - protein, 38 aa, Artificial Sequence
  GFR-binding peptide
  MOD_RES (2), (36), (37): Xaa is C or S
  MOD_RES (14), (15), (16), (17), (18): Xaa is A or G
  MOD_RES (19), (20), (21), (22): Xaa is A or G or is absent
GXGEVVMEYHYKLXXXXXXXXXKYLMSIPSLETPVXXA

SEQ ID NO: 3325 - protein, 40 aa, Artificial Sequence
  GFR-binding peptide
  MOD_RES (1), (38): Xaa is C or S
XALHDELTQYNKLFIPKKRVIELYLVSIASLQVQTPRXQV

SEQ ID NO: 3326 - protein, 39 aa, Artificial Sequence
  GFR-binding peptide
  MOD_RES (33), (34): Xaa is C or S
EAVSMGEQYNKLTPVGMDDLYLVSIASLKTPVXXAKGVK

SEQ ID NO: 3327 - protein, 40 aa, Artificial Sequence
  GFR-binding peptide
  MOD_RES (1), (3), (36), (37): Xaa is C or S
  MOD_RES (14), (15), (16), (17), (18): Xaa is A or G
  MOD_RES (19), (20), (21), (22): Xaa is A or G or is absent
XKXSRVIMYHYKLXXXXXXXXXKYLISIPSLAQPVXXPAA

SEQ ID NO: 3328 - protein, 38 aa, Artificial Sequence
  GFR-binding peptide
  MOD_RES (34), (34): Xaa is C or S
  MOD_RES (12), (13), (14), (15), (16): Xaa is A or G
  MOD_RES (17), (18), (19), (20): Xaa is A or G or is absent
SRVVMNYHYKLXXXXXXXXXKYLVSIPSLKTPAXTPKT

SEQ ID NO: 3329 - protein, 35 aa, Artificial Sequence
  GFR-binding peptide
  MOD_RES (2), (4): Xaa is C or S
RXGXGEVVMEYHYKLVVKDYEDKYLMSIPSLETPV

SEQ ID NO: 3330 - protein, 39 aa, Artificial Sequence
  GFR-binding peptide
  MOD_RES (1), (33), (34): Xaa is C or S
XGEVVMERYKKLVVKDYEDFYLMSIANLETPVXXAKPIS

SEQ ID NO: 3331 - protein, 40 aa, Artificial Sequence
  GFR-binding peptide
  MOD_RES (2), (4), (37), (38): Xaa is C or S
  MOD_RES (15), (16), (17), (18), (19): Xaa is A or G
  MOD_RES (20), (21), (22), (23): Xaa is A or G or is absent
SXKXSKVIMYHYKLXXXXXXXXXKYLISIPSLDQSVXXPS

SEQ ID NO: 3332 - protein, 38 aa, Artificial Sequence
  GFR-binding peptide
  MOD_RES (1), (3), (36), (37): Xaa is C or S
  MOD_RES (14), (15), (16), (17), (18): Xaa is A or G
  MOD_RES (19), (20), (21), (22): Xaa is A or G or is absent
XKXSKVVMQYNKLXXXXXXXXXLYLISIASLDQPVXXP

SEQ ID NO: 3333 - protein, 41 aa, Artificial Sequence
  GFR-binding peptide
  MOD_RES (2), (4), (35), (36): Xaa is C or S
SXKXSKVIMRHKRLIKPTKGIYYLISTASLDQSVXXPSASA

SEQ ID NO: 3334 - protein, 39 aa, Artificial Sequence
  GFR-binding peptide
  MOD_RES (2), (33), (34): Xaa is C or S
KXSRVIMRHKRLVKPKRGVYYLISTASLAQPVXXPAASA

SEQ ID NO: 3335 - protein, 43 aa, Artificial Sequence
  GFR-binding peptide
  MOD_RES (2), (4), (41): Xaa is C or S
  MOD_RES (17), (18), (19), (20), (21): Xaa is A or G
  MOD_RES (22), (23), (24), (25): Xaa is A or G or is absent
EXKXALHDELTYHYKLXXXXXXXXXKYLVSIPSLQVQTPRXQV

SEQ ID NO: 3336 - protein, 41 aa, Artificial Sequence
  GFR-binding peptide
  MOD_RES (35), (36): Xaa is C or S
  MOD_RES (13), (14), (15), (16), (17): Xaa is A or G
  MOD_RES (18), (19), (20), (21): Xaa is A or G or is absent
EAVSMGERHKRLXXXXXXXXXYYLVSTASLKTPVXXAKGVK

SEQ ID NO: 3337 - protein, 36 aa, Artificial Sequence
  GFR-binding peptide
  MOD_RES (2), (36): Xaa is C or S
  MOD_RES (14), (15), (16), (17), (18): Xaa is A or G
  MOD_RES (19), (20), (21), (22): Xaa is A or G or is absent
GXARVVMNRHKRLXXXXXXXXXYYLVSTASLQTPAX

SEQ ID NO: 3338 - protein, 41 aa, Artificial Sequence
  GFR-binding peptide
  MOD_RES (2), (4), (38): Xaa is C or S
  MOD_RES (16), (17), (18), (19), (20): Xaa is A or G
  MOD_RES (21), (22), (23), (24): Xaa is A or G or is absent
HXGXSRVVMNRHKRLXXXXXXXXXYYLVSTASLKTPAXTPK

SEQ ID NO: 3339 - protein, 37 aa, Artificial Sequence
  GFR-binding peptide
  MOD_RES (1), (32), (33): Xaa is C or S
XSKVIMQYNKLIKPTKGILYLISIASLDQSVXXPSAS

SEQ ID NO: 3340 - protein, 37 aa, Artificial Sequence
  GFR-binding peptide
  MOD_RES (2), (4), (37): Xaa is C or S
  MOD_RES (15), (16), (17), (18), (19): Xaa is A or G
  MOD_RES (20), (21), (22), (23): Xaa is A or G or is absent
SXKXSKVVMYHYKLXXXXXXXXXKYLISIPSLDQPVX

SEQ ID NO: 3341 - protein, 37 aa, Artificial Sequence
  GFR-binding peptide
  MOD_RES (2), (35), (36): Xaa is C or S
  MOD_RES (13), (14), (15), (16), (17): Xaa is A or G
  MOD_RES (18), (19), (20), (21): Xaa is A or G or is absent
KXSKVVMRYKKLXXXXXXXXXFYLISIANLDQPVXXP

SEQ ID NO: 3342 - protein, 37 aa, Artificial Sequence
  GFR-binding peptide
  MOD_RES (1), (32), (33): Xaa is C or S
XSKVIMRYKKLIKPTKGIFYLISIANLDQSVXXPSAS

SEQ ID NO: 3343 - protein, 40 aa, Artificial Sequence
  GFR-binding peptide
  MOD_RES (2), (4), (36), (37): Xaa is C or S
RXGXGEVVMDRHKRLVVKENEDYYLMSTASLETPVXXAKP

SEQ ID NO: 3344 - protein, 41 aa, Artificial Sequence
  GFR-binding peptide
  MOD_RES (1), (35), (36): Xaa is C or S
  MOD_RES (13), (14), (15), (16), (17): Xaa is A or G
  MOD_RES (18), (19), (20), (21): Xaa is A or G or is absent
XSRVVMNQYNKLXXXXXXXXXLYLVSIASLKTPAXXPKPVY

SEQ ID NO: 3345 - protein, 40 aa, Artificial Sequence
  GFR-binding peptide
  MOD_RES (37), (37): Xaa is C or S
  MOD_RES (13), (14), (15), (16), (17): Xaa is A or G
  MOD_RES (18), (19), (20), (21): Xaa is A or G or is absent
ALHDELTRHKRLXXXXXXXXXYYLVSTASLQVQTPRXQVN

SEQ ID NO: 3346 - protein, 40 aa, Artificial Sequence
  GFR-binding peptide
  MOD_RES (1), (38): Xaa is C or S
XALHDELTRHKRLFIPKKRVIEYYLVSTASLQVQTPRXQV

SEQ ID NO: 3347 - protein, 36 aa, Artificial Sequence
  GFR-binding peptide
  MOD_RES (2), (4): Xaa is C or S
  MOD_RES (15), (16), (17), (18), (19): Xaa is A or G
  MOD_RES (20), (21), (22), (23): Xaa is A or G or is absent
SXKXSRVIMQYNKLXXXXXXXXXLYLISIASLAQPV

SEQ ID NO: 3348 - protein, 42 aa, Artificial Sequence
  GFR-binding peptide
  MOD_RES (2), (4), (38), (39): Xaa is C or S
  MOD_RES (16), (17), (18), (19), (20): Xaa is A or G
  MOD_RES (21), (22), (23), (24): Xaa is A or G or is absent
HXGXSRVVMNRYKKLXXXXXXXXXFYLVSIANLKTPAXXPKP

SEQ ID NO: 3349 - protein, 35 aa, Artificial Sequence
  GFR-binding peptide
  MOD_RES (1), (3), (34), (35): Xaa is C or S
XKXSKVIMRHKRLIKPTKGIYYLISTASLDQSVXX

SEQ ID NO: 3350 - protein, 37 aa, Artificial Sequence
  GFR-binding peptide
  MOD_RES (2), (35), (36): Xaa is C or S
  MOD_RES (13), (14), (15), (16), (17): Xaa is A or G
  MOD_RES (18), (19), (20), (21): Xaa is A or G or is absent
KXSKVVMQYNKLXXXXXXXXXLYLISIASLDQPVXXP

SEQ ID NO: 3351 - protein, 40 aa, Artificial Sequence
  GFR-binding peptide
  MOD_RES (34), (35): Xaa is C or S
  MOD_RES (12), (13), (14), (15), (16): Xaa is A or G
  MOD_RES (17), (18), (19), (20): Xaa is A or G or is absent
SRVVMNRHKRLXXXXXXXXXYYLVSTASLKTPAXXPKPVY

SEQ ID NO: 3352 - protein, 33 aa, Artificial Sequence
  GFR-binding peptide
  MOD_RES (33), (33): Xaa is C or S
  MOD_RES (11), (12), (13), (14), (15): Xaa is A or G
  MOD_RES (16), (17), (18), (19): Xaa is A or G or is absent
SKVIMRHKRLXXXXXXXXXYYLISTASLDQSVX

SEQ ID NO: 3353 - protein, 36 aa, Artificial Sequence
  GFR-binding peptide
  MOD_RES (2), (34), (35): Xaa is C or S
GXARVVMNYHYKLIVNSSDDKYLVSIPSLQTPAXXP

SEQ ID NO: 3354 - protein, 35 aa, Artificial Sequence
  GFR-binding peptide
  MOD_RES (2), (4): Xaa is C or S
HXGXAKVVMNQYNKLIVNNSSDLYLVSIASLKTPA

SEQ ID NO: 3355 - protein, 38 aa, Artificial Sequence
  GFR-binding peptide
  MOD_RES (2), (4), (37), (38): Xaa is C or S
  MOD_RES (15), (16), (17), (18), (19): Xaa is A or G
  MOD_RES (20), (21), (22), (23): Xaa is A or G or is absent
SXKXSKVIMYHYKLXXXXXXXXXKYLISIPSLDQSVXX

SEQ ID NO: 3356 - protein, 43 aa, Artificial Sequence
  GFR-binding peptide
  MOD_RES (1), (3), (37), (38): Xaa is C or S
  MOD_RES (15), (16), (17), (18), (19): Xaa is A or G
  MOD_RES (20), (21), (22), (23): Xaa is A or G or is absent
XGXGEVVMDRYKKLXXXXXXXXXFYLMSIANLETPVXXAKPIK

SEQ ID NO: 3357 - protein, 31 aa, Artificial Sequence
  GFR-binding peptide
  MOD_RES (31), (31): Xaa is C or S
SRVIMRHKRLVKPKRGVYYLISTASLAQPVX

SEQ ID NO: 3358 - protein, 36 aa, Artificial Sequence
  GFR-binding peptide
  MOD_RES (1), (35), (36): Xaa is C or S
  MOD_RES (13), (14), (15), (16), (17): Xaa is A or G
  MOD_RES (18), (19), (20), (21): Xaa is A or G or is absent
XARVVMNQYNKLXXXXXXXXXLYLVSIASLQTPAXX

SEQ ID NO: 3359 - protein, 39 aa, Artificial Sequence
  GFR-binding peptide
  MOD_RES (34), (35): Xaa is C or S
  MOD_RES (12), (13), (14), (15), (16): Xaa is A or G
  MOD_RES (17), (18), (19), (20): Xaa is A or G or is absent
AKVVMNRHKRLXXXXXXXXXYYLVSTASLKTPAXXAKPV

SEQ ID NO: 3360 - protein, 34 aa, Artificial Sequence
  GFR-binding peptide
  MOD_RES (1), (32), (33): Xaa is C or S
XSRVIMYHYKLVKPKRGVKYLISIPSLAQPVXXP

SEQ ID NO: 3361 - protein, 40 aa, Artificial Sequence
  GFR-binding peptide
  MOD_RES (37), (37): Xaa is C or S
  MOD_RES (13), (14), (15), (16), (17): Xaa is A or G
  MOD_RES (18), (19), (20), (21): Xaa is A or G or is absent
ALHDELTQYNKLXXXXXXXXXLYLVSIASLQVQTPRXQVN

SEQ ID NO: 3362 - protein, 42 aa, Artificial Sequence
  GFR-binding peptide
  MOD_RES (2), (4), (37), (38): Xaa is C or S
  MOD_RES (15), (16), (17), (18), (19): Xaa is A or G
  MOD_RES (20), (21), (22), (23): Xaa is A or G or is absent
SXKXSKVVMYHYKLXXXXXXXXXKYLISIPSLDQPVXXPSAS

SEQ ID NO: 3363 - protein, 31 aa, Artificial Sequence
  GFR-binding peptide
AKVVMNYHYKLIVNNSSDKYLVSIPSLKTPA

SEQ ID NO: 3364 - protein, 33 aa, Artificial Sequence
  GFR-binding peptide
  MOD_RES (31), (32): Xaa is C or S
KVVMNRYKKLIVNNSSDFYLVSIANLKTPAXXA

SEQ ID NO: 3365 - protein, 38 aa, Artificial Sequence
  GFR-binding peptide
  MOD_RES (2), (4), (36), (37): Xaa is C or S
HXGXAKVVMNRHKRLIVNNSSDYYLVSTASLKTPAXXA

SEQ ID NO: 3366 - protein, 33 aa, Artificial Sequence
  GFR-binding peptide
HDELTQYNKLFIPKKRVIELYLVSIASLQVQTP

SEQ ID NO: 3367 - protein, 36 aa, Artificial Sequence
  GFR-binding peptide
  MOD_RES (1), (3), (35), (36): Xaa is C or S
XGXGEVVMDQYNKLVVKENEDLYLMSIASLETPVXX

SEQ ID NO: 3368 - protein, 37 aa, Artificial Sequence
  GFR-binding peptide
  MOD_RES (2), (4), (36), (37): Xaa is C or S
RXGXGEVVMERYKKLVVKDYEDFYLMSIANLETPVXX

SEQ ID NO: 3369 - protein, 37 aa, Artificial Sequence
  GFR-binding peptide
  MOD_RES (2), (4), (36), (37): Xaa is C or S
HXGXARVVMNYHYKLIVNSSDDKYLVSIPSLQTPAXX

SEQ ID NO: 3370 - protein, 36 aa, Artificial Sequence
  GFR-binding peptide
  MOD_RES (1), (35), (36): Xaa is C or S
  MOD_RES (13), (14), (15), (16), (17): Xaa is A or G
  MOD_RES (18), (19), (20), (21): Xaa is A or G or is absent
XARVVMNRYKKLXXXXXXXXXFYLVSIANLQTPAXX

SEQ ID NO: 3371 - protein, 41 aa, Artificial Sequence
  GFR-binding peptide
  MOD_RES (1), (3), (37): Xaa is C or S
  MOD_RES (15), (16), (17), (18), (19): Xaa is A or G
  MOD_RES (20), (21), (22), (23): Xaa is A or G or is absent
XGXSRVVMNRYKKLXXXXXXXXXFYLVSIANLKTPAXTPKT

SEQ ID NO: 3372 - protein, 37 aa, Artificial Sequence
  GFR-binding peptide
  MOD_RES (1), (3), (37): Xaa is C or S
  MOD_RES (15), (16), (17), (18), (19): Xaa is A or G
  MOD_RES (20), (21), (22), (23): Xaa is A or G or is absent
XGXARVVMNRYKKLXXXXXXXXXFYLVSIANLQTPAX

SEQ ID NO: 3373 - protein, 37 aa, Artificial Sequence
  GFR-binding peptide
  MOD_RES (1), (3), (34), (35): Xaa is C or S
XKXSRVIMRYKKLVKPKRGVFYLISIANLAQPVXXPA

SEQ ID NO: 3374 - protein, 37 aa, Artificial Sequence
  GFR-binding peptide
  MOD_RES (1), (3), (37): Xaa is C or S
  MOD_RES (15), (16), (17), (18), (19): Xaa is A or G
  MOD_RES (20), (21), (22), (23): Xaa is A or G or is absent
XGXARVVMNRHKRLXXXXXXXXXYYLVSTASLQTPAX

SEQ ID NO: 3375 - protein, 34 aa, Artificial Sequence
  GFR-binding peptide
  MOD_RES (13), (14), (15), (16), (17): Xaa is A or G
  MOD_RES (18), (19), (20), (21): Xaa is A or G or is absent
ALHDELTRHKRLXXXXXXXXXYYLVSTASLQVQT

SEQ ID NO: 3376 - protein, 38 aa, Artificial Sequence
  GFR-binding peptide
  MOD_RES (32), (33): Xaa is C or S
GEVVMDQYNKLVVKENEDLYLMSIASLETPVXXAKPIK

SEQ ID NO: 3377 - protein, 36 aa, Artificial Sequence
  GFR-binding peptide
  MOD_RES (2), (33), (34): Xaa is C or S
KXSKVVMQYNKLVKPTRGVLYLISIASLDQPVXXPS

SEQ ID NO: 3378 - protein, 42 aa, Artificial Sequence
  GFR-binding peptide
  MOD_RES (1), (3), (37), (38): Xaa is C or S
  MOD_RES (15), (16), (17), (18), (19): Xaa is A or G
  MOD_RES (20), (21), (22), (23): Xaa is A or G or is absent
XGXARVVMNRYKKLXXXXXXXXXFYLVSIANLQTPAXXPKPV

SEQ ID NO: 3379 - protein, 40 aa, Artificial Sequence
  GFR-binding peptide
  MOD_RES (2), (34), (35): Xaa is C or S
GXGEVVMEYHYKLVVKDYEDKYLMSIPSLETPVXXAKPIS

SEQ ID NO: 3380 - protein, 37 aa, Artificial Sequence
  GFR-binding peptide
  MOD_RES (1), (33), (34): Xaa is C or S
XGEVVMERHKRLVVKDYEDYYLMSTASLETPVXXAKP

SEQ ID NO: 3381 - protein, 36 aa, Artificial Sequence
  GFR-binding peptide
  MOD_RES (1), (3), (34), (35): Xaa is C or S
XKXSKVVMQYNKLVKPTRGVLYLISIASLDQPVXXP

SEQ ID NO: 3382 - protein, 36 aa, Artificial Sequence
  GFR-binding peptide
  MOD_RES (1), (35), (36): Xaa is C or S
  MOD_RES (13), (14), (15), (16), (17): Xaa is A or G
  MOD_RES (18), (19), (20), (21): Xaa is A or G or is absent
XGEVVMEYHYKLXXXXXXXXXKYLMSIPSLETPVXX

SEQ ID NO: 3383 - protein, 38 aa, Artificial Sequence
  GFR-binding peptide
  MOD_RES (2), (4), (38): Xaa is C or S
  MOD_RES (16), (17), (18), (19), (20): Xaa is A or G
  MOD_RES (21), (22), (23), (24): Xaa is A or G or is absent
HXGXAKVVMNQYNKLXXXXXXXXXLYLVSIASLKTPAX

SEQ ID NO: 3384 - protein, 39 aa, Artificial Sequence
  GFR-binding peptide
  MOD_RES (34), (35): Xaa is C or S
  MOD_RES (12), (13), (14), (15), (16): Xaa is A or G
  MOD_RES (17), (18), (19), (20): Xaa is A or G or is absent
GEVVMDQYNKLXXXXXXXXXLYLMSIASLETPVXXAKPI

SEQ ID NO: 3385 - protein, 34 aa, Artificial Sequence
  GFR-binding peptide
  MOD_RES (13), (14), (15), (16), (17): Xaa is A or G
  MOD_RES (18), (19), (20), (21): Xaa is A or G or is absent
ALHDELTQYNKLXXXXXXXXXLYLVSIASLQVQT

SEQ ID NO: 3386 - protein, 40 aa, Artificial Sequence
  GFR-binding peptide
  MOD_RES (1), (3), (40): Xaa is C or S
XKXALHDELTRHKRLFIPKKRVIEYYLVSTASLQVQTPRX

SEQ ID NO: 3387 - protein, 37 aa, Artificial Sequence
  GFR-binding peptide
  MOD_RES (31), (32): Xaa is C or S
SRVIMRHKRLVKPKRGVYYLISTASLAQPVXXPAASA

SEQ ID NO: 3388 - protein, 36 aa, Artificial Sequence
  GFR-binding peptide
  MOD_RES (2), (4), (36): Xaa is C or S
RXGXGEVVMDRYKKLVVKENEDFYLMSIANLETPVX

SEQ ID NO: 3389 - protein, 32 aa, Artificial Sequence
  GFR-binding peptide
  MOD_RES (11), (12), (13), (14), (15): Xaa is A or G
  MOD_RES (16), (17), (18), (19): Xaa is A or G or is absent
SRVIMQYNKLXXXXXXXXXLYLISIASLAQPV

SEQ ID NO: 3390 - protein, 36 aa, Artificial Sequence
  GFR-binding peptide
  MOD_RES (31), (32): Xaa is C or S
SKVVMRHKRLVKPTRGVYYLISTASLDQPVXXPSAS

SEQ ID NO: 3391 - protein, 35 aa, Artificial Sequence
  GFR-binding peptide
LHDELTQYNKLFIPKKRVIELYLVSIASLQVQTPR

SEQ ID NO: 3392 - protein, 31 aa, Artificial Sequence
  GFR-binding peptide
  MOD_RES (31), (31): Xaa is C or S
EVVMEQYNKLVVKDYEDLYLMSIASLETPVX

SEQ ID NO: 3393 - protein, 36 aa, Artificial Sequence
  GFR-binding peptide
  MOD_RES (33), (34): Xaa is C or S
EAVSMGEQYNKLTPVGMDDLYLVSIASLKTPVXXAK

SEQ ID NO: 3394 - protein, 41 aa, Artificial Sequence
  GFR-binding peptide
  MOD_RES (2), (4), (37), (38): Xaa is C or S
  MOD_RES (15), (16), (17), (18), (19): Xaa is A or G
  MOD_RES (20), (21), (22), (23): Xaa is A or G or is absent
SXKXSKVVMRHKRLXXXXXXXXXYYLISTASLDQPVXXPSA

SEQ ID NO: 3395 - protein, 41 aa, Artificial Sequence
  GFR-binding peptide
  MOD_RES (2), (4), (38), (39): Xaa is C or S
  MOD_RES (16), (17), (18), (19), (20): Xaa is A or G
  MOD_RES (21), (22), (23), (24): Xaa is A or G or is absent
RXGXGEVVMEYHYKLXXXXXXXXXKYLMSIPSLETPVXXAK

SEQ ID NO: 3396 - protein, 34 aa, Artificial Sequence
  GFR-binding peptide
  MOD_RES (1), (33), (34): Xaa is C or S
XSRVVMNRHKRLIVNSSDDYYLVSTASLKTPAXX

SEQ ID NO: 3397 - protein, 40 aa, Artificial Sequence
  GFR-binding peptide
  MOD_RES (2), (36), (37): Xaa is C or S
  MOD_RES (14), (15), (16), (17), (18): Xaa is A or G
  MOD_RES (19), (20), (21), (22): Xaa is A or G or is absent
GXGEVVMDRHKRLXXXXXXXXXYYLMSTASLETPVXXAKP

SEQ ID NO: 3398 - protein, 34 aa, Artificial Sequence
  GFR-binding peptide
  MOD_RES (1), (33), (34): Xaa is C or S
XAKVVMNQYNKLIVNNSSDLYLVSIASLKTPAXX

SEQ ID NO: 3399 - protein, 37 aa, Artificial Sequence
  GFR-binding peptide
  MOD_RES (1), (34), (35): Xaa is C or S
  MOD_RES (12), (13), (14), (15), (16): Xaa is A or G
  MOD_RES (17), (18), (19), (20): Xaa is A or G or is absent
XSKVIMYHYKLXXXXXXXXXKYLISIPSLDQSVXXPS

SEQ ID NO: 3400 - protein, 36 aa, Artificial Sequence
  GFR-binding peptide
  MOD_RES (1), (36): Xaa is C or S
  MOD_RES (14), (15), (16), (17), (18): Xaa is A or G
  MOD_RES (19), (20), (21), (22): Xaa is A or G or is absent
XEAVSMGEQYNKLXXXXXXXXXLYLVSIASLKTPVX

SEQ ID NO: 3401 - protein, 40 aa, Artificial Sequence
  GFR-binding peptide
  MOD_RES (2), (35), (36): Xaa is C or S
  MOD_RES (13), (14), (15), (16), (17): Xaa is A or G
  MOD_RES (18), (19), (20), (21): Xaa is A or G or is absent
KXSKVIMRHKRLXXXXXXXXXYYLISTASLDQSVXXPSAS

SEQ ID NO: 3402 - protein, 40 aa, Artificial Sequence
  GFR-binding peptide
  MOD_RES (37), (37): Xaa is C or S
ALHDELTRYKKLFIPKKRVIEFYLVSIANLQVQTPRXQVN

SEQ ID NO: 3403 - protein, 39 aa, Artificial Sequence
  GFR-binding peptide
  MOD_RES (2), (34), (35): Xaa is C or S
GXGEVVMDQYNKLVVKENEDLYLMSIASLETPVXXAKPI

SEQ ID NO: 3404 - protein, 35 aa, Artificial Sequence
  GFR-binding peptide
  MOD_RES (2), (34), (35): Xaa is C or S
GXARVVMNRYKKLIVNSSDDFYLVSIANLQTPAXX

SEQ ID NO: 3405 - protein, 35 aa, Artificial Sequence
  GFR-binding peptide
  MOD_RES (1), (1): Xaa is C or S
  MOD_RES (14), (15), (16), (17), (18): Xaa is A or G
  MOD_RES (19), (20), (21), (22): Xaa is A or G or is absent
XALHDELTRHKRLXXXXXXXXXYYLVSTASLQVQT

SEQ ID NO: 3406 - protein, 39 aa, Artificial Sequence
  GFR-binding peptide
  MOD_RES (2), (34), (35): Xaa is C or S
GXAKVVMNYHYKLIVNNSSDKYLVSIPSLKTPAXXAKPV

SEQ ID NO: 3407 - protein, 41 aa, Artificial Sequence
  GFR-binding peptide
  MOD_RES (2), (4), (36), (37): Xaa is C or S
HXGXSRVVMNRHKRLIVNSSDDYYLVSTASLKTPAXXPKPV

SEQ ID NO: 3408 - protein, 37 aa, Artificial Sequence
  GFR-binding peptide
  MOD_RES (31), (32): Xaa is C or S
EVVMEYHYKLVVKDYEDKYLMSIPSLETPVXXAKPIS

SEQ ID NO: 3409 - protein, 34 aa, Artificial Sequence
  GFR-binding peptide
  MOD_RES (1), (33): Xaa is C or S
XSRVVMNYHYKLIVNSSDDKYLVSIPSLKTPAXT

SEQ ID NO: 3410 - protein, 35 aa, Artificial Sequence
  GFR-binding peptide
  MOD_RES (2), (2): Xaa is C or S
  MOD_RES (14), (15), (16), (17), (18): Xaa is A or G
  MOD_RES (19), (20), (21), (22): Xaa is A or G or is absent
GXSRVVMNYHYKLXXXXXXXXXKYLVSIPSLKTPA

SEQ ID NO: 3411 - protein, 40 aa, Artificial Sequence
  GFR-binding peptide
  MOD_RES (1), (34), (35): Xaa is C or S
  MOD_RES (12), (13), (14), (15), (16): Xaa is A or G
  MOD_RES (17), (18), (19), (20): Xaa is A or G or is absent
XSRVIMRYKKLXXXXXXXXXFYLISIANLAQPVXXPAASA

SEQ ID NO: 3412 - protein, 42 aa, Artificial Sequence
  GFR-binding peptide
  MOD_RES (2), (36), (37): Xaa is C or S
  MOD_RES (14), (15), (16), (17), (18): Xaa is A or G
  MOD_RES (19), (20), (21), (22): Xaa is A or G or is absent
GXSRVVMNRHKRLXXXXXXXXXYYLVSTASLKTPAXXPKPVY

SEQ ID NO: 3413 - protein, 39 aa, Artificial Sequence
  GFR-binding peptide
  MOD_RES (33), (34): Xaa is C or S
  MOD_RES (11), (12), (13), (14), (15): Xaa is A or G
  MOD_RES (16), (17), (18), (19): Xaa is A or G or is absent
RVVMNRYKKLXXXXXXXXXFYLVSIANLKTPAXXPKPVY

SEQ ID NO: 3414 - protein, 36 aa, Artificial Sequence
  GFR-binding peptide
  MOD_RES (2), (33), (34): Xaa is C or S
KXSKVIMQYNKLIKPTKGILYLISIASLDQSVXXPS

SEQ ID NO: 3415 - protein, 31 aa, Artificial Sequence
  GFR-binding peptide
GEVVMDRHKRLVVKENEDYYLMSTASLETPV

SEQ ID NO: 3416 - protein, 41 aa, Artificial Sequence
  GFR-binding peptide
  MOD_RES (2), (4), (36), (37): Xaa is C or S
HXGXAKVVMNRHKRLIVNNSSDYYLVSTASLKTPAXXAKPV

SEQ ID NO: 3417 - protein, 40 aa, Artificial Sequence
  GFR-binding peptide
  MOD_RES (2), (34), (35): Xaa is C or S
GXSRVVMNRYKKLIVNSSDDFYLVSIANLKTPAXXPKPVY

SEQ ID NO: 3418 - protein, 36 aa, Artificial Sequence
  GFR-binding peptide
  MOD_RES (33), (34): Xaa is C or S
  MOD_RES (11), (12), (13), (14), (15): Xaa is A or G
  MOD_RES (16), (17), (18), (19): Xaa is A or G or is absent
SKVIMRYKKLXXXXXXXXXFYLISIANLDQSVXXPS

SEQ ID NO: 3419 - protein, 39 aa, Artificial Sequence
  GFR-binding peptide
  MOD_RES (1), (35), (36): Xaa is C or S
  MOD_RES (13), (14), (15), (16), (17): Xaa is A or G
  MOD_RES (18), (19), (20), (21): Xaa is A or G or is absent
XGEVVMERHKRLXXXXXXXXXYYLMSTASLETPVXXAKP

SEQ ID NO: 3420 - protein, 35 aa, Artificial Sequence
  GFR-binding peptide
  MOD_RES (32), (33): Xaa is C or S
GEVVMEYHYKLVVKDYEDKYLMSIPSLETPVXXAK

SEQ ID NO: 3421 - protein, 31 aa, Artificial Sequence
  GFR-binding peptide
GEVVMEYHYKLVVKDYEDKYLMSIPSLETPV

SEQ ID NO: 3422 - protein, 35 aa, Artificial Sequence
  GFR-binding peptide
  MOD_RES (35), (35): Xaa is C or S
  MOD_RES (11), (12), (13), (14), (15): Xaa is A or G
  MOD_RES (16), (17), (18), (19): Xaa is A or G or is absent
HDELTYHYKLXXXXXXXXXKYLVSIPSLQVQTPRX

SEQ ID NO: 3423 - protein, 36 aa, Artificial Sequence
  GFR-binding peptide
  MOD_RES (1), (34), (35): Xaa is C or S
  MOD_RES (12), (13), (14), (15), (16): Xaa is A or G
  MOD_RES (17), (18), (19), (20): Xaa is A or G or is absent
XSRVIMYHYKLXXXXXXXXXKYLISIPSLAQPVXXP

SEQ ID NO: 3424 - protein, 33 aa, Artificial Sequence
  GFR-binding peptide
  MOD_RES (12), (13), (14), (15), (16): Xaa is A or G
  MOD_RES (17), (18), (19), (20): Xaa is A or G or is absent
SRVVMNYHYKLXXXXXXXXXKYLVSIPSLKTPA

SEQ ID NO: 3425 - protein, 34 aa, Artificial Sequence
  GFR-binding peptide
ALHDELTRYKKLFIPKKRVIEFYLVSIANLQVQT

SEQ ID NO: 3426 - protein, 40 aa, Artificial Sequence
  GFR-binding peptide
  MOD_RES (2), (4), (36): Xaa is C or S
HXGXSRVVMNYHYKLIVNSSDDKYLVSIPSLKTPAXTPKT

SEQ ID NO: 3427 - protein, 43 aa, Artificial Sequence
  GFR-binding peptide
  MOD_RES (2), (4), (38), (39): Xaa is C or S
  MOD_RES (16), (17), (18), (19), (20): Xaa is A or G
  MOD_RES (21), (22), (23), (24): Xaa is A or G or is absent
RXGXGEVVMERYKKLXXXXXXXXXFYLMSIANLETPVXXAKPI

SEQ ID NO: 3428 - protein, 40 aa, Artificial Sequence
  GFR-binding peptide
  MOD_RES (2), (35), (36): Xaa is C or S
GXEAVSMGEYHYKLTPVGMDDKYLVSIPSLKTPVXXAKGV

SEQ ID NO: 3429 - protein, 34 aa, Artificial Sequence
  GFR-binding peptide
  MOD_RES (34), (34): Xaa is C or S
  MOD_RES (12), (13), (14), (15), (16): Xaa is A or G
  MOD_RES (17), (18), (19), (20): Xaa is A or G or is absent
GEVVMDRHKRLXXXXXXXXXYYLMSTASLETPVX

SEQ ID NO: 3430 - protein, 37 aa, Artificial Sequence
  GFR-binding peptide
  MOD_RES (1), (33): Xaa is C or S
XSRVVMNYHYKLIVNSSDDKYLVSIPSLKTPAXTPKT

SEQ ID NO: 3431 - protein, 38 aa, Artificial Sequence
  GFR-binding peptide
  MOD_RES (2), (35), (36): Xaa is C or S
  MOD_RES (13), (14), (15), (16), (17): Xaa is A or G
  MOD_RES (18), (19), (20), (21): Xaa is A or G or is absent
KXSKVIMRHKRLXXXXXXXXXYYLISTASLDQSVXXPS

SEQ ID NO: 3432 - protein, 35 aa, Artificial Sequence
  GFR-binding peptide
  MOD_RES (1), (33), (34): Xaa is C or S
XAKVVMNQYNKLIVNNSSDLYLVSIASLKTPAXXA

SEQ ID NO: 3433 - protein, 38 aa, Artificial Sequence
  GFR-binding peptide
  MOD_RES (1), (3), (37), (38): Xaa is C or S
  MOD_RES (15), (16), (17), (18), (19): Xaa is A or G
  MOD_RES (20), (21), (22), (23): Xaa is A or G or is absent
XGXSRVVMNRHKRLXXXXXXXXXYYLVSTASLKTPAXX

SEQ ID NO: 3434 - protein, 35 aa, Artificial Sequence
  GFR-binding peptide
  MOD_RES (1), (33), (34): Xaa is C or S
XGEVVMEQYNKLVVKDYEDLYLMSIASLETPVXXA

SEQ ID NO: 3435 - protein, 38 aa, Artificial Sequence
  GFR-binding peptide
  MOD_RES (2), (34), (35): Xaa is C or S
GXGEVVMEQYNKLVVKDYEDLYLMSIASLETPVXXAKP

SEQ ID NO: 3436 - protein, 32 aa, Artificial Sequence
  GFR-binding peptide
  MOD_RES (1), (1): Xaa is C or S
XGEVVMDQYNKLVVKENEDLYLMSIASLETPV

SEQ ID NO: 3437 - protein, 38 aa, Artificial Sequence
  GFR-binding peptide
  MOD_RES (1), (35), (36): Xaa is C or S
  MOD_RES (13), (14), (15), (16), (17): Xaa is A or G
  MOD_RES (18), (19), (20), (21): Xaa is A or G or is absent
XGEVVMDQYNKLXXXXXXXXXLYLMSIASLETPVXXAK

SEQ ID NO: 3438 - protein, 37 aa, Artificial Sequence
  GFR-binding peptide
  MOD_RES (33), (34): Xaa is C or S
  MOD_RES (11), (12), (13), (14), (15): Xaa is A or G
  MOD_RES (16), (17), (18), (19): Xaa is A or G or is absent
EVVMDQYNKLXXXXXXXXXLYLMSIASLETPVXXAKP

SEQ ID NO: 3439 - protein, 40 aa, Artificial Sequence
  GFR-binding peptide
  MOD_RES (2), (4), (35), (36): Xaa is C or S
SXKXSKVVMRYKKLVKPTRGVFYLISIANLDQPVXXPSAS

SEQ ID NO: 3440 - protein, 40 aa, Artificial Sequence
  GFR-binding peptide
  MOD_RES (2), (36), (37): Xaa is C or S
  MOD_RES (14), (15), (16), (17), (18): Xaa is A or G
  MOD_RES (19), (20), (21), (22): Xaa is A or G or is absent
GXARVVMNRYKKLXXXXXXXXXFYLVSIANLQTPAXXPKP

SEQ ID NO: 3441 - protein, 35 aa, Artificial Sequence
  GFR-binding peptide
  MOD_RES (34), (35): Xaa is C or S
  MOD_RES (12), (13), (14), (15), (16): Xaa is A or G
  MOD_RES (17), (18), (19), (20): Xaa is A or G or is absent
GEVVMDQYNKLXXXXXXXXXLYLMSIASLETPVXX

SEQ ID NO: 3442 - protein, 30 aa, Artificial Sequence
  GFR-binding peptide
SKVVMQYNKLVKPTRGVLYLISIASLDQPV

SEQ ID NO: 3443 - protein, 37 aa, Artificial Sequence
  GFR-binding peptide
  MOD_RES (1), (33), (34): Xaa is C or S
XAKVVMNRHKRLIVNNSSDYYLVSTASLKTPAXXAKP

SEQ ID NO: 3444 - protein, 34 aa, Artificial Sequence
  GFR-binding peptide
  MOD_RES (1), (33): Xaa is C or S
XSRVVMNRYKKLIVNSSDDFYLVSIANLKTPAXT

SEQ ID NO: 3445 - protein, 42 aa, Artificial Sequence
  GFR-binding peptide
  MOD_RES (1), (3), (38), (39): Xaa is C or S
  MOD_RES (16), (17), (18), (19), (20): Xaa is A or G
  MOD_RES (21), (22), (23), (24): Xaa is A or G or is absent
XGXEAVSMGERHKRLXXXXXXXXXYYLVSTASLKTPVXXAKG

SEQ ID NO: 3446 - protein, 32 aa, Artificial Sequence
  GFR-binding peptide
  MOD_RES (11), (12), (13), (14), (15): Xaa is A or G
  MOD_RES (16), (17), (18), (19): Xaa is A or G or is absent
EVVMDYHYKLXXXXXXXXXKYLMSIPSLETPV

SEQ ID NO: 3447 - protein, 42 aa, Artificial Sequence
  GFR-binding peptide
  MOD_RES (1), (3), (38), (39): Xaa is C or S
  MOD_RES (16), (17), (18), (19), (20): Xaa is A or G
  MOD_RES (21), (22), (23), (24): Xaa is A or G or is absent
XGXEAVSMGEQYNKLXXXXXXXXXLYLVSIASLKTPVXXAKG

SEQ ID NO: 3448 - protein, 40 aa, Artificial Sequence
  GFR-binding peptide
  MOD_RES (2), (36), (37): Xaa is C or S
  MOD_RES (14), (15), (16), (17), (18): Xaa is A or G
  MOD_RES (19), (20), (21), (22): Xaa is A or G or is absent
GXAKVVMNRHKRLXXXXXXXXXYYLVSTASLKTPAXXAKP

SEQ ID NO: 3449 - protein, 40 aa, Artificial Sequence
  GFR-binding peptide
  MOD_RES (2), (4), (37), (38): Xaa is C or S
RXGXEAVSMGEQYNKLTPVGMDDLYLVSIASLKTPVXXAK

SEQ ID NO: 3450 - protein, 40 aa, Artificial Sequence
  GFR-binding peptide
  MOD_RES (1), (3), (36), (37): Xaa is C or S
XGXEAVSMGERHKRLTPVGMDDYYLVSTASLKTPVXXAKG

SEQ ID NO: 3451 - protein, 37 aa, Artificial Sequence
  GFR-binding peptide
  MOD_RES (34), (35): Xaa is C or S
  MOD_RES (12), (13), (14), (15), (16): Xaa is A or G
  MOD_RES (17), (18), (19), (20): Xaa is A or G or is absent
GEVVMEQYNKLXXXXXXXXXLYLMSIASLETPVXXAK

SEQ ID NO: 3452 - protein, 33 aa, Artificial Sequence
  GFR-binding peptide
  MOD_RES (32), (33): Xaa is C or S
GEVVMDYHYKLVVKENEDKYLMSIPSLETPVXX

SEQ ID NO: 3453 - protein, 38 aa, Artificial Sequence
  GFR-binding peptide
  MOD_RES (1), (3), (36), (37): Xaa is C or S
  MOD_RES (14), (15), (16), (17), (18): Xaa is A or G
  MOD_RES (19), (20), (21), (22): Xaa is A or G or is absent
XKXSKVIMRHKRLXXXXXXXXXYYLISTASLDQSVXXP

SEQ ID NO: 3454 - protein, 45 aa, Artificial Sequence
  GFR-binding peptide
  MOD_RES (2), (4), (41): Xaa is C or S
  MOD_RES (17), (18), (19), (20), (21): Xaa is A or G
  MOD_RES (22), (23), (24), (25): Xaa is A or G or is absent
EXKXALHDELTRYKKLXXXXXXXXXFYLVSIANLQVQTPRXQVNR

SEQ ID NO: 3455 - protein, 37 aa, Artificial Sequence
  GFR-binding peptide
  MOD_RES (36), (36): Xaa is C or S
LHDELTRYKKLFIPKKRVIEFYLVSIANLQVQTPRXQ

SEQ ID NO: 3456 - protein, 33 aa, Artificial Sequence
  GFR-binding peptide
  MOD_RES (12), (13), (14), (15), (16): Xaa is A or G
  MOD_RES (17), (18), (19), (20): Xaa is A or G or is absent
SRVVMNRHKRLXXXXXXXXXYYLVSTASLKTPA

SEQ ID NO: 3457 - protein, 36 aa, Artificial Sequence
  GFR-binding peptide
  MOD_RES (33), (34): Xaa is C or S
  MOD_RES (11), (12), (13), (14), (15): Xaa is A or G
  MOD_RES (16), (17), (18), (19): Xaa is A or G or is absent
KVVMNQYNKLXXXXXXXXXLYLVSIASLKTPAXXAK

SEQ ID NO: 3458 - protein, 40 aa, Artificial Sequence
  GFR-binding peptide
  MOD_RES (1), (3), (37): Xaa is C or S
  MOD_RES (15), (16), (17), (18), (19): Xaa is A or G
  MOD_RES (20), (21), (22), (23): Xaa is A or G or is absent
XGXSRVVMNRHKRLXXXXXXXXXYYLVSTASLKTPAXTPK

SEQ ID NO: 3459 - protein, 38 aa, Artificial Sequence
  GFR-binding peptide
  MOD_RES (1), (32), (33): Xaa is C or S
XSKVVMQYNKLVKPTRGVLYLISIASLDQPVXXPSASA

SEQ ID NO: 3460 - protein, 38 aa, Artificial Sequence
  GFR-binding peptide
  MOD_RES (2), (35), (36): Xaa is C or S
  MOD_RES (13), (14), (15), (16), (17): Xaa is A or G
  MOD_RES (18), (19), (20), (21): Xaa is A or G or is absent
KXSRVIMYHYKLXXXXXXXXXKYLISIPSLAQPVXXPA

SEQ ID NO: 3461 - protein, 38 aa, Artificial Sequence
  GFR-binding peptide
  MOD_RES (1), (3): Xaa is C or S
XKXALHDELTQYNKLFIPKKRVIELYLVSIASLQVQTP

SEQ ID NO: 3462 - protein, 39 aa, Artificial Sequence
  GFR-binding peptide
  MOD_RES (1), (33), (34): Xaa is C or S
XSRVVMNRYKKLIVNSSDDFYLVSIANLKTPAXXPKPVY

SEQ ID NO: 3463 - protein, 44 aa, Artificial Sequence
  GFR-binding peptide
  MOD_RES (2), (4), (38), (39): Xaa is C or S
  MOD_RES (16), (17), (18), (19), (20): Xaa is A or G
  MOD_RES (21), (22), (23), (24): Xaa is A or G or is absent
HXGXAKVVMNRHKRLXXXXXXXXXYYLVSTASLKTPAXXAKPVA

SEQ ID NO: 3464 - protein, 41 aa, Artificial Sequence
  GFR-binding peptide
  MOD_RES (2), (4), (37), (38): Xaa is C or S
  MOD_RES (15), (16), (17), (18), (19): Xaa is A or G
  MOD_RES (20), (21), (22), (23): Xaa is A or G or is absent
SXKXSKVIMYHYKLXXXXXXXXXKYLISIPSLDQSVXXPSA

SEQ ID NO: 3465 - protein, 34 aa, Artificial Sequence
  GFR-binding peptide
  MOD_RES (31), (32): Xaa is C or S
EVVMERYKKLVVKDYEDFYLMSIANLETPVXXAK

SEQ ID NO: 3466 - protein, 41 aa, Artificial Sequence
  GFR-binding peptide
  MOD_RES (2), (4), (37), (38): Xaa is C or S
RXGXEAVSMGEYHYKLTPVGMDDKYLVSIPSLKTPVXXAKG

SEQ ID NO: 3467 - protein, 36 aa, Artificial Sequence
  GFR-binding peptide
  MOD_RES (2), (4), (36): Xaa is C or S
HXGXARVVMNYHYKLIVNSSDDKYLVSIPSLQTPAX

SEQ ID NO: 3468 - protein, 39 aa, Artificial Sequence
  GFR-binding peptide
  MOD_RES (2), (34), (35): Xaa is C or S
GXGEVVMERYKKLVVKDYEDFYLMSIANLETPVXXAKPI

SEQ ID NO: 3469 - protein, 36 aa, Artificial Sequence
  GFR-binding peptide
  MOD_RES (1), (34), (35): Xaa is C or S
XEAVSMGEQYNKLTPVGMDDLYLVSIASLKTPVXXA

SEQ ID NO: 3470 - protein, 37 aa, Artificial Sequence
  GFR-binding peptide
  MOD_RES (1), (3), (37): Xaa is C or S
  MOD_RES (15), (16), (17), (18), (19): Xaa is A or G
  MOD_RES (20), (21), (22), (23): Xaa is A or G or is absent
XGXGEVVMEQYNKLXXXXXXXXXLYLMSIASLETPVX

SEQ ID NO: 3471 - protein, 33 aa, Artificial Sequence
  GFR-binding peptide
  MOD_RES (2), (2): Xaa is C or S
GXGEVVMEYHYKLVVKDYEDKYLMSIPSLETPV

SEQ ID NO: 3472 - protein, 33 aa, Artificial Sequence
  GFR-binding peptide
  MOD_RES (2), (2): Xaa is C or S
GXSRVVMNRYKKLIVNSSDDFYLVSIANLKTPA

SEQ ID NO: 3473 - protein, 38 aa, Artificial Sequence
  GFR-binding peptide
  MOD_RES (1), (3), (35), (36): Xaa is C or S
XGXGEVVMERHKRLVVKDYEDYYLMSTASLETPVXXAK

SEQ ID NO: 3474 - protein, 34 aa, Artificial Sequence
  GFR-binding peptide
  MOD_RES (2), (33), (34): Xaa is C or S
KXSKVVMRHKRLVKPTRGVYYLISTASLDQPVXX

SEQ ID NO: 3475 - protein, 37 aa, Artificial Sequence
  GFR-binding peptide
  MOD_RES (34), (35): Xaa is C or S
  MOD_RES (12), (13), (14), (15), (16): Xaa is A or G
  MOD_RES (17), (18), (19), (20): Xaa is A or G or is absent
GEVVMERYKKLXXXXXXXXXFYLMSIANLETPVXXAK

SEQ ID NO: 3476 - protein, 42 aa, Artificial Sequence
  GFR-binding peptide
  MOD_RES (1), (3), (37), (38): Xaa is C or S
  MOD_RES (15), (16), (17), (18), (19): Xaa is A or G
  MOD_RES (20), (21), (22), (23): Xaa is A or G or is absent
XGXAKVVMNRYKKLXXXXXXXXXFYLVSIANLKTPAXXAKPV

SEQ ID NO: 3477 - protein, 34 aa, Artificial Sequence
  GFR-binding peptide
  MOD_RES (2), (4): Xaa is C or S
SXKXSKVIMRYKKLIKPTKGIFYLISIANLDQSV

SEQ ID NO: 3478 - protein, 39 aa, Artificial Sequence
  GFR-binding peptide
  MOD_RES (1), (3), (35), (36): Xaa is C or S
XGXAKVVMNYHYKLIVNNSSDKYLVSIPSLKTPAXXAKP

SEQ ID NO: 3479 - protein, 37 aa, Artificial Sequence
  GFR-binding peptide
  MOD_RES (31), (32): Xaa is C or S
EVVMERHKRLVVKDYEDYYLMSTASLETPVXXAKPIS

SEQ ID NO: 3480 - protein, 35 aa, Artificial Sequence
  GFR-binding peptide
  MOD_RES (33), (34): Xaa is C or S
  MOD_RES (11), (12), (13), (14), (15): Xaa is A or G
  MOD_RES (16), (17), (18), (19): Xaa is A or G or is absent
SKVVMYHYKLXXXXXXXXXKYLISIPSLDQPVXXP

SEQ ID NO: 3481 - protein, 35 aa, Artificial Sequence
  GFR-binding peptide
  MOD_RES (31), (32): Xaa is C or S
EVVMDRYKKLVVKENEDFYLMSIANLETPVXXAKP

SEQ ID NO: 3482 - protein, 35 aa, Artificial Sequence
  GFR-binding peptide
  MOD_RES (1), (3): Xaa is C or S
XGXEAVSMGEQYNKLTPVGMDDLYLVSIASLKTPV

SEQ ID NO: 3483 - protein, 34 aa, Artificial Sequence
  GFR-binding peptide
  MOD_RES (31), (31): Xaa is C or S
RVVMNRYKKLIVNSSDDFYLVSIANLKTPAXTPK

SEQ ID NO: 3484 - protein, 41 aa, Artificial Sequence
  GFR-binding peptide
  MOD_RES (2), (4), (41): Xaa is C or S
EXKXALHDELTYHYKLFIPKKRVIEKYLVSIPSLQVQTPRX

SEQ ID NO: 3485 - protein, 35 aa, Artificial Sequence
  GFR-binding peptide
  MOD_RES (2), (34): Xaa is C or S
GXSRVVMNYHYKLIVNSSDDKYLVSIPSLKTPAXT

SEQ ID NO: 3486 - protein, 37 aa, Artificial Sequence
  GFR-binding peptide
  MOD_RES (1), (33): Xaa is C or S
XSRVVMNRYKKLIVNSSDDFYLVSIANLKTPAXTPKT

SEQ ID NO: 3487 - protein, 35 aa, Artificial Sequence
  GFR-binding peptide
  MOD_RES (34), (35): Xaa is C or S
  MOD_RES (12), (13), (14), (15), (16): Xaa is A or G
  MOD_RES (17), (18), (19), (20): Xaa is A or G or is absent
GEVVMDRYKKLXXXXXXXXXFYLMSIANLETPVXX

SEQ ID NO: 3488 - protein, 40 aa, Artificial Sequence
  GFR-binding peptide
  MOD_RES (1), (3), (36), (37): Xaa is C or S
  MOD_RES (14), (15), (16), (17), (18): Xaa is A or G
  MOD_RES (19), (20), (21), (22): Xaa is A or G or is absent
XKXSKVIMYHYKLXXXXXXXXXKYLISIPSLDQSVXXPSA

SEQ ID NO: 3489 - protein, 40 aa, Artificial Sequence
  GFR-binding peptide
  MOD_RES (1), (35), (36): Xaa is C or S
  MOD_RES (13), (14), (15), (16), (17): Xaa is A or G
  MOD_RES (18), (19), (20), (21): Xaa is A or G or is absent
XGEVVMDRHKRLXXXXXXXXXYYLMSTASLETPVXXAKPI

SEQ ID NO: 3490 - protein, 39 aa, Artificial Sequence
  GFR-binding peptide
  MOD_RES (1), (3), (35), (36): Xaa is C or S
XGXARVVMNRYKKLIVNSSDDFYLVSIANLQTPAXXPKP

SEQ ID NO: 3491 - protein, 38 aa, Artificial Sequence
  GFR-binding peptide
  MOD_RES (2), (4), (37), (38): Xaa is C or S
  MOD_RES (15), (16), (17), (18), (19): Xaa is A or G
  MOD_RES (20), (21), (22), (23): Xaa is A or G or is absent
SXKXSKVVMRHKRLXXXXXXXXXYYLISTASLDQPVXX

SEQ ID NO: 3492 - protein, 38 aa, Artificial Sequence
  GFR-binding peptide
  MOD_RES (1), (3), (36), (37): Xaa is C or S
  MOD_RES (14), (15), (16), (17), (18): Xaa is A or G
  MOD_RES (19), (20), (21), (22): Xaa is A or G or is absent
XKXSKVVMRHKRLXXXXXXXXXYYLISTASLDQPVXXP

SEQ ID NO: 3493 - protein, 41 aa, Artificial Sequence
  GFR-binding peptide
  MOD_RES (1), (3), (36), (37): Xaa is C or S
  MOD_RES (14), (15), (16), (17), (18): Xaa is A or G
  MOD_RES (19), (20), (21), (22): Xaa is A or G or is absent
XKXSRVIMRYKKLXXXXXXXXXFYLISIANLAQPVXXPAAS

SEQ ID NO: 3494 - protein, 37 aa, Artificial Sequence
  GFR-binding peptide
  MOD_RES (33), (34): Xaa is C or S
  MOD_RES (11), (12), (13), (14), (15): Xaa is A or G
  MOD_RES (16), (17), (18), (19): Xaa is A or G or is absent
RVVMNQYNKLXXXXXXXXXLYLVSIASLKTPAXXPKP

SEQ ID NO: 3495 - protein, 30 aa, Artificial Sequence
  GFR-binding peptide
SKVVMYHYKLVKPTRGVKYLISIPSLDQPV

SEQ ID NO: 3496 - protein, 34 aa, Artificial Sequence
  GFR-binding peptide
  MOD_RES (33), (34): Xaa is C or S
  MOD_RES (11), (12), (13), (14), (15): Xaa is A or G
  MOD_RES (16), (17), (18), (19): Xaa is A or G or is absent
SKVVMRYKKLXXXXXXXXXFYLISIANLDQPVXX

SEQ ID NO: 3497 - protein, 32 aa, Artificial Sequence
  GFR-binding peptide
  MOD_RES (11), (12), (13), (14), (15): Xaa is A or G
  MOD_RES (16), (17), (18), (19): Xaa is A or G or is absent
SKVIMYHYKLXXXXXXXXXKYLISIPSLDQSV

SEQ ID NO: 3498 - protein, 33 aa, Artificial Sequence
  GFR-binding peptide
  MOD_RES (33), (33): Xaa is C or S
  MOD_RES (11), (12), (13), (14), (15): Xaa is A or G
  MOD_RES (16), (17), (18), (19): Xaa is A or G or is absent
SKVIMYHYKLXXXXXXXXXKYLISIPSLDQSVX

SEQ ID NO: 3499 - protein, 39 aa, Artificial Sequence
  GFR-binding peptide
  MOD_RES (2), (36), (37): Xaa is C or S
  MOD_RES (14), (15), (16), (17), (18): Xaa is A or G
  MOD_RES (19), (20), (21), (22): Xaa is A or G or is absent
GXSRVVMNQYNKLXXXXXXXXXLYLVSIASLKTPAXXPK

SEQ ID NO: 3500 - protein, 36 aa, Artificial Sequence
  GFR-binding peptide
  MOD_RES (34), (35): Xaa is C or S
  MOD_RES (12), (13), (14), (15), (16): Xaa is A or G
  MOD_RES (17), (18), (19), (20): Xaa is A or G or is absent
AKVVMNYHYKLXXXXXXXXXKYLVSIPSLKTPAXXA

SEQ ID NO: 3501 - protein, 37 aa, Artificial Sequence
  GFR-binding peptide
  MOD_RES (1), (3), (34), (35): Xaa is C or S
XKXSKVVMYHYKLVKPTRGVKYLISIPSLDQPVXXPS

SEQ ID NO: 3502 - protein, 40 aa, Artificial Sequence
  GFR-binding peptide
  MOD_RES (2), (4), (35), (36): Xaa is C or S
SXKXSKVIMRHKRLIKPTKGIYYLISTASLDQSVXXPSAS

SEQ ID NO: 3503 - protein, 40 aa, Artificial Sequence
  GFR-binding peptide
  MOD_RES (1), (3), (35), (36): Xaa is C or S
XGXSRVVMNRYKKLIVNSSDDFYLVSIANLKTPAXXPKPV

SEQ ID NO: 3504 - protein, 36 aa, Artificial Sequence
  GFR-binding peptide
  MOD_RES (32), (33): Xaa is C or S
AKVVMNRHKRLIVNNSSDYYLVSTASLKTPAXXAKP

SEQ ID NO: 3505 - protein, 38 aa, Artificial Sequence
  GFR-binding peptide
  MOD_RES (1), (3), (34), (35): Xaa is C or S
XKXSRVIMYHYKLVKPKRGVKYLISIPSLAQPVXXPAA

SEQ ID NO: 3506 - protein, 40 aa, Artificial Sequence
  GFR-binding peptide
  MOD_RES (2), (4), (36), (37): Xaa is C or S
HXGXSRVVMNYHYKLIVNSSDDKYLVSIPSLKTPAXXPKP

SEQ ID NO: 3507 - protein, 42 aa, Artificial Sequence
  GFR-binding peptide
  MOD_RES (2), (4), (38), (39): Xaa is C or S
  MOD_RES (16), (17), (18), (19), (20): Xaa is A or G
  MOD_RES (21), (22), (23), (24): Xaa is A or G or is absent
HXGXAKVVMNYHYKLXXXXXXXXXKYLVSIPSLKTPAXXAKP

SEQ ID NO: 3508 - protein, 39 aa, Artificial Sequence
  GFR-binding peptide
  MOD_RES (1), (35): Xaa is C or S
  MOD_RES (13), (14), (15), (16), (17): Xaa is A or G
  MOD_RES (18), (19), (20), (21): Xaa is A or G or is absent
XSRVVMNRYKKLXXXXXXXXXFYLVSIANLKTPAXTPKT

SEQ ID NO: 3509 - protein, 35 aa, Artificial Sequence
  GFR-binding peptide
  MOD_RES (2), (2): Xaa is C or S
  MOD_RES (14), (15), (16), (17), (18): Xaa is A or G
  MOD_RES (19), (20), (21), (22): Xaa is A or G or is absent
GXGEVVMDYHYKLXXXXXXXXXKYLMSIPSLETPV

SEQ ID NO: 3510 - protein, 43 aa, Artificial Sequence
  GFR-binding peptide
  MOD_RES (1), (3), (38), (39): Xaa is C or S
  MOD_RES (16), (17), (18), (19), (20): Xaa is A or G
  MOD_RES (21), (22), (23), (24): Xaa is A or G or is absent
XGXEAVSMGEYHYKLXXXXXXXXXKYLVSIPSLKTPVXXAKGV

SEQ ID NO: 3511 - protein, 39 aa, Artificial Sequence
  GFR-binding peptide
  MOD_RES (1), (35): Xaa is C or S
  MOD_RES (13), (14), (15), (16), (17): Xaa is A or G
  MOD_RES (18), (19), (20), (21): Xaa is A or G or is absent
XSRVVMNYHYKLXXXXXXXXXKYLVSIPSLKTPAXTPKT

SEQ ID NO: 3512 - protein, 34 aa, Artificial Sequence
  GFR-binding peptide
  MOD_RES (32), (32): Xaa is C or S
SRVVMNQYNKLIVNSSDDLYLVSIASLKTPAXTP

SEQ ID NO: 3513 - protein, 40 aa, Artificial Sequence
  GFR-binding peptide
  MOD_RES (1), (3), (40): Xaa is C or S
XKXALHDELTQYNKLFIPKKRVIELYLVSIASLQVQTPRX

SEQ ID NO: 3514 - protein, 34 aa, Artificial Sequence
  GFR-binding peptide
  MOD_RES (34), (34): Xaa is C or S
  MOD_RES (12), (13), (14), (15), (16): Xaa is A or G
  MOD_RES (17), (18), (19), (20): Xaa is A or G or is absent
GEVVMDRYKKLXXXXXXXXXFYLMSIANLETPVX

SEQ ID NO: 3515 - protein, 37 aa, Artificial Sequence
  GFR-binding peptide
  MOD_RES (2), (4), (35), (36): Xaa is C or S
SXKXSKVIMRYKKLIKPTKGIFYLISIANLDQSVXXP

SEQ ID NO: 3516 - protein, 37 aa, Artificial Sequence
  GFR-binding peptide
  MOD_RES (1), (3), (36), (37): Xaa is C or S
  MOD_RES (14), (15), (16), (17), (18): Xaa is A or G
  MOD_RES (19), (20), (21), (22): Xaa is A or G or is absent
XKXSRVIMQYNKLXXXXXXXXXLYLISIASLAQPVXX

SEQ ID NO: 3517 - protein, 34 aa, Artificial Sequence
  GFR-binding peptide
  MOD_RES (2), (34): Xaa is C or S
GXARVVMNQYNKLIVNSSDDLYLVSIASLQTPAX

SEQ ID NO: 3518 - protein, 37 aa, Artificial Sequence
  GFR-binding peptide
  MOD_RES (1), (35): Xaa is C or S
  MOD_RES (13), (14), (15), (16), (17): Xaa is A or G
  MOD_RES (18), (19), (20), (21): Xaa is A or G or is absent
XSRVVMNRYKKLXXXXXXXXXFYLVSIANLKTPAXTP

SEQ ID NO: 3519 - protein, 38 aa, Artificial Sequence
  GFR-binding peptide
  MOD_RES (35), (35): Xaa is C or S
HDELTRYKKLFIPKKRVIEFYLVSIANLQVQTPRXQVN

SEQ ID NO: 3520 - protein, 32 aa, Artificial Sequence
  GFR-binding peptide
  MOD_RES (1), (1): Xaa is C or S
XARVVMNRYKKLIVNSSDDFYLVSIANLQTPA

SEQ ID NO: 3521 - protein, 42 aa, Artificial Sequence
  GFR-binding peptide
  MOD_RES (2), (4), (36): Xaa is C or S
HXGXSRVVMNRYKKLIVNSSDDFYLVSIANLKTPAXTPKTVH

SEQ ID NO: 3522 - protein, 41 aa, Artificial Sequence
  GFR-binding peptide
  MOD_RES (2), (4), (37), (38): Xaa is C or S
  MOD_RES (15), (16), (17), (18), (19): Xaa is A or G
  MOD_RES (20), (21), (22), (23): Xaa is A or G or is absent
SXKXSKVVMRYKKLXXXXXXXXXFYLISIANLDQPVXXPSA

SEQ ID NO: 3523 - protein, 40 aa, Artificial Sequence
  GFR-binding peptide
  MOD_RES (2), (34), (35): Xaa is C or S
GXAKVVMNRYKKLIVNNSSDFYLVSIANLKTPAXXAKPVA

SEQ ID NO: 3524 - protein, 34 aa, Artificial Sequence
  GFR-binding peptide
  MOD_RES (1), (32), (33): Xaa is C or S
XSKVIMQYNKLIKPTKGILYLISIASLDQSVXXP

SEQ ID NO: 3525 - protein, 35 aa, Artificial Sequence
  GFR-binding peptide
  MOD_RES (1), (1): Xaa is C or S
XALHDELTRYKKLFIPKKRVIEFYLVSIANLQVQT

SEQ ID NO: 3526 - protein, 32 aa, Artificial Sequence
  GFR-binding peptide
  MOD_RES (1), (1): Xaa is C or S
XARVVMNYHYKLIVNSSDDKYLVSIPSLQTPA

SEQ ID NO: 3527 - protein, 36 aa, Artificial Sequence
  GFR-binding peptide
  MOD_RES (1), (3), (34), (35): Xaa is C or S
XKXSKVIMRYKKLIKPTKGIFYLISIANLDQSVXXP

SEQ ID NO: 3528 - protein, 38 aa, Artificial Sequence
  GFR-binding peptide
  MOD_RES (2), (4), (35), (36): Xaa is C or S
SXKXSKVIMQYNKLIKPTKGILYLISIASLDQSVXXPS

SEQ ID NO: 3529 - protein, 38 aa, Artificial Sequence
  GFR-binding peptide
  MOD_RES (34), (35): Xaa is C or S
  MOD_RES (12), (13), (14), (15), (16): Xaa is A or G
  MOD_RES (17), (18), (19), (20): Xaa is A or G or is absent
AKVVMNQYNKLXXXXXXXXXLYLVSIASLKTPAXXAKP

SEQ ID NO: 3530 - protein, 36 aa, Artificial Sequence
  GFR-binding peptide
  MOD_RES (32), (33): Xaa is C or S
AKVVMNQYNKLIVNNSSDLYLVSIASLKTPAXXAKP

SEQ ID NO: 3531 - protein, 39 aa, Artificial Sequence
  GFR-binding peptide
  MOD_RES (2), (35), (36): Xaa is C or S
GXEAVSMGEYHYKLTPVGMDDKYLVSIPSLKTPVXXAKG

SEQ ID NO: 3532 - protein, 38 aa, Artificial Sequence
  GFR-binding peptide
  MOD_RES (34), (35): Xaa is C or S
  MOD_RES (12), (13), (14), (15), (16): Xaa is A or G
  MOD_RES (17), (18), (19), (20): Xaa is A or G or is absent
AKVVMNRYKKLXXXXXXXXXFYLVSIANLKTPAXXAKP

SEQ ID NO: 3533 - protein, 39 aa, Artificial Sequence
  GFR-binding peptide
  MOD_RES (37), (37): Xaa is C or S
ALHDELTRYKKLFIPKKRVIEFYLVSIANLQVQTPRXQV

SEQ ID NO: 3534 - protein, 35 aa, Artificial Sequence
  GFR-binding peptide
  MOD_RES (1), (34), (35): Xaa is C or S
  MOD_RES (12), (13), (14), (15), (16): Xaa is A or G
  MOD_RES (17), (18), (19), (20): Xaa is A or G or is absent
XSKVVMYHYKLXXXXXXXXXKYLISIPSLDQPVXX

SEQ ID NO: 3535 - protein, 36 aa, Artificial Sequence
  GFR-binding peptide
  MOD_RES (1), (3), (36): Xaa is C or S
  MOD_RES (14), (15), (16), (17), (18): Xaa is A or G
  MOD_RES (19), (20), (21), (22): Xaa is A or G or is absent
XKXSKVVMYHYKLXXXXXXXXXKYLISIPSLDQPVX

SEQ ID NO: 3536 - protein, 34 aa, Artificial Sequence
  GFR-binding peptide
  MOD_RES (1), (34): Xaa is C or S
  MOD_RES (12), (13), (14), (15), (16): Xaa is A or G
  MOD_RES (17), (18), (19), (20): Xaa is A or G or is absent
XSRVIMYHYKLXXXXXXXXXKYLISIPSLAQPVX

SEQ ID NO: 3537 - protein, 36 aa, Artificial Sequence
  GFR-binding peptide
  MOD_RES (32), (33): Xaa is C or S
ARVVMNQYNKLIVNSSDDLYLVSIASLQTPAXXPKP

SEQ ID NO: 3538 - protein, 35 aa, Artificial Sequence
  GFR-binding peptide
  MOD_RES (2), (33), (34): Xaa is C or S
KXSRVIMRHKRLVKPKRGVYYLISTASLAQPVXXP

SEQ ID NO: 3539 - protein, 37 aa, Artificial Sequence
  GFR-binding peptide
  MOD_RES (2), (35), (36): Xaa is C or S
GXEAVSMGEQYNKLTPVGMDDLYLVSIASLKTPVXXA

SEQ ID NO: 3540 - protein, 41 aa, Artificial Sequence
  GFR-binding peptide
  MOD_RES (1), (3), (37): Xaa is C or S
  MOD_RES (15), (16), (17), (18), (19): Xaa is A or G
  MOD_RES (20), (21), (22), (23): Xaa is A or G or is absent
XGXSRVVMNRHKRLXXXXXXXXXYYLVSTASLKTPAXTPKT

SEQ ID NO: 3541 - protein, 39 aa, Artificial Sequence
  GFR-binding peptide
  MOD_RES (2), (4): Xaa is C or S
EXKXALHDELTRYKKLFIPKKRVIEFYLVSIANLQVQTP

SEQ ID NO: 3542 - protein, 38 aa, Artificial Sequence
  GFR-binding peptide
  MOD_RES (2), (4), (38): Xaa is C or S
  MOD_RES (16), (17), (18), (19), (20): Xaa is A or G
  MOD_RES (21), (22), (23), (24): Xaa is A or G or is absent
HXGXAKVVMNRHKRLXXXXXXXXXYYLVSTASLKTPAX

SEQ ID NO: 3543 - protein, 38 aa, Artificial Sequence
  GFR-binding peptide
  MOD_RES (1), (3), (35), (36): Xaa is C or S
XGXAKVVMNRYKKLIVNNSSDFYLVSIANLKTPAXXAK

SEQ ID NO: 3544 - protein, 37 aa, Artificial Sequence
  GFR-binding peptide
  MOD_RES (2), (36), (37): Xaa is C or S
  MOD_RES (14), (15), (16), (17), (18): Xaa is A or G
  MOD_RES (19), (20), (21), (22): Xaa is A or G or is absent
GXSRVVMNRHKRLXXXXXXXXXYYLVSTASLKTPAXX

SEQ ID NO: 3545 - protein, 35 aa, Artificial Sequence
  GFR-binding peptide
  MOD_RES (1), (35): Xaa is C or S
  MOD_RES (13), (14), (15), (16), (17): Xaa is A or G
  MOD_RES (18), (19), (20), (21): Xaa is A or G or is absent
XGEVVMDRHKRLXXXXXXXXXYYLMSTASLETPVX

SEQ ID NO: 3546 - protein, 40 aa, Artificial Sequence
  GFR-binding peptide
  MOD_RES (2), (34), (35): Xaa is C or S
GXAKVVMNRHKRLIVNNSSDYYLVSTASLKTPAXXAKPVA

SEQ ID NO: 3547 - protein, 34 aa, Artificial Sequence
  GFR-binding peptide
  MOD_RES (2), (33), (34): Xaa is C or S
KXSRVIMQYNKLVKPKRGVLYLISIASLAQPVXX

SEQ ID NO: 3548 - protein, 39 aa, Artificial Sequence
  GFR-binding peptide
  MOD_RES (1), (35), (36): Xaa is C or S
  MOD_RES (13), (14), (15), (16), (17): Xaa is A or G
  MOD_RES (18), (19), (20), (21): Xaa is A or G or is absent
XGEVVMEQYNKLXXXXXXXXXLYLMSIASLETPVXXAKP

SEQ ID NO: 3549 - protein, 34 aa, Artificial Sequence
  GFR-binding peptide
  MOD_RES (2), (2): Xaa is C or S
  MOD_RES (13), (14), (15), (16), (17): Xaa is A or G
  MOD_RES (18), (19), (20), (21): Xaa is A or G or is absent
KXSRVIMRYKKLXXXXXXXXXFYLISIANLAQPV

SEQ ID NO: 3550 - protein, 40 aa, Artificial Sequence
  GFR-binding peptide
  MOD_RES (2), (4), (38), (39): Xaa is C or S
  MOD_RES (16), (17), (18), (19), (20): Xaa is A or G
  MOD_RES (21), (22), (23), (24): Xaa is A or G or is absent
RXGXGEVVMDRYKKLXXXXXXXXXFYLMSIANLETPVXXA

SEQ ID NO: 3551 - protein, 34 aa, Artificial Sequence
  GFR-binding peptide
  MOD_RES (32), (33): Xaa is C or S
SRVVMNQYNKLIVNSSDDLYLVSIASLKTPAXXP

SEQ ID NO: 3552 - protein, 37 aa, Artificial Sequence
  GFR-binding peptide
  MOD_RES (2), (4), (37): Xaa is C or S
RXGXEAVSMGERYKKLTPVGMDDFYLVSIANLKTPVX

SEQ ID NO: 3553 - protein, 33 aa, Artificial Sequence
  GFR-binding peptide
  MOD_RES (2), (2): Xaa is C or S
GXAKVVMNYHYKLIVNNSSDKYLVSIPSLKTPA

SEQ ID NO: 3554 - protein, 39 aa, Artificial Sequence
  GFR-binding peptide
  MOD_RES (1), (33), (34): Xaa is C or S
XGEVVMERHKRLVVKDYEDYYLMSTASLETPVXXAKPIS

SEQ ID NO: 3555 - protein, 41 aa, Artificial Sequence
  GFR-binding peptide
  MOD_RES (1), (3), (36), (37): Xaa is C or S
XGXEAVSMGEQYNKLTPVGMDDLYLVSIASLKTPVXXAKGV

SEQ ID NO: 3556 - protein, 39 aa, Artificial Sequence
  GFR-binding peptide
  MOD_RES (2), (33), (34): Xaa is C or S
KXSRVIMRYKKLVKPKRGVFYLISIANLAQPVXXPAASA

SEQ ID NO: 3557 - protein, 35 aa, Artificial Sequence
  GFR-binding peptide
  MOD_RES (32), (33): Xaa is C or S
ARVVMNYHYKLIVNSSDDKYLVSIPSLQTPAXXPK

SEQ ID NO: 3558 - protein, 33 aa, Artificial Sequence
  GFR-binding peptide
  MOD_RES (12), (13), (14), (15), (16): Xaa is A or G
  MOD_RES (17), (18), (19), (20): Xaa is A or G or is absent
AKVVMNYHYKLXXXXXXXXXKYLVSIPSLKTPA

SEQ ID NO: 3559 - protein, 39 aa, Artificial Sequence
  GFR-binding peptide
  MOD_RES (2), (4), (36), (37): Xaa is C or S
RXGXGEVVMERHKRLVVKDYEDYYLMSTASLETPVXXAK

SEQ ID NO: 3560 - protein, 39 aa, Artificial Sequence
  GFR-binding peptide
  MOD_RES (1), (3), (37), (38): Xaa is C or S
  MOD_RES (15), (16), (17), (18), (19): Xaa is A or G
  MOD_RES (20), (21), (22), (23): Xaa is A or G or is absent
XGXGEVVMEQYNKLXXXXXXXXXLYLMSIASLETPVXXA

SEQ ID NO: 3561 - protein, 33 aa, Artificial Sequence
  GFR-binding peptide
  MOD_RES (1), (33): Xaa is C or S
XGEVVMDYHYKLVVKENEDKYLMSIPSLETPVX

SEQ ID NO: 3562 - protein, 35 aa, Artificial Sequence
  GFR-binding peptide
  MOD_RES (2), (4): Xaa is C or S
RXGXGEVVMERYKKLVVKDYEDFYLMSIANLETPV

SEQ ID NO: 3563 - protein, 36 aa, Artificial Sequence
  GFR-binding peptide
  MOD_RES (31), (32): Xaa is C or S
SKVIMRYKKLIKPTKGIFYLISIANLDQSVXXPSAS

SEQ ID NO: 3564 - protein, 32 aa, Artificial Sequence
  GFR-binding peptide
  MOD_RES (11), (12), (13), (14), (15): Xaa is A or G
  MOD_RES (16), (17), (18), (19): Xaa is A or G or is absent
SKVIMRHKRLXXXXXXXXXYYLISTASLDQSV

SEQ ID NO: 3565 - protein, 42 aa, Artificial Sequence
  GFR-binding peptide
  MOD_RES (2), (4), (38): Xaa is C or S
  MOD_RES (16), (17), (18), (19), (20): Xaa is A or G
  MOD_RES (21), (22), (23), (24): Xaa is A or G or is absent
HXGXSRVVMNRYKKLXXXXXXXXXFYLVSIANLKTPAXTPKT

SEQ ID NO: 3566 - protein, 35 aa, Artificial Sequence
  GFR-binding peptide
  MOD_RES (1), (33): Xaa is C or S
XSRVVMNRHKRLIVNSSDDYYLVSTASLKTPAXTP

SEQ ID NO: 3567 - protein, 37 aa, Artificial Sequence
  GFR-binding peptide
  MOD_RES (33), (34): Xaa is C or S
  MOD_RES (11), (12), (13), (14), (15): Xaa is A or G
  MOD_RES (16), (17), (18), (19): Xaa is A or G or is absent
KVVMNQYNKLXXXXXXXXXLYLVSIASLKTPAXXAKP

SEQ ID NO: 3568 - protein, 41 aa, Artificial Sequence
  GFR-binding peptide
  MOD_RES (1), (3), (35), (36): Xaa is C or S
XGXAKVVMNRHKRLIVNNSSDYYLVSTASLKTPAXXAKPVA

SEQ ID NO: 3569 - protein, 34 aa, Artificial Sequence
  GFR-binding peptide
  MOD_RES (33), (33): Xaa is C or S
  MOD_RES (11), (12), (13), (14), (15): Xaa is A or G
  MOD_RES (16), (17), (18), (19): Xaa is A or G or is absent
RVVMNRHKRLXXXXXXXXXYYLVSTASLKTPAXT

SEQ ID NO: 3570 - protein, 35 aa, Artificial Sequence
  GFR-binding peptide
  MOD_RES (2), (34), (35): Xaa is C or S
GXSRVVMNRHKRLIVNSSDDYYLVSTASLKTPAXX

SEQ ID NO: 3571 - protein, 30 aa, Artificial Sequence
  GFR-binding peptide
SKVIMRYKKLIKPTKGIFYLISIANLDQSV

SEQ ID NO: 3572 - protein, 38 aa, Artificial Sequence
  GFR-binding peptide
  MOD_RES (2), (4), (38): Xaa is C or S
  MOD_RES (16), (17), (18), (19), (20): Xaa is A or G
  MOD_RES (21), (22), (23), (24): Xaa is A or G or is absent
HXGXSRVVMNYHYKLXXXXXXXXXKYLVSIPSLKTPAX

SEQ ID NO: 3573 - protein, 38 aa, Artificial Sequence
  GFR-binding peptide
  MOD_RES (2), (4), (35), (36): Xaa is C or S
SXKXSKVIMRYKKLIKPTKGIFYLISIANLDQSVXXPS

SEQ ID NO: 3574 - protein, 43 aa, Artificial Sequence
  GFR-binding peptide
  MOD_RES (2), (39): Xaa is C or S
  MOD_RES (15), (16), (17), (18), (19): Xaa is A or G
  MOD_RES (20), (21), (22), (23): Xaa is A or G or is absent
KXALHDELTQYNKLXXXXXXXXXLYLVSIASLQVQTPRXQVNR

SEQ ID NO: 3575 - protein, 36 aa, Artificial Sequence
  GFR-binding peptide
  MOD_RES (2), (35), (36): Xaa is C or S
  MOD_RES (13), (14), (15), (16), (17): Xaa is A or G
  MOD_RES (18), (19), (20), (21): Xaa is A or G or is absent
KXSRVIMQYNKLXXXXXXXXXLYLISIASLAQPVXX

SEQ ID NO: 3576 - protein, 40 aa, Artificial Sequence
  GFR-binding peptide
  MOD_RES (2), (36), (37): Xaa is C or S
  MOD_RES (14), (15), (16), (17), (18): Xaa is A or G
  MOD_RES (19), (20), (21), (22): Xaa is A or G or is absent
GXGEVVMDRYKKLXXXXXXXXXFYLMSIANLETPVXXAKP

SEQ ID NO: 3577 - protein, 32 aa, Artificial Sequence
  GFR-binding peptide
  MOD_RES (1), (1): Xaa is C or S
XSRVVMNRHKRLIVNSSDDYYLVSTASLKTPA

SEQ ID NO: 3578 - protein, 44 aa, Artificial Sequence
  GFR-binding peptide
  MOD_RES (1), (3), (40): Xaa is C or S
XKXALHDELTRHKRLFIPKKRVIEYYLVSTASLQVQTPRXQVNR

SEQ ID NO: 3579 - protein, 37 aa, Artificial Sequence
  GFR-binding peptide
  MOD_RES (2), (36), (37): Xaa is C or S
  MOD_RES (14), (15), (16), (17), (18): Xaa is A or G
  MOD_RES (19), (20), (21), (22): Xaa is A or G or is absent
GXGEVVMDYHYKLXXXXXXXXXKYLMSIPSLETPVXX

SEQ ID NO: 3580 - protein, 42 aa, Artificial Sequence
  GFR-binding peptide
  MOD_RES (1), (36), (37): Xaa is C or S
  MOD_RES (14), (15), (16), (17), (18): Xaa is A or G
  MOD_RES (19), (20), (21), (22): Xaa is A or G or is absent
XEAVSMGEYHYKLXXXXXXXXXKYLVSIPSLKTPVXXAKGVK

SEQ ID NO: 3581 - protein, 32 aa, Artificial Sequence
  GFR-binding peptide
  MOD_RES (32), (32): Xaa is C or S
AKVVMNRHKRLIVNNSSDYYLVSTASLKTPAX

SEQ ID NO: 3582 - protein, 37 aa, Artificial Sequence
  GFR-binding peptide
  MOD_RES (34), (35): Xaa is C or S
  MOD_RES (12), (13), (14), (15), (16): Xaa is A or G
  MOD_RES (17), (18), (19), (20): Xaa is A or G or is absent
AKVVMNRYKKLXXXXXXXXXFYLVSIANLKTPAXXAK

SEQ ID NO: 3583 - protein, 38 aa, Artificial Sequence
  GFR-binding peptide
  MOD_RES (32), (33): Xaa is C or S
ARVVMNRHKRLIVNSSDDYYLVSTASLQTPAXXPKPVT

SEQ ID NO: 3584 - protein, 36 aa, Artificial Sequence
  GFR-binding peptide
  MOD_RES (35), (35): Xaa is C or S
  MOD_RES (11), (12), (13), (14), (15): Xaa is A or G
  MOD_RES (16), (17), (18), (19): Xaa is A or G or is absent
HDELTQYNKLXXXXXXXXXLYLVSIASLQVQTPRXQ

SEQ ID NO: 3585 - protein, 34 aa, Artificial Sequence
  GFR-binding peptide
  MOD_RES (1), (33), (34): Xaa is C or S
XARVVMNYHYKLIVNSSDDKYLVSIPSLQTPAXX

SEQ ID NO: 3586 - protein, 39 aa, Artificial Sequence
  GFR-binding peptide
  MOD_RES (2), (4), (36), (37): Xaa is C or S
HXGXARVVMNRHKRLIVNSSDDYYLVSTASLQTPAXXPK

SEQ ID NO: 3587 - protein, 38 aa, Artificial Sequence
  GFR-binding peptide
  MOD_RES (1), (3), (37), (38): Xaa is C or S
  MOD_RES (15), (16), (17), (18), (19): Xaa is A or G
  MOD_RES (20), (21), (22), (23): Xaa is A or G or is absent
XGXGEVVMDRHKRLXXXXXXXXXYYLMSTASLETPVXX

SEQ ID NO: 3588 - protein, 42 aa, Artificial Sequence
  GFR-binding peptide
  MOD_RES (1), (3), (40): Xaa is C or S
  MOD_RES (16), (17), (18), (19), (20): Xaa is A or G
  MOD_RES (21), (22), (23), (24): Xaa is A or G or is absent
XKXALHDELTYHYKLXXXXXXXXXKYLVSIPSLQVQTPRXQV

SEQ ID NO: 3589 - protein, 36 aa, Artificial Sequence
  GFR-binding peptide
  MOD_RES (1), (3), (36): Xaa is C or S
  MOD_RES (14), (15), (16), (17), (18): Xaa is A or G
  MOD_RES (19), (20), (21), (22): Xaa is A or G or is absent
XKXSKVIMRYKKLXXXXXXXXXFYLISIANLDQSVX

SEQ ID NO: 3590 - protein, 39 aa, Artificial Sequence
  GFR-binding peptide
  MOD_RES (2), (34), (35): Xaa is C or S
GXAKVVMNQYNKLIVNNSSDLYLVSIASLKTPAXXAKPV

SEQ ID NO: 3591 - protein, 40 aa, Artificial Sequence
  GFR-binding peptide
  MOD_RES (1), (3), (37), (38): Xaa is C or S
  MOD_RES (15), (16), (17), (18), (19): Xaa is A or G
  MOD_RES (20), (21), (22), (23): Xaa is A or G or is absent
XGXGEVVMEYHYKLXXXXXXXXXKYLMSIPSLETPVXXAK

SEQ ID NO: 3592 - protein, 40 aa, Artificial Sequence
  GFR-binding peptide
  MOD_RES (1), (3), (34), (35): Xaa is C or S
XKXSKVIMYHYKLIKPTKGIKYLISIPSLDQSVXXPSASA

SEQ ID NO: 3593 - protein, 41 aa, Artificial Sequence
  GFR-binding peptide
  MOD_RES (1), (3), (36), (37): Xaa is C or S
XGXEAVSMGERYKKLTPVGMDDFYLVSIANLKTPVXXAKGV

SEQ ID NO: 3594 - protein, 40 aa, Artificial Sequence
  GFR-binding peptide
  MOD_RES (37), (37): Xaa is C or S
  MOD_RES (13), (14), (15), (16), (17): Xaa is A or G
  MOD_RES (18), (19), (20), (21): Xaa is A or G or is absent
ALHDELTRYKKLXXXXXXXXXFYLVSIANLQVQTPRXQVN

SEQ ID NO: 3595 - protein, 42 aa, Artificial Sequence
  GFR-binding peptide
  MOD_RES (1), (3), (36), (37): Xaa is C or S
  MOD_RES (14), (15), (16), (17), (18): Xaa is A or G
  MOD_RES (19), (20), (21), (22): Xaa is A or G or is absent
XKXSKVVMRHKRLXXXXXXXXXYYLISTASLDQPVXXPSASA

SEQ ID NO: 3596 - protein, 38 aa, Artificial Sequence
  GFR-binding peptide
  MOD_RES (2), (4), (36): Xaa is C or S
HXGXSRVVMNQYNKLIVNSSDDLYLVSIASLKTPAXTP

SEQ ID NO: 3597 - protein, 36 aa, Artificial Sequence
  GFR-binding peptide
  MOD_RES (1), (3), (35), (36): Xaa is C or S
XGXAKVVMNYHYKLIVNNSSDKYLVSIPSLKTPAXX

SEQ ID NO: 3598 - protein, 34 aa, Artificial Sequence
  GFR-binding peptide
LHDELTYHYKLFIPKKRVIEKYLVSIPSLQVQTP

SEQ ID NO: 3599 - protein, 32 aa, Artificial Sequence
  GFR-binding peptide
  MOD_RES (31), (32): Xaa is C or S
EVVMEQYNKLVVKDYEDLYLMSIASLETPVXX

SEQ ID NO: 3600 - protein, 38 aa, Artificial Sequence
  GFR-binding peptide
  MOD_RES (1), (3), (36), (37): Xaa is C or S
XGXEAVSMGERHKRLTPVGMDDYYLVSTASLKTPVXXA

SEQ ID NO: 3601 - protein, 42 aa, Artificial Sequence
  GFR-binding peptide
  MOD_RES (1), (3), (36), (37): Xaa is C or S
  MOD_RES (14), (15), (16), (17), (18): Xaa is A or G
  MOD_RES (19), (20), (21), (22): Xaa is A or G or is absent
XKXSKVVMQYNKLXXXXXXXXXLYLISIASLDQPVXXPSASA

SEQ ID NO: 3602 - protein, 43 aa, Artificial Sequence
  GFR-binding peptide
  MOD_RES (2), (39): Xaa is C or S
  MOD_RES (15), (16), (17), (18), (19): Xaa is A or G
  MOD_RES (20), (21), (22), (23): Xaa is A or G or is absent
KXALHDELTRHKRLXXXXXXXXXYYLVSTASLQVQTPRXQVNR

SEQ ID NO: 3603 - protein, 35 aa, Artificial Sequence
  GFR-binding peptide
  MOD_RES (1), (3): Xaa is C or S
  MOD_RES (14), (15), (16), (17), (18): Xaa is A or G
  MOD_RES (19), (20), (21), (22): Xaa is A or G or is absent
XKXSRVIMRHKRLXXXXXXXXXYYLISTASLAQPV

SEQ ID NO: 3604 - protein, 39 aa, Artificial Sequence
  GFR-binding peptide
  MOD_RES (2), (36), (37): Xaa is C or S
  MOD_RES (14), (15), (16), (17), (18): Xaa is A or G
  MOD_RES (19), (20), (21), (22): Xaa is A or G or is absent
GXSRVVMNRHKRLXXXXXXXXXYYLVSTASLKTPAXXPK

SEQ ID NO: 3605 - protein, 39 aa, Artificial Sequence
  GFR-binding peptide
  MOD_RES (2), (4), (38), (39): Xaa is C or S
  MOD_RES (16), (17), (18), (19), (20): Xaa is A or G
  MOD_RES (21), (22), (23), (24): Xaa is A or G or is absent
RXGXGEVVMDRHKRLXXXXXXXXXYYLMSTASLETPVXX

SEQ ID NO: 3606 - protein, 37 aa, Artificial Sequence
  GFR-binding peptide
  MOD_RES (1), (3), (37): Xaa is C or S
  MOD_RES (15), (16), (17), (18), (19): Xaa is A or G
  MOD_RES (20), (21), (22), (23): Xaa is A or G or is absent
XGXGEVVMEYHYKLXXXXXXXXXKYLMSIPSLETPVX

SEQ ID NO: 3607 - protein, 38 aa, Artificial Sequence
  GFR-binding peptide
  MOD_RES (1), (34), (35): Xaa is C or S
XEAVSMGERYKKLTPVGMDDFYLVSIANLKTPVXXAKG

SEQ ID NO: 3608 - protein, 41 aa, Artificial Sequence
  GFR-binding peptide
  MOD_RES (1), (3), (35), (36): Xaa is C or S
XGXSRVVMNRYKKLIVNSSDDFYLVSIANLKTPAXXPKPVY

SEQ ID NO: 3609 - protein, 39 aa, Artificial Sequence
  GFR-binding peptide
  MOD_RES (1), (3), (34), (35): Xaa is C or S
XKXSRVIMRYKKLVKPKRGVFYLISIANLAQPVXXPAAS

SEQ ID NO: 3610 - protein, 36 aa, Artificial Sequence
  GFR-binding peptide
  MOD_RES (31), (32): Xaa is C or S
RVVMNYHYKLIVNSSDDKYLVSIPSLKTPAXXPKPV

SEQ ID NO: 3611 - protein, 31 aa, Artificial Sequence
  GFR-binding peptide
SRVVMNRYKKLIVNSSDDFYLVSIANLKTPA

SEQ ID NO: 3612 - protein, 35 aa, Artificial Sequence
  GFR-binding peptide
  MOD_RES (31), (32): Xaa is C or S
EVVMDRHKRLVVKENEDYYLMSTASLETPVXXAKP

SEQ ID NO: 3613 - protein, 40 aa, Artificial Sequence
  GFR-binding peptide
  MOD_RES (2), (4), (38), (39): Xaa is C or S
  MOD_RES (16), (17), (18), (19), (20): Xaa is A or G
  MOD_RES (21), (22), (23), (24): Xaa is A or G or is absent
HXGXARVVMNRHKRLXXXXXXXXXYYLVSTASLQTPAXXP

SEQ ID NO: 3614 - protein, 34 aa, Artificial Sequence
  GFR-binding peptide
ALHDELTQYNKLFIPKKRVIELYLVSIASLQVQT

SEQ ID NO: 3615 - protein, 34 aa, Artificial Sequence
  GFR-binding peptide
  MOD_RES (31), (32): Xaa is C or S
SKVVMRYKKLVKPTRGVFYLISIANLDQPVXXPS

SEQ ID NO: 3616 - protein, 34 aa, Artificial Sequence
  GFR-binding peptide
ALHDELTRHKRLFIPKKRVIEYYLVSTASLQVQT

SEQ ID NO: 3617 - protein, 42 aa, Artificial Sequence
  GFR-binding peptide
  MOD_RES (2), (4), (36), (37): Xaa is C or S
RXGXGEVVMEYHYKLVVKDYEDKYLMSIPSLETPVXXAKPIS

SEQ ID NO: 3618 - protein, 38 aa, Artificial Sequence
  GFR-binding peptide
  MOD_RES (33), (34): Xaa is C or S
  MOD_RES (11), (12), (13), (14), (15): Xaa is A or G
  MOD_RES (16), (17), (18), (19): Xaa is A or G or is absent
EVVMEQYNKLXXXXXXXXXLYLMSIASLETPVXXAKPI

SEQ ID NO: 3619 - protein, 35 aa, Artificial Sequence
  GFR-binding peptide
  MOD_RES (35), (35): Xaa is C or S
  MOD_RES (11), (12), (13), (14), (15): Xaa is A or G
  MOD_RES (16), (17), (18), (19): Xaa is A or G or is absent
HDELTRHKRLXXXXXXXXXYYLVSTASLQVQTPRX

SEQ ID NO: 3620 - protein, 39 aa, Artificial Sequence
  GFR-binding peptide
  MOD_RES (2), (4), (36), (37): Xaa is C or S
RXGXGEVVMDYHYKLVVKENEDKYLMSIPSLETPVXXAK

SEQ ID NO: 3621 - protein, 40 aa, Artificial Sequence
  GFR-binding peptide
  MOD_RES (2), (4), (37), (38): Xaa is C or S
  MOD_RES (15), (16), (17), (18), (19): Xaa is A or G
  MOD_RES (20), (21), (22), (23): Xaa is A or G or is absent
SXKXSKVIMQYNKLXXXXXXXXXLYLISIASLDQSVXXPS

SEQ ID NO: 3622 - protein, 35 aa, Artificial Sequence
  GFR-binding peptide
  MOD_RES (2), (35): Xaa is C or S
GXEAVSMGERYKKLTPVGMDDFYLVSIANLKTPVX

SEQ ID NO: 3623 - protein, 43 aa, Artificial Sequence
  GFR-binding peptide
  MOD_RES (2), (4), (37), (38): Xaa is C or S
RXGXEAVSMGEYHYKLTPVGMDDKYLVSIPSLKTPVXXAKGVK

SEQ ID NO: 3624 - protein, 43 aa, Artificial Sequence
  GFR-binding peptide
  MOD_RES (2), (39): Xaa is C or S
KXALHDELTRHKRLFIPKKRVIEYYLVSTASLQVQTPRXQVNR

SEQ ID NO: 3625 - protein, 33 aa, Artificial Sequence
  GFR-binding peptide
  MOD_RES (12), (13), (14), (15), (16): Xaa is A or G
  MOD_RES (17), (18), (19), (20): Xaa is A or G or is absent
LHDELTYHYKLXXXXXXXXXKYLVSIPSLQVQT

SEQ ID NO: 3626 - protein, 33 aa, Artificial Sequence
  GFR-binding peptide
  MOD_RES (1), (33): Xaa is C or S
XGEVVMDRYKKLVVKENEDFYLMSIANLETPVX

SEQ ID NO: 3627 - protein, 37 aa, Artificial Sequence
  GFR-binding peptide
  MOD_RES (1), (3), (36), (37): Xaa is C or S
  MOD_RES (14), (15), (16), (17), (18): Xaa is A or G
  MOD_RES (19), (20), (21), (22): Xaa is A or G or is absent
XKXSKVIMYHYKLXXXXXXXXXKYLISIPSLDQSVXX

SEQ ID NO: 3628 - protein, 43 aa, Artificial Sequence
  GFR-binding peptide
  MOD_RES (1), (3), (37), (38): Xaa is C or S
  MOD_RES (15), (16), (17), (18), (19): Xaa is A or G
  MOD_RES (20), (21), (22), (23): Xaa is A or G or is absent
XGXARVVMNRYKKLXXXXXXXXXFYLVSIANLQTPAXXPKPVT

SEQ ID NO: 3629 - protein, 37 aa, Artificial Sequence
  GFR-binding peptide
  MOD_RES (1), (34), (35): Xaa is C or S
  MOD_RES (12), (13), (14), (15), (16): Xaa is A or G
  MOD_RES (17), (18), (19), (20): Xaa is A or G or is absent
XSKVVMRHKRLXXXXXXXXXYYLISTASLDQPVXXPS

SEQ ID NO: 3630 - protein, 38 aa, Artificial Sequence
  GFR-binding peptide
  MOD_RES (33), (34): Xaa is C or S
  MOD_RES (11), (12), (13), (14), (15): Xaa is A or G
  MOD_RES (16), (17), (18), (19): Xaa is A or G or is absent
EVVMDRYKKLXXXXXXXXXFYLMSIANLETPVXXAKPI

SEQ ID NO: 3631 - protein, 34 aa, Artificial Sequence
  GFR-binding peptide
  MOD_RES (1), (33), (34): Xaa is C or S
XGEVVMDRYKKLVVKENEDFYLMSIANLETPVXX

SEQ ID NO: 3632 - protein, 39 aa, Artificial Sequence
  GFR-binding peptide
  MOD_RES (33), (34): Xaa is C or S
EAVSMGERYKKLTPVGMDDFYLVSIANLKTPVXXAKGVK

SEQ ID NO: 3633 - protein, 35 aa, Artificial Sequence
  GFR-binding peptide
  MOD_RES (2), (34), (35): Xaa is C or S
GXARVVMNRHKRLIVNSSDDYYLVSTASLQTPAXX

SEQ ID NO: 3634 - protein, 37 aa, Artificial Sequence
  GFR-binding peptide
  MOD_RES (1), (3), (34), (35): Xaa is C or S
XKXSRVIMYHYKLVKPKRGVKYLISIPSLAQPVXXPA

SEQ ID NO: 3635 - protein, 37 aa, Artificial Sequence
  GFR-binding peptide
  MOD_RES (2), (35), (36): Xaa is C or S
  MOD_RES (13), (14), (15), (16), (17): Xaa is A or G
  MOD_RES (18), (19), (20), (21): Xaa is A or G or is absent
KXSKVVMRHKRLXXXXXXXXXYYLISTASLDQPVXXP

SEQ ID NO: 3636 - protein, 40 aa, Artificial Sequence
  GFR-binding peptide
  MOD_RES (1), (34), (35): Xaa is C or S
  MOD_RES (12), (13), (14), (15), (16): Xaa is A or G
  MOD_RES (17), (18), (19), (20): Xaa is A or G or is absent
XSKVVMYHYKLXXXXXXXXXKYLISIPSLDQPVXXPSASA

SEQ ID NO: 3637 - protein, 35 aa, Artificial Sequence
  GFR-binding peptide
  MOD_RES (2), (35): Xaa is C or S
  MOD_RES (13), (14), (15), (16), (17): Xaa is A or G
  MOD_RES (18), (19), (20), (21): Xaa is A or G or is absent
KXSRVIMRYKKLXXXXXXXXXFYLISIANLAQPVX

SEQ ID NO: 3638 - protein, 34 aa, Artificial Sequence
  GFR-binding peptide
  MOD_RES (1), (33), (34): Xaa is C or S
XGEVVMDYHYKLVVKENEDKYLMSIPSLETPVXX

SEQ ID NO: 3639 - protein, 36 aa, Artificial Sequence
  GFR-binding peptide
  MOD_RES (2), (4), (35), (36): Xaa is C or S
SXKXSKVIMRYKKLIKPTKGIFYLISIANLDQSVXX

SEQ ID NO: 3640 - protein, 36 aa, Artificial Sequence
  GFR-binding peptide
  MOD_RES (1), (35), (36): Xaa is C or S
  MOD_RES (13), (14), (15), (16), (17): Xaa is A or G
  MOD_RES (18), (19), (20), (21): Xaa is A or G or is absent
XGEVVMDRYKKLXXXXXXXXXFYLMSIANLETPVXX

SEQ ID NO: 3641 - protein, 38 aa, Artificial Sequence
  GFR-binding peptide
  MOD_RES (1), (3), (38): Xaa is C or S
  MOD_RES (16), (17), (18), (19), (20): Xaa is A or G
  MOD_RES (21), (22), (23), (24): Xaa is A or G or is absent
XGXEAVSMGEYHYKLXXXXXXXXXKYLVSIPSLKTPVX

SEQ ID NO: 3642 - protein, 42 aa, Artificial Sequence
  GFR-binding peptide
  MOD_RES (2), (4), (38), (39): Xaa is C or S
  MOD_RES (16), (17), (18), (19), (20): Xaa is A or G
  MOD_RES (21), (22), (23), (24): Xaa is A or G or is absent
HXGXARVVMNRHKRLXXXXXXXXXYYLVSTASLQTPAXXPKP

SEQ ID NO: 3643 - protein, 32 aa, Artificial Sequence
  GFR-binding peptide
  MOD_RES (1), (1): Xaa is C or S
XARVVMNQYNKLIVNSSDDLYLVSIASLQTPA

SEQ ID NO: 3644 - protein, 38 aa, Artificial Sequence
  GFR-binding peptide
  MOD_RES (1), (33), (34): Xaa is C or S
XGEVVMERYKKLVVKDYEDFYLMSIANLETPVXXAKPI

SEQ ID NO: 3645 - protein, 37 aa, Artificial Sequence
  GFR-binding peptide
  MOD_RES (31), (32): Xaa is C or S
RVVMNQYNKLIVNSSDDLYLVSIASLKTPAXXPKPVY

SEQ ID NO: 3646 - protein, 42 aa, Artificial Sequence
  GFR-binding peptide
  MOD_RES (2), (36), (37): Xaa is C or S
  MOD_RES (14), (15), (16), (17), (18): Xaa is A or G
  MOD_RES (19), (20), (21), (22): Xaa is A or G or is absent
GXGEVVMERHKRLXXXXXXXXXYYLMSTASLETPVXXAKPIS

SEQ ID NO: 3647 - protein, 43 aa, Artificial Sequence
  GFR-binding peptide
  MOD_RES (2), (4), (38), (39): Xaa is C or S
  MOD_RES (16), (17), (18), (19), (20): Xaa is A or G
  MOD_RES (21), (22), (23), (24): Xaa is A or G or is absent
HXGXARVVMNYHYKLXXXXXXXXXKYLVSIPSLQTPAXXPKPV

SEQ ID NO: 3648 - protein, 38 aa, Artificial Sequence
  GFR-binding peptide
  MOD_RES (2), (36), (37): Xaa is C or S
  MOD_RES (14), (15), (16), (17), (18): Xaa is A or G
  MOD_RES (19), (20), (21), (22): Xaa is A or G or is absent
GXGEVVMERYKKLXXXXXXXXXFYLMSIANLETPVXXA

SEQ ID NO: 3649 - protein, 37 aa, Artificial Sequence
  GFR-binding peptide
  MOD_RES (1), (34), (35): Xaa is C or S
  MOD_RES (12), (13), (14), (15), (16): Xaa is A or G
  MOD_RES (17), (18), (19), (20): Xaa is A or G or is absent
XSKVVMQYNKLXXXXXXXXXLYLISIASLDQPVXXPS

SEQ ID NO: 3650 - protein, 39 aa, Artificial Sequence
  GFR-binding peptide
  MOD_RES (1), (3), (35): Xaa is C or S
XGXSRVVMNYHYKLIVNSSDDKYLVSIPSLKTPAXTPKT

SEQ ID NO: 3651 - protein, 35 aa, Artificial Sequence
  GFR-binding peptide
  MOD_RES (1), (3): Xaa is C or S
  MOD_RES (14), (15), (16), (17), (18): Xaa is A or G
  MOD_RES (19), (20), (21), (22): Xaa is A or G or is absent
XKXSKVIMYHYKLXXXXXXXXXKYLISIPSLDQSV

SEQ ID NO: 3652 - protein, 31 aa, Artificial Sequence
  GFR-binding peptide
GEVVMDQYNKLVVKENEDLYLMSIASLETPV

SEQ ID NO: 3653 - protein, 37 aa, Artificial Sequence
  GFR-binding peptide
  MOD_RES (2), (34), (35): Xaa is C or S
GXGEVVMEQYNKLVVKDYEDLYLMSIASLETPVXXAK

SEQ ID NO: 3654 - protein, 44 aa, Artificial Sequence
  GFR-binding peptide
  MOD_RES (1), (3), (38), (39): Xaa is C or S
  MOD_RES (16), (17), (18), (19), (20): Xaa is A or G
  MOD_RES (21), (22), (23), (24): Xaa is A or G or is absent
XGXEAVSMGEYHYKLXXXXXXXXXKYLVSIPSLKTPVXXAKGVK

SEQ ID NO: 3655 - protein, 39 aa, Artificial Sequence
  GFR-binding peptide
  MOD_RES (2), (4), (39): Xaa is C or S
  MOD_RES (17), (18), (19), (20), (21): Xaa is A or G
  MOD_RES (22), (23), (24), (25): Xaa is A or G or is absent
RXGXEAVSMGEYHYKLXXXXXXXXXKYLVSIPSLKTPVX

SEQ ID NO: 3656 - protein, 35 aa, Artificial Sequence
  GFR-binding peptide
  MOD_RES (32), (33): Xaa is C or S
GEVVMDRHKRLVVKENEDYYLMSTASLETPVXXAK

SEQ ID NO: 3657 - protein, 40 aa, Artificial Sequence
  GFR-binding peptide
  MOD_RES (1), (3), (34), (35): Xaa is C or S
XKXSKVVMRHKRLVKPTRGVYYLISTASLDQPVXXPSASA

SEQ ID NO: 3658 - protein, 36 aa, Artificial Sequence
  GFR-binding peptide
  MOD_RES (32), (33): Xaa is C or S
GEVVMEQYNKLVVKDYEDLYLMSIASLETPVXXAKP

SEQ ID NO: 3659 - protein, 39 aa, Artificial Sequence
  GFR-binding peptide
  MOD_RES (1), (3), (34), (35): Xaa is C or S
XKXSKVVMYHYKLVKPTRGVKYLISIPSLDQPVXXPSAS

SEQ ID NO: 3660 - protein, 32 aa, Artificial Sequence
  GFR-binding peptide
  MOD_RES (32), (32): Xaa is C or S
GEVVMERHKRLVVKDYEDYYLMSTASLETPVX

SEQ ID NO: 3661 - protein, 36 aa, Artificial Sequence
  GFR-binding peptide
  MOD_RES (1), (3), (35), (36): Xaa is C or S
XGXARVVMNQYNKLIVNSSDDLYLVSIASLQTPAXX

SEQ ID NO: 3662 - protein, 34 aa, Artificial Sequence
  GFR-binding peptide
  MOD_RES (33), (34): Xaa is C or S
  MOD_RES (11), (12), (13), (14), (15): Xaa is A or G
  MOD_RES (16), (17), (18), (19): Xaa is A or G or is absent
KVVMNRYKKLXXXXXXXXXFYLVSIANLKTPAXX

SEQ ID NO: 3663 - protein, 37 aa, Artificial Sequence
  GFR-binding peptide
  MOD_RES (2), (4), (37): Xaa is C or S
  MOD_RES (15), (16), (17), (18), (19): Xaa is A or G
  MOD_RES (20), (21), (22), (23): Xaa is A or G or is absent
SXKXSKVVMQYNKLXXXXXXXXXLYLISIASLDQPVX

SEQ ID NO: 3664 - protein, 37 aa, Artificial Sequence
  GFR-binding peptide
  MOD_RES (37), (37): Xaa is C or S
  MOD_RES (13), (14), (15), (16), (17): Xaa is A or G
  MOD_RES (18), (19), (20), (21): Xaa is A or G or is absent
ALHDELTRYKKLXXXXXXXXXFYLVSIANLQVQTPRX

SEQ ID NO: 3665 - protein, 35 aa, Artificial Sequence
  GFR-binding peptide
  MOD_RES (1), (34), (35): Xaa is C or S
  MOD_RES (12), (13), (14), (15), (16): Xaa is A or G
  MOD_RES (17), (18), (19), (20): Xaa is A or G or is absent
XSKVIMYHYKLXXXXXXXXXKYLISIPSLDQSVXX

SEQ ID NO: 3666 - protein, 36 aa, Artificial Sequence
  GFR-binding peptide
  MOD_RES (32), (32): Xaa is C or S
SRVVMNYHYKLIVNSSDDKYLVSIPSLKTPAXTPKT

SEQ ID NO: 3667 - protein, 39 aa, Artificial Sequence
  GFR-binding peptide
  MOD_RES (34), (35): Xaa is C or S
  MOD_RES (12), (13), (14), (15), (16): Xaa is A or G
  MOD_RES (17), (18), (19), (20): Xaa is A or G or is absent
AKVVMNYHYKLXXXXXXXXXKYLVSIPSLKTPAXXAKPV

SEQ ID NO: 3668 - protein, 41 aa, Artificial Sequence
  GFR-binding peptide
  MOD_RES (1), (3), (35), (36): Xaa is C or S
XGXGEVVMDRYKKLVVKENEDFYLMSIANLETPVXXAKPIK

SEQ ID NO: 3669 - protein, 34 aa, Artificial Sequence
  GFR-binding peptide
  MOD_RES (33), (34): Xaa is C or S
  MOD_RES (11), (12), (13), (14), (15): Xaa is A or G
  MOD_RES (16), (17), (18), (19): Xaa is A or G or is absent
RVVMNRYKKLXXXXXXXXXFYLVSIANLKTPAXX

SEQ ID NO: 3670 - protein, 34 aa, Artificial Sequence
  GFR-binding peptide
  MOD_RES (12), (13), (14), (15), (16): Xaa is A or G
  MOD_RES (17), (18), (19), (20): Xaa is A or G or is absent
LHDELTRHKRLXXXXXXXXXYYLVSTASLQVQTP

SEQ ID NO: 3671 - protein, 35 aa, Artificial Sequence
  GFR-binding peptide
  MOD_RES (2), (34), (35): Xaa is C or S
GXAKVVMNQYNKLIVNNSSDLYLVSIASLKTPAXX

SEQ ID NO: 3672 - protein, 37 aa, Artificial Sequence
  GFR-binding peptide
  MOD_RES (2), (4), (36): Xaa is C or S
HXGXSRVVMNRYKKLIVNSSDDFYLVSIANLKTPAXT

SEQ ID NO: 3673 - protein, 37 aa, Artificial Sequence
  GFR-binding peptide
  MOD_RES (1), (3), (37): Xaa is C or S
  MOD_RES (15), (16), (17), (18), (19): Xaa is A or G
  MOD_RES (20), (21), (22), (23): Xaa is A or G or is absent
XGXGEVVMDYHYKLXXXXXXXXXKYLMSIPSLETPVX

SEQ ID NO: 3674 - protein, 39 aa, Artificial Sequence
  GFR-binding peptide
  MOD_RES (1), (35), (36): Xaa is C or S
  MOD_RES (13), (14), (15), (16), (17): Xaa is A or G
  MOD_RES (18), (19), (20), (21): Xaa is A or G or is absent
XAKVVMNQYNKLXXXXXXXXXLYLVSIASLKTPAXXAKP

SEQ ID NO: 3675 - protein, 40 aa, Artificial Sequence
  GFR-binding peptide
  MOD_RES (1), (35), (36): Xaa is C or S
  MOD_RES (13), (14), (15), (16), (17): Xaa is A or G
  MOD_RES (18), (19), (20), (21): Xaa is A or G or is absent
XGEVVMDQYNKLXXXXXXXXXLYLMSIASLETPVXXAKPI

SEQ ID NO: 3676 - protein, 40 aa, Artificial Sequence
  GFR-binding peptide
  MOD_RES (1), (3), (35), (36): Xaa is C or S
XGXGEVVMERHKRLVVKDYEDYYLMSTASLETPVXXAKPI

SEQ ID NO: 3677 - protein, 39 aa, Artificial Sequence
  GFR-binding peptide
  MOD_RES (1), (3), (37), (38): Xaa is C or S
  MOD_RES (15), (16), (17), (18), (19): Xaa is A or G
  MOD_RES (20), (21), (22), (23): Xaa is A or G or is absent
XGXGEVVMDYHYKLXXXXXXXXXKYLMSIPSLETPVXXA

SEQ ID NO: 3678 - protein, 41 aa, Artificial Sequence
  GFR-binding peptide
  MOD_RES (1), (3), (37), (38): Xaa is C or S
  MOD_RES (15), (16), (17), (18), (19): Xaa is A or G
  MOD_RES (20), (21), (22), (23): Xaa is A or G or is absent
XGXARVVMNYHYKLXXXXXXXXXKYLVSIPSLQTPAXXPKP

SEQ ID NO: 3679 - protein, 41 aa, Artificial Sequence
  GFR-binding peptide
  MOD_RES (2), (4), (41): Xaa is C or S
EXKXALHDELTQYNKLFIPKKRVIELYLVSIASLQVQTPRX

SEQ ID NO: 3680 - protein, 36 aa, Artificial Sequence
  GFR-binding peptide
  MOD_RES (34), (35): Xaa is C or S
  MOD_RES (12), (13), (14), (15), (16): Xaa is A or G
  MOD_RES (17), (18), (19), (20): Xaa is A or G or is absent
GEVVMERHKRLXXXXXXXXXYYLMSTASLETPVXXA

SEQ ID NO: 3681 - protein, 39 aa, Artificial Sequence
  GFR-binding peptide
  MOD_RES (1), (35), (36): Xaa is C or S
  MOD_RES (13), (14), (15), (16), (17): Xaa is A or G
  MOD_RES (18), (19), (20), (21): Xaa is A or G or is absent
XSRVVMNYHYKLXXXXXXXXXKYLVSIPSLKTPAXXPKP

SEQ ID NO: 3682 - protein, 34 aa, Artificial Sequence
  GFR-binding peptide
  MOD_RES (1), (32), (33): Xaa is C or S
XSKVIMRYKKLIKPTKGIFYLISIANLDQSVXXP

SEQ ID NO: 3683 - protein, 35 aa, Artificial Sequence
  GFR-binding peptide
  MOD_RES (33), (34): Xaa is C or S
  MOD_RES (11), (12), (13), (14), (15): Xaa is A or G
  MOD_RES (16), (17), (18), (19): Xaa is A or G or is absent
SKVVMRHKRLXXXXXXXXXYYLISTASLDQPVXXP

SEQ ID NO: 3684 - protein, 38 aa, Artificial Sequence
  GFR-binding peptide
  MOD_RES (2), (33), (34): Xaa is C or S
KXSKVIMRHKRLIKPTKGIYYLISTASLDQSVXXPSAS

SEQ ID NO: 3685 - protein, 35 aa, Artificial Sequence
  GFR-binding peptide
  MOD_RES (33), (34): Xaa is C or S
  MOD_RES (11), (12), (13), (14), (15): Xaa is A or G
  MOD_RES (16), (17), (18), (19): Xaa is A or G or is absent
EVVMEQYNKLXXXXXXXXXLYLMSIASLETPVXXA

SEQ ID NO: 3686 - protein, 37 aa, Artificial Sequence
  GFR-binding peptide
  MOD_RES (33), (34): Xaa is C or S
  MOD_RES (11), (12), (13), (14), (15): Xaa is A or G
  MOD_RES (16), (17), (18), (19): Xaa is A or G or is absent
SRVIMYHYKLXXXXXXXXXKYLISIPSLAQPVXXPAA

SEQ ID NO: 3687 - protein, 38 aa, Artificial Sequence
  GFR-binding peptide
  MOD_RES (1), (3), (37), (38): Xaa is C or S
  MOD_RES (15), (16), (17), (18), (19): Xaa is A or G
  MOD_RES (20), (21), (22), (23): Xaa is A or G or is absent
XGXGEVVMERYKKLXXXXXXXXXFYLMSIANLETPVXX

SEQ ID NO: 3688 - protein, 38 aa, Artificial Sequence
  GFR-binding peptide
  MOD_RES (2), (35), (36): Xaa is C or S
  MOD_RES (13), (14), (15), (16), (17): Xaa is A or G
  MOD_RES (18), (19), (20), (21): Xaa is A or G or is absent
KXSRVIMQYNKLXXXXXXXXXLYLISIASLAQPVXXPA

SEQ ID NO: 3689 - protein, 41 aa, Artificial Sequence
  GFR-binding peptide
  MOD_RES (2), (4), (35), (36): Xaa is C or S
SXKXSKVIMQYNKLIKPTKGILYLISIASLDQSVXXPSASA

SEQ ID NO: 3690 - protein, 41 aa, Artificial Sequence
  GFR-binding peptide
  MOD_RES (1), (35), (36): Xaa is C or S
  MOD_RES (13), (14), (15), (16), (17): Xaa is A or G
  MOD_RES (18), (19), (20), (21): Xaa is A or G or is absent
XSRVVMNYHYKLXXXXXXXXXKYLVSIPSLKTPAXXPKPVY

SEQ ID NO: 3691 - protein, 40 aa, Artificial Sequence
  GFR-binding peptide
  MOD_RES (1), (3), (34), (35): Xaa is C or S
XKXSRVIMQYNKLVKPKRGVLYLISIASLAQPVXXPAASA

SEQ ID NO: 3692 - protein, 34 aa, Artificial Sequence
  GFR-binding peptide
  MOD_RES (2), (34): Xaa is C or S
GXGEVVMERYKKLVVKDYEDFYLMSIANLETPVX

SEQ ID NO: 3693 - protein, 38 aa, Artificial Sequence
  GFR-binding peptide
  MOD_RES (1), (3), (37), (38): Xaa is C or S
  MOD_RES (15), (16), (17), (18), (19): Xaa is A or G
  MOD_RES (20), (21), (22), (23): Xaa is A or G or is absent
XGXGEVVMERHKRLXXXXXXXXXYYLMSTASLETPVXX

SEQ ID NO: 3694 - protein, 33 aa, Artificial Sequence
  GFR-binding peptide
  MOD_RES (12), (13), (14), (15), (16): Xaa is A or G
  MOD_RES (17), (18), (19), (20): Xaa is A or G or is absent
ARVVMNRHKRLXXXXXXXXXYYLVSTASLQTPA

SEQ ID NO: 3695 - protein, 41 aa, Artificial Sequence
  GFR-binding peptide
  MOD_RES (2), (35), (36): Xaa is C or S
  MOD_RES (13), (14), (15), (16), (17): Xaa is A or G
  MOD_RES (18), (19), (20), (21): Xaa is A or G or is absent
KXSKVVMQYNKLXXXXXXXXXLYLISIASLDQPVXXPSASA

SEQ ID NO: 3696 - protein, 34 aa, Artificial Sequence
  GFR-binding peptide
  MOD_RES (1), (33), (34): Xaa is C or S
XARVVMNRYKKLIVNSSDDFYLVSIANLQTPAXX

SEQ ID NO: 3697 - protein, 37 aa, Artificial Sequence
  GFR-binding peptide
  MOD_RES (31), (32): Xaa is C or S
SRVIMRYKKLVKPKRGVFYLISIANLAQPVXXPAASA

SEQ ID NO: 3698 - protein, 36 aa, Artificial Sequence
  GFR-binding peptide
  MOD_RES (1), (36): Xaa is C or S
  MOD_RES (14), (15), (16), (17), (18): Xaa is A or G
  MOD_RES (19), (20), (21), (22): Xaa is A or G or is absent
XEAVSMGERYKKLXXXXXXXXXFYLVSIANLKTPVX

SEQ ID NO: 3699 - protein, 41 aa, Artificial Sequence
  GFR-binding peptide
  MOD_RES (2), (4), (37), (38): Xaa is C or S
RXGXEAVSMGERYKKLTPVGMDDFYLVSIANLKTPVXXAKG

SEQ ID NO: 3700 - protein, 42 aa, Artificial Sequence
  GFR-binding peptide
  MOD_RES (2), (36), (37): Xaa is C or S
  MOD_RES (14), (15), (16), (17), (18): Xaa is A or G
  MOD_RES (19), (20), (21), (22): Xaa is A or G or is absent
GXARVVMNQYNKLXXXXXXXXXLYLVSIASLQTPAXXPKPVT

SEQ ID NO: 3701 - protein, 40 aa, Artificial Sequence
  GFR-binding peptide
  MOD_RES (1), (38): Xaa is C or S
  MOD_RES (14), (15), (16), (17), (18): Xaa is A or G
  MOD_RES (19), (20), (21), (22): Xaa is A or G or is absent
XALHDELTQYNKLXXXXXXXXXLYLVSIASLQVQTPRXQV

SEQ ID NO: 3702 - protein, 36 aa, Artificial Sequence
  GFR-binding peptide
  MOD_RES (2), (4), (35), (36): Xaa is C or S
SXKXSKVIMQYNKLIKPTKGILYLISIASLDQSVXX

SEQ ID NO: 3703 - protein, 31 aa, Artificial Sequence
  GFR-binding peptide
ARVVMNYHYKLIVNSSDDKYLVSIPSLQTPA

SEQ ID NO: 3704 - protein, 36 aa, Artificial Sequence
  GFR-binding peptide
  MOD_RES (31), (32): Xaa is C or S
RVVMNQYNKLIVNSSDDLYLVSIASLKTPAXXPKPV

SEQ ID NO: 3705 - protein, 40 aa, Artificial Sequence
  GFR-binding peptide
  MOD_RES (2), (34), (35): Xaa is C or S
GXGEVVMEQYNKLVVKDYEDLYLMSIASLETPVXXAKPIS

SEQ ID NO: 3706 - protein, 33 aa, Artificial Sequence
  GFR-binding peptide
  MOD_RES (32), (33): Xaa is C or S
GEVVMERYKKLVVKDYEDFYLMSIANLETPVXX

SEQ ID NO: 3707 - protein, 36 aa, Artificial Sequence
  GFR-binding peptide
  MOD_RES (33), (34): Xaa is C or S
  MOD_RES (11), (12), (13), (14), (15): Xaa is A or G
  MOD_RES (16), (17), (18), (19): Xaa is A or G or is absent
RVVMNQYNKLXXXXXXXXXLYLVSIASLQTPAXXPK

SEQ ID NO: 3708 - protein, 33 aa, Artificial Sequence
  GFR-binding peptide
  MOD_RES (33), (33): Xaa is C or S
  MOD_RES (11), (12), (13), (14), (15): Xaa is A or G
  MOD_RES (16), (17), (18), (19): Xaa is A or G or is absent
EVVMDRHKRLXXXXXXXXXYYLMSTASLETPVX

SEQ ID NO: 3709 - protein, 42 aa, Artificial Sequence
  GFR-binding peptide
  MOD_RES (2), (4), (39), (40): Xaa is C or S
  MOD_RES (17), (18), (19), (20), (21): Xaa is A or G
  MOD_RES (22), (23), (24), (25): Xaa is A or G or is absent
RXGXEAVSMGEYHYKLXXXXXXXXXKYLVSIPSLKTPVXXAK

SEQ ID NO: 3710 - protein, 37 aa, Artificial Sequence
  GFR-binding peptide
  MOD_RES (2), (4), (36), (37): Xaa is C or S
RXGXGEVVMDRYKKLVVKENEDFYLMSIANLETPVXX

SEQ ID NO: 3711 - protein, 38 aa, Artificial Sequence
  GFR-binding peptide
  MOD_RES (1), (3), (36), (37): Xaa is C or S
  MOD_RES (14), (15), (16), (17), (18): Xaa is A or G
  MOD_RES (19), (20), (21), (22): Xaa is A or G or is absent
XKXSKVIMQYNKLXXXXXXXXXLYLISIASLDQSVXXP

SEQ ID NO: 3712 - protein, 38 aa, Artificial Sequence
  GFR-binding peptide
  MOD_RES (2), (4), (36), (37): Xaa is C or S
HXGXSRVVMNRHKRLIVNSSDDYYLVSTASLKTPAXXP

SEQ ID NO: 3713 - protein, 45 aa, Artificial Sequence
  GFR-binding peptide
  MOD_RES (2), (4), (39), (40): Xaa is C or S
  MOD_RES (17), (18), (19), (20), (21): Xaa is A or G
  MOD_RES (22), (23), (24), (25): Xaa is A or G or is absent
RXGXEAVSMGEYHYKLXXXXXXXXXKYLVSIPSLKTPVXXAKGVK

SEQ ID NO: 3714 - protein, 35 aa, Artificial Sequence
  GFR-binding peptide
  MOD_RES (34), (35): Xaa is C or S
  MOD_RES (12), (13), (14), (15), (16): Xaa is A or G
  MOD_RES (17), (18), (19), (20): Xaa is A or G or is absent
AKVVMNRHKRLXXXXXXXXXYYLVSTASLKTPAXX

SEQ ID NO: 3715 - protein, 37 aa, Artificial Sequence
  GFR-binding peptide
  MOD_RES (1), (3): Xaa is C or S
XKXALHDELTRHKRLFIPKKRVIEYYLVSTASLQVQT

SEQ ID NO: 3716 - protein, 36 aa, Artificial Sequence
  GFR-binding peptide
  MOD_RES (31), (32): Xaa is C or S
SKVVMRYKKLVKPTRGVFYLISIANLDQPVXXPSAS

SEQ ID NO: 3717 - protein, 35 aa, Artificial Sequence
  GFR-binding peptide
  MOD_RES (2), (4), (35): Xaa is C or S
SXKXSRVIMRHKRLVKPKRGVYYLISTASLAQPVX

SEQ ID NO: 3718 - protein, 35 aa, Artificial Sequence
  GFR-binding peptide
  MOD_RES (1), (3), (35): Xaa is C or S
XGXGEVVMERHKRLVVKDYEDYYLMSTASLETPVX

SEQ ID NO: 3719 - protein, 35 aa, Artificial Sequence
  GFR-binding peptide
  MOD_RES (2), (4), (35): Xaa is C or S
SXKXSRVIMYHYKLVKPKRGVKYLISIPSLAQPVX

SEQ ID NO: 3720 - protein, 39 aa, Artificial Sequence
  GFR-binding peptide
  MOD_RES (2), (4), (38), (39): Xaa is C or S
  MOD_RES (16), (17), (18), (19), (20): Xaa is A or G
  MOD_RES (21), (22), (23), (24): Xaa is A or G or is absent
HXGXARVVMNYHYKLXXXXXXXXXKYLVSIPSLQTPAXX

SEQ ID NO: 3721 - protein, 39 aa, Artificial Sequence
  GFR-binding peptide
  MOD_RES (1), (3), (34), (35): Xaa is C or S
XKXSKVIMYHYKLIKPTKGIKYLISIPSLDQSVXXPSAS

SEQ ID NO: 3722 - protein, 39 aa, Artificial Sequence
  GFR-binding peptide
  MOD_RES (2), (34), (35): Xaa is C or S
GXGEVVMDYHYKLVVKENEDKYLMSIPSLETPVXXAKPI

SEQ ID NO: 3723 - protein, 38 aa, Artificial Sequence
  GFR-binding peptide
  MOD_RES (2), (35), (36): Xaa is C or S
  MOD_RES (13), (14), (15), (16), (17): Xaa is A or G
  MOD_RES (18), (19), (20), (21): Xaa is A or G or is absent
KXSKVIMQYNKLXXXXXXXXXLYLISIASLDQSVXXPS

SEQ ID NO: 3724 - protein, 39 aa, Artificial Sequence
  GFR-binding peptide
  MOD_RES (2), (33), (34): Xaa is C or S
KXSRVIMYHYKLVKPKRGVKYLISIPSLAQPVXXPAASA

SEQ ID NO: 3725 - protein, 39 aa, Artificial Sequence
  GFR-binding peptide
  MOD_RES (2), (35), (36): Xaa is C or S
  MOD_RES (13), (14), (15), (16), (17): Xaa is A or G
  MOD_RES (18), (19), (20), (21): Xaa is A or G or is absent
KXSRVIMRHKRLXXXXXXXXXYYLISTASLAQPVXXPAA

SEQ ID NO: 3726 - protein, 34 aa, Artificial Sequence
  GFR-binding peptide
  MOD_RES (2), (2): Xaa is C or S
  MOD_RES (13), (14), (15), (16), (17): Xaa is A or G
  MOD_RES (18), (19), (20), (21): Xaa is A or G or is absent
KXSKVIMRHKRLXXXXXXXXXYYLISTASLDQSV

SEQ ID NO: 3727 - protein, 40 aa, Artificial Sequence
  GFR-binding peptide
  MOD_RES (1), (3), (35): Xaa is C or S
XGXSRVVMNYHYKLIVNSSDDKYLVSIPSLKTPAXTPKTV

SEQ ID NO: 3728 - protein, 36 aa, Artificial Sequence
  GFR-binding peptide
  MOD_RES (1), (3), (35), (36): Xaa is C or S
XGXARVVMNRYKKLIVNSSDDFYLVSIANLQTPAXX

SEQ ID NO: 3729 - protein, 42 aa, Artificial Sequence
  GFR-binding peptide
  MOD_RES (2), (37), (38): Xaa is C or S
  MOD_RES (15), (16), (17), (18), (19): Xaa is A or G
  MOD_RES (20), (21), (22), (23): Xaa is A or G or is absent
GXEAVSMGEYHYKLXXXXXXXXXKYLVSIPSLKTPVXXAKGV

SEQ ID NO: 3730 - protein, 40 aa, Artificial Sequence
  GFR-binding peptide
  MOD_RES (2), (4), (36), (37): Xaa is C or S
RXGXGEVVMERHKRLVVKDYEDYYLMSTASLETPVXXAKP

SEQ ID NO: 3731 - protein, 38 aa, Artificial Sequence
  GFR-binding peptide
  MOD_RES (1), (35), (36): Xaa is C or S
  MOD_RES (13), (14), (15), (16), (17): Xaa is A or G
  MOD_RES (18), (19), (20), (21): Xaa is A or G or is absent
XARVVMNRYKKLXXXXXXXXXFYLVSIANLQTPAXXPK

SEQ ID NO: 3732 - protein, 39 aa, Artificial Sequence
  GFR-binding peptide
  MOD_RES (33), (34): Xaa is C or S
  MOD_RES (11), (12), (13), (14), (15): Xaa is A or G
  MOD_RES (16), (17), (18), (19): Xaa is A or G or is absent
EVVMERYKKLXXXXXXXXXFYLMSIANLETPVXXAKPIS

SEQ ID NO: 3733 - protein, 37 aa, Artificial Sequence
  GFR-binding peptide
  MOD_RES (2), (36), (37): Xaa is C or S
  MOD_RES (14), (15), (16), (17), (18): Xaa is A or G
  MOD_RES (19), (20), (21), (22): Xaa is A or G or is absent
GXAKVVMNYHYKLXXXXXXXXXKYLVSIPSLKTPAXX

SEQ ID NO: 3734 - protein, 37 aa, Artificial Sequence
  GFR-binding peptide
  MOD_RES (1), (3), (35): Xaa is C or S
XGXSRVVMNRYKKLIVNSSDDFYLVSIANLKTPAXTP

SEQ ID NO: 3735 - protein, 40 aa, Artificial Sequence
  GFR-binding peptide
  MOD_RES (2), (36), (37): Xaa is C or S
  MOD_RES (14), (15), (16), (17), (18): Xaa is A or G
  MOD_RES (19), (20), (21), (22): Xaa is A or G or is absent
GXAKVVMNRYKKLXXXXXXXXXFYLVSIANLKTPAXXAKP

SEQ ID NO: 3736 - protein, 37 aa, Artificial Sequence
  GFR-binding peptide
  MOD_RES (31), (31): Xaa is C or S
RVVMNYHYKLIVNSSDDKYLVSIPSLKTPAXTPKTVH

SEQ ID NO: 3737 - protein, 33 aa, Artificial Sequence
  GFR-binding peptide
  MOD_RES (1), (1): Xaa is C or S
XEAVSMGERYKKLTPVGMDDFYLVSIANLKTPV

SEQ ID NO: 3738 - protein, 39 aa, Artificial Sequence
  GFR-binding peptide
  MOD_RES (34), (35): Xaa is C or S
  MOD_RES (12), (13), (14), (15), (16): Xaa is A or G
  MOD_RES (17), (18), (19), (20): Xaa is A or G or is absent
GEVVMDRYKKLXXXXXXXXXFYLMSIANLETPVXXAKPI

SEQ ID NO: 3739 - protein, 37 aa, Artificial Sequence
  GFR-binding peptide
  MOD_RES (35), (36): Xaa is C or S
  MOD_RES (13), (14), (15), (16), (17): Xaa is A or G
  MOD_RES (18), (19), (20), (21): Xaa is A or G or is absent
EAVSMGEYHYKLXXXXXXXXXKYLVSIPSLKTPVXXA

SEQ ID NO: 3740 - protein, 38 aa, Artificial Sequence
  GFR-binding peptide
  MOD_RES (2), (35), (36): Xaa is C or S
GXEAVSMGEYHYKLTPVGMDDKYLVSIPSLKTPVXXAK

SEQ ID NO: 3741 - protein, 40 aa, Artificial Sequence
  GFR-binding peptide
  MOD_RES (1), (34), (35): Xaa is C or S
XEAVSMGEQYNKLTPVGMDDLYLVSIASLKTPVXXAKGVK

SEQ ID NO: 3742 - protein, 37 aa, Artificial Sequence
  GFR-binding peptide
  MOD_RES (34), (35): Xaa is C or S
  MOD_RES (12), (13), (14), (15), (16): Xaa is A or G
  MOD_RES (17), (18), (19), (20): Xaa is A or G or is absent
AKVVMNQYNKLXXXXXXXXXLYLVSIASLKTPAXXAK

SEQ ID NO: 3743 - protein, 45 aa, Artificial Sequence
  GFR-binding peptide
  MOD_RES (2), (4), (41): Xaa is C or S
EXKXALHDELTQYNKLFIPKKRVIELYLVSIASLQVQTPRXQVNR

SEQ ID NO: 3744 - protein, 37 aa, Artificial Sequence
  GFR-binding peptide
  MOD_RES (31), (32): Xaa is C or S
RVVMNYHYKLIVNSSDDKYLVSIPSLKTPAXXPKPVY

SEQ ID NO: 3745 - protein, 32 aa, Artificial Sequence
  GFR-binding peptide
  MOD_RES (2), (2): Xaa is C or S
KXSKVVMRHKRLVKPTRGVYYLISTASLDQPV

SEQ ID NO: 3746 - protein, 38 aa, Artificial Sequence
  GFR-binding peptide
  MOD_RES (32), (33): Xaa is C or S
GEVVMEYHYKLVVKDYEDKYLMSIPSLETPVXXAKPIS

SEQ ID NO: 3747 - protein, 36 aa, Artificial Sequence
  GFR-binding peptide
  MOD_RES (1), (3): Xaa is C or S
  MOD_RES (15), (16), (17), (18), (19): Xaa is A or G
  MOD_RES (20), (21), (22), (23): Xaa is A or G or is absent
XGXARVVMNQYNKLXXXXXXXXXLYLVSIASLQTPA

SEQ ID NO: 3748 - protein, 38 aa, Artificial Sequence
  GFR-binding peptide
  MOD_RES (35), (36): Xaa is C or S
  MOD_RES (13), (14), (15), (16), (17): Xaa is A or G
  MOD_RES (18), (19), (20), (21): Xaa is A or G or is absent
EAVSMGERYKKLXXXXXXXXXFYLVSIANLKTPVXXAK

SEQ ID NO: 3749 - protein, 37 aa, Artificial Sequence
  GFR-binding peptide
  MOD_RES (2), (4), (37): Xaa is C or S
  MOD_RES (15), (16), (17), (18), (19): Xaa is A or G
  MOD_RES (20), (21), (22), (23): Xaa is A or G or is absent
SXKXSRVIMRYKKLXXXXXXXXXFYLISIANLAQPVX

SEQ ID NO: 3750 - protein, 39 aa, Artificial Sequence
  GFR-binding peptide
  MOD_RES (1), (3), (34), (35): Xaa is C or S
XKXSKVIMRYKKLIKPTKGIFYLISIANLDQSVXXPSAS

SEQ ID NO: 3751 - protein, 36 aa, Artificial Sequence
  GFR-binding peptide
ALHDELTQYNKLFIPKKRVIELYLVSIASLQVQTPR

SEQ ID NO: 3752 - protein, 37 aa, Artificial Sequence
  GFR-binding peptide
  MOD_RES (1), (35), (36): Xaa is C or S
  MOD_RES (13), (14), (15), (16), (17): Xaa is A or G
  MOD_RES (18), (19), (20), (21): Xaa is A or G or is absent
XARVVMNQYNKLXXXXXXXXXLYLVSIASLQTPAXXP

SEQ ID NO: 3753 - protein, 34 aa, Artificial Sequence
  GFR-binding peptide
  MOD_RES (1), (3): Xaa is C or S
XGXARVVMNYHYKLIVNSSDDKYLVSIPSLQTPA

SEQ ID NO: 3754 - protein, 33 aa, Artificial Sequence
  GFR-binding peptide
  MOD_RES (11), (12), (13), (14), (15): Xaa is A or G
  MOD_RES (16), (17), (18), (19): Xaa is A or G or is absent
HDELTYHYKLXXXXXXXXXKYLVSIPSLQVQTP

SEQ ID NO: 3755 - protein, 38 aa, Artificial Sequence
  GFR-binding peptide
  MOD_RES (2), (36), (37): Xaa is C or S
  MOD_RES (14), (15), (16), (17), (18): Xaa is A or G
  MOD_RES (19), (20), (21), (22): Xaa is A or G or is absent
GXARVVMNRYKKLXXXXXXXXXFYLVSIANLQTPAXXP

SEQ ID NO: 3756 - protein, 37 aa, Artificial Sequence
  GFR-binding peptide
  MOD_RES (34), (35): Xaa is C or S
  MOD_RES (12), (13), (14), (15), (16): Xaa is A or G
  MOD_RES (17), (18), (19), (20): Xaa is A or G or is absent
SRVVMNQYNKLXXXXXXXXXLYLVSIASLKTPAXXPK

SEQ ID NO: 3757 - protein, 40 aa, Artificial Sequence
  GFR-binding peptide
  MOD_RES (1), (3), (37), (38): Xaa is C or S
  MOD_RES (15), (16), (17), (18), (19): Xaa is A or G
  MOD_RES (20), (21), (22), (23): Xaa is A or G or is absent
XGXAKVVMNRYKKLXXXXXXXXXFYLVSIANLKTPAXXAK

SEQ ID NO: 3758 - protein, 38 aa, Artificial Sequence
  GFR-binding peptide
  MOD_RES (2), (4), (38): Xaa is C or S
  MOD_RES (16), (17), (18), (19), (20): Xaa is A or G
  MOD_RES (21), (22), (23), (24): Xaa is A or G or is absent
RXGXGEVVMERYKKLXXXXXXXXXFYLMSIANLETPVX

SEQ ID NO: 3759 - protein, 41 aa, Artificial Sequence
  GFR-binding peptide
  MOD_RES (2), (4), (41): Xaa is C or S
  MOD_RES (17), (18), (19), (20), (21): Xaa is A or G
  MOD_RES (22), (23), (24), (25): Xaa is A or G or is absent
EXKXALHDELTQYNKLXXXXXXXXXLYLVSIASLQVQTPRX

SEQ ID NO: 3760 - protein, 36 aa, Artificial Sequence
  GFR-binding peptide
  MOD_RES (2), (35), (36): Xaa is C or S
  MOD_RES (13), (14), (15), (16), (17): Xaa is A or G
  MOD_RES (18), (19), (20), (21): Xaa is A or G or is absent
KXSKVVMQYNKLXXXXXXXXXLYLISIASLDQPVXX

SEQ ID NO: 3761 - protein, 37 aa, Artificial Sequence
  GFR-binding peptide
  MOD_RES (31), (32): Xaa is C or S
EVVMERYKKLVVKDYEDFYLMSIANLETPVXXAKPIS

SEQ ID NO: 3762 - protein, 37 aa, Artificial Sequence
  GFR-binding peptide
  MOD_RES (34), (35): Xaa is C or S
  MOD_RES (12), (13), (14), (15), (16): Xaa is A or G
  MOD_RES (17), (18), (19), (20): Xaa is A or G or is absent
SRVVMNRYKKLXXXXXXXXXFYLVSIANLKTPAXXPK

SEQ ID NO: 3763 - protein, 35 aa, Artificial Sequence
  GFR-binding peptide
  MOD_RES (2), (4): Xaa is C or S
HXGXAKVVMNRYKKLIVNNSSDFYLVSIANLKTPA

SEQ ID NO: 3764 - protein, 38 aa, Artificial Sequence
  GFR-binding peptide
  MOD_RES (35), (35): Xaa is C or S
  MOD_RES (11), (12), (13), (14), (15): Xaa is A or G
  MOD_RES (16), (17), (18), (19): Xaa is A or G or is absent
HDELTRYKKLXXXXXXXXXFYLVSIANLQVQTPRXQVN

SEQ ID NO: 3765 - protein, 41 aa, Artificial Sequence
  GFR-binding peptide
  MOD_RES (2), (36), (37): Xaa is C or S
  MOD_RES (14), (15), (16), (17), (18): Xaa is A or G
  MOD_RES (19), (20), (21), (22): Xaa is A or G or is absent
GXARVVMNRYKKLXXXXXXXXXFYLVSIANLQTPAXXPKPV

SEQ ID NO: 3766 - protein, 38 aa, Artificial Sequence
  GFR-binding peptide
  MOD_RES (2), (4): Xaa is C or S
  MOD_RES (17), (18), (19), (20), (21): Xaa is A or G
  MOD_RES (22), (23), (24), (25): Xaa is A or G or is absent
RXGXEAVSMGERHKRLXXXXXXXXXYYLVSTASLKTPV

SEQ ID NO: 3767 - protein, 35 aa, Artificial Sequence
  GFR-binding peptide
  MOD_RES (2), (35): Xaa is C or S
  MOD_RES (13), (14), (15), (16), (17): Xaa is A or G
  MOD_RES (18), (19), (20), (21): Xaa is A or G or is absent
KXSKVIMYHYKLXXXXXXXXXKYLISIPSLDQSVX

SEQ ID NO: 3768 - protein, 37 aa, Artificial Sequence
  GFR-binding peptide
  MOD_RES (33), (34): Xaa is C or S
  MOD_RES (11), (12), (13), (14), (15): Xaa is A or G
  MOD_RES (16), (17), (18), (19): Xaa is A or G or is absent
SKVVMRYKKLXXXXXXXXXFYLISIANLDQPVXXPSA

SEQ ID NO: 3769 - protein, 40 aa, Artificial Sequence
  GFR-binding peptide
  MOD_RES (35), (36): Xaa is C or S
  MOD_RES (13), (14), (15), (16), (17): Xaa is A or G
  MOD_RES (18), (19), (20), (21): Xaa is A or G or is absent
EAVSMGEYHYKLXXXXXXXXXKYLVSIPSLKTPVXXAKGV

SEQ ID NO: 3770 - protein, 38 aa, Artificial Sequence
  GFR-binding peptide
  MOD_RES (2), (34), (35): Xaa is C or S
GXSRVVMNQYNKLIVNSSDDLYLVSIASLKTPAXXPKP

SEQ ID NO: 3771 - protein, 34 aa, Artificial Sequence
  GFR-binding peptide
  MOD_RES (33), (34): Xaa is C or S
  MOD_RES (11), (12), (13), (14), (15): Xaa is A or G
  MOD_RES (16), (17), (18), (19): Xaa is A or G or is absent
RVVMNQYNKLXXXXXXXXXLYLVSIASLQTPAXX

SEQ ID NO: 3772 - protein, 42 aa, Artificial Sequence
  GFR-binding peptide
  MOD_RES (2), (4), (37), (38): Xaa is C or S
RXGXEAVSMGEYHYKLTPVGMDDKYLVSIPSLKTPVXXAKGV

SEQ ID NO: 3773 - protein, 38 aa, Artificial Sequence
  GFR-binding peptide
  MOD_RES (2), (35), (36): Xaa is C or S
  MOD_RES (13), (14), (15), (16), (17): Xaa is A or G
  MOD_RES (18), (19), (20), (21): Xaa is A or G or is absent
KXSRVIMRHKRLXXXXXXXXXYYLISTASLAQPVXXPA

SEQ ID NO: 3774 - protein, 38 aa, Artificial Sequence
  GFR-binding peptide
  MOD_RES (2), (34), (35): Xaa is C or S
GXSRVVMNYHYKLIVNSSDDKYLVSIPSLKTPAXXPKP

SEQ ID NO: 3775 - protein, 36 aa, Artificial Sequence
  GFR-binding peptide
ALHDELTRHKRLFIPKKRVIEYYLVSTASLQVQTPR

SEQ ID NO: 3776 - protein, 40 aa, Artificial Sequence
  GFR-binding peptide
  MOD_RES (1), (3), (35), (36): Xaa is C or S
XGXGEVVMDRHKRLVVKENEDYYLMSTASLETPVXXAKPI

SEQ ID NO: 3777 - protein, 36 aa, Artificial Sequence
  GFR-binding peptide
  MOD_RES (1), (35), (36): Xaa is C or S
  MOD_RES (13), (14), (15), (16), (17): Xaa is A or G
  MOD_RES (18), (19), (20), (21): Xaa is A or G or is absent
XGEVVMEQYNKLXXXXXXXXXLYLMSIASLETPVXX

SEQ ID NO: 3778 - protein, 36 aa, Artificial Sequence
  GFR-binding peptide
  MOD_RES (2), (4), (36): Xaa is C or S
HXGXAKVVMNRHKRLIVNNSSDYYLVSTASLKTPAX

SEQ ID NO: 3779 - protein, 31 aa, Artificial Sequence
  GFR-binding peptide
  MOD_RES (1), (1): Xaa is C or S
XSRVIMQYNKLVKPKRGVLYLISIASLAQPV

SEQ ID NO: 3780 - protein, 44 aa, Artificial Sequence
  GFR-binding peptide
  MOD_RES (2), (4), (41): Xaa is C or S
EXKXALHDELTRYKKLFIPKKRVIEFYLVSIANLQVQTPRXQVN

SEQ ID NO: 3781 - protein, 39 aa, Artificial Sequence
  GFR-binding peptide
  MOD_RES (1), (3), (36), (37): Xaa is C or S
  MOD_RES (14), (15), (16), (17), (18): Xaa is A or G
  MOD_RES (19), (20), (21), (22): Xaa is A or G or is absent
XKXSKVVMQYNKLXXXXXXXXXLYLISIASLDQPVXXPS

SEQ ID NO: 3782 - protein, 42 aa, Artificial Sequence
  GFR-binding peptide
  MOD_RES (2), (36), (37): Xaa is C or S
  MOD_RES (14), (15), (16), (17), (18): Xaa is A or G
  MOD_RES (19), (20), (21), (22): Xaa is A or G or is absent
GXAKVVMNYHYKLXXXXXXXXXKYLVSIPSLKTPAXXAKPVA

SEQ ID NO: 3783 - protein, 34 aa, Artificial Sequence
  GFR-binding peptide
  MOD_RES (1), (34): Xaa is C or S
XEAVSMGERYKKLTPVGMDDFYLVSIANLKTPVX

SEQ ID NO: 3784 - protein, 41 aa, Artificial Sequence
  GFR-binding peptide
  MOD_RES (2), (4), (36), (37): Xaa is C or S
RXGXGEVVMDYHYKLVVKENEDKYLMSIPSLETPVXXAKPI

SEQ ID NO: 3785 - protein, 35 aa, Artificial Sequence
  GFR-binding peptide
  MOD_RES (1), (3), (35): Xaa is C or S
XGXARVVMNRHKRLIVNSSDDYYLVSTASLQTPAX

SEQ ID NO: 3786 - protein, 36 aa, Artificial Sequence
  GFR-binding peptide
  MOD_RES (1), (3): Xaa is C or S
  MOD_RES (15), (16), (17), (18), (19): Xaa is A or G
  MOD_RES (20), (21), (22), (23): Xaa is A or G or is absent
XGXGEVVMERYKKLXXXXXXXXXFYLMSIANLETPV

SEQ ID NO: 3787 - protein, 35 aa, Artificial Sequence
  GFR-binding peptide
  MOD_RES (1), (3), (35): Xaa is C or S
XGXSRVVMNRHKRLIVNSSDDYYLVSTASLKTPAX

SEQ ID NO: 3788 - protein, 35 aa, Artificial Sequence
  GFR-binding peptide
  MOD_RES (2), (2): Xaa is C or S
  MOD_RES (14), (15), (16), (17), (18): Xaa is A or G
  MOD_RES (19), (20), (21), (22): Xaa is A or G or is absent
GXGEVVMDQYNKLXXXXXXXXXLYLMSIASLETPV

SEQ ID NO: 3789 - protein, 41 aa, Artificial Sequence
  GFR-binding peptide
  MOD_RES (2), (4), (36), (37): Xaa is C or S
RXGXGEVVMEQYNKLVVKDYEDLYLMSIASLETPVXXAKPI

SEQ ID NO: 3790 - protein, 38 aa, Artificial Sequence
  GFR-binding peptide
  MOD_RES (2), (36): Xaa is C or S
  MOD_RES (14), (15), (16), (17), (18): Xaa is A or G
  MOD_RES (19), (20), (21), (22): Xaa is A or G or is absent
GXSRVVMNRYKKLXXXXXXXXXFYLVSIANLKTPAXTP

SEQ ID NO: 3791 - protein, 37 aa, Artificial Sequence
  GFR-binding peptide
  MOD_RES (1), (3), (35), (36): Xaa is C or S
XGXAKVVMNYHYKLIVNNSSDKYLVSIPSLKTPAXXA

SEQ ID NO: 3792 - protein, 33 aa, Artificial Sequence
  GFR-binding peptide
  MOD_RES (1), (33): Xaa is C or S
XAKVVMNQYNKLIVNNSSDLYLVSIASLKTPAX

SEQ ID NO: 3793 - protein, 38 aa, Artificial Sequence
  GFR-binding peptide
  MOD_RES (33), (34): Xaa is C or S
  MOD_RES (11), (12), (13), (14), (15): Xaa is A or G
  MOD_RES (16), (17), (18), (19): Xaa is A or G or is absent
KVVMNRYKKLXXXXXXXXXFYLVSIANLKTPAXXAKPV

SEQ ID NO: 3794 - protein, 31 aa, Artificial Sequence
  GFR-binding peptide
AKVVMNQYNKLIVNNSSDLYLVSIASLKTPA

SEQ ID NO: 3795 - protein, 40 aa, Artificial Sequence
  GFR-binding peptide
  MOD_RES (2), (36), (37): Xaa is C or S
  MOD_RES (14), (15), (16), (17), (18): Xaa is A or G
  MOD_RES (19), (20), (21), (22): Xaa is A or G or is absent
GXGEVVMERYKKLXXXXXXXXXFYLMSIANLETPVXXAKP

SEQ ID NO: 3796 - protein, 43 aa, Artificial Sequence
  GFR-binding peptide
  MOD_RES (1), (3), (37), (38): Xaa is C or S
  MOD_RES (15), (16), (17), (18), (19): Xaa is A or G
  MOD_RES (20), (21), (22), (23): Xaa is A or G or is absent
XGXGEVVMDYHYKLXXXXXXXXXKYLMSIPSLETPVXXAKPIK

SEQ ID NO: 3797 - protein, 36 aa, Artificial Sequence
  GFR-binding peptide
  MOD_RES (2), (4), (36): Xaa is C or S
RXGXGEVVMDQYNKLVVKENEDLYLMSIASLETPVX

SEQ ID NO: 3798 - protein, 40 aa, Artificial Sequence
  GFR-binding peptide
  MOD_RES (2), (4), (35), (36): Xaa is C or S
SXKXSRVIMYHYKLVKPKRGVKYLISIPSLAQPVXXPAAS

SEQ ID NO: 3799 - protein, 33 aa, Artificial Sequence
  GFR-binding peptide
  MOD_RES (33), (33): Xaa is C or S
  MOD_RES (11), (12), (13), (14), (15): Xaa is A or G
  MOD_RES (16), (17), (18), (19): Xaa is A or G or is absent
EVVMDYHYKLXXXXXXXXXKYLMSIPSLETPVX

SEQ ID NO: 3800 - protein, 34 aa, Artificial Sequence
  GFR-binding peptide
  MOD_RES (33), (33): Xaa is C or S
  MOD_RES (11), (12), (13), (14), (15): Xaa is A or G
  MOD_RES (16), (17), (18), (19): Xaa is A or G or is absent
RVVMNYHYKLXXXXXXXXXKYLVSIPSLKTPAXT

SEQ ID NO: 3801 - protein, 39 aa, Artificial Sequence
  GFR-binding peptide
  MOD_RES (33), (34): Xaa is C or S
  MOD_RES (11), (12), (13), (14), (15): Xaa is A or G
  MOD_RES (16), (17), (18), (19): Xaa is A or G or is absent
RVVMNRYKKLXXXXXXXXXFYLVSIANLQTPAXXPKPVT

SEQ ID NO: 3802 - protein, 35 aa, Artificial Sequence
  GFR-binding peptide
  MOD_RES (2), (4): Xaa is C or S
HXGXARVVMNRHKRLIVNSSDDYYLVSTASLQTPA

SEQ ID NO: 3803 - protein, 34 aa, Artificial Sequence
  GFR-binding peptide
  MOD_RES (1), (33), (34): Xaa is C or S
XGEVVMDQYNKLVVKENEDLYLMSIASLETPVXX

SEQ ID NO: 3804 - protein, 42 aa, Artificial Sequence
  GFR-binding peptide
  MOD_RES (2), (4), (41): Xaa is C or S
EXKXALHDELTYHYKLFIPKKRVIEKYLVSIPSLQVQTPRXQ

SEQ ID NO: 3805 - protein, 39 aa, Artificial Sequence
  GFR-binding peptide
  MOD_RES (2), (4), (37), (38): Xaa is C or S
  MOD_RES (15), (16), (17), (18), (19): Xaa is A or G
  MOD_RES (20), (21), (22), (23): Xaa is A or G or is absent
SXKXSKVIMQYNKLXXXXXXXXXLYLISIASLDQSVXXP

SEQ ID NO: 3806 - protein, 38 aa, Artificial Sequence
  GFR-binding peptide
  MOD_RES (1), (3): Xaa is C or S
  MOD_RES (16), (17), (18), (19), (20): Xaa is A or G
  MOD_RES (21), (22), (23), (24): Xaa is A or G or is absent
XKXALHDELTRHKRLXXXXXXXXXYYLVSTASLQVQTP

SEQ ID NO: 3807 - protein, 35 aa, Artificial Sequence
  GFR-binding peptide
  MOD_RES (1), (32), (33): Xaa is C or S
XSKVVMRHKRLVKPTRGVYYLISTASLDQPVXXPS

SEQ ID NO: 3808 - protein, 36 aa, Artificial Sequence
  GFR-binding peptide
  MOD_RES (1), (3), (34), (35): Xaa is C or S
XKXSRVIMYHYKLVKPKRGVKYLISIPSLAQPVXXP

SEQ ID NO: 3809 - protein, 35 aa, Artificial Sequence
  GFR-binding peptide
  MOD_RES (1), (34), (35): Xaa is C or S
  MOD_RES (12), (13), (14), (15), (16): Xaa is A or G
  MOD_RES (17), (18), (19), (20): Xaa is A or G or is absent
XSKVIMRYKKLXXXXXXXXXFYLISIANLDQSVXX

SEQ ID NO: 3810 - protein, 33 aa, Artificial Sequence
  GFR-binding peptide
  MOD_RES (2), (2): Xaa is C or S
GXGEVVMDRHKRLVVKENEDYYLMSTASLETPV

SEQ ID NO: 3811 - protein, 42 aa, Artificial Sequence
  GFR-binding peptide
  MOD_RES (1), (3), (40): Xaa is C or S
  MOD_RES (16), (17), (18), (19), (20): Xaa is A or G
  MOD_RES (21), (22), (23), (24): Xaa is A or G or is absent
XKXALHDELTRYKKLXXXXXXXXXFYLVSIANLQVQTPRXQV

SEQ ID NO: 3812 - protein, 39 aa, Artificial Sequence
  GFR-binding peptide
  MOD_RES (1), (35): Xaa is C or S
  MOD_RES (13), (14), (15), (16), (17): Xaa is A or G
  MOD_RES (18), (19), (20), (21): Xaa is A or G or is absent
XSRVVMNRHKRLXXXXXXXXXYYLVSTASLKTPAXTPKT

SEQ ID NO: 3813 - protein, 38 aa, Artificial Sequence
  GFR-binding peptide
  MOD_RES (2), (33), (34): Xaa is C or S
KXSKVVMRHKRLVKPTRGVYYLISTASLDQPVXXPSAS

SEQ ID NO: 3814 - protein, 40 aa, Artificial Sequence
  GFR-binding peptide
  MOD_RES (1), (3), (35), (36): Xaa is C or S
XGXAKVVMNYHYKLIVNNSSDKYLVSIPSLKTPAXXAKPV

SEQ ID NO: 3815 - protein, 37 aa, Artificial Sequence
  GFR-binding peptide
  MOD_RES (34), (35): Xaa is C or S
  MOD_RES (12), (13), (14), (15), (16): Xaa is A or G
  MOD_RES (17), (18), (19), (20): Xaa is A or G or is absent
GEVVMDYHYKLXXXXXXXXXKYLMSIPSLETPVXXAK

SEQ ID NO: 3816 - protein, 38 aa, Artificial Sequence
  GFR-binding peptide
  MOD_RES (2), (4), (36), (37): Xaa is C or S
HXGXAKVVMNQYNKLIVNNSSDLYLVSIASLKTPAXXA

SEQ ID NO: 3817 - protein, 38 aa, Artificial Sequence
  GFR-binding peptide
  MOD_RES (1), (3), (36), (37): Xaa is C or S
  MOD_RES (14), (15), (16), (17), (18): Xaa is A or G
  MOD_RES (19), (20), (21), (22): Xaa is A or G or is absent
XKXSRVIMQYNKLXXXXXXXXXLYLISIASLAQPVXXP

SEQ ID NO: 3818 - protein, 39 aa, Artificial Sequence
  GFR-binding peptide
  MOD_RES (1), (33), (34): Xaa is C or S
XSRVVMNQYNKLIVNSSDDLYLVSIASLKTPAXXPKPVY

SEQ ID NO: 3819 - protein, 40 aa, Artificial Sequence
  GFR-binding peptide
  MOD_RES (36), (36): Xaa is C or S
  MOD_RES (12), (13), (14), (15), (16): Xaa is A or G
  MOD_RES (17), (18), (19), (20): Xaa is A or G or is absent
LHDELTQYNKLXXXXXXXXXLYLVSIASLQVQTPRXQVNR

SEQ ID NO: 3820 - protein, 35 aa, Artificial Sequence
  GFR-binding peptide
  MOD_RES (2), (33), (34): Xaa is C or S
KXSRVIMRYKKLVKPKRGVFYLISIANLAQPVXXP

SEQ ID NO: 3821 - protein, 31 aa, Artificial Sequence
  GFR-binding peptide
AKVVMNRYKKLIVNNSSDFYLVSIANLKTPA

SEQ ID NO: 3822 - protein, 38 aa, Artificial Sequence
  GFR-binding peptide
  MOD_RES (1), (32), (33): Xaa is C or S
XSRVIMYHYKLVKPKRGVKYLISIPSLAQPVXXPAASA

SEQ ID NO: 3823 - protein, 36 aa, Artificial Sequence
  GFR-binding peptide
  MOD_RES (2), (4), (36): Xaa is C or S
HXGXSRVVMNRYKKLIVNSSDDFYLVSIANLKTPAX

SEQ ID NO: 3824 - protein, 34 aa, Artificial Sequence
  GFR-binding peptide
  MOD_RES (1), (3): Xaa is C or S
XGXSRVVMNYHYKLIVNSSDDKYLVSIPSLKTPA

SEQ ID NO: 3825 - protein, 35 aa, Artificial Sequence
  GFR-binding peptide
  MOD_RES (31), (32): Xaa is C or S
EVVMERYKKLVVKDYEDFYLMSIANLETPVXXAKP

SEQ ID NO: 3826 - protein, 35 aa, Artificial Sequence
  GFR-binding peptide
  MOD_RES (2), (33), (34): Xaa is C or S
KXSRVIMYHYKLVKPKRGVKYLISIPSLAQPVXXP

SEQ ID NO: 3827 - protein, 40 aa, Artificial Sequence
  GFR-binding peptide
  MOD_RES (1), (38): Xaa is C or S
  MOD_RES (14), (15), (16), (17), (18): Xaa is A or G
  MOD_RES (19), (20), (21), (22): Xaa is A or G or is absent
XALHDELTYHYKLXXXXXXXXXKYLVSIPSLQVQTPRXQV

SEQ ID NO: 3828 - protein, 37 aa, Artificial Sequence
  GFR-binding peptide
  MOD_RES (33), (34): Xaa is C or S
  MOD_RES (11), (12), (13), (14), (15): Xaa is A or G
  MOD_RES (16), (17), (18), (19): Xaa is A or G or is absent
EVVMEYHYKLXXXXXXXXXKYLMSIPSLETPVXXAKP

SEQ ID NO: 3829 - protein, 32 aa, Artificial Sequence
  GFR-binding peptide
  MOD_RES (1), (1): Xaa is C or S
XGEVVMDRYKKLVVKENEDFYLMSIANLETPV

SEQ ID NO: 3830 - protein, 35 aa, Artificial Sequence
  GFR-binding peptide
  MOD_RES (34), (35): Xaa is C or S
  MOD_RES (12), (13), (14), (15), (16): Xaa is A or G
  MOD_RES (17), (18), (19), (20): Xaa is A or G or is absent
SRVVMNRHKRLXXXXXXXXXYYLVSTASLKTPAXX

SEQ ID NO: 3831 - protein, 35 aa, Artificial Sequence
  GFR-binding peptide
  MOD_RES (2), (34), (35): Xaa is C or S
GXAKVVMNYHYKLIVNNSSDKYLVSIPSLKTPAXX

SEQ ID NO: 3832 - protein, 43 aa, Artificial Sequence
  GFR-binding peptide
  MOD_RES (1), (3), (37), (38): Xaa is C or S
  MOD_RES (15), (16), (17), (18), (19): Xaa is A or G
  MOD_RES (20), (21), (22), (23): Xaa is A or G or is absent
XGXGEVVMEQYNKLXXXXXXXXXLYLMSIASLETPVXXAKPIS

SEQ ID NO: 3833 - protein, 36 aa, Artificial Sequence
  GFR-binding peptide
  MOD_RES (1), (35), (36): Xaa is C or S
  MOD_RES (13), (14), (15), (16), (17): Xaa is A or G
  MOD_RES (18), (19), (20), (21): Xaa is A or G or is absent
XARVVMNYHYKLXXXXXXXXXKYLVSIPSLQTPAXX

SEQ ID NO: 3834 - protein, 39 aa, Artificial Sequence
  GFR-binding peptide
  MOD_RES (33), (34): Xaa is C or S
  MOD_RES (11), (12), (13), (14), (15): Xaa is A or G
  MOD_RES (16), (17), (18), (19): Xaa is A or G or is absent
EVVMDRHKRLXXXXXXXXXYYLMSTASLETPVXXAKPIK

SEQ ID NO: 3835 - protein, 41 aa, Artificial Sequence
  GFR-binding peptide
  MOD_RES (2), (39): Xaa is C or S
  MOD_RES (15), (16), (17), (18), (19): Xaa is A or G
  MOD_RES (20), (21), (22), (23): Xaa is A or G or is absent
KXALHDELTRYKKLXXXXXXXXXFYLVSIANLQVQTPRXQV

SEQ ID NO: 3836 - protein, 38 aa, Artificial Sequence
  GFR-binding peptide
  MOD_RES (33), (34): Xaa is C or S
EAVSMGEYHYKLTPVGMDDKYLVSIPSLKTPVXXAKGV

SEQ ID NO: 3837 - protein, 36 aa, Artificial Sequence
  GFR-binding peptide
  MOD_RES (32), (33): Xaa is C or S
GEVVMDRHKRLVVKENEDYYLMSTASLETPVXXAKP

SEQ ID NO: 3838 - protein, 40 aa, Artificial Sequence
  GFR-binding peptide
  MOD_RES (1), (3), (35), (36): Xaa is C or S
XGXGEVVMEQYNKLVVKDYEDLYLMSIASLETPVXXAKPI

SEQ ID NO: 3839 - protein, 38 aa, Artificial Sequence
  GFR-binding peptide
  MOD_RES (1), (33), (34): Xaa is C or S
XGEVVMEYHYKLVVKDYEDKYLMSIPSLETPVXXAKPI

SEQ ID NO: 3840 - protein, 39 aa, Artificial Sequence
  GFR-binding peptide
  MOD_RES (2), (34): Xaa is C or S
GXSRVVMNQYNKLIVNSSDDLYLVSIASLKTPAXTPKTV

SEQ ID NO: 3841 - protein, 39 aa, Artificial Sequence
  GFR-binding peptide
  MOD_RES (35), (35): Xaa is C or S
HDELTRHKRLFIPKKRVIEYYLVSTASLQVQTPRXQVNR

SEQ ID NO: 3842 - protein, 39 aa, Artificial Sequence
  GFR-binding peptide
  MOD_RES (37), (37): Xaa is C or S
ALHDELTYHYKLFIPKKRVIEKYLVSIPSLQVQTPRXQV

SEQ ID NO: 3843 - protein, 42 aa, Artificial Sequence
  GFR-binding peptide
  MOD_RES (1), (3), (36), (37): Xaa is C or S
  MOD_RES (14), (15), (16), (17), (18): Xaa is A or G
  MOD_RES (19), (20), (21), (22): Xaa is A or G or is absent
XKXSKVIMYHYKLXXXXXXXXXKYLISIPSLDQSVXXPSASA

SEQ ID NO: 3844 - protein, 35 aa, Artificial Sequence
  GFR-binding peptide
  MOD_RES (1), (33): Xaa is C or S
XSRVVMNYHYKLIVNSSDDKYLVSIPSLKTPAXTP

SEQ ID NO: 3845 - protein, 40 aa, Artificial Sequence
  GFR-binding peptide
  MOD_RES (2), (34), (35): Xaa is C or S
GXARVVMNQYNKLIVNSSDDLYLVSIASLQTPAXXPKPVT

SEQ ID NO: 3846 - protein, 34 aa, Artificial Sequence
  GFR-binding peptide
  MOD_RES (2), (33), (34): Xaa is C or S
KXSRVIMRYKKLVKPKRGVFYLISIANLAQPVXX

SEQ ID NO: 3847 - protein, 39 aa, Artificial Sequence
  GFR-binding peptide
  MOD_RES (1), (3), (36), (37): Xaa is C or S
  MOD_RES (14), (15), (16), (17), (18): Xaa is A or G
  MOD_RES (19), (20), (21), (22): Xaa is A or G or is absent
XKXSKVIMYHYKLXXXXXXXXXKYLISIPSLDQSVXXPS

SEQ ID NO: 3848 - protein, 42 aa, Artificial Sequence
  GFR-binding peptide
  MOD_RES (1), (3), (37), (38): Xaa is C or S
  MOD_RES (15), (16), (17), (18), (19): Xaa is A or G
  MOD_RES (20), (21), (22), (23): Xaa is A or G or is absent
XGXARVVMNYHYKLXXXXXXXXXKYLVSIPSLQTPAXXPKPV

SEQ ID NO: 3849 - protein, 36 aa, Artificial Sequence
  GFR-binding peptide
  MOD_RES (33), (34): Xaa is C or S
  MOD_RES (11), (12), (13), (14), (15): Xaa is A or G
  MOD_RES (16), (17), (18), (19): Xaa is A or G or is absent
EVVMERYKKLXXXXXXXXXFYLMSIANLETPVXXAK

SEQ ID NO: 3850 - protein, 41 aa, Artificial Sequence
  GFR-binding peptide
  MOD_RES (2), (36), (37): Xaa is C or S
  MOD_RES (14), (15), (16), (17), (18): Xaa is A or G
  MOD_RES (19), (20), (21), (22): Xaa is A or G or is absent
GXSRVVMNRHKRLXXXXXXXXXYYLVSTASLKTPAXXPKPV

SEQ ID NO: 3851 - protein, 40 aa, Artificial Sequence
  GFR-binding peptide
  MOD_RES (36), (36): Xaa is C or S
LHDELTRHKRLFIPKKRVIEYYLVSTASLQVQTPRXQVNR

SEQ ID NO: 3852 - protein, 37 aa, Artificial Sequence
  GFR-binding peptide
  MOD_RES (37), (37): Xaa is C or S
ALHDELTYHYKLFIPKKRVIEKYLVSIPSLQVQTPRX

SEQ ID NO: 3853 - protein, 31 aa, Artificial Sequence
  GFR-binding peptide
  MOD_RES (31), (31): Xaa is C or S
EVVMERHKRLVVKDYEDYYLMSTASLETPVX

SEQ ID NO: 3854 - protein, 37 aa, Artificial Sequence
  GFR-binding peptide
  MOD_RES (1), (35), (36): Xaa is C or S
  MOD_RES (13), (14), (15), (16), (17): Xaa is A or G
  MOD_RES (18), (19), (20), (21): Xaa is A or G or is absent
XAKVVMNRYKKLXXXXXXXXXFYLVSIANLKTPAXXA

SEQ ID NO: 3855 - protein, 36 aa, Artificial Sequence
  GFR-binding peptide
  MOD_RES (1), (3), (34), (35): Xaa is C or S
XKXSKVVMRYKKLVKPTRGVFYLISIANLDQPVXXP

SEQ ID NO: 3856 - protein, 37 aa, Artificial Sequence
  GFR-binding peptide
  MOD_RES (2), (34), (35): Xaa is C or S
GXARVVMNYHYKLIVNSSDDKYLVSIPSLQTPAXXPK

SEQ ID NO: 3857 - protein, 38 aa, Artificial Sequence
  GFR-binding peptide
  MOD_RES (2), (36), (37): Xaa is C or S
  MOD_RES (14), (15), (16), (17), (18): Xaa is A or G
  MOD_RES (19), (20), (21), (22): Xaa is A or G or is absent
GXARVVMNYHYKLXXXXXXXXXKYLVSIPSLQTPAXXP

SEQ ID NO: 3858 - protein, 39 aa, Artificial Sequence
  GFR-binding peptide
  MOD_RES (2), (39): Xaa is C or S
KXALHDELTRYKKLFIPKKRVIEFYLVSIANLQVQTPRX

SEQ ID NO: 3859 - protein, 38 aa, Artificial Sequence
  GFR-binding peptide
  MOD_RES (34), (35): Xaa is C or S
  MOD_RES (12), (13), (14), (15), (16): Xaa is A or G
  MOD_RES (17), (18), (19), (20): Xaa is A or G or is absent
GEVVMERYKKLXXXXXXXXXFYLMSIANLETPVXXAKP

SEQ ID NO: 3860 - protein, 41 aa, Artificial Sequence
  GFR-binding peptide
  MOD_RES (2), (4), (38), (39): Xaa is C or S
  MOD_RES (16), (17), (18), (19), (20): Xaa is A or G
  MOD_RES (21), (22), (23), (24): Xaa is A or G or is absent
HXGXAKVVMNRYKKLXXXXXXXXXFYLVSIANLKTPAXXAK

SEQ ID NO: 3861 - protein, 40 aa, Artificial Sequence
  GFR-binding peptide
  MOD_RES (34), (35): Xaa is C or S
  MOD_RES (12), (13), (14), (15), (16): Xaa is A or G
  MOD_RES (17), (18), (19), (20): Xaa is A or G or is absent
GEVVMDRYKKLXXXXXXXXXFYLMSIANLETPVXXAKPIK

SEQ ID NO: 3862 - protein, 34 aa, Artificial Sequence
  GFR-binding peptide
  MOD_RES (31), (32): Xaa is C or S
EVVMERHKRLVVKDYEDYYLMSTASLETPVXXAK

SEQ ID NO: 3863 - protein, 35 aa, Artificial Sequence
  GFR-binding peptide
  MOD_RES (1), (33): Xaa is C or S
XSRVVMNRYKKLIVNSSDDFYLVSIANLKTPAXTP

SEQ ID NO: 3864 - protein, 42 aa, Artificial Sequence
  GFR-binding peptide
  MOD_RES (2), (36), (37): Xaa is C or S
  MOD_RES (14), (15), (16), (17), (18): Xaa is A or G
  MOD_RES (19), (20), (21), (22): Xaa is A or G or is absent
GXAKVVMNRYKKLXXXXXXXXXFYLVSIANLKTPAXXAKPVA

SEQ ID NO: 3865 - protein, 38 aa, Artificial Sequence
  GFR-binding peptide
  MOD_RES (33), (34): Xaa is C or S
  MOD_RES (11), (12), (13), (14), (15): Xaa is A or G
  MOD_RES (16), (17), (18), (19): Xaa is A or G or is absent
SKVVMRHKRLXXXXXXXXXYYLISTASLDQPVXXPSAS

SEQ ID NO: 3866 - protein, 42 aa, Artificial Sequence
  GFR-binding peptide
  MOD_RES (2), (4), (37), (38): Xaa is C or S
  MOD_RES (15), (16), (17), (18), (19): Xaa is A or G
  MOD_RES (20), (21), (22), (23): Xaa is A or G or is absent
SXKXSRVIMYHYKLXXXXXXXXXKYLISIPSLAQPVXXPAAS

SEQ ID NO: 3867 - protein, 37 aa, Artificial Sequence
  GFR-binding peptide
  MOD_RES (1), (1): Xaa is C or S
  MOD_RES (14), (15), (16), (17), (18): Xaa is A or G
  MOD_RES (19), (20), (21), (22): Xaa is A or G or is absent
XALHDELTQYNKLXXXXXXXXXLYLVSIASLQVQTPR

SEQ ID NO: 3868 - protein, 38 aa, Artificial Sequence
  GFR-binding peptide
  MOD_RES (1), (3), (35), (36): Xaa is C or S
XGXARVVMNQYNKLIVNSSDDLYLVSIASLQTPAXXPK

SEQ ID NO: 3869 - protein, 33 aa, Artificial Sequence
  GFR-binding peptide
  MOD_RES (2), (33): Xaa is C or S
KXSKVVMRHKRLVKPTRGVYYLISTASLDQPVX

SEQ ID NO: 3870 - protein, 39 aa, Artificial Sequence
  GFR-binding peptide
  MOD_RES (1), (3), (35), (36): Xaa is C or S
XGXGEVVMDRHKRLVVKENEDYYLMSTASLETPVXXAKP

SEQ ID NO: 3871 - protein, 37 aa, Artificial Sequence
  GFR-binding peptide
  MOD_RES (1), (1): Xaa is C or S
XALHDELTRHKRLFIPKKRVIEYYLVSTASLQVQTPR

SEQ ID NO: 3872 - protein, 41 aa, Artificial Sequence
  GFR-binding peptide
  MOD_RES (2), (36), (37): Xaa is C or S
  MOD_RES (14), (15), (16), (17), (18): Xaa is A or G
  MOD_RES (19), (20), (21), (22): Xaa is A or G or is absent
GXAKVVMNRYKKLXXXXXXXXXFYLVSIANLKTPAXXAKPV

SEQ ID NO: 3873 - protein, 35 aa, Artificial Sequence
  GFR-binding peptide
  MOD_RES (1), (1): Xaa is C or S
XALHDELTYHYKLFIPKKRVIEKYLVSIPSLQVQT

SEQ ID NO: 3874 - protein, 37 aa, Artificial Sequence
  GFR-binding peptide
  MOD_RES (1), (3), (36), (37): Xaa is C or S
  MOD_RES (14), (15), (16), (17), (18): Xaa is A or G
  MOD_RES (19), (20), (21), (22): Xaa is A or G or is absent
XKXSKVVMYHYKLXXXXXXXXXKYLISIPSLDQPVXX

SEQ ID NO: 3875 - protein, 36 aa, Artificial Sequence
  GFR-binding peptide
  MOD_RES (2), (4), (36): Xaa is C or S
HXGXARVVMNRYKKLIVNSSDDFYLVSIANLQTPAX

SEQ ID NO: 3876 - protein, 42 aa, Artificial Sequence
  GFR-binding peptide
  MOD_RES (2), (4), (37), (38): Xaa is C or S
  MOD_RES (15), (16), (17), (18), (19): Xaa is A or G
  MOD_RES (20), (21), (22), (23): Xaa is A or G or is absent
SXKXSKVVMQYNKLXXXXXXXXXLYLISIASLDQPVXXPSAS

SEQ ID NO: 3877 - protein, 33 aa, Artificial Sequence
  GFR-binding peptide
  MOD_RES (32), (33): Xaa is C or S
ARVVMNRYKKLIVNSSDDFYLVSIANLQTPAXX

SEQ ID NO: 3878 - protein, 39 aa, Artificial Sequence
  GFR-binding peptide
  MOD_RES (36), (36): Xaa is C or S
LHDELTRYKKLFIPKKRVIEFYLVSIANLQVQTPRXQVN

SEQ ID NO: 3879 - protein, 37 aa, Artificial Sequence
  GFR-binding peptide
  MOD_RES (1), (34), (35): Xaa is C or S
XEAVSMGEQYNKLTPVGMDDLYLVSIASLKTPVXXAK

SEQ ID NO: 3880 - protein, 36 aa, Artificial Sequence
  GFR-binding peptide
  MOD_RES (35), (35): Xaa is C or S
HDELTRYKKLFIPKKRVIEFYLVSIANLQVQTPRXQ

SEQ ID NO: 3881 - protein, 33 aa, Artificial Sequence
  GFR-binding peptide
  MOD_RES (31), (32): Xaa is C or S
KVVMNRHKRLIVNNSSDYYLVSTASLKTPAXXA

SEQ ID NO: 3882 - protein, 36 aa, Artificial Sequence
  GFR-binding peptide
  MOD_RES (31), (32): Xaa is C or S
KVVMNRYKKLIVNNSSDFYLVSIANLKTPAXXAKPV

SEQ ID NO: 3883 - protein, 39 aa, Artificial Sequence
  GFR-binding peptide
  MOD_RES (1), (3), (35), (36): Xaa is C or S
XGXARVVMNQYNKLIVNSSDDLYLVSIASLQTPAXXPKP

SEQ ID NO: 3884 - protein, 40 aa, Artificial Sequence
  GFR-binding peptide
  MOD_RES (1), (3), (37), (38): Xaa is C or S
  MOD_RES (15), (16), (17), (18), (19): Xaa is A or G
  MOD_RES (20), (21), (22), (23): Xaa is A or G or is absent
XGXGEVVMDYHYKLXXXXXXXXXKYLMSIPSLETPVXXAK

SEQ ID NO: 3885 - protein, 38 aa, Artificial Sequence
  GFR-binding peptide
  MOD_RES (1), (3), (35), (36): Xaa is C or S
XGXGEVVMDRHKRLVVKENEDYYLMSTASLETPVXXAK

SEQ ID NO: 3886 - protein, 33 aa, Artificial Sequence
  GFR-binding peptide
  MOD_RES (2), (2): Xaa is C or S
GXARVVMNRYKKLIVNSSDDFYLVSIANLQTPA

SEQ ID NO: 3887 - protein, 40 aa, Artificial Sequence
  GFR-binding peptide
  MOD_RES (35), (36): Xaa is C or S
  MOD_RES (13), (14), (15), (16), (17): Xaa is A or G
  MOD_RES (18), (19), (20), (21): Xaa is A or G or is absent
EAVSMGERYKKLXXXXXXXXXFYLVSIANLKTPVXXAKGV

SEQ ID NO: 3888 - protein, 38 aa, Artificial Sequence
  GFR-binding peptide
  MOD_RES (1), (3), (34), (35): Xaa is C or S
XKXSRVIMRYKKLVKPKRGVFYLISIANLAQPVXXPAA

SEQ ID NO: 3889 - protein, 34 aa, Artificial Sequence
  GFR-binding peptide
  MOD_RES (1), (1): Xaa is C or S
  MOD_RES (13), (14), (15), (16), (17): Xaa is A or G
  MOD_RES (18), (19), (20), (21): Xaa is A or G or is absent
XSRVVMNRHKRLXXXXXXXXXYYLVSTASLKTPA

SEQ ID NO: 3890 - protein, 38 aa, Artificial Sequence
  GFR-binding peptide
  MOD_RES (1), (35): Xaa is C or S
  MOD_RES (13), (14), (15), (16), (17): Xaa is A or G
  MOD_RES (18), (19), (20), (21): Xaa is A or G or is absent
XSRVVMNRHKRLXXXXXXXXXYYLVSTASLKTPAXTPK

SEQ ID NO: 3891 - protein, 37 aa, Artificial Sequence
  GFR-binding peptide
  MOD_RES (2), (4), (35), (36): Xaa is C or S
SXKXSKVVMYHYKLVKPTRGVKYLISIPSLDQPVXXP

SEQ ID NO: 3892 - protein, 41 aa, Artificial Sequence
  GFR-binding peptide
  MOD_RES (37), (37): Xaa is C or S
  MOD_RES (13), (14), (15), (16), (17): Xaa is A or G
  MOD_RES (18), (19), (20), (21): Xaa is A or G or is absent
ALHDELTRYKKLXXXXXXXXXFYLVSIANLQVQTPRXQVNR

SEQ ID NO: 3893 - protein, 42 aa, Artificial Sequence
  GFR-binding peptide
  MOD_RES (2), (4), (39), (40): Xaa is C or S
  MOD_RES (17), (18), (19), (20), (21): Xaa is A or G
  MOD_RES (22), (23), (24), (25): Xaa is A or G or is absent
RXGXEAVSMGERHKRLXXXXXXXXXYYLVSTASLKTPVXXAK

SEQ ID NO: 3894 - protein, 34 aa, Artificial Sequence
  GFR-binding peptide
  MOD_RES (33), (34): Xaa is C or S
  MOD_RES (11), (12), (13), (14), (15): Xaa is A or G
  MOD_RES (16), (17), (18), (19): Xaa is A or G or is absent
RVVMNYHYKLXXXXXXXXXKYLVSIPSLQTPAXX

SEQ ID NO: 3895 - protein, 40 aa, Artificial Sequence
  GFR-binding peptide
  MOD_RES (1), (3), (35), (36): Xaa is C or S
XGXSRVVMNQYNKLIVNSSDDLYLVSIASLKTPAXXPKPV

SEQ ID NO: 3896 - protein, 34 aa, Artificial Sequence
  GFR-binding peptide
  MOD_RES (1), (3): Xaa is C or S
XGXGEVVMDRYKKLVVKENEDFYLMSIANLETPV

SEQ ID NO: 3897 - protein, 37 aa, Artificial Sequence
  GFR-binding peptide
  MOD_RES (32), (33): Xaa is C or S
GEVVMERHKRLVVKDYEDYYLMSTASLETPVXXAKPI

SEQ ID NO: 3898 - protein, 42 aa, Artificial Sequence
  GFR-binding peptide
  MOD_RES (2), (4), (36), (37): Xaa is C or S
HXGXARVVMNRYKKLIVNSSDDFYLVSIANLQTPAXXPKPVT

SEQ ID NO: 3899 - protein, 36 aa, Artificial Sequence
  GFR-binding peptide
  MOD_RES (2), (34), (35): Xaa is C or S
GXGEVVMERYKKLVVKDYEDFYLMSIANLETPVXXA

SEQ ID NO: 3900 - protein, 35 aa, Artificial Sequence
  GFR-binding peptide
  MOD_RES (35), (35): Xaa is C or S
  MOD_RES (11), (12), (13), (14), (15): Xaa is A or G
  MOD_RES (16), (17), (18), (19): Xaa is A or G or is absent
HDELTQYNKLXXXXXXXXXLYLVSIASLQVQTPRX

SEQ ID NO: 3901 - protein, 37 aa, Artificial Sequence
  GFR-binding peptide
  MOD_RES (2), (4), (35), (36): Xaa is C or S
SXKXSRVIMQYNKLVKPKRGVLYLISIASLAQPVXXP

SEQ ID NO: 3902 - protein, 36 aa, Artificial Sequence
  GFR-binding peptide
  MOD_RES (1), (33), (34): Xaa is C or S
XAKVVMNRHKRLIVNNSSDYYLVSTASLKTPAXXAK

SEQ ID NO: 3903 - protein, 36 aa, Artificial Sequence
  GFR-binding peptide
  MOD_RES (31), (32): Xaa is C or S
RVVMNYHYKLIVNSSDDKYLVSIPSLQTPAXXPKPV

SEQ ID NO: 3904 - protein, 34 aa, Artificial Sequence
  GFR-binding peptide
  MOD_RES (1), (33), (34): Xaa is C or S
XSRVVMNYHYKLIVNSSDDKYLVSIPSLKTPAXX

SEQ ID NO: 3905 - protein, 32 aa, Artificial Sequence
  GFR-binding peptide
  MOD_RES (1), (1): Xaa is C or S
XGEVVMDYHYKLVVKENEDKYLMSIPSLETPV

SEQ ID NO: 3906 - protein, 39 aa, Artificial Sequence
  GFR-binding peptide
  MOD_RES (1), (3), (36), (37): Xaa is C or S
  MOD_RES (14), (15), (16), (17), (18): Xaa is A or G
  MOD_RES (19), (20), (21), (22): Xaa is A or G or is absent
XKXSRVIMYHYKLXXXXXXXXXKYLISIPSLAQPVXXPA

SEQ ID NO: 3907 - protein, 37 aa, Artificial Sequence
  GFR-binding peptide
  MOD_RES (1), (3), (37): Xaa is C or S
  MOD_RES (15), (16), (17), (18), (19): Xaa is A or G
  MOD_RES (20), (21), (22), (23): Xaa is A or G or is absent
XGXGEVVMDRYKKLXXXXXXXXXFYLMSIANLETPVX

SEQ ID NO: 3908 - protein, 34 aa, Artificial Sequence
  GFR-binding peptide
  MOD_RES (32), (33): Xaa is C or S
SRVVMNRYKKLIVNSSDDFYLVSIANLKTPAXXP

SEQ ID NO: 3909 - protein, 37 aa, Artificial Sequence
  GFR-binding peptide
  MOD_RES (2), (35), (36): Xaa is C or S
  MOD_RES (13), (14), (15), (16), (17): Xaa is A or G
  MOD_RES (18), (19), (20), (21): Xaa is A or G or is absent
KXSRVIMRHKRLXXXXXXXXXYYLISTASLAQPVXXP

SEQ ID NO: 3910 - protein, 35 aa, Artificial Sequence
  GFR-binding peptide
  MOD_RES (31), (32): Xaa is C or S
SRVIMRYKKLVKPKRGVFYLISIANLAQPVXXPAA

SEQ ID NO: 3911 - protein, 41 aa, Artificial Sequence
  GFR-binding peptide
  MOD_RES (2), (35), (36): Xaa is C or S
  MOD_RES (13), (14), (15), (16), (17): Xaa is A or G
  MOD_RES (18), (19), (20), (21): Xaa is A or G or is absent
KXSKVVMRYKKLXXXXXXXXXFYLISIANLDQPVXXPSASA

SEQ ID NO: 3912 - protein, 41 aa, Artificial Sequence
  GFR-binding peptide
  MOD_RES (2), (35), (36): Xaa is C or S
  MOD_RES (13), (14), (15), (16), (17): Xaa is A or G
  MOD_RES (18), (19), (20), (21): Xaa is A or G or is absent
KXSKVVMYHYKLXXXXXXXXXKYLISIPSLDQPVXXPSASA

SEQ ID NO: 3913 - protein, 33 aa, Artificial Sequence
  GFR-binding peptide
  MOD_RES (31), (32): Xaa is C or S
KVVMNYHYKLIVNNSSDKYLVSIPSLKTPAXXA

SEQ ID NO: 3914 - protein, 40 aa, Artificial Sequence
  GFR-binding peptide
  MOD_RES (2), (35), (36): Xaa is C or S
GXEAVSMGERYKKLTPVGMDDFYLVSIANLKTPVXXAKGV

SEQ ID NO: 3915 - protein, 40 aa, Artificial Sequence
  GFR-binding peptide
  MOD_RES (36), (36): Xaa is C or S
  MOD_RES (12), (13), (14), (15), (16): Xaa is A or G
  MOD_RES (17), (18), (19), (20): Xaa is A or G or is absent
LHDELTRYKKLXXXXXXXXXFYLVSIANLQVQTPRXQVNR

SEQ ID NO: 3916 - protein, 35 aa, Artificial Sequence
  GFR-binding peptide
  MOD_RES (1), (34), (35): Xaa is C or S
XEAVSMGERHKRLTPVGMDDYYLVSTASLKTPVXX

SEQ ID NO: 3917 - protein, 37 aa, Artificial Sequence
  GFR-binding peptide
  MOD_RES (33), (34): Xaa is C or S
  MOD_RES (11), (12), (13), (14), (15): Xaa is A or G
  MOD_RES (16), (17), (18), (19): Xaa is A or G or is absent
SRVIMRHKRLXXXXXXXXXYYLISTASLAQPVXXPAA

SEQ ID NO: 3918 - protein, 39 aa, Artificial Sequence
  GFR-binding peptide
  MOD_RES (33), (34): Xaa is C or S
  MOD_RES (11), (12), (13), (14), (15): Xaa is A or G
  MOD_RES (16), (17), (18), (19): Xaa is A or G or is absent
SKVIMRYKKLXXXXXXXXXFYLISIANLDQSVXXPSASA

SEQ ID NO: 3919 - protein, 34 aa, Artificial Sequence
  GFR-binding peptide
  MOD_RES (2), (33), (34): Xaa is C or S
KXSRVIMYHYKLVKPKRGVKYLISIPSLAQPVXX

SEQ ID NO: 3920 - protein, 37 aa, Artificial Sequence
  GFR-binding peptide
  MOD_RES (32), (32): Xaa is C or S
SRVVMNRYKKLIVNSSDDFYLVSIANLKTPAXTPKTV

SEQ ID NO: 3921 - protein, 41 aa, Artificial Sequence
  GFR-binding peptide
  MOD_RES (1), (36), (37): Xaa is C or S
  MOD_RES (14), (15), (16), (17), (18): Xaa is A or G
  MOD_RES (19), (20), (21), (22): Xaa is A or G or is absent
XEAVSMGERHKRLXXXXXXXXXYYLVSTASLKTPVXXAKGV

SEQ ID NO: 3922 - protein, 43 aa, Artificial Sequence
  GFR-binding peptide
  MOD_RES (2), (4), (38): Xaa is C or S
  MOD_RES (16), (17), (18), (19), (20): Xaa is A or G
  MOD_RES (21), (22), (23), (24): Xaa is A or G or is absent
HXGXSRVVMNRYKKLXXXXXXXXXFYLVSIANLKTPAXTPKTV

SEQ ID NO: 3923 - protein, 37 aa, Artificial Sequence
  GFR-binding peptide
  MOD_RES (2), (4), (36): Xaa is C or S
HXGXSRVVMNQYNKLIVNSSDDLYLVSIASLKTPAXT

SEQ ID NO: 3924 - protein, 36 aa, Artificial Sequence
  GFR-binding peptide
  MOD_RES (1), (35), (36): Xaa is C or S
  MOD_RES (13), (14), (15), (16), (17): Xaa is A or G
  MOD_RES (18), (19), (20), (21): Xaa is A or G or is absent
XAKVVMNRHKRLXXXXXXXXXYYLVSTASLKTPAXX

SEQ ID NO: 3925 - protein, 36 aa, Artificial Sequence
  GFR-binding peptide
  MOD_RES (31), (32): Xaa is C or S
RVVMNRHKRLIVNSSDDYYLVSTASLKTPAXXPKPV

SEQ ID NO: 3926 - protein, 40 aa, Artificial Sequence
  GFR-binding peptide
  MOD_RES (2), (4), (38), (39): Xaa is C or S
  MOD_RES (16), (17), (18), (19), (20): Xaa is A or G
  MOD_RES (21), (22), (23), (24): Xaa is A or G or is absent
HXGXAKVVMNYHYKLXXXXXXXXXKYLVSIPSLKTPAXXA

SEQ ID NO: 3927 - protein, 38 aa, Artificial Sequence
  GFR-binding peptide
  MOD_RES (33), (34): Xaa is C or S
  MOD_RES (11), (12), (13), (14), (15): Xaa is A or G
  MOD_RES (16), (17), (18), (19): Xaa is A or G or is absent
RVVMNRYKKLXXXXXXXXXFYLVSIANLQTPAXXPKPV

SEQ ID NO: 3928 - protein, 41 aa, Artificial Sequence
  GFR-binding peptide
  MOD_RES (2), (36): Xaa is C or S
  MOD_RES (14), (15), (16), (17), (18): Xaa is A or G
  MOD_RES (19), (20), (21), (22): Xaa is A or G or is absent
GXSRVVMNRYKKLXXXXXXXXXFYLVSIANLKTPAXTPKTV

SEQ ID NO: 3929 - protein, 42 aa, Artificial Sequence
  GFR-binding peptide
  MOD_RES (2), (4), (38): Xaa is C or S
  MOD_RES (16), (17), (18), (19), (20): Xaa is A or G
  MOD_RES (21), (22), (23), (24): Xaa is A or G or is absent
HXGXSRVVMNYHYKLXXXXXXXXXKYLVSIPSLKTPAXTPKT

SEQ ID NO: 3930 - protein, 35 aa, Artificial Sequence
  GFR-binding peptide
  MOD_RES (1), (33), (34): Xaa is C or S
XGEVVMDRYKKLVVKENEDFYLMSIANLETPVXXA

SEQ ID NO: 3931 - protein, 35 aa, Artificial Sequence
  GFR-binding peptide
  MOD_RES (33), (34): Xaa is C or S
  MOD_RES (11), (12), (13), (14), (15): Xaa is A or G
  MOD_RES (16), (17), (18), (19): Xaa is A or G or is absent
EVVMDRYKKLXXXXXXXXXFYLMSIANLETPVXXA

SEQ ID NO: 3932 - protein, 35 aa, Artificial Sequence
  GFR-binding peptide
  MOD_RES (1), (33), (34): Xaa is C or S
XGEVVMDYHYKLVVKENEDKYLMSIPSLETPVXXA

SEQ ID NO: 3933 - protein, 35 aa, Artificial Sequence
  GFR-binding peptide
  MOD_RES (1), (3), (34), (35): Xaa is C or S
XKXSKVIMRYKKLIKPTKGIFYLISIANLDQSVXX

SEQ ID NO: 3934 - protein, 34 aa, Artificial Sequence
  GFR-binding peptide
  MOD_RES (1), (1): Xaa is C or S
  MOD_RES (13), (14), (15), (16), (17): Xaa is A or G
  MOD_RES (18), (19), (20), (21): Xaa is A or G or is absent
XSRVVMNYHYKLXXXXXXXXXKYLVSIPSLKTPA

SEQ ID NO: 3935 - protein, 44 aa, Artificial Sequence
  GFR-binding peptide
  MOD_RES (2), (4), (38): Xaa is C or S
  MOD_RES (16), (17), (18), (19), (20): Xaa is A or G
  MOD_RES (21), (22), (23), (24): Xaa is A or G or is absent
HXGXSRVVMNRHKRLXXXXXXXXXYYLVSTASLKTPAXTPKTVH

SEQ ID NO: 3936 - protein, 32 aa, Artificial Sequence
  GFR-binding peptide
  MOD_RES (31), (32): Xaa is C or S
EVVMERHKRLVVKDYEDYYLMSTASLETPVXX

SEQ ID NO: 3937 - protein, 39 aa, Artificial Sequence
  GFR-binding peptide
  MOD_RES (2), (39): Xaa is C or S
  MOD_RES (15), (16), (17), (18), (19): Xaa is A or G
  MOD_RES (20), (21), (22), (23): Xaa is A or G or is absent
KXALHDELTRYKKLXXXXXXXXXFYLVSIANLQVQTPRX

SEQ ID NO: 3938 - protein, 34 aa, Artificial Sequence
  GFR-binding peptide
  MOD_RES (33), (34): Xaa is C or S
  MOD_RES (11), (12), (13), (14), (15): Xaa is A or G
  MOD_RES (16), (17), (18), (19): Xaa is A or G or is absent
EVVMDRHKRLXXXXXXXXXYYLMSTASLETPVXX

SEQ ID NO: 3939 - protein, 43 aa, Artificial Sequence
  GFR-binding peptide
  MOD_RES (1), (3), (40): Xaa is C or S
XKXALHDELTRYKKLFIPKKRVIEFYLVSIANLQVQTPRXQVN

SEQ ID NO: 3940 - protein, 33 aa, Artificial Sequence
  GFR-binding peptide
  MOD_RES (1), (32), (33): Xaa is C or S
XSRVIMYHYKLVKPKRGVKYLISIPSLAQPVXX

SEQ ID NO: 3941 - protein, 38 aa, Artificial Sequence
  GFR-binding peptide
  MOD_RES (1), (33): Xaa is C or S
XSRVVMNQYNKLIVNSSDDLYLVSIASLKTPAXTPKTV

SEQ ID NO: 3942 - protein, 38 aa, Artificial Sequence
  GFR-binding peptide
  MOD_RES (2), (4), (37), (38): Xaa is C or S
  MOD_RES (15), (16), (17), (18), (19): Xaa is A or G
  MOD_RES (20), (21), (22), (23): Xaa is A or G or is absent
SXKXSKVIMQYNKLXXXXXXXXXLYLISIASLDQSVXX

SEQ ID NO: 3943 - protein, 35 aa, Artificial Sequence
  GFR-binding peptide
  MOD_RES (1), (3), (34), (35): Xaa is C or S
XKXSRVIMRYKKLVKPKRGVFYLISIANLAQPVXX

SEQ ID NO: 3944 - protein, 40 aa, Artificial Sequence
  GFR-binding peptide
  MOD_RES (1), (35), (36): Xaa is C or S
  MOD_RES (13), (14), (15), (16), (17): Xaa is A or G
  MOD_RES (18), (19), (20), (21): Xaa is A or G or is absent
XSRVVMNRHKRLXXXXXXXXXYYLVSTASLKTPAXXPKPV

SEQ ID NO: 3945 - protein, 44 aa, Artificial Sequence
  GFR-binding peptide
  MOD_RES (1), (3), (40): Xaa is C or S
XKXALHDELTQYNKLFIPKKRVIELYLVSIASLQVQTPRXQVNR

SEQ ID NO: 3946 - protein, 40 aa, Artificial Sequence
  GFR-binding peptide
  MOD_RES (1), (3), (36), (37): Xaa is C or S
  MOD_RES (14), (15), (16), (17), (18): Xaa is A or G
  MOD_RES (19), (20), (21), (22): Xaa is A or G or is absent
XKXSKVVMRHKRLXXXXXXXXXYYLISTASLDQPVXXPSA

SEQ ID NO: 3947 - protein, 41 aa, Artificial Sequence
  GFR-binding peptide
  MOD_RES (1), (3), (35): Xaa is C or S
XGXSRVVMNQYNKLIVNSSDDLYLVSIASLKTPAXTPKTVH

SEQ ID NO: 3948 - protein, 39 aa, Artificial Sequence
  GFR-binding peptide
  MOD_RES (1), (3), (37), (38): Xaa is C or S
  MOD_RES (15), (16), (17), (18), (19): Xaa is A or G
  MOD_RES (20), (21), (22), (23): Xaa is A or G or is absent
XGXGEVVMDQYNKLXXXXXXXXXLYLMSIASLETPVXXA

SEQ ID NO: 3949 - protein, 39 aa, Artificial Sequence
  GFR-binding peptide
  MOD_RES (2), (36), (37): Xaa is C or S
  MOD_RES (14), (15), (16), (17), (18): Xaa is A or G
  MOD_RES (19), (20), (21), (22): Xaa is A or G or is absent
GXGEVVMERYKKLXXXXXXXXXFYLMSIANLETPVXXAK

SEQ ID NO: 3950 - protein, 34 aa, Artificial Sequence
  GFR-binding peptide
  MOD_RES (1), (3): Xaa is C or S
XGXGEVVMERYKKLVVKDYEDFYLMSIANLETPV

SEQ ID NO: 3951 - protein, 36 aa, Artificial Sequence
  GFR-binding peptide
  MOD_RES (34), (35): Xaa is C or S
  MOD_RES (12), (13), (14), (15), (16): Xaa is A or G
  MOD_RES (17), (18), (19), (20): Xaa is A or G or is absent
ARVVMNRHKRLXXXXXXXXXYYLVSTASLQTPAXXP

SEQ ID NO: 3952 - protein, 40 aa, Artificial Sequence
  GFR-binding peptide
  MOD_RES (34), (35): Xaa is C or S
  MOD_RES (12), (13), (14), (15), (16): Xaa is A or G
  MOD_RES (17), (18), (19), (20): Xaa is A or G or is absent
GEVVMDQYNKLXXXXXXXXXLYLMSIASLETPVXXAKPIK

SEQ ID NO: 3953 - protein, 34 aa, Artificial Sequence
  GFR-binding peptide
  MOD_RES (31), (32): Xaa is C or S
SKVIMRHKRLIKPTKGIYYLISTASLDQSVXXPS

SEQ ID NO: 3954 - protein, 38 aa, Artificial Sequence
  GFR-binding peptide
  MOD_RES (2), (2): Xaa is C or S
KXALHDELTQYNKLFIPKKRVIELYLVSIASLQVQTPR

SEQ ID NO: 3955 - protein, 39 aa, Artificial Sequence
  GFR-binding peptide
  MOD_RES (2), (4), (36), (37): Xaa is C or S
RXGXGEVVMDRYKKLVVKENEDFYLMSIANLETPVXXAK

SEQ ID NO: 3956 - protein, 43 aa, Artificial Sequence
  GFR-binding peptide
  MOD_RES (2), (4), (37), (38): Xaa is C or S
  MOD_RES (15), (16), (17), (18), (19): Xaa is A or G
  MOD_RES (20), (21), (22), (23): Xaa is A or G or is absent
SXKXSRVIMQYNKLXXXXXXXXXLYLISIASLAQPVXXPAASA

SEQ ID NO: 3957 - protein, 37 aa, Artificial Sequence
  GFR-binding peptide
  MOD_RES (2), (4): Xaa is C or S
  MOD_RES (16), (17), (18), (19), (20): Xaa is A or G
  MOD_RES (21), (22), (23), (24): Xaa is A or G or is absent
HXGXAKVVMNYHYKLXXXXXXXXXKYLVSIPSLKTPA

SEQ ID NO: 3958 - protein, 41 aa, Artificial Sequence
  GFR-binding peptide
  MOD_RES (1), (3), (35), (36): Xaa is C or S
XGXGEVVMEYHYKLVVKDYEDKYLMSIPSLETPVXXAKPIS

SEQ ID NO: 3959 - protein, 38 aa, Artificial Sequence
  GFR-binding peptide
  MOD_RES (2), (4), (36): Xaa is C or S
HXGXSRVVMNRYKKLIVNSSDDFYLVSIANLKTPAXTP

SEQ ID NO: 3960 - protein, 38 aa, Artificial Sequence
  GFR-binding peptide
  MOD_RES (33), (34): Xaa is C or S
  MOD_RES (11), (12), (13), (14), (15): Xaa is A or G
  MOD_RES (16), (17), (18), (19): Xaa is A or G or is absent
SKVVMQYNKLXXXXXXXXXLYLISIASLDQPVXXPSAS

SEQ ID NO: 3961 - protein, 37 aa, Artificial Sequence
  GFR-binding peptide
  MOD_RES (37), (37): Xaa is C or S
ALHDELTRYKKLFIPKKRVIEFYLVSIANLQVQTPRX

SEQ ID NO: 3962 - protein, 36 aa, Artificial Sequence
  GFR-binding peptide
  MOD_RES (1), (3): Xaa is C or S
  MOD_RES (15), (16), (17), (18), (19): Xaa is A or G
  MOD_RES (20), (21), (22), (23): Xaa is A or G or is absent
XGXGEVVMDRHKRLXXXXXXXXXYYLMSTASLETPV

SEQ ID NO: 3963 - protein, 37 aa, Artificial Sequence
  GFR-binding peptide
  MOD_RES (2), (34), (35): Xaa is C or S
GXSRVVMNYHYKLIVNSSDDKYLVSIPSLKTPAXXPK

SEQ ID NO: 3964 - protein, 39 aa, Artificial Sequence
  GFR-binding peptide
  MOD_RES (36), (36): Xaa is C or S
LHDELTQYNKLFIPKKRVIELYLVSIASLQVQTPRXQVN

SEQ ID NO: 3965 - protein, 34 aa, Artificial Sequence
  GFR-binding peptide
  MOD_RES (1), (34): Xaa is C or S
  MOD_RES (12), (13), (14), (15), (16): Xaa is A or G
  MOD_RES (17), (18), (19), (20): Xaa is A or G or is absent
XSKVIMRHKRLXXXXXXXXXYYLISTASLDQSVX

SEQ ID NO: 3966 - protein, 35 aa, Artificial Sequence
  GFR-binding peptide
  MOD_RES (1), (35): Xaa is C or S
  MOD_RES (13), (14), (15), (16), (17): Xaa is A or G
  MOD_RES (18), (19), (20), (21): Xaa is A or G or is absent
XSRVVMNYHYKLXXXXXXXXXKYLVSIPSLKTPAX

SEQ ID NO: 3967 - protein, 37 aa, Artificial Sequence
  GFR-binding peptide
  MOD_RES (2), (4), (36), (37): Xaa is C or S
RXGXGEVVMEQYNKLVVKDYEDLYLMSIASLETPVXX

SEQ ID NO: 3968 - protein, 34 aa, Artificial Sequence
  GFR-binding peptide
  MOD_RES (1), (34): Xaa is C or S
  MOD_RES (12), (13), (14), (15), (16): Xaa is A or G
  MOD_RES (17), (18), (19), (20): Xaa is A or G or is absent
XSKVIMQYNKLXXXXXXXXXLYLISIASLDQSVX

SEQ ID NO: 3969 - protein, 34 aa, Artificial Sequence
  GFR-binding peptide
  MOD_RES (1), (33), (34): Xaa is C or S
XSRVVMNRYKKLIVNSSDDFYLVSIANLKTPAXX

SEQ ID NO: 3970 - protein, 39 aa, Artificial Sequence
  GFR-binding peptide
  MOD_RES (1), (3), (37), (38): Xaa is C or S
  MOD_RES (15), (16), (17), (18), (19): Xaa is A or G
  MOD_RES (20), (21), (22), (23): Xaa is A or G or is absent
XGXAKVVMNYHYKLXXXXXXXXXKYLVSIPSLKTPAXXA

SEQ ID NO: 3971 - protein, 41 aa, Artificial Sequence
  GFR-binding peptide
  MOD_RES (2), (4), (37), (38): Xaa is C or S
  MOD_RES (15), (16), (17), (18), (19): Xaa is A or G
  MOD_RES (20), (21), (22), (23): Xaa is A or G or is absent
SXKXSRVIMRHKRLXXXXXXXXXYYLISTASLAQPVXXPAA

SEQ ID NO: 3972 - protein, 39 aa, Artificial Sequence
  GFR-binding peptide
  MOD_RES (33), (34): Xaa is C or S
  MOD_RES (11), (12), (13), (14), (15): Xaa is A or G
  MOD_RES (16), (17), (18), (19): Xaa is A or G or is absent
SKVVMQYNKLXXXXXXXXXLYLISIASLDQPVXXPSASA

SEQ ID NO: 3973 - protein, 38 aa, Artificial Sequence
  GFR-binding peptide
  MOD_RES (2), (34): Xaa is C or S
GXSRVVMNRYKKLIVNSSDDFYLVSIANLKTPAXTPKT

SEQ ID NO: 3974 - protein, 36 aa, Artificial Sequence
  GFR-binding peptide
  MOD_RES (13), (14), (15), (16), (17): Xaa is A or G
  MOD_RES (18), (19), (20), (21): Xaa is A or G or is absent
ALHDELTRHKRLXXXXXXXXXYYLVSTASLQVQTPR

SEQ ID NO: 3975 - protein, 37 aa, Artificial Sequence
  GFR-binding peptide
  MOD_RES (2), (4), (37): Xaa is C or S
  MOD_RES (15), (16), (17), (18), (19): Xaa is A or G
  MOD_RES (20), (21), (22), (23): Xaa is A or G or is absent
SXKXSKVIMRHKRLXXXXXXXXXYYLISTASLDQSVX

SEQ ID NO: 3976 - protein, 34 aa, Artificial Sequence
  GFR-binding peptide
  MOD_RES (31), (32): Xaa is C or S
SKVIMRYKKLIKPTKGIFYLISIANLDQSVXXPS

SEQ ID NO: 3977 - protein, 42 aa, Artificial Sequence
  GFR-binding peptide
  MOD_RES (1), (3), (40): Xaa is C or S
XKXALHDELTYHYKLFIPKKRVIEKYLVSIPSLQVQTPRXQV

SEQ ID NO: 3978 - protein, 36 aa, Artificial Sequence
  GFR-binding peptide
  MOD_RES (1), (3), (34), (35): Xaa is C or S
XKXSRVIMRYKKLVKPKRGVFYLISIANLAQPVXXP

SEQ ID NO: 3979 - protein, 34 aa, Artificial Sequence
  GFR-binding peptide
  MOD_RES (1), (3): Xaa is C or S
XGXAKVVMNQYNKLIVNNSSDLYLVSIASLKTPA

SEQ ID NO: 3980 - protein, 36 aa, Artificial Sequence
  GFR-binding peptide
  MOD_RES (13), (14), (15), (16), (17): Xaa is A or G
  MOD_RES (18), (19), (20), (21): Xaa is A or G or is absent
ALHDELTQYNKLXXXXXXXXXLYLVSIASLQVQTPR

SEQ ID NO: 3981 - protein, 41 aa, Artificial Sequence
  GFR-binding peptide
  MOD_RES (1), (3), (37), (38): Xaa is C or S
  MOD_RES (15), (16), (17), (18), (19): Xaa is A or G
  MOD_RES (20), (21), (22), (23): Xaa is A or G or is absent
XGXGEVVMDRYKKLXXXXXXXXXFYLMSIANLETPVXXAKP

SEQ ID NO: 3982 - protein, 39 aa, Artificial Sequence
  GFR-binding peptide
  MOD_RES (2), (35), (36): Xaa is C or S
  MOD_RES (13), (14), (15), (16), (17): Xaa is A or G
  MOD_RES (18), (19), (20), (21): Xaa is A or G or is absent
KXSKVVMRYKKLXXXXXXXXXFYLISIANLDQPVXXPSA

SEQ ID NO: 3983 - protein, 38 aa, Artificial Sequence
  GFR-binding peptide
  MOD_RES (1), (35): Xaa is C or S
  MOD_RES (13), (14), (15), (16), (17): Xaa is A or G
  MOD_RES (18), (19), (20), (21): Xaa is A or G or is absent
XSRVVMNQYNKLXXXXXXXXXLYLVSIASLKTPAXTPK

SEQ ID NO: 3984 - protein, 38 aa, Artificial Sequence
  GFR-binding peptide
  MOD_RES (33), (34): Xaa is C or S
  MOD_RES (11), (12), (13), (14), (15): Xaa is A or G
  MOD_RES (16), (17), (18), (19): Xaa is A or G or is absent
SKVVMYHYKLXXXXXXXXXKYLISIPSLDQPVXXPSAS

SEQ ID NO: 3985 - protein, 36 aa, Artificial Sequence
  GFR-binding peptide
  MOD_RES (1), (34), (35): Xaa is C or S
  MOD_RES (12), (13), (14), (15), (16): Xaa is A or G
  MOD_RES (17), (18), (19), (20): Xaa is A or G or is absent
XSRVIMRYKKLXXXXXXXXXFYLISIANLAQPVXXP

SEQ ID NO: 3986 - protein, 35 aa, Artificial Sequence
  GFR-binding peptide
  MOD_RES (31), (32): Xaa is C or S
EVVMEQYNKLVVKDYEDLYLMSIASLETPVXXAKP

SEQ ID NO: 3987 - protein, 32 aa, Artificial Sequence
  GFR-binding peptide
  MOD_RES (32), (32): Xaa is C or S
GEVVMDYHYKLVVKENEDKYLMSIPSLETPVX

SEQ ID NO: 3988 - protein, 40 aa, Artificial Sequence
  GFR-binding peptide
  MOD_RES (1), (3), (37), (38): Xaa is C or S
  MOD_RES (15), (16), (17), (18), (19): Xaa is A or G
  MOD_RES (20), (21), (22), (23): Xaa is A or G or is absent
XGXSRVVMNRHKRLXXXXXXXXXYYLVSTASLKTPAXXPK

SEQ ID NO: 3989 - protein, 33 aa, Artificial Sequence
  GFR-binding peptide
  MOD_RES (31), (32): Xaa is C or S
KVVMNQYNKLIVNNSSDLYLVSIASLKTPAXXA

SEQ ID NO: 3990 - protein, 39 aa, Artificial Sequence
  GFR-binding peptide
  MOD_RES (1), (35): Xaa is C or S
  MOD_RES (13), (14), (15), (16), (17): Xaa is A or G
  MOD_RES (18), (19), (20), (21): Xaa is A or G or is absent
XSRVVMNQYNKLXXXXXXXXXLYLVSIASLKTPAXTPKT

SEQ ID NO: 3991 - protein, 38 aa, Artificial Sequence
  GFR-binding peptide
  MOD_RES (2), (4), (35), (36): Xaa is C or S
SXKXSKVVMYHYKLVKPTRGVKYLISIPSLDQPVXXPS

SEQ ID NO: 3992 - protein, 37 aa, Artificial Sequence
  GFR-binding peptide
  MOD_RES (33), (34): Xaa is C or S
  MOD_RES (11), (12), (13), (14), (15): Xaa is A or G
  MOD_RES (16), (17), (18), (19): Xaa is A or G or is absent
KVVMNRHKRLXXXXXXXXXYYLVSTASLKTPAXXAKP

SEQ ID NO: 3993 - protein, 36 aa, Artificial Sequence
  GFR-binding peptide
  MOD_RES (1), (1): Xaa is C or S
XALHDELTRYKKLFIPKKRVIEFYLVSIANLQVQTP

SEQ ID NO: 3994 - protein, 39 aa, Artificial Sequence
  GFR-binding peptide
  MOD_RES (2), (4), (37), (38): Xaa is C or S
RXGXEAVSMGERHKRLTPVGMDDYYLVSTASLKTPVXXA

SEQ ID NO: 3995 - protein, 32 aa, Artificial Sequence
  GFR-binding peptide
  MOD_RES (32), (32): Xaa is C or S
SRVVMNYHYKLIVNSSDDKYLVSIPSLKTPAX

SEQ ID NO: 3996 - protein, 35 aa, Artificial Sequence
  GFR-binding peptide
  MOD_RES (34), (34): Xaa is C or S
  MOD_RES (12), (13), (14), (15), (16): Xaa is A or G
  MOD_RES (17), (18), (19), (20): Xaa is A or G or is absent
SRVVMNRHKRLXXXXXXXXXYYLVSTASLKTPAXT

SEQ ID NO: 3997 - protein, 37 aa, Artificial Sequence
  GFR-binding peptide
  MOD_RES (1), (3), (35), (36): Xaa is C or S
XGXGEVVMDQYNKLVVKENEDLYLMSIASLETPVXXA

SEQ ID NO: 3998 - protein, 36 aa, Artificial Sequence
  GFR-binding peptide
  MOD_RES (34), (35): Xaa is C or S
  MOD_RES (12), (13), (14), (15), (16): Xaa is A or G
  MOD_RES (17), (18), (19), (20): Xaa is A or G or is absent
GEVVMDRHKRLXXXXXXXXXYYLMSTASLETPVXXA

SEQ ID NO: 3999 - protein, 38 aa, Artificial Sequence
  GFR-binding peptide
  MOD_RES (1), (3), (34), (35): Xaa is C or S
XKXSKVIMYHYKLIKPTKGIKYLISIPSLDQSVXXPSA

SEQ ID NO: 4000 - protein, 36 aa, Artificial Sequence
  GFR-binding peptide
  MOD_RES (31), (32): Xaa is C or S
RVVMNRYKKLIVNSSDDFYLVSIANLQTPAXXPKPV

SEQ ID NO: 4001 - protein, 41 aa, Artificial Sequence
  GFR-binding peptide
  MOD_RES (2), (4), (35), (36): Xaa is C or S
SXKXSRVIMRHKRLVKPKRGVYYLISTASLAQPVXXPAASA

SEQ ID NO: 4002 - protein, 37 aa, Artificial Sequence
  GFR-binding peptide
  MOD_RES (2), (4): Xaa is C or S
  MOD_RES (16), (17), (18), (19), (20): Xaa is A or G
  MOD_RES (21), (22), (23), (24): Xaa is A or G or is absent
RXGXGEVVMDRHKRLXXXXXXXXXYYLMSTASLETPV

SEQ ID NO: 4003 - protein, 39 aa, Artificial Sequence
  GFR-binding peptide
  MOD_RES (1), (3), (35), (36): Xaa is C or S
XGXSRVVMNQYNKLIVNSSDDLYLVSIASLKTPAXXPKP

SEQ ID NO: 4004 - protein, 40 aa, Artificial Sequence
  GFR-binding peptide
  MOD_RES (1), (3), (37), (38): Xaa is C or S
  MOD_RES (15), (16), (17), (18), (19): Xaa is A or G
  MOD_RES (20), (21), (22), (23): Xaa is A or G or is absent
XGXGEVVMEQYNKLXXXXXXXXXLYLMSIASLETPVXXAK

SEQ ID NO: 4005 - protein, 37 aa, Artificial Sequence
  GFR-binding peptide
  MOD_RES (33), (34): Xaa is C or S
  MOD_RES (11), (12), (13), (14), (15): Xaa is A or G
  MOD_RES (16), (17), (18), (19): Xaa is A or G or is absent
EVVMERHKRLXXXXXXXXXYYLMSTASLETPVXXAKP

SEQ ID NO: 4006 - protein, 37 aa, Artificial Sequence
  GFR-binding peptide
  MOD_RES (1), (3), (34), (35): Xaa is C or S
XKXSKVIMYHYKLIKPTKGIKYLISIPSLDQSVXXPS

SEQ ID NO: 4007 - protein, 36 aa, Artificial Sequence
  GFR-binding peptide
  MOD_RES (1), (32), (33): Xaa is C or S
XSRVIMRYKKLVKPKRGVFYLISIANLAQPVXXPAA

SEQ ID NO: 4008 - protein, 42 aa, Artificial Sequence
  GFR-binding peptide
  MOD_RES (1), (3), (36), (37): Xaa is C or S
XGXEAVSMGERHKRLTPVGMDDYYLVSTASLKTPVXXAKGVK

SEQ ID NO: 4009 - protein, 36 aa, Artificial Sequence
  GFR-binding peptide
  MOD_RES (1), (35), (36): Xaa is C or S
  MOD_RES (13), (14), (15), (16), (17): Xaa is A or G
  MOD_RES (18), (19), (20), (21): Xaa is A or G or is absent
XARVVMNRHKRLXXXXXXXXXYYLVSTASLQTPAXX

SEQ ID NO: 4010 - protein, 41 aa, Artificial Sequence
  GFR-binding peptide
  MOD_RES (2), (4), (39), (40): Xaa is C or S
  MOD_RES (17), (18), (19), (20), (21): Xaa is A or G
  MOD_RES (22), (23), (24), (25): Xaa is A or G or is absent
RXGXEAVSMGERYKKLXXXXXXXXXFYLVSIANLKTPVXXA

SEQ ID NO: 4011 - protein, 36 aa, Artificial Sequence
  GFR-binding peptide
  MOD_RES (2), (34), (35): Xaa is C or S
GXAKVVMNRYKKLIVNNSSDFYLVSIANLKTPAXXA

SEQ ID NO: 4012 - protein, 38 aa, Artificial Sequence
  GFR-binding peptide
  MOD_RES (2), (33), (34): Xaa is C or S
KXSRVIMYHYKLVKPKRGVKYLISIPSLAQPVXXPAAS

SEQ ID NO: 4013 - protein, 34 aa, Artificial Sequence
  GFR-binding peptide
  MOD_RES (2), (2): Xaa is C or S
  MOD_RES (13), (14), (15), (16), (17): Xaa is A or G
  MOD_RES (18), (19), (20), (21): Xaa is A or G or is absent
KXSKVIMQYNKLXXXXXXXXXLYLISIASLDQSV

SEQ ID NO: 4014 - protein, 38 aa, Artificial Sequence
  GFR-binding peptide
  MOD_RES (1), (3), (35), (36): Xaa is C or S
XGXSRVVMNQYNKLIVNSSDDLYLVSIASLKTPAXXPK

SEQ ID NO: 4015 - protein, 39 aa, Artificial Sequence
  GFR-binding peptide
  MOD_RES (33), (34): Xaa is C or S
  MOD_RES (11), (12), (13), (14), (15): Xaa is A or G
  MOD_RES (16), (17), (18), (19): Xaa is A or G or is absent
SKVVMRHKRLXXXXXXXXXYYLISTASLDQPVXXPSASA

SEQ ID NO: 4016 - protein, 37 aa, Artificial Sequence
  GFR-binding peptide
  MOD_RES (1), (32), (33): Xaa is C or S
XSKVVMQYNKLVKPTRGVLYLISIASLDQPVXXPSAS

SEQ ID NO: 4017 - protein, 39 aa, Artificial Sequence
  GFR-binding peptide
  MOD_RES (1), (35), (36): Xaa is C or S
  MOD_RES (13), (14), (15), (16), (17): Xaa is A or G
  MOD_RES (18), (19), (20), (21): Xaa is A or G or is absent
XSRVVMNRYKKLXXXXXXXXXFYLVSIANLKTPAXXPKP

SEQ ID NO: 4018 - protein, 42 aa, Artificial Sequence
  GFR-binding peptide
  MOD_RES (2), (4), (37), (38): Xaa is C or S
  MOD_RES (15), (16), (17), (18), (19): Xaa is A or G
  MOD_RES (20), (21), (22), (23): Xaa is A or G or is absent
SXKXSKVIMRHKRLXXXXXXXXXYYLISTASLDQSVXXPSAS

SEQ ID NO: 4019 - protein, 38 aa, Artificial Sequence
  GFR-binding peptide
  MOD_RES (1), (38): Xaa is C or S
XALHDELTYHYKLFIPKKRVIEKYLVSIPSLQVQTPRX

SEQ ID NO: 4020 - protein, 34 aa, Artificial Sequence
  GFR-binding peptide
  MOD_RES (33), (33): Xaa is C or S
  MOD_RES (11), (12), (13), (14), (15): Xaa is A or G
  MOD_RES (16), (17), (18), (19): Xaa is A or G or is absent
RVVMNQYNKLXXXXXXXXXLYLVSIASLKTPAXT

SEQ ID NO: 4021 - protein, 37 aa, Artificial Sequence
  GFR-binding peptide
  MOD_RES (1), (3), (34), (35): Xaa is C or S
XKXSKVIMRHKRLIKPTKGIYYLISTASLDQSVXXPS

SEQ ID NO: 4022 - protein, 36 aa, Artificial Sequence
  GFR-binding peptide
  MOD_RES (1), (35), (36): Xaa is C or S
  MOD_RES (13), (14), (15), (16), (17): Xaa is A or G
  MOD_RES (18), (19), (20), (21): Xaa is A or G or is absent
XGEVVMERHKRLXXXXXXXXXYYLMSTASLETPVXX

SEQ ID NO: 4023 - protein, 38 aa, Artificial Sequence
  GFR-binding peptide
  MOD_RES (2), (4), (37), (38): Xaa is C or S
RXGXEAVSMGEYHYKLTPVGMDDKYLVSIPSLKTPVXX

SEQ ID NO: 4024 - protein, 37 aa, Artificial Sequence
  GFR-binding peptide
  MOD_RES (1), (3), (35), (36): Xaa is C or S
XGXARVVMNRYKKLIVNSSDDFYLVSIANLQTPAXXP

SEQ ID NO: 4025 - protein, 37 aa, Artificial Sequence
  GFR-binding peptide
  MOD_RES (2), (36), (37): Xaa is C or S
  MOD_RES (14), (15), (16), (17), (18): Xaa is A or G
  MOD_RES (19), (20), (21), (22): Xaa is A or G or is absent
GXARVVMNRYKKLXXXXXXXXXFYLVSIANLQTPAXX

SEQ ID NO: 4026 - protein, 42 aa, Artificial Sequence
  GFR-binding peptide
  MOD_RES (2), (4), (36), (37): Xaa is C or S
RXGXGEVVMDQYNKLVVKENEDLYLMSIASLETPVXXAKPIK

SEQ ID NO: 4027 - protein, 40 aa, Artificial Sequence
  GFR-binding peptide
  MOD_RES (37), (37): Xaa is C or S
ALHDELTRHKRLFIPKKRVIEYYLVSTASLQVQTPRXQVN

SEQ ID NO: 4028 - protein, 33 aa, Artificial Sequence
  GFR-binding peptide
  MOD_RES (11), (12), (13), (14), (15): Xaa is A or G
  MOD_RES (16), (17), (18), (19): Xaa is A or G or is absent
HDELTQYNKLXXXXXXXXXLYLVSIASLQVQTP

SEQ ID NO: 4029 - protein, 36 aa, Artificial Sequence
  GFR-binding peptide
  MOD_RES (33), (34): Xaa is C or S
EAVSMGEYHYKLTPVGMDDKYLVSIPSLKTPVXXAK

SEQ ID NO: 4030 - protein, 36 aa, Artificial Sequence
  GFR-binding peptide
  MOD_RES (1), (36): Xaa is C or S
  MOD_RES (14), (15), (16), (17), (18): Xaa is A or G
  MOD_RES (19), (20), (21), (22): Xaa is A or G or is absent
XEAVSMGEYHYKLXXXXXXXXXKYLVSIPSLKTPVX

SEQ ID NO: 4031 - protein, 32 aa, Artificial Sequence
  GFR-binding peptide
  MOD_RES (1), (1): Xaa is C or S
XAKVVMNQYNKLIVNNSSDLYLVSIASLKTPA

SEQ ID NO: 4032 - protein, 34 aa, Artificial Sequence
  GFR-binding peptide
  MOD_RES (2), (34): Xaa is C or S
GXGEVVMERHKRLVVKDYEDYYLMSTASLETPVX

SEQ ID NO: 4033 - protein, 41 aa, Artificial Sequence
  GFR-binding peptide
  MOD_RES (1), (3), (37), (38): Xaa is C or S
  MOD_RES (15), (16), (17), (18), (19): Xaa is A or G
  MOD_RES (20), (21), (22), (23): Xaa is A or G or is absent
XGXARVVMNRYKKLXXXXXXXXXFYLVSIANLQTPAXXPKP

SEQ ID NO: 4034 - protein, 33 aa, Artificial Sequence
  GFR-binding peptide
  MOD_RES (1), (1): Xaa is C or S
  MOD_RES (12), (13), (14), (15), (16): Xaa is A or G
  MOD_RES (17), (18), (19), (20): Xaa is A or G or is absent
XSRVIMYHYKLXXXXXXXXXKYLISIPSLAQPV

SEQ ID NO: 4035 - protein, 40 aa, Artificial Sequence
  GFR-binding peptide
  MOD_RES (1), (34), (35): Xaa is C or S
XEAVSMGEYHYKLTPVGMDDKYLVSIPSLKTPVXXAKGVK

SEQ ID NO: 4036 - protein, 35 aa, Artificial Sequence
  GFR-binding peptide
  MOD_RES (33), (34): Xaa is C or S
  MOD_RES (11), (12), (13), (14), (15): Xaa is A or G
  MOD_RES (16), (17), (18), (19): Xaa is A or G or is absent
RVVMNYHYKLXXXXXXXXXKYLVSIPSLQTPAXXP

SEQ ID NO: 4037 - protein, 37 aa, Artificial Sequence
  GFR-binding peptide
  MOD_RES (2), (35), (36): Xaa is C or S
  MOD_RES (13), (14), (15), (16), (17): Xaa is A or G
  MOD_RES (18), (19), (20), (21): Xaa is A or G or is absent
KXSKVVMYHYKLXXXXXXXXXKYLISIPSLDQPVXXP

SEQ ID NO: 4038 - protein, 44 aa, Artificial Sequence
  GFR-binding peptide
  MOD_RES (2), (4), (38), (39): Xaa is C or S
  MOD_RES (16), (17), (18), (19), (20): Xaa is A or G
  MOD_RES (21), (22), (23), (24): Xaa is A or G or is absent
RXGXGEVVMDRHKRLXXXXXXXXXYYLMSTASLETPVXXAKPIK

SEQ ID NO: 4039 - protein, 39 aa, Artificial Sequence
  GFR-binding peptide
  MOD_RES (1), (34), (35): Xaa is C or S
XEAVSMGEQYNKLTPVGMDDLYLVSIASLKTPVXXAKGV

SEQ ID NO: 4040 - protein, 43 aa, Artificial Sequence
  GFR-binding peptide
  MOD_RES (1), (3), (37), (38): Xaa is C or S
  MOD_RES (15), (16), (17), (18), (19): Xaa is A or G
  MOD_RES (20), (21), (22), (23): Xaa is A or G or is absent
XGXSRVVMNRHKRLXXXXXXXXXYYLVSTASLKTPAXXPKPVY

SEQ ID NO: 4041 - protein, 38 aa, Artificial Sequence
  GFR-binding peptide
  MOD_RES (1), (34), (35): Xaa is C or S
  MOD_RES (12), (13), (14), (15), (16): Xaa is A or G
  MOD_RES (17), (18), (19), (20): Xaa is A or G or is absent
XSRVIMYHYKLXXXXXXXXXKYLISIPSLAQPVXXPAA

SEQ ID NO: 4042 - protein, 42 aa, Artificial Sequence
  GFR-binding peptide
  MOD_RES (2), (4), (38), (39): Xaa is C or S
  MOD_RES (16), (17), (18), (19), (20): Xaa is A or G
  MOD_RES (21), (22), (23), (24): Xaa is A or G or is absent
RXGXGEVVMDQYNKLXXXXXXXXXLYLMSIASLETPVXXAKP

SEQ ID NO: 4043 - protein, 36 aa, Artificial Sequence
  GFR-binding peptide
  MOD_RES (36), (36): Xaa is C or S
LHDELTQYNKLFIPKKRVIELYLVSIASLQVQTPRX

SEQ ID NO: 4044 - protein, 33 aa, Artificial Sequence
  GFR-binding peptide
  MOD_RES (1), (32), (33): Xaa is C or S
XSRVIMRHKRLVKPKRGVYYLISTASLAQPVXX

SEQ ID NO: 4045 - protein, 36 aa, Artificial Sequence
  GFR-binding peptide
  MOD_RES (2), (2): Xaa is C or S
  MOD_RES (15), (16), (17), (18), (19): Xaa is A or G
  MOD_RES (20), (21), (22), (23): Xaa is A or G or is absent
GXEAVSMGEYHYKLXXXXXXXXXKYLVSIPSLKTPV

SEQ ID NO: 4046 - protein, 37 aa, Artificial Sequence
  GFR-binding peptide
  MOD_RES (1), (3), (36), (37): Xaa is C or S
XGXEAVSMGERHKRLTPVGMDDYYLVSTASLKTPVXX

SEQ ID NO: 4047 - protein, 40 aa, Artificial Sequence
  GFR-binding peptide
  MOD_RES (2), (4), (38), (39): Xaa is C or S
  MOD_RES (16), (17), (18), (19), (20): Xaa is A or G
  MOD_RES (21), (22), (23), (24): Xaa is A or G or is absent
RXGXGEVVMDQYNKLXXXXXXXXXLYLMSIASLETPVXXA

SEQ ID NO: 4048 - protein, 37 aa, Artificial Sequence
  GFR-binding peptide
  MOD_RES (37), (37): Xaa is C or S
  MOD_RES (13), (14), (15), (16), (17): Xaa is A or G
  MOD_RES (18), (19), (20), (21): Xaa is A or G or is absent
ALHDELTYHYKLXXXXXXXXXKYLVSIPSLQVQTPRX

SEQ ID NO: 4049 - protein, 40 aa, Artificial Sequence
  GFR-binding peptide
  MOD_RES (1), (35), (36): Xaa is C or S
  MOD_RES (13), (14), (15), (16), (17): Xaa is A or G
  MOD_RES (18), (19), (20), (21): Xaa is A or G or is absent
XSRVVMNQYNKLXXXXXXXXXLYLVSIASLKTPAXXPKPV

SEQ ID NO: 4050 - protein, 40 aa, Artificial Sequence
  GFR-binding peptide
  MOD_RES (2), (35), (36): Xaa is C or S
  MOD_RES (13), (14), (15), (16), (17): Xaa is A or G
  MOD_RES (18), (19), (20), (21): Xaa is A or G or is absent
KXSKVVMRYKKLXXXXXXXXXFYLISIANLDQPVXXPSAS

SEQ ID NO: 4051 - protein, 41 aa, Artificial Sequence
  GFR-binding peptide
  MOD_RES (2), (39): Xaa is C or S
KXALHDELTRYKKLFIPKKRVIEFYLVSIANLQVQTPRXQV

SEQ ID NO: 4052 - protein, 35 aa, Artificial Sequence
  GFR-binding peptide
  MOD_RES (34), (35): Xaa is C or S
  MOD_RES (12), (13), (14), (15), (16): Xaa is A or G
  MOD_RES (17), (18), (19), (20): Xaa is A or G or is absent
GEVVMERHKRLXXXXXXXXXYYLMSTASLETPVXX

SEQ ID NO: 4053 - protein, 36 aa, Artificial Sequence
  GFR-binding peptide
  MOD_RES (2), (36): Xaa is C or S
  MOD_RES (14), (15), (16), (17), (18): Xaa is A or G
  MOD_RES (19), (20), (21), (22): Xaa is A or G or is absent
GXGEVVMERHKRLXXXXXXXXXYYLMSTASLETPVX

SEQ ID NO: 4054 - protein, 39 aa, Artificial Sequence
  GFR-binding peptide
  MOD_RES (33), (34): Xaa is C or S
  MOD_RES (11), (12), (13), (14), (15): Xaa is A or G
  MOD_RES (16), (17), (18), (19): Xaa is A or G or is absent
KVVMNRYKKLXXXXXXXXXFYLVSIANLKTPAXXAKPVA

SEQ ID NO: 4055 - protein, 42 aa, Artificial Sequence
  GFR-binding peptide
  MOD_RES (1), (36), (37): Xaa is C or S
  MOD_RES (14), (15), (16), (17), (18): Xaa is A or G
  MOD_RES (19), (20), (21), (22): Xaa is A or G or is absent
XEAVSMGERYKKLXXXXXXXXXFYLVSIANLKTPVXXAKGVK

SEQ ID NO: 4056 - protein, 40 aa, Artificial Sequence
  GFR-binding peptide
  MOD_RES (1), (34), (35): Xaa is C or S
  MOD_RES (12), (13), (14), (15), (16): Xaa is A or G
  MOD_RES (17), (18), (19), (20): Xaa is A or G or is absent
XSRVIMRHKRLXXXXXXXXXYYLISTASLAQPVXXPAASA

SEQ ID NO: 4057 - protein, 35 aa, Artificial Sequence
  GFR-binding peptide
  MOD_RES (1), (3): Xaa is C or S
  MOD_RES (14), (15), (16), (17), (18): Xaa is A or G
  MOD_RES (19), (20), (21), (22): Xaa is A or G or is absent
XKXSRVIMQYNKLXXXXXXXXXLYLISIASLAQPV

SEQ ID NO: 4058 - protein, 38 aa, Artificial Sequence
  GFR-binding peptide
  MOD_RES (2), (4), (36), (37): Xaa is C or S
RXGXGEVVMDRYKKLVVKENEDFYLMSIANLETPVXXA

SEQ ID NO: 4059 - protein, 36 aa, Artificial Sequence
  GFR-binding peptide
  MOD_RES (2), (4): Xaa is C or S
  MOD_RES (15), (16), (17), (18), (19): Xaa is A or G
  MOD_RES (20), (21), (22), (23): Xaa is A or G or is absent
SXKXSKVIMQYNKLXXXXXXXXXLYLISIASLDQSV

SEQ ID NO: 4060 - protein, 35 aa, Artificial Sequence
  GFR-binding peptide
  MOD_RES (2), (34): Xaa is C or S
GXSRVVMNQYNKLIVNSSDDLYLVSIASLKTPAXT

SEQ ID NO: 4061 - protein, 34 aa, Artificial Sequence
  GFR-binding peptide
  MOD_RES (31), (31): Xaa is C or S
RVVMNRHKRLIVNSSDDYYLVSTASLKTPAXTPK

SEQ ID NO: 4062 - protein, 40 aa, Artificial Sequence
  GFR-binding peptide
  MOD_RES (1), (3), (37), (38): Xaa is C or S
  MOD_RES (15), (16), (17), (18), (19): Xaa is A or G
  MOD_RES (20), (21), (22), (23): Xaa is A or G or is absent
XGXARVVMNYHYKLXXXXXXXXXKYLVSIPSLQTPAXXPK

SEQ ID NO: 4063 - protein, 37 aa, Artificial Sequence
  GFR-binding peptide
  MOD_RES (1), (34), (35): Xaa is C or S
  MOD_RES (12), (13), (14), (15), (16): Xaa is A or G
  MOD_RES (17), (18), (19), (20): Xaa is A or G or is absent
XSRVIMYHYKLXXXXXXXXXKYLISIPSLAQPVXXPA

SEQ ID NO: 4064 - protein, 32 aa, Artificial Sequence
  GFR-binding peptide
  MOD_RES (2), (2): Xaa is C or S
KXSRVIMRYKKLVKPKRGVFYLISIANLAQPV

SEQ ID NO: 4065 - protein, 33 aa, Artificial Sequence
  GFR-binding peptide
  MOD_RES (33), (33): Xaa is C or S
  MOD_RES (11), (12), (13), (14), (15): Xaa is A or G
  MOD_RES (16), (17), (18), (19): Xaa is A or G or is absent
EVVMDQYNKLXXXXXXXXXLYLMSIASLETPVX

SEQ ID NO: 4066 - protein, 35 aa, Artificial Sequence
  GFR-binding peptide
  MOD_RES (1), (32), (33): Xaa is C or S
XSKVIMYHYKLIKPTKGIKYLISIPSLDQSVXXPS

SEQ ID NO: 4067 - protein, 35 aa, Artificial Sequence
  GFR-binding peptide
  MOD_RES (32), (33): Xaa is C or S
AKVVMNQYNKLIVNNSSDLYLVSIASLKTPAXXAK

SEQ ID NO: 4068 - protein, 34 aa, Artificial Sequence
  GFR-binding peptide
  MOD_RES (34), (34): Xaa is C or S
  MOD_RES (12), (13), (14), (15), (16): Xaa is A or G
  MOD_RES (17), (18), (19), (20): Xaa is A or G or is absent
GEVVMERHKRLXXXXXXXXXYYLMSTASLETPVX

SEQ ID NO: 4069 - protein, 35 aa, Artificial Sequence
  GFR-binding peptide
  MOD_RES (33), (34): Xaa is C or S
  MOD_RES (11), (12), (13), (14), (15): Xaa is A or G
  MOD_RES (16), (17), (18), (19): Xaa is A or G or is absent
KVVMNYHYKLXXXXXXXXXKYLVSIPSLKTPAXXA

SEQ ID NO: 4070 - protein, 40 aa, Artificial Sequence
  GFR-binding peptide
  MOD_RES (2), (4), (38), (39): Xaa is C or S
  MOD_RES (16), (17), (18), (19), (20): Xaa is A or G
  MOD_RES (21), (22), (23), (24): Xaa is A or G or is absent
HXGXSRVVMNQYNKLXXXXXXXXXLYLVSIASLKTPAXXP

SEQ ID NO: 4071 - protein, 35 aa, Artificial Sequence
  GFR-binding peptide
  MOD_RES (32), (33): Xaa is C or S
SRVVMNRHKRLIVNSSDDYYLVSTASLKTPAXXPK

SEQ ID NO: 4072 - protein, 33 aa, Artificial Sequence
  GFR-binding peptide
LHDELTRYKKLFIPKKRVIEFYLVSIANLQVQT

SEQ ID NO: 4073 - protein, 39 aa, Artificial Sequence
  GFR-binding peptide
  MOD_RES (1), (35), (36): Xaa is C or S
  MOD_RES (13), (14), (15), (16), (17): Xaa is A or G
  MOD_RES (18), (19), (20), (21): Xaa is A or G or is absent
XGEVVMDRYKKLXXXXXXXXXFYLMSIANLETPVXXAKP

SEQ ID NO: 4074 - protein, 38 aa, Artificial Sequence
  GFR-binding peptide
  MOD_RES (2), (4): Xaa is C or S
  MOD_RES (17), (18), (19), (20), (21): Xaa is A or G
  MOD_RES (22), (23), (24), (25): Xaa is A or G or is absent
RXGXEAVSMGEQYNKLXXXXXXXXXLYLVSIASLKTPV

SEQ ID NO: 4075 - protein, 39 aa, Artificial Sequence
  GFR-binding peptide
  MOD_RES (1), (33), (34): Xaa is C or S
XGEVVMDQYNKLVVKENEDLYLMSIASLETPVXXAKPIK

SEQ ID NO: 4076 - protein, 43 aa, Artificial Sequence
  GFR-binding peptide
  MOD_RES (2), (4), (41): Xaa is C or S
EXKXALHDELTYHYKLFIPKKRVIEKYLVSIPSLQVQTPRXQV

SEQ ID NO: 4077 - protein, 37 aa, Artificial Sequence
  GFR-binding peptide
  MOD_RES (1), (32), (33): Xaa is C or S
XSRVIMYHYKLVKPKRGVKYLISIPSLAQPVXXPAAS

SEQ ID NO: 4078 - protein, 39 aa, Artificial Sequence
  GFR-binding peptide
  MOD_RES (1), (3), (36), (37): Xaa is C or S
  MOD_RES (14), (15), (16), (17), (18): Xaa is A or G
  MOD_RES (19), (20), (21), (22): Xaa is A or G or is absent
XKXSKVVMRHKRLXXXXXXXXXYYLISTASLDQPVXXPS

SEQ ID NO: 4079 - protein, 39 aa, Artificial Sequence
  GFR-binding peptide
  MOD_RES (2), (4), (38), (39): Xaa is C or S
  MOD_RES (16), (17), (18), (19), (20): Xaa is A or G
  MOD_RES (21), (22), (23), (24): Xaa is A or G or is absent
HXGXAKVVMNYHYKLXXXXXXXXXKYLVSIPSLKTPAXX

SEQ ID NO: 4080 - protein, 41 aa, Artificial Sequence
  GFR-binding peptide
  MOD_RES (35), (36): Xaa is C or S
  MOD_RES (13), (14), (15), (16), (17): Xaa is A or G
  MOD_RES (18), (19), (20), (21): Xaa is A or G or is absent
EAVSMGERYKKLXXXXXXXXXFYLVSIANLKTPVXXAKGVK

SEQ ID NO: 4081 - protein, 40 aa, Artificial Sequence
  GFR-binding peptide
  MOD_RES (2), (4), (36), (37): Xaa is C or S
HXGXSRVVMNRYKKLIVNSSDDFYLVSIANLKTPAXXPKP

SEQ ID NO: 4082 - protein, 35 aa, Artificial Sequence
  GFR-binding peptide
  MOD_RES (33), (34): Xaa is C or S
  MOD_RES (11), (12), (13), (14), (15): Xaa is A or G
  MOD_RES (16), (17), (18), (19): Xaa is A or G or is absent
SKVVMQYNKLXXXXXXXXXLYLISIASLDQPVXXP

SEQ ID NO: 4083 - protein, 38 aa, Artificial Sequence
  GFR-binding peptide
  MOD_RES (1), (3), (34), (35): Xaa is C or S
XKXSKVIMRHKRLIKPTKGIYYLISTASLDQSVXXPSA

SEQ ID NO: 4084 - protein, 37 aa, Artificial Sequence
  GFR-binding peptide
  MOD_RES (2), (4): Xaa is C or S
  MOD_RES (16), (17), (18), (19), (20): Xaa is A or G
  MOD_RES (21), (22), (23), (24): Xaa is A or G or is absent
HXGXARVVMNYHYKLXXXXXXXXXKYLVSIPSLQTPA

SEQ ID NO: 4085 - protein, 33 aa, Artificial Sequence
  GFR-binding peptide
  MOD_RES (12), (13), (14), (15), (16): Xaa is A or G
  MOD_RES (17), (18), (19), (20): Xaa is A or G or is absent
GEVVMERHKRLXXXXXXXXXYYLMSTASLETPV

SEQ ID NO: 4086 - protein, 36 aa, Artificial Sequence
  GFR-binding peptide
  MOD_RES (1), (3): Xaa is C or S
  MOD_RES (15), (16), (17), (18), (19): Xaa is A or G
  MOD_RES (20), (21), (22), (23): Xaa is A or G or is absent
XGXSRVVMNRYKKLXXXXXXXXXFYLVSIANLKTPA

SEQ ID NO: 4087 - protein, 38 aa, Artificial Sequence
  GFR-binding peptide
  MOD_RES (34), (35): Xaa is C or S
  MOD_RES (12), (13), (14), (15), (16): Xaa is A or G
  MOD_RES (17), (18), (19), (20): Xaa is A or G or is absent
GEVVMEQYNKLXXXXXXXXXLYLMSIASLETPVXXAKP

SEQ ID NO: 4088 - protein, 30 aa, Artificial Sequence
  GFR-binding peptide
SKVIMQYNKLIKPTKGILYLISIASLDQSV

SEQ ID NO: 4089 - protein, 38 aa, Artificial Sequence
  GFR-binding peptide
  MOD_RES (1), (3), (37), (38): Xaa is C or S
  MOD_RES (15), (16), (17), (18), (19): Xaa is A or G
  MOD_RES (20), (21), (22), (23): Xaa is A or G or is absent
XGXARVVMNQYNKLXXXXXXXXXLYLVSIASLQTPAXX

SEQ ID NO: 4090 - protein, 36 aa, Artificial Sequence
  GFR-binding peptide
  MOD_RES (33), (34): Xaa is C or S
  MOD_RES (11), (12), (13), (14), (15): Xaa is A or G
  MOD_RES (16), (17), (18), (19): Xaa is A or G or is absent
SRVIMRYKKLXXXXXXXXXFYLISIANLAQPVXXPA

SEQ ID NO: 4091 - protein, 39 aa, Artificial Sequence
  GFR-binding peptide
  MOD_RES (2), (34): Xaa is C or S
GXSRVVMNYHYKLIVNSSDDKYLVSIPSLKTPAXTPKTV

SEQ ID NO: 4092 - protein, 35 aa, Artificial Sequence
  GFR-binding peptide
  MOD_RES (32), (32): Xaa is C or S
SRVVMNRHKRLIVNSSDDYYLVSTASLKTPAXTPK

SEQ ID NO: 4093 - protein, 38 aa, Artificial Sequence
  GFR-binding peptide
  MOD_RES (2), (4), (36), (37): Xaa is C or S
HXGXARVVMNRHKRLIVNSSDDYYLVSTASLQTPAXXP

SEQ ID NO: 4094 - protein, 38 aa, Artificial Sequence
  GFR-binding peptide
  MOD_RES (2), (34), (35): Xaa is C or S
GXGEVVMDQYNKLVVKENEDLYLMSIASLETPVXXAKP

SEQ ID NO: 4095 - protein, 41 aa, Artificial Sequence
  GFR-binding peptide
  MOD_RES (1), (38): Xaa is C or S
XALHDELTQYNKLFIPKKRVIELYLVSIASLQVQTPRXQVN

SEQ ID NO: 4096 - protein, 40 aa, Artificial Sequence
  GFR-binding peptide
  MOD_RES (1), (36), (37): Xaa is C or S
  MOD_RES (14), (15), (16), (17), (18): Xaa is A or G
  MOD_RES (19), (20), (21), (22): Xaa is A or G or is absent
XEAVSMGERHKRLXXXXXXXXXYYLVSTASLKTPVXXAKG

SEQ ID NO: 4097 - protein, 42 aa, Artificial Sequence
  GFR-binding peptide
  MOD_RES (2), (4), (41): Xaa is C or S
  MOD_RES (17), (18), (19), (20), (21): Xaa is A or G
  MOD_RES (22), (23), (24), (25): Xaa is A or G or is absent
EXKXALHDELTYHYKLXXXXXXXXXKYLVSIPSLQVQTPRXQ

SEQ ID NO: 4098 - protein, 40 aa, Artificial Sequence
  GFR-binding peptide
  MOD_RES (1), (3), (34), (35): Xaa is C or S
XKXSKVIMRYKKLIKPTKGIFYLISIANLDQSVXXPSASA

SEQ ID NO: 4099 - protein, 38 aa, Artificial Sequence
  GFR-binding peptide
  MOD_RES (1), (33), (34): Xaa is C or S
XAKVVMNQYNKLIVNNSSDLYLVSIASLKTPAXXAKPV

SEQ ID NO: 4100 - protein, 34 aa, Artificial Sequence
  GFR-binding peptide
  MOD_RES (1), (34): Xaa is C or S
  MOD_RES (12), (13), (14), (15), (16): Xaa is A or G
  MOD_RES (17), (18), (19), (20): Xaa is A or G or is absent
XSRVIMRYKKLXXXXXXXXXFYLISIANLAQPVX

SEQ ID NO: 4101 - protein, 38 aa, Artificial Sequence
  GFR-binding peptide
  MOD_RES (1), (32), (33): Xaa is C or S
XSKVIMRYKKLIKPTKGIFYLISIANLDQSVXXPSASA

SEQ ID NO: 4102 - protein, 37 aa, Artificial Sequence
  GFR-binding peptide
  MOD_RES (2), (37): Xaa is C or S
  MOD_RES (15), (16), (17), (18), (19): Xaa is A or G
  MOD_RES (20), (21), (22), (23): Xaa is A or G or is absent
GXEAVSMGERYKKLXXXXXXXXXFYLVSIANLKTPVX

SEQ ID NO: 4103 - protein, 36 aa, Artificial Sequence
  GFR-binding peptide
  MOD_RES (1), (35), (36): Xaa is C or S
  MOD_RES (13), (14), (15), (16), (17): Xaa is A or G
  MOD_RES (18), (19), (20), (21): Xaa is A or G or is absent
XAKVVMNQYNKLXXXXXXXXXLYLVSIASLKTPAXX

SEQ ID NO: 4104 - protein, 39 aa, Artificial Sequence
  GFR-binding peptide
  MOD_RES (1), (3), (34), (35): Xaa is C or S
XKXSKVVMRYKKLVKPTRGVFYLISIANLDQPVXXPSAS

SEQ ID NO: 4105 - protein, 38 aa, Artificial Sequence
  GFR-binding peptide
  MOD_RES (2), (35), (36): Xaa is C or S
GXEAVSMGERYKKLTPVGMDDFYLVSIANLKTPVXXAK

SEQ ID NO: 4106 - protein, 37 aa, Artificial Sequence
  GFR-binding peptide
  MOD_RES (36), (36): Xaa is C or S
  MOD_RES (12), (13), (14), (15), (16): Xaa is A or G
  MOD_RES (17), (18), (19), (20): Xaa is A or G or is absent
LHDELTYHYKLXXXXXXXXXKYLVSIPSLQVQTPRXQ

SEQ ID NO: 4107 - protein, 34 aa, Artificial Sequence
  GFR-binding peptide
  MOD_RES (31), (32): Xaa is C or S
SKVVMQYNKLVKPTRGVLYLISIASLDQPVXXPS

SEQ ID NO: 4108 - protein, 38 aa, Artificial Sequence
  GFR-binding peptide
  MOD_RES (37), (37): Xaa is C or S
  MOD_RES (13), (14), (15), (16), (17): Xaa is A or G
  MOD_RES (18), (19), (20), (21): Xaa is A or G or is absent
ALHDELTQYNKLXXXXXXXXXLYLVSIASLQVQTPRXQ

SEQ ID NO: 4109 - protein, 42 aa, Artificial Sequence
  GFR-binding peptide
  MOD_RES (1), (3), (37), (38): Xaa is C or S
  MOD_RES (15), (16), (17), (18), (19): Xaa is A or G
  MOD_RES (20), (21), (22), (23): Xaa is A or G or is absent
XGXGEVVMEQYNKLXXXXXXXXXLYLMSIASLETPVXXAKPI

SEQ ID NO: 4110 - protein, 37 aa, Artificial Sequence
  GFR-binding peptide
  MOD_RES (1), (34), (35): Xaa is C or S
XEAVSMGEYHYKLTPVGMDDKYLVSIPSLKTPVXXAK

SEQ ID NO: 4111 - protein, 41 aa, Artificial Sequence
  GFR-binding peptide
  MOD_RES (2), (36), (37): Xaa is C or S
  MOD_RES (14), (15), (16), (17), (18): Xaa is A or G
  MOD_RES (19), (20), (21), (22): Xaa is A or G or is absent
GXGEVVMERYKKLXXXXXXXXXFYLMSIANLETPVXXAKPI

SEQ ID NO: 4112 - protein, 38 aa, Artificial Sequence
  GFR-binding peptide
  MOD_RES (1), (3), (34), (35): Xaa is C or S
XKXSKVVMYHYKLVKPTRGVKYLISIPSLDQPVXXPSA

SEQ ID NO: 4113 - protein, 35 aa, Artificial Sequence
  GFR-binding peptide
  MOD_RES (33), (34): Xaa is C or S
  MOD_RES (11), (12), (13), (14), (15): Xaa is A or G
  MOD_RES (16), (17), (18), (19): Xaa is A or G or is absent
KVVMNQYNKLXXXXXXXXXLYLVSIASLKTPAXXA

SEQ ID NO: 4114 - protein, 44 aa, Artificial Sequence
  GFR-binding peptide
  MOD_RES (1), (3), (40): Xaa is C or S
  MOD_RES (16), (17), (18), (19), (20): Xaa is A or G
  MOD_RES (21), (22), (23), (24): Xaa is A or G or is absent
XKXALHDELTRHKRLXXXXXXXXXYYLVSTASLQVQTPRXQVNR

SEQ ID NO: 4115 - protein, 37 aa, Artificial Sequence
  GFR-binding peptide
  MOD_RES (1), (33), (34): Xaa is C or S
XGEVVMEYHYKLVVKDYEDKYLMSIPSLETPVXXAKP

SEQ ID NO: 4116 - protein, 38 aa, Artificial Sequence
  GFR-binding peptide
  MOD_RES (37), (37): Xaa is C or S
  MOD_RES (13), (14), (15), (16), (17): Xaa is A or G
  MOD_RES (18), (19), (20), (21): Xaa is A or G or is absent
ALHDELTRHKRLXXXXXXXXXYYLVSTASLQVQTPRXQ

SEQ ID NO: 4117 - protein, 37 aa, Artificial Sequence
  GFR-binding peptide
  MOD_RES (33), (33): Xaa is C or S
  MOD_RES (11), (12), (13), (14), (15): Xaa is A or G
  MOD_RES (16), (17), (18), (19): Xaa is A or G or is absent
RVVMNRHKRLXXXXXXXXXYYLVSTASLKTPAXTPKT

SEQ ID NO: 4118 - protein, 37 aa, Artificial Sequence
  GFR-binding peptide
  MOD_RES (1), (33): Xaa is C or S
XSRVVMNRHKRLIVNSSDDYYLVSTASLKTPAXTPKT

SEQ ID NO: 4119 - protein, 36 aa, Artificial Sequence
  GFR-binding peptide
  MOD_RES (2), (4), (35), (36): Xaa is C or S
SXKXSRVIMQYNKLVKPKRGVLYLISIASLAQPVXX

SEQ ID NO: 4120 - protein, 36 aa, Artificial Sequence
  GFR-binding peptide
  MOD_RES (1), (33), (34): Xaa is C or S
XGEVVMERYKKLVVKDYEDFYLMSIANLETPVXXAK

SEQ ID NO: 4121 - protein, 37 aa, Artificial Sequence
  GFR-binding peptide
  MOD_RES (1), (3): Xaa is C or S
XKXALHDELTQYNKLFIPKKRVIELYLVSIASLQVQT

SEQ ID NO: 4122 - protein, 36 aa, Artificial Sequence
  GFR-binding peptide
  MOD_RES (31), (32): Xaa is C or S
RVVMNQYNKLIVNSSDDLYLVSIASLQTPAXXPKPV

SEQ ID NO: 4123 - protein, 40 aa, Artificial Sequence
  GFR-binding peptide
  MOD_RES (2), (4), (39), (40): Xaa is C or S
  MOD_RES (17), (18), (19), (20), (21): Xaa is A or G
  MOD_RES (22), (23), (24), (25): Xaa is A or G or is absent
RXGXEAVSMGEQYNKLXXXXXXXXXLYLVSIASLKTPVXX

SEQ ID NO: 4124 - protein, 37 aa, Artificial Sequence
  GFR-binding peptide
  MOD_RES (2), (4), (36), (37): Xaa is C or S
RXGXGEVVMDYHYKLVVKENEDKYLMSIPSLETPVXX

SEQ ID NO: 4125 - protein, 35 aa, Artificial Sequence
  GFR-binding peptide
  MOD_RES (1), (32), (33): Xaa is C or S
XSKVVMYHYKLVKPTRGVKYLISIPSLDQPVXXPS

SEQ ID NO: 4126 - protein, 35 aa, Artificial Sequence
  GFR-binding peptide
  MOD_RES (31), (32): Xaa is C or S
SRVIMQYNKLVKPKRGVLYLISIASLAQPVXXPAA

SEQ ID NO: 4127 - protein, 35 aa, Artificial Sequence
  GFR-binding peptide
LHDELTRYKKLFIPKKRVIEFYLVSIANLQVQTPR

SEQ ID NO: 4128 - protein, 38 aa, Artificial Sequence
  GFR-binding peptide
  MOD_RES (34), (35): Xaa is C or S
  MOD_RES (12), (13), (14), (15), (16): Xaa is A or G
  MOD_RES (17), (18), (19), (20): Xaa is A or G or is absent
ARVVMNYHYKLXXXXXXXXXKYLVSIPSLQTPAXXPKP

SEQ ID NO: 4129 - protein, 37 aa, Artificial Sequence
  GFR-binding peptide
  MOD_RES (1), (32), (33): Xaa is C or S
XSKVVMRYKKLVKPTRGVFYLISIANLDQPVXXPSAS

SEQ ID NO: 4130 - protein, 34 aa, Artificial Sequence
  GFR-binding peptide
  MOD_RES (13), (14), (15), (16), (17): Xaa is A or G
  MOD_RES (18), (19), (20), (21): Xaa is A or G or is absent
ALHDELTRYKKLXXXXXXXXXFYLVSIANLQVQT

SEQ ID NO: 4131 - protein, 39 aa, Artificial Sequence
  GFR-binding peptide
  MOD_RES (2), (4), (37), (38): Xaa is C or S
RXGXEAVSMGEQYNKLTPVGMDDLYLVSIASLKTPVXXA

SEQ ID NO: 4132 - protein, 40 aa, Artificial Sequence
  GFR-binding peptide
  MOD_RES (2), (4), (37), (38): Xaa is C or S
  MOD_RES (15), (16), (17), (18), (19): Xaa is A or G
  MOD_RES (20), (21), (22), (23): Xaa is A or G or is absent
SXKXSKVVMRHKRLXXXXXXXXXYYLISTASLDQPVXXPS

SEQ ID NO: 4133 - protein, 34 aa, Artificial Sequence
  GFR-binding peptide
  MOD_RES (2), (34): Xaa is C or S
GXAKVVMNRHKRLIVNNSSDYYLVSTASLKTPAX

SEQ ID NO: 4134 - protein, 37 aa, Artificial Sequence
  GFR-binding peptide
  MOD_RES (1), (33), (34): Xaa is C or S
XGEVVMERYKKLVVKDYEDFYLMSIANLETPVXXAKP

SEQ ID NO: 4135 - protein, 41 aa, Artificial Sequence
  GFR-binding peptide
  MOD_RES (2), (4), (37), (38): Xaa is C or S
  MOD_RES (15), (16), (17), (18), (19): Xaa is A or G
  MOD_RES (20), (21), (22), (23): Xaa is A or G or is absent
SXKXSKVIMQYNKLXXXXXXXXXLYLISIASLDQSVXXPSA

SEQ ID NO: 4136 - protein, 37 aa, Artificial Sequence
  GFR-binding peptide
  MOD_RES (2), (36), (37): Xaa is C or S
  MOD_RES (14), (15), (16), (17), (18): Xaa is A or G
  MOD_RES (19), (20), (21), (22): Xaa is A or G or is absent
GXAKVVMNRYKKLXXXXXXXXXFYLVSIANLKTPAXX

SEQ ID NO: 4137 - protein, 38 aa, Artificial Sequence
  GFR-binding peptide
  MOD_RES (2), (34), (35): Xaa is C or S
GXARVVMNYHYKLIVNSSDDKYLVSIPSLQTPAXXPKP

SEQ ID NO: 4138 - protein, 36 aa, Artificial Sequence
  GFR-binding peptide
  MOD_RES (33), (33): Xaa is C or S
  MOD_RES (11), (12), (13), (14), (15): Xaa is A or G
  MOD_RES (16), (17), (18), (19): Xaa is A or G or is absent
RVVMNRYKKLXXXXXXXXXFYLVSIANLKTPAXTPK

SEQ ID NO: 4139 - protein, 39 aa, Artificial Sequence
  GFR-binding peptide
  MOD_RES (2), (34), (35): Xaa is C or S
GXARVVMNRHKRLIVNSSDDYYLVSTASLQTPAXXPKPV

SEQ ID NO: 4140 - protein, 40 aa, Artificial Sequence
  GFR-binding peptide
  MOD_RES (2), (37), (38): Xaa is C or S
  MOD_RES (15), (16), (17), (18), (19): Xaa is A or G
  MOD_RES (20), (21), (22), (23): Xaa is A or G or is absent
GXEAVSMGERYKKLXXXXXXXXXFYLVSIANLKTPVXXAK

SEQ ID NO: 4141 - protein, 43 aa, Artificial Sequence
  GFR-binding peptide
  MOD_RES (2), (4), (38), (39): Xaa is C or S
  MOD_RES (16), (17), (18), (19), (20): Xaa is A or G
  MOD_RES (21), (22), (23), (24): Xaa is A or G or is absent
HXGXAKVVMNRHKRLXXXXXXXXXYYLVSTASLKTPAXXAKPV

SEQ ID NO: 4142 - protein, 38 aa, Artificial Sequence
  GFR-binding peptide
  MOD_RES (1), (3), (34), (35): Xaa is C or S
XKXSKVVMRHKRLVKPTRGVYYLISTASLDQPVXXPSA

SEQ ID NO: 4143 - protein, 36 aa, Artificial Sequence
  GFR-binding peptide
  MOD_RES (2), (35), (36): Xaa is C or S
  MOD_RES (13), (14), (15), (16), (17): Xaa is A or G
  MOD_RES (18), (19), (20), (21): Xaa is A or G or is absent
KXSRVIMRHKRLXXXXXXXXXYYLISTASLAQPVXX

SEQ ID NO: 4144 - protein, 40 aa, Artificial Sequence
  GFR-binding peptide
  MOD_RES (1), (34), (35): Xaa is C or S
  MOD_RES (12), (13), (14), (15), (16): Xaa is A or G
  MOD_RES (17), (18), (19), (20): Xaa is A or G or is absent
XSRVIMQYNKLXXXXXXXXXLYLISIASLAQPVXXPAASA

SEQ ID NO: 4145 - protein, 35 aa, Artificial Sequence
  GFR-binding peptide
  MOD_RES (1), (32), (33): Xaa is C or S
XSKVIMRHKRLIKPTKGIYYLISTASLDQSVXXPS

SEQ ID NO: 4146 - protein, 38 aa, Artificial Sequence
  GFR-binding peptide
  MOD_RES (34), (35): Xaa is C or S
  MOD_RES (12), (13), (14), (15), (16): Xaa is A or G
  MOD_RES (17), (18), (19), (20): Xaa is A or G or is absent
GEVVMDYHYKLXXXXXXXXXKYLMSIPSLETPVXXAKP

SEQ ID NO: 4147 - protein, 34 aa, Artificial Sequence
  GFR-binding peptide
  MOD_RES (1), (1): Xaa is C or S
  MOD_RES (13), (14), (15), (16), (17): Xaa is A or G
  MOD_RES (18), (19), (20), (21): Xaa is A or G or is absent
XSRVVMNQYNKLXXXXXXXXXLYLVSIASLKTPA

SEQ ID NO: 4148 - protein, 43 aa, Artificial Sequence
  GFR-binding peptide
  MOD_RES (1), (3), (40): Xaa is C or S
  MOD_RES (16), (17), (18), (19), (20): Xaa is A or G
  MOD_RES (21), (22), (23), (24): Xaa is A or G or is absent
XKXALHDELTQYNKLXXXXXXXXXLYLVSIASLQVQTPRXQVN

SEQ ID NO: 4149 - protein, 37 aa, Artificial Sequence
  GFR-binding peptide
  MOD_RES (2), (4), (36), (37): Xaa is C or S
HXGXAKVVMNQYNKLIVNNSSDLYLVSIASLKTPAXX

SEQ ID NO: 4150 - protein, 40 aa, Artificial Sequence
  GFR-binding peptide
  MOD_RES (1), (34), (35): Xaa is C or S
  MOD_RES (12), (13), (14), (15), (16): Xaa is A or G
  MOD_RES (17), (18), (19), (20): Xaa is A or G or is absent
XSKVIMRYKKLXXXXXXXXXFYLISIANLDQSVXXPSASA

SEQ ID NO: 4151 - protein, 35 aa, Artificial Sequence
  GFR-binding peptide
  MOD_RES (1), (3), (35): Xaa is C or S
XGXAKVVMNRYKKLIVNNSSDFYLVSIANLKTPAX

SEQ ID NO: 4152 - protein, 34 aa, Artificial Sequence
  GFR-binding peptide
  MOD_RES (2), (2): Xaa is C or S
  MOD_RES (13), (14), (15), (16), (17): Xaa is A or G
  MOD_RES (18), (19), (20), (21): Xaa is A or G or is absent
KXSKVIMYHYKLXXXXXXXXXKYLISIPSLDQSV

SEQ ID NO: 4153 - protein, 32 aa, Artificial Sequence
  GFR-binding peptide
  MOD_RES (2), (2): Xaa is C or S
KXSRVIMYHYKLVKPKRGVKYLISIPSLAQPV

SEQ ID NO: 4154 - protein, 36 aa, Artificial Sequence
  GFR-binding peptide
  MOD_RES (1), (1): Xaa is C or S
  MOD_RES (14), (15), (16), (17), (18): Xaa is A or G
  MOD_RES (19), (20), (21), (22): Xaa is A or G or is absent
XALHDELTRHKRLXXXXXXXXXYYLVSTASLQVQTP

SEQ ID NO: 4155 - protein, 38 aa, Artificial Sequence
  GFR-binding peptide
  MOD_RES (2), (4), (36), (37): Xaa is C or S
RXGXGEVVMEQYNKLVVKDYEDLYLMSIASLETPVXXA

SEQ ID NO: 4156 - protein, 36 aa, Artificial Sequence
  GFR-binding peptide
  MOD_RES (31), (32): Xaa is C or S
KVVMNQYNKLIVNNSSDLYLVSIASLKTPAXXAKPV

SEQ ID NO: 4157 - protein, 35 aa, Artificial Sequence
  GFR-binding peptide
  MOD_RES (1), (33), (34): Xaa is C or S
XSRVVMNRHKRLIVNSSDDYYLVSTASLKTPAXXP

SEQ ID NO: 4158 - protein, 33 aa, Artificial Sequence
  GFR-binding peptide
  MOD_RES (31), (32): Xaa is C or S
RVVMNRYKKLIVNSSDDFYLVSIANLQTPAXXP

SEQ ID NO: 4159 - protein, 39 aa, Artificial Sequence
  GFR-binding peptide
  MOD_RES (2), (4), (36): Xaa is C or S
HXGXSRVVMNQYNKLIVNSSDDLYLVSIASLKTPAXTPK

SEQ ID NO: 4160 - protein, 38 aa, Artificial Sequence
  GFR-binding peptide
  MOD_RES (2), (36), (37): Xaa is C or S
  MOD_RES (14), (15), (16), (17), (18): Xaa is A or G
  MOD_RES (19), (20), (21), (22): Xaa is A or G or is absent
GXAKVVMNRYKKLXXXXXXXXXFYLVSIANLKTPAXXA

SEQ ID NO: 4161 - protein, 40 aa, Artificial Sequence
  GFR-binding peptide
  MOD_RES (2), (34), (35): Xaa is C or S
GXGEVVMDYHYKLVVKENEDKYLMSIPSLETPVXXAKPIK

SEQ ID NO: 4162 - protein, 37 aa, Artificial Sequence
  GFR-binding peptide
  MOD_RES (2), (4), (36), (37): Xaa is C or S
HXGXSRVVMNYHYKLIVNSSDDKYLVSIPSLKTPAXX

SEQ ID NO: 4163 - protein, 35 aa, Artificial Sequence
  GFR-binding peptide
  MOD_RES (31), (32): Xaa is C or S
SRVIMYHYKLVKPKRGVKYLISIPSLAQPVXXPAA

SEQ ID NO: 4164 - protein, 40 aa, Artificial Sequence
  GFR-binding peptide
  MOD_RES (2), (36): Xaa is C or S
  MOD_RES (14), (15), (16), (17), (18): Xaa is A or G
  MOD_RES (19), (20), (21), (22): Xaa is A or G or is absent
GXSRVVMNYHYKLXXXXXXXXXKYLVSIPSLKTPAXTPKT

SEQ ID NO: 4165 - protein, 42 aa, Artificial Sequence
  GFR-binding peptide
  MOD_RES (2), (39): Xaa is C or S
KXALHDELTRYKKLFIPKKRVIEFYLVSIANLQVQTPRXQVN

SEQ ID NO: 4166 - protein, 37 aa, Artificial Sequence
  GFR-binding peptide
  MOD_RES (1), (32), (33): Xaa is C or S
XSRVIMRHKRLVKPKRGVYYLISTASLAQPVXXPAAS

SEQ ID NO: 4167 - protein, 40 aa, Artificial Sequence
  GFR-binding peptide
  MOD_RES (37), (37): Xaa is C or S
ALHDELTQYNKLFIPKKRVIELYLVSIASLQVQTPRXQVN

SEQ ID NO: 4168 - protein, 39 aa, Artificial Sequence
  GFR-binding peptide
  MOD_RES (2), (4), (38), (39): Xaa is C or S
  MOD_RES (16), (17), (18), (19), (20): Xaa is A or G
  MOD_RES (21), (22), (23), (24): Xaa is A or G or is absent
RXGXGEVVMDQYNKLXXXXXXXXXLYLMSIASLETPVXX

SEQ ID NO: 4169 - protein, 35 aa, Artificial Sequence
  GFR-binding peptide
  MOD_RES (2), (2): Xaa is C or S
  MOD_RES (14), (15), (16), (17), (18): Xaa is A or G
  MOD_RES (19), (20), (21), (22): Xaa is A or G or is absent
GXARVVMNQYNKLXXXXXXXXXLYLVSIASLQTPA

SEQ ID NO: 4170 - protein, 34 aa, Artificial Sequence
  GFR-binding peptide
  MOD_RES (33), (34): Xaa is C or S
EAVSMGERYKKLTPVGMDDFYLVSIANLKTPVXX

SEQ ID NO: 4171 - protein, 35 aa, Artificial Sequence
  GFR-binding peptide
  MOD_RES (32), (33): Xaa is C or S
AKVVMNRYKKLIVNNSSDFYLVSIANLKTPAXXAK

SEQ ID NO: 4172 - protein, 37 aa, Artificial Sequence
  GFR-binding peptide
  MOD_RES (31), (32): Xaa is C or S
EVVMEQYNKLVVKDYEDLYLMSIASLETPVXXAKPIS

SEQ ID NO: 4173 - protein, 40 aa, Artificial Sequence
  GFR-binding peptide
  MOD_RES (34), (34): Xaa is C or S
  MOD_RES (12), (13), (14), (15), (16): Xaa is A or G
  MOD_RES (17), (18), (19), (20): Xaa is A or G or is absent
SRVVMNRYKKLXXXXXXXXXFYLVSIANLKTPAXTPKTVH

SEQ ID NO: 4174 - protein, 38 aa, Artificial Sequence
  GFR-binding peptide
  MOD_RES (2), (4), (38): Xaa is C or S
  MOD_RES (16), (17), (18), (19), (20): Xaa is A or G
  MOD_RES (21), (22), (23), (24): Xaa is A or G or is absent
HXGXARVVMNRYKKLXXXXXXXXXFYLVSIANLQTPAX

SEQ ID NO: 4175 - protein, 36 aa, Artificial Sequence
  GFR-binding peptide
  MOD_RES (2), (4): Xaa is C or S
RXGXEAVSMGEYHYKLTPVGMDDKYLVSIPSLKTPV

SEQ ID NO: 4176 - protein, 35 aa, Artificial Sequence
  GFR-binding peptide
  MOD_RES (1), (35): Xaa is C or S
  MOD_RES (13), (14), (15), (16), (17): Xaa is A or G
  MOD_RES (18), (19), (20), (21): Xaa is A or G or is absent
XSRVVMNQYNKLXXXXXXXXXLYLVSIASLKTPAX

SEQ ID NO: 4177 - protein, 37 aa, Artificial Sequence
  GFR-binding peptide
  MOD_RES (1), (35), (36): Xaa is C or S
  MOD_RES (13), (14), (15), (16), (17): Xaa is A or G
  MOD_RES (18), (19), (20), (21): Xaa is A or G or is absent
XARVVMNRHKRLXXXXXXXXXYYLVSTASLQTPAXXP

SEQ ID NO: 4178 - protein, 38 aa, Artificial Sequence
  GFR-binding peptide
  MOD_RES (1), (3), (37): Xaa is C or S
  MOD_RES (15), (16), (17), (18), (19): Xaa is A or G
  MOD_RES (20), (21), (22), (23): Xaa is A or G or is absent
XGXSRVVMNQYNKLXXXXXXXXXLYLVSIASLKTPAXT

SEQ ID NO: 4179 - protein, 43 aa, Artificial Sequence
  GFR-binding peptide
  MOD_RES (2), (4), (38), (39): Xaa is C or S
  MOD_RES (16), (17), (18), (19), (20): Xaa is A or G
  MOD_RES (21), (22), (23), (24): Xaa is A or G or is absent
RXGXGEVVMEYHYKLXXXXXXXXXKYLMSIPSLETPVXXAKPI

SEQ ID NO: 4180 - protein, 41 aa, Artificial Sequence
  GFR-binding peptide
  MOD_RES (1), (35), (36): Xaa is C or S
  MOD_RES (13), (14), (15), (16), (17): Xaa is A or G
  MOD_RES (18), (19), (20), (21): Xaa is A or G or is absent
XSRVVMNRYKKLXXXXXXXXXFYLVSIANLKTPAXXPKPVY

SEQ ID NO: 4181 - protein, 39 aa, Artificial Sequence
  GFR-binding peptide
  MOD_RES (1), (34), (35): Xaa is C or S
  MOD_RES (12), (13), (14), (15), (16): Xaa is A or G
  MOD_RES (17), (18), (19), (20): Xaa is A or G or is absent
XSRVIMYHYKLXXXXXXXXXKYLISIPSLAQPVXXPAAS

SEQ ID NO: 4182 - protein, 38 aa, Artificial Sequence
  GFR-binding peptide
  MOD_RES (2), (4), (35), (36): Xaa is C or S
SXKXSRVIMQYNKLVKPKRGVLYLISIASLAQPVXXPA

SEQ ID NO: 4183 - protein, 35 aa, Artificial Sequence
  GFR-binding peptide
  MOD_RES (1), (33), (34): Xaa is C or S
XARVVMNRYKKLIVNSSDDFYLVSIANLQTPAXXP

SEQ ID NO: 4184 - protein, 38 aa, Artificial Sequence
  GFR-binding peptide
  MOD_RES (1), (35), (36): Xaa is C or S
  MOD_RES (13), (14), (15), (16), (17): Xaa is A or G
  MOD_RES (18), (19), (20), (21): Xaa is A or G or is absent
XSRVVMNRHKRLXXXXXXXXXYYLVSTASLKTPAXXPK

SEQ ID NO: 4185 - protein, 37 aa, Artificial Sequence
  GFR-binding peptide
  MOD_RES (2), (34): Xaa is C or S
GXSRVVMNRYKKLIVNSSDDFYLVSIANLKTPAXTPK

SEQ ID NO: 4186 - protein, 38 aa, Artificial Sequence
  GFR-binding peptide
  MOD_RES (1), (32), (33): Xaa is C or S
XSKVVMRYKKLVKPTRGVFYLISIANLDQPVXXPSASA

SEQ ID NO: 4187 - protein, 39 aa, Artificial Sequence
  GFR-binding peptide
  MOD_RES (1), (3): Xaa is C or S
  MOD_RES (16), (17), (18), (19), (20): Xaa is A or G
  MOD_RES (21), (22), (23), (24): Xaa is A or G or is absent
XKXALHDELTYHYKLXXXXXXXXXKYLVSIPSLQVQTPR

SEQ ID NO: 4188 - protein, 44 aa, Artificial Sequence
  GFR-binding peptide
  MOD_RES (2), (4), (39), (40): Xaa is C or S
  MOD_RES (17), (18), (19), (20), (21): Xaa is A or G
  MOD_RES (22), (23), (24), (25): Xaa is A or G or is absent
RXGXEAVSMGEYHYKLXXXXXXXXXKYLVSIPSLKTPVXXAKGV

SEQ ID NO: 4189 - protein, 34 aa, Artificial Sequence
  GFR-binding peptide
  MOD_RES (32), (33): Xaa is C or S
GEVVMDRYKKLVVKENEDFYLMSIANLETPVXXA

SEQ ID NO: 4190 - protein, 42 aa, Artificial Sequence
  GFR-binding peptide
  MOD_RES (2), (39): Xaa is C or S
  MOD_RES (15), (16), (17), (18), (19): Xaa is A or G
  MOD_RES (20), (21), (22), (23): Xaa is A or G or is absent
KXALHDELTRYKKLXXXXXXXXXFYLVSIANLQVQTPRXQVN

SEQ ID NO: 4191 - protein, 36 aa, Artificial Sequence
  GFR-binding peptide
  MOD_RES (31), (32): Xaa is C or S
KVVMNYHYKLIVNNSSDKYLVSIPSLKTPAXXAKPV

SEQ ID NO: 4192 - protein, 40 aa, Artificial Sequence
  GFR-binding peptide
  MOD_RES (34), (35): Xaa is C or S
  MOD_RES (12), (13), (14), (15), (16): Xaa is A or G
  MOD_RES (17), (18), (19), (20): Xaa is A or G or is absent
ARVVMNRHKRLXXXXXXXXXYYLVSTASLQTPAXXPKPVT

SEQ ID NO: 4193 - protein, 41 aa, Artificial Sequence
  GFR-binding peptide
  MOD_RES (1), (3), (37), (38): Xaa is C or S
  MOD_RES (15), (16), (17), (18), (19): Xaa is A or G
  MOD_RES (20), (21), (22), (23): Xaa is A or G or is absent
XGXGEVVMEYHYKLXXXXXXXXXKYLMSIPSLETPVXXAKP

SEQ ID NO: 4194 - protein, 37 aa, Artificial Sequence
  GFR-binding peptide
  MOD_RES (2), (34), (35): Xaa is C or S
GXGEVVMDYHYKLVVKENEDKYLMSIPSLETPVXXAK

SEQ ID NO: 4195 - protein, 42 aa, Artificial Sequence
  GFR-binding peptide
  MOD_RES (1), (3), (36), (37): Xaa is C or S
  MOD_RES (14), (15), (16), (17), (18): Xaa is A or G
  MOD_RES (19), (20), (21), (22): Xaa is A or G or is absent
XKXSRVIMYHYKLXXXXXXXXXKYLISIPSLAQPVXXPAASA

SEQ ID NO: 4196 - protein, 38 aa, Artificial Sequence
  GFR-binding peptide
  MOD_RES (1), (3), (35): Xaa is C or S
XGXSRVVMNRHKRLIVNSSDDYYLVSTASLKTPAXTPK

SEQ ID NO: 4197 - protein, 37 aa, Artificial Sequence
  GFR-binding peptide
  MOD_RES (1), (3), (35), (36): Xaa is C or S
XGXGEVVMEQYNKLVVKDYEDLYLMSIASLETPVXXA

SEQ ID NO: 4198 - protein, 36 aa, Artificial Sequence
  GFR-binding peptide
  MOD_RES (35), (36): Xaa is C or S
  MOD_RES (13), (14), (15), (16), (17): Xaa is A or G
  MOD_RES (18), (19), (20), (21): Xaa is A or G or is absent
EAVSMGEQYNKLXXXXXXXXXLYLVSIASLKTPVXX

SEQ ID NO: 4199 - protein, 35 aa, Artificial Sequence
  GFR-binding peptide
  MOD_RES (1), (33), (34): Xaa is C or S
XARVVMNYHYKLIVNSSDDKYLVSIPSLQTPAXXP

SEQ ID NO: 4200 - protein, 33 aa, Artificial Sequence
  GFR-binding peptide
  MOD_RES (31), (32): Xaa is C or S
RVVMNRHKRLIVNSSDDYYLVSTASLQTPAXXP

SEQ ID NO: 4201 - protein, 41 aa, Artificial Sequence
  GFR-binding peptide
  MOD_RES (2), (4), (35), (36): Xaa is C or S
SXKXSKVVMRYKKLVKPTRGVFYLISIANLDQPVXXPSASA

SEQ ID NO: 4202 - protein, 32 aa, Artificial Sequence
  GFR-binding peptide
  MOD_RES (11), (12), (13), (14), (15): Xaa is A or G
  MOD_RES (16), (17), (18), (19): Xaa is A or G or is absent
SKVVMRYKKLXXXXXXXXXFYLISIANLDQPV

SEQ ID NO: 4203 - protein, 38 aa, Artificial Sequence
  GFR-binding peptide
  MOD_RES (33), (34): Xaa is C or S
EAVSMGERHKRLTPVGMDDYYLVSTASLKTPVXXAKGV

SEQ ID NO: 4204 - protein, 34 aa, Artificial Sequence
  GFR-binding peptide
  MOD_RES (31), (32): Xaa is C or S
SKVVMYHYKLVKPTRGVKYLISIPSLDQPVXXPS

SEQ ID NO: 4205 - protein, 37 aa, Artificial Sequence
  GFR-binding peptide
  MOD_RES (1), (3), (37): Xaa is C or S
  MOD_RES (15), (16), (17), (18), (19): Xaa is A or G
  MOD_RES (20), (21), (22), (23): Xaa is A or G or is absent
XGXAKVVMNRYKKLXXXXXXXXXFYLVSIANLKTPAX

SEQ ID NO: 4206 - protein, 35 aa, Artificial Sequence
  GFR-binding peptide
  MOD_RES (1), (3): Xaa is C or S
  MOD_RES (14), (15), (16), (17), (18): Xaa is A or G
  MOD_RES (19), (20), (21), (22): Xaa is A or G or is absent
XKXSKVVMRHKRLXXXXXXXXXYYLISTASLDQPV

SEQ ID NO: 4207 - protein, 38 aa, Artificial Sequence
  GFR-binding peptide
  MOD_RES (2), (36), (37): Xaa is C or S
  MOD_RES (14), (15), (16), (17), (18): Xaa is A or G
  MOD_RES (19), (20), (21), (22): Xaa is A or G or is absent
GXGEVVMDRYKKLXXXXXXXXXFYLMSIANLETPVXXA

SEQ ID NO: 4208 - protein, 36 aa, Artificial Sequence
  GFR-binding peptide
  MOD_RES (35), (36): Xaa is C or S
  MOD_RES (13), (14), (15), (16), (17): Xaa is A or G
  MOD_RES (18), (19), (20), (21): Xaa is A or G or is absent
EAVSMGERHKRLXXXXXXXXXYYLVSTASLKTPVXX

SEQ ID NO: 4209 - protein, 41 aa, Artificial Sequence
  GFR-binding peptide
  MOD_RES (2), (4), (41): Xaa is C or S
EXKXALHDELTRHKRLFIPKKRVIEYYLVSTASLQVQTPRX

SEQ ID NO: 4210 - protein, 38 aa, Artificial Sequence
  GFR-binding peptide
  MOD_RES (1), (35), (36): Xaa is C or S
  MOD_RES (13), (14), (15), (16), (17): Xaa is A or G
  MOD_RES (18), (19), (20), (21): Xaa is A or G or is absent
XGEVVMDRHKRLXXXXXXXXXYYLMSTASLETPVXXAK

SEQ ID NO: 4211 - protein, 33 aa, Artificial Sequence
  GFR-binding peptide
  MOD_RES (33), (33): Xaa is C or S
  MOD_RES (11), (12), (13), (14), (15): Xaa is A or G
  MOD_RES (16), (17), (18), (19): Xaa is A or G or is absent
SKVVMRYKKLXXXXXXXXXFYLISIANLDQPVX

SEQ ID NO: 4212 - protein, 38 aa, Artificial Sequence
  GFR-binding peptide
  MOD_RES (2), (36), (37): Xaa is C or S
  MOD_RES (14), (15), (16), (17), (18): Xaa is A or G
  MOD_RES (19), (20), (21), (22): Xaa is A or G or is absent
GXSRVVMNRHKRLXXXXXXXXXYYLVSTASLKTPAXXP

SEQ ID NO: 4213 - protein, 36 aa, Artificial Sequence
  GFR-binding peptide
  MOD_RES (2), (35), (36): Xaa is C or S
  MOD_RES (13), (14), (15), (16), (17): Xaa is A or G
  MOD_RES (18), (19), (20), (21): Xaa is A or G or is absent
KXSKVVMYHYKLXXXXXXXXXKYLISIPSLDQPVXX

SEQ ID NO: 4214 - protein, 35 aa, Artificial Sequence
  GFR-binding peptide
  MOD_RES (2), (2): Xaa is C or S
  MOD_RES (14), (15), (16), (17), (18): Xaa is A or G
  MOD_RES (19), (20), (21), (22): Xaa is A or G or is absent
GXAKVVMNQYNKLXXXXXXXXXLYLVSIASLKTPA

SEQ ID NO: 4215 - protein, 37 aa, Artificial Sequence
  GFR-binding peptide
  MOD_RES (1), (35), (36): Xaa is C or S
  MOD_RES (13), (14), (15), (16), (17): Xaa is A or G
  MOD_RES (18), (19), (20), (21): Xaa is A or G or is absent
XGEVVMERYKKLXXXXXXXXXFYLMSIANLETPVXXA

SEQ ID NO: 4216 - protein, 38 aa, Artificial Sequence
  GFR-binding peptide
  MOD_RES (1), (32), (33): Xaa is C or S
XSRVIMRHKRLVKPKRGVYYLISTASLAQPVXXPAASA

SEQ ID NO: 4217 - protein, 30 aa, Artificial Sequence
  GFR-binding peptide
SKVIMYHYKLIKPTKGIKYLISIPSLDQSV

SEQ ID NO: 4218 - protein, 36 aa, Artificial Sequence
  GFR-binding peptide
  MOD_RES (1), (3), (35), (36): Xaa is C or S
XGXGEVVMEQYNKLVVKDYEDLYLMSIASLETPVXX

SEQ ID NO: 4219 - protein, 36 aa, Artificial Sequence
  GFR-binding peptide
  MOD_RES (36), (36): Xaa is C or S
LHDELTRYKKLFIPKKRVIEFYLVSIANLQVQTPRX

SEQ ID NO: 4220 - protein, 32 aa, Artificial Sequence
  GFR-binding peptide
  MOD_RES (1), (32): Xaa is C or S
XSRVIMRYKKLVKPKRGVFYLISIANLAQPVX

SEQ ID NO: 4221 - protein, 31 aa, Artificial Sequence
  GFR-binding peptide
  MOD_RES (1), (1): Xaa is C or S
XSRVIMRYKKLVKPKRGVFYLISIANLAQPV

SEQ ID NO: 4222 - protein, 41 aa, Artificial Sequence
  GFR-binding peptide
  MOD_RES (1), (38): Xaa is C or S
  MOD_RES (14), (15), (16), (17), (18): Xaa is A or G
  MOD_RES (19), (20), (21), (22): Xaa is A or G or is absent
XALHDELTRYKKLXXXXXXXXXFYLVSIANLQVQTPRXQVN

SEQ ID NO: 4223 - protein, 37 aa, Artificial Sequence
  GFR-binding peptide
  MOD_RES (2), (36), (37): Xaa is C or S
  MOD_RES (14), (15), (16), (17), (18): Xaa is A or G
  MOD_RES (19), (20), (21), (22): Xaa is A or G or is absent
GXGEVVMDRYKKLXXXXXXXXXFYLMSIANLETPVXX

SEQ ID NO: 4224 - protein, 36 aa, Artificial Sequence
  GFR-binding peptide
  MOD_RES (2), (4), (35), (36): Xaa is C or S
SXKXSKVVMYHYKLVKPTRGVKYLISIPSLDQPVXX

SEQ ID NO: 4225 - protein, 35 aa, Artificial Sequence
  GFR-binding peptide
  MOD_RES (2), (4), (35): Xaa is C or S
SXKXSKVIMRHKRLIKPTKGIYYLISTASLDQSVX

SEQ ID NO: 4226 - protein, 40 aa, Artificial Sequence
  GFR-binding peptide
  MOD_RES (1), (3), (34), (35): Xaa is C or S
XKXSKVVMRYKKLVKPTRGVFYLISIANLDQPVXXPSASA

SEQ ID NO: 4227 - protein, 38 aa, Artificial Sequence
  GFR-binding peptide
  MOD_RES (1), (34), (35): Xaa is C or S
  MOD_RES (12), (13), (14), (15), (16): Xaa is A or G
  MOD_RES (17), (18), (19), (20): Xaa is A or G or is absent
XSKVIMRYKKLXXXXXXXXXFYLISIANLDQSVXXPSA

SEQ ID NO: 4228 - protein, 36 aa, Artificial Sequence
  GFR-binding peptide
  MOD_RES (1), (33), (34): Xaa is C or S
XSRVVMNRYKKLIVNSSDDFYLVSIANLKTPAXXPK

SEQ ID NO: 4229 - protein, 39 aa, Artificial Sequence
  GFR-binding peptide
  MOD_RES (1), (33), (34): Xaa is C or S
XARVVMNRYKKLIVNSSDDFYLVSIANLQTPAXXPKPVT

SEQ ID NO: 4230 - protein, 37 aa, Artificial Sequence
  GFR-binding peptide
  MOD_RES (2), (4), (35), (36): Xaa is C or S
SXKXSRVIMRYKKLVKPKRGVFYLISIANLAQPVXXP

SEQ ID NO: 4231 - protein, 34 aa, Artificial Sequence
  GFR-binding peptide
  MOD_RES (31), (32): Xaa is C or S
KVVMNRHKRLIVNNSSDYYLVSTASLKTPAXXAK

SEQ ID NO: 4232 - protein, 42 aa, Artificial Sequence
  GFR-binding peptide
  MOD_RES (1), (38): Xaa is C or S
  MOD_RES (14), (15), (16), (17), (18): Xaa is A or G
  MOD_RES (19), (20), (21), (22): Xaa is A or G or is absent
XALHDELTRYKKLXXXXXXXXXFYLVSIANLQVQTPRXQVNR

SEQ ID NO: 4233 - protein, 35 aa, Artificial Sequence
  GFR-binding peptide
  MOD_RES (1), (3), (34), (35): Xaa is C or S
XKXSKVIMYHYKLIKPTKGIKYLISIPSLDQSVXX

SEQ ID NO: 4234 - protein, 42 aa, Artificial Sequence
  GFR-binding peptide
  MOD_RES (2), (4), (37), (38): Xaa is C or S
  MOD_RES (15), (16), (17), (18), (19): Xaa is A or G
  MOD_RES (20), (21), (22), (23): Xaa is A or G or is absent
SXKXSRVIMRYKKLXXXXXXXXXFYLISIANLAQPVXXPAAS

SEQ ID NO: 4235 - protein, 36 aa, Artificial Sequence
  GFR-binding peptide
  MOD_RES (2), (4), (36): Xaa is C or S
RXGXGEVVMDRHKRLVVKENEDYYLMSTASLETPVX

SEQ ID NO: 4236 - protein, 38 aa, Artificial Sequence
  GFR-binding peptide
  MOD_RES (1), (33), (34): Xaa is C or S
XAKVVMNRYKKLIVNNSSDFYLVSIANLKTPAXXAKPV

SEQ ID NO: 4237 - protein, 39 aa, Artificial Sequence
  GFR-binding peptide
  MOD_RES (1), (3), (37): Xaa is C or S
  MOD_RES (15), (16), (17), (18), (19): Xaa is A or G
  MOD_RES (20), (21), (22), (23): Xaa is A or G or is absent
XGXSRVVMNRHKRLXXXXXXXXXYYLVSTASLKTPAXTP

SEQ ID NO: 4238 - protein, 43 aa, Artificial Sequence
  GFR-binding peptide
  MOD_RES (1), (3), (37): Xaa is C or S
  MOD_RES (15), (16), (17), (18), (19): Xaa is A or G
  MOD_RES (20), (21), (22), (23): Xaa is A or G or is absent
XGXSRVVMNQYNKLXXXXXXXXXLYLVSIASLKTPAXTPKTVH

SEQ ID NO: 4239 - protein, 33 aa, Artificial Sequence
  GFR-binding peptide
  MOD_RES (11), (12), (13), (14), (15): Xaa is A or G
  MOD_RES (16), (17), (18), (19): Xaa is A or G or is absent
HDELTRYKKLXXXXXXXXXFYLVSIANLQVQTP

SEQ ID NO: 4240 - protein, 37 aa, Artificial Sequence
  GFR-binding peptide
  MOD_RES (1), (3), (35), (36): Xaa is C or S
XGXGEVVMDRHKRLVVKENEDYYLMSTASLETPVXXA

SEQ ID NO: 4241 - protein, 37 aa, Artificial Sequence
  GFR-binding peptide
  MOD_RES (2), (2): Xaa is C or S
  MOD_RES (15), (16), (17), (18), (19): Xaa is A or G
  MOD_RES (20), (21), (22), (23): Xaa is A or G or is absent
KXALHDELTRHKRLXXXXXXXXXYYLVSTASLQVQTP

SEQ ID NO: 4242 - protein, 36 aa, Artificial Sequence
  GFR-binding peptide
  MOD_RES (36), (36): Xaa is C or S
  MOD_RES (12), (13), (14), (15), (16): Xaa is A or G
  MOD_RES (17), (18), (19), (20): Xaa is A or G or is absent
LHDELTRHKRLXXXXXXXXXYYLVSTASLQVQTPRX

SEQ ID NO: 4243 - protein, 44 aa, Artificial Sequence
  GFR-binding peptide
  MOD_RES (2), (4), (38), (39): Xaa is C or S
  MOD_RES (16), (17), (18), (19), (20): Xaa is A or G
  MOD_RES (21), (22), (23), (24): Xaa is A or G or is absent
HXGXARVVMNQYNKLXXXXXXXXXLYLVSIASLQTPAXXPKPVT

SEQ ID NO: 4244 - protein, 41 aa, Artificial Sequence
  GFR-binding peptide
  MOD_RES (1), (3), (38), (39): Xaa is C or S
  MOD_RES (16), (17), (18), (19), (20): Xaa is A or G
  MOD_RES (21), (22), (23), (24): Xaa is A or G or is absent
XGXEAVSMGERHKRLXXXXXXXXXYYLVSTASLKTPVXXAK

SEQ ID NO: 4245 - protein, 38 aa, Artificial Sequence
  GFR-binding peptide
  MOD_RES (2), (35), (36): Xaa is C or S
GXEAVSMGERHKRLTPVGMDDYYLVSTASLKTPVXXAK

SEQ ID NO: 4246 - protein, 37 aa, Artificial Sequence
  GFR-binding peptide
  MOD_RES (2), (35), (36): Xaa is C or S
  MOD_RES (13), (14), (15), (16), (17): Xaa is A or G
  MOD_RES (18), (19), (20), (21): Xaa is A or G or is absent
KXSRVIMYHYKLXXXXXXXXXKYLISIPSLAQPVXXP

SEQ ID NO: 4247 - protein, 39 aa, Artificial Sequence
  GFR-binding peptide
  MOD_RES (2), (36), (37): Xaa is C or S
  MOD_RES (14), (15), (16), (17), (18): Xaa is A or G
  MOD_RES (19), (20), (21), (22): Xaa is A or G or is absent
GXGEVVMDRHKRLXXXXXXXXXYYLMSTASLETPVXXAK

SEQ ID NO: 4248 - protein, 31 aa, Artificial Sequence
  GFR-binding peptide
  MOD_RES (31), (31): Xaa is C or S
SKVIMRHKRLIKPTKGIYYLISTASLDQSVX

SEQ ID NO: 4249 - protein, 38 aa, Artificial Sequence
  GFR-binding peptide
  MOD_RES (1), (33): Xaa is C or S
XSRVVMNYHYKLIVNSSDDKYLVSIPSLKTPAXTPKTV

SEQ ID NO: 4250 - protein, 37 aa, Artificial Sequence
  GFR-binding peptide
  MOD_RES (2), (36): Xaa is C or S
  MOD_RES (14), (15), (16), (17), (18): Xaa is A or G
  MOD_RES (19), (20), (21), (22): Xaa is A or G or is absent
GXSRVVMNRYKKLXXXXXXXXXFYLVSIANLKTPAXT

SEQ ID NO: 4251 - protein, 35 aa, Artificial Sequence
  GFR-binding peptide
  MOD_RES (2), (4), (35): Xaa is C or S
SXKXSKVVMRYKKLVKPTRGVFYLISIANLDQPVX

SEQ ID NO: 4252 - protein, 35 aa, Artificial Sequence
  GFR-binding peptide
  MOD_RES (1), (3), (35): Xaa is C or S
XGXGEVVMEYHYKLVVKDYEDKYLMSIPSLETPVX

SEQ ID NO: 4253 - protein, 35 aa, Artificial Sequence
  GFR-binding peptide
  MOD_RES (2), (35): Xaa is C or S
GXEAVSMGEQYNKLTPVGMDDLYLVSIASLKTPVX

SEQ ID NO: 4254 - protein, 37 aa, Artificial Sequence
  GFR-binding peptide
  MOD_RES (31), (32): Xaa is C or S
EVVMDRHKRLVVKENEDYYLMSTASLETPVXXAKPIK

SEQ ID NO: 4255 - protein, 41 aa, Artificial Sequence
  GFR-binding peptide
  MOD_RES (1), (38): Xaa is C or S
XALHDELTYHYKLFIPKKRVIEKYLVSIPSLQVQTPRXQVN

SEQ ID NO: 4256 - protein, 41 aa, Artificial Sequence
  GFR-binding peptide
  MOD_RES (2), (4), (36), (37): Xaa is C or S
RXGXGEVVMERYKKLVVKDYEDFYLMSIANLETPVXXAKPI

SEQ ID NO: 4257 - protein, 41 aa, Artificial Sequence
  GFR-binding peptide
  MOD_RES (1), (3), (35): Xaa is C or S
XGXSRVVMNRYKKLIVNSSDDFYLVSIANLKTPAXTPKTVH

SEQ ID NO: 4258 - protein, 39 aa, Artificial Sequence
  GFR-binding peptide
  MOD_RES (34), (35): Xaa is C or S
  MOD_RES (12), (13), (14), (15), (16): Xaa is A or G
  MOD_RES (17), (18), (19), (20): Xaa is A or G or is absent
SRVVMNYHYKLXXXXXXXXXKYLVSIPSLKTPAXXPKPV

SEQ ID NO: 4259 - protein, 37 aa, Artificial Sequence
  GFR-binding peptide
  MOD_RES (2), (4), (35), (36): Xaa is C or S
SXKXSKVVMRHKRLVKPTRGVYYLISTASLDQPVXXP

SEQ ID NO: 4260 - protein, 44 aa, Artificial Sequence
  GFR-binding peptide
  MOD_RES (2), (4), (41): Xaa is C or S
EXKXALHDELTRHKRLFIPKKRVIEYYLVSTASLQVQTPRXQVN

SEQ ID NO: 4261 - protein, 41 aa, Artificial Sequence
  GFR-binding peptide
  MOD_RES (1), (38): Xaa is C or S
  MOD_RES (14), (15), (16), (17), (18): Xaa is A or G
  MOD_RES (19), (20), (21), (22): Xaa is A or G or is absent
XALHDELTYHYKLXXXXXXXXXKYLVSIPSLQVQTPRXQVN

SEQ ID NO: 4262 - protein, 39 aa, Artificial Sequence
  GFR-binding peptide
  MOD_RES (33), (33): Xaa is C or S
  MOD_RES (11), (12), (13), (14), (15): Xaa is A or G
  MOD_RES (16), (17), (18), (19): Xaa is A or G or is absent
RVVMNYHYKLXXXXXXXXXKYLVSIPSLKTPAXTPKTVH

SEQ ID NO: 4263 - protein, 37 aa, Artificial Sequence
  GFR-binding peptide
  MOD_RES (34), (34): Xaa is C or S
  MOD_RES (12), (13), (14), (15), (16): Xaa is A or G
  MOD_RES (17), (18), (19), (20): Xaa is A or G or is absent
SRVVMNQYNKLXXXXXXXXXLYLVSIASLKTPAXTPK

SEQ ID NO: 4264 - protein, 34 aa, Artificial Sequence
  GFR-binding peptide
  MOD_RES (1), (3), (34): Xaa is C or S
XKXSKVIMYHYKLIKPTKGIKYLISIPSLDQSVX

SEQ ID NO: 4265 - protein, 36 aa, Artificial Sequence
  GFR-binding peptide
  MOD_RES (2), (33), (34): Xaa is C or S
KXSRVIMQYNKLVKPKRGVLYLISIASLAQPVXXPA

SEQ ID NO: 4266 - protein, 36 aa, Artificial Sequence
  GFR-binding peptide
  MOD_RES (2), (35), (36): Xaa is C or S
GXEAVSMGEQYNKLTPVGMDDLYLVSIASLKTPVXX

SEQ ID NO: 4267 - protein, 38 aa, Artificial Sequence
  GFR-binding peptide
  MOD_RES (35), (35): Xaa is C or S
  MOD_RES (11), (12), (13), (14), (15): Xaa is A or G
  MOD_RES (16), (17), (18), (19): Xaa is A or G or is absent
HDELTYHYKLXXXXXXXXXKYLVSIPSLQVQTPRXQVN

SEQ ID NO: 4268 - protein, 39 aa, Artificial Sequence
  GFR-binding peptide
  MOD_RES (35), (35): Xaa is C or S
  MOD_RES (11), (12), (13), (14), (15): Xaa is A or G
  MOD_RES (16), (17), (18), (19): Xaa is A or G or is absent
HDELTYHYKLXXXXXXXXXKYLVSIPSLQVQTPRXQVNR

SEQ ID NO: 4269 - protein, 35 aa, Artificial Sequence
  GFR-binding peptide
ALHDELTRYKKLFIPKKRVIEFYLVSIANLQVQTP

SEQ ID NO: 4270 - protein, 42 aa, Artificial Sequence
  GFR-binding peptide
  MOD_RES (1), (38): Xaa is C or S
XALHDELTRYKKLFIPKKRVIEFYLVSIANLQVQTPRXQVNR

SEQ ID NO: 4271 - protein, 42 aa, Artificial Sequence
  GFR-binding peptide
  MOD_RES (1), (3), (37), (38): Xaa is C or S
  MOD_RES (15), (16), (17), (18), (19): Xaa is A or G
  MOD_RES (20), (21), (22), (23): Xaa is A or G or is absent
XGXARVVMNQYNKLXXXXXXXXXLYLVSIASLQTPAXXPKPV

SEQ ID NO: 4272 - protein, 34 aa, Artificial Sequence
  GFR-binding peptide
  MOD_RES (1), (32), (33): Xaa is C or S
XSKVVMQYNKLVKPTRGVLYLISIASLDQPVXXP

SEQ ID NO: 4273 - protein, 40 aa, Artificial Sequence
  GFR-binding peptide
  MOD_RES (36), (36): Xaa is C or S
  MOD_RES (12), (13), (14), (15), (16): Xaa is A or G
  MOD_RES (17), (18), (19), (20): Xaa is A or G or is absent
LHDELTRHKRLXXXXXXXXXYYLVSTASLQVQTPRXQVNR

SEQ ID NO: 4274 - protein, 42 aa, Artificial Sequence
  GFR-binding peptide
  MOD_RES (2), (4), (37), (38): Xaa is C or S
RXGXEAVSMGERYKKLTPVGMDDFYLVSIANLKTPVXXAKGV

SEQ ID NO: 4275 - protein, 39 aa, Artificial Sequence
  GFR-binding peptide
  MOD_RES (2), (36), (37): Xaa is C or S
  MOD_RES (14), (15), (16), (17), (18): Xaa is A or G
  MOD_RES (19), (20), (21), (22): Xaa is A or G or is absent
GXARVVMNQYNKLXXXXXXXXXLYLVSIASLQTPAXXPK

SEQ ID NO: 4276 - protein, 36 aa, Artificial Sequence
  GFR-binding peptide
  MOD_RES (1), (35): Xaa is C or S
  MOD_RES (13), (14), (15), (16), (17): Xaa is A or G
  MOD_RES (18), (19), (20), (21): Xaa is A or G or is absent
XSRVVMNYHYKLXXXXXXXXXKYLVSIPSLKTPAXT

SEQ ID NO: 4277 - protein, 34 aa, Artificial Sequence
  GFR-binding peptide
  MOD_RES (1), (1): Xaa is C or S
  MOD_RES (13), (14), (15), (16), (17): Xaa is A or G
  MOD_RES (18), (19), (20), (21): Xaa is A or G or is absent
XGEVVMERYKKLXXXXXXXXXFYLMSIANLETPV

SEQ ID NO: 4278 - protein, 39 aa, Artificial Sequence
  GFR-binding peptide
  MOD_RES (1), (33): Xaa is C or S
XSRVVMNQYNKLIVNSSDDLYLVSIASLKTPAXTPKTVH

SEQ ID NO: 4279 - protein, 37 aa, Artificial Sequence
  GFR-binding peptide
  MOD_RES (2), (4), (36): Xaa is C or S
HXGXSRVVMNRHKRLIVNSSDDYYLVSTASLKTPAXT

SEQ ID NO: 4280 - protein, 40 aa, Artificial Sequence
  GFR-binding peptide
  MOD_RES (34), (34): Xaa is C or S
  MOD_RES (12), (13), (14), (15), (16): Xaa is A or G
  MOD_RES (17), (18), (19), (20): Xaa is A or G or is absent
SRVVMNQYNKLXXXXXXXXXLYLVSIASLKTPAXTPKTVH

SEQ ID NO: 4281 - protein, 33 aa, Artificial Sequence
  GFR-binding peptide
  MOD_RES (31), (31): Xaa is C or S
RVVMNYHYKLIVNSSDDKYLVSIPSLKTPAXTP

SEQ ID NO: 4282 - protein, 44 aa, Artificial Sequence
  GFR-binding peptide
  MOD_RES (2), (4), (38), (39): Xaa is C or S
  MOD_RES (16), (17), (18), (19), (20): Xaa is A or G
  MOD_RES (21), (22), (23), (24): Xaa is A or G or is absent
HXGXSRVVMNYHYKLXXXXXXXXXKYLVSIPSLKTPAXXPKPVY

SEQ ID NO: 4283 - protein, 39 aa, Artificial Sequence
  GFR-binding peptide
  MOD_RES (2), (33), (34): Xaa is C or S
KXSRVIMQYNKLVKPKRGVLYLISIASLAQPVXXPAASA

SEQ ID NO: 4284 - protein, 35 aa, Artificial Sequence
  GFR-binding peptide
  MOD_RES (1), (3), (34), (35): Xaa is C or S
XKXSRVIMRHKRLVKPKRGVYYLISTASLAQPVXX

SEQ ID NO: 4285 - protein, 44 aa, Artificial Sequence
  GFR-binding peptide
  MOD_RES (2), (4), (38), (39): Xaa is C or S
  MOD_RES (16), (17), (18), (19), (20): Xaa is A or G
  MOD_RES (21), (22), (23), (24): Xaa is A or G or is absent
HXGXSRVVMNRHKRLXXXXXXXXXYYLVSTASLKTPAXXPKPVY

SEQ ID NO: 4286 - protein, 37 aa, Artificial Sequence
  GFR-binding peptide
  MOD_RES (1), (3), (37): Xaa is C or S
  MOD_RES (15), (16), (17), (18), (19): Xaa is A or G
  MOD_RES (20), (21), (22), (23): Xaa is A or G or is absent
XGXARVVMNQYNKLXXXXXXXXXLYLVSIASLQTPAX

SEQ ID NO: 4287 - protein, 38 aa, Artificial Sequence
  GFR-binding peptide
  MOD_RES (36), (36): Xaa is C or S
  MOD_RES (12), (13), (14), (15), (16): Xaa is A or G
  MOD_RES (17), (18), (19), (20): Xaa is A or G or is absent
LHDELTRYKKLXXXXXXXXXFYLVSIANLQVQTPRXQV

SEQ ID NO: 4288 - protein, 43 aa, Artificial Sequence
  GFR-binding peptide
  MOD_RES (1), (3), (37), (38): Xaa is C or S
  MOD_RES (15), (16), (17), (18), (19): Xaa is A or G
  MOD_RES (20), (21), (22), (23): Xaa is A or G or is absent
XGXGEVVMEYHYKLXXXXXXXXXKYLMSIPSLETPVXXAKPIS

SEQ ID NO: 4289 - protein, 40 aa, Artificial Sequence
  GFR-binding peptide
  MOD_RES (2), (39): Xaa is C or S
  MOD_RES (15), (16), (17), (18), (19): Xaa is A or G
  MOD_RES (20), (21), (22), (23): Xaa is A or G or is absent
KXALHDELTYHYKLXXXXXXXXXKYLVSIPSLQVQTPRXQ

SEQ ID NO: 4290 - protein, 40 aa, Artificial Sequence
  GFR-binding peptide
  MOD_RES (2), (35), (36): Xaa is C or S
  MOD_RES (13), (14), (15), (16), (17): Xaa is A or G
  MOD_RES (18), (19), (20), (21): Xaa is A or G or is absent
KXSKVVMYHYKLXXXXXXXXXKYLISIPSLDQPVXXPSAS

SEQ ID NO: 4291 - protein, 40 aa, Artificial Sequence
  GFR-binding peptide
  MOD_RES (2), (4), (36), (37): Xaa is C or S
HXGXAKVVMNQYNKLIVNNSSDLYLVSIASLKTPAXXAKP

SEQ ID NO: 4292 - protein, 37 aa, Artificial Sequence
  GFR-binding peptide
  MOD_RES (34), (35): Xaa is C or S
  MOD_RES (12), (13), (14), (15), (16): Xaa is A or G
  MOD_RES (17), (18), (19), (20): Xaa is A or G or is absent
ARVVMNYHYKLXXXXXXXXXKYLVSIPSLQTPAXXPK

SEQ ID NO: 4293 - protein, 41 aa, Artificial Sequence
  GFR-binding peptide
  MOD_RES (2), (37), (38): Xaa is C or S
  MOD_RES (15), (16), (17), (18), (19): Xaa is A or G
  MOD_RES (20), (21), (22), (23): Xaa is A or G or is absent
GXEAVSMGEYHYKLXXXXXXXXXKYLVSIPSLKTPVXXAKG

SEQ ID NO: 4294 - protein, 38 aa, Artificial Sequence
  GFR-binding peptide
  MOD_RES (33), (34): Xaa is C or S
  MOD_RES (11), (12), (13), (14), (15): Xaa is A or G
  MOD_RES (16), (17), (18), (19): Xaa is A or G or is absent
EVVMERYKKLXXXXXXXXXFYLMSIANLETPVXXAKPI

SEQ ID NO: 4295 - protein, 33 aa, Artificial Sequence
  GFR-binding peptide
  MOD_RES (2), (33): Xaa is C or S
KXSKVVMRYKKLVKPTRGVFYLISIANLDQPVX

SEQ ID NO: 4296 - protein, 36 aa, Artificial Sequence
  GFR-binding peptide
  MOD_RES (31), (32): Xaa is C or S
KVVMNRHKRLIVNNSSDYYLVSTASLKTPAXXAKPV

SEQ ID NO: 4297 - protein, 39 aa, Artificial Sequence
  GFR-binding peptide
  MOD_RES (2), (4), (38), (39): Xaa is C or S
  MOD_RES (16), (17), (18), (19), (20): Xaa is A or G
  MOD_RES (21), (22), (23), (24): Xaa is A or G or is absent
RXGXGEVVMERYKKLXXXXXXXXXFYLMSIANLETPVXX

SEQ ID NO: 4298 - protein, 33 aa, Artificial Sequence
  GFR-binding peptide
  MOD_RES (2), (33): Xaa is C or S
KXSKVIMRYKKLIKPTKGIFYLISIANLDQSVX

SEQ ID NO: 4299 - protein, 37 aa, Artificial Sequence
  GFR-binding peptide
  MOD_RES (2), (36), (37): Xaa is C or S
  MOD_RES (14), (15), (16), (17), (18): Xaa is A or G
  MOD_RES (19), (20), (21), (22): Xaa is A or G or is absent
GXGEVVMERYKKLXXXXXXXXXFYLMSIANLETPVXX

SEQ ID NO: 4300 - protein, 36 aa, Artificial Sequence
  GFR-binding peptide
  MOD_RES (2), (33), (34): Xaa is C or S
KXSKVVMRHKRLVKPTRGVYYLISTASLDQPVXXPS

SEQ ID NO: 4301 - protein, 40 aa, Artificial Sequence
  GFR-binding peptide
  MOD_RES (2), (34): Xaa is C or S
GXSRVVMNYHYKLIVNSSDDKYLVSIPSLKTPAXTPKTVH

SEQ ID NO: 4302 - protein, 36 aa, Artificial Sequence
  GFR-binding peptide
  MOD_RES (34), (35): Xaa is C or S
  MOD_RES (12), (13), (14), (15), (16): Xaa is A or G
  MOD_RES (17), (18), (19), (20): Xaa is A or G or is absent
GEVVMDYHYKLXXXXXXXXXKYLMSIPSLETPVXXA

SEQ ID NO: 4303 - protein, 37 aa, Artificial Sequence
  GFR-binding peptide
  MOD_RES (2), (34), (35): Xaa is C or S
GXGEVVMDQYNKLVVKENEDLYLMSIASLETPVXXAK

SEQ ID NO: 4304 - protein, 38 aa, Artificial Sequence
  GFR-binding peptide
  MOD_RES (1), (35), (36): Xaa is C or S
  MOD_RES (13), (14), (15), (16), (17): Xaa is A or G
  MOD_RES (18), (19), (20), (21): Xaa is A or G or is absent
XSRVVMNQYNKLXXXXXXXXXLYLVSIASLKTPAXXPK

SEQ ID NO: 4305 - protein, 40 aa, Artificial Sequence
  GFR-binding peptide
  MOD_RES (2), (4), (36), (37): Xaa is C or S
RXGXGEVVMERYKKLVVKDYEDFYLMSIANLETPVXXAKP

SEQ ID NO: 4306 - protein, 36 aa, Artificial Sequence
  GFR-binding peptide
  MOD_RES (2), (4), (35), (36): Xaa is C or S
SXKXSKVVMQYNKLVKPTRGVLYLISIASLDQPVXX

SEQ ID NO: 4307 - protein, 40 aa, Artificial Sequence
  GFR-binding peptide
  MOD_RES (2), (35), (36): Xaa is C or S
GXEAVSMGERHKRLTPVGMDDYYLVSTASLKTPVXXAKGV

SEQ ID NO: 4308 - protein, 32 aa, Artificial Sequence
  GFR-binding peptide
  MOD_RES (31), (32): Xaa is C or S
EVVMERYKKLVVKDYEDFYLMSIANLETPVXX

SEQ ID NO: 4309 - protein, 36 aa, Artificial Sequence
  GFR-binding peptide
  MOD_RES (35), (35): Xaa is C or S
  MOD_RES (11), (12), (13), (14), (15): Xaa is A or G
  MOD_RES (16), (17), (18), (19): Xaa is A or G or is absent
HDELTRYKKLXXXXXXXXXFYLVSIANLQVQTPRXQ

SEQ ID NO: 4310 - protein, 33 aa, Artificial Sequence
  GFR-binding peptide
  MOD_RES (33), (33): Xaa is C or S
  MOD_RES (11), (12), (13), (14), (15): Xaa is A or G
  MOD_RES (16), (17), (18), (19): Xaa is A or G or is absent
SKVIMQYNKLXXXXXXXXXLYLISIASLDQSVX

SEQ ID NO: 4311 - protein, 41 aa, Artificial Sequence
  GFR-binding peptide
  MOD_RES (1), (35), (36): Xaa is C or S
  MOD_RES (13), (14), (15), (16), (17): Xaa is A or G
  MOD_RES (18), (19), (20), (21): Xaa is A or G or is absent
XARVVMNYHYKLXXXXXXXXXKYLVSIPSLQTPAXXPKPVT

SEQ ID NO: 4312 - protein, 36 aa, Artificial Sequence
  GFR-binding peptide
  MOD_RES (1), (34), (35): Xaa is C or S
XEAVSMGERHKRLTPVGMDDYYLVSTASLKTPVXXA

SEQ ID NO: 4313 - protein, 32 aa, Artificial Sequence
  GFR-binding peptide
  MOD_RES (1), (1): Xaa is C or S
XGEVVMERYKKLVVKDYEDFYLMSIANLETPV

SEQ ID NO: 4314 - protein, 41 aa, Artificial Sequence
  GFR-binding peptide
  MOD_RES (1), (3), (35), (36): Xaa is C or S
XGXGEVVMDQYNKLVVKENEDLYLMSIASLETPVXXAKPIK

SEQ ID NO: 4315 - protein, 39 aa, Artificial Sequence
  GFR-binding peptide
  MOD_RES (2), (33), (34): Xaa is C or S
KXSKVVMRHKRLVKPTRGVYYLISTASLDQPVXXPSASA

SEQ ID NO: 4316 - protein, 38 aa, Artificial Sequence
  GFR-binding peptide
  MOD_RES (1), (3), (35), (36): Xaa is C or S
XGXGEVVMDYHYKLVVKENEDKYLMSIPSLETPVXXAK

SEQ ID NO: 4317 - protein, 39 aa, Artificial Sequence
  GFR-binding peptide
  MOD_RES (35), (36): Xaa is C or S
  MOD_RES (13), (14), (15), (16), (17): Xaa is A or G
  MOD_RES (18), (19), (20), (21): Xaa is A or G or is absent
EAVSMGEYHYKLXXXXXXXXXKYLVSIPSLKTPVXXAKG

SEQ ID NO: 4318 - protein, 41 aa, Artificial Sequence
  GFR-binding peptide
  MOD_RES (1), (35): Xaa is C or S
  MOD_RES (13), (14), (15), (16), (17): Xaa is A or G
  MOD_RES (18), (19), (20), (21): Xaa is A or G or is absent
XSRVVMNYHYKLXXXXXXXXXKYLVSIPSLKTPAXTPKTVH

SEQ ID NO: 4319 - protein, 36 aa, Artificial Sequence
  GFR-binding peptide
  MOD_RES (1), (3), (35), (36): Xaa is C or S
XGXSRVVMNRHKRLIVNSSDDYYLVSTASLKTPAXX

SEQ ID NO: 4320 - protein, 36 aa, Artificial Sequence
  GFR-binding peptide
  MOD_RES (2), (36): Xaa is C or S
  MOD_RES (14), (15), (16), (17), (18): Xaa is A or G
  MOD_RES (19), (20), (21), (22): Xaa is A or G or is absent
GXAKVVMNRYKKLXXXXXXXXXFYLVSIANLKTPAX

SEQ ID NO: 4321 - protein, 38 aa, Artificial Sequence
  GFR-binding peptide
  MOD_RES (1), (35): Xaa is C or S
  MOD_RES (13), (14), (15), (16), (17): Xaa is A or G
  MOD_RES (18), (19), (20), (21): Xaa is A or G or is absent
XSRVVMNYHYKLXXXXXXXXXKYLVSIPSLKTPAXTPK

SEQ ID NO: 4322 - protein, 38 aa, Artificial Sequence
  GFR-binding peptide
  MOD_RES (33), (34): Xaa is C or S
  MOD_RES (11), (12), (13), (14), (15): Xaa is A or G
  MOD_RES (16), (17), (18), (19): Xaa is A or G or is absent
RVVMNQYNKLXXXXXXXXXLYLVSIASLKTPAXXPKPV

SEQ ID NO: 4323 - protein, 34 aa, Artificial Sequence
  GFR-binding peptide
  MOD_RES (2), (34): Xaa is C or S
GXARVVMNRHKRLIVNSSDDYYLVSTASLQTPAX

SEQ ID NO: 4324 - protein, 38 aa, Artificial Sequence
  GFR-binding peptide
  MOD_RES (2), (34), (35): Xaa is C or S
GXAKVVMNRYKKLIVNNSSDFYLVSIANLKTPAXXAKP

SEQ ID NO: 4325 - protein, 37 aa, Artificial Sequence
  GFR-binding peptide
  MOD_RES (31), (32): Xaa is C or S
KVVMNYHYKLIVNNSSDKYLVSIPSLKTPAXXAKPVA

SEQ ID NO: 4326 - protein, 33 aa, Artificial Sequence
  GFR-binding peptide
  MOD_RES (31), (32): Xaa is C or S
SRVIMYHYKLVKPKRGVKYLISIPSLAQPVXXP

SEQ ID NO: 4327 - protein, 35 aa, Artificial Sequence
  GFR-binding peptide
  MOD_RES (31), (32): Xaa is C or S
SRVIMRHKRLVKPKRGVYYLISTASLAQPVXXPAA

SEQ ID NO: 4328 - protein, 38 aa, Artificial Sequence
  GFR-binding peptide
  MOD_RES (1), (3), (36), (37): Xaa is C or S
  MOD_RES (14), (15), (16), (17), (18): Xaa is A or G
  MOD_RES (19), (20), (21), (22): Xaa is A or G or is absent
XKXSKVVMYHYKLXXXXXXXXXKYLISIPSLDQPVXXP

SEQ ID NO: 4329 - protein, 38 aa, Artificial Sequence
  GFR-binding peptide
  MOD_RES (1), (33), (34): Xaa is C or S
XARVVMNRYKKLIVNSSDDFYLVSIANLQTPAXXPKPV

SEQ ID NO: 4330 - protein, 37 aa, Artificial Sequence
  GFR-binding peptide
  MOD_RES (2), (4), (35), (36): Xaa is C or S
SXKXSKVIMYHYKLIKPTKGIKYLISIPSLDQSVXXP

SEQ ID NO: 4331 - protein, 35 aa, Artificial Sequence
  GFR-binding peptide
  MOD_RES (34), (35): Xaa is C or S
  MOD_RES (12), (13), (14), (15), (16): Xaa is A or G
  MOD_RES (17), (18), (19), (20): Xaa is A or G or is absent
ARVVMNRYKKLXXXXXXXXXFYLVSIANLQTPAXX

SEQ ID NO: 4332 - protein, 36 aa, Artificial Sequence
  GFR-binding peptide
  MOD_RES (2), (36): Xaa is C or S
  MOD_RES (14), (15), (16), (17), (18): Xaa is A or G
  MOD_RES (19), (20), (21), (22): Xaa is A or G or is absent
GXSRVVMNQYNKLXXXXXXXXXLYLVSIASLKTPAX

SEQ ID NO: 4333 - protein, 35 aa, Artificial Sequence
  GFR-binding peptide
  MOD_RES (12), (13), (14), (15), (16): Xaa is A or G
  MOD_RES (17), (18), (19), (20): Xaa is A or G or is absent
LHDELTYHYKLXXXXXXXXXKYLVSIPSLQVQTPR

SEQ ID NO: 4334 - protein, 39 aa, Artificial Sequence
  GFR-binding peptide
  MOD_RES (1), (38): Xaa is C or S
  MOD_RES (14), (15), (16), (17), (18): Xaa is A or G
  MOD_RES (19), (20), (21), (22): Xaa is A or G or is absent
XALHDELTYHYKLXXXXXXXXXKYLVSIPSLQVQTPRXQ

SEQ ID NO: 4335 - protein, 33 aa, Artificial Sequence
  GFR-binding peptide
  MOD_RES (1), (1): Xaa is C or S
  MOD_RES (12), (13), (14), (15), (16): Xaa is A or G
  MOD_RES (17), (18), (19), (20): Xaa is A or G or is absent
XSKVVMRYKKLXXXXXXXXXFYLISIANLDQPV

SEQ ID NO: 4336 - protein, 39 aa, Artificial Sequence
  GFR-binding peptide
  MOD_RES (2), (39): Xaa is C or S
KXALHDELTRHKRLFIPKKRVIEYYLVSTASLQVQTPRX

SEQ ID NO: 4337 - protein, 35 aa, Artificial Sequence
  GFR-binding peptide
  MOD_RES (2), (2): Xaa is C or S
  MOD_RES (14), (15), (16), (17), (18): Xaa is A or G
  MOD_RES (19), (20), (21), (22): Xaa is A or G or is absent
GXGEVVMEQYNKLXXXXXXXXXLYLMSIASLETPV

SEQ ID NO: 4338 - protein, 34 aa, Artificial Sequence
  GFR-binding peptide
  MOD_RES (1), (34): Xaa is C or S
  MOD_RES (12), (13), (14), (15), (16): Xaa is A or G
  MOD_RES (17), (18), (19), (20): Xaa is A or G or is absent
XSKVIMRYKKLXXXXXXXXXFYLISIANLDQSVX

SEQ ID NO: 4339 - protein, 36 aa, Artificial Sequence
  GFR-binding peptide
  MOD_RES (32), (33): Xaa is C or S
GEVVMEYHYKLVVKDYEDKYLMSIPSLETPVXXAKP

SEQ ID NO: 4340 - protein, 39 aa, Artificial Sequence
  GFR-binding peptide
  MOD_RES (2), (33), (34): Xaa is C or S
KXSKVIMRHKRLIKPTKGIYYLISTASLDQSVXXPSASA

SEQ ID NO: 4341 - protein, 37 aa, Artificial Sequence
  GFR-binding peptide
  MOD_RES (37), (37): Xaa is C or S
ALHDELTRHKRLFIPKKRVIEYYLVSTASLQVQTPRX

SEQ ID NO: 4342 - protein, 36 aa, Artificial Sequence
  GFR-binding peptide
  MOD_RES (2), (34), (35): Xaa is C or S
GXGEVVMEYHYKLVVKDYEDKYLMSIPSLETPVXXA

SEQ ID NO: 4343 - protein, 42 aa, Artificial Sequence
  GFR-binding peptide
  MOD_RES (2), (4), (41): Xaa is C or S
  MOD_RES (17), (18), (19), (20), (21): Xaa is A or G
  MOD_RES (22), (23), (24), (25): Xaa is A or G or is absent
EXKXALHDELTRYKKLXXXXXXXXXFYLVSIANLQVQTPRXQ

SEQ ID NO: 4344 - protein, 36 aa, Artificial Sequence
  GFR-binding peptide
  MOD_RES (1), (32), (33): Xaa is C or S
XSKVIMYHYKLIKPTKGIKYLISIPSLDQSVXXPSA

SEQ ID NO: 4345 - protein, 37 aa, Artificial Sequence
  GFR-binding peptide
  MOD_RES (1), (3), (37): Xaa is C or S
  MOD_RES (15), (16), (17), (18), (19): Xaa is A or G
  MOD_RES (20), (21), (22), (23): Xaa is A or G or is absent
XGXGEVVMERHKRLXXXXXXXXXYYLMSTASLETPVX

SEQ ID NO: 4346 - protein, 32 aa, Artificial Sequence
  GFR-binding peptide
  MOD_RES (11), (12), (13), (14), (15): Xaa is A or G
  MOD_RES (16), (17), (18), (19): Xaa is A or G or is absent
SKVVMQYNKLXXXXXXXXXLYLISIASLDQPV

SEQ ID NO: 4347 - protein, 40 aa, Artificial Sequence
  GFR-binding peptide
  MOD_RES (2), (4), (37), (38): Xaa is C or S
  MOD_RES (15), (16), (17), (18), (19): Xaa is A or G
  MOD_RES (20), (21), (22), (23): Xaa is A or G or is absent
SXKXSKVVMYHYKLXXXXXXXXXKYLISIPSLDQPVXXPS

SEQ ID NO: 4348 - protein, 35 aa, Artificial Sequence
  GFR-binding peptide
  MOD_RES (35), (35): Xaa is C or S
HDELTRYKKLFIPKKRVIEFYLVSIANLQVQTPRX

SEQ ID NO: 4349 - protein, 39 aa, Artificial Sequence
  GFR-binding peptide
  MOD_RES (1), (3), (37), (38): Xaa is C or S
  MOD_RES (15), (16), (17), (18), (19): Xaa is A or G
  MOD_RES (20), (21), (22), (23): Xaa is A or G or is absent
XGXARVVMNQYNKLXXXXXXXXXLYLVSIASLQTPAXXP

SEQ ID NO: 4350 - protein, 33 aa, Artificial Sequence
  GFR-binding peptide
  MOD_RES (33), (33): Xaa is C or S
  MOD_RES (11), (12), (13), (14), (15): Xaa is A or G
  MOD_RES (16), (17), (18), (19): Xaa is A or G or is absent
RVVMNRYKKLXXXXXXXXXFYLVSIANLQTPAX

SEQ ID NO: 4351 - protein, 34 aa, Artificial Sequence
  GFR-binding peptide
  MOD_RES (1), (32), (33): Xaa is C or S
XSKVVMRYKKLVKPTRGVFYLISIANLDQPVXXP

SEQ ID NO: 4352 - protein, 38 aa, Artificial Sequence
  GFR-binding peptide
  MOD_RES (37), (37): Xaa is C or S
ALHDELTQYNKLFIPKKRVIELYLVSIASLQVQTPRXQ

SEQ ID NO: 4353 - protein, 37 aa, Artificial Sequence
  GFR-binding peptide
  MOD_RES (2), (4), (36), (37): Xaa is C or S
HXGXAKVVMNYHYKLIVNNSSDKYLVSIPSLKTPAXX

SEQ ID NO: 4354 - protein, 33 aa, Artificial Sequence
  GFR-binding peptide
  MOD_RES (1), (1): Xaa is C or S
XEAVSMGEQYNKLTPVGMDDLYLVSIASLKTPV

SEQ ID NO: 4355 - protein, 36 aa, Artificial Sequence
  GFR-binding peptide
  MOD_RES (31), (32): Xaa is C or S
RVVMNRYKKLIVNSSDDFYLVSIANLKTPAXXPKPV

SEQ ID NO: 4356 - protein, 37 aa, Artificial Sequence
  GFR-binding peptide
  MOD_RES (2), (4), (36), (37): Xaa is C or S
RXGXGEVVMDRHKRLVVKENEDYYLMSTASLETPVXX

SEQ ID NO: 4357 - protein, 37 aa, Artificial Sequence
  GFR-binding peptide
  MOD_RES (2), (4): Xaa is C or S
  MOD_RES (16), (17), (18), (19), (20): Xaa is A or G
  MOD_RES (21), (22), (23), (24): Xaa is A or G or is absent
RXGXGEVVMDRYKKLXXXXXXXXXFYLMSIANLETPV

SEQ ID NO: 4358 - protein, 36 aa, Artificial Sequence
  GFR-binding peptide
  MOD_RES (2), (36): Xaa is C or S
  MOD_RES (14), (15), (16), (17), (18): Xaa is A or G
  MOD_RES (19), (20), (21), (22): Xaa is A or G or is absent
GXGEVVMDQYNKLXXXXXXXXXLYLMSIASLETPVX

SEQ ID NO: 4359 - protein, 42 aa, Artificial Sequence
  GFR-binding peptide
  MOD_RES (2), (4), (38), (39): Xaa is C or S
  MOD_RES (16), (17), (18), (19), (20): Xaa is A or G
  MOD_RES (21), (22), (23), (24): Xaa is A or G or is absent
RXGXGEVVMDRYKKLXXXXXXXXXFYLMSIANLETPVXXAKP

SEQ ID NO: 4360 - protein, 42 aa, Artificial Sequence
  GFR-binding peptide
  MOD_RES (2), (36), (37): Xaa is C or S
  MOD_RES (14), (15), (16), (17), (18): Xaa is A or G
  MOD_RES (19), (20), (21), (22): Xaa is A or G or is absent
GXGEVVMDRYKKLXXXXXXXXXFYLMSIANLETPVXXAKPIK

SEQ ID NO: 4361 - protein, 35 aa, Artificial Sequence
  GFR-binding peptide
  MOD_RES (31), (32): Xaa is C or S
SKVVMYHYKLVKPTRGVKYLISIPSLDQPVXXPSA

SEQ ID NO: 4362 - protein, 32 aa, Artificial Sequence
  GFR-binding peptide
  MOD_RES (32), (32): Xaa is C or S
ARVVMNYHYKLIVNSSDDKYLVSIPSLQTPAX

SEQ ID NO: 4363 - protein, 40 aa, Artificial Sequence
  GFR-binding peptide
  MOD_RES (1), (3), (35), (36): Xaa is C or S
XGXSRVVMNYHYKLIVNSSDDKYLVSIPSLKTPAXXPKPV

SEQ ID NO: 4364 - protein, 34 aa, Artificial Sequence
  GFR-binding peptide
  MOD_RES (1), (1): Xaa is C or S
  MOD_RES (13), (14), (15), (16), (17): Xaa is A or G
  MOD_RES (18), (19), (20), (21): Xaa is A or G or is absent
XSRVVMNRYKKLXXXXXXXXXFYLVSIANLKTPA

SEQ ID NO: 4365 - protein, 39 aa, Artificial Sequence
  GFR-binding peptide
  MOD_RES (1), (35), (36): Xaa is C or S
  MOD_RES (13), (14), (15), (16), (17): Xaa is A or G
  MOD_RES (18), (19), (20), (21): Xaa is A or G or is absent
XGEVVMDQYNKLXXXXXXXXXLYLMSIASLETPVXXAKP

SEQ ID NO: 4366 - protein, 38 aa, Artificial Sequence
  GFR-binding peptide
  MOD_RES (37), (37): Xaa is C or S
ALHDELTRHKRLFIPKKRVIEYYLVSTASLQVQTPRXQ

SEQ ID NO: 4367 - protein, 36 aa, Artificial Sequence
  GFR-binding peptide
  MOD_RES (13), (14), (15), (16), (17): Xaa is A or G
  MOD_RES (18), (19), (20), (21): Xaa is A or G or is absent
ALHDELTYHYKLXXXXXXXXXKYLVSIPSLQVQTPR

SEQ ID NO: 4368 - protein, 39 aa, Artificial Sequence
  GFR-binding peptide
  MOD_RES (2), (35), (36): Xaa is C or S
GXEAVSMGEQYNKLTPVGMDDLYLVSIASLKTPVXXAKG

SEQ ID NO: 4369 - protein, 35 aa, Artificial Sequence
  GFR-binding peptide
  MOD_RES (33), (34): Xaa is C or S
  MOD_RES (11), (12), (13), (14), (15): Xaa is A or G
  MOD_RES (16), (17), (18), (19): Xaa is A or G or is absent
RVVMNRYKKLXXXXXXXXXFYLVSIANLKTPAXXP

SEQ ID NO: 4370 - protein, 39 aa, Artificial Sequence
  GFR-binding peptide
  MOD_RES (2), (36): Xaa is C or S
  MOD_RES (14), (15), (16), (17), (18): Xaa is A or G
  MOD_RES (19), (20), (21), (22): Xaa is A or G or is absent
GXSRVVMNQYNKLXXXXXXXXXLYLVSIASLKTPAXTPK

SEQ ID NO: 4371 - protein, 39 aa, Artificial Sequence
  GFR-binding peptide
  MOD_RES (34), (35): Xaa is C or S
  MOD_RES (12), (13), (14), (15), (16): Xaa is A or G
  MOD_RES (17), (18), (19), (20): Xaa is A or G or is absent
GEVVMEQYNKLXXXXXXXXXLYLMSIASLETPVXXAKPI

SEQ ID NO: 4372 - protein, 35 aa, Artificial Sequence
  GFR-binding peptide
  MOD_RES (35), (35): Xaa is C or S
  MOD_RES (13), (14), (15), (16), (17): Xaa is A or G
  MOD_RES (18), (19), (20), (21): Xaa is A or G or is absent
EAVSMGERYKKLXXXXXXXXXFYLVSIANLKTPVX

SEQ ID NO: 4373 - protein, 36 aa, Artificial Sequence
  GFR-binding peptide
  MOD_RES (2), (34): Xaa is C or S
GXSRVVMNQYNKLIVNSSDDLYLVSIASLKTPAXTP

SEQ ID NO: 4374 - protein, 37 aa, Artificial Sequence
  GFR-binding peptide
  MOD_RES (37), (37): Xaa is C or S
ALHDELTQYNKLFIPKKRVIELYLVSIASLQVQTPRX

SEQ ID NO: 4375 - protein, 39 aa, Artificial Sequence
  GFR-binding peptide
  MOD_RES (1), (33), (34): Xaa is C or S
XAKVVMNQYNKLIVNNSSDLYLVSIASLKTPAXXAKPVA

SEQ ID NO: 4376 - protein, 40 aa, Artificial Sequence
  GFR-binding peptide
  MOD_RES (2), (34), (35): Xaa is C or S
GXARVVMNRYKKLIVNSSDDFYLVSIANLQTPAXXPKPVT

SEQ ID NO: 4377 - protein, 39 aa, Artificial Sequence
  GFR-binding peptide
  MOD_RES (1), (3), (36), (37): Xaa is C or S
XGXEAVSMGERHKRLTPVGMDDYYLVSTASLKTPVXXAK

SEQ ID NO: 4378 - protein, 41 aa, Artificial Sequence
  GFR-binding peptide
  MOD_RES (2), (4), (38): Xaa is C or S
  MOD_RES (16), (17), (18), (19), (20): Xaa is A or G
  MOD_RES (21), (22), (23), (24): Xaa is A or G or is absent
HXGXSRVVMNRYKKLXXXXXXXXXFYLVSIANLKTPAXTPK

SEQ ID NO: 4379 - protein, 39 aa, Artificial Sequence
  GFR-binding peptide
  MOD_RES (2), (4), (35), (36): Xaa is C or S
SXKXSKVIMRHKRLIKPTKGIYYLISTASLDQSVXXPSA

SEQ ID NO: 4380 - protein, 37 aa, Artificial Sequence
  GFR-binding peptide
  MOD_RES (2), (34), (35): Xaa is C or S
GXSRVVMNRYKKLIVNSSDDFYLVSIANLKTPAXXPK

SEQ ID NO: 4381 - protein, 35 aa, Artificial Sequence
  GFR-binding peptide
  MOD_RES (1), (3): Xaa is C or S
  MOD_RES (14), (15), (16), (17), (18): Xaa is A or G
  MOD_RES (19), (20), (21), (22): Xaa is A or G or is absent
XKXSKVVMQYNKLXXXXXXXXXLYLISIASLDQPV

SEQ ID NO: 4382 - protein, 37 aa, Artificial Sequence
  GFR-binding peptide
  MOD_RES (1), (3), (37): Xaa is C or S
  MOD_RES (15), (16), (17), (18), (19): Xaa is A or G
  MOD_RES (20), (21), (22), (23): Xaa is A or G or is absent
XGXGEVVMDRHKRLXXXXXXXXXYYLMSTASLETPVX

SEQ ID NO: 4383 - protein, 40 aa, Artificial Sequence
  GFR-binding peptide
  MOD_RES (2), (4), (37), (38): Xaa is C or S
  MOD_RES (15), (16), (17), (18), (19): Xaa is A or G
  MOD_RES (20), (21), (22), (23): Xaa is A or G or is absent
SXKXSKVIMRHKRLXXXXXXXXXYYLISTASLDQSVXXPS

SEQ ID NO: 4384 - protein, 40 aa, Artificial Sequence
  GFR-binding peptide
  MOD_RES (2), (4), (38), (39): Xaa is C or S
  MOD_RES (16), (17), (18), (19), (20): Xaa is A or G
  MOD_RES (21), (22), (23), (24): Xaa is A or G or is absent
HXGXAKVVMNQYNKLXXXXXXXXXLYLVSIASLKTPAXXA

SEQ ID NO: 4385 - protein, 36 aa, Artificial Sequence
  GFR-binding peptide
  MOD_RES (2), (36): Xaa is C or S
  MOD_RES (14), (15), (16), (17), (18): Xaa is A or G
  MOD_RES (19), (20), (21), (22): Xaa is A or G or is absent
GXAKVVMNRHKRLXXXXXXXXXYYLVSTASLKTPAX

SEQ ID NO: 4386 - protein, 36 aa, Artificial Sequence
  GFR-binding peptide
  MOD_RES (2), (4): Xaa is C or S
  MOD_RES (15), (16), (17), (18), (19): Xaa is A or G
  MOD_RES (20), (21), (22), (23): Xaa is A or G or is absent
SXKXSRVIMRYKKLXXXXXXXXXFYLISIANLAQPV

SEQ ID NO: 4387 - protein, 42 aa, Artificial Sequence
  GFR-binding peptide
  MOD_RES (2), (4), (38): Xaa is C or S
  MOD_RES (16), (17), (18), (19), (20): Xaa is A or G
  MOD_RES (21), (22), (23), (24): Xaa is A or G or is absent
HXGXSRVVMNQYNKLXXXXXXXXXLYLVSIASLKTPAXTPKT

SEQ ID NO: 4388 - protein, 42 aa, Artificial Sequence
  GFR-binding peptide
  MOD_RES (2), (4), (38), (39): Xaa is C or S
  MOD_RES (16), (17), (18), (19), (20): Xaa is A or G
  MOD_RES (21), (22), (23), (24): Xaa is A or G or is absent
RXGXGEVVMERYKKLXXXXXXXXXFYLMSIANLETPVXXAKP

SEQ ID NO: 4389 - protein, 33 aa, Artificial Sequence
  GFR-binding peptide
  MOD_RES (32), (33): Xaa is C or S
AKVVMNQYNKLIVNNSSDLYLVSIASLKTPAXX

SEQ ID NO: 4390 - protein, 33 aa, Artificial Sequence
  GFR-binding peptide
  MOD_RES (1), (3): Xaa is C or S
XKXSKVVMQYNKLVKPTRGVLYLISIASLDQPV

SEQ ID NO: 4391 - protein, 34 aa, Artificial Sequence
  GFR-binding peptide
LHDELTQYNKLFIPKKRVIELYLVSIASLQVQTP

SEQ ID NO: 4392 - protein, 37 aa, Artificial Sequence
  GFR-binding peptide
  MOD_RES (35), (35): Xaa is C or S
HDELTRYKKLFIPKKRVIEFYLVSIANLQVQTPRXQV

SEQ ID NO: 4393 - protein, 33 aa, Artificial Sequence
  GFR-binding peptide
  MOD_RES (32), (33): Xaa is C or S
SRVVMNYHYKLIVNSSDDKYLVSIPSLKTPAXX

SEQ ID NO: 4394 - protein, 38 aa, Artificial Sequence
  GFR-binding peptide
  MOD_RES (33), (34): Xaa is C or S
  MOD_RES (11), (12), (13), (14), (15): Xaa is A or G
  MOD_RES (16), (17), (18), (19): Xaa is A or G or is absent
SRVIMQYNKLXXXXXXXXXLYLISIASLAQPVXXPAAS

SEQ ID NO: 4395 - protein, 35 aa, Artificial Sequence
  GFR-binding peptide
  MOD_RES (2), (33), (34): Xaa is C or S
KXSKVVMRHKRLVKPTRGVYYLISTASLDQPVXXP

SEQ ID NO: 4396 - protein, 40 aa, Artificial Sequence
  GFR-binding peptide
  MOD_RES (34), (35): Xaa is C or S
  MOD_RES (12), (13), (14), (15), (16): Xaa is A or G
  MOD_RES (17), (18), (19), (20): Xaa is A or G or is absent
AKVVMNYHYKLXXXXXXXXXKYLVSIPSLKTPAXXAKPVA

SEQ ID NO: 4397 - protein, 39 aa, Artificial Sequence
  GFR-binding peptide
  MOD_RES (33), (34): Xaa is C or S
  MOD_RES (11), (12), (13), (14), (15): Xaa is A or G
  MOD_RES (16), (17), (18), (19): Xaa is A or G or is absent
EVVMEQYNKLXXXXXXXXXLYLMSIASLETPVXXAKPIS

SEQ ID NO: 4398 - protein, 41 aa, Artificial Sequence
  GFR-binding peptide
  MOD_RES (2), (4), (36), (37): Xaa is C or S
HXGXARVVMNRHKRLIVNSSDDYYLVSTASLQTPAXXPKPV

SEQ ID NO: 4399 - protein, 33 aa, Artificial Sequence
  GFR-binding peptide
  MOD_RES (1), (33): Xaa is C or S
XSRVVMNYHYKLIVNSSDDKYLVSIPSLKTPAX

SEQ ID NO: 4400 - protein, 38 aa, Artificial Sequence
  GFR-binding peptide
  MOD_RES (1), (38): Xaa is C or S
  MOD_RES (14), (15), (16), (17), (18): Xaa is A or G
  MOD_RES (19), (20), (21), (22): Xaa is A or G or is absent
XALHDELTQYNKLXXXXXXXXXLYLVSIASLQVQTPRX

SEQ ID NO: 4401 - protein, 38 aa, Artificial Sequence
  GFR-binding peptide
  MOD_RES (1), (3), (34), (35): Xaa is C or S
XKXSRVIMRHKRLVKPKRGVYYLISTASLAQPVXXPAA

SEQ ID NO: 4402 - protein, 34 aa, Artificial Sequence
  GFR-binding peptide
  MOD_RES (1), (3): Xaa is C or S
XGXAKVVMNRYKKLIVNNSSDFYLVSIANLKTPA

SEQ ID NO: 4403 - protein, 35 aa, Artificial Sequence
  GFR-binding peptide
  MOD_RES (2), (34), (35): Xaa is C or S
GXSRVVMNRYKKLIVNSSDDFYLVSIANLKTPAXX

SEQ ID NO: 4404 - protein, 35 aa, Artificial Sequence
  GFR-binding peptide
  MOD_RES (1), (1): Xaa is C or S
  MOD_RES (14), (15), (16), (17), (18): Xaa is A or G
  MOD_RES (19), (20), (21), (22): Xaa is A or G or is absent
XEAVSMGEYHYKLXXXXXXXXXKYLVSIPSLKTPV

SEQ ID NO: 4405 - protein, 34 aa, Artificial Sequence
  GFR-binding peptide
  MOD_RES (31), (32): Xaa is C or S
RVVMNRHKRLIVNSSDDYYLVSTASLQTPAXXPK

SEQ ID NO: 4406 - protein, 40 aa, Artificial Sequence
  GFR-binding peptide
  MOD_RES (2), (4), (36), (37): Xaa is C or S
HXGXARVVMNRYKKLIVNSSDDFYLVSIANLQTPAXXPKP

SEQ ID NO: 4407 - protein, 43 aa, Artificial Sequence
  GFR-binding peptide
  MOD_RES (2), (37), (38): Xaa is C or S
  MOD_RES (15), (16), (17), (18), (19): Xaa is A or G
  MOD_RES (20), (21), (22), (23): Xaa is A or G or is absent
GXEAVSMGERYKKLXXXXXXXXXFYLVSIANLKTPVXXAKGVK

SEQ ID NO: 4408 - protein, 43 aa, Artificial Sequence
  GFR-binding peptide
  MOD_RES (2), (39): Xaa is C or S
KXALHDELTYHYKLFIPKKRVIEKYLVSIPSLQVQTPRXQVNR

SEQ ID NO: 4409 - protein, 34 aa, Artificial Sequence
  GFR-binding peptide
  MOD_RES (2), (34): Xaa is C or S
GXGEVVMDRYKKLVVKENEDFYLMSIANLETPVX

SEQ ID NO: 4410 - protein, 38 aa, Artificial Sequence
  GFR-binding peptide
  MOD_RES (33), (34): Xaa is C or S
  MOD_RES (11), (12), (13), (14), (15): Xaa is A or G
  MOD_RES (16), (17), (18), (19): Xaa is A or G or is absent
KVVMNQYNKLXXXXXXXXXLYLVSIASLKTPAXXAKPV

SEQ ID NO: 4411 - protein, 42 aa, Artificial Sequence
  GFR-binding peptide
  MOD_RES (1), (38): Xaa is C or S
  MOD_RES (14), (15), (16), (17), (18): Xaa is A or G
  MOD_RES (19), (20), (21), (22): Xaa is A or G or is absent
XALHDELTRHKRLXXXXXXXXXYYLVSTASLQVQTPRXQVNR

SEQ ID NO: 4412 - protein, 35 aa, Artificial Sequence
  GFR-binding peptide
  MOD_RES (2), (33), (34): Xaa is C or S
KXSRVIMQYNKLVKPKRGVLYLISIASLAQPVXXP

SEQ ID NO: 4413 - protein, 33 aa, Artificial Sequence
  GFR-binding peptide
  MOD_RES (1), (32), (33): Xaa is C or S
XSKVVMYHYKLVKPTRGVKYLISIPSLDQPVXX

SEQ ID NO: 4414 - protein, 35 aa, Artificial Sequence
  GFR-binding peptide
  MOD_RES (1), (3), (34), (35): Xaa is C or S
XKXSKVVMRYKKLVKPTRGVFYLISIANLDQPVXX

SEQ ID NO: 4415 - protein, 35 aa, Artificial Sequence
  GFR-binding peptide
  MOD_RES (31), (32): Xaa is C or S
KVVMNRYKKLIVNNSSDFYLVSIANLKTPAXXAKP

SEQ ID NO: 4416 - protein, 40 aa, Artificial Sequence
  GFR-binding peptide
  MOD_RES (35), (36): Xaa is C or S
  MOD_RES (13), (14), (15), (16), (17): Xaa is A or G
  MOD_RES (18), (19), (20), (21): Xaa is A or G or is absent
EAVSMGERHKRLXXXXXXXXXYYLVSTASLKTPVXXAKGV

SEQ ID NO: 4417 - protein, 33 aa, Artificial Sequence
  GFR-binding peptide
  MOD_RES (31), (32): Xaa is C or S
SKVVMRYKKLVKPTRGVFYLISIANLDQPVXXP

SEQ ID NO: 4418 - protein, 36 aa, Artificial Sequence
  GFR-binding peptide
  MOD_RES (2), (35), (36): Xaa is C or S
  MOD_RES (13), (14), (15), (16), (17): Xaa is A or G
  MOD_RES (18), (19), (20), (21): Xaa is A or G or is absent
KXSKVIMRYKKLXXXXXXXXXFYLISIANLDQSVXX

SEQ ID NO: 4419 - protein, 33 aa, Artificial Sequence
  GFR-binding peptide
  MOD_RES (31), (32): Xaa is C or S
SRVIMQYNKLVKPKRGVLYLISIASLAQPVXXP

SEQ ID NO: 4420 - protein, 40 aa, Artificial Sequence
  GFR-binding peptide
  MOD_RES (35), (36): Xaa is C or S
  MOD_RES (13), (14), (15), (16), (17): Xaa is A or G
  MOD_RES (18), (19), (20), (21): Xaa is A or G or is absent
EAVSMGEQYNKLXXXXXXXXXLYLVSIASLKTPVXXAKGV

SEQ ID NO: 4421 - protein, 34 aa, Artificial Sequence
  GFR-binding peptide
  MOD_RES (2), (4): Xaa is C or S
SXKXSRVIMRHKRLVKPKRGVYYLISTASLAQPV

SEQ ID NO: 4422 - protein, 40 aa, Artificial Sequence
  GFR-binding peptide
  MOD_RES (2), (36): Xaa is C or S
  MOD_RES (14), (15), (16), (17), (18): Xaa is A or G
  MOD_RES (19), (20), (21), (22): Xaa is A or G or is absent
GXSRVVMNQYNKLXXXXXXXXXLYLVSIASLKTPAXTPKT

SEQ ID NO: 4423 - protein, 34 aa, Artificial Sequence
  GFR-binding peptide
  MOD_RES (1), (34): Xaa is C or S
  MOD_RES (12), (13), (14), (15), (16): Xaa is A or G
  MOD_RES (17), (18), (19), (20): Xaa is A or G or is absent
XSKVVMYHYKLXXXXXXXXXKYLISIPSLDQPVX

SEQ ID NO: 4424 - protein, 41 aa, Artificial Sequence
  GFR-binding peptide
  MOD_RES (1), (3), (37), (38): Xaa is C or S
  MOD_RES (15), (16), (17), (18), (19): Xaa is A or G
  MOD_RES (20), (21), (22), (23): Xaa is A or G or is absent
XGXSRVVMNYHYKLXXXXXXXXXKYLVSIPSLKTPAXXPKP

SEQ ID NO: 4425 - protein, 36 aa, Artificial Sequence
  GFR-binding peptide
  MOD_RES (2), (4): Xaa is C or S
RXGXEAVSMGERYKKLTPVGMDDFYLVSIANLKTPV

SEQ ID NO: 4426 - protein, 33 aa, Artificial Sequence
  GFR-binding peptide
  MOD_RES (31), (32): Xaa is C or S
RVVMNQYNKLIVNSSDDLYLVSIASLKTPAXXP

SEQ ID NO: 4427 - protein, 41 aa, Artificial Sequence
  GFR-binding peptide
  MOD_RES (2), (36), (37): Xaa is C or S
  MOD_RES (14), (15), (16), (17), (18): Xaa is A or G
  MOD_RES (19), (20), (21), (22): Xaa is A or G or is absent
GXGEVVMDQYNKLXXXXXXXXXLYLMSIASLETPVXXAKPI

SEQ ID NO: 4428 - protein, 38 aa, Artificial Sequence
  GFR-binding peptide
  MOD_RES (2), (33), (34): Xaa is C or S
KXSRVIMRYKKLVKPKRGVFYLISIANLAQPVXXPAAS

SEQ ID NO: 4429 - protein, 36 aa, Artificial Sequence
  GFR-binding peptide
  MOD_RES (1), (34), (35): Xaa is C or S
  MOD_RES (12), (13), (14), (15), (16): Xaa is A or G
  MOD_RES (17), (18), (19), (20): Xaa is A or G or is absent
XSKVVMRYKKLXXXXXXXXXFYLISIANLDQPVXXP

SEQ ID NO: 4430 - protein, 36 aa, Artificial Sequence
  GFR-binding peptide
  MOD_RES (33), (34): Xaa is C or S
  MOD_RES (11), (12), (13), (14), (15): Xaa is A or G
  MOD_RES (16), (17), (18), (19): Xaa is A or G or is absent
RVVMNRYKKLXXXXXXXXXFYLVSIANLQTPAXXPK

SEQ ID NO: 4431 - protein, 35 aa, Artificial Sequence
  GFR-binding peptide
  MOD_RES (2), (4): Xaa is C or S
RXGXGEVVMDRHKRLVVKENEDYYLMSTASLETPV

SEQ ID NO: 4432 - protein, 34 aa, Artificial Sequence
  GFR-binding peptide
  MOD_RES (2), (2): Xaa is C or S
  MOD_RES (13), (14), (15), (16), (17): Xaa is A or G
  MOD_RES (18), (19), (20), (21): Xaa is A or G or is absent
KXSKVVMRYKKLXXXXXXXXXFYLISIANLDQPV

SEQ ID NO: 4433 - protein, 34 aa, Artificial Sequence
  GFR-binding peptide
  MOD_RES (1), (33), (34): Xaa is C or S
XGEVVMERHKRLVVKDYEDYYLMSTASLETPVXX

SEQ ID NO: 4434 - protein, 35 aa, Artificial Sequence
  GFR-binding peptide
  MOD_RES (2), (34), (35): Xaa is C or S
GXGEVVMEYHYKLVVKDYEDKYLMSIPSLETPVXX

SEQ ID NO: 4435 - protein, 33 aa, Artificial Sequence
  GFR-binding peptide
  MOD_RES (1), (32), (33): Xaa is C or S
XSRVIMRYKKLVKPKRGVFYLISIANLAQPVXX

SEQ ID NO: 4436 - protein, 36 aa, Artificial Sequence
  GFR-binding peptide
  MOD_RES (1), (1): Xaa is C or S
  MOD_RES (14), (15), (16), (17), (18): Xaa is A or G
  MOD_RES (19), (20), (21), (22): Xaa is A or G or is absent
XALHDELTRYKKLXXXXXXXXXFYLVSIANLQVQTP

SEQ ID NO: 4437 - protein, 38 aa, Artificial Sequence
  GFR-binding peptide
  MOD_RES (1), (3), (36), (37): Xaa is C or S
XGXEAVSMGERYKKLTPVGMDDFYLVSIANLKTPVXXA

SEQ ID NO: 4438 - protein, 41 aa, Artificial Sequence
  GFR-binding peptide
  MOD_RES (2), (36), (37): Xaa is C or S
  MOD_RES (14), (15), (16), (17), (18): Xaa is A or G
  MOD_RES (19), (20), (21), (22): Xaa is A or G or is absent
GXAKVVMNQYNKLXXXXXXXXXLYLVSIASLKTPAXXAKPV

SEQ ID NO: 4439 - protein, 36 aa, Artificial Sequence
  GFR-binding peptide
  MOD_RES (32), (33): Xaa is C or S
GEVVMDYHYKLVVKENEDKYLMSIPSLETPVXXAKP

SEQ ID NO: 4440 - protein, 39 aa, Artificial Sequence
  GFR-binding peptide
  MOD_RES (2), (34), (35): Xaa is C or S
GXGEVVMDRHKRLVVKENEDYYLMSTASLETPVXXAKPI

SEQ ID NO: 4441 - protein, 34 aa, Artificial Sequence
  GFR-binding peptide
  MOD_RES (1), (34): Xaa is C or S
XEAVSMGEYHYKLTPVGMDDKYLVSIPSLKTPVX

SEQ ID NO: 4442 - protein, 35 aa, Artificial Sequence
  GFR-binding peptide
  MOD_RES (33), (34): Xaa is C or S
  MOD_RES (11), (12), (13), (14), (15): Xaa is A or G
  MOD_RES (16), (17), (18), (19): Xaa is A or G or is absent
RVVMNRHKRLXXXXXXXXXYYLVSTASLQTPAXXP

SEQ ID NO: 4443 - protein, 32 aa, Artificial Sequence
  GFR-binding peptide
  MOD_RES (2), (2): Xaa is C or S
KXSKVIMQYNKLIKPTKGILYLISIASLDQSV

SEQ ID NO: 4444 - protein, 34 aa, Artificial Sequence
  GFR-binding peptide
  MOD_RES (33), (34): Xaa is C or S
EAVSMGEQYNKLTPVGMDDLYLVSIASLKTPVXX

SEQ ID NO: 4445 - protein, 39 aa, Artificial Sequence
  GFR-binding peptide
  MOD_RES (33), (33): Xaa is C or S
  MOD_RES (11), (12), (13), (14), (15): Xaa is A or G
  MOD_RES (16), (17), (18), (19): Xaa is A or G or is absent
RVVMNRHKRLXXXXXXXXXYYLVSTASLKTPAXTPKTVH

SEQ ID NO: 4446 - protein, 38 aa, Artificial Sequence
  GFR-binding peptide
  MOD_RES (34), (35): Xaa is C or S
  MOD_RES (12), (13), (14), (15), (16): Xaa is A or G
  MOD_RES (17), (18), (19), (20): Xaa is A or G or is absent
SRVVMNRYKKLXXXXXXXXXFYLVSIANLKTPAXXPKP

SEQ ID NO: 4447 - protein, 36 aa, Artificial Sequence
  GFR-binding peptide
  MOD_RES (31), (32): Xaa is C or S
RVVMNRHKRLIVNSSDDYYLVSTASLQTPAXXPKPV

SEQ ID NO: 4448 - protein, 38 aa, Artificial Sequence
  GFR-binding peptide
  MOD_RES (2), (34), (35): Xaa is C or S
GXARVVMNQYNKLIVNSSDDLYLVSIASLQTPAXXPKP

SEQ ID NO: 4449 - protein, 41 aa, Artificial Sequence
  GFR-binding peptide
  MOD_RES (1), (3), (38), (39): Xaa is C or S
  MOD_RES (16), (17), (18), (19), (20): Xaa is A or G
  MOD_RES (21), (22), (23), (24): Xaa is A or G or is absent
XGXEAVSMGEYHYKLXXXXXXXXXKYLVSIPSLKTPVXXAK

SEQ ID NO: 4450 - protein, 39 aa, Artificial Sequence
  GFR-binding peptide
  MOD_RES (2), (4), (35), (36): Xaa is C or S
SXKXSKVIMQYNKLIKPTKGILYLISIASLDQSVXXPSA

SEQ ID NO: 4451 - protein, 35 aa, Artificial Sequence
  GFR-binding peptide
  MOD_RES (33), (34): Xaa is C or S
  MOD_RES (11), (12), (13), (14), (15): Xaa is A or G
  MOD_RES (16), (17), (18), (19): Xaa is A or G or is absent
KVVMNRYKKLXXXXXXXXXFYLVSIANLKTPAXXA

SEQ ID NO: 4452 - protein, 33 aa, Artificial Sequence
  GFR-binding peptide
  MOD_RES (31), (32): Xaa is C or S
EVVMDRHKRLVVKENEDYYLMSTASLETPVXXA

SEQ ID NO: 4453 - protein, 32 aa, Artificial Sequence
  GFR-binding peptide
  MOD_RES (11), (12), (13), (14), (15): Xaa is A or G
  MOD_RES (16), (17), (18), (19): Xaa is A or G or is absent
EVVMERYKKLXXXXXXXXXFYLMSIANLETPV

SEQ ID NO: 4454 - protein, 43 aa, Artificial Sequence
  GFR-binding peptide
  MOD_RES (2), (4), (37), (38): Xaa is C or S
  MOD_RES (15), (16), (17), (18), (19): Xaa is A or G
  MOD_RES (20), (21), (22), (23): Xaa is A or G or is absent
SXKXSKVIMRYKKLXXXXXXXXXFYLISIANLDQSVXXPSASA

SEQ ID NO: 4455 - protein, 39 aa, Artificial Sequence
  GFR-binding peptide
  MOD_RES (1), (3): Xaa is C or S
XKXALHDELTYHYKLFIPKKRVIEKYLVSIPSLQVQTPR

SEQ ID NO: 4456 - protein, 38 aa, Artificial Sequence
  GFR-binding peptide
  MOD_RES (1), (34), (35): Xaa is C or S
XEAVSMGEQYNKLTPVGMDDLYLVSIASLKTPVXXAKG

SEQ ID NO: 4457 - protein, 39 aa, Artificial Sequence
  GFR-binding peptide
  MOD_RES (2), (34), (35): Xaa is C or S
GXARVVMNQYNKLIVNSSDDLYLVSIASLQTPAXXPKPV

SEQ ID NO: 4458 - protein, 41 aa, Artificial Sequence
  GFR-binding peptide
  MOD_RES (2), (36), (37): Xaa is C or S
  MOD_RES (14), (15), (16), (17), (18): Xaa is A or G
  MOD_RES (19), (20), (21), (22): Xaa is A or G or is absent
GXARVVMNQYNKLXXXXXXXXXLYLVSIASLQTPAXXPKPV

SEQ ID NO: 4459 - protein, 36 aa, Artificial Sequence
  GFR-binding peptide
  MOD_RES (2), (4): Xaa is C or S
  MOD_RES (15), (16), (17), (18), (19): Xaa is A or G
  MOD_RES (20), (21), (22), (23): Xaa is A or G or is absent
SXKXSKVVMRYKKLXXXXXXXXXFYLISIANLDQPV

SEQ ID NO: 4460 - protein, 36 aa, Artificial Sequence
  GFR-binding peptide
  MOD_RES (1), (34), (35): Xaa is C or S
  MOD_RES (12), (13), (14), (15), (16): Xaa is A or G
  MOD_RES (17), (18), (19), (20): Xaa is A or G or is absent
XSKVIMRHKRLXXXXXXXXXYYLISTASLDQSVXXP

SEQ ID NO: 4461 - protein, 34 aa, Artificial Sequence
  GFR-binding peptide
  MOD_RES (1), (3), (34): Xaa is C or S
XKXSKVIMRYKKLIKPTKGIFYLISIANLDQSVX

SEQ ID NO: 4462 - protein, 34 aa, Artificial Sequence
  GFR-binding peptide
  MOD_RES (13), (14), (15), (16), (17): Xaa is A or G
  MOD_RES (18), (19), (20), (21): Xaa is A or G or is absent
EAVSMGEQYNKLXXXXXXXXXLYLVSIASLKTPV

SEQ ID NO: 4463 - protein, 40 aa, Artificial Sequence
  GFR-binding peptide
  MOD_RES (2), (4), (37), (38): Xaa is C or S
  MOD_RES (15), (16), (17), (18), (19): Xaa is A or G
  MOD_RES (20), (21), (22), (23): Xaa is A or G or is absent
SXKXSKVVMQYNKLXXXXXXXXXLYLISIASLDQPVXXPS

SEQ ID NO: 4464 - protein, 35 aa, Artificial Sequence
  GFR-binding peptide
  MOD_RES (1), (33), (34): Xaa is C or S
XGEVVMEYHYKLVVKDYEDKYLMSIPSLETPVXXA

SEQ ID NO: 4465 - protein, 35 aa, Artificial Sequence
  GFR-binding peptide
  MOD_RES (32), (33): Xaa is C or S
AKVVMNRHKRLIVNNSSDYYLVSTASLKTPAXXAK

SEQ ID NO: 4466 - protein, 34 aa, Artificial Sequence
  GFR-binding peptide
  MOD_RES (31), (32): Xaa is C or S
EVVMEQYNKLVVKDYEDLYLMSIASLETPVXXAK

SEQ ID NO: 4467 - protein, 44 aa, Artificial Sequence
  GFR-binding peptide
  MOD_RES (2), (4), (38), (39): Xaa is C or S
  MOD_RES (16), (17), (18), (19), (20): Xaa is A or G
  MOD_RES (21), (22), (23), (24): Xaa is A or G or is absent
HXGXSRVVMNQYNKLXXXXXXXXXLYLVSIASLKTPAXXPKPVY

SEQ ID NO: 4468 - protein, 33 aa, Artificial Sequence
  GFR-binding peptide
  MOD_RES (2), (2): Xaa is C or S
GXAKVVMNRHKRLIVNNSSDYYLVSTASLKTPA

SEQ ID NO: 4469 - protein, 34 aa, Artificial Sequence
  GFR-binding peptide
  MOD_RES (13), (14), (15), (16), (17): Xaa is A or G
  MOD_RES (18), (19), (20), (21): Xaa is A or G or is absent
EAVSMGERHKRLXXXXXXXXXYYLVSTASLKTPV

SEQ ID NO: 4470 - protein, 38 aa, Artificial Sequence
  GFR-binding peptide
  MOD_RES (2), (35), (36): Xaa is C or S
  MOD_RES (13), (14), (15), (16), (17): Xaa is A or G
  MOD_RES (18), (19), (20), (21): Xaa is A or G or is absent
KXSKVVMRYKKLXXXXXXXXXFYLISIANLDQPVXXPS

SEQ ID NO: 4471 - protein, 39 aa, Artificial Sequence
  GFR-binding peptide
  MOD_RES (34), (35): Xaa is C or S
  MOD_RES (12), (13), (14), (15), (16): Xaa is A or G
  MOD_RES (17), (18), (19), (20): Xaa is A or G or is absent
SRVVMNRHKRLXXXXXXXXXYYLVSTASLKTPAXXPKPV

SEQ ID NO: 4472 - protein, 37 aa, Artificial Sequence
  GFR-binding peptide
  MOD_RES (2), (34), (35): Xaa is C or S
GXSRVVMNQYNKLIVNSSDDLYLVSIASLKTPAXXPK

SEQ ID NO: 4473 - protein, 33 aa, Artificial Sequence
  GFR-binding peptide
  MOD_RES (2), (2): Xaa is C or S
GXGEVVMERHKRLVVKDYEDYYLMSTASLETPV

SEQ ID NO: 4474 - protein, 40 aa, Artificial Sequence
  GFR-binding peptide
  MOD_RES (2), (4), (39), (40): Xaa is C or S
  MOD_RES (17), (18), (19), (20), (21): Xaa is A or G
  MOD_RES (22), (23), (24), (25): Xaa is A or G or is absent
RXGXEAVSMGERYKKLXXXXXXXXXFYLVSIANLKTPVXX

SEQ ID NO: 4475 - protein, 39 aa, Artificial Sequence
  GFR-binding peptide
  MOD_RES (1), (34), (35): Xaa is C or S
  MOD_RES (12), (13), (14), (15), (16): Xaa is A or G
  MOD_RES (17), (18), (19), (20): Xaa is A or G or is absent
XSKVIMYHYKLXXXXXXXXXKYLISIPSLDQSVXXPSAS

SEQ ID NO: 4476 - protein, 36 aa, Artificial Sequence
  GFR-binding peptide
  MOD_RES (33), (34): Xaa is C or S
  MOD_RES (11), (12), (13), (14), (15): Xaa is A or G
  MOD_RES (16), (17), (18), (19): Xaa is A or G or is absent
RVVMNYHYKLXXXXXXXXXKYLVSIPSLQTPAXXPK

SEQ ID NO: 4477 - protein, 38 aa, Artificial Sequence
  GFR-binding peptide
  MOD_RES (2), (4), (38): Xaa is C or S
  MOD_RES (16), (17), (18), (19), (20): Xaa is A or G
  MOD_RES (21), (22), (23), (24): Xaa is A or G or is absent
RXGXGEVVMEYHYKLXXXXXXXXXKYLMSIPSLETPVX

SEQ ID NO: 4478 - protein, 38 aa, Artificial Sequence
  GFR-binding peptide
  MOD_RES (2), (2): Xaa is C or S
KXALHDELTRHKRLFIPKKRVIEYYLVSTASLQVQTPR

SEQ ID NO: 4479 - protein, 34 aa, Artificial Sequence
  GFR-binding peptide
  MOD_RES (33), (34): Xaa is C or S
  MOD_RES (11), (12), (13), (14), (15): Xaa is A or G
  MOD_RES (16), (17), (18), (19): Xaa is A or G or is absent
SKVVMQYNKLXXXXXXXXXLYLISIASLDQPVXX

SEQ ID NO: 4480 - protein, 35 aa, Artificial Sequence
  GFR-binding peptide
  MOD_RES (31), (32): Xaa is C or S
SKVVMRHKRLVKPTRGVYYLISTASLDQPVXXPSA

SEQ ID NO: 4481 - protein, 38 aa, Artificial Sequence
  GFR-binding peptide
  MOD_RES (1), (3), (37), (38): Xaa is C or S
  MOD_RES (15), (16), (17), (18), (19): Xaa is A or G
  MOD_RES (20), (21), (22), (23): Xaa is A or G or is absent
XGXAKVVMNRHKRLXXXXXXXXXYYLVSTASLKTPAXX

SEQ ID NO: 4482 - protein, 40 aa, Artificial Sequence
  GFR-binding peptide
  MOD_RES (2), (35), (36): Xaa is C or S
  MOD_RES (13), (14), (15), (16), (17): Xaa is A or G
  MOD_RES (18), (19), (20), (21): Xaa is A or G or is absent
KXSKVIMYHYKLXXXXXXXXXKYLISIPSLDQSVXXPSAS

SEQ ID NO: 4483 - protein, 39 aa, Artificial Sequence
  GFR-binding peptide
  MOD_RES (1), (34), (35): Xaa is C or S
  MOD_RES (12), (13), (14), (15), (16): Xaa is A or G
  MOD_RES (17), (18), (19), (20): Xaa is A or G or is absent
XSRVIMRYKKLXXXXXXXXXFYLISIANLAQPVXXPAAS

SEQ ID NO: 4484 - protein, 39 aa, Artificial Sequence
  GFR-binding peptide
  MOD_RES (33), (34): Xaa is C or S
  MOD_RES (11), (12), (13), (14), (15): Xaa is A or G
  MOD_RES (16), (17), (18), (19): Xaa is A or G or is absent
SKVIMYHYKLXXXXXXXXXKYLISIPSLDQSVXXPSASA

SEQ ID NO: 4485 - protein, 37 aa, Artificial Sequence
  GFR-binding peptide
  MOD_RES (2), (33), (34): Xaa is C or S
KXSKVIMYHYKLIKPTKGIKYLISIPSLDQSVXXPSA

SEQ ID NO: 4486 - protein, 34 aa, Artificial Sequence
  GFR-binding peptide
  MOD_RES (2), (33), (34): Xaa is C or S
KXSKVIMQYNKLIKPTKGILYLISIASLDQSVXX

SEQ ID NO: 4487 - protein, 36 aa, Artificial Sequence
  GFR-binding peptide
  MOD_RES (33), (34): Xaa is C or S
  MOD_RES (11), (12), (13), (14), (15): Xaa is A or G
  MOD_RES (16), (17), (18), (19): Xaa is A or G or is absent
SRVIMRHKRLXXXXXXXXXYYLISTASLAQPVXXPA

SEQ ID NO: 4488 - protein, 41 aa, Artificial Sequence
  GFR-binding peptide
  MOD_RES (1), (3), (35), (36): Xaa is C or S
XGXSRVVMNQYNKLIVNSSDDLYLVSIASLKTPAXXPKPVY

SEQ ID NO: 4489 - protein, 33 aa, Artificial Sequence
  GFR-binding peptide
  MOD_RES (32), (33): Xaa is C or S
GEVVMEQYNKLVVKDYEDLYLMSIASLETPVXX

SEQ ID NO: 4490 - protein, 38 aa, Artificial Sequence
  GFR-binding peptide
  MOD_RES (1), (32), (33): Xaa is C or S
XSKVIMQYNKLIKPTKGILYLISIASLDQSVXXPSASA

SEQ ID NO: 4491 - protein, 35 aa, Artificial Sequence
  GFR-binding peptide
  MOD_RES (1), (33), (34): Xaa is C or S
XAKVVMNYHYKLIVNNSSDKYLVSIPSLKTPAXXA

SEQ ID NO: 4492 - protein, 38 aa, Artificial Sequence
  GFR-binding peptide
  MOD_RES (1), (3), (34), (35): Xaa is C or S
XKXSKVVMQYNKLVKPTRGVLYLISIASLDQPVXXPSA

SEQ ID NO: 4493 - protein, 41 aa, Artificial Sequence
  GFR-binding peptide
  MOD_RES (1), (3), (35), (36): Xaa is C or S
XGXSRVVMNYHYKLIVNSSDDKYLVSIPSLKTPAXXPKPVY

SEQ ID NO: 4494 - protein, 38 aa, Artificial Sequence
  GFR-binding peptide
  MOD_RES (1), (3): Xaa is C or S
  MOD_RES (16), (17), (18), (19), (20): Xaa is A or G
  MOD_RES (21), (22), (23), (24): Xaa is A or G or is absent
XKXALHDELTQYNKLXXXXXXXXXLYLVSIASLQVQTP

SEQ ID NO: 4495 - protein, 36 aa, Artificial Sequence
  GFR-binding peptide
  MOD_RES (1), (34), (35): Xaa is C or S
  MOD_RES (12), (13), (14), (15), (16): Xaa is A or G
  MOD_RES (17), (18), (19), (20): Xaa is A or G or is absent
XSKVIMQYNKLXXXXXXXXXLYLISIASLDQSVXXP

SEQ ID NO: 4496 - protein, 42 aa, Artificial Sequence
  GFR-binding peptide
  MOD_RES (1), (3), (36), (37): Xaa is C or S
  MOD_RES (14), (15), (16), (17), (18): Xaa is A or G
  MOD_RES (19), (20), (21), (22): Xaa is A or G or is absent
XKXSKVVMYHYKLXXXXXXXXXKYLISIPSLDQPVXXPSASA

SEQ ID NO: 4497 - protein, 40 aa, Artificial Sequence
  GFR-binding peptide
  MOD_RES (2), (36), (37): Xaa is C or S
  MOD_RES (14), (15), (16), (17), (18): Xaa is A or G
  MOD_RES (19), (20), (21), (22): Xaa is A or G or is absent
GXSRVVMNRHKRLXXXXXXXXXYYLVSTASLKTPAXXPKP

SEQ ID NO: 4498 - protein, 40 aa, Artificial Sequence
  GFR-binding peptide
  MOD_RES (2), (35), (36): Xaa is C or S
  MOD_RES (13), (14), (15), (16), (17): Xaa is A or G
  MOD_RES (18), (19), (20), (21): Xaa is A or G or is absent
KXSKVVMQYNKLXXXXXXXXXLYLISIASLDQPVXXPSAS

SEQ ID NO: 4499 - protein, 37 aa, Artificial Sequence
  GFR-binding peptide
  MOD_RES (2), (34), (35): Xaa is C or S
GXGEVVMERYKKLVVKDYEDFYLMSIANLETPVXXAK

SEQ ID NO: 4500 - protein, 39 aa, Artificial Sequence
  GFR-binding peptide
  MOD_RES (34), (35): Xaa is C or S
  MOD_RES (12), (13), (14), (15), (16): Xaa is A or G
  MOD_RES (17), (18), (19), (20): Xaa is A or G or is absent
GEVVMDYHYKLXXXXXXXXXKYLMSIPSLETPVXXAKPI

SEQ ID NO: 4501 - protein, 34 aa, Artificial Sequence
  GFR-binding peptide
  MOD_RES (2), (2): Xaa is C or S
  MOD_RES (13), (14), (15), (16), (17): Xaa is A or G
  MOD_RES (18), (19), (20), (21): Xaa is A or G or is absent
KXSKVIMRYKKLXXXXXXXXXFYLISIANLDQSV

SEQ ID NO: 4502 - protein, 40 aa, Artificial Sequence
  GFR-binding peptide
  MOD_RES (2), (36), (37): Xaa is C or S
  MOD_RES (14), (15), (16), (17), (18): Xaa is A or G
  MOD_RES (19), (20), (21), (22): Xaa is A or G or is absent
GXGEVVMEQYNKLXXXXXXXXXLYLMSIASLETPVXXAKP

SEQ ID NO: 4503 - protein, 37 aa, Artificial Sequence
  GFR-binding peptide
  MOD_RES (31), (32): Xaa is C or S
KVVMNRHKRLIVNNSSDYYLVSTASLKTPAXXAKPVA

SEQ ID NO: 4504 - protein, 39 aa, Artificial Sequence
  GFR-binding peptide
  MOD_RES (1), (33), (34): Xaa is C or S
XARVVMNRHKRLIVNSSDDYYLVSTASLQTPAXXPKPVT

SEQ ID NO: 4505 - protein, 37 aa, Artificial Sequence
  GFR-binding peptide
  MOD_RES (2), (4), (35), (36): Xaa is C or S
SXKXSKVVMQYNKLVKPTRGVLYLISIASLDQPVXXP

SEQ ID NO: 4506 - protein, 43 aa, Artificial Sequence
  GFR-binding peptide
  MOD_RES (2), (4), (39), (40): Xaa is C or S
  MOD_RES (17), (18), (19), (20), (21): Xaa is A or G
  MOD_RES (22), (23), (24), (25): Xaa is A or G or is absent
RXGXEAVSMGEQYNKLXXXXXXXXXLYLVSIASLKTPVXXAKG

SEQ ID NO: 4507 - protein, 41 aa, Artificial Sequence
  GFR-binding peptide
  MOD_RES (1), (3), (35), (36): Xaa is C or S
XGXGEVVMDRHKRLVVKENEDYYLMSTASLETPVXXAKPIK

SEQ ID NO: 4508 - protein, 42 aa, Artificial Sequence
  GFR-binding peptide
  MOD_RES (1), (3), (37), (38): Xaa is C or S
  MOD_RES (15), (16), (17), (18), (19): Xaa is A or G
  MOD_RES (20), (21), (22), (23): Xaa is A or G or is absent
XGXSRVVMNRHKRLXXXXXXXXXYYLVSTASLKTPAXXPKPV

SEQ ID NO: 4509 - protein, 36 aa, Artificial Sequence
  GFR-binding peptide
  MOD_RES (1), (35): Xaa is C or S
  MOD_RES (13), (14), (15), (16), (17): Xaa is A or G
  MOD_RES (18), (19), (20), (21): Xaa is A or G or is absent
XSRVVMNQYNKLXXXXXXXXXLYLVSIASLKTPAXT

SEQ ID NO: 4510 - protein, 41 aa, Artificial Sequence
  GFR-binding peptide
  MOD_RES (1), (38): Xaa is C or S
  MOD_RES (14), (15), (16), (17), (18): Xaa is A or G
  MOD_RES (19), (20), (21), (22): Xaa is A or G or is absent
XALHDELTQYNKLXXXXXXXXXLYLVSIASLQVQTPRXQVN

SEQ ID NO: 4511 - protein, 37 aa, Artificial Sequence
  GFR-binding peptide
  MOD_RES (2), (35), (36): Xaa is C or S
  MOD_RES (13), (14), (15), (16), (17): Xaa is A or G
  MOD_RES (18), (19), (20), (21): Xaa is A or G or is absent
KXSKVIMRHKRLXXXXXXXXXYYLISTASLDQSVXXP

SEQ ID NO: 4512 - protein, 34 aa, Artificial Sequence
  GFR-binding peptide
  MOD_RES (1), (1): Xaa is C or S
  MOD_RES (13), (14), (15), (16), (17): Xaa is A or G
  MOD_RES (18), (19), (20), (21): Xaa is A or G or is absent
XAKVVMNQYNKLXXXXXXXXXLYLVSIASLKTPA

SEQ ID NO: 4513 - protein, 35 aa, Artificial Sequence
  GFR-binding peptide
  MOD_RES (34), (35): Xaa is C or S
  MOD_RES (12), (13), (14), (15), (16): Xaa is A or G
  MOD_RES (17), (18), (19), (20): Xaa is A or G or is absent
GEVVMERYKKLXXXXXXXXXFYLMSIANLETPVXX

SEQ ID NO: 4514 - protein, 39 aa, Artificial Sequence
  GFR-binding peptide
  MOD_RES (2), (36), (37): Xaa is C or S
  MOD_RES (14), (15), (16), (17), (18): Xaa is A or G
  MOD_RES (19), (20), (21), (22): Xaa is A or G or is absent
GXGEVVMDRYKKLXXXXXXXXXFYLMSIANLETPVXXAK

SEQ ID NO: 4515 - protein, 37 aa, Artificial Sequence
  GFR-binding peptide
  MOD_RES (2), (34): Xaa is C or S
GXSRVVMNRHKRLIVNSSDDYYLVSTASLKTPAXTPK

SEQ ID NO: 4516 - protein, 37 aa, Artificial Sequence
  GFR-binding peptide
  MOD_RES (33), (34): Xaa is C or S
  MOD_RES (11), (12), (13), (14), (15): Xaa is A or G
  MOD_RES (16), (17), (18), (19): Xaa is A or G or is absent
SKVVMRHKRLXXXXXXXXXYYLISTASLDQPVXXPSA

SEQ ID NO: 4517 - protein, 43 aa, Artificial Sequence
  GFR-binding peptide
  MOD_RES (2), (4), (38): Xaa is C or S
  MOD_RES (16), (17), (18), (19), (20): Xaa is A or G
  MOD_RES (21), (22), (23), (24): Xaa is A or G or is absent
HXGXSRVVMNRHKRLXXXXXXXXXYYLVSTASLKTPAXTPKTV

SEQ ID NO: 4518 - protein, 37 aa, Artificial Sequence
  GFR-binding peptide
  MOD_RES (1), (3), (35), (36): Xaa is C or S
XGXSRVVMNRHKRLIVNSSDDYYLVSTASLKTPAXXP

SEQ ID NO: 4519 - protein, 38 aa, Artificial Sequence
  GFR-binding peptide
  MOD_RES (32), (33): Xaa is C or S
AKVVMNRHKRLIVNNSSDYYLVSTASLKTPAXXAKPVA

SEQ ID NO: 4520 - protein, 33 aa, Artificial Sequence
  GFR-binding peptide
  MOD_RES (31), (32): Xaa is C or S
RVVMNRHKRLIVNSSDDYYLVSTASLKTPAXXP

SEQ ID NO: 4521 - protein, 37 aa, Artificial Sequence
  GFR-binding peptide
  MOD_RES (34), (35): Xaa is C or S
  MOD_RES (12), (13), (14), (15), (16): Xaa is A or G
  MOD_RES (17), (18), (19), (20): Xaa is A or G or is absent
ARVVMNRHKRLXXXXXXXXXYYLVSTASLQTPAXXPK

SEQ ID NO: 4522 - protein, 36 aa, Artificial Sequence
  GFR-binding peptide
  MOD_RES (1), (33): Xaa is C or S
XSRVVMNQYNKLIVNSSDDLYLVSIASLKTPAXTPK

SEQ ID NO: 4523 - protein, 35 aa, Artificial Sequence
  GFR-binding peptide
  MOD_RES (33), (34): Xaa is C or S
  MOD_RES (11), (12), (13), (14), (15): Xaa is A or G
  MOD_RES (16), (17), (18), (19): Xaa is A or G or is absent
SKVIMRYKKLXXXXXXXXXFYLISIANLDQSVXXP

SEQ ID NO: 4524 - protein, 36 aa, Artificial Sequence
  GFR-binding peptide
  MOD_RES (1), (3): Xaa is C or S
  MOD_RES (15), (16), (17), (18), (19): Xaa is A or G
  MOD_RES (20), (21), (22), (23): Xaa is A or G or is absent
XGXARVVMNRHKRLXXXXXXXXXYYLVSTASLQTPA

SEQ ID NO: 4525 - protein, 34 aa, Artificial Sequence
  GFR-binding peptide
  MOD_RES (11), (12), (13), (14), (15): Xaa is A or G
  MOD_RES (16), (17), (18), (19): Xaa is A or G or is absent
HDELTRYKKLXXXXXXXXXFYLVSIANLQVQTPR

SEQ ID NO: 4526 - protein, 35 aa, Artificial Sequence
  GFR-binding peptide
  MOD_RES (32), (33): Xaa is C or S
GEVVMERHKRLVVKDYEDYYLMSTASLETPVXXAK

SEQ ID NO: 4527 - protein, 37 aa, Artificial Sequence
  GFR-binding peptide
  MOD_RES (1), (3), (37): Xaa is C or S
  MOD_RES (15), (16), (17), (18), (19): Xaa is A or G
  MOD_RES (20), (21), (22), (23): Xaa is A or G or is absent
XGXARVVMNYHYKLXXXXXXXXXKYLVSIPSLQTPAX

SEQ ID NO: 4528 - protein, 38 aa, Artificial Sequence
  GFR-binding peptide
  MOD_RES (2), (4), (36), (37): Xaa is C or S
HXGXAKVVMNYHYKLIVNNSSDKYLVSIPSLKTPAXXA

SEQ ID NO: 4529 - protein, 34 aa, Artificial Sequence
  GFR-binding peptide
  MOD_RES (2), (4): Xaa is C or S
SXKXSRVIMQYNKLVKPKRGVLYLISIASLAQPV

SEQ ID NO: 4530 - protein, 33 aa, Artificial Sequence
  GFR-binding peptide
  MOD_RES (32), (33): Xaa is C or S
AKVVMNRHKRLIVNNSSDYYLVSTASLKTPAXX

SEQ ID NO: 4531 - protein, 37 aa, Artificial Sequence
  GFR-binding peptide
  MOD_RES (33), (33): Xaa is C or S
  MOD_RES (11), (12), (13), (14), (15): Xaa is A or G
  MOD_RES (16), (17), (18), (19): Xaa is A or G or is absent
RVVMNQYNKLXXXXXXXXXLYLVSIASLKTPAXTPKT

SEQ ID NO: 4532 - protein, 41 aa, Artificial Sequence
  GFR-binding peptide
  MOD_RES (2), (4), (39), (40): Xaa is C or S
  MOD_RES (17), (18), (19), (20), (21): Xaa is A or G
  MOD_RES (22), (23), (24), (25): Xaa is A or G or is absent
RXGXEAVSMGERHKRLXXXXXXXXXYYLVSTASLKTPVXXA

SEQ ID NO: 4533 - protein, 39 aa, Artificial Sequence
  GFR-binding peptide
  MOD_RES (1), (35), (36): Xaa is C or S
  MOD_RES (13), (14), (15), (16), (17): Xaa is A or G
  MOD_RES (18), (19), (20), (21): Xaa is A or G or is absent
XGEVVMDYHYKLXXXXXXXXXKYLMSIPSLETPVXXAKP

SEQ ID NO: 4534 - protein, 36 aa, Artificial Sequence
  GFR-binding peptide
  MOD_RES (32), (33): Xaa is C or S
ARVVMNRYKKLIVNSSDDFYLVSIANLQTPAXXPKP

SEQ ID NO: 4535 - protein, 38 aa, Artificial Sequence
  GFR-binding peptide
  MOD_RES (2), (4), (36): Xaa is C or S
HXGXSRVVMNRHKRLIVNSSDDYYLVSTASLKTPAXTP

SEQ ID NO: 4536 - protein, 43 aa, Artificial Sequence
  GFR-binding peptide
  MOD_RES (2), (4), (41): Xaa is C or S
  MOD_RES (17), (18), (19), (20), (21): Xaa is A or G
  MOD_RES (22), (23), (24), (25): Xaa is A or G or is absent
EXKXALHDELTRHKRLXXXXXXXXXYYLVSTASLQVQTPRXQV

SEQ ID NO: 4537 - protein, 35 aa, Artificial Sequence
  GFR-binding peptide
  MOD_RES (2), (4): Xaa is C or S
HXGXAKVVMNYHYKLIVNNSSDKYLVSIPSLKTPA

SEQ ID NO: 4538 - protein, 34 aa, Artificial Sequence
  GFR-binding peptide
  MOD_RES (2), (33), (34): Xaa is C or S
KXSKVIMRYKKLIKPTKGIFYLISIANLDQSVXX

SEQ ID NO: 4539 - protein, 34 aa, Artificial Sequence
  GFR-binding peptide
  MOD_RES (32), (33): Xaa is C or S
AKVVMNYHYKLIVNNSSDKYLVSIPSLKTPAXXA

SEQ ID NO: 4540 - protein, 34 aa, Artificial Sequence
  GFR-binding peptide
  MOD_RES (2), (34): Xaa is C or S
GXAKVVMNRYKKLIVNNSSDFYLVSIANLKTPAX

SEQ ID NO: 4541 - protein, 37 aa, Artificial Sequence
  GFR-binding peptide
  MOD_RES (34), (34): Xaa is C or S
  MOD_RES (12), (13), (14), (15), (16): Xaa is A or G
  MOD_RES (17), (18), (19), (20): Xaa is A or G or is absent
SRVVMNRHKRLXXXXXXXXXYYLVSTASLKTPAXTPK

SEQ ID NO: 4542 - protein, 38 aa, Artificial Sequence
  GFR-binding peptide
  MOD_RES (2), (34): Xaa is C or S
GXSRVVMNQYNKLIVNSSDDLYLVSIASLKTPAXTPKT

SEQ ID NO: 4543 - protein, 40 aa, Artificial Sequence
  GFR-binding peptide
  MOD_RES (1), (3), (34), (35): Xaa is C or S
XKXSKVIMRHKRLIKPTKGIYYLISTASLDQSVXXPSASA

SEQ ID NO: 4544 - protein, 34 aa, Artificial Sequence
  GFR-binding peptide
  MOD_RES (32), (32): Xaa is C or S
SRVVMNRYKKLIVNSSDDFYLVSIANLKTPAXTP

SEQ ID NO: 4545 - protein, 39 aa, Artificial Sequence
  GFR-binding peptide
  MOD_RES (2), (4), (36), (37): Xaa is C or S
HXGXARVVMNQYNKLIVNSSDDLYLVSIASLQTPAXXPK

SEQ ID NO: 4546 - protein, 36 aa, Artificial Sequence
  GFR-binding peptide
  MOD_RES (2), (4), (36): Xaa is C or S
RXGXGEVVMEQYNKLVVKDYEDLYLMSIASLETPVX

SEQ ID NO: 4547 - protein, 41 aa, Artificial Sequence
  GFR-binding peptide
  MOD_RES (2), (4), (38), (39): Xaa is C or S
  MOD_RES (16), (17), (18), (19), (20): Xaa is A or G
  MOD_RES (21), (22), (23), (24): Xaa is A or G or is absent
HXGXSRVVMNRHKRLXXXXXXXXXYYLVSTASLKTPAXXPK

SEQ ID NO: 4548 - protein, 39 aa, Artificial Sequence
  GFR-binding peptide
  MOD_RES (37), (37): Xaa is C or S
  MOD_RES (13), (14), (15), (16), (17): Xaa is A or G
  MOD_RES (18), (19), (20), (21): Xaa is A or G or is absent
ALHDELTYHYKLXXXXXXXXXKYLVSIPSLQVQTPRXQV

SEQ ID NO: 4549 - protein, 41 aa, Artificial Sequence
  GFR-binding peptide
  MOD_RES (1), (35): Xaa is C or S
  MOD_RES (13), (14), (15), (16), (17): Xaa is A or G
  MOD_RES (18), (19), (20), (21): Xaa is A or G or is absent
XSRVVMNQYNKLXXXXXXXXXLYLVSIASLKTPAXTPKTVH

SEQ ID NO: 4550 - protein, 38 aa, Artificial Sequence
  GFR-binding peptide
  MOD_RES (1), (35), (36): Xaa is C or S
  MOD_RES (13), (14), (15), (16), (17): Xaa is A or G
  MOD_RES (18), (19), (20), (21): Xaa is A or G or is absent
XGEVVMERHKRLXXXXXXXXXYYLMSTASLETPVXXAK

SEQ ID NO: 4551 - protein, 40 aa, Artificial Sequence
  GFR-binding peptide
  MOD_RES (1), (35), (36): Xaa is C or S
  MOD_RES (13), (14), (15), (16), (17): Xaa is A or G
  MOD_RES (18), (19), (20), (21): Xaa is A or G or is absent
XGEVVMERHKRLXXXXXXXXXYYLMSTASLETPVXXAKPI

SEQ ID NO: 4552 - protein, 34 aa, Artificial Sequence
  GFR-binding peptide
  MOD_RES (31), (32): Xaa is C or S
EVVMEYHYKLVVKDYEDKYLMSIPSLETPVXXAK

SEQ ID NO: 4553 - protein, 40 aa, Artificial Sequence
  GFR-binding peptide
  MOD_RES (34), (35): Xaa is C or S
  MOD_RES (12), (13), (14), (15), (16): Xaa is A or G
  MOD_RES (17), (18), (19), (20): Xaa is A or G or is absent
GEVVMERYKKLXXXXXXXXXFYLMSIANLETPVXXAKPIS

SEQ ID NO: 4554 - protein, 33 aa, Artificial Sequence
  GFR-binding peptide
  MOD_RES (33), (33): Xaa is C or S
  MOD_RES (11), (12), (13), (14), (15): Xaa is A or G
  MOD_RES (16), (17), (18), (19): Xaa is A or G or is absent
RVVMNQYNKLXXXXXXXXXLYLVSIASLKTPAX

SEQ ID NO: 4555 - protein, 36 aa, Artificial Sequence
  GFR-binding peptide
  MOD_RES (2), (34): Xaa is C or S
GXSRVVMNRYKKLIVNSSDDFYLVSIANLKTPAXTP

SEQ ID NO: 4556 - protein, 36 aa, Artificial Sequence
  GFR-binding peptide
  MOD_RES (1), (33), (34): Xaa is C or S
XARVVMNRYKKLIVNSSDDFYLVSIANLQTPAXXPK

SEQ ID NO: 4557 - protein, 33 aa, Artificial Sequence
  GFR-binding peptide
  MOD_RES (33), (33): Xaa is C or S
  MOD_RES (11), (12), (13), (14), (15): Xaa is A or G
  MOD_RES (16), (17), (18), (19): Xaa is A or G or is absent
KVVMNQYNKLXXXXXXXXXLYLVSIASLKTPAX

SEQ ID NO: 4558 - protein, 35 aa, Artificial Sequence
  GFR-binding peptide
  MOD_RES (2), (2): Xaa is C or S
  MOD_RES (14), (15), (16), (17), (18): Xaa is A or G
  MOD_RES (19), (20), (21), (22): Xaa is A or G or is absent
GXARVVMNRYKKLXXXXXXXXXFYLVSIANLQTPA

SEQ ID NO: 4559 - protein, 38 aa, Artificial Sequence
  GFR-binding peptide
  MOD_RES (1), (3), (36), (37): Xaa is C or S
  MOD_RES (14), (15), (16), (17), (18): Xaa is A or G
  MOD_RES (19), (20), (21), (22): Xaa is A or G or is absent
XKXSRVIMRHKRLXXXXXXXXXYYLISTASLAQPVXXP

SEQ ID NO: 4560 - protein, 39 aa, Artificial Sequence
  GFR-binding peptide
  MOD_RES (2), (4), (37), (38): Xaa is C or S
  MOD_RES (15), (16), (17), (18), (19): Xaa is A or G
  MOD_RES (20), (21), (22), (23): Xaa is A or G or is absent
SXKXSKVVMRHKRLXXXXXXXXXYYLISTASLDQPVXXP

SEQ ID NO: 4561 - protein, 38 aa, Artificial Sequence
  GFR-binding peptide
  MOD_RES (1), (33), (34): Xaa is C or S
XSRVVMNRHKRLIVNSSDDYYLVSTASLKTPAXXPKPV

SEQ ID NO: 4562 - protein, 37 aa, Artificial Sequence
  GFR-binding peptide
  MOD_RES (1), (35), (36): Xaa is C or S
  MOD_RES (13), (14), (15), (16), (17): Xaa is A or G
  MOD_RES (18), (19), (20), (21): Xaa is A or G or is absent
XAKVVMNYHYKLXXXXXXXXXKYLVSIPSLKTPAXXA

SEQ ID NO: 4563 - protein, 33 aa, Artificial Sequence
  GFR-binding peptide
  MOD_RES (11), (12), (13), (14), (15): Xaa is A or G
  MOD_RES (16), (17), (18), (19): Xaa is A or G or is absent
HDELTRHKRLXXXXXXXXXYYLVSTASLQVQTP

SEQ ID NO: 4564 - protein, 39 aa, Artificial Sequence
  GFR-binding peptide
  MOD_RES (1), (3): Xaa is C or S
XKXALHDELTRHKRLFIPKKRVIEYYLVSTASLQVQTPR

SEQ ID NO: 4565 - protein, 36 aa, Artificial Sequence
  GFR-binding peptide
  MOD_RES (34), (34): Xaa is C or S
  MOD_RES (12), (13), (14), (15), (16): Xaa is A or G
  MOD_RES (17), (18), (19), (20): Xaa is A or G or is absent
SRVVMNRHKRLXXXXXXXXXYYLVSTASLKTPAXTP

SEQ ID NO: 4566 - protein, 38 aa, Artificial Sequence
  GFR-binding peptide
  MOD_RES (1), (3), (36), (37): Xaa is C or S
  MOD_RES (14), (15), (16), (17), (18): Xaa is A or G
  MOD_RES (19), (20), (21), (22): Xaa is A or G or is absent
XKXSKVIMRYKKLXXXXXXXXXFYLISIANLDQSVXXP

SEQ ID NO: 4567 - protein, 37 aa, Artificial Sequence
  GFR-binding peptide
  MOD_RES (1), (3), (37): Xaa is C or S
  MOD_RES (15), (16), (17), (18), (19): Xaa is A or G
  MOD_RES (20), (21), (22), (23): Xaa is A or G or is absent
XGXSRVVMNRHKRLXXXXXXXXXYYLVSTASLKTPAX

SEQ ID NO: 4568 - protein, 36 aa, Artificial Sequence
  GFR-binding peptide
  MOD_RES (2), (33), (34): Xaa is C or S
KXSKVIMRHKRLIKPTKGIYYLISTASLDQSVXXPS

SEQ ID NO: 4569 - protein, 37 aa, Artificial Sequence
  GFR-binding peptide
  MOD_RES (2), (2): Xaa is C or S
  MOD_RES (15), (16), (17), (18), (19): Xaa is A or G
  MOD_RES (20), (21), (22), (23): Xaa is A or G or is absent
KXALHDELTQYNKLXXXXXXXXXLYLVSIASLQVQTP

SEQ ID NO: 4570 - protein, 39 aa, Artificial Sequence
  GFR-binding peptide
  MOD_RES (1), (3), (35), (36): Xaa is C or S
XGXGEVVMERYKKLVVKDYEDFYLMSIANLETPVXXAKP

SEQ ID NO: 4571 - protein, 43 aa, Artificial Sequence
  GFR-binding peptide
  MOD_RES (2), (4), (38), (39): Xaa is C or S
  MOD_RES (16), (17), (18), (19), (20): Xaa is A or G
  MOD_RES (21), (22), (23), (24): Xaa is A or G or is absent
HXGXAKVVMNQYNKLXXXXXXXXXLYLVSIASLKTPAXXAKPV

SEQ ID NO: 4572 - protein, 37 aa, Artificial Sequence
  GFR-binding peptide
  MOD_RES (2), (4): Xaa is C or S
  MOD_RES (16), (17), (18), (19), (20): Xaa is A or G
  MOD_RES (21), (22), (23), (24): Xaa is A or G or is absent
RXGXGEVVMEYHYKLXXXXXXXXXKYLMSIPSLETPV

SEQ ID NO: 4573 - protein, 37 aa, Artificial Sequence
  GFR-binding peptide
  MOD_RES (34), (35): Xaa is C or S
  MOD_RES (12), (13), (14), (15), (16): Xaa is A or G
  MOD_RES (17), (18), (19), (20): Xaa is A or G or is absent
SRVVMNRHKRLXXXXXXXXXYYLVSTASLKTPAXXPK

SEQ ID NO: 4574 - protein, 41 aa, Artificial Sequence
  GFR-binding peptide
  MOD_RES (1), (3), (40): Xaa is C or S
  MOD_RES (16), (17), (18), (19), (20): Xaa is A or G
  MOD_RES (21), (22), (23), (24): Xaa is A or G or is absent
XKXALHDELTRYKKLXXXXXXXXXFYLVSIANLQVQTPRXQ

SEQ ID NO: 4575 - protein, 41 aa, Artificial Sequence
  GFR-binding peptide
  MOD_RES (1), (3), (35), (36): Xaa is C or S
XGXGEVVMDYHYKLVVKENEDKYLMSIPSLETPVXXAKPIK

SEQ ID NO: 4576 - protein, 40 aa, Artificial Sequence
  GFR-binding peptide
  MOD_RES (2), (4), (38): Xaa is C or S
  MOD_RES (16), (17), (18), (19), (20): Xaa is A or G
  MOD_RES (21), (22), (23), (24): Xaa is A or G or is absent
HXGXSRVVMNRYKKLXXXXXXXXXFYLVSIANLKTPAXTP

SEQ ID NO: 4577 - protein, 39 aa, Artificial Sequence
  GFR-binding peptide
  MOD_RES (35), (35): Xaa is C or S
  MOD_RES (11), (12), (13), (14), (15): Xaa is A or G
  MOD_RES (16), (17), (18), (19): Xaa is A or G or is absent
HDELTRHKRLXXXXXXXXXYYLVSTASLQVQTPRXQVNR

SEQ ID NO: 4578 - protein, 40 aa, Artificial Sequence
  GFR-binding peptide
  MOD_RES (1), (3), (36), (37): Xaa is C or S
  MOD_RES (14), (15), (16), (17), (18): Xaa is A or G
  MOD_RES (19), (20), (21), (22): Xaa is A or G or is absent
XKXSKVVMQYNKLXXXXXXXXXLYLISIASLDQPVXXPSA

SEQ ID NO: 4579 - protein, 38 aa, Artificial Sequence
  GFR-binding peptide
  MOD_RES (32), (33): Xaa is C or S
GEVVMDYHYKLVVKENEDKYLMSIPSLETPVXXAKPIK

SEQ ID NO: 4580 - protein, 32 aa, Artificial Sequence
  GFR-binding peptide
  MOD_RES (11), (12), (13), (14), (15): Xaa is A or G
  MOD_RES (16), (17), (18), (19): Xaa is A or G or is absent
SRVIMRHKRLXXXXXXXXXYYLISTASLAQPV

SEQ ID NO: 4581 - protein, 37 aa, Artificial Sequence
  GFR-binding peptide
  MOD_RES (36), (36): Xaa is C or S
  MOD_RES (12), (13), (14), (15), (16): Xaa is A or G
  MOD_RES (17), (18), (19), (20): Xaa is A or G or is absent
LHDELTRHKRLXXXXXXXXXYYLVSTASLQVQTPRXQ

SEQ ID NO: 4582 - protein, 35 aa, Artificial Sequence
  GFR-binding peptide
  MOD_RES (34), (34): Xaa is C or S
  MOD_RES (12), (13), (14), (15), (16): Xaa is A or G
  MOD_RES (17), (18), (19), (20): Xaa is A or G or is absent
SRVVMNRYKKLXXXXXXXXXFYLVSIANLKTPAXT

SEQ ID NO: 4583 - protein, 37 aa, Artificial Sequence
  GFR-binding peptide
  MOD_RES (2), (35), (36): Xaa is C or S
  MOD_RES (13), (14), (15), (16), (17): Xaa is A or G
  MOD_RES (18), (19), (20), (21): Xaa is A or G or is absent
KXSRVIMQYNKLXXXXXXXXXLYLISIASLAQPVXXP

SEQ ID NO: 4584 - protein, 35 aa, Artificial Sequence
  GFR-binding peptide
  MOD_RES (2), (2): Xaa is C or S
  MOD_RES (14), (15), (16), (17), (18): Xaa is A or G
  MOD_RES (19), (20), (21), (22): Xaa is A or G or is absent
GXARVVMNRHKRLXXXXXXXXXYYLVSTASLQTPA

SEQ ID NO: 4585 - protein, 31 aa, Artificial Sequence
  GFR-binding peptide
SRVVMNQYNKLIVNSSDDLYLVSIASLKTPA

SEQ ID NO: 4586 - protein, 41 aa, Artificial Sequence
  GFR-binding peptide
  MOD_RES (37), (37): Xaa is C or S
ALHDELTRYKKLFIPKKRVIEFYLVSIANLQVQTPRXQVNR

SEQ ID NO: 4587 - protein, 38 aa, Artificial Sequence
  GFR-binding peptide
  MOD_RES (2), (4), (38): Xaa is C or S
  MOD_RES (16), (17), (18), (19), (20): Xaa is A or G
  MOD_RES (21), (22), (23), (24): Xaa is A or G or is absent
RXGXGEVVMERHKRLXXXXXXXXXYYLMSTASLETPVX

SEQ ID NO: 4588 - protein, 35 aa, Artificial Sequence
  GFR-binding peptide
  MOD_RES (2), (35): Xaa is C or S
  MOD_RES (13), (14), (15), (16), (17): Xaa is A or G
  MOD_RES (18), (19), (20), (21): Xaa is A or G or is absent
KXSKVIMRYKKLXXXXXXXXXFYLISIANLDQSVX

SEQ ID NO: 4589 - protein, 37 aa, Artificial Sequence
  GFR-binding peptide
  MOD_RES (1), (35), (36): Xaa is C or S
  MOD_RES (13), (14), (15), (16), (17): Xaa is A or G
  MOD_RES (18), (19), (20), (21): Xaa is A or G or is absent
XGEVVMDRYKKLXXXXXXXXXFYLMSIANLETPVXXA

SEQ ID NO: 4590 - protein, 36 aa, Artificial Sequence
  GFR-binding peptide
ALHDELTYHYKLFIPKKRVIEKYLVSIPSLQVQTPR

SEQ ID NO: 4591 - protein, 33 aa, Artificial Sequence
  GFR-binding peptide
  MOD_RES (31), (31): Xaa is C or S
RVVMNQYNKLIVNSSDDLYLVSIASLKTPAXTP

SEQ ID NO: 4592 - protein, 33 aa, Artificial Sequence
  GFR-binding peptide
  MOD_RES (1), (32), (33): Xaa is C or S
XSRVIMQYNKLVKPKRGVLYLISIASLAQPVXX

SEQ ID NO: 4593 - protein, 37 aa, Artificial Sequence
  GFR-binding peptide
  MOD_RES (2), (36), (37): Xaa is C or S
  MOD_RES (14), (15), (16), (17), (18): Xaa is A or G
  MOD_RES (19), (20), (21), (22): Xaa is A or G or is absent
GXGEVVMERHKRLXXXXXXXXXYYLMSTASLETPVXX

SEQ ID NO: 4594 - protein, 37 aa, Artificial Sequence
  GFR-binding peptide
  MOD_RES (1), (35), (36): Xaa is C or S
  MOD_RES (13), (14), (15), (16), (17): Xaa is A or G
  MOD_RES (18), (19), (20), (21): Xaa is A or G or is absent
XARVVMNYHYKLXXXXXXXXXKYLVSIPSLQTPAXXP

SEQ ID NO: 4595 - protein, 41 aa, Artificial Sequence
  GFR-binding peptide
  MOD_RES (1), (35), (36): Xaa is C or S
  MOD_RES (13), (14), (15), (16), (17): Xaa is A or G
  MOD_RES (18), (19), (20), (21): Xaa is A or G or is absent
XARVVMNQYNKLXXXXXXXXXLYLVSIASLQTPAXXPKPVT

SEQ ID NO: 4596 - protein, 36 aa, Artificial Sequence
  GFR-binding peptide
  MOD_RES (1), (33), (34): Xaa is C or S
XARVVMNQYNKLIVNSSDDLYLVSIASLQTPAXXPK

SEQ ID NO: 4597 - protein, 36 aa, Artificial Sequence
  GFR-binding peptide
  MOD_RES (33), (34): Xaa is C or S
  MOD_RES (11), (12), (13), (14), (15): Xaa is A or G
  MOD_RES (16), (17), (18), (19): Xaa is A or G or is absent
KVVMNRYKKLXXXXXXXXXFYLVSIANLKTPAXXAK

SEQ ID NO: 4598 - protein, 40 aa, Artificial Sequence
  GFR-binding peptide
  MOD_RES (1), (3), (35), (36): Xaa is C or S
XGXARVVMNRHKRLIVNSSDDYYLVSTASLQTPAXXPKPV

SEQ ID NO: 4599 - protein, 34 aa, Artificial Sequence
  GFR-binding peptide
  MOD_RES (1), (3), (34): Xaa is C or S
XKXSRVIMRHKRLVKPKRGVYYLISTASLAQPVX

SEQ ID NO: 4600 - protein, 38 aa, Artificial Sequence
  GFR-binding peptide
  MOD_RES (2), (4), (36), (37): Xaa is C or S
HXGXSRVVMNRYKKLIVNSSDDFYLVSIANLKTPAXXP

SEQ ID NO: 4601 - protein, 34 aa, Artificial Sequence
  GFR-binding peptide
  MOD_RES (1), (3), (34): Xaa is C or S
XKXSKVVMRYKKLVKPTRGVFYLISIANLDQPVX

SEQ ID NO: 4602 - protein, 38 aa, Artificial Sequence
  GFR-binding peptide
  MOD_RES (1), (35), (36): Xaa is C or S
  MOD_RES (13), (14), (15), (16), (17): Xaa is A or G
  MOD_RES (18), (19), (20), (21): Xaa is A or G or is absent
XSRVVMNYHYKLXXXXXXXXXKYLVSIPSLKTPAXXPK

SEQ ID NO: 4603 - protein, 36 aa, Artificial Sequence
  GFR-binding peptide
  MOD_RES (36), (36): Xaa is C or S
  MOD_RES (12), (13), (14), (15), (16): Xaa is A or G
  MOD_RES (17), (18), (19), (20): Xaa is A or G or is absent
LHDELTQYNKLXXXXXXXXXLYLVSIASLQVQTPRX

SEQ ID NO: 4604 - protein, 37 aa, Artificial Sequence
  GFR-binding peptide
  MOD_RES (37), (37): Xaa is C or S
  MOD_RES (13), (14), (15), (16), (17): Xaa is A or G
  MOD_RES (18), (19), (20), (21): Xaa is A or G or is absent
ALHDELTQYNKLXXXXXXXXXLYLVSIASLQVQTPRX

SEQ ID NO: 4605 - protein, 42 aa, Artificial Sequence
  GFR-binding peptide
  MOD_RES (2), (4), (38): Xaa is C or S
  MOD_RES (16), (17), (18), (19), (20): Xaa is A or G
  MOD_RES (21), (22), (23), (24): Xaa is A or G or is absent
HXGXSRVVMNRHKRLXXXXXXXXXYYLVSTASLKTPAXTPKT

SEQ ID NO: 4606 - protein, 39 aa, Artificial Sequence
  GFR-binding peptide
  MOD_RES (2), (34), (35): Xaa is C or S
GXARVVMNRYKKLIVNSSDDFYLVSIANLQTPAXXPKPV

SEQ ID NO: 4607 - protein, 36 aa, Artificial Sequence
  GFR-binding peptide
  MOD_RES (2), (4), (35), (36): Xaa is C or S
SXKXSKVIMYHYKLIKPTKGIKYLISIPSLDQSVXX

SEQ ID NO: 4608 - protein, 39 aa, Artificial Sequence
  GFR-binding peptide
  MOD_RES (1), (3), (35): Xaa is C or S
XGXSRVVMNRYKKLIVNSSDDFYLVSIANLKTPAXTPKT

SEQ ID NO: 4609 - protein, 38 aa, Artificial Sequence
  GFR-binding peptide
  MOD_RES (1), (36), (37): Xaa is C or S
  MOD_RES (14), (15), (16), (17), (18): Xaa is A or G
  MOD_RES (19), (20), (21), (22): Xaa is A or G or is absent
XEAVSMGEQYNKLXXXXXXXXXLYLVSIASLKTPVXXA

SEQ ID NO: 4610 - protein, 34 aa, Artificial Sequence
  GFR-binding peptide
  MOD_RES (31), (32): Xaa is C or S
KVVMNYHYKLIVNNSSDKYLVSIPSLKTPAXXAK

SEQ ID NO: 4611 - protein, 38 aa, Artificial Sequence
  GFR-binding peptide
  MOD_RES (36), (36): Xaa is C or S
LHDELTRHKRLFIPKKRVIEYYLVSTASLQVQTPRXQV

SEQ ID NO: 4612 - protein, 38 aa, Artificial Sequence
  GFR-binding peptide
  MOD_RES (1), (3): Xaa is C or S
XKXALHDELTRYKKLFIPKKRVIEFYLVSIANLQVQTP

SEQ ID NO: 4613 - protein, 40 aa, Artificial Sequence
  GFR-binding peptide
  MOD_RES (1), (3), (35): Xaa is C or S
XGXSRVVMNRHKRLIVNSSDDYYLVSTASLKTPAXTPKTV

SEQ ID NO: 4614 - protein, 36 aa, Artificial Sequence
  GFR-binding peptide
  MOD_RES (1), (3), (35), (36): Xaa is C or S
XGXSRVVMNQYNKLIVNSSDDLYLVSIASLKTPAXX

SEQ ID NO: 4615 - protein, 43 aa, Artificial Sequence
  GFR-binding peptide
  MOD_RES (1), (3), (37): Xaa is C or S
  MOD_RES (15), (16), (17), (18), (19): Xaa is A or G
  MOD_RES (20), (21), (22), (23): Xaa is A or G or is absent
XGXSRVVMNYHYKLXXXXXXXXXKYLVSIPSLKTPAXTPKTVH

SEQ ID NO: 4616 - protein, 37 aa, Artificial Sequence
  GFR-binding peptide
  MOD_RES (2), (34), (35): Xaa is C or S
GXAKVVMNQYNKLIVNNSSDLYLVSIASLKTPAXXAK

SEQ ID NO: 4617 - protein, 41 aa, Artificial Sequence
  GFR-binding peptide
  MOD_RES (1), (3), (37), (38): Xaa is C or S
  MOD_RES (15), (16), (17), (18), (19): Xaa is A or G
  MOD_RES (20), (21), (22), (23): Xaa is A or G or is absent
XGXAKVVMNRHKRLXXXXXXXXXYYLVSTASLKTPAXXAKP

SEQ ID NO: 4618 - protein, 40 aa, Artificial Sequence
  GFR-binding peptide
  MOD_RES (1), (35), (36): Xaa is C or S
  MOD_RES (13), (14), (15), (16), (17): Xaa is A or G
  MOD_RES (18), (19), (20), (21): Xaa is A or G or is absent
XAKVVMNYHYKLXXXXXXXXXKYLVSIPSLKTPAXXAKPV

SEQ ID NO: 4619 - protein, 33 aa, Artificial Sequence
  GFR-binding peptide
  MOD_RES (1), (33): Xaa is C or S
XARVVMNYHYKLIVNSSDDKYLVSIPSLQTPAX

SEQ ID NO: 4620 - protein, 38 aa, Artificial Sequence
  GFR-binding peptide
  MOD_RES (1), (3), (36), (37): Xaa is C or S
XGXEAVSMGEQYNKLTPVGMDDLYLVSIASLKTPVXXA

SEQ ID NO: 4621 - protein, 31 aa, Artificial Sequence
  GFR-binding peptide
  MOD_RES (1), (1): Xaa is C or S
XSKVIMRHKRLIKPTKGIYYLISTASLDQSV

SEQ ID NO: 4622 - protein, 43 aa, Artificial Sequence
  GFR-binding peptide
  MOD_RES (2), (39): Xaa is C or S
  MOD_RES (15), (16), (17), (18), (19): Xaa is A or G
  MOD_RES (20), (21), (22), (23): Xaa is A or G or is absent
KXALHDELTRYKKLXXXXXXXXXFYLVSIANLQVQTPRXQVNR

SEQ ID NO: 4623 - protein, 41 aa, Artificial Sequence
  GFR-binding peptide
  MOD_RES (2), (4), (38), (39): Xaa is C or S
  MOD_RES (16), (17), (18), (19), (20): Xaa is A or G
  MOD_RES (21), (22), (23), (24): Xaa is A or G or is absent
HXGXSRVVMNYHYKLXXXXXXXXXKYLVSIPSLKTPAXXPK

SEQ ID NO: 4624 - protein, 37 aa, Artificial Sequence
  GFR-binding peptide
  MOD_RES (1), (3), (35): Xaa is C or S
XGXSRVVMNQYNKLIVNSSDDLYLVSIASLKTPAXTP

SEQ ID NO: 4625 - protein, 36 aa, Artificial Sequence
  GFR-binding peptide
  MOD_RES (1), (32), (33): Xaa is C or S
XSRVIMQYNKLVKPKRGVLYLISIASLAQPVXXPAA

SEQ ID NO: 4626 - protein, 34 aa, Artificial Sequence
  GFR-binding peptide
  MOD_RES (31), (32): Xaa is C or S
KVVMNQYNKLIVNNSSDLYLVSIASLKTPAXXAK

SEQ ID NO: 4627 - protein, 33 aa, Artificial Sequence
  GFR-binding peptide
  MOD_RES (1), (3): Xaa is C or S
XKXSKVIMRYKKLIKPTKGIFYLISIANLDQSV

SEQ ID NO: 4628 - protein, 41 aa, Artificial Sequence
  GFR-binding peptide
  MOD_RES (2), (4), (41): Xaa is C or S
  MOD_RES (17), (18), (19), (20), (21): Xaa is A or G
  MOD_RES (22), (23), (24), (25): Xaa is A or G or is absent
EXKXALHDELTRHKRLXXXXXXXXXYYLVSTASLQVQTPRX

SEQ ID NO: 4629 - protein, 37 aa, Artificial Sequence
  GFR-binding peptide
  MOD_RES (2), (34), (35): Xaa is C or S
GXARVVMNQYNKLIVNSSDDLYLVSIASLQTPAXXPK

SEQ ID NO: 4630 - protein, 39 aa, Artificial Sequence
  GFR-binding peptide
  MOD_RES (1), (34), (35): Xaa is C or S
  MOD_RES (12), (13), (14), (15), (16): Xaa is A or G
  MOD_RES (17), (18), (19), (20): Xaa is A or G or is absent
XSKVVMRYKKLXXXXXXXXXFYLISIANLDQPVXXPSAS

SEQ ID NO: 4631 - protein, 37 aa, Artificial Sequence
  GFR-binding peptide
  MOD_RES (1), (3), (37): Xaa is C or S
  MOD_RES (15), (16), (17), (18), (19): Xaa is A or G
  MOD_RES (20), (21), (22), (23): Xaa is A or G or is absent
XGXAKVVMNQYNKLXXXXXXXXXLYLVSIASLKTPAX

SEQ ID NO: 4632 - protein, 42 aa, Artificial Sequence
  GFR-binding peptide
  MOD_RES (1), (3), (37), (38): Xaa is C or S
  MOD_RES (15), (16), (17), (18), (19): Xaa is A or G
  MOD_RES (20), (21), (22), (23): Xaa is A or G or is absent
XGXGEVVMDRYKKLXXXXXXXXXFYLMSIANLETPVXXAKPI

SEQ ID NO: 4633 - protein, 38 aa, Artificial Sequence
  GFR-binding peptide
  MOD_RES (2), (4), (36), (37): Xaa is C or S
HXGXSRVVMNQYNKLIVNSSDDLYLVSIASLKTPAXXP

SEQ ID NO: 4634 - protein, 36 aa, Artificial Sequence
  GFR-binding peptide
  MOD_RES (1), (3): Xaa is C or S
  MOD_RES (15), (16), (17), (18), (19): Xaa is A or G
  MOD_RES (20), (21), (22), (23): Xaa is A or G or is absent
XGXAKVVMNRHKRLXXXXXXXXXYYLVSTASLKTPA

SEQ ID NO: 4635 - protein, 35 aa, Artificial Sequence
  GFR-binding peptide
  MOD_RES (32), (33): Xaa is C or S
SRVVMNYHYKLIVNSSDDKYLVSIPSLKTPAXXPK

SEQ ID NO: 4636 - protein, 38 aa, Artificial Sequence
  GFR-binding peptide
  MOD_RES (33), (33): Xaa is C or S
  MOD_RES (11), (12), (13), (14), (15): Xaa is A or G
  MOD_RES (16), (17), (18), (19): Xaa is A or G or is absent
RVVMNYHYKLXXXXXXXXXKYLVSIPSLKTPAXTPKTV

SEQ ID NO: 4637 - protein, 39 aa, Artificial Sequence
  GFR-binding peptide
  MOD_RES (2), (4), (36), (37): Xaa is C or S
RXGXGEVVMEQYNKLVVKDYEDLYLMSIASLETPVXXAK

SEQ ID NO: 4638 - protein, 34 aa, Artificial Sequence
  GFR-binding peptide
  MOD_RES (2), (2): Xaa is C or S
GXEAVSMGEQYNKLTPVGMDDLYLVSIASLKTPV

SEQ ID NO: 4639 - protein, 41 aa, Artificial Sequence
  GFR-binding peptide
  MOD_RES (2), (4), (36), (37): Xaa is C or S
HXGXAKVVMNRYKKLIVNNSSDFYLVSIANLKTPAXXAKPV

SEQ ID NO: 4640 - protein, 33 aa, Artificial Sequence
  GFR-binding peptide
  MOD_RES (2), (2): Xaa is C or S
GXGEVVMDYHYKLVVKENEDKYLMSIPSLETPV

SEQ ID NO: 4641 - protein, 38 aa, Artificial Sequence
  GFR-binding peptide
  MOD_RES (1), (3), (34), (35): Xaa is C or S
XKXSKVVMRYKKLVKPTRGVFYLISIANLDQPVXXPSA

SEQ ID NO: 4642 - protein, 39 aa, Artificial Sequence
  GFR-binding peptide
  MOD_RES (34), (35): Xaa is C or S
  MOD_RES (12), (13), (14), (15), (16): Xaa is A or G
  MOD_RES (17), (18), (19), (20): Xaa is A or G or is absent
ARVVMNRHKRLXXXXXXXXXYYLVSTASLQTPAXXPKPV

SEQ ID NO: 4643 - protein, 39 aa, Artificial Sequence
  GFR-binding peptide
  MOD_RES (2), (35), (36): Xaa is C or S
  MOD_RES (13), (14), (15), (16), (17): Xaa is A or G
  MOD_RES (18), (19), (20), (21): Xaa is A or G or is absent
KXSKVIMRYKKLXXXXXXXXXFYLISIANLDQSVXXPSA

SEQ ID NO: 4644 - protein, 40 aa, Artificial Sequence
  GFR-binding peptide
  MOD_RES (1), (3), (35), (36): Xaa is C or S
XGXGEVVMEYHYKLVVKDYEDKYLMSIPSLETPVXXAKPI

SEQ ID NO: 4645 - protein, 38 aa, Artificial Sequence
  GFR-binding peptide
  MOD_RES (1), (34), (35): Xaa is C or S
  MOD_RES (12), (13), (14), (15), (16): Xaa is A or G
  MOD_RES (17), (18), (19), (20): Xaa is A or G or is absent
XSKVVMQYNKLXXXXXXXXXLYLISIASLDQPVXXPSA

SEQ ID NO: 4646 - protein, 36 aa, Artificial Sequence
  GFR-binding peptide
  MOD_RES (1), (33), (34): Xaa is C or S
XSRVVMNRHKRLIVNSSDDYYLVSTASLKTPAXXPK

SEQ ID NO: 4647 - protein, 43 aa, Artificial Sequence
  GFR-binding peptide
  MOD_RES (1), (3), (40): Xaa is C or S
XKXALHDELTQYNKLFIPKKRVIELYLVSIASLQVQTPRXQVN

SEQ ID NO: 4648 - protein, 41 aa, Artificial Sequence
  GFR-binding peptide
  MOD_RES (2), (4), (37), (38): Xaa is C or S
  MOD_RES (15), (16), (17), (18), (19): Xaa is A or G
  MOD_RES (20), (21), (22), (23): Xaa is A or G or is absent
SXKXSKVIMRHKRLXXXXXXXXXYYLISTASLDQSVXXPSA

SEQ ID NO: 4649 - protein, 38 aa, Artificial Sequence
  GFR-binding peptide
  MOD_RES (1), (3), (34), (35): Xaa is C or S
XKXSKVIMRYKKLIKPTKGIFYLISIANLDQSVXXPSA

SEQ ID NO: 4650 - protein, 37 aa, Artificial Sequence
  GFR-binding peptide
  MOD_RES (2), (33), (34): Xaa is C or S
KXSRVIMRHKRLVKPKRGVYYLISTASLAQPVXXPAA

SEQ ID NO: 4651 - protein, 37 aa, Artificial Sequence
  GFR-binding peptide
  MOD_RES (32), (32): Xaa is C or S
SRVVMNYHYKLIVNSSDDKYLVSIPSLKTPAXTPKTV

SEQ ID NO: 4652 - protein, 35 aa, Artificial Sequence
  GFR-binding peptide
  MOD_RES (33), (34): Xaa is C or S
  MOD_RES (11), (12), (13), (14), (15): Xaa is A or G
  MOD_RES (16), (17), (18), (19): Xaa is A or G or is absent
RVVMNRYKKLXXXXXXXXXFYLVSIANLQTPAXXP

SEQ ID NO: 4653 - protein, 39 aa, Artificial Sequence
  GFR-binding peptide
  MOD_RES (1), (3), (34), (35): Xaa is C or S
XKXSKVVMRHKRLVKPTRGVYYLISTASLDQPVXXPSAS

SEQ ID NO: 4654 - protein, 37 aa, Artificial Sequence
  GFR-binding peptide
  MOD_RES (1), (3), (35): Xaa is C or S
XGXSRVVMNYHYKLIVNSSDDKYLVSIPSLKTPAXTP

SEQ ID NO: 4655 - protein, 31 aa, Artificial Sequence
  GFR-binding peptide
  MOD_RES (1), (1): Xaa is C or S
XSKVVMYHYKLVKPTRGVKYLISIPSLDQPV

SEQ ID NO: 4656 - protein, 38 aa, Artificial Sequence
  GFR-binding peptide
  MOD_RES (1), (34), (35): Xaa is C or S
  MOD_RES (12), (13), (14), (15), (16): Xaa is A or G
  MOD_RES (17), (18), (19), (20): Xaa is A or G or is absent
XSKVVMRHKRLXXXXXXXXXYYLISTASLDQPVXXPSA

SEQ ID NO: 4657 - protein, 32 aa, Artificial Sequence
  GFR-binding peptide
  MOD_RES (32), (32): Xaa is C or S
GEVVMDRHKRLVVKENEDYYLMSTASLETPVX

SEQ ID NO: 4658 - protein, 34 aa, Artificial Sequence
  GFR-binding peptide
  MOD_RES (34), (34): Xaa is C or S
  MOD_RES (12), (13), (14), (15), (16): Xaa is A or G
  MOD_RES (17), (18), (19), (20): Xaa is A or G or is absent
GEVVMERYKKLXXXXXXXXXFYLMSIANLETPVX

SEQ ID NO: 4659 - protein, 39 aa, Artificial Sequence
  GFR-binding peptide
  MOD_RES (2), (37), (38): Xaa is C or S
  MOD_RES (15), (16), (17), (18), (19): Xaa is A or G
  MOD_RES (20), (21), (22), (23): Xaa is A or G or is absent
GXEAVSMGERYKKLXXXXXXXXXFYLVSIANLKTPVXXA

SEQ ID NO: 4660 - protein, 38 aa, Artificial Sequence
  GFR-binding peptide
  MOD_RES (1), (38): Xaa is C or S
  MOD_RES (14), (15), (16), (17), (18): Xaa is A or G
  MOD_RES (19), (20), (21), (22): Xaa is A or G or is absent
XALHDELTYHYKLXXXXXXXXXKYLVSIPSLQVQTPRX

SEQ ID NO: 4661 - protein, 43 aa, Artificial Sequence
  GFR-binding peptide
  MOD_RES (2), (4), (38): Xaa is C or S
  MOD_RES (16), (17), (18), (19), (20): Xaa is A or G
  MOD_RES (21), (22), (23), (24): Xaa is A or G or is absent
HXGXSRVVMNYHYKLXXXXXXXXXKYLVSIPSLKTPAXTPKTV

SEQ ID NO: 4662 - protein, 31 aa, Artificial Sequence
  GFR-binding peptide
GEVVMDRYKKLVVKENEDFYLMSIANLETPV

SEQ ID NO: 4663 - protein, 35 aa, Artificial Sequence
  GFR-binding peptide
  MOD_RES (33), (34): Xaa is C or S
  MOD_RES (11), (12), (13), (14), (15): Xaa is A or G
  MOD_RES (16), (17), (18), (19): Xaa is A or G or is absent
EVVMDQYNKLXXXXXXXXXLYLMSIASLETPVXXA

SEQ ID NO: 4664 - protein, 38 aa, Artificial Sequence
  GFR-binding peptide
  MOD_RES (2), (36), (37): Xaa is C or S
  MOD_RES (14), (15), (16), (17), (18): Xaa is A or G
  MOD_RES (19), (20), (21), (22): Xaa is A or G or is absent
GXAKVVMNYHYKLXXXXXXXXXKYLVSIPSLKTPAXXA

SEQ ID NO: 4665 - protein, 40 aa, Artificial Sequence
  GFR-binding peptide
  MOD_RES (34), (35): Xaa is C or S
  MOD_RES (12), (13), (14), (15), (16): Xaa is A or G
  MOD_RES (17), (18), (19), (20): Xaa is A or G or is absent
ARVVMNYHYKLXXXXXXXXXKYLVSIPSLQTPAXXPKPVT

SEQ ID NO: 4666 - protein, 40 aa, Artificial Sequence
  GFR-binding peptide
  MOD_RES (1), (3), (35), (36): Xaa is C or S
XGXARVVMNQYNKLIVNSSDDLYLVSIASLQTPAXXPKPV

SEQ ID NO: 4667 - protein, 38 aa, Artificial Sequence
  GFR-binding peptide
  MOD_RES (33), (34): Xaa is C or S
  MOD_RES (11), (12), (13), (14), (15): Xaa is A or G
  MOD_RES (16), (17), (18), (19): Xaa is A or G or is absent
SKVVMRYKKLXXXXXXXXXFYLISIANLDQPVXXPSAS

SEQ ID NO: 4668 - protein, 39 aa, Artificial Sequence
  GFR-binding peptide
  MOD_RES (1), (3), (34), (35): Xaa is C or S
XKXSKVIMRHKRLIKPTKGIYYLISTASLDQSVXXPSAS

SEQ ID NO: 4669 - protein, 37 aa, Artificial Sequence
  GFR-binding peptide
  MOD_RES (32), (33): Xaa is C or S
ARVVMNRHKRLIVNSSDDYYLVSTASLQTPAXXPKPV

SEQ ID NO: 4670 - protein, 37 aa, Artificial Sequence
  GFR-binding peptide
  MOD_RES (2), (36), (37): Xaa is C or S
  MOD_RES (14), (15), (16), (17), (18): Xaa is A or G
  MOD_RES (19), (20), (21), (22): Xaa is A or G or is absent
GXARVVMNYHYKLXXXXXXXXXKYLVSIPSLQTPAXX

SEQ ID NO: 4671 - protein, 35 aa, Artificial Sequence
  GFR-binding peptide
  MOD_RES (33), (34): Xaa is C or S
  MOD_RES (11), (12), (13), (14), (15): Xaa is A or G
  MOD_RES (16), (17), (18), (19): Xaa is A or G or is absent
KVVMNRHKRLXXXXXXXXXYYLVSTASLKTPAXXA

SEQ ID NO: 4672 - protein, 42 aa, Artificial Sequence
  GFR-binding peptide
  MOD_RES (1), (3), (37): Xaa is C or S
  MOD_RES (15), (16), (17), (18), (19): Xaa is A or G
  MOD_RES (20), (21), (22), (23): Xaa is A or G or is absent
XGXSRVVMNRYKKLXXXXXXXXXFYLVSIANLKTPAXTPKTV

SEQ ID NO: 4673 - protein, 32 aa, Artificial Sequence
  GFR-binding peptide
  MOD_RES (11), (12), (13), (14), (15): Xaa is A or G
  MOD_RES (16), (17), (18), (19): Xaa is A or G or is absent
EVVMERHKRLXXXXXXXXXYYLMSTASLETPV

SEQ ID NO: 4674 - protein, 33 aa, Artificial Sequence
  GFR-binding peptide
  MOD_RES (1), (1): Xaa is C or S
  MOD_RES (12), (13), (14), (15), (16): Xaa is A or G
  MOD_RES (17), (18), (19), (20): Xaa is A or G or is absent
XSKVIMQYNKLXXXXXXXXXLYLISIASLDQSV

SEQ ID NO: 4675 - protein, 38 aa, Artificial Sequence
  GFR-binding peptide
  MOD_RES (35), (35): Xaa is C or S
  MOD_RES (11), (12), (13), (14), (15): Xaa is A or G
  MOD_RES (16), (17), (18), (19): Xaa is A or G or is absent
HDELTRHKRLXXXXXXXXXYYLVSTASLQVQTPRXQVN

SEQ ID NO: 4676 - protein, 38 aa, Artificial Sequence
  GFR-binding peptide
  MOD_RES (34), (34): Xaa is C or S
  MOD_RES (12), (13), (14), (15), (16): Xaa is A or G
  MOD_RES (17), (18), (19), (20): Xaa is A or G or is absent
SRVVMNRYKKLXXXXXXXXXFYLVSIANLKTPAXTPKT

SEQ ID NO: 4677 - protein, 37 aa, Artificial Sequence
  GFR-binding peptide
  MOD_RES (37), (37): Xaa is C or S
  MOD_RES (13), (14), (15), (16), (17): Xaa is A or G
  MOD_RES (18), (19), (20), (21): Xaa is A or G or is absent
ALHDELTRHKRLXXXXXXXXXYYLVSTASLQVQTPRX

SEQ ID NO: 4678 - protein, 36 aa, Artificial Sequence
  GFR-binding peptide
  MOD_RES (1), (33): Xaa is C or S
XSRVVMNRYKKLIVNSSDDFYLVSIANLKTPAXTPK

SEQ ID NO: 4679 - protein, 40 aa, Artificial Sequence
  GFR-binding peptide
  MOD_RES (2), (34), (35): Xaa is C or S
GXSRVVMNRHKRLIVNSSDDYYLVSTASLKTPAXXPKPVY

SEQ ID NO: 4680 - protein, 40 aa, Artificial Sequence
  GFR-binding peptide
  MOD_RES (1), (3), (40): Xaa is C or S
XKXALHDELTRYKKLFIPKKRVIEFYLVSIANLQVQTPRX

SEQ ID NO: 4681 - protein, 37 aa, Artificial Sequence
  GFR-binding peptide
  MOD_RES (1), (3), (34), (35): Xaa is C or S
XKXSRVIMRHKRLVKPKRGVYYLISTASLAQPVXXPA

SEQ ID NO: 4682 - protein, 36 aa, Artificial Sequence
  GFR-binding peptide
  MOD_RES (2), (33), (34): Xaa is C or S
KXSKVIMRYKKLIKPTKGIFYLISIANLDQSVXXPS

SEQ ID NO: 4683 - protein, 42 aa, Artificial Sequence
  GFR-binding peptide
  MOD_RES (1), (38): Xaa is C or S
XALHDELTRHKRLFIPKKRVIEYYLVSTASLQVQTPRXQVNR

SEQ ID NO: 4684 - protein, 36 aa, Artificial Sequence
  GFR-binding peptide
  MOD_RES (2), (2): Xaa is C or S
KXALHDELTYHYKLFIPKKRVIEKYLVSIPSLQVQT

SEQ ID NO: 4685 - protein, 32 aa, Artificial Sequence
  GFR-binding peptide
  MOD_RES (1), (32): Xaa is C or S
XSKVVMRYKKLVKPTRGVFYLISIANLDQPVX

SEQ ID NO: 4686 - protein, 36 aa, Artificial Sequence
  GFR-binding peptide
  MOD_RES (2), (35), (36): Xaa is C or S
  MOD_RES (13), (14), (15), (16), (17): Xaa is A or G
  MOD_RES (18), (19), (20), (21): Xaa is A or G or is absent
KXSKVVMRYKKLXXXXXXXXXFYLISIANLDQPVXX

SEQ ID NO: 4687 - protein, 38 aa, Artificial Sequence
  GFR-binding peptide
  MOD_RES (1), (3), (37), (38): Xaa is C or S
  MOD_RES (15), (16), (17), (18), (19): Xaa is A or G
  MOD_RES (20), (21), (22), (23): Xaa is A or G or is absent
XGXARVVMNRHKRLXXXXXXXXXYYLVSTASLQTPAXX

SEQ ID NO: 4688 - protein, 32 aa, Artificial Sequence
  GFR-binding peptide
  MOD_RES (31), (32): Xaa is C or S
RVVMNRYKKLIVNSSDDFYLVSIANLKTPAXX

SEQ ID NO: 4689 - protein, 38 aa, Artificial Sequence
  GFR-binding peptide
  MOD_RES (1), (33), (34): Xaa is C or S
XSRVVMNRYKKLIVNSSDDFYLVSIANLKTPAXXPKPV

SEQ ID NO: 4690 - protein, 36 aa, Artificial Sequence
  GFR-binding peptide
  MOD_RES (2), (36): Xaa is C or S
  MOD_RES (14), (15), (16), (17), (18): Xaa is A or G
  MOD_RES (19), (20), (21), (22): Xaa is A or G or is absent
GXSRVVMNYHYKLXXXXXXXXXKYLVSIPSLKTPAX

SEQ ID NO: 4691 - protein, 36 aa, Artificial Sequence
  GFR-binding peptide
  MOD_RES (1), (35), (36): Xaa is C or S
  MOD_RES (13), (14), (15), (16), (17): Xaa is A or G
  MOD_RES (18), (19), (20), (21): Xaa is A or G or is absent
XSRVVMNRYKKLXXXXXXXXXFYLVSIANLKTPAXX

SEQ ID NO: 4692 - protein, 41 aa, Artificial Sequence
  GFR-binding peptide
  MOD_RES (1), (3), (36), (37): Xaa is C or S
XGXEAVSMGEYHYKLTPVGMDDKYLVSIPSLKTPVXXAKGV

SEQ ID NO: 4693 - protein, 34 aa, Artificial Sequence
  GFR-binding peptide
  MOD_RES (13), (14), (15), (16), (17): Xaa is A or G
  MOD_RES (18), (19), (20), (21): Xaa is A or G or is absent
ALHDELTYHYKLXXXXXXXXXKYLVSIPSLQVQT

SEQ ID NO: 4694 - protein, 41 aa, Artificial Sequence
  GFR-binding peptide
  MOD_RES (2), (36), (37): Xaa is C or S
  MOD_RES (14), (15), (16), (17), (18): Xaa is A or G
  MOD_RES (19), (20), (21), (22): Xaa is A or G or is absent
GXAKVVMNYHYKLXXXXXXXXXKYLVSIPSLKTPAXXAKPV

SEQ ID NO: 4695 - protein, 34 aa, Artificial Sequence
  GFR-binding peptide
  MOD_RES (33), (34): Xaa is C or S
  MOD_RES (11), (12), (13), (14), (15): Xaa is A or G
  MOD_RES (16), (17), (18), (19): Xaa is A or G or is absent
SRVIMRHKRLXXXXXXXXXYYLISTASLAQPVXX

SEQ ID NO: 4696 - protein, 36 aa, Artificial Sequence
  GFR-binding peptide
  MOD_RES (1), (34), (35): Xaa is C or S
  MOD_RES (12), (13), (14), (15), (16): Xaa is A or G
  MOD_RES (17), (18), (19), (20): Xaa is A or G or is absent
XSRVIMQYNKLXXXXXXXXXLYLISIASLAQPVXXP

SEQ ID NO: 4697 - protein, 33 aa, Artificial Sequence
  GFR-binding peptide
  MOD_RES (33), (33): Xaa is C or S
  MOD_RES (11), (12), (13), (14), (15): Xaa is A or G
  MOD_RES (16), (17), (18), (19): Xaa is A or G or is absent
RVVMNRYKKLXXXXXXXXXFYLVSIANLKTPAX

SEQ ID NO: 4698 - protein, 39 aa, Artificial Sequence
  GFR-binding peptide
  MOD_RES (1), (33), (34): Xaa is C or S
XAKVVMNRYKKLIVNNSSDFYLVSIANLKTPAXXAKPVA

SEQ ID NO: 4699 - protein, 34 aa, Artificial Sequence
  GFR-binding peptide
  MOD_RES (2), (33), (34): Xaa is C or S
KXSKVVMRYKKLVKPTRGVFYLISIANLDQPVXX

SEQ ID NO: 4700 - protein, 37 aa, Artificial Sequence
  GFR-binding peptide
  MOD_RES (2), (36), (37): Xaa is C or S
  MOD_RES (14), (15), (16), (17), (18): Xaa is A or G
  MOD_RES (19), (20), (21), (22): Xaa is A or G or is absent
GXARVVMNQYNKLXXXXXXXXXLYLVSIASLQTPAXX

SEQ ID NO: 4701 - protein, 38 aa, Artificial Sequence
  GFR-binding peptide
  MOD_RES (1), (33), (34): Xaa is C or S
XARVVMNQYNKLIVNSSDDLYLVSIASLQTPAXXPKPV

SEQ ID NO: 4702 - protein, 36 aa, Artificial Sequence
  GFR-binding peptide
  MOD_RES (1), (33), (34): Xaa is C or S
XGEVVMEQYNKLVVKDYEDLYLMSIASLETPVXXAK

SEQ ID NO: 4703 - protein, 43 aa, Artificial Sequence
  GFR-binding peptide
  MOD_RES (1), (3), (37), (38): Xaa is C or S
  MOD_RES (15), (16), (17), (18), (19): Xaa is A or G
  MOD_RES (20), (21), (22), (23): Xaa is A or G or is absent
XGXSRVVMNRYKKLXXXXXXXXXFYLVSIANLKTPAXXPKPVY

SEQ ID NO: 4704 - protein, 31 aa, Artificial Sequence
  GFR-binding peptide
  MOD_RES (31), (31): Xaa is C or S
EVVMDQYNKLVVKENEDLYLMSIASLETPVX

SEQ ID NO: 4705 - protein, 34 aa, Artificial Sequence
  GFR-binding peptide
  MOD_RES (2), (34): Xaa is C or S
GXGEVVMDQYNKLVVKENEDLYLMSIASLETPVX

SEQ ID NO: 4706 - protein, 36 aa, Artificial Sequence
  GFR-binding peptide
  MOD_RES (1), (34), (35): Xaa is C or S
  MOD_RES (12), (13), (14), (15), (16): Xaa is A or G
  MOD_RES (17), (18), (19), (20): Xaa is A or G or is absent
XSRVIMRHKRLXXXXXXXXXYYLISTASLAQPVXXP

SEQ ID NO: 4707 - protein, 40 aa, Artificial Sequence
  GFR-binding peptide
  MOD_RES (2), (4), (38): Xaa is C or S
  MOD_RES (16), (17), (18), (19), (20): Xaa is A or G
  MOD_RES (21), (22), (23), (24): Xaa is A or G or is absent
HXGXSRVVMNRHKRLXXXXXXXXXYYLVSTASLKTPAXTP

SEQ ID NO: 4708 - protein, 36 aa, Artificial Sequence
  GFR-binding peptide
  MOD_RES (1), (35), (36): Xaa is C or S
  MOD_RES (13), (14), (15), (16), (17): Xaa is A or G
  MOD_RES (18), (19), (20), (21): Xaa is A or G or is absent
XGEVVMERYKKLXXXXXXXXXFYLMSIANLETPVXX

SEQ ID NO: 4709 - protein, 39 aa, Artificial Sequence
  GFR-binding peptide
  MOD_RES (2), (4), (36), (37): Xaa is C or S
HXGXAKVVMNQYNKLIVNNSSDLYLVSIASLKTPAXXAK

SEQ ID NO: 4710 - protein, 35 aa, Artificial Sequence
  GFR-binding peptide
  MOD_RES (1), (3), (34), (35): Xaa is C or S
XKXSKVVMQYNKLVKPTRGVLYLISIASLDQPVXX

SEQ ID NO: 4711 - protein, 38 aa, Artificial Sequence
  GFR-binding peptide
  MOD_RES (2), (4), (35), (36): Xaa is C or S
SXKXSRVIMRYKKLVKPKRGVFYLISIANLAQPVXXPA

SEQ ID NO: 4712 - protein, 34 aa, Artificial Sequence
  GFR-binding peptide
  MOD_RES (1), (33), (34): Xaa is C or S
XAKVVMNRYKKLIVNNSSDFYLVSIANLKTPAXX

SEQ ID NO: 4713 - protein, 35 aa, Artificial Sequence
  GFR-binding peptide
  MOD_RES (2), (2): Xaa is C or S
  MOD_RES (14), (15), (16), (17), (18): Xaa is A or G
  MOD_RES (19), (20), (21), (22): Xaa is A or G or is absent
GXAKVVMNRHKRLXXXXXXXXXYYLVSTASLKTPA

SEQ ID NO: 4714 - protein, 36 aa, Artificial Sequence
  GFR-binding peptide
  MOD_RES (2), (2): Xaa is C or S
  MOD_RES (15), (16), (17), (18), (19): Xaa is A or G
  MOD_RES (20), (21), (22), (23): Xaa is A or G or is absent
KXALHDELTRYKKLXXXXXXXXXFYLVSIANLQVQT

SEQ ID NO: 4715 - protein, 39 aa, Artificial Sequence
  GFR-binding peptide
  MOD_RES (1), (38): Xaa is C or S
  MOD_RES (14), (15), (16), (17), (18): Xaa is A or G
  MOD_RES (19), (20), (21), (22): Xaa is A or G or is absent
XALHDELTQYNKLXXXXXXXXXLYLVSIASLQVQTPRXQ

SEQ ID NO: 4716 - protein, 38 aa, Artificial Sequence
  GFR-binding peptide
  MOD_RES (2), (37), (38): Xaa is C or S
  MOD_RES (15), (16), (17), (18), (19): Xaa is A or G
  MOD_RES (20), (21), (22), (23): Xaa is A or G or is absent
GXEAVSMGERYKKLXXXXXXXXXFYLVSIANLKTPVXX

SEQ ID NO: 4717 - protein, 44 aa, Artificial Sequence
  GFR-binding peptide
  MOD_RES (2), (4), (38): Xaa is C or S
  MOD_RES (16), (17), (18), (19), (20): Xaa is A or G
  MOD_RES (21), (22), (23), (24): Xaa is A or G or is absent
HXGXSRVVMNQYNKLXXXXXXXXXLYLVSIASLKTPAXTPKTVH

SEQ ID NO: 4718 - protein, 38 aa, Artificial Sequence
  GFR-binding peptide
  MOD_RES (37), (37): Xaa is C or S
  MOD_RES (13), (14), (15), (16), (17): Xaa is A or G
  MOD_RES (18), (19), (20), (21): Xaa is A or G or is absent
ALHDELTYHYKLXXXXXXXXXKYLVSIPSLQVQTPRXQ

SEQ ID NO: 4719 - protein, 36 aa, Artificial Sequence
  GFR-binding peptide
  MOD_RES (1), (3), (35), (36): Xaa is C or S
XGXGEVVMDRYKKLVVKENEDFYLMSIANLETPVXX

SEQ ID NO: 4720 - protein, 41 aa, Artificial Sequence
  GFR-binding peptide
  MOD_RES (1), (3), (37), (38): Xaa is C or S
  MOD_RES (15), (16), (17), (18), (19): Xaa is A or G
  MOD_RES (20), (21), (22), (23): Xaa is A or G or is absent
XGXGEVVMERYKKLXXXXXXXXXFYLMSIANLETPVXXAKP

SEQ ID NO: 4721 - protein, 40 aa, Artificial Sequence
  GFR-binding peptide
  MOD_RES (37), (37): Xaa is C or S
  MOD_RES (13), (14), (15), (16), (17): Xaa is A or G
  MOD_RES (18), (19), (20), (21): Xaa is A or G or is absent
ALHDELTYHYKLXXXXXXXXXKYLVSIPSLQVQTPRXQVN

SEQ ID NO: 4722 - protein, 38 aa, Artificial Sequence
  GFR-binding peptide
  MOD_RES (2), (4), (38): Xaa is C or S
  MOD_RES (16), (17), (18), (19), (20): Xaa is A or G
  MOD_RES (21), (22), (23), (24): Xaa is A or G or is absent
HXGXSRVVMNRYKKLXXXXXXXXXFYLVSIANLKTPAX

SEQ ID NO: 4723 - protein, 37 aa, Artificial Sequence
  GFR-binding peptide
  MOD_RES (1), (32), (33): Xaa is C or S
XSRVIMRYKKLVKPKRGVFYLISIANLAQPVXXPAAS

SEQ ID NO: 4724 - protein, 33 aa, Artificial Sequence
  GFR-binding peptide
  MOD_RES (33), (33): Xaa is C or S
  MOD_RES (11), (12), (13), (14), (15): Xaa is A or G
  MOD_RES (16), (17), (18), (19): Xaa is A or G or is absent
KVVMNRYKKLXXXXXXXXXFYLVSIANLKTPAX

SEQ ID NO: 4725 - protein, 34 aa, Artificial Sequence
  GFR-binding peptide
  MOD_RES (33), (34): Xaa is C or S
  MOD_RES (11), (12), (13), (14), (15): Xaa is A or G
  MOD_RES (16), (17), (18), (19): Xaa is A or G or is absent
EVVMERHKRLXXXXXXXXXYYLMSTASLETPVXX

SEQ ID NO: 4726 - protein, 37 aa, Artificial Sequence
  GFR-binding peptide
  MOD_RES (35), (35): Xaa is C or S
HDELTQYNKLFIPKKRVIELYLVSIASLQVQTPRXQV

SEQ ID NO: 4727 - protein, 41 aa, Artificial Sequence
  GFR-binding peptide
  MOD_RES (2), (4), (38), (39): Xaa is C or S
  MOD_RES (16), (17), (18), (19), (20): Xaa is A or G
  MOD_RES (21), (22), (23), (24): Xaa is A or G or is absent
HXGXSRVVMNQYNKLXXXXXXXXXLYLVSIASLKTPAXXPK

SEQ ID NO: 4728 - protein, 43 aa, Artificial Sequence
  GFR-binding peptide
  MOD_RES (2), (4), (37), (38): Xaa is C or S
  MOD_RES (15), (16), (17), (18), (19): Xaa is A or G
  MOD_RES (20), (21), (22), (23): Xaa is A or G or is absent
SXKXSKVVMRHKRLXXXXXXXXXYYLISTASLDQPVXXPSASA

SEQ ID NO: 4729 - protein, 37 aa, Artificial Sequence
  GFR-binding peptide
  MOD_RES (35), (35): Xaa is C or S
HDELTRHKRLFIPKKRVIEYYLVSTASLQVQTPRXQV

SEQ ID NO: 4730 - protein, 39 aa, Artificial Sequence
  GFR-binding peptide
  MOD_RES (1), (3), (35), (36): Xaa is C or S
XGXSRVVMNRHKRLIVNSSDDYYLVSTASLKTPAXXPKP

SEQ ID NO: 4731 - protein, 37 aa, Artificial Sequence
  GFR-binding peptide
  MOD_RES (32), (33): Xaa is C or S
SRVVMNQYNKLIVNSSDDLYLVSIASLKTPAXXPKPV

SEQ ID NO: 4732 - protein, 33 aa, Artificial Sequence
  GFR-binding peptide
  MOD_RES (1), (1): Xaa is C or S
  MOD_RES (12), (13), (14), (15), (16): Xaa is A or G
  MOD_RES (17), (18), (19), (20): Xaa is A or G or is absent
XSKVIMRHKRLXXXXXXXXXYYLISTASLDQSV

SEQ ID NO: 4733 - protein, 38 aa, Artificial Sequence
  GFR-binding peptide
  MOD_RES (2), (4), (37), (38): Xaa is C or S
  MOD_RES (15), (16), (17), (18), (19): Xaa is A or G
  MOD_RES (20), (21), (22), (23): Xaa is A or G or is absent
SXKXSKVIMRYKKLXXXXXXXXXFYLISIANLDQSVXX

SEQ ID NO: 4734 - protein, 33 aa, Artificial Sequence
  GFR-binding peptide
  MOD_RES (31), (32): Xaa is C or S
EVVMDYHYKLVVKENEDKYLMSIPSLETPVXXA

SEQ ID NO: 4735 - protein, 32 aa, Artificial Sequence
  GFR-binding peptide
  MOD_RES (31), (32): Xaa is C or S
EVVMDRYKKLVVKENEDFYLMSIANLETPVXX

SEQ ID NO: 4736 - protein, 35 aa, Artificial Sequence
  GFR-binding peptide
  MOD_RES (1), (3): Xaa is C or S
XGXEAVSMGERHKRLTPVGMDDYYLVSTASLKTPV

SEQ ID NO: 4737 - protein, 34 aa, Artificial Sequence
  GFR-binding peptide
  MOD_RES (1), (3): Xaa is C or S
XGXARVVMNRYKKLIVNSSDDFYLVSIANLQTPA

SEQ ID NO: 4738 - protein, 34 aa, Artificial Sequence
  GFR-binding peptide
  MOD_RES (34), (34): Xaa is C or S
  MOD_RES (12), (13), (14), (15), (16): Xaa is A or G
  MOD_RES (17), (18), (19), (20): Xaa is A or G or is absent
ARVVMNRYKKLXXXXXXXXXFYLVSIANLQTPAX

SEQ ID NO: 4739 - protein, 41 aa, Artificial Sequence
  GFR-binding peptide
  MOD_RES (2), (36), (37): Xaa is C or S
  MOD_RES (14), (15), (16), (17), (18): Xaa is A or G
  MOD_RES (19), (20), (21), (22): Xaa is A or G or is absent
GXGEVVMEYHYKLXXXXXXXXXKYLMSIPSLETPVXXAKPI

SEQ ID NO: 4740 - protein, 40 aa, Artificial Sequence
  GFR-binding peptide
  MOD_RES (1), (3), (40): Xaa is C or S
  MOD_RES (16), (17), (18), (19), (20): Xaa is A or G
  MOD_RES (21), (22), (23), (24): Xaa is A or G or is absent
XKXALHDELTRHKRLXXXXXXXXXYYLVSTASLQVQTPRX

SEQ ID NO: 4741 - protein, 37 aa, Artificial Sequence
  GFR-binding peptide
  MOD_RES (1), (1): Xaa is C or S
XALHDELTRYKKLFIPKKRVIEFYLVSIANLQVQTPR

SEQ ID NO: 4742 - protein, 41 aa, Artificial Sequence
  GFR-binding peptide
  MOD_RES (1), (3), (36), (37): Xaa is C or S
  MOD_RES (14), (15), (16), (17), (18): Xaa is A or G
  MOD_RES (19), (20), (21), (22): Xaa is A or G or is absent
XKXSKVIMRHKRLXXXXXXXXXYYLISTASLDQSVXXPSAS

SEQ ID NO: 4743 - protein, 40 aa, Artificial Sequence
  GFR-binding peptide
  MOD_RES (1), (3), (34), (35): Xaa is C or S
XKXSKVVMYHYKLVKPTRGVKYLISIPSLDQPVXXPSASA

SEQ ID NO: 4744 - protein, 39 aa, Artificial Sequence
  GFR-binding peptide
  MOD_RES (2), (34), (35): Xaa is C or S
GXSRVVMNRYKKLIVNSSDDFYLVSIANLKTPAXXPKPV

SEQ ID NO: 4745 - protein, 33 aa, Artificial Sequence
  GFR-binding peptide
  MOD_RES (32), (33): Xaa is C or S
GEVVMDQYNKLVVKENEDLYLMSIASLETPVXX

SEQ ID NO: 4746 - protein, 41 aa, Artificial Sequence
  GFR-binding peptide
  MOD_RES (2), (4), (41): Xaa is C or S
EXKXALHDELTRYKKLFIPKKRVIEFYLVSIANLQVQTPRX

SEQ ID NO: 4747 - protein, 37 aa, Artificial Sequence
  GFR-binding peptide
  MOD_RES (2), (36), (37): Xaa is C or S
  MOD_RES (14), (15), (16), (17), (18): Xaa is A or G
  MOD_RES (19), (20), (21), (22): Xaa is A or G or is absent
GXGEVVMDRHKRLXXXXXXXXXYYLMSTASLETPVXX

SEQ ID NO: 4748 - protein, 33 aa, Artificial Sequence
  GFR-binding peptide
  MOD_RES (12), (13), (14), (15), (16): Xaa is A or G
  MOD_RES (17), (18), (19), (20): Xaa is A or G or is absent
LHDELTQYNKLXXXXXXXXXLYLVSIASLQVQT

SEQ ID NO: 4749 - protein, 39 aa, Artificial Sequence
  GFR-binding peptide
  MOD_RES (1), (35), (36): Xaa is C or S
  MOD_RES (13), (14), (15), (16), (17): Xaa is A or G
  MOD_RES (18), (19), (20), (21): Xaa is A or G or is absent
XGEVVMDRHKRLXXXXXXXXXYYLMSTASLETPVXXAKP

SEQ ID NO: 4750 - protein, 34 aa, Artificial Sequence
  GFR-binding peptide
  MOD_RES (33), (34): Xaa is C or S
  MOD_RES (11), (12), (13), (14), (15): Xaa is A or G
  MOD_RES (16), (17), (18), (19): Xaa is A or G or is absent
EVVMDYHYKLXXXXXXXXXKYLMSIPSLETPVXX

SEQ ID NO: 4751 - protein, 39 aa, Artificial Sequence
  GFR-binding peptide
  MOD_RES (1), (3), (37), (38): Xaa is C or S
  MOD_RES (15), (16), (17), (18), (19): Xaa is A or G
  MOD_RES (20), (21), (22), (23): Xaa is A or G or is absent
XGXGEVVMDRYKKLXXXXXXXXXFYLMSIANLETPVXXA

SEQ ID NO: 4752 - protein, 37 aa, Artificial Sequence
  GFR-binding peptide
  MOD_RES (31), (32): Xaa is C or S
SKVVMRYKKLVKPTRGVFYLISIANLDQPVXXPSASA

SEQ ID NO: 4753 - protein, 33 aa, Artificial Sequence
  GFR-binding peptide
  MOD_RES (33), (33): Xaa is C or S
  MOD_RES (11), (12), (13), (14), (15): Xaa is A or G
  MOD_RES (16), (17), (18), (19): Xaa is A or G or is absent
RVVMNRHKRLXXXXXXXXXYYLVSTASLQTPAX

SEQ ID NO: 4754 - protein, 35 aa, Artificial Sequence
  GFR-binding peptide
  MOD_RES (1), (3), (35): Xaa is C or S
XGXGEVVMEQYNKLVVKDYEDLYLMSIASLETPVX

SEQ ID NO: 4755 - protein, 33 aa, Artificial Sequence
  GFR-binding peptide
  MOD_RES (31), (32): Xaa is C or S
SKVIMRYKKLIKPTKGIFYLISIANLDQSVXXP

SEQ ID NO: 4756 - protein, 36 aa, Artificial Sequence
  GFR-binding peptide
  MOD_RES (2), (4): Xaa is C or S
  MOD_RES (15), (16), (17), (18), (19): Xaa is A or G
  MOD_RES (20), (21), (22), (23): Xaa is A or G or is absent
SXKXSKVIMYHYKLXXXXXXXXXKYLISIPSLDQSV

SEQ ID NO: 4757 - protein, 37 aa, Artificial Sequence
  GFR-binding peptide
  MOD_RES (1), (3), (35), (36): Xaa is C or S
XGXGEVVMERYKKLVVKDYEDFYLMSIANLETPVXXA

SEQ ID NO: 4758 - protein, 34 aa, Artificial Sequence
  GFR-binding peptide
  MOD_RES (1), (3): Xaa is C or S
XGXSRVVMNRYKKLIVNSSDDFYLVSIANLKTPA

SEQ ID NO: 4759 - protein, 38 aa, Artificial Sequence
  GFR-binding peptide
  MOD_RES (2), (2): Xaa is C or S
  MOD_RES (15), (16), (17), (18), (19): Xaa is A or G
  MOD_RES (20), (21), (22), (23): Xaa is A or G or is absent
KXALHDELTRYKKLXXXXXXXXXFYLVSIANLQVQTPR

SEQ ID NO: 4760 - protein, 32 aa, Artificial Sequence
  GFR-binding peptide
  MOD_RES (32), (32): Xaa is C or S
GEVVMEQYNKLVVKDYEDLYLMSIASLETPVX

SEQ ID NO: 4761 - protein, 34 aa, Artificial Sequence
  GFR-binding peptide
  MOD_RES (31), (32): Xaa is C or S
EVVMDRYKKLVVKENEDFYLMSIANLETPVXXAK

SEQ ID NO: 4762 - protein, 37 aa, Artificial Sequence
  GFR-binding peptide
  MOD_RES (1), (3), (37): Xaa is C or S
  MOD_RES (15), (16), (17), (18), (19): Xaa is A or G
  MOD_RES (20), (21), (22), (23): Xaa is A or G or is absent
XGXSRVVMNYHYKLXXXXXXXXXKYLVSIPSLKTPAX

SEQ ID NO: 4763 - protein, 38 aa, Artificial Sequence
  GFR-binding peptide
  MOD_RES (1), (3), (35), (36): Xaa is C or S
XGXARVVMNRHKRLIVNSSDDYYLVSTASLQTPAXXPK

SEQ ID NO: 4764 - protein, 37 aa, Artificial Sequence
  GFR-binding peptide
  MOD_RES (34), (35): Xaa is C or S
  MOD_RES (12), (13), (14), (15), (16): Xaa is A or G
  MOD_RES (17), (18), (19), (20): Xaa is A or G or is absent
AKVVMNYHYKLXXXXXXXXXKYLVSIPSLKTPAXXAK

SEQ ID NO: 4765 - protein, 39 aa, Artificial Sequence
  GFR-binding peptide
  MOD_RES (35), (35): Xaa is C or S
HDELTQYNKLFIPKKRVIELYLVSIASLQVQTPRXQVNR

SEQ ID NO: 4766 - protein, 35 aa, Artificial Sequence
  GFR-binding peptide
  MOD_RES (35), (35): Xaa is C or S
HDELTRHKRLFIPKKRVIEYYLVSTASLQVQTPRX

SEQ ID NO: 4767 - protein, 38 aa, Artificial Sequence
  GFR-binding peptide
  MOD_RES (32), (33): Xaa is C or S
SRVVMNYHYKLIVNSSDDKYLVSIPSLKTPAXXPKPVY

SEQ ID NO: 4768 - protein, 39 aa, Artificial Sequence
  GFR-binding peptide
  MOD_RES (2), (36): Xaa is C or S
  MOD_RES (14), (15), (16), (17), (18): Xaa is A or G
  MOD_RES (19), (20), (21), (22): Xaa is A or G or is absent
GXSRVVMNYHYKLXXXXXXXXXKYLVSIPSLKTPAXTPK

SEQ ID NO: 4769 - protein, 39 aa, Artificial Sequence
  GFR-binding peptide
  MOD_RES (34), (35): Xaa is C or S
  MOD_RES (12), (13), (14), (15), (16): Xaa is A or G
  MOD_RES (17), (18), (19), (20): Xaa is A or G or is absent
GEVVMERHKRLXXXXXXXXXYYLMSTASLETPVXXAKPI

SEQ ID NO: 4770 - protein, 33 aa, Artificial Sequence
  GFR-binding peptide
  MOD_RES (1), (3): Xaa is C or S
XKXSKVIMQYNKLIKPTKGILYLISIASLDQSV

SEQ ID NO: 4771 - protein, 40 aa, Artificial Sequence
  GFR-binding peptide
  MOD_RES (1), (3), (37), (38): Xaa is C or S
  MOD_RES (15), (16), (17), (18), (19): Xaa is A or G
  MOD_RES (20), (21), (22), (23): Xaa is A or G or is absent
XGXARVVMNQYNKLXXXXXXXXXLYLVSIASLQTPAXXPK

SEQ ID NO: 4772 - protein, 37 aa, Artificial Sequence
  GFR-binding peptide
  MOD_RES (34), (35): Xaa is C or S
  MOD_RES (12), (13), (14), (15), (16): Xaa is A or G
  MOD_RES (17), (18), (19), (20): Xaa is A or G or is absent
GEVVMEYHYKLXXXXXXXXXKYLMSIPSLETPVXXAK

SEQ ID NO: 4773 - protein, 39 aa, Artificial Sequence
  GFR-binding peptide
  MOD_RES (1), (3), (34), (35): Xaa is C or S
XKXSRVIMQYNKLVKPKRGVLYLISIASLAQPVXXPAAS

SEQ ID NO: 4774 - protein, 37 aa, Artificial Sequence
  GFR-binding peptide
  MOD_RES (1), (1): Xaa is C or S
  MOD_RES (14), (15), (16), (17), (18): Xaa is A or G
  MOD_RES (19), (20), (21), (22): Xaa is A or G or is absent
XALHDELTRHKRLXXXXXXXXXYYLVSTASLQVQTPR

SEQ ID NO: 4775 - protein, 33 aa, Artificial Sequence
  GFR-binding peptide
  MOD_RES (1), (3): Xaa is C or S
XKXSKVIMYHYKLIKPTKGIKYLISIPSLDQSV

SEQ ID NO: 4776 - protein, 41 aa, Artificial Sequence
  GFR-binding peptide
  MOD_RES (1), (3), (35), (36): Xaa is C or S
XGXSRVVMNRHKRLIVNSSDDYYLVSTASLKTPAXXPKPVY

SEQ ID NO: 4777 - protein, 40 aa, Artificial Sequence
  GFR-binding peptide
  MOD_RES (2), (4), (35), (36): Xaa is C or S
SXKXSRVIMRYKKLVKPKRGVFYLISIANLAQPVXXPAAS

SEQ ID NO: 4778 - protein, 41 aa, Artificial Sequence
  GFR-binding peptide
  MOD_RES (1), (3), (36), (37): Xaa is C or S
  MOD_RES (14), (15), (16), (17), (18): Xaa is A or G
  MOD_RES (19), (20), (21), (22): Xaa is A or G or is absent
XKXSRVIMRHKRLXXXXXXXXXYYLISTASLAQPVXXPAAS

SEQ ID NO: 4779 - protein, 39 aa, Artificial Sequence
  GFR-binding peptide
  MOD_RES (1), (3), (35), (36): Xaa is C or S
XGXGEVVMDQYNKLVVKENEDLYLMSIASLETPVXXAKP

SEQ ID NO: 4780 - protein, 35 aa, Artificial Sequence
  GFR-binding peptide
  MOD_RES (32), (32): Xaa is C or S
SRVVMNYHYKLIVNSSDDKYLVSIPSLKTPAXTPK

SEQ ID NO: 4781 - protein, 36 aa, Artificial Sequence
  GFR-binding peptide
  MOD_RES (2), (4): Xaa is C or S
RXGXEAVSMGERHKRLTPVGMDDYYLVSTASLKTPV

SEQ ID NO: 4782 - protein, 42 aa, Artificial Sequence
  GFR-binding peptide
  MOD_RES (2), (4), (41): Xaa is C or S
  MOD_RES (17), (18), (19), (20), (21): Xaa is A or G
  MOD_RES (22), (23), (24), (25): Xaa is A or G or is absent
EXKXALHDELTRHKRLXXXXXXXXXYYLVSTASLQVQTPRXQ

SEQ ID NO: 4783 - protein, 33 aa, Artificial Sequence
  GFR-binding peptide
  MOD_RES (31), (32): Xaa is C or S
EVVMDQYNKLVVKENEDLYLMSIASLETPVXXA

SEQ ID NO: 4784 - protein, 41 aa, Artificial Sequence
  GFR-binding peptide
  MOD_RES (2), (4), (38), (39): Xaa is C or S
  MOD_RES (16), (17), (18), (19), (20): Xaa is A or G
  MOD_RES (21), (22), (23), (24): Xaa is A or G or is absent
RXGXGEVVMDRHKRLXXXXXXXXXYYLMSTASLETPVXXAK

SEQ ID NO: 4785 - protein, 38 aa, Artificial Sequence
  GFR-binding peptide
  MOD_RES (1), (33), (34): Xaa is C or S
XARVVMNRHKRLIVNSSDDYYLVSTASLQTPAXXPKPV

SEQ ID NO: 4786 - protein, 37 aa, Artificial Sequence
  GFR-binding peptide
  MOD_RES (1), (36), (37): Xaa is C or S
  MOD_RES (14), (15), (16), (17), (18): Xaa is A or G
  MOD_RES (19), (20), (21), (22): Xaa is A or G or is absent
XEAVSMGERHKRLXXXXXXXXXYYLVSTASLKTPVXX

SEQ ID NO: 4787 - protein, 30 aa, Artificial Sequence
  GFR-binding peptide
SKVVMRHKRLVKPTRGVYYLISTASLDQPV

SEQ ID NO: 4788 - protein, 36 aa, Artificial Sequence
  GFR-binding peptide
  MOD_RES (34), (34): Xaa is C or S
  MOD_RES (12), (13), (14), (15), (16): Xaa is A or G
  MOD_RES (17), (18), (19), (20): Xaa is A or G or is absent
SRVVMNYHYKLXXXXXXXXXKYLVSIPSLKTPAXTP

SEQ ID NO: 4789 - protein, 35 aa, Artificial Sequence
  GFR-binding peptide
  MOD_RES (1), (35): Xaa is C or S
  MOD_RES (13), (14), (15), (16), (17): Xaa is A or G
  MOD_RES (18), (19), (20), (21): Xaa is A or G or is absent
XGEVVMERYKKLXXXXXXXXXFYLMSIANLETPVX

SEQ ID NO: 4790 - protein, 35 aa, Artificial Sequence
  GFR-binding peptide
  MOD_RES (1), (34), (35): Xaa is C or S
  MOD_RES (12), (13), (14), (15), (16): Xaa is A or G
  MOD_RES (17), (18), (19), (20): Xaa is A or G or is absent
XSRVIMYHYKLXXXXXXXXXKYLISIPSLAQPVXX

SEQ ID NO: 4791 - protein, 36 aa, Artificial Sequence
  GFR-binding peptide
  MOD_RES (31), (32): Xaa is C or S
SKVIMRHKRLIKPTKGIYYLISTASLDQSVXXPSAS

SEQ ID NO: 4792 - protein, 42 aa, Artificial Sequence
  GFR-binding peptide
  MOD_RES (2), (4), (36), (37): Xaa is C or S
RXGXGEVVMDYHYKLVVKENEDKYLMSIPSLETPVXXAKPIK

SEQ ID NO: 4793 - protein, 39 aa, Artificial Sequence
  GFR-binding peptide
  MOD_RES (36), (36): Xaa is C or S
  MOD_RES (12), (13), (14), (15), (16): Xaa is A or G
  MOD_RES (17), (18), (19), (20): Xaa is A or G or is absent
LHDELTYHYKLXXXXXXXXXKYLVSIPSLQVQTPRXQVN

SEQ ID NO: 4794 - protein, 38 aa, Artificial Sequence
  GFR-binding peptide
  MOD_RES (2), (33), (34): Xaa is C or S
KXSRVIMRHKRLVKPKRGVYYLISTASLAQPVXXPAAS

SEQ ID NO: 4795 - protein, 38 aa, Artificial Sequence
  GFR-binding peptide
  MOD_RES (2), (4), (38): Xaa is C or S
  MOD_RES (16), (17), (18), (19), (20): Xaa is A or G
  MOD_RES (21), (22), (23), (24): Xaa is A or G or is absent
RXGXGEVVMEQYNKLXXXXXXXXXLYLMSIASLETPVX

SEQ ID NO: 4796 - protein, 38 aa, Artificial Sequence
  GFR-binding peptide
  MOD_RES (2), (33), (34): Xaa is C or S
KXSRVIMQYNKLVKPKRGVLYLISIASLAQPVXXPAAS

SEQ ID NO: 4797 - protein, 35 aa, Artificial Sequence
  GFR-binding peptide
  MOD_RES (31), (31): Xaa is C or S
RVVMNRHKRLIVNSSDDYYLVSTASLKTPAXTPKT

SEQ ID NO: 4798 - protein, 39 aa, Artificial Sequence
  GFR-binding peptide
  MOD_RES (34), (34): Xaa is C or S
  MOD_RES (12), (13), (14), (15), (16): Xaa is A or G
  MOD_RES (17), (18), (19), (20): Xaa is A or G or is absent
SRVVMNRYKKLXXXXXXXXXFYLVSIANLKTPAXTPKTV

SEQ ID NO: 4799 - protein, 36 aa, Artificial Sequence
  GFR-binding peptide
  MOD_RES (31), (32): Xaa is C or S
SRVIMQYNKLVKPKRGVLYLISIASLAQPVXXPAAS

SEQ ID NO: 4800 - protein, 33 aa, Artificial Sequence
  GFR-binding peptide
  MOD_RES (33), (33): Xaa is C or S
  MOD_RES (11), (12), (13), (14), (15): Xaa is A or G
  MOD_RES (16), (17), (18), (19): Xaa is A or G or is absent
RVVMNYHYKLXXXXXXXXXKYLVSIPSLQTPAX

SEQ ID NO: 4801 - protein, 40 aa, Artificial Sequence
  GFR-binding peptide
  MOD_RES (2), (4): Xaa is C or S
  MOD_RES (17), (18), (19), (20), (21): Xaa is A or G
  MOD_RES (22), (23), (24), (25): Xaa is A or G or is absent
EXKXALHDELTYHYKLXXXXXXXXXKYLVSIPSLQVQTPR

SEQ ID NO: 4802 - protein, 36 aa, Artificial Sequence
  GFR-binding peptide
  MOD_RES (1), (3), (35), (36): Xaa is C or S
XGXAKVVMNRHKRLIVNNSSDYYLVSTASLKTPAXX

SEQ ID NO: 4803 - protein, 33 aa, Artificial Sequence
  GFR-binding peptide
  MOD_RES (1), (3): Xaa is C or S
XKXSRVIMYHYKLVKPKRGVKYLISIPSLAQPV

SEQ ID NO: 4804 - protein, 37 aa, Artificial Sequence
  GFR-binding peptide
  MOD_RES (1), (3), (36), (37): Xaa is C or S
  MOD_RES (14), (15), (16), (17), (18): Xaa is A or G
  MOD_RES (19), (20), (21), (22): Xaa is A or G or is absent
XKXSKVVMRHKRLXXXXXXXXXYYLISTASLDQPVXX

SEQ ID NO: 4805 - protein, 34 aa, Artificial Sequence
  GFR-binding peptide
  MOD_RES (31), (32): Xaa is C or S
RVVMNQYNKLIVNSSDDLYLVSIASLQTPAXXPK

SEQ ID NO: 4806 - protein, 40 aa, Artificial Sequence
  GFR-binding peptide
  MOD_RES (2), (4), (39), (40): Xaa is C or S
  MOD_RES (17), (18), (19), (20), (21): Xaa is A or G
  MOD_RES (22), (23), (24), (25): Xaa is A or G or is absent
RXGXEAVSMGEYHYKLXXXXXXXXXKYLVSIPSLKTPVXX

SEQ ID NO: 4807 - protein, 39 aa, Artificial Sequence
  GFR-binding peptide
  MOD_RES (1), (3), (37), (38): Xaa is C or S
  MOD_RES (15), (16), (17), (18), (19): Xaa is A or G
  MOD_RES (20), (21), (22), (23): Xaa is A or G or is absent
XGXSRVVMNYHYKLXXXXXXXXXKYLVSIPSLKTPAXXP

SEQ ID NO: 4808 - protein, 41 aa, Artificial Sequence
  GFR-binding peptide
  MOD_RES (1), (3), (36), (37): Xaa is C or S
  MOD_RES (14), (15), (16), (17), (18): Xaa is A or G
  MOD_RES (19), (20), (21), (22): Xaa is A or G or is absent
XKXSKVVMYHYKLXXXXXXXXXKYLISIPSLDQPVXXPSAS

SEQ ID NO: 4809 - protein, 35 aa, Artificial Sequence
  GFR-binding peptide
  MOD_RES (35), (35): Xaa is C or S
HDELTQYNKLFIPKKRVIELYLVSIASLQVQTPRX

SEQ ID NO: 4810 - protein, 41 aa, Artificial Sequence
  GFR-binding peptide
  MOD_RES (2), (36), (37): Xaa is C or S
  MOD_RES (14), (15), (16), (17), (18): Xaa is A or G
  MOD_RES (19), (20), (21), (22): Xaa is A or G or is absent
GXARVVMNYHYKLXXXXXXXXXKYLVSIPSLQTPAXXPKPV

SEQ ID NO: 4811 - protein, 39 aa, Artificial Sequence
  GFR-binding peptide
  MOD_RES (2), (4), (35), (36): Xaa is C or S
SXKXSKVIMYHYKLIKPTKGIKYLISIPSLDQSVXXPSA

SEQ ID NO: 4812 - protein, 33 aa, Artificial Sequence
  GFR-binding peptide
  MOD_RES (1), (3): Xaa is C or S
XKXSRVIMRHKRLVKPKRGVYYLISTASLAQPV

SEQ ID NO: 4813 - protein, 37 aa, Artificial Sequence
  GFR-binding peptide
  MOD_RES (1), (3), (35), (36): Xaa is C or S
XGXAKVVMNRYKKLIVNNSSDFYLVSIANLKTPAXXA

SEQ ID NO: 4814 - protein, 37 aa, Artificial Sequence
  GFR-binding peptide
  MOD_RES (31), (32): Xaa is C or S
EVVMDQYNKLVVKENEDLYLMSIASLETPVXXAKPIK

SEQ ID NO: 4815 - protein, 32 aa, Artificial Sequence
  GFR-binding peptide
  MOD_RES (1), (1): Xaa is C or S
XARVVMNRHKRLIVNSSDDYYLVSTASLQTPA

SEQ ID NO: 4816 - protein, 40 aa, Artificial Sequence
  GFR-binding peptide
  MOD_RES (2), (37), (38): Xaa is C or S
  MOD_RES (15), (16), (17), (18), (19): Xaa is A or G
  MOD_RES (20), (21), (22), (23): Xaa is A or G or is absent
GXEAVSMGERHKRLXXXXXXXXXYYLVSTASLKTPVXXAK

SEQ ID NO: 4817 - protein, 33 aa, Artificial Sequence
  GFR-binding peptide
  MOD_RES (12), (13), (14), (15), (16): Xaa is A or G
  MOD_RES (17), (18), (19), (20): Xaa is A or G or is absent
GEVVMEYHYKLXXXXXXXXXKYLMSIPSLETPV

SEQ ID NO: 4818 - protein, 36 aa, Artificial Sequence
  GFR-binding peptide
  MOD_RES (33), (34): Xaa is C or S
  MOD_RES (11), (12), (13), (14), (15): Xaa is A or G
  MOD_RES (16), (17), (18), (19): Xaa is A or G or is absent
SKVIMQYNKLXXXXXXXXXLYLISIASLDQSVXXPS

SEQ ID NO: 4819 - protein, 37 aa, Artificial Sequence
  GFR-binding peptide
  MOD_RES (33), (34): Xaa is C or S
  MOD_RES (11), (12), (13), (14), (15): Xaa is A or G
  MOD_RES (16), (17), (18), (19): Xaa is A or G or is absent
RVVMNQYNKLXXXXXXXXXLYLVSIASLQTPAXXPKP

SEQ ID NO: 4820 - protein, 31 aa, Artificial Sequence
  GFR-binding peptide
  MOD_RES (31), (31): Xaa is C or S
SKVVMRHKRLVKPTRGVYYLISTASLDQPVX

SEQ ID NO: 4821 - protein, 40 aa, Artificial Sequence
  GFR-binding peptide
  MOD_RES (2), (4), (38): Xaa is C or S
  MOD_RES (16), (17), (18), (19), (20): Xaa is A or G
  MOD_RES (21), (22), (23), (24): Xaa is A or G or is absent
HXGXSRVVMNYHYKLXXXXXXXXXKYLVSIPSLKTPAXTP

SEQ ID NO: 4822 - protein, 37 aa, Artificial Sequence
  GFR-binding peptide
  MOD_RES (1), (33), (34): Xaa is C or S
XAKVVMNYHYKLIVNNSSDKYLVSIPSLKTPAXXAKP

SEQ ID NO: 4823 - protein, 36 aa, Artificial Sequence
  GFR-binding peptide
  MOD_RES (33), (34): Xaa is C or S
  MOD_RES (11), (12), (13), (14), (15): Xaa is A or G
  MOD_RES (16), (17), (18), (19): Xaa is A or G or is absent
RVVMNRHKRLXXXXXXXXXYYLVSTASLKTPAXXPK

SEQ ID NO: 4824 - protein, 40 aa, Artificial Sequence
  GFR-binding peptide
  MOD_RES (1), (36), (37): Xaa is C or S
  MOD_RES (14), (15), (16), (17), (18): Xaa is A or G
  MOD_RES (19), (20), (21), (22): Xaa is A or G or is absent
XEAVSMGERYKKLXXXXXXXXXFYLVSIANLKTPVXXAKG

SEQ ID NO: 4825 - protein, 37 aa, Artificial Sequence
  GFR-binding peptide
  MOD_RES (32), (33): Xaa is C or S
GEVVMDRYKKLVVKENEDFYLMSIANLETPVXXAKPI

SEQ ID NO: 4826 - protein, 39 aa, Artificial Sequence
  GFR-binding peptide
  MOD_RES (2), (35), (36): Xaa is C or S
GXEAVSMGERYKKLTPVGMDDFYLVSIANLKTPVXXAKG

SEQ ID NO: 4827 - protein, 33 aa, Artificial Sequence
  GFR-binding peptide
  MOD_RES (1), (32), (33): Xaa is C or S
XSKVIMRYKKLIKPTKGIFYLISIANLDQSVXX

SEQ ID NO: 4828 - protein, 37 aa, Artificial Sequence
  GFR-binding peptide
  MOD_RES (31), (32): Xaa is C or S
EVVMDYHYKLVVKENEDKYLMSIPSLETPVXXAKPIK

SEQ ID NO: 4829 - protein, 36 aa, Artificial Sequence
  GFR-binding peptide
  MOD_RES (2), (34), (35): Xaa is C or S
GXARVVMNRYKKLIVNSSDDFYLVSIANLQTPAXXP

SEQ ID NO: 4830 - protein, 39 aa, Artificial Sequence
  GFR-binding peptide
  MOD_RES (35), (36): Xaa is C or S
  MOD_RES (13), (14), (15), (16), (17): Xaa is A or G
  MOD_RES (18), (19), (20), (21): Xaa is A or G or is absent
EAVSMGERHKRLXXXXXXXXXYYLVSTASLKTPVXXAKG

SEQ ID NO: 4831 - protein, 33 aa, Artificial Sequence
  GFR-binding peptide
  MOD_RES (2), (33): Xaa is C or S
KXSRVIMQYNKLVKPKRGVLYLISIASLAQPVX

SEQ ID NO: 4832 - protein, 37 aa, Artificial Sequence
  GFR-binding peptide
  MOD_RES (32), (33): Xaa is C or S
GEVVMEQYNKLVVKDYEDLYLMSIASLETPVXXAKPI

SEQ ID NO: 4833 - protein, 40 aa, Artificial Sequence
  GFR-binding peptide
  MOD_RES (1), (3), (40): Xaa is C or S
  MOD_RES (16), (17), (18), (19), (20): Xaa is A or G
  MOD_RES (21), (22), (23), (24): Xaa is A or G or is absent
XKXALHDELTYHYKLXXXXXXXXXKYLVSIPSLQVQTPRX

SEQ ID NO: 4834 - protein, 39 aa, Artificial Sequence
  GFR-binding peptide
  MOD_RES (2), (4), (37), (38): Xaa is C or S
  MOD_RES (15), (16), (17), (18), (19): Xaa is A or G
  MOD_RES (20), (21), (22), (23): Xaa is A or G or is absent
SXKXSRVIMRHKRLXXXXXXXXXYYLISTASLAQPVXXP

SEQ ID NO: 4835 - protein, 35 aa, Artificial Sequence
  GFR-binding peptide
  MOD_RES (1), (3), (34), (35): Xaa is C or S
XKXSKVVMYHYKLVKPTRGVKYLISIPSLDQPVXX

SEQ ID NO: 4836 - protein, 41 aa, Artificial Sequence
  GFR-binding peptide
  MOD_RES (2), (4), (36), (37): Xaa is C or S
HXGXAKVVMNQYNKLIVNNSSDLYLVSIASLKTPAXXAKPV

SEQ ID NO: 4837 - protein, 38 aa, Artificial Sequence
  GFR-binding peptide
  MOD_RES (2), (4), (37), (38): Xaa is C or S
  MOD_RES (15), (16), (17), (18), (19): Xaa is A or G
  MOD_RES (20), (21), (22), (23): Xaa is A or G or is absent
SXKXSKVVMRYKKLXXXXXXXXXFYLISIANLDQPVXX

SEQ ID NO: 4838 - protein, 39 aa, Artificial Sequence
  GFR-binding peptide
  MOD_RES (1), (33), (34): Xaa is C or S
XARVVMNQYNKLIVNSSDDLYLVSIASLQTPAXXPKPVT

SEQ ID NO: 4839 - protein, 36 aa, Artificial Sequence
  GFR-binding peptide
  MOD_RES (31), (32): Xaa is C or S
SKVVMQYNKLVKPTRGVLYLISIASLDQPVXXPSAS

SEQ ID NO: 4840 - protein, 36 aa, Artificial Sequence
  GFR-binding peptide
  MOD_RES (35), (35): Xaa is C or S
  MOD_RES (11), (12), (13), (14), (15): Xaa is A or G
  MOD_RES (16), (17), (18), (19): Xaa is A or G or is absent
HDELTYHYKLXXXXXXXXXKYLVSIPSLQVQTPRXQ

SEQ ID NO: 4841 - protein, 37 aa, Artificial Sequence
  GFR-binding peptide
  MOD_RES (31), (32): Xaa is C or S
SRVIMQYNKLVKPKRGVLYLISIASLAQPVXXPAASA

SEQ ID NO: 4842 - protein, 36 aa, Artificial Sequence
  GFR-binding peptide
  MOD_RES (1), (32), (33): Xaa is C or S
XSRVIMRHKRLVKPKRGVYYLISTASLAQPVXXPAA

SEQ ID NO: 4843 - protein, 41 aa, Artificial Sequence
  GFR-binding peptide
  MOD_RES (2), (4), (41): Xaa is C or S
  MOD_RES (17), (18), (19), (20), (21): Xaa is A or G
  MOD_RES (22), (23), (24), (25): Xaa is A or G or is absent
EXKXALHDELTRYKKLXXXXXXXXXFYLVSIANLQVQTPRX

SEQ ID NO: 4844 - protein, 37 aa, Artificial Sequence
  GFR-binding peptide
  MOD_RES (33), (34): Xaa is C or S
  MOD_RES (11), (12), (13), (14), (15): Xaa is A or G
  MOD_RES (16), (17), (18), (19): Xaa is A or G or is absent
SRVIMQYNKLXXXXXXXXXLYLISIASLAQPVXXPAA

SEQ ID NO: 4845 - protein, 38 aa, Artificial Sequence
  GFR-binding peptide
  MOD_RES (2), (4), (36), (37): Xaa is C or S
RXGXGEVVMEYHYKLVVKDYEDKYLMSIPSLETPVXXA

SEQ ID NO: 4846 - protein, 43 aa, Artificial Sequence
  GFR-binding peptide
  MOD_RES (2), (4), (41): Xaa is C or S
EXKXALHDELTRHKRLFIPKKRVIEYYLVSTASLQVQTPRXQV

SEQ ID NO: 4847 - protein, 36 aa, Artificial Sequence
  GFR-binding peptide
  MOD_RES (33), (34): Xaa is C or S
  MOD_RES (11), (12), (13), (14), (15): Xaa is A or G
  MOD_RES (16), (17), (18), (19): Xaa is A or G or is absent
KVVMNYHYKLXXXXXXXXXKYLVSIPSLKTPAXXAK

SEQ ID NO: 4848 - protein, 37 aa, Artificial Sequence
  GFR-binding peptide
  MOD_RES (1), (35), (36): Xaa is C or S
  MOD_RES (13), (14), (15), (16), (17): Xaa is A or G
  MOD_RES (18), (19), (20), (21): Xaa is A or G or is absent
XAKVVMNQYNKLXXXXXXXXXLYLVSIASLKTPAXXA

SEQ ID NO: 4849 - protein, 39 aa, Artificial Sequence
  GFR-binding peptide
  MOD_RES (2), (4), (35), (36): Xaa is C or S
SXKXSKVVMQYNKLVKPTRGVLYLISIASLDQPVXXPSA

SEQ ID NO: 4850 - protein, 41 aa, Artificial Sequence
  GFR-binding peptide
  MOD_RES (2), (4), (41): Xaa is C or S
  MOD_RES (17), (18), (19), (20), (21): Xaa is A or G
  MOD_RES (22), (23), (24), (25): Xaa is A or G or is absent
EXKXALHDELTYHYKLXXXXXXXXXKYLVSIPSLQVQTPRX

SEQ ID NO: 4851 - protein, 44 aa, Artificial Sequence
  GFR-binding peptide
  MOD_RES (2), (4), (41): Xaa is C or S
  MOD_RES (17), (18), (19), (20), (21): Xaa is A or G
  MOD_RES (22), (23), (24), (25): Xaa is A or G or is absent
EXKXALHDELTRYKKLXXXXXXXXXFYLVSIANLQVQTPRXQVN

SEQ ID NO: 4852 - protein, 32 aa, Artificial Sequence
  GFR-binding peptide
  MOD_RES (32), (32): Xaa is C or S
GEVVMDRYKKLVVKENEDFYLMSIANLETPVX

SEQ ID NO: 4853 - protein, 39 aa, Artificial Sequence
  GFR-binding peptide
  MOD_RES (35), (36): Xaa is C or S
  MOD_RES (13), (14), (15), (16), (17): Xaa is A or G
  MOD_RES (18), (19), (20), (21): Xaa is A or G or is absent
EAVSMGEQYNKLXXXXXXXXXLYLVSIASLKTPVXXAKG

SEQ ID NO: 4854 - protein, 37 aa, Artificial Sequence
  GFR-binding peptide
  MOD_RES (1), (3), (35), (36): Xaa is C or S
XGXSRVVMNQYNKLIVNSSDDLYLVSIASLKTPAXXP

SEQ ID NO: 4855 - protein, 38 aa, Artificial Sequence
  GFR-binding peptide
  MOD_RES (1), (33), (34): Xaa is C or S
XGEVVMDQYNKLVVKENEDLYLMSIASLETPVXXAKPI

SEQ ID NO: 4856 - protein, 36 aa, Artificial Sequence
  GFR-binding peptide
  MOD_RES (33), (33): Xaa is C or S
  MOD_RES (11), (12), (13), (14), (15): Xaa is A or G
  MOD_RES (16), (17), (18), (19): Xaa is A or G or is absent
RVVMNYHYKLXXXXXXXXXKYLVSIPSLKTPAXTPK

SEQ ID NO: 4857 - protein, 38 aa, Artificial Sequence
  GFR-binding peptide
  MOD_RES (2), (34), (35): Xaa is C or S
GXAKVVMNQYNKLIVNNSSDLYLVSIASLKTPAXXAKP

SEQ ID NO: 4858 - protein, 37 aa, Artificial Sequence
  GFR-binding peptide
  MOD_RES (33), (34): Xaa is C or S
  MOD_RES (11), (12), (13), (14), (15): Xaa is A or G
  MOD_RES (16), (17), (18), (19): Xaa is A or G or is absent
SKVIMQYNKLXXXXXXXXXLYLISIASLDQSVXXPSA

SEQ ID NO: 4859 - protein, 36 aa, Artificial Sequence
  GFR-binding peptide
  MOD_RES (33), (34): Xaa is C or S
  MOD_RES (11), (12), (13), (14), (15): Xaa is A or G
  MOD_RES (16), (17), (18), (19): Xaa is A or G or is absent
SRVIMYHYKLXXXXXXXXXKYLISIPSLAQPVXXPA

SEQ ID NO: 4860 - protein, 41 aa, Artificial Sequence
  GFR-binding peptide
  MOD_RES (1), (35), (36): Xaa is C or S
  MOD_RES (13), (14), (15), (16), (17): Xaa is A or G
  MOD_RES (18), (19), (20), (21): Xaa is A or G or is absent
XGEVVMERYKKLXXXXXXXXXFYLMSIANLETPVXXAKPIS

SEQ ID NO: 4861 - protein, 41 aa, Artificial Sequence
  GFR-binding peptide
  MOD_RES (2), (4), (38), (39): Xaa is C or S
  MOD_RES (16), (17), (18), (19), (20): Xaa is A or G
  MOD_RES (21), (22), (23), (24): Xaa is A or G or is absent
RXGXGEVVMEQYNKLXXXXXXXXXLYLMSIASLETPVXXAK

SEQ ID NO: 4862 - protein, 32 aa, Artificial Sequence
  GFR-binding peptide
  MOD_RES (32), (32): Xaa is C or S
GEVVMERYKKLVVKDYEDFYLMSIANLETPVX

SEQ ID NO: 4863 - protein, 38 aa, Artificial Sequence
  GFR-binding peptide
  MOD_RES (2), (36), (37): Xaa is C or S
  MOD_RES (14), (15), (16), (17), (18): Xaa is A or G
  MOD_RES (19), (20), (21), (22): Xaa is A or G or is absent
GXGEVVMDRHKRLXXXXXXXXXYYLMSTASLETPVXXA

SEQ ID NO: 4864 - protein, 40 aa, Artificial Sequence
  GFR-binding peptide
  MOD_RES (2), (35), (36): Xaa is C or S
  MOD_RES (13), (14), (15), (16), (17): Xaa is A or G
  MOD_RES (18), (19), (20), (21): Xaa is A or G or is absent
KXSKVIMQYNKLXXXXXXXXXLYLISIASLDQSVXXPSAS

SEQ ID NO: 4865 - protein, 36 aa, Artificial Sequence
  GFR-binding peptide
  MOD_RES (1), (3), (34), (35): Xaa is C or S
XKXSKVIMQYNKLIKPTKGILYLISIASLDQSVXXP

SEQ ID NO: 4866 - protein, 39 aa, Artificial Sequence
  GFR-binding peptide
  MOD_RES (1), (35), (36): Xaa is C or S
  MOD_RES (13), (14), (15), (16), (17): Xaa is A or G
  MOD_RES (18), (19), (20), (21): Xaa is A or G or is absent
XGEVVMEYHYKLXXXXXXXXXKYLMSIPSLETPVXXAKP

SEQ ID NO: 4867 - protein, 37 aa, Artificial Sequence
  GFR-binding peptide
  MOD_RES (2), (4): Xaa is C or S
  MOD_RES (16), (17), (18), (19), (20): Xaa is A or G
  MOD_RES (21), (22), (23), (24): Xaa is A or G or is absent
RXGXGEVVMERYKKLXXXXXXXXXFYLMSIANLETPV

SEQ ID NO: 4868 - protein, 36 aa, Artificial Sequence
  GFR-binding peptide
  MOD_RES (1), (3), (34), (35): Xaa is C or S
XKXSRVIMQYNKLVKPKRGVLYLISIASLAQPVXXP

SEQ ID NO: 4869 - protein, 36 aa, Artificial Sequence
  GFR-binding peptide
  MOD_RES (1), (3), (36): Xaa is C or S
XGXEAVSMGERYKKLTPVGMDDFYLVSIANLKTPVX

SEQ ID NO: 4870 - protein, 40 aa, Artificial Sequence
  GFR-binding peptide
  MOD_RES (2), (34), (35): Xaa is C or S
GXGEVVMERYKKLVVKDYEDFYLMSIANLETPVXXAKPIS

SEQ ID NO: 4871 - protein, 39 aa, Artificial Sequence
  GFR-binding peptide
  MOD_RES (2), (4), (36), (37): Xaa is C or S
HXGXSRVVMNRYKKLIVNSSDDFYLVSIANLKTPAXXPK

SEQ ID NO: 4872 - protein, 37 aa, Artificial Sequence
  GFR-binding peptide
  MOD_RES (2), (36), (37): Xaa is C or S
  MOD_RES (14), (15), (16), (17), (18): Xaa is A or G
  MOD_RES (19), (20), (21), (22): Xaa is A or G or is absent
GXAKVVMNQYNKLXXXXXXXXXLYLVSIASLKTPAXX

SEQ ID NO: 4873 - protein, 34 aa, Artificial Sequence
  GFR-binding peptide
  MOD_RES (31), (32): Xaa is C or S
RVVMNYHYKLIVNSSDDKYLVSIPSLQTPAXXPK

SEQ ID NO: 4874 - protein, 35 aa, Artificial Sequence
  GFR-binding peptide
  MOD_RES (2), (33), (34): Xaa is C or S
KXSKVIMRHKRLIKPTKGIYYLISTASLDQSVXXP

SEQ ID NO: 4875 - protein, 35 aa, Artificial Sequence
  GFR-binding peptide
  MOD_RES (1), (3): Xaa is C or S
  MOD_RES (14), (15), (16), (17), (18): Xaa is A or G
  MOD_RES (19), (20), (21), (22): Xaa is A or G or is absent
XKXSRVIMRYKKLXXXXXXXXXFYLISIANLAQPV

SEQ ID NO: 4876 - protein, 41 aa, Artificial Sequence
  GFR-binding peptide
  MOD_RES (1), (3), (35), (36): Xaa is C or S
XGXGEVVMERYKKLVVKDYEDFYLMSIANLETPVXXAKPIS

SEQ ID NO: 4877 - protein, 36 aa, Artificial Sequence
  GFR-binding peptide
  MOD_RES (31), (32): Xaa is C or S
SKVVMYHYKLVKPTRGVKYLISIPSLDQPVXXPSAS

SEQ ID NO: 4878 - protein, 40 aa, Artificial Sequence
  GFR-binding peptide
  MOD_RES (2), (4), (36), (37): Xaa is C or S
HXGXAKVVMNRYKKLIVNNSSDFYLVSIANLKTPAXXAKP

SEQ ID NO: 4879 - protein, 37 aa, Artificial Sequence
  GFR-binding peptide
  MOD_RES (1), (32), (33): Xaa is C or S
XSRVIMQYNKLVKPKRGVLYLISIASLAQPVXXPAAS

SEQ ID NO: 4880 - protein, 37 aa, Artificial Sequence
  GFR-binding peptide
  MOD_RES (2), (4), (35), (36): Xaa is C or S
SXKXSKVIMQYNKLIKPTKGILYLISIASLDQSVXXP

SEQ ID NO: 4881 - protein, 31 aa, Artificial Sequence
  GFR-binding peptide
  MOD_RES (31), (31): Xaa is C or S
SKVIMQYNKLIKPTKGILYLISIASLDQSVX

SEQ ID NO: 4882 - protein, 44 aa, Artificial Sequence
  GFR-binding peptide
  MOD_RES (2), (4), (39), (40): Xaa is C or S
  MOD_RES (17), (18), (19), (20), (21): Xaa is A or G
  MOD_RES (22), (23), (24), (25): Xaa is A or G or is absent
RXGXEAVSMGERHKRLXXXXXXXXXYYLVSTASLKTPVXXAKGV

SEQ ID NO: 4883 - protein, 40 aa, Artificial Sequence
  GFR-binding peptide
  MOD_RES (2), (4), (39), (40): Xaa is C or S
  MOD_RES (17), (18), (19), (20), (21): Xaa is A or G
  MOD_RES (22), (23), (24), (25): Xaa is A or G or is absent
RXGXEAVSMGERHKRLXXXXXXXXXYYLVSTASLKTPVXX

SEQ ID NO: 4884 - protein, 44 aa, Artificial Sequence
  GFR-binding peptide
  MOD_RES (2), (4), (41): Xaa is C or S
  MOD_RES (17), (18), (19), (20), (21): Xaa is A or G
  MOD_RES (22), (23), (24), (25): Xaa is A or G or is absent
EXKXALHDELTYHYKLXXXXXXXXXKYLVSIPSLQVQTPRXQVN

SEQ ID NO: 4885 - protein, 39 aa, Artificial Sequence
  GFR-binding peptide
  MOD_RES (2), (4), (36), (37): Xaa is C or S
RXGXGEVVMERYKKLVVKDYEDFYLMSIANLETPVXXAK

SEQ ID NO: 4886 - protein, 34 aa, Artificial Sequence
  GFR-binding peptide
  MOD_RES (2), (34): Xaa is C or S
GXSRVVMNQYNKLIVNSSDDLYLVSIASLKTPAX

SEQ ID NO: 4887 - protein, 34 aa, Artificial Sequence
  GFR-binding peptide
  MOD_RES (32), (33): Xaa is C or S
GEVVMEYHYKLVVKDYEDKYLMSIPSLETPVXXA

SEQ ID NO: 4888 - protein, 35 aa, Artificial Sequence
  GFR-binding peptide
  MOD_RES (1), (35): Xaa is C or S
  MOD_RES (13), (14), (15), (16), (17): Xaa is A or G
  MOD_RES (18), (19), (20), (21): Xaa is A or G or is absent
XSRVVMNRYKKLXXXXXXXXXFYLVSIANLKTPAX

SEQ ID NO: 4889 - protein, 37 aa, Artificial Sequence
  GFR-binding peptide
  MOD_RES (1), (3), (37): Xaa is C or S
  MOD_RES (15), (16), (17), (18), (19): Xaa is A or G
  MOD_RES (20), (21), (22), (23): Xaa is A or G or is absent
XGXAKVVMNYHYKLXXXXXXXXXKYLVSIPSLKTPAX

SEQ ID NO: 4890 - protein, 42 aa, Artificial Sequence
  GFR-binding peptide
  MOD_RES (1), (3), (36), (37): Xaa is C or S
  MOD_RES (14), (15), (16), (17), (18): Xaa is A or G
  MOD_RES (19), (20), (21), (22): Xaa is A or G or is absent
XKXSKVIMQYNKLXXXXXXXXXLYLISIASLDQSVXXPSASA

SEQ ID NO: 4891 - protein, 41 aa, Artificial Sequence
  GFR-binding peptide
  MOD_RES (1), (3), (36), (37): Xaa is C or S
  MOD_RES (14), (15), (16), (17), (18): Xaa is A or G
  MOD_RES (19), (20), (21), (22): Xaa is A or G or is absent
XKXSKVIMQYNKLXXXXXXXXXLYLISIASLDQSVXXPSAS

SEQ ID NO: 4892 - protein, 37 aa, Artificial Sequence
  GFR-binding peptide
  MOD_RES (31), (32): Xaa is C or S
SKVIMRHKRLIKPTKGIYYLISTASLDQSVXXPSASA

SEQ ID NO: 4893 - protein, 41 aa, Artificial Sequence
  GFR-binding peptide
  MOD_RES (1), (3), (37), (38): Xaa is C or S
  MOD_RES (15), (16), (17), (18), (19): Xaa is A or G
  MOD_RES (20), (21), (22), (23): Xaa is A or G or is absent
XGXARVVMNQYNKLXXXXXXXXXLYLVSIASLQTPAXXPKP

SEQ ID NO: 4894 - protein, 31 aa, Artificial Sequence
  GFR-binding peptide
  MOD_RES (31), (31): Xaa is C or S
SKVIMYHYKLIKPTKGIKYLISIPSLDQSVX

SEQ ID NO: 4895 - protein, 37 aa, Artificial Sequence
  GFR-binding peptide
  MOD_RES (1), (3), (34), (35): Xaa is C or S
XKXSKVIMRYKKLIKPTKGIFYLISIANLDQSVXXPS

SEQ ID NO: 4896 - protein, 34 aa, Artificial Sequence
  GFR-binding peptide
  MOD_RES (1), (33), (34): Xaa is C or S
XGEVVMDRHKRLVVKENEDYYLMSTASLETPVXX

SEQ ID NO: 4897 - protein, 39 aa, Artificial Sequence
  GFR-binding peptide
  MOD_RES (2), (4), (37), (38): Xaa is C or S
  MOD_RES (15), (16), (17), (18), (19): Xaa is A or G
  MOD_RES (20), (21), (22), (23): Xaa is A or G or is absent
SXKXSKVIMRYKKLXXXXXXXXXFYLISIANLDQSVXXP

SEQ ID NO: 4898 - protein, 43 aa, Artificial Sequence
  GFR-binding peptide
  MOD_RES (1), (3), (38), (39): Xaa is C or S
  MOD_RES (16), (17), (18), (19), (20): Xaa is A or G
  MOD_RES (21), (22), (23), (24): Xaa is A or G or is absent
XGXEAVSMGEQYNKLXXXXXXXXXLYLVSIASLKTPVXXAKGV

SEQ ID NO: 4899 - protein, 35 aa, Artificial Sequence
  GFR-binding peptide
  MOD_RES (2), (35): Xaa is C or S
  MOD_RES (13), (14), (15), (16), (17): Xaa is A or G
  MOD_RES (18), (19), (20), (21): Xaa is A or G or is absent
KXSKVVMRYKKLXXXXXXXXXFYLISIANLDQPVX

SEQ ID NO: 4900 - protein, 34 aa, Artificial Sequence
  GFR-binding peptide
  MOD_RES (32), (33): Xaa is C or S
GEVVMDYHYKLVVKENEDKYLMSIPSLETPVXXA

SEQ ID NO: 4901 - protein, 34 aa, Artificial Sequence
  GFR-binding peptide
  MOD_RES (1), (3): Xaa is C or S
XGXGEVVMEYHYKLVVKDYEDKYLMSIPSLETPV

SEQ ID NO: 4902 - protein, 37 aa, Artificial Sequence
  GFR-binding peptide
  MOD_RES (2), (37): Xaa is C or S
  MOD_RES (15), (16), (17), (18), (19): Xaa is A or G
  MOD_RES (20), (21), (22), (23): Xaa is A or G or is absent
GXEAVSMGEQYNKLXXXXXXXXXLYLVSIASLKTPVX

SEQ ID NO: 4903 - protein, 38 aa, Artificial Sequence
  GFR-binding peptide
  MOD_RES (32), (32): Xaa is C or S
SRVVMNYHYKLIVNSSDDKYLVSIPSLKTPAXTPKTVH

SEQ ID NO: 4904 - protein, 42 aa, Artificial Sequence
  GFR-binding peptide
  MOD_RES (2), (36), (37): Xaa is C or S
  MOD_RES (14), (15), (16), (17), (18): Xaa is A or G
  MOD_RES (19), (20), (21), (22): Xaa is A or G or is absent
GXARVVMNYHYKLXXXXXXXXXKYLVSIPSLQTPAXXPKPVT

SEQ ID NO: 4905 - protein, 40 aa, Artificial Sequence
  GFR-binding peptide
  MOD_RES (34), (35): Xaa is C or S
  MOD_RES (12), (13), (14), (15), (16): Xaa is A or G
  MOD_RES (17), (18), (19), (20): Xaa is A or G or is absent
AKVVMNRHKRLXXXXXXXXXYYLVSTASLKTPAXXAKPVA

SEQ ID NO: 4906 - protein, 42 aa, Artificial Sequence
  GFR-binding peptide
  MOD_RES (1), (3), (36), (37): Xaa is C or S
  MOD_RES (14), (15), (16), (17), (18): Xaa is A or G
  MOD_RES (19), (20), (21), (22): Xaa is A or G or is absent
XKXSRVIMQYNKLXXXXXXXXXLYLISIASLAQPVXXPAASA

SEQ ID NO: 4907 - protein, 38 aa, Artificial Sequence
  GFR-binding peptide
  MOD_RES (2), (4), (38): Xaa is C or S
  MOD_RES (16), (17), (18), (19), (20): Xaa is A or G
  MOD_RES (21), (22), (23), (24): Xaa is A or G or is absent
RXGXGEVVMDYHYKLXXXXXXXXXKYLMSIPSLETPVX

SEQ ID NO: 4908 - protein, 40 aa, Artificial Sequence
  GFR-binding peptide
  MOD_RES (2), (36), (37): Xaa is C or S
  MOD_RES (14), (15), (16), (17), (18): Xaa is A or G
  MOD_RES (19), (20), (21), (22): Xaa is A or G or is absent
GXARVVMNYHYKLXXXXXXXXXKYLVSIPSLQTPAXXPKP

SEQ ID NO: 4909 - protein, 40 aa, Artificial Sequence
  GFR-binding peptide
  MOD_RES (1), (3), (40): Xaa is C or S
  MOD_RES (16), (17), (18), (19), (20): Xaa is A or G
  MOD_RES (21), (22), (23), (24): Xaa is A or G or is absent
XKXALHDELTQYNKLXXXXXXXXXLYLVSIASLQVQTPRX

SEQ ID NO: 4910 - protein, 36 aa, Artificial Sequence
  GFR-binding peptide
  MOD_RES (1), (1): Xaa is C or S
XALHDELTRHKRLFIPKKRVIEYYLVSTASLQVQTP

SEQ ID NO: 4911 - protein, 33 aa, Artificial Sequence
  GFR-binding peptide
  MOD_RES (1), (33): Xaa is C or S
XGEVVMERHKRLVVKDYEDYYLMSTASLETPVX

SEQ ID NO: 4912 - protein, 41 aa, Artificial Sequence
  GFR-binding peptide
  MOD_RES (1), (3), (40): Xaa is C or S
  MOD_RES (16), (17), (18), (19), (20): Xaa is A or G
  MOD_RES (21), (22), (23), (24): Xaa is A or G or is absent
XKXALHDELTYHYKLXXXXXXXXXKYLVSIPSLQVQTPRXQ

SEQ ID NO: 4913 - protein, 34 aa, Artificial Sequence
  GFR-binding peptide
  MOD_RES (1), (3), (34): Xaa is C or S
XKXSKVVMQYNKLVKPTRGVLYLISIASLDQPVX

SEQ ID NO: 4914 - protein, 42 aa, Artificial Sequence
  GFR-binding peptide
  MOD_RES (1), (36), (37): Xaa is C or S
  MOD_RES (14), (15), (16), (17), (18): Xaa is A or G
  MOD_RES (19), (20), (21), (22): Xaa is A or G or is absent
XEAVSMGEQYNKLXXXXXXXXXLYLVSIASLKTPVXXAKGVK

SEQ ID NO: 4915 - protein, 39 aa, Artificial Sequence
  GFR-binding peptide
  MOD_RES (2), (33), (34): Xaa is C or S
KXSKVVMRYKKLVKPTRGVFYLISIANLDQPVXXPSASA

SEQ ID NO: 4916 - protein, 41 aa, Artificial Sequence
  GFR-binding peptide
  MOD_RES (2), (4), (35), (36): Xaa is C or S
SXKXSRVIMYHYKLVKPKRGVKYLISIPSLAQPVXXPAASA

SEQ ID NO: 4917 - protein, 39 aa, Artificial Sequence
  GFR-binding peptide
  MOD_RES (1), (3): Xaa is C or S
XKXALHDELTRYKKLFIPKKRVIEFYLVSIANLQVQTPR

SEQ ID NO: 4918 - protein, 38 aa, Artificial Sequence
  GFR-binding peptide
  MOD_RES (2), (35), (36): Xaa is C or S
  MOD_RES (13), (14), (15), (16), (17): Xaa is A or G
  MOD_RES (18), (19), (20), (21): Xaa is A or G or is absent
KXSKVIMRYKKLXXXXXXXXXFYLISIANLDQSVXXPS

SEQ ID NO: 4919 - protein, 36 aa, Artificial Sequence
  GFR-binding peptide
  MOD_RES (36), (36): Xaa is C or S
  MOD_RES (12), (13), (14), (15), (16): Xaa is A or G
  MOD_RES (17), (18), (19), (20): Xaa is A or G or is absent
LHDELTYHYKLXXXXXXXXXKYLVSIPSLQVQTPRX

SEQ ID NO: 4920 - protein, 39 aa, Artificial Sequence
  GFR-binding peptide
  MOD_RES (2), (4), (38), (39): Xaa is C or S
  MOD_RES (16), (17), (18), (19), (20): Xaa is A or G
  MOD_RES (21), (22), (23), (24): Xaa is A or G or is absent
RXGXGEVVMDRYKKLXXXXXXXXXFYLMSIANLETPVXX

SEQ ID NO: 4921 - protein, 38 aa, Artificial Sequence
  GFR-binding peptide
  MOD_RES (1), (3), (37): Xaa is C or S
  MOD_RES (15), (16), (17), (18), (19): Xaa is A or G
  MOD_RES (20), (21), (22), (23): Xaa is A or G or is absent
XGXSRVVMNYHYKLXXXXXXXXXKYLVSIPSLKTPAXT

SEQ ID NO: 4922 - protein, 36 aa, Artificial Sequence
  GFR-binding peptide
  MOD_RES (1), (33), (34): Xaa is C or S
XARVVMNRHKRLIVNSSDDYYLVSTASLQTPAXXPK

SEQ ID NO: 4923 - protein, 35 aa, Artificial Sequence
  GFR-binding peptide
  MOD_RES (1), (35): Xaa is C or S
  MOD_RES (13), (14), (15), (16), (17): Xaa is A or G
  MOD_RES (18), (19), (20), (21): Xaa is A or G or is absent
XGEVVMDYHYKLXXXXXXXXXKYLMSIPSLETPVX

SEQ ID NO: 4924 - protein, 36 aa, Artificial Sequence
  GFR-binding peptide
  MOD_RES (31), (32): Xaa is C or S
SRVIMYHYKLVKPKRGVKYLISIPSLAQPVXXPAAS

SEQ ID NO: 4925 - protein, 36 aa, Artificial Sequence
  GFR-binding peptide
  MOD_RES (33), (34): Xaa is C or S
  MOD_RES (11), (12), (13), (14), (15): Xaa is A or G
  MOD_RES (16), (17), (18), (19): Xaa is A or G or is absent
SKVVMRHKRLXXXXXXXXXYYLISTASLDQPVXXPS

SEQ ID NO: 4926 - protein, 38 aa, Artificial Sequence
  GFR-binding peptide
  MOD_RES (33), (34): Xaa is C or S
  MOD_RES (11), (12), (13), (14), (15): Xaa is A or G
  MOD_RES (16), (17), (18), (19): Xaa is A or G or is absent
EVVMEYHYKLXXXXXXXXXKYLMSIPSLETPVXXAKPI

SEQ ID NO: 4927 - protein, 40 aa, Artificial Sequence
  GFR-binding peptide
  MOD_RES (1), (35), (36): Xaa is C or S
  MOD_RES (13), (14), (15), (16), (17): Xaa is A or G
  MOD_RES (18), (19), (20), (21): Xaa is A or G or is absent
XARVVMNYHYKLXXXXXXXXXKYLVSIPSLQTPAXXPKPV

SEQ ID NO: 4928 - protein, 33 aa, Artificial Sequence
  GFR-binding peptide
  MOD_RES (32), (33): Xaa is C or S
GEVVMDRHKRLVVKENEDYYLMSTASLETPVXX

SEQ ID NO: 4929 - protein, 35 aa, Artificial Sequence
  GFR-binding peptide
  MOD_RES (12), (13), (14), (15), (16): Xaa is A or G
  MOD_RES (17), (18), (19), (20): Xaa is A or G or is absent
LHDELTRHKRLXXXXXXXXXYYLVSTASLQVQTPR

SEQ ID NO: 4930 - protein, 45 aa, Artificial Sequence
  GFR-binding peptide
  MOD_RES (2), (4), (39), (40): Xaa is C or S
  MOD_RES (17), (18), (19), (20), (21): Xaa is A or G
  MOD_RES (22), (23), (24), (25): Xaa is A or G or is absent
RXGXEAVSMGERHKRLXXXXXXXXXYYLVSTASLKTPVXXAKGVK

SEQ ID NO: 4931 - protein, 34 aa, Artificial Sequence
  GFR-binding peptide
  MOD_RES (2), (33), (34): Xaa is C or S
KXSKVIMRHKRLIKPTKGIYYLISTASLDQSVXX

SEQ ID NO: 4932 - protein, 37 aa, Artificial Sequence
  GFR-binding peptide
  MOD_RES (2), (2): Xaa is C or S
KXALHDELTRYKKLFIPKKRVIEFYLVSIANLQVQTP

SEQ ID NO: 4933 - protein, 32 aa, Artificial Sequence
  GFR-binding peptide
  MOD_RES (1), (1): Xaa is C or S
XGEVVMEQYNKLVVKDYEDLYLMSIASLETPV

SEQ ID NO: 4934 - protein, 38 aa, Artificial Sequence
  GFR-binding peptide
  MOD_RES (1), (3), (38): Xaa is C or S
  MOD_RES (16), (17), (18), (19), (20): Xaa is A or G
  MOD_RES (21), (22), (23), (24): Xaa is A or G or is absent
XGXEAVSMGERYKKLXXXXXXXXXFYLVSIANLKTPVX

SEQ ID NO: 4935 - protein, 36 aa, Artificial Sequence
  GFR-binding peptide
  MOD_RES (1), (3): Xaa is C or S
  MOD_RES (15), (16), (17), (18), (19): Xaa is A or G
  MOD_RES (20), (21), (22), (23): Xaa is A or G or is absent
XGXGEVVMDRYKKLXXXXXXXXXFYLMSIANLETPV

SEQ ID NO: 4936 - protein, 38 aa, Artificial Sequence
  GFR-binding peptide
  MOD_RES (1), (3), (35), (36): Xaa is C or S
XGXGEVVMDQYNKLVVKENEDLYLMSIASLETPVXXAK

SEQ ID NO: 4937 - protein, 38 aa, Artificial Sequence
  GFR-binding peptide
  MOD_RES (1), (3), (37), (38): Xaa is C or S
  MOD_RES (15), (16), (17), (18), (19): Xaa is A or G
  MOD_RES (20), (21), (22), (23): Xaa is A or G or is absent
XGXARVVMNYHYKLXXXXXXXXXKYLVSIPSLQTPAXX

SEQ ID NO: 4938 - protein, 37 aa, Artificial Sequence
  GFR-binding peptide
  MOD_RES (2), (4), (37): Xaa is C or S
  MOD_RES (15), (16), (17), (18), (19): Xaa is A or G
  MOD_RES (20), (21), (22), (23): Xaa is A or G or is absent
SXKXSKVIMRYKKLXXXXXXXXXFYLISIANLDQSVX

SEQ ID NO: 4939 - protein, 36 aa, Artificial Sequence
  GFR-binding peptide
  MOD_RES (1), (35): Xaa is C or S
  MOD_RES (13), (14), (15), (16), (17): Xaa is A or G
  MOD_RES (18), (19), (20), (21): Xaa is A or G or is absent
XSRVVMNRHKRLXXXXXXXXXYYLVSTASLKTPAXT

SEQ ID NO: 4940 - protein, 42 aa, Artificial Sequence
  GFR-binding peptide
  MOD_RES (2), (4), (39), (40): Xaa is C or S
  MOD_RES (17), (18), (19), (20), (21): Xaa is A or G
  MOD_RES (22), (23), (24), (25): Xaa is A or G or is absent
RXGXEAVSMGEQYNKLXXXXXXXXXLYLVSIASLKTPVXXAK

SEQ ID NO: 4941 - protein, 35 aa, Artificial Sequence
  GFR-binding peptide
  MOD_RES (35), (35): Xaa is C or S
HDELTYHYKLFIPKKRVIEKYLVSIPSLQVQTPRX

SEQ ID NO: 4942 - protein, 40 aa, Artificial Sequence
  GFR-binding peptide
  MOD_RES (2), (36), (37): Xaa is C or S
  MOD_RES (14), (15), (16), (17), (18): Xaa is A or G
  MOD_RES (19), (20), (21), (22): Xaa is A or G or is absent
GXGEVVMEYHYKLXXXXXXXXXKYLMSIPSLETPVXXAKP

SEQ ID NO: 4943 - protein, 37 aa, Artificial Sequence
  GFR-binding peptide
  MOD_RES (32), (33): Xaa is C or S
GEVVMDQYNKLVVKENEDLYLMSIASLETPVXXAKPI

SEQ ID NO: 4944 - protein, 36 aa, Artificial Sequence
  GFR-binding peptide
  MOD_RES (1), (33), (34): Xaa is C or S
XSRVVMNQYNKLIVNSSDDLYLVSIASLKTPAXXPK

SEQ ID NO: 4945 - protein, 35 aa, Artificial Sequence
  GFR-binding peptide
  MOD_RES (1), (33), (34): Xaa is C or S
XSRVVMNYHYKLIVNSSDDKYLVSIPSLKTPAXXP

SEQ ID NO: 4946 - protein, 41 aa, Artificial Sequence
  GFR-binding peptide
  MOD_RES (35), (36): Xaa is C or S
  MOD_RES (13), (14), (15), (16), (17): Xaa is A or G
  MOD_RES (18), (19), (20), (21): Xaa is A or G or is absent
EAVSMGEYHYKLXXXXXXXXXKYLVSIPSLKTPVXXAKGVK

SEQ ID NO: 4947 - protein, 37 aa, Artificial Sequence
  GFR-binding peptide
  MOD_RES (2), (4), (37): Xaa is C or S
  MOD_RES (15), (16), (17), (18), (19): Xaa is A or G
  MOD_RES (20), (21), (22), (23): Xaa is A or G or is absent
SXKXSRVIMRHKRLXXXXXXXXXYYLISTASLAQPVX

SEQ ID NO: 4948 - protein, 43 aa, Artificial Sequence
  GFR-binding peptide
  MOD_RES (1), (3), (40): Xaa is C or S
XKXALHDELTYHYKLFIPKKRVIEKYLVSIPSLQVQTPRXQVN

SEQ ID NO: 4949 - protein, 31 aa, Artificial Sequence
  GFR-binding peptide
ARVVMNRHKRLIVNSSDDYYLVSTASLQTPA

SEQ ID NO: 4950 - protein, 42 aa, Artificial Sequence
  GFR-binding peptide
  MOD_RES (1), (3), (37), (38): Xaa is C or S
  MOD_RES (15), (16), (17), (18), (19): Xaa is A or G
  MOD_RES (20), (21), (22), (23): Xaa is A or G or is absent
XGXAKVVMNRHKRLXXXXXXXXXYYLVSTASLKTPAXXAKPV

SEQ ID NO: 4951 - protein, 33 aa, Artificial Sequence
  GFR-binding peptide
  MOD_RES (2), (33): Xaa is C or S
KXSKVIMRHKRLIKPTKGIYYLISTASLDQSVX

SEQ ID NO: 4952 - protein, 38 aa, Artificial Sequence
  GFR-binding peptide
  MOD_RES (1), (3), (35): Xaa is C or S
XGXSRVVMNYHYKLIVNSSDDKYLVSIPSLKTPAXTPK

SEQ ID NO: 4953 - protein, 33 aa, Artificial Sequence
  GFR-binding peptide
  MOD_RES (32), (33): Xaa is C or S
GEVVMERHKRLVVKDYEDYYLMSTASLETPVXX

SEQ ID NO: 4954 - protein, 35 aa, Artificial Sequence
  GFR-binding peptide
  MOD_RES (1), (33): Xaa is C or S
XSRVVMNQYNKLIVNSSDDLYLVSIASLKTPAXTP

SEQ ID NO: 4955 - protein, 37 aa, Artificial Sequence
  GFR-binding peptide
  MOD_RES (2), (34), (35): Xaa is C or S
GXAKVVMNRYKKLIVNNSSDFYLVSIANLKTPAXXAK

SEQ ID NO: 4956 - protein, 36 aa, Artificial Sequence
  GFR-binding peptide
  MOD_RES (2), (34), (35): Xaa is C or S
GXSRVVMNYHYKLIVNSSDDKYLVSIPSLKTPAXXP

SEQ ID NO: 4957 - protein, 36 aa, Artificial Sequence
  GFR-binding peptide
  MOD_RES (33), (34): Xaa is C or S
  MOD_RES (11), (12), (13), (14), (15): Xaa is A or G
  MOD_RES (16), (17), (18), (19): Xaa is A or G or is absent
EVVMEQYNKLXXXXXXXXXLYLMSIASLETPVXXAK

SEQ ID NO: 4958 - protein, 34 aa, Artificial Sequence
  GFR-binding peptide
  MOD_RES (2), (4): Xaa is C or S
SXKXSRVIMYHYKLVKPKRGVKYLISIPSLAQPV

SEQ ID NO: 4959 - protein, 35 aa, Artificial Sequence
  GFR-binding peptide
  MOD_RES (1), (32), (33): Xaa is C or S
XSKVVMQYNKLVKPTRGVLYLISIASLDQPVXXPS

SEQ ID NO: 4960 - protein, 39 aa, Artificial Sequence
  GFR-binding peptide
  MOD_RES (33), (34): Xaa is C or S
  MOD_RES (11), (12), (13), (14), (15): Xaa is A or G
  MOD_RES (16), (17), (18), (19): Xaa is A or G or is absent
RVVMNQYNKLXXXXXXXXXLYLVSIASLQTPAXXPKPVT

SEQ ID NO: 4961 - protein, 36 aa, Artificial Sequence
  GFR-binding peptide
  MOD_RES (33), (34): Xaa is C or S
  MOD_RES (11), (12), (13), (14), (15): Xaa is A or G
  MOD_RES (16), (17), (18), (19): Xaa is A or G or is absent
SKVVMYHYKLXXXXXXXXXKYLISIPSLDQPVXXPS

SEQ ID NO: 4962 - protein, 36 aa, Artificial Sequence
  GFR-binding peptide
  MOD_RES (35), (35): Xaa is C or S
  MOD_RES (11), (12), (13), (14), (15): Xaa is A or G
  MOD_RES (16), (17), (18), (19): Xaa is A or G or is absent
HDELTRHKRLXXXXXXXXXYYLVSTASLQVQTPRXQ

SEQ ID NO: 4963 - protein, 32 aa, Artificial Sequence
  GFR-binding peptide
  MOD_RES (11), (12), (13), (14), (15): Xaa is A or G
  MOD_RES (16), (17), (18), (19): Xaa is A or G or is absent
EVVMEYHYKLXXXXXXXXXKYLMSIPSLETPV

SEQ ID NO: 4964 - protein, 38 aa, Artificial Sequence
  GFR-binding peptide
  MOD_RES (34), (35): Xaa is C or S
  MOD_RES (12), (13), (14), (15), (16): Xaa is A or G
  MOD_RES (17), (18), (19), (20): Xaa is A or G or is absent
ARVVMNRYKKLXXXXXXXXXFYLVSIANLQTPAXXPKP

SEQ ID NO: 4965 - protein, 38 aa, Artificial Sequence
  GFR-binding peptide
  MOD_RES (1), (32), (33): Xaa is C or S
XSKVVMRHKRLVKPTRGVYYLISTASLDQPVXXPSASA

SEQ ID NO: 4966 - protein, 30 aa, Artificial Sequence
  GFR-binding peptide
RVVMNRYKKLIVNSSDDFYLVSIANLKTPA

SEQ ID NO: 4967 - protein, 33 aa, Artificial Sequence
  GFR-binding peptide
  MOD_RES (1), (32), (33): Xaa is C or S
XSKVIMQYNKLIKPTKGILYLISIASLDQSVXX

SEQ ID NO: 4968 - protein, 40 aa, Artificial Sequence
  GFR-binding peptide
  MOD_RES (2), (37), (38): Xaa is C or S
  MOD_RES (15), (16), (17), (18), (19): Xaa is A or G
  MOD_RES (20), (21), (22), (23): Xaa is A or G or is absent
GXEAVSMGEQYNKLXXXXXXXXXLYLVSIASLKTPVXXAK

SEQ ID NO: 4969 - protein, 34 aa, Artificial Sequence
  GFR-binding peptide
  MOD_RES (34), (34): Xaa is C or S
  MOD_RES (12), (13), (14), (15), (16): Xaa is A or G
  MOD_RES (17), (18), (19), (20): Xaa is A or G or is absent
GEVVMDQYNKLXXXXXXXXXLYLMSIASLETPVX

SEQ ID NO: 4970 - protein, 38 aa, Artificial Sequence
  GFR-binding peptide
  MOD_RES (34), (35): Xaa is C or S
  MOD_RES (12), (13), (14), (15), (16): Xaa is A or G
  MOD_RES (17), (18), (19), (20): Xaa is A or G or is absent
GEVVMDQYNKLXXXXXXXXXLYLMSIASLETPVXXAKP

SEQ ID NO: 4971 - protein, 37 aa, Artificial Sequence
  GFR-binding peptide
  MOD_RES (36), (36): Xaa is C or S
  MOD_RES (12), (13), (14), (15), (16): Xaa is A or G
  MOD_RES (17), (18), (19), (20): Xaa is A or G or is absent
LHDELTQYNKLXXXXXXXXXLYLVSIASLQVQTPRXQ

SEQ ID NO: 4972 - protein, 36 aa, Artificial Sequence
  GFR-binding peptide
  MOD_RES (2), (4), (35), (36): Xaa is C or S
SXKXSKVVMRHKRLVKPTRGVYYLISTASLDQPVXX

SEQ ID NO: 4973 - protein, 36 aa, Artificial Sequence
  GFR-binding peptide
  MOD_RES (2), (4), (36): Xaa is C or S
HXGXSRVVMNYHYKLIVNSSDDKYLVSIPSLKTPAX

SEQ ID NO: 4974 - protein, 35 aa, Artificial Sequence
  GFR-binding peptide
  MOD_RES (2), (4): Xaa is C or S
RXGXGEVVMEQYNKLVVKDYEDLYLMSIASLETPV

SEQ ID NO: 4975 - protein, 42 aa, Artificial Sequence
  GFR-binding peptide
  MOD_RES (2), (4), (41): Xaa is C or S
EXKXALHDELTRHKRLFIPKKRVIEYYLVSTASLQVQTPRXQ

SEQ ID NO: 4976 - protein, 35 aa, Artificial Sequence
  GFR-binding peptide
  MOD_RES (2), (2): Xaa is C or S
  MOD_RES (14), (15), (16), (17), (18): Xaa is A or G
  MOD_RES (19), (20), (21), (22): Xaa is A or G or is absent
GXGEVVMEYHYKLXXXXXXXXXKYLMSIPSLETPV

SEQ ID NO: 4977 - protein, 38 aa, Artificial Sequence
  GFR-binding peptide
  MOD_RES (2), (36), (37): Xaa is C or S
  MOD_RES (14), (15), (16), (17), (18): Xaa is A or G
  MOD_RES (19), (20), (21), (22): Xaa is A or G or is absent
GXARVVMNQYNKLXXXXXXXXXLYLVSIASLQTPAXXP

SEQ ID NO: 4978 - protein, 32 aa, Artificial Sequence
  GFR-binding peptide
  MOD_RES (11), (12), (13), (14), (15): Xaa is A or G
  MOD_RES (16), (17), (18), (19): Xaa is A or G or is absent
SRVIMYHYKLXXXXXXXXXKYLISIPSLAQPV

SEQ ID NO: 4979 - protein, 40 aa, Artificial Sequence
  GFR-binding peptide
  MOD_RES (2), (4), (37), (38): Xaa is C or S
  MOD_RES (15), (16), (17), (18), (19): Xaa is A or G
  MOD_RES (20), (21), (22), (23): Xaa is A or G or is absent
SXKXSRVIMRHKRLXXXXXXXXXYYLISTASLAQPVXXPA

SEQ ID NO: 4980 - protein, 38 aa, Artificial Sequence
  GFR-binding peptide
  MOD_RES (32), (33): Xaa is C or S
ARVVMNRYKKLIVNSSDDFYLVSIANLQTPAXXPKPVT

SEQ ID NO: 4981 - protein, 43 aa, Artificial Sequence
  GFR-binding peptide
  MOD_RES (1), (3), (37), (38): Xaa is C or S
  MOD_RES (15), (16), (17), (18), (19): Xaa is A or G
  MOD_RES (20), (21), (22), (23): Xaa is A or G or is absent
XGXAKVVMNRYKKLXXXXXXXXXFYLVSIANLKTPAXXAKPVA

SEQ ID NO: 4982 - protein, 40 aa, Artificial Sequence
  GFR-binding peptide
  MOD_RES (34), (34): Xaa is C or S
  MOD_RES (12), (13), (14), (15), (16): Xaa is A or G
  MOD_RES (17), (18), (19), (20): Xaa is A or G or is absent
SRVVMNYHYKLXXXXXXXXXKYLVSIPSLKTPAXTPKTVH

SEQ ID NO: 4983 - protein, 40 aa, Artificial Sequence
  GFR-binding peptide
  MOD_RES (36), (36): Xaa is C or S
  MOD_RES (12), (13), (14), (15), (16): Xaa is A or G
  MOD_RES (17), (18), (19), (20): Xaa is A or G or is absent
LHDELTYHYKLXXXXXXXXXKYLVSIPSLQVQTPRXQVNR

SEQ ID NO: 4984 - protein, 38 aa, Artificial Sequence
  GFR-binding peptide
  MOD_RES (2), (36), (37): Xaa is C or S
  MOD_RES (14), (15), (16), (17), (18): Xaa is A or G
  MOD_RES (19), (20), (21), (22): Xaa is A or G or is absent
GXSRVVMNRYKKLXXXXXXXXXFYLVSIANLKTPAXXP

SEQ ID NO: 4985 - protein, 38 aa, Artificial Sequence
  GFR-binding peptide
  MOD_RES (2), (4), (35), (36): Xaa is C or S
SXKXSKVVMRYKKLVKPTRGVFYLISIANLDQPVXXPS

SEQ ID NO: 4986 - protein, 41 aa, Artificial Sequence
  GFR-binding peptide
  MOD_RES (2), (39): Xaa is C or S
  MOD_RES (15), (16), (17), (18), (19): Xaa is A or G
  MOD_RES (20), (21), (22), (23): Xaa is A or G or is absent
KXALHDELTQYNKLXXXXXXXXXLYLVSIASLQVQTPRXQV

SEQ ID NO: 4987 - protein, 39 aa, Artificial Sequence
  GFR-binding peptide
  MOD_RES (2), (36), (37): Xaa is C or S
  MOD_RES (14), (15), (16), (17), (18): Xaa is A or G
  MOD_RES (19), (20), (21), (22): Xaa is A or G or is absent
GXAKVVMNYHYKLXXXXXXXXXKYLVSIPSLKTPAXXAK

SEQ ID NO: 4988 - protein, 36 aa, Artificial Sequence
  GFR-binding peptide
  MOD_RES (35), (36): Xaa is C or S
  MOD_RES (13), (14), (15), (16), (17): Xaa is A or G
  MOD_RES (18), (19), (20), (21): Xaa is A or G or is absent
EAVSMGERYKKLXXXXXXXXXFYLVSIANLKTPVXX

SEQ ID NO: 4989 - protein, 38 aa, Artificial Sequence
  GFR-binding peptide
  MOD_RES (33), (34): Xaa is C or S
  MOD_RES (11), (12), (13), (14), (15): Xaa is A or G
  MOD_RES (16), (17), (18), (19): Xaa is A or G or is absent
EVVMERHKRLXXXXXXXXXYYLMSTASLETPVXXAKPI

SEQ ID NO: 4990 - protein, 44 aa, Artificial Sequence
  GFR-binding peptide
  MOD_RES (2), (4), (38), (39): Xaa is C or S
  MOD_RES (16), (17), (18), (19), (20): Xaa is A or G
  MOD_RES (21), (22), (23), (24): Xaa is A or G or is absent
HXGXARVVMNRHKRLXXXXXXXXXYYLVSTASLQTPAXXPKPVT

SEQ ID NO: 4991 - protein, 38 aa, Artificial Sequence
  GFR-binding peptide
  MOD_RES (2), (33), (34): Xaa is C or S
KXSKVVMRYKKLVKPTRGVFYLISIANLDQPVXXPSAS

SEQ ID NO: 4992 - protein, 34 aa, Artificial Sequence
  GFR-binding peptide
  MOD_RES (31), (32): Xaa is C or S
RVVMNRYKKLIVNSSDDFYLVSIANLKTPAXXPK

SEQ ID NO: 4993 - protein, 36 aa, Artificial Sequence
  GFR-binding peptide
  MOD_RES (33), (34): Xaa is C or S
  MOD_RES (11), (12), (13), (14), (15): Xaa is A or G
  MOD_RES (16), (17), (18), (19): Xaa is A or G or is absent
KVVMNRHKRLXXXXXXXXXYYLVSTASLKTPAXXAK

SEQ ID NO: 4994 - protein, 42 aa, Artificial Sequence
  GFR-binding peptide
  MOD_RES (1), (3), (36), (37): Xaa is C or S
  MOD_RES (14), (15), (16), (17), (18): Xaa is A or G
  MOD_RES (19), (20), (21), (22): Xaa is A or G or is absent
XKXSRVIMRHKRLXXXXXXXXXYYLISTASLAQPVXXPAASA

SEQ ID NO: 4995 - protein, 43 aa, Artificial Sequence
  GFR-binding peptide
  MOD_RES (1), (3), (37), (38): Xaa is C or S
  MOD_RES (15), (16), (17), (18), (19): Xaa is A or G
  MOD_RES (20), (21), (22), (23): Xaa is A or G or is absent
XGXARVVMNYHYKLXXXXXXXXXKYLVSIPSLQTPAXXPKPVT

SEQ ID NO: 4996 - protein, 36 aa, Artificial Sequence
  GFR-binding peptide
  MOD_RES (1), (3), (35), (36): Xaa is C or S
XGXGEVVMERHKRLVVKDYEDYYLMSTASLETPVXX

SEQ ID NO: 4997 - protein, 42 aa, Artificial Sequence
  GFR-binding peptide
  MOD_RES (2), (39): Xaa is C or S
KXALHDELTQYNKLFIPKKRVIELYLVSIASLQVQTPRXQVN

SEQ ID NO: 4998 - protein, 34 aa, Artificial Sequence
  GFR-binding peptide
ALHDELTYHYKLFIPKKRVIEKYLVSIPSLQVQT

SEQ ID NO: 4999 - protein, 34 aa, Artificial Sequence
  GFR-binding peptide
  MOD_RES (11), (12), (13), (14), (15): Xaa is A or G
  MOD_RES (16), (17), (18), (19): Xaa is A or G or is absent
HDELTYHYKLXXXXXXXXXKYLVSIPSLQVQTPR

SEQ ID NO: 5000 - protein, 35 aa, Artificial Sequence
  GFR-binding peptide
  MOD_RES (2), (34), (35): Xaa is C or S
GXGEVVMDRYKKLVVKENEDFYLMSIANLETPVXX

SEQ ID NO: 5001 - protein, 39 aa, Artificial Sequence
  GFR-binding peptide
  MOD_RES (2), (4), (36), (37): Xaa is C or S
HXGXSRVVMNRHKRLIVNSSDDYYLVSTASLKTPAXXPK

SEQ ID NO: 5002 - protein, 31 aa, Artificial Sequence
  GFR-binding peptide
  MOD_RES (31), (31): Xaa is C or S
SKVVMYHYKLVKPTRGVKYLISIPSLDQPVX

SEQ ID NO: 5003 - protein, 41 aa, Artificial Sequence
  GFR-binding peptide
  MOD_RES (2), (35), (36): Xaa is C or S
GXEAVSMGEYHYKLTPVGMDDKYLVSIPSLKTPVXXAKGVK

SEQ ID NO: 5004 - protein, 39 aa, Artificial Sequence
  GFR-binding peptide
  MOD_RES (1), (3), (35), (36): Xaa is C or S
XGXAKVVMNRYKKLIVNNSSDFYLVSIANLKTPAXXAKP

SEQ ID NO: 5005 - protein, 33 aa, Artificial Sequence
  GFR-binding peptide
  MOD_RES (31), (32): Xaa is C or S
SRVIMRHKRLVKPKRGVYYLISTASLAQPVXXP

SEQ ID NO: 5006 - protein, 37 aa, Artificial Sequence
  GFR-binding peptide
  MOD_RES (1), (3), (34), (35): Xaa is C or S
XKXSKVVMRYKKLVKPTRGVFYLISIANLDQPVXXPS

SEQ ID NO: 5007 - protein, 39 aa, Artificial Sequence
  GFR-binding peptide
  MOD_RES (1), (38): Xaa is C or S
XALHDELTYHYKLFIPKKRVIEKYLVSIPSLQVQTPRXQ

SEQ ID NO: 5008 - protein, 37 aa, Artificial Sequence
  GFR-binding peptide
  MOD_RES (1), (3), (36), (37): Xaa is C or S
XGXEAVSMGEQYNKLTPVGMDDLYLVSIASLKTPVXX

SEQ ID NO: 5009 - protein, 37 aa, Artificial Sequence
  GFR-binding peptide
  MOD_RES (1), (3), (36), (37): Xaa is C or S
  MOD_RES (14), (15), (16), (17), (18): Xaa is A or G
  MOD_RES (19), (20), (21), (22): Xaa is A or G or is absent
XKXSKVVMQYNKLXXXXXXXXXLYLISIASLDQPVXX

SEQ ID NO: 5010 - protein, 35 aa, Artificial Sequence
  GFR-binding peptide
  MOD_RES (1), (33), (34): Xaa is C or S
XGEVVMDQYNKLVVKENEDLYLMSIASLETPVXXA

SEQ ID NO: 5011 - protein, 34 aa, Artificial Sequence
  GFR-binding peptide
  MOD_RES (1), (34): Xaa is C or S
  MOD_RES (12), (13), (14), (15), (16): Xaa is A or G
  MOD_RES (17), (18), (19), (20): Xaa is A or G or is absent
XSKVVMQYNKLXXXXXXXXXLYLISIASLDQPVX

SEQ ID NO: 5012 - protein, 37 aa, Artificial Sequence
  GFR-binding peptide
  MOD_RES (1), (32), (33): Xaa is C or S
XSKVIMYHYKLIKPTKGIKYLISIPSLDQSVXXPSAS

SEQ ID NO: 5013 - protein, 37 aa, Artificial Sequence
  GFR-binding peptide
  MOD_RES (2), (4), (37): Xaa is C or S
RXGXEAVSMGEQYNKLTPVGMDDLYLVSIASLKTPVX

SEQ ID NO: 5014 - protein, 37 aa, Artificial Sequence
  GFR-binding peptide
  MOD_RES (31), (32): Xaa is C or S
SRVIMYHYKLVKPKRGVKYLISIPSLAQPVXXPAASA

SEQ ID NO: 5015 - protein, 39 aa, Artificial Sequence
  GFR-binding peptide
  MOD_RES (1), (3), (37), (38): Xaa is C or S
  MOD_RES (15), (16), (17), (18), (19): Xaa is A or G
  MOD_RES (20), (21), (22), (23): Xaa is A or G or is absent
XGXSRVVMNRHKRLXXXXXXXXXYYLVSTASLKTPAXXP

SEQ ID NO: 5016 - protein, 39 aa, Artificial Sequence
  GFR-binding peptide
  MOD_RES (1), (35), (36): Xaa is C or S
  MOD_RES (13), (14), (15), (16), (17): Xaa is A or G
  MOD_RES (18), (19), (20), (21): Xaa is A or G or is absent
XAKVVMNRYKKLXXXXXXXXXFYLVSIANLKTPAXXAKP

SEQ ID NO: 5017 - protein, 36 aa, Artificial Sequence
  GFR-binding peptide
  MOD_RES (2), (34), (35): Xaa is C or S
GXGEVVMERHKRLVVKDYEDYYLMSTASLETPVXXA

SEQ ID NO: 5018 - protein, 34 aa, Artificial Sequence
  GFR-binding peptide
  MOD_RES (12), (13), (14), (15), (16): Xaa is A or G
  MOD_RES (17), (18), (19), (20): Xaa is A or G or is absent
LHDELTYHYKLXXXXXXXXXKYLVSIPSLQVQTP

SEQ ID NO: 5019 - protein, 40 aa, Artificial Sequence
  GFR-binding peptide
  MOD_RES (2), (4): Xaa is C or S
EXKXALHDELTYHYKLFIPKKRVIEKYLVSIPSLQVQTPR

SEQ ID NO: 5020 - protein, 43 aa, Artificial Sequence
  GFR-binding peptide
  MOD_RES (2), (4), (38), (39): Xaa is C or S
  MOD_RES (16), (17), (18), (19), (20): Xaa is A or G
  MOD_RES (21), (22), (23), (24): Xaa is A or G or is absent
HXGXARVVMNQYNKLXXXXXXXXXLYLVSIASLQTPAXXPKPV

SEQ ID NO: 5021 - protein, 40 aa, Artificial Sequence
  GFR-binding peptide
  MOD_RES (2), (36), (37): Xaa is C or S
  MOD_RES (14), (15), (16), (17), (18): Xaa is A or G
  MOD_RES (19), (20), (21), (22): Xaa is A or G or is absent
GXAKVVMNYHYKLXXXXXXXXXKYLVSIPSLKTPAXXAKP

SEQ ID NO: 5022 - protein, 42 aa, Artificial Sequence
  GFR-binding peptide
  MOD_RES (2), (4), (38), (39): Xaa is C or S
  MOD_RES (16), (17), (18), (19), (20): Xaa is A or G
  MOD_RES (21), (22), (23), (24): Xaa is A or G or is absent
RXGXGEVVMERHKRLXXXXXXXXXYYLMSTASLETPVXXAKP

SEQ ID NO: 5023 - protein, 39 aa, Artificial Sequence
  GFR-binding peptide
  MOD_RES (36), (36): Xaa is C or S
  MOD_RES (12), (13), (14), (15), (16): Xaa is A or G
  MOD_RES (17), (18), (19), (20): Xaa is A or G or is absent
LHDELTRHKRLXXXXXXXXXYYLVSTASLQVQTPRXQVN

SEQ ID NO: 5024 - protein, 34 aa, Artificial Sequence
  GFR-binding peptide
  MOD_RES (1), (33): Xaa is C or S
XSRVVMNRHKRLIVNSSDDYYLVSTASLKTPAXT

SEQ ID NO: 5025 - protein, 36 aa, Artificial Sequence
  GFR-binding peptide
  MOD_RES (2), (35), (36): Xaa is C or S
  MOD_RES (13), (14), (15), (16), (17): Xaa is A or G
  MOD_RES (18), (19), (20), (21): Xaa is A or G or is absent
KXSRVIMRYKKLXXXXXXXXXFYLISIANLAQPVXX

SEQ ID NO: 5026 - protein, 33 aa, Artificial Sequence
  GFR-binding peptide
  MOD_RES (32), (32): Xaa is C or S
SRVVMNYHYKLIVNSSDDKYLVSIPSLKTPAXT

SEQ ID NO: 5027 - protein, 33 aa, Artificial Sequence
  GFR-binding peptide
  MOD_RES (31), (32): Xaa is C or S
RVVMNYHYKLIVNSSDDKYLVSIPSLKTPAXXP

SEQ ID NO: 5028 - protein, 40 aa, Artificial Sequence
  GFR-binding peptide
  MOD_RES (2), (4), (37), (38): Xaa is C or S
RXGXEAVSMGERHKRLTPVGMDDYYLVSTASLKTPVXXAK

SEQ ID NO: 5029 - protein, 32 aa, Artificial Sequence
  GFR-binding peptide
  MOD_RES (32), (32): Xaa is C or S
SRVVMNQYNKLIVNSSDDLYLVSIASLKTPAX

SEQ ID NO: 5030 - protein, 36 aa, Artificial Sequence
  GFR-binding peptide
  MOD_RES (33), (34): Xaa is C or S
  MOD_RES (11), (12), (13), (14), (15): Xaa is A or G
  MOD_RES (16), (17), (18), (19): Xaa is A or G or is absent
RVVMNRYKKLXXXXXXXXXFYLVSIANLKTPAXXPK

SEQ ID NO: 5031 - protein, 36 aa, Artificial Sequence
  GFR-binding peptide
  MOD_RES (1), (34), (35): Xaa is C or S
XEAVSMGEYHYKLTPVGMDDKYLVSIPSLKTPVXXA

SEQ ID NO: 5032 - protein, 36 aa, Artificial Sequence
  GFR-binding peptide
  MOD_RES (32), (32): Xaa is C or S
SRVVMNRHKRLIVNSSDDYYLVSTASLKTPAXTPKT

SEQ ID NO: 5033 - protein, 34 aa, Artificial Sequence
  GFR-binding peptide
  MOD_RES (1), (34): Xaa is C or S
  MOD_RES (12), (13), (14), (15), (16): Xaa is A or G
  MOD_RES (17), (18), (19), (20): Xaa is A or G or is absent
XSKVVMRHKRLXXXXXXXXXYYLISTASLDQPVX

SEQ ID NO: 5034 - protein, 32 aa, Artificial Sequence
  GFR-binding peptide
  MOD_RES (32), (32): Xaa is C or S
GEVVMDQYNKLVVKENEDLYLMSIASLETPVX

SEQ ID NO: 5035 - protein, 41 aa, Artificial Sequence
  GFR-binding peptide
  MOD_RES (2), (4), (38), (39): Xaa is C or S
  MOD_RES (16), (17), (18), (19), (20): Xaa is A or G
  MOD_RES (21), (22), (23), (24): Xaa is A or G or is absent
HXGXARVVMNRYKKLXXXXXXXXXFYLVSIANLQTPAXXPK

SEQ ID NO: 5036 - protein, 40 aa, Artificial Sequence
  GFR-binding peptide
  MOD_RES (34), (35): Xaa is C or S
  MOD_RES (12), (13), (14), (15), (16): Xaa is A or G
  MOD_RES (17), (18), (19), (20): Xaa is A or G or is absent
AKVVMNQYNKLXXXXXXXXXLYLVSIASLKTPAXXAKPVA

SEQ ID NO: 5037 - protein, 37 aa, Artificial Sequence
  GFR-binding peptide
  MOD_RES (31), (32): Xaa is C or S
SKVIMYHYKLIKPTKGIKYLISIPSLDQSVXXPSASA

SEQ ID NO: 5038 - protein, 35 aa, Artificial Sequence
  GFR-binding peptide
  MOD_RES (1), (3), (35): Xaa is C or S
XGXSRVVMNYHYKLIVNSSDDKYLVSIPSLKTPAX

SEQ ID NO: 5039 - protein, 37 aa, Artificial Sequence
  GFR-binding peptide
  MOD_RES (35), (35): Xaa is C or S
HDELTYHYKLFIPKKRVIEKYLVSIPSLQVQTPRXQV

SEQ ID NO: 5040 - protein, 38 aa, Artificial Sequence
  GFR-binding peptide
  MOD_RES (2), (4), (37), (38): Xaa is C or S
RXGXEAVSMGERYKKLTPVGMDDFYLVSIANLKTPVXX

SEQ ID NO: 5041 - protein, 42 aa, Artificial Sequence
  GFR-binding peptide
  MOD_RES (1), (3), (36), (37): Xaa is C or S
XGXEAVSMGEQYNKLTPVGMDDLYLVSIASLKTPVXXAKGVK

SEQ ID NO: 5042 - protein, 34 aa, Artificial Sequence
  GFR-binding peptide
  MOD_RES (32), (33): Xaa is C or S
ARVVMNRHKRLIVNSSDDYYLVSTASLQTPAXXP

SEQ ID NO: 5043 - protein, 39 aa, Artificial Sequence
  GFR-binding peptide
  MOD_RES (1), (3), (37), (38): Xaa is C or S
  MOD_RES (15), (16), (17), (18), (19): Xaa is A or G
  MOD_RES (20), (21), (22), (23): Xaa is A or G or is absent
XGXARVVMNYHYKLXXXXXXXXXKYLVSIPSLQTPAXXP

SEQ ID NO: 5044 - protein, 37 aa, Artificial Sequence
  GFR-binding peptide
  MOD_RES (32), (33): Xaa is C or S
GEVVMERYKKLVVKDYEDFYLMSIANLETPVXXAKPI

SEQ ID NO: 5045 - protein, 43 aa, Artificial Sequence
  GFR-binding peptide
  MOD_RES (1), (3), (40): Xaa is C or S
XKXALHDELTRHKRLFIPKKRVIEYYLVSTASLQVQTPRXQVN

SEQ ID NO: 5046 - protein, 38 aa, Artificial Sequence
  GFR-binding peptide
  MOD_RES (33), (33): Xaa is C or S
  MOD_RES (11), (12), (13), (14), (15): Xaa is A or G
  MOD_RES (16), (17), (18), (19): Xaa is A or G or is absent
RVVMNRYKKLXXXXXXXXXFYLVSIANLKTPAXTPKTV

SEQ ID NO: 5047 - protein, 39 aa, Artificial Sequence
  GFR-binding peptide
  MOD_RES (34), (35): Xaa is C or S
  MOD_RES (12), (13), (14), (15), (16): Xaa is A or G
  MOD_RES (17), (18), (19), (20): Xaa is A or G or is absent
GEVVMEYHYKLXXXXXXXXXKYLMSIPSLETPVXXAKPI

SEQ ID NO: 5048 - protein, 38 aa, Artificial Sequence
  GFR-binding peptide
  MOD_RES (2), (4), (38): Xaa is C or S
  MOD_RES (16), (17), (18), (19), (20): Xaa is A or G
  MOD_RES (21), (22), (23), (24): Xaa is A or G or is absent
RXGXGEVVMDRHKRLXXXXXXXXXYYLMSTASLETPVX

SEQ ID NO: 5049 - protein, 42 aa, Artificial Sequence
  GFR-binding peptide
  MOD_RES (2), (4), (36), (37): Xaa is C or S
RXGXGEVVMERHKRLVVKDYEDYYLMSTASLETPVXXAKPIS

SEQ ID NO: 5050 - protein, 39 aa, Artificial Sequence
  GFR-binding peptide
  MOD_RES (2), (39): Xaa is C or S
KXALHDELTQYNKLFIPKKRVIELYLVSIASLQVQTPRX

SEQ ID NO: 5051 - protein, 41 aa, Artificial Sequence
  GFR-binding peptide
  MOD_RES (2), (4), (37), (38): Xaa is C or S
  MOD_RES (15), (16), (17), (18), (19): Xaa is A or G
  MOD_RES (20), (21), (22), (23): Xaa is A or G or is absent
SXKXSKVVMYHYKLXXXXXXXXXKYLISIPSLDQPVXXPSA

SEQ ID NO: 5052 - protein, 39 aa, Artificial Sequence
  GFR-binding peptide
  MOD_RES (2), (4), (38), (39): Xaa is C or S
  MOD_RES (16), (17), (18), (19), (20): Xaa is A or G
  MOD_RES (21), (22), (23), (24): Xaa is A or G or is absent
RXGXGEVVMEYHYKLXXXXXXXXXKYLMSIPSLETPVXX

SEQ ID NO: 5053 - protein, 40 aa, Artificial Sequence
  GFR-binding peptide
  MOD_RES (2), (34), (35): Xaa is C or S
GXSRVVMNQYNKLIVNSSDDLYLVSIASLKTPAXXPKPVY

SEQ ID NO: 5054 - protein, 38 aa, Artificial Sequence
  GFR-binding peptide
  MOD_RES (33), (33): Xaa is C or S
  MOD_RES (11), (12), (13), (14), (15): Xaa is A or G
  MOD_RES (16), (17), (18), (19): Xaa is A or G or is absent
RVVMNRHKRLXXXXXXXXXYYLVSTASLKTPAXTPKTV

SEQ ID NO: 5055 - protein, 42 aa, Artificial Sequence
  GFR-binding peptide
  MOD_RES (2), (36), (37): Xaa is C or S
  MOD_RES (14), (15), (16), (17), (18): Xaa is A or G
  MOD_RES (19), (20), (21), (22): Xaa is A or G or is absent
GXGEVVMEQYNKLXXXXXXXXXLYLMSIASLETPVXXAKPIS

SEQ ID NO: 5056 - protein, 35 aa, Artificial Sequence
  GFR-binding peptide
  MOD_RES (1), (3), (35): Xaa is C or S
XGXARVVMNQYNKLIVNSSDDLYLVSIASLQTPAX

SEQ ID NO: 5057 - protein, 39 aa, Artificial Sequence
  GFR-binding peptide
  MOD_RES (34), (35): Xaa is C or S
  MOD_RES (12), (13), (14), (15), (16): Xaa is A or G
  MOD_RES (17), (18), (19), (20): Xaa is A or G or is absent
ARVVMNQYNKLXXXXXXXXXLYLVSIASLQTPAXXPKPV

SEQ ID NO: 5058 - protein, 39 aa, Artificial Sequence
  GFR-binding peptide
  MOD_RES (2), (36), (37): Xaa is C or S
  MOD_RES (14), (15), (16), (17), (18): Xaa is A or G
  MOD_RES (19), (20), (21), (22): Xaa is A or G or is absent
GXARVVMNYHYKLXXXXXXXXXKYLVSIPSLQTPAXXPK

SEQ ID NO: 5059 - protein, 41 aa, Artificial Sequence
  GFR-binding peptide
  MOD_RES (1), (3), (36), (37): Xaa is C or S
  MOD_RES (14), (15), (16), (17), (18): Xaa is A or G
  MOD_RES (19), (20), (21), (22): Xaa is A or G or is absent
XKXSRVIMQYNKLXXXXXXXXXLYLISIASLAQPVXXPAAS

SEQ ID NO: 5060 - protein, 36 aa, Artificial Sequence
  GFR-binding peptide
  MOD_RES (31), (32): Xaa is C or S
EVVMERYKKLVVKDYEDFYLMSIANLETPVXXAKPI

SEQ ID NO: 5061 - protein, 40 aa, Artificial Sequence
  GFR-binding peptide
  MOD_RES (1), (34), (35): Xaa is C or S
XEAVSMGERHKRLTPVGMDDYYLVSTASLKTPVXXAKGVK

SEQ ID NO: 5062 - protein, 33 aa, Artificial Sequence
  GFR-binding peptide
  MOD_RES (12), (13), (14), (15), (16): Xaa is A or G
  MOD_RES (17), (18), (19), (20): Xaa is A or G or is absent
LHDELTRHKRLXXXXXXXXXYYLVSTASLQVQT

SEQ ID NO: 5063 - protein, 36 aa, Artificial Sequence
  GFR-binding peptide
  MOD_RES (2), (35), (36): Xaa is C or S
GXEAVSMGEYHYKLTPVGMDDKYLVSIPSLKTPVXX

SEQ ID NO: 5064 - protein, 41 aa, Artificial Sequence
  GFR-binding peptide
  MOD_RES (2), (36): Xaa is C or S
  MOD_RES (14), (15), (16), (17), (18): Xaa is A or G
  MOD_RES (19), (20), (21), (22): Xaa is A or G or is absent
GXSRVVMNRHKRLXXXXXXXXXYYLVSTASLKTPAXTPKTV

SEQ ID NO: 5065 - protein, 37 aa, Artificial Sequence
  GFR-binding peptide
  MOD_RES (2), (37): Xaa is C or S
  MOD_RES (15), (16), (17), (18), (19): Xaa is A or G
  MOD_RES (20), (21), (22), (23): Xaa is A or G or is absent
GXEAVSMGERHKRLXXXXXXXXXYYLVSTASLKTPVX

SEQ ID NO: 5066 - protein, 36 aa, Artificial Sequence
  GFR-binding peptide
  MOD_RES (31), (32): Xaa is C or S
SKVIMYHYKLIKPTKGIKYLISIPSLDQSVXXPSAS

SEQ ID NO: 5067 - protein, 38 aa, Artificial Sequence
  GFR-binding peptide
  MOD_RES (2), (36), (37): Xaa is C or S
  MOD_RES (14), (15), (16), (17), (18): Xaa is A or G
  MOD_RES (19), (20), (21), (22): Xaa is A or G or is absent
GXGEVVMEQYNKLXXXXXXXXXLYLMSIASLETPVXXA

SEQ ID NO: 5068 - protein, 42 aa, Artificial Sequence
  GFR-binding peptide
  MOD_RES (2), (4), (36), (37): Xaa is C or S
HXGXAKVVMNQYNKLIVNNSSDLYLVSIASLKTPAXXAKPVA

SEQ ID NO: 5069 - protein, 36 aa, Artificial Sequence
  GFR-binding peptide
  MOD_RES (1), (33), (34): Xaa is C or S
XAKVVMNRYKKLIVNNSSDFYLVSIANLKTPAXXAK

SEQ ID NO: 5070 - protein, 41 aa, Artificial Sequence
  GFR-binding peptide
  MOD_RES (1), (36), (37): Xaa is C or S
  MOD_RES (14), (15), (16), (17), (18): Xaa is A or G
  MOD_RES (19), (20), (21), (22): Xaa is A or G or is absent
XEAVSMGERYKKLXXXXXXXXXFYLVSIANLKTPVXXAKGV

SEQ ID NO: 5071 - protein, 36 aa, Artificial Sequence
  GFR-binding peptide
  MOD_RES (33), (34): Xaa is C or S
  MOD_RES (11), (12), (13), (14), (15): Xaa is A or G
  MOD_RES (16), (17), (18), (19): Xaa is A or G or is absent
RVVMNRHKRLXXXXXXXXXYYLVSTASLQTPAXXPK

SEQ ID NO: 5072 - protein, 35 aa, Artificial Sequence
  GFR-binding peptide
  MOD_RES (31), (31): Xaa is C or S
RVVMNYHYKLIVNSSDDKYLVSIPSLKTPAXTPKT

SEQ ID NO: 5073 - protein, 31 aa, Artificial Sequence
  GFR-binding peptide
  MOD_RES (31), (31): Xaa is C or S
EVVMDRHKRLVVKENEDYYLMSTASLETPVX

SEQ ID NO: 5074 - protein, 35 aa, Artificial Sequence
  GFR-binding peptide
  MOD_RES (1), (3), (34), (35): Xaa is C or S
XKXSKVIMQYNKLIKPTKGILYLISIASLDQSVXX

SEQ ID NO: 5075 - protein, 37 aa, Artificial Sequence
  GFR-binding peptide
  MOD_RES (2), (4), (36), (37): Xaa is C or S
HXGXARVVMNRHKRLIVNSSDDYYLVSTASLQTPAXX

SEQ ID NO: 5076 - protein, 36 aa, Artificial Sequence
  GFR-binding peptide
  MOD_RES (2), (34), (35): Xaa is C or S
GXGEVVMDYHYKLVVKENEDKYLMSIPSLETPVXXA

SEQ ID NO: 5077 - protein, 41 aa, Artificial Sequence
  GFR-binding peptide
  MOD_RES (1), (35), (36): Xaa is C or S
  MOD_RES (13), (14), (15), (16), (17): Xaa is A or G
  MOD_RES (18), (19), (20), (21): Xaa is A or G or is absent
XSRVVMNRHKRLXXXXXXXXXYYLVSTASLKTPAXXPKPVY

SEQ ID NO: 5078 - protein, 42 aa, Artificial Sequence
  GFR-binding peptide
  MOD_RES (2), (36), (37): Xaa is C or S
  MOD_RES (14), (15), (16), (17), (18): Xaa is A or G
  MOD_RES (19), (20), (21), (22): Xaa is A or G or is absent
GXAKVVMNQYNKLXXXXXXXXXLYLVSIASLKTPAXXAKPVA

SEQ ID NO: 5079 - protein, 35 aa, Artificial Sequence
  GFR-binding peptide
  MOD_RES (32), (33): Xaa is C or S
GEVVMEQYNKLVVKDYEDLYLMSIASLETPVXXAK

SEQ ID NO: 5080 - protein, 38 aa, Artificial Sequence
  GFR-binding peptide
  MOD_RES (1), (3), (37), (38): Xaa is C or S
  MOD_RES (15), (16), (17), (18), (19): Xaa is A or G
  MOD_RES (20), (21), (22), (23): Xaa is A or G or is absent
XGXAKVVMNQYNKLXXXXXXXXXLYLVSIASLKTPAXX

SEQ ID NO: 5081 - protein, 38 aa, Artificial Sequence
  GFR-binding peptide
  MOD_RES (32), (33): Xaa is C or S
AKVVMNRYKKLIVNNSSDFYLVSIANLKTPAXXAKPVA

SEQ ID NO: 5082 - protein, 32 aa, Artificial Sequence
  GFR-binding peptide
  MOD_RES (1), (1): Xaa is C or S
XGEVVMDRHKRLVVKENEDYYLMSTASLETPV

SEQ ID NO: 5083 - protein, 37 aa, Artificial Sequence
  GFR-binding peptide
  MOD_RES (31), (32): Xaa is C or S
SKVVMYHYKLVKPTRGVKYLISIPSLDQPVXXPSASA

SEQ ID NO: 5084 - protein, 38 aa, Artificial Sequence
  GFR-binding peptide
  MOD_RES (2), (36): Xaa is C or S
  MOD_RES (14), (15), (16), (17), (18): Xaa is A or G
  MOD_RES (19), (20), (21), (22): Xaa is A or G or is absent
GXSRVVMNYHYKLXXXXXXXXXKYLVSIPSLKTPAXTP

SEQ ID NO: 5085 - protein, 35 aa, Artificial Sequence
  GFR-binding peptide
  MOD_RES (1), (3), (35): Xaa is C or S
XGXAKVVMNYHYKLIVNNSSDKYLVSIPSLKTPAX

SEQ ID NO: 5086 - protein, 36 aa, Artificial Sequence
  GFR-binding peptide
  MOD_RES (34), (35): Xaa is C or S
  MOD_RES (12), (13), (14), (15), (16): Xaa is A or G
  MOD_RES (17), (18), (19), (20): Xaa is A or G or is absent
AKVVMNQYNKLXXXXXXXXXLYLVSIASLKTPAXXA

SEQ ID NO: 5087 - protein, 41 aa, Artificial Sequence
  GFR-binding peptide
  MOD_RES (1), (35), (36): Xaa is C or S
  MOD_RES (13), (14), (15), (16), (17): Xaa is A or G
  MOD_RES (18), (19), (20), (21): Xaa is A or G or is absent
XGEVVMDRHKRLXXXXXXXXXYYLMSTASLETPVXXAKPIK

SEQ ID NO: 5088 - protein, 35 aa, Artificial Sequence
  GFR-binding peptide
  MOD_RES (32), (33): Xaa is C or S
GEVVMDQYNKLVVKENEDLYLMSIASLETPVXXAK

SEQ ID NO: 5089 - protein, 39 aa, Artificial Sequence
  GFR-binding peptide
  MOD_RES (2), (4), (36): Xaa is C or S
HXGXSRVVMNRHKRLIVNSSDDYYLVSTASLKTPAXTPK

SEQ ID NO: 5090 - protein, 41 aa, Artificial Sequence
  GFR-binding peptide
  MOD_RES (2), (36), (37): Xaa is C or S
  MOD_RES (14), (15), (16), (17), (18): Xaa is A or G
  MOD_RES (19), (20), (21), (22): Xaa is A or G or is absent
GXGEVVMDYHYKLXXXXXXXXXKYLMSIPSLETPVXXAKPI

SEQ ID NO: 5091 - protein, 38 aa, Artificial Sequence
  GFR-binding peptide
  MOD_RES (2), (4), (36), (37): Xaa is C or S
HXGXARVVMNQYNKLIVNSSDDLYLVSIASLQTPAXXP

SEQ ID NO: 5092 - protein, 37 aa, Artificial Sequence
  GFR-binding peptide
  MOD_RES (36), (36): Xaa is C or S
LHDELTQYNKLFIPKKRVIELYLVSIASLQVQTPRXQ

SEQ ID NO: 5093 - protein, 38 aa, Artificial Sequence
  GFR-binding peptide
  MOD_RES (36), (36): Xaa is C or S
LHDELTYHYKLFIPKKRVIEKYLVSIPSLQVQTPRXQV

SEQ ID NO: 5094 - protein, 38 aa, Artificial Sequence
  GFR-binding peptide
  MOD_RES (33), (34): Xaa is C or S
  MOD_RES (11), (12), (13), (14), (15): Xaa is A or G
  MOD_RES (16), (17), (18), (19): Xaa is A or G or is absent
RVVMNYHYKLXXXXXXXXXKYLVSIPSLQTPAXXPKPV

SEQ ID NO: 5095 - protein, 41 aa, Artificial Sequence
  GFR-binding peptide
  MOD_RES (2), (35), (36): Xaa is C or S
GXEAVSMGERHKRLTPVGMDDYYLVSTASLKTPVXXAKGVK

SEQ ID NO: 5096 - protein, 40 aa, Artificial Sequence
  GFR-binding peptide
  MOD_RES (2), (35), (36): Xaa is C or S
  MOD_RES (13), (14), (15), (16), (17): Xaa is A or G
  MOD_RES (18), (19), (20), (21): Xaa is A or G or is absent
KXSKVVMRHKRLXXXXXXXXXYYLISTASLDQPVXXPSAS

SEQ ID NO: 5097 - protein, 33 aa, Artificial Sequence
  GFR-binding peptide
  MOD_RES (2), (2): Xaa is C or S
GXGEVVMEQYNKLVVKDYEDLYLMSIASLETPV

SEQ ID NO: 5098 - protein, 36 aa, Artificial Sequence
  GFR-binding peptide
  MOD_RES (1), (32), (33): Xaa is C or S
XSKVVMRYKKLVKPTRGVFYLISIANLDQPVXXPSA

SEQ ID NO: 5099 - protein, 31 aa, Artificial Sequence
  GFR-binding peptide
SRVVMNRHKRLIVNSSDDYYLVSTASLKTPA

SEQ ID NO: 5100 - protein, 33 aa, Artificial Sequence
  GFR-binding peptide
  MOD_RES (33), (33): Xaa is C or S
  MOD_RES (11), (12), (13), (14), (15): Xaa is A or G
  MOD_RES (16), (17), (18), (19): Xaa is A or G or is absent
RVVMNRHKRLXXXXXXXXXYYLVSTASLKTPAX

SEQ ID NO: 5101 - protein, 37 aa, Artificial Sequence
  GFR-binding peptide
  MOD_RES (2), (4), (36), (37): Xaa is C or S
RXGXGEVVMEYHYKLVVKDYEDKYLMSIPSLETPVXX

SEQ ID NO: 5102 - protein, 38 aa, Artificial Sequence
  GFR-binding peptide
  MOD_RES (1), (35), (36): Xaa is C or S
  MOD_RES (13), (14), (15), (16), (17): Xaa is A or G
  MOD_RES (18), (19), (20), (21): Xaa is A or G or is absent
XGEVVMDRYKKLXXXXXXXXXFYLMSIANLETPVXXAK

SEQ ID NO: 5103 - protein, 38 aa, Artificial Sequence
  GFR-binding peptide
  MOD_RES (33), (34): Xaa is C or S
  MOD_RES (11), (12), (13), (14), (15): Xaa is A or G
  MOD_RES (16), (17), (18), (19): Xaa is A or G or is absent
SRVIMRYKKLXXXXXXXXXFYLISIANLAQPVXXPAAS

SEQ ID NO: 5104 - protein, 35 aa, Artificial Sequence
  GFR-binding peptide
  MOD_RES (31), (31): Xaa is C or S
RVVMNQYNKLIVNSSDDLYLVSIASLKTPAXTPKT

SEQ ID NO: 5105 - protein, 30 aa, Artificial Sequence
  GFR-binding peptide
EVVMERYKKLVVKDYEDFYLMSIANLETPV

SEQ ID NO: 5106 - protein, 39 aa, Artificial Sequence
  GFR-binding peptide
  MOD_RES (2), (34), (35): Xaa is C or S
GXGEVVMEQYNKLVVKDYEDLYLMSIASLETPVXXAKPI

SEQ ID NO: 5107 - protein, 35 aa, Artificial Sequence
  GFR-binding peptide
  MOD_RES (1), (32), (33): Xaa is C or S
XSRVIMRHKRLVKPKRGVYYLISTASLAQPVXXPA

SEQ ID NO: 5108 - protein, 41 aa, Artificial Sequence
  GFR-binding peptide
  MOD_RES (1), (35): Xaa is C or S
  MOD_RES (13), (14), (15), (16), (17): Xaa is A or G
  MOD_RES (18), (19), (20), (21): Xaa is A or G or is absent
XSRVVMNRHKRLXXXXXXXXXYYLVSTASLKTPAXTPKTVH

SEQ ID NO: 5109 - protein, 33 aa, Artificial Sequence
  GFR-binding peptide
  MOD_RES (33), (33): Xaa is C or S
  MOD_RES (11), (12), (13), (14), (15): Xaa is A or G
  MOD_RES (16), (17), (18), (19): Xaa is A or G or is absent
KVVMNRHKRLXXXXXXXXXYYLVSTASLKTPAX

SEQ ID NO: 5110 - protein, 34 aa, Artificial Sequence
  GFR-binding peptide
  MOD_RES (11), (12), (13), (14), (15): Xaa is A or G
  MOD_RES (16), (17), (18), (19): Xaa is A or G or is absent
HDELTQYNKLXXXXXXXXXLYLVSIASLQVQTPR

SEQ ID NO: 5111 - protein, 34 aa, Artificial Sequence
  GFR-binding peptide
  MOD_RES (2), (34): Xaa is C or S
GXARVVMNYHYKLIVNSSDDKYLVSIPSLQTPAX

SEQ ID NO: 5112 - protein, 31 aa, Artificial Sequence
  GFR-binding peptide
  MOD_RES (1), (1): Xaa is C or S
XSRVIMRHKRLVKPKRGVYYLISTASLAQPV

SEQ ID NO: 5113 - protein, 35 aa, Artificial Sequence
  GFR-binding peptide
  MOD_RES (1), (3): Xaa is C or S
XGXEAVSMGERYKKLTPVGMDDFYLVSIANLKTPV

SEQ ID NO: 5114 - protein, 36 aa, Artificial Sequence
  GFR-binding peptide
  MOD_RES (31), (32): Xaa is C or S
SKVIMQYNKLIKPTKGILYLISIASLDQSVXXPSAS

SEQ ID NO: 5115 - protein, 37 aa, Artificial Sequence
  GFR-binding peptide
  MOD_RES (31), (31): Xaa is C or S
RVVMNRHKRLIVNSSDDYYLVSTASLKTPAXTPKTVH

SEQ ID NO: 5116 - protein, 35 aa, Artificial Sequence
  GFR-binding peptide
  MOD_RES (32), (33): Xaa is C or S
ARVVMNRYKKLIVNSSDDFYLVSIANLQTPAXXPK

SEQ ID NO: 5117 - protein, 32 aa, Artificial Sequence
  GFR-binding peptide
  MOD_RES (31), (32): Xaa is C or S
SKVIMRYKKLIKPTKGIFYLISIANLDQSVXX

SEQ ID NO: 5118 - protein, 36 aa, Artificial Sequence
  GFR-binding peptide
  MOD_RES (1), (3), (36): Xaa is C or S
XGXEAVSMGERHKRLTPVGMDDYYLVSTASLKTPVX

SEQ ID NO: 5119 - protein, 33 aa, Artificial Sequence
  GFR-binding peptide
  MOD_RES (1), (3): Xaa is C or S
XKXSKVVMYHYKLVKPTRGVKYLISIPSLDQPV

SEQ ID NO: 5120 - protein, 41 aa, Artificial Sequence
  GFR-binding peptide
  MOD_RES (2), (4), (36), (37): Xaa is C or S
HXGXSRVVMNYHYKLIVNSSDDKYLVSIPSLKTPAXXPKPV

SEQ ID NO: 5121 - protein, 37 aa, Artificial Sequence
  GFR-binding peptide
  MOD_RES (2), (2): Xaa is C or S
  MOD_RES (15), (16), (17), (18), (19): Xaa is A or G
  MOD_RES (20), (21), (22), (23): Xaa is A or G or is absent
KXALHDELTYHYKLXXXXXXXXXKYLVSIPSLQVQTP

SEQ ID NO: 5122 - protein, 36 aa, Artificial Sequence
  GFR-binding peptide
  MOD_RES (33), (34): Xaa is C or S
  MOD_RES (11), (12), (13), (14), (15): Xaa is A or G
  MOD_RES (16), (17), (18), (19): Xaa is A or G or is absent
EVVMDRYKKLXXXXXXXXXFYLMSIANLETPVXXAK

SEQ ID NO: 5123 - protein, 39 aa, Artificial Sequence
  GFR-binding peptide
  MOD_RES (2), (36), (37): Xaa is C or S
  MOD_RES (14), (15), (16), (17), (18): Xaa is A or G
  MOD_RES (19), (20), (21), (22): Xaa is A or G or is absent
GXGEVVMERHKRLXXXXXXXXXYYLMSTASLETPVXXAK

SEQ ID NO: 5124 - protein, 34 aa, Artificial Sequence
  GFR-binding peptide
  MOD_RES (33), (34): Xaa is C or S
  MOD_RES (11), (12), (13), (14), (15): Xaa is A or G
  MOD_RES (16), (17), (18), (19): Xaa is A or G or is absent
SRVIMRYKKLXXXXXXXXXFYLISIANLAQPVXX

SEQ ID NO: 5125 - protein, 37 aa, Artificial Sequence
  GFR-binding peptide
  MOD_RES (2), (34), (35): Xaa is C or S
GXARVVMNRHKRLIVNSSDDYYLVSTASLQTPAXXPK

SEQ ID NO: 5126 - protein, 41 aa, Artificial Sequence
  GFR-binding peptide
  MOD_RES (1), (35), (36): Xaa is C or S
  MOD_RES (13), (14), (15), (16), (17): Xaa is A or G
  MOD_RES (18), (19), (20), (21): Xaa is A or G or is absent
XARVVMNRHKRLXXXXXXXXXYYLVSTASLQTPAXXPKPVT

SEQ ID NO: 5127 - protein, 34 aa, Artificial Sequence
  GFR-binding peptide
  MOD_RES (33), (34): Xaa is C or S
EAVSMGERHKRLTPVGMDDYYLVSTASLKTPVXX

SEQ ID NO: 5128 - protein, 37 aa, Artificial Sequence
  GFR-binding peptide
  MOD_RES (34), (35): Xaa is C or S
  MOD_RES (12), (13), (14), (15), (16): Xaa is A or G
  MOD_RES (17), (18), (19), (20): Xaa is A or G or is absent
SRVVMNYHYKLXXXXXXXXXKYLVSIPSLKTPAXXPK

SEQ ID NO: 5129 - protein, 40 aa, Artificial Sequence
  GFR-binding peptide
  MOD_RES (2), (4), (36): Xaa is C or S
HXGXSRVVMNRHKRLIVNSSDDYYLVSTASLKTPAXTPKT

SEQ ID NO: 5130 - protein, 44 aa, Artificial Sequence
  GFR-binding peptide
  MOD_RES (2), (4), (38), (39): Xaa is C or S
  MOD_RES (16), (17), (18), (19), (20): Xaa is A or G
  MOD_RES (21), (22), (23), (24): Xaa is A or G or is absent
RXGXGEVVMDRYKKLXXXXXXXXXFYLMSIANLETPVXXAKPIK

SEQ ID NO: 5131 - protein, 42 aa, Artificial Sequence
  GFR-binding peptide
  MOD_RES (2), (4), (37), (38): Xaa is C or S
  MOD_RES (15), (16), (17), (18), (19): Xaa is A or G
  MOD_RES (20), (21), (22), (23): Xaa is A or G or is absent
SXKXSKVIMRYKKLXXXXXXXXXFYLISIANLDQSVXXPSAS

SEQ ID NO: 5132 - protein, 37 aa, Artificial Sequence
  GFR-binding peptide
  MOD_RES (32), (33): Xaa is C or S
ARVVMNQYNKLIVNSSDDLYLVSIASLQTPAXXPKPV

SEQ ID NO: 5133 - protein, 37 aa, Artificial Sequence
  GFR-binding peptide
  MOD_RES (32), (33): Xaa is C or S
SRVVMNRYKKLIVNSSDDFYLVSIANLKTPAXXPKPV

SEQ ID NO: 5134 - protein, 40 aa, Artificial Sequence
  GFR-binding peptide
  MOD_RES (34), (35): Xaa is C or S
  MOD_RES (12), (13), (14), (15), (16): Xaa is A or G
  MOD_RES (17), (18), (19), (20): Xaa is A or G or is absent
SRVVMNRYKKLXXXXXXXXXFYLVSIANLKTPAXXPKPVY

SEQ ID NO: 5135 - protein, 33 aa, Artificial Sequence
  GFR-binding peptide
  MOD_RES (1), (1): Xaa is C or S
  MOD_RES (12), (13), (14), (15), (16): Xaa is A or G
  MOD_RES (17), (18), (19), (20): Xaa is A or G or is absent
XSKVIMYHYKLXXXXXXXXXKYLISIPSLDQSV

SEQ ID NO: 5136 - protein, 43 aa, Artificial Sequence
  GFR-binding peptide
  MOD_RES (1), (3), (37), (38): Xaa is C or S
  MOD_RES (15), (16), (17), (18), (19): Xaa is A or G
  MOD_RES (20), (21), (22), (23): Xaa is A or G or is absent
XGXGEVVMDQYNKLXXXXXXXXXLYLMSIASLETPVXXAKPIK

SEQ ID NO: 5137 - protein, 32 aa, Artificial Sequence
  GFR-binding peptide
  MOD_RES (11), (12), (13), (14), (15): Xaa is A or G
  MOD_RES (16), (17), (18), (19): Xaa is A or G or is absent
EVVMEQYNKLXXXXXXXXXLYLMSIASLETPV

SEQ ID NO: 5138 - protein, 37 aa, Artificial Sequence
  GFR-binding peptide
  MOD_RES (2), (36): Xaa is C or S
  MOD_RES (14), (15), (16), (17), (18): Xaa is A or G
  MOD_RES (19), (20), (21), (22): Xaa is A or G or is absent
GXSRVVMNRHKRLXXXXXXXXXYYLVSTASLKTPAXT

SEQ ID NO: 5139 - protein, 38 aa, Artificial Sequence
  GFR-binding peptide
  MOD_RES (2), (34), (35): Xaa is C or S
GXGEVVMERYKKLVVKDYEDFYLMSIANLETPVXXAKP

SEQ ID NO: 5140 - protein, 33 aa, Artificial Sequence
  GFR-binding peptide
  MOD_RES (12), (13), (14), (15), (16): Xaa is A or G
  MOD_RES (17), (18), (19), (20): Xaa is A or G or is absent
ARVVMNRYKKLXXXXXXXXXFYLVSIANLQTPA

SEQ ID NO: 5141 - protein, 32 aa, Artificial Sequence
  GFR-binding peptide
  MOD_RES (1), (1): Xaa is C or S
XAKVVMNRYKKLIVNNSSDFYLVSIANLKTPA

SEQ ID NO: 5142 - protein, 40 aa, Artificial Sequence
  GFR-binding peptide
  MOD_RES (2), (4), (38), (39): Xaa is C or S
  MOD_RES (16), (17), (18), (19), (20): Xaa is A or G
  MOD_RES (21), (22), (23), (24): Xaa is A or G or is absent
HXGXARVVMNQYNKLXXXXXXXXXLYLVSIASLQTPAXXP

SEQ ID NO: 5143 - protein, 37 aa, Artificial Sequence
  GFR-binding peptide
  MOD_RES (31), (32): Xaa is C or S
SKVIMQYNKLIKPTKGILYLISIASLDQSVXXPSASA

SEQ ID NO: 5144 - protein, 32 aa, Artificial Sequence
  GFR-binding peptide
  MOD_RES (1), (32): Xaa is C or S
XSRVIMYHYKLVKPKRGVKYLISIPSLAQPVX

SEQ ID NO: 5145 - protein, 42 aa, Artificial Sequence
  GFR-binding peptide
  MOD_RES (2), (39): Xaa is C or S
KXALHDELTRHKRLFIPKKRVIEYYLVSTASLQVQTPRXQVN

SEQ ID NO: 5146 - protein, 40 aa, Artificial Sequence
  GFR-binding peptide
  MOD_RES (1), (3), (35), (36): Xaa is C or S
XGXAKVVMNRHKRLIVNNSSDYYLVSTASLKTPAXXAKPV

SEQ ID NO: 5147 - protein, 39 aa, Artificial Sequence
  GFR-binding peptide
  MOD_RES (1), (33), (34): Xaa is C or S
XGEVVMDRYKKLVVKENEDFYLMSIANLETPVXXAKPIK

SEQ ID NO: 5148 - protein, 36 aa, Artificial Sequence
  GFR-binding peptide
  MOD_RES (2), (4), (35), (36): Xaa is C or S
SXKXSRVIMRYKKLVKPKRGVFYLISIANLAQPVXX

SEQ ID NO: 5149 - protein, 37 aa, Artificial Sequence
  GFR-binding peptide
  MOD_RES (34), (35): Xaa is C or S
  MOD_RES (12), (13), (14), (15), (16): Xaa is A or G
  MOD_RES (17), (18), (19), (20): Xaa is A or G or is absent
ARVVMNQYNKLXXXXXXXXXLYLVSIASLQTPAXXPK

SEQ ID NO: 5150 - protein, 41 aa, Artificial Sequence
  GFR-binding peptide
  MOD_RES (1), (3), (37), (38): Xaa is C or S
  MOD_RES (15), (16), (17), (18), (19): Xaa is A or G
  MOD_RES (20), (21), (22), (23): Xaa is A or G or is absent
XGXSRVVMNQYNKLXXXXXXXXXLYLVSIASLKTPAXXPKP

SEQ ID NO: 5151 - protein, 41 aa, Artificial Sequence
  GFR-binding peptide
  MOD_RES (2), (36), (37): Xaa is C or S
  MOD_RES (14), (15), (16), (17), (18): Xaa is A or G
  MOD_RES (19), (20), (21), (22): Xaa is A or G or is absent
GXSRVVMNQYNKLXXXXXXXXXLYLVSIASLKTPAXXPKPV

SEQ ID NO: 5152 - protein, 31 aa, Artificial Sequence
  GFR-binding peptide
  MOD_RES (31), (31): Xaa is C or S
SKVVMQYNKLVKPTRGVLYLISIASLDQPVX

SEQ ID NO: 5153 - protein, 38 aa, Artificial Sequence
  GFR-binding peptide
  MOD_RES (32), (33): Xaa is C or S
AKVVMNQYNKLIVNNSSDLYLVSIASLKTPAXXAKPVA

SEQ ID NO: 5154 - protein, 36 aa, Artificial Sequence
  GFR-binding peptide
  MOD_RES (2), (34), (35): Xaa is C or S
GXGEVVMDRYKKLVVKENEDFYLMSIANLETPVXXA

SEQ ID NO: 5155 - protein, 36 aa, Artificial Sequence
  GFR-binding peptide
  MOD_RES (1), (33), (34): Xaa is C or S
XGEVVMERHKRLVVKDYEDYYLMSTASLETPVXXAK

SEQ ID NO: 5156 - protein, 39 aa, Artificial Sequence
  GFR-binding peptide
  MOD_RES (33), (33): Xaa is C or S
  MOD_RES (11), (12), (13), (14), (15): Xaa is A or G
  MOD_RES (16), (17), (18), (19): Xaa is A or G or is absent
RVVMNRYKKLXXXXXXXXXFYLVSIANLKTPAXTPKTVH

SEQ ID NO: 5157 - protein, 38 aa, Artificial Sequence
  GFR-binding peptide
  MOD_RES (2), (4), (36), (37): Xaa is C or S
RXGXGEVVMDQYNKLVVKENEDLYLMSIASLETPVXXA

SEQ ID NO: 5158 - protein, 35 aa, Artificial Sequence
  GFR-binding peptide
  MOD_RES (1), (3), (35): Xaa is C or S
XGXARVVMNYHYKLIVNSSDDKYLVSIPSLQTPAX

SEQ ID NO: 5159 - protein, 34 aa, Artificial Sequence
  GFR-binding peptide
  MOD_RES (2), (34): Xaa is C or S
GXSRVVMNRYKKLIVNSSDDFYLVSIANLKTPAX

SEQ ID NO: 5160 - protein, 42 aa, Artificial Sequence
  GFR-binding peptide
  MOD_RES (2), (36): Xaa is C or S
  MOD_RES (14), (15), (16), (17), (18): Xaa is A or G
  MOD_RES (19), (20), (21), (22): Xaa is A or G or is absent
GXSRVVMNQYNKLXXXXXXXXXLYLVSIASLKTPAXTPKTVH

SEQ ID NO: 5161 - protein, 35 aa, Artificial Sequence
  GFR-binding peptide
  MOD_RES (2), (4): Xaa is C or S
HXGXSRVVMNYHYKLIVNSSDDKYLVSIPSLKTPA

SEQ ID NO: 5162 - protein, 41 aa, Artificial Sequence
  GFR-binding peptide
  MOD_RES (2), (4), (36): Xaa is C or S
HXGXSRVVMNYHYKLIVNSSDDKYLVSIPSLKTPAXTPKTV

SEQ ID NO: 5163 - protein, 40 aa, Artificial Sequence
  GFR-binding peptide
  MOD_RES (2), (39): Xaa is C or S
KXALHDELTRYKKLFIPKKRVIEFYLVSIANLQVQTPRXQ

SEQ ID NO: 5164 - protein, 38 aa, Artificial Sequence
  GFR-binding peptide
  MOD_RES (33), (34): Xaa is C or S
  MOD_RES (11), (12), (13), (14), (15): Xaa is A or G
  MOD_RES (16), (17), (18), (19): Xaa is A or G or is absent
RVVMNQYNKLXXXXXXXXXLYLVSIASLQTPAXXPKPV

SEQ ID NO: 5165 - protein, 43 aa, Artificial Sequence
  GFR-binding peptide
  MOD_RES (2), (4), (38): Xaa is C or S
  MOD_RES (16), (17), (18), (19), (20): Xaa is A or G
  MOD_RES (21), (22), (23), (24): Xaa is A or G or is absent
HXGXSRVVMNQYNKLXXXXXXXXXLYLVSIASLKTPAXTPKTV

SEQ ID NO: 5166 - protein, 36 aa, Artificial Sequence
  GFR-binding peptide
  MOD_RES (1), (33), (34): Xaa is C or S
XGEVVMDRHKRLVVKENEDYYLMSTASLETPVXXAK

SEQ ID NO: 5167 - protein, 41 aa, Artificial Sequence
  GFR-binding peptide
  MOD_RES (2), (4), (38), (39): Xaa is C or S
  MOD_RES (16), (17), (18), (19), (20): Xaa is A or G
  MOD_RES (21), (22), (23), (24): Xaa is A or G or is absent
RXGXGEVVMDQYNKLXXXXXXXXXLYLMSIASLETPVXXAK

SEQ ID NO: 5168 - protein, 37 aa, Artificial Sequence
  GFR-binding peptide
  MOD_RES (34), (35): Xaa is C or S
  MOD_RES (12), (13), (14), (15), (16): Xaa is A or G
  MOD_RES (17), (18), (19), (20): Xaa is A or G or is absent
GEVVMDRYKKLXXXXXXXXXFYLMSIANLETPVXXAK

SEQ ID NO: 5169 - protein, 36 aa, Artificial Sequence
  GFR-binding peptide
  MOD_RES (1), (35), (36): Xaa is C or S
  MOD_RES (13), (14), (15), (16), (17): Xaa is A or G
  MOD_RES (18), (19), (20), (21): Xaa is A or G or is absent
XGEVVMDYHYKLXXXXXXXXXKYLMSIPSLETPVXX

SEQ ID NO: 5170 - protein, 37 aa, Artificial Sequence
  GFR-binding peptide
  MOD_RES (1), (32), (33): Xaa is C or S
XSKVIMRHKRLIKPTKGIYYLISTASLDQSVXXPSAS

SEQ ID NO: 5171 - protein, 32 aa, Artificial Sequence
  GFR-binding peptide
  MOD_RES (31), (32): Xaa is C or S
SRVIMRYKKLVKPKRGVFYLISIANLAQPVXX

SEQ ID NO: 5172 - protein, 42 aa, Artificial Sequence
  GFR-binding peptide
  MOD_RES (1), (3), (36), (37): Xaa is C or S
  MOD_RES (14), (15), (16), (17), (18): Xaa is A or G
  MOD_RES (19), (20), (21), (22): Xaa is A or G or is absent
XKXSKVIMRHKRLXXXXXXXXXYYLISTASLDQSVXXPSASA

SEQ ID NO: 5173 - protein, 30 aa, Artificial Sequence
  GFR-binding peptide
RVVMNQYNKLIVNSSDDLYLVSIASLQTPA

SEQ ID NO: 5174 - protein, 35 aa, Artificial Sequence
  GFR-binding peptide
  MOD_RES (2), (34), (35): Xaa is C or S
GXGEVVMDYHYKLVVKENEDKYLMSIPSLETPVXX

SEQ ID NO: 5175 - protein, 34 aa, Artificial Sequence
  GFR-binding peptide
  MOD_RES (1), (3), (34): Xaa is C or S
XKXSKVVMYHYKLVKPTRGVKYLISIPSLDQPVX

SEQ ID NO: 5176 - protein, 38 aa, Artificial Sequence
  GFR-binding peptide
  MOD_RES (1), (34), (35): Xaa is C or S
XEAVSMGERHKRLTPVGMDDYYLVSTASLKTPVXXAKG

SEQ ID NO: 5177 - protein, 34 aa, Artificial Sequence
  GFR-binding peptide
  MOD_RES (33), (34): Xaa is C or S
  MOD_RES (11), (12), (13), (14), (15): Xaa is A or G
  MOD_RES (16), (17), (18), (19): Xaa is A or G or is absent
EVVMERYKKLXXXXXXXXXFYLMSIANLETPVXX

SEQ ID NO: 5178 - protein, 32 aa, Artificial Sequence
  GFR-binding peptide
  MOD_RES (1), (1): Xaa is C or S
XGEVVMERHKRLVVKDYEDYYLMSTASLETPV

SEQ ID NO: 5179 - protein, 37 aa, Artificial Sequence
  GFR-binding peptide
  MOD_RES (33), (34): Xaa is C or S
  MOD_RES (11), (12), (13), (14), (15): Xaa is A or G
  MOD_RES (16), (17), (18), (19): Xaa is A or G or is absent
SKVVMYHYKLXXXXXXXXXKYLISIPSLDQPVXXPSA

SEQ ID NO: 5180 - protein, 33 aa, Artificial Sequence
  GFR-binding peptide
  MOD_RES (12), (13), (14), (15), (16): Xaa is A or G
  MOD_RES (17), (18), (19), (20): Xaa is A or G or is absent
GEVVMDRYKKLXXXXXXXXXFYLMSIANLETPV

SEQ ID NO: 5181 - protein, 40 aa, Artificial Sequence
  GFR-binding peptide
  MOD_RES (2), (4): Xaa is C or S
EXKXALHDELTRYKKLFIPKKRVIEFYLVSIANLQVQTPR

SEQ ID NO: 5182 - protein, 38 aa, Artificial Sequence
  GFR-binding peptide
  MOD_RES (1), (32), (33): Xaa is C or S
XSKVVMYHYKLVKPTRGVKYLISIPSLDQPVXXPSASA

SEQ ID NO: 5183 - protein, 35 aa, Artificial Sequence
  GFR-binding peptide
  MOD_RES (1), (35): Xaa is C or S
  MOD_RES (13), (14), (15), (16), (17): Xaa is A or G
  MOD_RES (18), (19), (20), (21): Xaa is A or G or is absent
XGEVVMDQYNKLXXXXXXXXXLYLMSIASLETPVX

SEQ ID NO: 5184 - protein, 35 aa, Artificial Sequence
  GFR-binding peptide
  MOD_RES (1), (34), (35): Xaa is C or S
XEAVSMGEYHYKLTPVGMDDKYLVSIPSLKTPVXX

SEQ ID NO: 5185 - protein, 36 aa, Artificial Sequence
  GFR-binding peptide
  MOD_RES (2), (33), (34): Xaa is C or S
KXSKVVMRYKKLVKPTRGVFYLISIANLDQPVXXPS

SEQ ID NO: 5186 - protein, 38 aa, Artificial Sequence
  GFR-binding peptide
  MOD_RES (1), (35), (36): Xaa is C or S
  MOD_RES (13), (14), (15), (16), (17): Xaa is A or G
  MOD_RES (18), (19), (20), (21): Xaa is A or G or is absent
XARVVMNYHYKLXXXXXXXXXKYLVSIPSLQTPAXXPK

SEQ ID NO: 5187 - protein, 37 aa, Artificial Sequence
  GFR-binding peptide
  MOD_RES (1), (32), (33): Xaa is C or S
XSKVVMYHYKLVKPTRGVKYLISIPSLDQPVXXPSAS

SEQ ID NO: 5188 - protein, 32 aa, Artificial Sequence
  GFR-binding peptide
EAVSMGEQYNKLTPVGMDDLYLVSIASLKTPV

SEQ ID NO: 5189 - protein, 44 aa, Artificial Sequence
  GFR-binding peptide
  MOD_RES (2), (4), (38), (39): Xaa is C or S
  MOD_RES (16), (17), (18), (19), (20): Xaa is A or G
  MOD_RES (21), (22), (23), (24): Xaa is A or G or is absent
HXGXARVVMNYHYKLXXXXXXXXXKYLVSIPSLQTPAXXPKPVT

SEQ ID NO: 5190 - protein, 40 aa, Artificial Sequence
  GFR-binding peptide
  MOD_RES (1), (3), (37), (38): Xaa is C or S
  MOD_RES (15), (16), (17), (18), (19): Xaa is A or G
  MOD_RES (20), (21), (22), (23): Xaa is A or G or is absent
XGXGEVVMDQYNKLXXXXXXXXXLYLMSIASLETPVXXAK

SEQ ID NO: 5191 - protein, 38 aa, Artificial Sequence
  GFR-binding peptide
  MOD_RES (1), (38): Xaa is C or S
XALHDELTQYNKLFIPKKRVIELYLVSIASLQVQTPRX

SEQ ID NO: 5192 - protein, 35 aa, Artificial Sequence
  GFR-binding peptide
  MOD_RES (1), (3), (35): Xaa is C or S
XGXAKVVMNQYNKLIVNNSSDLYLVSIASLKTPAX

SEQ ID NO: 5193 - protein, 33 aa, Artificial Sequence
  GFR-binding peptide
  MOD_RES (33), (33): Xaa is C or S
  MOD_RES (11), (12), (13), (14), (15): Xaa is A or G
  MOD_RES (16), (17), (18), (19): Xaa is A or G or is absent
RVVMNQYNKLXXXXXXXXXLYLVSIASLQTPAX

SEQ ID NO: 5194 - protein, 42 aa, Artificial Sequence
  GFR-binding peptide
  MOD_RES (2), (4), (38), (39): Xaa is C or S
  MOD_RES (16), (17), (18), (19), (20): Xaa is A or G
  MOD_RES (21), (22), (23), (24): Xaa is A or G or is absent
RXGXGEVVMEYHYKLXXXXXXXXXKYLMSIPSLETPVXXAKP

SEQ ID NO: 5195 - protein, 35 aa, Artificial Sequence
  GFR-binding peptide
  MOD_RES (1), (32), (33): Xaa is C or S
XSKVVMRYKKLVKPTRGVFYLISIANLDQPVXXPS

SEQ ID NO: 5196 - protein, 38 aa, Artificial Sequence
  GFR-binding peptide
  MOD_RES (1), (3), (35), (36): Xaa is C or S
XGXSRVVMNRHKRLIVNSSDDYYLVSTASLKTPAXXPK

SEQ ID NO: 5197 - protein, 39 aa, Artificial Sequence
  GFR-binding peptide
  MOD_RES (1), (3), (37), (38): Xaa is C or S
  MOD_RES (15), (16), (17), (18), (19): Xaa is A or G
  MOD_RES (20), (21), (22), (23): Xaa is A or G or is absent
XGXAKVVMNRYKKLXXXXXXXXXFYLVSIANLKTPAXXA

SEQ ID NO: 5198 - protein, 36 aa, Artificial Sequence
  GFR-binding peptide
  MOD_RES (32), (33): Xaa is C or S
SRVVMNYHYKLIVNSSDDKYLVSIPSLKTPAXXPKP

SEQ ID NO: 5199 - protein, 41 aa, Artificial Sequence
  GFR-binding peptide
  MOD_RES (1), (3), (35): Xaa is C or S
XGXSRVVMNYHYKLIVNSSDDKYLVSIPSLKTPAXTPKTVH

SEQ ID NO: 5200 - protein, 38 aa, Artificial Sequence
  GFR-binding peptide
  MOD_RES (1), (33), (34): Xaa is C or S
XGEVVMDYHYKLVVKENEDKYLMSIPSLETPVXXAKPI

SEQ ID NO: 5201 - protein, 36 aa, Artificial Sequence
  GFR-binding peptide
  MOD_RES (33), (34): Xaa is C or S
EAVSMGERYKKLTPVGMDDFYLVSIANLKTPVXXAK

SEQ ID NO: 5202 - protein, 35 aa, Artificial Sequence
  GFR-binding peptide
  MOD_RES (1), (35): Xaa is C or S
  MOD_RES (13), (14), (15), (16), (17): Xaa is A or G
  MOD_RES (18), (19), (20), (21): Xaa is A or G or is absent
XARVVMNQYNKLXXXXXXXXXLYLVSIASLQTPAX

SEQ ID NO: 5203 - protein, 36 aa, Artificial Sequence
  GFR-binding peptide
  MOD_RES (1), (36): Xaa is C or S
  MOD_RES (14), (15), (16), (17), (18): Xaa is A or G
  MOD_RES (19), (20), (21), (22): Xaa is A or G or is absent
XEAVSMGERHKRLXXXXXXXXXYYLVSTASLKTPVX

SEQ ID NO: 5204 - protein, 44 aa, Artificial Sequence
  GFR-binding peptide
  MOD_RES (1), (3), (40): Xaa is C or S
  MOD_RES (16), (17), (18), (19), (20): Xaa is A or G
  MOD_RES (21), (22), (23), (24): Xaa is A or G or is absent
XKXALHDELTRYKKLXXXXXXXXXFYLVSIANLQVQTPRXQVNR

SEQ ID NO: 5205 - protein, 37 aa, Artificial Sequence
  GFR-binding peptide
  MOD_RES (2), (34), (35): Xaa is C or S
GXGEVVMDRHKRLVVKENEDYYLMSTASLETPVXXAK

SEQ ID NO: 5206 - protein, 39 aa, Artificial Sequence
  GFR-binding peptide
  MOD_RES (33), (34): Xaa is C or S
  MOD_RES (11), (12), (13), (14), (15): Xaa is A or G
  MOD_RES (16), (17), (18), (19): Xaa is A or G or is absent
KVVMNQYNKLXXXXXXXXXLYLVSIASLKTPAXXAKPVA

SEQ ID NO: 5207 - protein, 31 aa, Artificial Sequence
  GFR-binding peptide
  MOD_RES (1), (1): Xaa is C or S
XSKVIMYHYKLIKPTKGIKYLISIPSLDQSV

SEQ ID NO: 5208 - protein, 35 aa, Artificial Sequence
  GFR-binding peptide
  MOD_RES (1), (34), (35): Xaa is C or S
  MOD_RES (12), (13), (14), (15), (16): Xaa is A or G
  MOD_RES (17), (18), (19), (20): Xaa is A or G or is absent
XSRVIMQYNKLXXXXXXXXXLYLISIASLAQPVXX

SEQ ID NO: 5209 - protein, 39 aa, Artificial Sequence
  GFR-binding peptide
  MOD_RES (37), (37): Xaa is C or S
ALHDELTQYNKLFIPKKRVIELYLVSIASLQVQTPRXQV

SEQ ID NO: 5210 - protein, 39 aa, Artificial Sequence
  GFR-binding peptide
  MOD_RES (37), (37): Xaa is C or S
ALHDELTRHKRLFIPKKRVIEYYLVSTASLQVQTPRXQV

SEQ ID NO: 5211 - protein, 39 aa, Artificial Sequence
  GFR-binding peptide
  MOD_RES (36), (36): Xaa is C or S
LHDELTRHKRLFIPKKRVIEYYLVSTASLQVQTPRXQVN

SEQ ID NO: 5212 - protein, 40 aa, Artificial Sequence
  GFR-binding peptide
  MOD_RES (34), (35): Xaa is C or S
  MOD_RES (12), (13), (14), (15), (16): Xaa is A or G
  MOD_RES (17), (18), (19), (20): Xaa is A or G or is absent
GEVVMDYHYKLXXXXXXXXXKYLMSIPSLETPVXXAKPIK

SEQ ID NO: 5213 - protein, 34 aa, Artificial Sequence
  GFR-binding peptide
  MOD_RES (1), (3): Xaa is C or S
XGXGEVVMDQYNKLVVKENEDLYLMSIASLETPV

SEQ ID NO: 5214 - protein, 32 aa, Artificial Sequence
  GFR-binding peptide
  MOD_RES (31), (32): Xaa is C or S
SRVIMQYNKLVKPKRGVLYLISIASLAQPVXX

SEQ ID NO: 5215 - protein, 35 aa, Artificial Sequence
  GFR-binding peptide
  MOD_RES (34), (34): Xaa is C or S
  MOD_RES (12), (13), (14), (15), (16): Xaa is A or G
  MOD_RES (17), (18), (19), (20): Xaa is A or G or is absent
SRVVMNYHYKLXXXXXXXXXKYLVSIPSLKTPAXT

SEQ ID NO: 5216 - protein, 41 aa, Artificial Sequence
  GFR-binding peptide
  MOD_RES (2), (37), (38): Xaa is C or S
  MOD_RES (15), (16), (17), (18), (19): Xaa is A or G
  MOD_RES (20), (21), (22), (23): Xaa is A or G or is absent
GXEAVSMGEQYNKLXXXXXXXXXLYLVSIASLKTPVXXAKG

SEQ ID NO: 5217 - protein, 37 aa, Artificial Sequence
  GFR-binding peptide
  MOD_RES (1), (3), (36), (37): Xaa is C or S
  MOD_RES (14), (15), (16), (17), (18): Xaa is A or G
  MOD_RES (19), (20), (21), (22): Xaa is A or G or is absent
XKXSKVVMRYKKLXXXXXXXXXFYLISIANLDQPVXX

SEQ ID NO: 5218 - protein, 40 aa, Artificial Sequence
  GFR-binding peptide
  MOD_RES (1), (3), (35), (36): Xaa is C or S
XGXAKVVMNQYNKLIVNNSSDLYLVSIASLKTPAXXAKPV

SEQ ID NO: 5219 - protein, 35 aa, Artificial Sequence
  GFR-binding peptide
  MOD_RES (2), (34), (35): Xaa is C or S
GXAKVVMNRYKKLIVNNSSDFYLVSIANLKTPAXX

SEQ ID NO: 5220 - protein, 40 aa, Artificial Sequence
  GFR-binding peptide
  MOD_RES (2), (4), (35), (36): Xaa is C or S
SXKXSRVIMQYNKLVKPKRGVLYLISIASLAQPVXXPAAS

SEQ ID NO: 5221 - protein, 37 aa, Artificial Sequence
  GFR-binding peptide
  MOD_RES (2), (35), (36): Xaa is C or S
  MOD_RES (13), (14), (15), (16), (17): Xaa is A or G
  MOD_RES (18), (19), (20), (21): Xaa is A or G or is absent
KXSKVIMYHYKLXXXXXXXXXKYLISIPSLDQSVXXP

SEQ ID NO: 5222 - protein, 40 aa, Artificial Sequence
  GFR-binding peptide
  MOD_RES (1), (35), (36): Xaa is C or S
  MOD_RES (13), (14), (15), (16), (17): Xaa is A or G
  MOD_RES (18), (19), (20), (21): Xaa is A or G or is absent
XARVVMNRHKRLXXXXXXXXXYYLVSTASLQTPAXXPKPV

SEQ ID NO: 5223 - protein, 37 aa, Artificial Sequence
  GFR-binding peptide
  MOD_RES (31), (32): Xaa is C or S
SKVIMRYKKLIKPTKGIFYLISIANLDQSVXXPSASA

SEQ ID NO: 5224 - protein, 42 aa, Artificial Sequence
  GFR-binding peptide
  MOD_RES (2), (37), (38): Xaa is C or S
  MOD_RES (15), (16), (17), (18), (19): Xaa is A or G
  MOD_RES (20), (21), (22), (23): Xaa is A or G or is absent
GXEAVSMGERYKKLXXXXXXXXXFYLVSIANLKTPVXXAKGV

SEQ ID NO: 5225 - protein, 34 aa, Artificial Sequence
  GFR-binding peptide
  MOD_RES (33), (33): Xaa is C or S
  MOD_RES (11), (12), (13), (14), (15): Xaa is A or G
  MOD_RES (16), (17), (18), (19): Xaa is A or G or is absent
RVVMNRYKKLXXXXXXXXXFYLVSIANLKTPAXT

SEQ ID NO: 5226 - protein, 41 aa, Artificial Sequence
  GFR-binding peptide
  MOD_RES (2), (4), (35), (36): Xaa is C or S
SXKXSRVIMQYNKLVKPKRGVLYLISIASLAQPVXXPAASA

SEQ ID NO: 5227 - protein, 41 aa, Artificial Sequence
  GFR-binding peptide
  MOD_RES (1), (36), (37): Xaa is C or S
  MOD_RES (14), (15), (16), (17), (18): Xaa is A or G
  MOD_RES (19), (20), (21), (22): Xaa is A or G or is absent
XEAVSMGEYHYKLXXXXXXXXXKYLVSIPSLKTPVXXAKGV

SEQ ID NO: 5228 - protein, 38 aa, Artificial Sequence
  GFR-binding peptide
  MOD_RES (2), (37), (38): Xaa is C or S
  MOD_RES (15), (16), (17), (18), (19): Xaa is A or G
  MOD_RES (20), (21), (22), (23): Xaa is A or G or is absent
GXEAVSMGERHKRLXXXXXXXXXYYLVSTASLKTPVXX

SEQ ID NO: 5229 - protein, 35 aa, Artificial Sequence
  GFR-binding peptide
  MOD_RES (33), (34): Xaa is C or S
  MOD_RES (11), (12), (13), (14), (15): Xaa is A or G
  MOD_RES (16), (17), (18), (19): Xaa is A or G or is absent
SRVIMQYNKLXXXXXXXXXLYLISIASLAQPVXXP

SEQ ID NO: 5230 - protein, 39 aa, Artificial Sequence
  GFR-binding peptide
  MOD_RES (2), (4), (38), (39): Xaa is C or S
  MOD_RES (16), (17), (18), (19), (20): Xaa is A or G
  MOD_RES (21), (22), (23), (24): Xaa is A or G or is absent
HXGXARVVMNQYNKLXXXXXXXXXLYLVSIASLQTPAXX

SEQ ID NO: 5231 - protein, 34 aa, Artificial Sequence
  GFR-binding peptide
  MOD_RES (1), (1): Xaa is C or S
  MOD_RES (13), (14), (15), (16), (17): Xaa is A or G
  MOD_RES (18), (19), (20), (21): Xaa is A or G or is absent
XARVVMNYHYKLXXXXXXXXXKYLVSIPSLQTPA

SEQ ID NO: 5232 - protein, 35 aa, Artificial Sequence
  GFR-binding peptide
  MOD_RES (33), (34): Xaa is C or S
EAVSMGEQYNKLTPVGMDDLYLVSIASLKTPVXXA

SEQ ID NO: 5233 - protein, 32 aa, Artificial Sequence
  GFR-binding peptide
  MOD_RES (31), (32): Xaa is C or S
KVVMNRHKRLIVNNSSDYYLVSTASLKTPAXX

SEQ ID NO: 5234 - protein, 36 aa, Artificial Sequence
  GFR-binding peptide
  MOD_RES (1), (32), (33): Xaa is C or S
XSKVVMQYNKLVKPTRGVLYLISIASLDQPVXXPSA

SEQ ID NO: 5235 - protein, 35 aa, Artificial Sequence
  GFR-binding peptide
  MOD_RES (2), (34), (35): Xaa is C or S
GXGEVVMERHKRLVVKDYEDYYLMSTASLETPVXX

SEQ ID NO: 5236 - protein, 35 aa, Artificial Sequence
  GFR-binding peptide
  MOD_RES (2), (4), (35): Xaa is C or S
SXKXSKVVMYHYKLVKPTRGVKYLISIPSLDQPVX

SEQ ID NO: 5237 - protein, 31 aa, Artificial Sequence
  GFR-binding peptide
  MOD_RES (31), (31): Xaa is C or S
RVVMNQYNKLIVNSSDDLYLVSIASLQTPAX

SEQ ID NO: 5238 - protein, 40 aa, Artificial Sequence
  GFR-binding peptide
  MOD_RES (2), (39): Xaa is C or S
  MOD_RES (15), (16), (17), (18), (19): Xaa is A or G
  MOD_RES (20), (21), (22), (23): Xaa is A or G or is absent
KXALHDELTRHKRLXXXXXXXXXYYLVSTASLQVQTPRXQ

SEQ ID NO: 5239 - protein, 42 aa, Artificial Sequence
  GFR-binding peptide
  MOD_RES (2), (4), (37), (38): Xaa is C or S
  MOD_RES (15), (16), (17), (18), (19): Xaa is A or G
  MOD_RES (20), (21), (22), (23): Xaa is A or G or is absent
SXKXSRVIMQYNKLXXXXXXXXXLYLISIASLAQPVXXPAAS

SEQ ID NO: 5240 - protein, 34 aa, Artificial Sequence
  GFR-binding peptide
  MOD_RES (1), (3), (34): Xaa is C or S
XKXSRVIMYHYKLVKPKRGVKYLISIPSLAQPVX

SEQ ID NO: 5241 - protein, 41 aa, Artificial Sequence
  GFR-binding peptide
  MOD_RES (2), (35), (36): Xaa is C or S
  MOD_RES (13), (14), (15), (16), (17): Xaa is A or G
  MOD_RES (18), (19), (20), (21): Xaa is A or G or is absent
KXSKVIMQYNKLXXXXXXXXXLYLISIASLDQSVXXPSASA

SEQ ID NO: 5242 - protein, 41 aa, Artificial Sequence
  GFR-binding peptide
  MOD_RES (2), (35), (36): Xaa is C or S
  MOD_RES (13), (14), (15), (16), (17): Xaa is A or G
  MOD_RES (18), (19), (20), (21): Xaa is A or G or is absent
KXSKVIMRYKKLXXXXXXXXXFYLISIANLDQSVXXPSASA

SEQ ID NO: 5243 - protein, 38 aa, Artificial Sequence
  GFR-binding peptide
  MOD_RES (33), (34): Xaa is C or S
  MOD_RES (11), (12), (13), (14), (15): Xaa is A or G
  MOD_RES (16), (17), (18), (19): Xaa is A or G or is absent
KVVMNYHYKLXXXXXXXXXKYLVSIPSLKTPAXXAKPV

SEQ ID NO: 5244 - protein, 39 aa, Artificial Sequence
  GFR-binding peptide
  MOD_RES (1), (3), (37), (38): Xaa is C or S
  MOD_RES (15), (16), (17), (18), (19): Xaa is A or G
  MOD_RES (20), (21), (22), (23): Xaa is A or G or is absent
XGXSRVVMNQYNKLXXXXXXXXXLYLVSIASLKTPAXXP

SEQ ID NO: 5245 - protein, 35 aa, Artificial Sequence
  GFR-binding peptide
  MOD_RES (2), (4): Xaa is C or S
HXGXSRVVMNQYNKLIVNSSDDLYLVSIASLKTPA

SEQ ID NO: 5246 - protein, 36 aa, Artificial Sequence
  GFR-binding peptide
  MOD_RES (2), (33), (34): Xaa is C or S
KXSRVIMRHKRLVKPKRGVYYLISTASLAQPVXXPA

SEQ ID NO: 5247 - protein, 40 aa, Artificial Sequence
  GFR-binding peptide
  MOD_RES (2), (4), (36): Xaa is C or S
HXGXSRVVMNRYKKLIVNSSDDFYLVSIANLKTPAXTPKT

SEQ ID NO: 5248 - protein, 35 aa, Artificial Sequence
  GFR-binding peptide
  MOD_RES (31), (32): Xaa is C or S
RVVMNRHKRLIVNSSDDYYLVSTASLKTPAXXPKP

SEQ ID NO: 5249 - protein, 39 aa, Artificial Sequence
  GFR-binding peptide
  MOD_RES (2), (4), (37), (38): Xaa is C or S
RXGXEAVSMGERYKKLTPVGMDDFYLVSIANLKTPVXXA

SEQ ID NO: 5250 - protein, 38 aa, Artificial Sequence
  GFR-binding peptide
  MOD_RES (1), (3), (35), (36): Xaa is C or S
XGXGEVVMDRYKKLVVKENEDFYLMSIANLETPVXXAK

SEQ ID NO: 5251 - protein, 35 aa, Artificial Sequence
  GFR-binding peptide
  MOD_RES (1), (34), (35): Xaa is C or S
  MOD_RES (12), (13), (14), (15), (16): Xaa is A or G
  MOD_RES (17), (18), (19), (20): Xaa is A or G or is absent
XSRVIMRHKRLXXXXXXXXXYYLISTASLAQPVXX

SEQ ID NO: 5252 - protein, 45 aa, Artificial Sequence
  GFR-binding peptide
  MOD_RES (2), (4), (39), (40): Xaa is C or S
  MOD_RES (17), (18), (19), (20), (21): Xaa is A or G
  MOD_RES (22), (23), (24), (25): Xaa is A or G or is absent
RXGXEAVSMGERYKKLXXXXXXXXXFYLVSIANLKTPVXXAKGVK

SEQ ID NO: 5253 - protein, 37 aa, Artificial Sequence
  GFR-binding peptide
  MOD_RES (1), (34), (35): Xaa is C or S
XEAVSMGERYKKLTPVGMDDFYLVSIANLKTPVXXAK

SEQ ID NO: 5254 - protein, 36 aa, Artificial Sequence
  GFR-binding peptide
  MOD_RES (2), (4), (36): Xaa is C or S
RXGXGEVVMEYHYKLVVKDYEDKYLMSIPSLETPVX

SEQ ID NO: 5255 - protein, 33 aa, Artificial Sequence
  GFR-binding peptide
  MOD_RES (33), (33): Xaa is C or S
  MOD_RES (11), (12), (13), (14), (15): Xaa is A or G
  MOD_RES (16), (17), (18), (19): Xaa is A or G or is absent
EVVMDRYKKLXXXXXXXXXFYLMSIANLETPVX

SEQ ID NO: 5256 - protein, 40 aa, Artificial Sequence
  GFR-binding peptide
  MOD_RES (1), (3), (35), (36): Xaa is C or S
XGXGEVVMERYKKLVVKDYEDFYLMSIANLETPVXXAKPI

SEQ ID NO: 5257 - protein, 39 aa, Artificial Sequence
  GFR-binding peptide
  MOD_RES (2), (33), (34): Xaa is C or S
KXSKVIMQYNKLIKPTKGILYLISIASLDQSVXXPSASA

SEQ ID NO: 5258 - protein, 40 aa, Artificial Sequence
  GFR-binding peptide
  MOD_RES (2), (36), (37): Xaa is C or S
  MOD_RES (14), (15), (16), (17), (18): Xaa is A or G
  MOD_RES (19), (20), (21), (22): Xaa is A or G or is absent
GXARVVMNQYNKLXXXXXXXXXLYLVSIASLQTPAXXPKP

SEQ ID NO: 5259 - protein, 43 aa, Artificial Sequence
  GFR-binding peptide
  MOD_RES (1), (3), (37), (38): Xaa is C or S
  MOD_RES (15), (16), (17), (18), (19): Xaa is A or G
  MOD_RES (20), (21), (22), (23): Xaa is A or G or is absent
XGXAKVVMNRHKRLXXXXXXXXXYYLVSTASLKTPAXXAKPVA

SEQ ID NO: 5260 - protein, 42 aa, Artificial Sequence
  GFR-binding peptide
  MOD_RES (2), (4), (38), (39): Xaa is C or S
  MOD_RES (16), (17), (18), (19), (20): Xaa is A or G
  MOD_RES (21), (22), (23), (24): Xaa is A or G or is absent
HXGXAKVVMNRHKRLXXXXXXXXXYYLVSTASLKTPAXXAKP

SEQ ID NO: 5261 - protein, 39 aa, Artificial Sequence
  GFR-binding peptide
  MOD_RES (1), (3), (37), (38): Xaa is C or S
  MOD_RES (15), (16), (17), (18), (19): Xaa is A or G
  MOD_RES (20), (21), (22), (23): Xaa is A or G or is absent
XGXARVVMNRHKRLXXXXXXXXXYYLVSTASLQTPAXXP

SEQ ID NO: 5262 - protein, 36 aa, Artificial Sequence
  GFR-binding peptide
  MOD_RES (35), (35): Xaa is C or S
HDELTQYNKLFIPKKRVIELYLVSIASLQVQTPRXQ

SEQ ID NO: 5263 - protein, 32 aa, Artificial Sequence
  GFR-binding peptide
  MOD_RES (11), (12), (13), (14), (15): Xaa is A or G
  MOD_RES (16), (17), (18), (19): Xaa is A or G or is absent
SKVVMYHYKLXXXXXXXXXKYLISIPSLDQPV

SEQ ID NO: 5264 - protein, 32 aa, Artificial Sequence
  GFR-binding peptide
  MOD_RES (2), (2): Xaa is C or S
KXSKVVMYHYKLVKPTRGVKYLISIPSLDQPV

SEQ ID NO: 5265 - protein, 39 aa, Artificial Sequence
  GFR-binding peptide
  MOD_RES (1), (3), (36), (37): Xaa is C or S
  MOD_RES (14), (15), (16), (17), (18): Xaa is A or G
  MOD_RES (19), (20), (21), (22): Xaa is A or G or is absent
XKXSRVIMRYKKLXXXXXXXXXFYLISIANLAQPVXXPA

SEQ ID NO: 5266 - protein, 39 aa, Artificial Sequence
  GFR-binding peptide
  MOD_RES (36), (36): Xaa is C or S
  MOD_RES (12), (13), (14), (15), (16): Xaa is A or G
  MOD_RES (17), (18), (19), (20): Xaa is A or G or is absent
LHDELTQYNKLXXXXXXXXXLYLVSIASLQVQTPRXQVN

SEQ ID NO: 5267 - protein, 35 aa, Artificial Sequence
  GFR-binding peptide
  MOD_RES (2), (4), (35): Xaa is C or S
SXKXSRVIMQYNKLVKPKRGVLYLISIASLAQPVX

SEQ ID NO: 5268 - protein, 40 aa, Artificial Sequence
  GFR-binding peptide
  MOD_RES (34), (35): Xaa is C or S
  MOD_RES (12), (13), (14), (15), (16): Xaa is A or G
  MOD_RES (17), (18), (19), (20): Xaa is A or G or is absent
ARVVMNRYKKLXXXXXXXXXFYLVSIANLQTPAXXPKPVT

SEQ ID NO: 5269 - protein, 37 aa, Artificial Sequence
  GFR-binding peptide
  MOD_RES (35), (36): Xaa is C or S
  MOD_RES (13), (14), (15), (16), (17): Xaa is A or G
  MOD_RES (18), (19), (20), (21): Xaa is A or G or is absent
EAVSMGERYKKLXXXXXXXXXFYLVSIANLKTPVXXA

SEQ ID NO: 5270 - protein, 38 aa, Artificial Sequence
  GFR-binding peptide
  MOD_RES (32), (33): Xaa is C or S
GEVVMDRHKRLVVKENEDYYLMSTASLETPVXXAKPIK

SEQ ID NO: 5271 - protein, 36 aa, Artificial Sequence
  GFR-binding peptide
  MOD_RES (1), (32), (33): Xaa is C or S
XSKVIMRHKRLIKPTKGIYYLISTASLDQSVXXPSA

SEQ ID NO: 5272 - protein, 37 aa, Artificial Sequence
  GFR-binding peptide
  MOD_RES (1), (35), (36): Xaa is C or S
  MOD_RES (13), (14), (15), (16), (17): Xaa is A or G
  MOD_RES (18), (19), (20), (21): Xaa is A or G or is absent
XGEVVMERHKRLXXXXXXXXXYYLMSTASLETPVXXA

SEQ ID NO: 5273 - protein, 37 aa, Artificial Sequence
  GFR-binding peptide
  MOD_RES (35), (35): Xaa is C or S
  MOD_RES (11), (12), (13), (14), (15): Xaa is A or G
  MOD_RES (16), (17), (18), (19): Xaa is A or G or is absent
HDELTYHYKLXXXXXXXXXKYLVSIPSLQVQTPRXQV

SEQ ID NO: 5274 - protein, 39 aa, Artificial Sequence
  GFR-binding peptide
  MOD_RES (2), (4), (38), (39): Xaa is C or S
  MOD_RES (16), (17), (18), (19), (20): Xaa is A or G
  MOD_RES (21), (22), (23), (24): Xaa is A or G or is absent
HXGXSRVVMNRYKKLXXXXXXXXXFYLVSIANLKTPAXX

SEQ ID NO: 5275 - protein, 33 aa, Artificial Sequence
  GFR-binding peptide
  MOD_RES (32), (32): Xaa is C or S
SRVVMNRYKKLIVNSSDDFYLVSIANLKTPAXT

SEQ ID NO: 5276 - protein, 38 aa, Artificial Sequence
  GFR-binding peptide
  MOD_RES (32), (33): Xaa is C or S
SRVVMNRYKKLIVNSSDDFYLVSIANLKTPAXXPKPVY

SEQ ID NO: 5277 - protein, 39 aa, Artificial Sequence
  GFR-binding peptide
  MOD_RES (1), (3): Xaa is C or S
  MOD_RES (16), (17), (18), (19), (20): Xaa is A or G
  MOD_RES (21), (22), (23), (24): Xaa is A or G or is absent
XKXALHDELTRHKRLXXXXXXXXXYYLVSTASLQVQTPR

SEQ ID NO: 5278 - protein, 43 aa, Artificial Sequence
  GFR-binding peptide
  MOD_RES (2), (4), (41): Xaa is C or S
EXKXALHDELTQYNKLFIPKKRVIELYLVSIASLQVQTPRXQV

SEQ ID NO: 5279 - protein, 40 aa, Artificial Sequence
  GFR-binding peptide
  MOD_RES (2), (34), (35): Xaa is C or S
GXGEVVMDRHKRLVVKENEDYYLMSTASLETPVXXAKPIK

SEQ ID NO: 5280 - protein, 38 aa, Artificial Sequence
  GFR-binding peptide
  MOD_RES (1), (35), (36): Xaa is C or S
  MOD_RES (13), (14), (15), (16), (17): Xaa is A or G
  MOD_RES (18), (19), (20), (21): Xaa is A or G or is absent
XAKVVMNYHYKLXXXXXXXXXKYLVSIPSLKTPAXXAK

SEQ ID NO: 5281 - protein, 41 aa, Artificial Sequence
  GFR-binding peptide
  MOD_RES (2), (4), (36), (37): Xaa is C or S
RXGXGEVVMERHKRLVVKDYEDYYLMSTASLETPVXXAKPI

SEQ ID NO: 5282 - protein, 36 aa, Artificial Sequence
  GFR-binding peptide
  MOD_RES (34), (35): Xaa is C or S
  MOD_RES (12), (13), (14), (15), (16): Xaa is A or G
  MOD_RES (17), (18), (19), (20): Xaa is A or G or is absent
SRVVMNQYNKLXXXXXXXXXLYLVSIASLKTPAXXP

SEQ ID NO: 5283 - protein, 35 aa, Artificial Sequence
  GFR-binding peptide
  MOD_RES (1), (33), (34): Xaa is C or S
XSRVVMNQYNKLIVNSSDDLYLVSIASLKTPAXXP

SEQ ID NO: 5284 - protein, 39 aa, Artificial Sequence
  GFR-binding peptide
  MOD_RES (2), (34), (35): Xaa is C or S
GXSRVVMNYHYKLIVNSSDDKYLVSIPSLKTPAXXPKPV

SEQ ID NO: 5285 - protein, 42 aa, Artificial Sequence
  GFR-binding peptide
  MOD_RES (1), (3), (40): Xaa is C or S
XKXALHDELTQYNKLFIPKKRVIELYLVSIASLQVQTPRXQV

SEQ ID NO: 5286 - protein, 41 aa, Artificial Sequence
  GFR-binding peptide
  MOD_RES (2), (39): Xaa is C or S
  MOD_RES (15), (16), (17), (18), (19): Xaa is A or G
  MOD_RES (20), (21), (22), (23): Xaa is A or G or is absent
KXALHDELTRHKRLXXXXXXXXXYYLVSTASLQVQTPRXQV

SEQ ID NO: 5287 - protein, 40 aa, Artificial Sequence
  GFR-binding peptide
  MOD_RES (2), (4), (37), (38): Xaa is C or S
RXGXEAVSMGEYHYKLTPVGMDDKYLVSIPSLKTPVXXAK

SEQ ID NO: 5288 - protein, 42 aa, Artificial Sequence
  GFR-binding peptide
  MOD_RES (2), (4), (36), (37): Xaa is C or S
HXGXARVVMNQYNKLIVNSSDDLYLVSIASLQTPAXXPKPVT

SEQ ID NO: 5289 - protein, 31 aa, Artificial Sequence
  GFR-binding peptide
  MOD_RES (31), (31): Xaa is C or S
RVVMNRHKRLIVNSSDDYYLVSTASLKTPAX

SEQ ID NO: 5290 - protein, 35 aa, Artificial Sequence
  GFR-binding peptide
  MOD_RES (1), (3), (35): Xaa is C or S
XGXGEVVMDRYKKLVVKENEDFYLMSIANLETPVX

SEQ ID NO: 5291 - protein, 33 aa, Artificial Sequence
  GFR-binding peptide
  MOD_RES (31), (32): Xaa is C or S
EVVMEYHYKLVVKDYEDKYLMSIPSLETPVXXA

SEQ ID NO: 5292 - protein, 40 aa, Artificial Sequence
  GFR-binding peptide
  MOD_RES (2), (4), (37), (38): Xaa is C or S
  MOD_RES (15), (16), (17), (18), (19): Xaa is A or G
  MOD_RES (20), (21), (22), (23): Xaa is A or G or is absent
SXKXSRVIMRYKKLXXXXXXXXXFYLISIANLAQPVXXPA

SEQ ID NO: 5293 - protein, 39 aa, Artificial Sequence
  GFR-binding peptide
  MOD_RES (2), (33), (34): Xaa is C or S
KXSKVVMQYNKLVKPTRGVLYLISIASLDQPVXXPSASA

SEQ ID NO: 5294 - protein, 36 aa, Artificial Sequence
  GFR-binding peptide
  MOD_RES (1), (3), (35): Xaa is C or S
XGXSRVVMNRHKRLIVNSSDDYYLVSTASLKTPAXT

SEQ ID NO: 5295 - protein, 32 aa, Artificial Sequence
  GFR-binding peptide
  MOD_RES (31), (32): Xaa is C or S
SRVIMYHYKLVKPKRGVKYLISIPSLAQPVXX

SEQ ID NO: 5296 - protein, 35 aa, Artificial Sequence
  GFR-binding peptide
  MOD_RES (34), (35): Xaa is C or S
  MOD_RES (12), (13), (14), (15), (16): Xaa is A or G
  MOD_RES (17), (18), (19), (20): Xaa is A or G or is absent
GEVVMEYHYKLXXXXXXXXXKYLMSIPSLETPVXX

SEQ ID NO: 5297 - protein, 34 aa, Artificial Sequence
  GFR-binding peptide
  MOD_RES (1), (3): Xaa is C or S
XGXARVVMNQYNKLIVNSSDDLYLVSIASLQTPA

SEQ ID NO: 5298 - protein, 37 aa, Artificial Sequence
  GFR-binding peptide
  MOD_RES (32), (33): Xaa is C or S
ARVVMNYHYKLIVNSSDDKYLVSIPSLQTPAXXPKPV

SEQ ID NO: 5299 - protein, 40 aa, Artificial Sequence
  GFR-binding peptide
  MOD_RES (1), (3), (37), (38): Xaa is C or S
  MOD_RES (15), (16), (17), (18), (19): Xaa is A or G
  MOD_RES (20), (21), (22), (23): Xaa is A or G or is absent
XGXSRVVMNYHYKLXXXXXXXXXKYLVSIPSLKTPAXXPK

SEQ ID NO: 5300 - protein, 36 aa, Artificial Sequence
  GFR-binding peptide
  MOD_RES (2), (2): Xaa is C or S
  MOD_RES (15), (16), (17), (18), (19): Xaa is A or G
  MOD_RES (20), (21), (22), (23): Xaa is A or G or is absent
KXALHDELTRHKRLXXXXXXXXXYYLVSTASLQVQT

SEQ ID NO: 5301 - protein, 35 aa, Artificial Sequence
  GFR-binding peptide
  MOD_RES (2), (4): Xaa is C or S
RXGXGEVVMDRYKKLVVKENEDFYLMSIANLETPV

SEQ ID NO: 5302 - protein, 39 aa, Artificial Sequence
  GFR-binding peptide
  MOD_RES (2), (4), (37), (38): Xaa is C or S
  MOD_RES (15), (16), (17), (18), (19): Xaa is A or G
  MOD_RES (20), (21), (22), (23): Xaa is A or G or is absent
SXKXSKVVMYHYKLXXXXXXXXXKYLISIPSLDQPVXXP

SEQ ID NO: 5303 - protein, 38 aa, Artificial Sequence
  GFR-binding peptide
  MOD_RES (2), (4), (35), (36): Xaa is C or S
SXKXSKVIMRHKRLIKPTKGIYYLISTASLDQSVXXPS

SEQ ID NO: 5304 - protein, 36 aa, Artificial Sequence
  GFR-binding peptide
  MOD_RES (31), (32): Xaa is C or S
SRVIMRYKKLVKPKRGVFYLISIANLAQPVXXPAAS

SEQ ID NO: 5305 - protein, 41 aa, Artificial Sequence
  GFR-binding peptide
  MOD_RES (2), (4), (37), (38): Xaa is C or S
  MOD_RES (15), (16), (17), (18), (19): Xaa is A or G
  MOD_RES (20), (21), (22), (23): Xaa is A or G or is absent
SXKXSRVIMRYKKLXXXXXXXXXFYLISIANLAQPVXXPAA

SEQ ID NO: 5306 - protein, 38 aa, Artificial Sequence
  GFR-binding peptide
  MOD_RES (2), (34), (35): Xaa is C or S
GXARVVMNRHKRLIVNSSDDYYLVSTASLQTPAXXPKP

SEQ ID NO: 5307 - protein, 33 aa, Artificial Sequence
  GFR-binding peptide
  MOD_RES (32), (33): Xaa is C or S
ARVVMNYHYKLIVNSSDDKYLVSIPSLQTPAXX

SEQ ID NO: 5308 - protein, 31 aa, Artificial Sequence
  GFR-binding peptide
  MOD_RES (31), (31): Xaa is C or S
RVVMNYHYKLIVNSSDDKYLVSIPSLQTPAX

SEQ ID NO: 5309 - protein, 44 aa, Artificial Sequence
  GFR-binding peptide
  MOD_RES (2), (4), (39), (40): Xaa is C or S
  MOD_RES (17), (18), (19), (20), (21): Xaa is A or G
  MOD_RES (22), (23), (24), (25): Xaa is A or G or is absent
RXGXEAVSMGERYKKLXXXXXXXXXFYLVSIANLKTPVXXAKGV

SEQ ID NO: 5310 - protein, 39 aa, Artificial Sequence
  GFR-binding peptide
  MOD_RES (2), (4), (36), (37): Xaa is C or S
HXGXAKVVMNRYKKLIVNNSSDFYLVSIANLKTPAXXAK

SEQ ID NO: 5311 - protein, 44 aa, Artificial Sequence
  GFR-binding peptide
  MOD_RES (2), (4), (38), (39): Xaa is C or S
  MOD_RES (16), (17), (18), (19), (20): Xaa is A or G
  MOD_RES (21), (22), (23), (24): Xaa is A or G or is absent
HXGXAKVVMNYHYKLXXXXXXXXXKYLVSIPSLKTPAXXAKPVA

SEQ ID NO: 5312 - protein, 42 aa, Artificial Sequence
  GFR-binding peptide
  MOD_RES (2), (36), (37): Xaa is C or S
  MOD_RES (14), (15), (16), (17), (18): Xaa is A or G
  MOD_RES (19), (20), (21), (22): Xaa is A or G or is absent
GXSRVVMNQYNKLXXXXXXXXXLYLVSIASLKTPAXXPKPVY

SEQ ID NO: 5313 - protein, 38 aa, Artificial Sequence
  GFR-binding peptide
  MOD_RES (1), (33), (34): Xaa is C or S
XGEVVMDRYKKLVVKENEDFYLMSIANLETPVXXAKPI

SEQ ID NO: 5314 - protein, 32 aa, Artificial Sequence
  GFR-binding peptide
  MOD_RES (2), (2): Xaa is C or S
KXSKVVMRYKKLVKPTRGVFYLISIANLDQPV

SEQ ID NO: 5315 - protein, 42 aa, Artificial Sequence
  GFR-binding peptide
  MOD_RES (2), (39): Xaa is C or S
  MOD_RES (15), (16), (17), (18), (19): Xaa is A or G
  MOD_RES (20), (21), (22), (23): Xaa is A or G or is absent
KXALHDELTYHYKLXXXXXXXXXKYLVSIPSLQVQTPRXQVN

SEQ ID NO: 5316 - protein, 38 aa, Artificial Sequence
  GFR-binding peptide
  MOD_RES (2), (33), (34): Xaa is C or S
KXSKVIMYHYKLIKPTKGIKYLISIPSLDQSVXXPSAS

SEQ ID NO: 5317 - protein, 42 aa, Artificial Sequence
  GFR-binding peptide
  MOD_RES (2), (4), (38), (39): Xaa is C or S
  MOD_RES (16), (17), (18), (19), (20): Xaa is A or G
  MOD_RES (21), (22), (23), (24): Xaa is A or G or is absent
RXGXGEVVMDYHYKLXXXXXXXXXKYLMSIPSLETPVXXAKP

SEQ ID NO: 5318 - protein, 40 aa, Artificial Sequence
  GFR-binding peptide
  MOD_RES (1), (35): Xaa is C or S
  MOD_RES (13), (14), (15), (16), (17): Xaa is A or G
  MOD_RES (18), (19), (20), (21): Xaa is A or G or is absent
XSRVVMNRHKRLXXXXXXXXXYYLVSTASLKTPAXTPKTV

SEQ ID NO: 5319 - protein, 39 aa, Artificial Sequence
  GFR-binding peptide
  MOD_RES (2), (4): Xaa is C or S
EXKXALHDELTYHYKLFIPKKRVIEKYLVSIPSLQVQTP

SEQ ID NO: 5320 - protein, 35 aa, Artificial Sequence
  GFR-binding peptide
  MOD_RES (33), (33): Xaa is C or S
  MOD_RES (11), (12), (13), (14), (15): Xaa is A or G
  MOD_RES (16), (17), (18), (19): Xaa is A or G or is absent
RVVMNQYNKLXXXXXXXXXLYLVSIASLKTPAXTP

SEQ ID NO: 5321 - protein, 35 aa, Artificial Sequence
  GFR-binding peptide
  MOD_RES (1), (1): Xaa is C or S
XALHDELTRHKRLFIPKKRVIEYYLVSTASLQVQT

SEQ ID NO: 5322 - protein, 38 aa, Artificial Sequence
  GFR-binding peptide
  MOD_RES (33), (34): Xaa is C or S
  MOD_RES (11), (12), (13), (14), (15): Xaa is A or G
  MOD_RES (16), (17), (18), (19): Xaa is A or G or is absent
KVVMNRHKRLXXXXXXXXXYYLVSTASLKTPAXXAKPV

SEQ ID NO: 5323 - protein, 39 aa, Artificial Sequence
  GFR-binding peptide
  MOD_RES (2), (4), (39): Xaa is C or S
  MOD_RES (17), (18), (19), (20), (21): Xaa is A or G
  MOD_RES (22), (23), (24), (25): Xaa is A or G or is absent
RXGXEAVSMGERYKKLXXXXXXXXXFYLVSIANLKTPVX

SEQ ID NO: 5324 - protein, 41 aa, Artificial Sequence
  GFR-binding peptide
  MOD_RES (2), (36), (37): Xaa is C or S
  MOD_RES (14), (15), (16), (17), (18): Xaa is A or G
  MOD_RES (19), (20), (21), (22): Xaa is A or G or is absent
GXGEVVMEQYNKLXXXXXXXXXLYLMSIASLETPVXXAKPI

SEQ ID NO: 5325 - protein, 33 aa, Artificial Sequence
  GFR-binding peptide
  MOD_RES (1), (33): Xaa is C or S
XAKVVMNYHYKLIVNNSSDKYLVSIPSLKTPAX

SEQ ID NO: 5326 - protein, 30 aa, Artificial Sequence
  GFR-binding peptide
EVVMDRHKRLVVKENEDYYLMSTASLETPV

SEQ ID NO: 5327 - protein, 38 aa, Artificial Sequence
  GFR-binding peptide
  MOD_RES (1), (3): Xaa is C or S
XKXALHDELTYHYKLFIPKKRVIEKYLVSIPSLQVQTP

SEQ ID NO: 5328 - protein, 35 aa, Artificial Sequence
  GFR-binding peptide
  MOD_RES (2), (35): Xaa is C or S
  MOD_RES (13), (14), (15), (16), (17): Xaa is A or G
  MOD_RES (18), (19), (20), (21): Xaa is A or G or is absent
KXSRVIMQYNKLXXXXXXXXXLYLISIASLAQPVX

SEQ ID NO: 5329 - protein, 39 aa, Artificial Sequence
  GFR-binding peptide
  MOD_RES (1), (35), (36): Xaa is C or S
  MOD_RES (13), (14), (15), (16), (17): Xaa is A or G
  MOD_RES (18), (19), (20), (21): Xaa is A or G or is absent
XARVVMNRHKRLXXXXXXXXXYYLVSTASLQTPAXXPKP

SEQ ID NO: 5330 - protein, 33 aa, Artificial Sequence
  GFR-binding peptide
  MOD_RES (1), (33): Xaa is C or S
XGEVVMERYKKLVVKDYEDFYLMSIANLETPVX

SEQ ID NO: 5331 - protein, 41 aa, Artificial Sequence
  GFR-binding peptide
  MOD_RES (1), (3), (37), (38): Xaa is C or S
  MOD_RES (15), (16), (17), (18), (19): Xaa is A or G
  MOD_RES (20), (21), (22), (23): Xaa is A or G or is absent
XGXAKVVMNYHYKLXXXXXXXXXKYLVSIPSLKTPAXXAKP

SEQ ID NO: 5332 - protein, 40 aa, Artificial Sequence
  GFR-binding peptide
  MOD_RES (1), (3), (34), (35): Xaa is C or S
XKXSRVIMRHKRLVKPKRGVYYLISTASLAQPVXXPAASA

SEQ ID NO: 5333 - protein, 39 aa, Artificial Sequence
  GFR-binding peptide
  MOD_RES (1), (33): Xaa is C or S
XSRVVMNRHKRLIVNSSDDYYLVSTASLKTPAXTPKTVH

SEQ ID NO: 5334 - protein, 36 aa, Artificial Sequence
  GFR-binding peptide
  MOD_RES (34), (35): Xaa is C or S
  MOD_RES (12), (13), (14), (15), (16): Xaa is A or G
  MOD_RES (17), (18), (19), (20): Xaa is A or G or is absent
ARVVMNRYKKLXXXXXXXXXFYLVSIANLQTPAXXP

SEQ ID NO: 5335 - protein, 39 aa, Artificial Sequence
  GFR-binding peptide
  MOD_RES (2), (4): Xaa is C or S
EXKXALHDELTQYNKLFIPKKRVIELYLVSIASLQVQTP

SEQ ID NO: 5336 - protein, 31 aa, Artificial Sequence
  GFR-binding peptide
  MOD_RES (31), (31): Xaa is C or S
SKVVMRYKKLVKPTRGVFYLISIANLDQPVX

SEQ ID NO: 5337 - protein, 40 aa, Artificial Sequence
  GFR-binding peptide
  MOD_RES (2), (4): Xaa is C or S
EXKXALHDELTRHKRLFIPKKRVIEYYLVSTASLQVQTPR

SEQ ID NO: 5338 - protein, 38 aa, Artificial Sequence
  GFR-binding peptide
  MOD_RES (1), (3), (35), (36): Xaa is C or S
XGXGEVVMERYKKLVVKDYEDFYLMSIANLETPVXXAK

SEQ ID NO: 5339 - protein, 35 aa, Artificial Sequence
  GFR-binding peptide
  MOD_RES (2), (34), (35): Xaa is C or S
GXGEVVMDQYNKLVVKENEDLYLMSIASLETPVXX

SEQ ID NO: 5340 - protein, 42 aa, Artificial Sequence
  GFR-binding peptide
  MOD_RES (1), (3), (37), (38): Xaa is C or S
  MOD_RES (15), (16), (17), (18), (19): Xaa is A or G
  MOD_RES (20), (21), (22), (23): Xaa is A or G or is absent
XGXSRVVMNQYNKLXXXXXXXXXLYLVSIASLKTPAXXPKPV

SEQ ID NO: 5341 - protein, 40 aa, Artificial Sequence
  GFR-binding peptide
  MOD_RES (2), (39): Xaa is C or S
  MOD_RES (15), (16), (17), (18), (19): Xaa is A or G
  MOD_RES (20), (21), (22), (23): Xaa is A or G or is absent
KXALHDELTQYNKLXXXXXXXXXLYLVSIASLQVQTPRXQ

SEQ ID NO: 5342 - protein, 39 aa, Artificial Sequence
  GFR-binding peptide
  MOD_RES (2), (4), (36): Xaa is C or S
HXGXSRVVMNYHYKLIVNSSDDKYLVSIPSLKTPAXTPK

SEQ ID NO: 5343 - protein, 39 aa, Artificial Sequence
  GFR-binding peptide
  MOD_RES (2), (4), (38), (39): Xaa is C or S
  MOD_RES (16), (17), (18), (19), (20): Xaa is A or G
  MOD_RES (21), (22), (23), (24): Xaa is A or G or is absent
RXGXGEVVMEQYNKLXXXXXXXXXLYLMSIASLETPVXX

SEQ ID NO: 5344 - protein, 38 aa, Artificial Sequence
  GFR-binding peptide
  MOD_RES (1), (3), (35), (36): Xaa is C or S
XGXAKVVMNRHKRLIVNNSSDYYLVSTASLKTPAXXAK

SEQ ID NO: 5345 - protein, 32 aa, Artificial Sequence
  GFR-binding peptide
  MOD_RES (31), (32): Xaa is C or S
RVVMNYHYKLIVNSSDDKYLVSIPSLKTPAXX

SEQ ID NO: 5346 - protein, 33 aa, Artificial Sequence
  GFR-binding peptide
  MOD_RES (32), (33): Xaa is C or S
AKVVMNRYKKLIVNNSSDFYLVSIANLKTPAXX

SEQ ID NO: 5347 - protein, 32 aa, Artificial Sequence
  GFR-binding peptide
  MOD_RES (31), (32): Xaa is C or S
SKVVMRYKKLVKPTRGVFYLISIANLDQPVXX

SEQ ID NO: 5348 - protein, 39 aa, Artificial Sequence
  GFR-binding peptide
  MOD_RES (1), (3), (35), (36): Xaa is C or S
XGXGEVVMEYHYKLVVKDYEDKYLMSIPSLETPVXXAKP

SEQ ID NO: 5349 - protein, 44 aa, Artificial Sequence
  GFR-binding peptide
  MOD_RES (2), (4), (38), (39): Xaa is C or S
  MOD_RES (16), (17), (18), (19), (20): Xaa is A or G
  MOD_RES (21), (22), (23), (24): Xaa is A or G or is absent
HXGXARVVMNRYKKLXXXXXXXXXFYLVSIANLQTPAXXPKPVT

SEQ ID NO: 5350 - protein, 34 aa, Artificial Sequence
  GFR-binding peptide
  MOD_RES (1), (3), (34): Xaa is C or S
XKXSKVIMQYNKLIKPTKGILYLISIASLDQSVX

SEQ ID NO: 5351 - protein, 33 aa, Artificial Sequence
  GFR-binding peptide
  MOD_RES (31), (32): Xaa is C or S
SKVIMYHYKLIKPTKGIKYLISIPSLDQSVXXP

SEQ ID NO: 5352 - protein, 39 aa, Artificial Sequence
  GFR-binding peptide
  MOD_RES (33), (33): Xaa is C or S
  MOD_RES (11), (12), (13), (14), (15): Xaa is A or G
  MOD_RES (16), (17), (18), (19): Xaa is A or G or is absent
RVVMNQYNKLXXXXXXXXXLYLVSIASLKTPAXTPKTVH

SEQ ID NO: 5353 - protein, 45 aa, Artificial Sequence
  GFR-binding peptide
  MOD_RES (2), (4), (39), (40): Xaa is C or S
  MOD_RES (17), (18), (19), (20), (21): Xaa is A or G
  MOD_RES (22), (23), (24), (25): Xaa is A or G or is absent
RXGXEAVSMGEQYNKLXXXXXXXXXLYLVSIASLKTPVXXAKGVK

SEQ ID NO: 5354 - protein, 37 aa, Artificial Sequence
  GFR-binding peptide
  MOD_RES (31), (32): Xaa is C or S
SKVVMQYNKLVKPTRGVLYLISIASLDQPVXXPSASA

SEQ ID NO: 5355 - protein, 40 aa, Artificial Sequence
  GFR-binding peptide
  MOD_RES (1), (35), (36): Xaa is C or S
  MOD_RES (13), (14), (15), (16), (17): Xaa is A or G
  MOD_RES (18), (19), (20), (21): Xaa is A or G or is absent
XGEVVMDRYKKLXXXXXXXXXFYLMSIANLETPVXXAKPI

SEQ ID NO: 5356 - protein, 41 aa, Artificial Sequence
  GFR-binding peptide
  MOD_RES (2), (4), (38), (39): Xaa is C or S
  MOD_RES (16), (17), (18), (19), (20): Xaa is A or G
  MOD_RES (21), (22), (23), (24): Xaa is A or G or is absent
RXGXGEVVMERHKRLXXXXXXXXXYYLMSTASLETPVXXAK

SEQ ID NO: 5357 - protein, 41 aa, Artificial Sequence
  GFR-binding peptide
  MOD_RES (1), (3), (35), (36): Xaa is C or S
XGXARVVMNRYKKLIVNSSDDFYLVSIANLQTPAXXPKPVT

SEQ ID NO: 5358 - protein, 34 aa, Artificial Sequence
  GFR-binding peptide
  MOD_RES (33), (34): Xaa is C or S
  MOD_RES (11), (12), (13), (14), (15): Xaa is A or G
  MOD_RES (16), (17), (18), (19): Xaa is A or G or is absent
SKVIMRHKRLXXXXXXXXXYYLISTASLDQSVXX

SEQ ID NO: 5359 - protein, 36 aa, Artificial Sequence
  GFR-binding peptide
  MOD_RES (33), (34): Xaa is C or S
  MOD_RES (11), (12), (13), (14), (15): Xaa is A or G
  MOD_RES (16), (17), (18), (19): Xaa is A or G or is absent
EVVMDYHYKLXXXXXXXXXKYLMSIPSLETPVXXAK

SEQ ID NO: 5360 - protein, 34 aa, Artificial Sequence
  GFR-binding peptide
  MOD_RES (1), (3): Xaa is C or S
XGXGEVVMEQYNKLVVKDYEDLYLMSIASLETPV

SEQ ID NO: 5361 - protein, 35 aa, Artificial Sequence
  GFR-binding peptide
  MOD_RES (32), (33): Xaa is C or S
GEVVMDYHYKLVVKENEDKYLMSIPSLETPVXXAK

SEQ ID NO: 5362 - protein, 35 aa, Artificial Sequence
  GFR-binding peptide
  MOD_RES (31), (32): Xaa is C or S
RVVMNYHYKLIVNSSDDKYLVSIPSLQTPAXXPKP

SEQ ID NO: 5363 - protein, 37 aa, Artificial Sequence
  GFR-binding peptide
  MOD_RES (1), (3), (35), (36): Xaa is C or S
XGXARVVMNRHKRLIVNSSDDYYLVSTASLQTPAXXP

SEQ ID NO: 5364 - protein, 35 aa, Artificial Sequence
  GFR-binding peptide
  MOD_RES (2), (35): Xaa is C or S
GXEAVSMGEYHYKLTPVGMDDKYLVSIPSLKTPVX

SEQ ID NO: 5365 - protein, 41 aa, Artificial Sequence
  GFR-binding peptide
  MOD_RES (1), (35), (36): Xaa is C or S
  MOD_RES (13), (14), (15), (16), (17): Xaa is A or G
  MOD_RES (18), (19), (20), (21): Xaa is A or G or is absent
XAKVVMNRYKKLXXXXXXXXXFYLVSIANLKTPAXXAKPVA

SEQ ID NO: 5366 - protein, 37 aa, Artificial Sequence
  GFR-binding peptide
  MOD_RES (1), (35): Xaa is C or S
  MOD_RES (13), (14), (15), (16), (17): Xaa is A or G
  MOD_RES (18), (19), (20), (21): Xaa is A or G or is absent
XSRVVMNRHKRLXXXXXXXXXYYLVSTASLKTPAXTP

SEQ ID NO: 5367 - protein, 34 aa, Artificial Sequence
  GFR-binding peptide
  MOD_RES (33), (34): Xaa is C or S
  MOD_RES (11), (12), (13), (14), (15): Xaa is A or G
  MOD_RES (16), (17), (18), (19): Xaa is A or G or is absent
RVVMNRHKRLXXXXXXXXXYYLVSTASLKTPAXX

SEQ ID NO: 5368 - protein, 33 aa, Artificial Sequence
  GFR-binding peptide
  MOD_RES (31), (32): Xaa is C or S
SKVIMQYNKLIKPTKGILYLISIASLDQSVXXP

SEQ ID NO: 5369 - protein, 35 aa, Artificial Sequence
  GFR-binding peptide
  MOD_RES (33), (34): Xaa is C or S
EAVSMGERYKKLTPVGMDDFYLVSIANLKTPVXXA

SEQ ID NO: 5370 - protein, 33 aa, Artificial Sequence
  GFR-binding peptide
  MOD_RES (1), (33): Xaa is C or S
XAKVVMNRYKKLIVNNSSDFYLVSIANLKTPAX

SEQ ID NO: 5371 - protein, 40 aa, Artificial Sequence
  GFR-binding peptide
  MOD_RES (34), (35): Xaa is C or S
  MOD_RES (12), (13), (14), (15), (16): Xaa is A or G
  MOD_RES (17), (18), (19), (20): Xaa is A or G or is absent
AKVVMNRYKKLXXXXXXXXXFYLVSIANLKTPAXXAKPVA

SEQ ID NO: 5372 - protein, 37 aa, Artificial Sequence
  GFR-binding peptide
  MOD_RES (34), (35): Xaa is C or S
  MOD_RES (12), (13), (14), (15), (16): Xaa is A or G
  MOD_RES (17), (18), (19), (20): Xaa is A or G or is absent
AKVVMNRHKRLXXXXXXXXXYYLVSTASLKTPAXXAK

SEQ ID NO: 5373 - protein, 34 aa, Artificial Sequence
  GFR-binding peptide
  MOD_RES (33), (34): Xaa is C or S
  MOD_RES (11), (12), (13), (14), (15): Xaa is A or G
  MOD_RES (16), (17), (18), (19): Xaa is A or G or is absent
KVVMNRHKRLXXXXXXXXXYYLVSTASLKTPAXX

SEQ ID NO: 5374 - protein, 36 aa, Artificial Sequence
  GFR-binding peptide
  MOD_RES (1), (3), (35): Xaa is C or S
XGXSRVVMNQYNKLIVNSSDDLYLVSIASLKTPAXT

SEQ ID NO: 5375 - protein, 36 aa, Artificial Sequence
  GFR-binding peptide
  MOD_RES (1), (3): Xaa is C or S
  MOD_RES (15), (16), (17), (18), (19): Xaa is A or G
  MOD_RES (20), (21), (22), (23): Xaa is A or G or is absent
XGXAKVVMNYHYKLXXXXXXXXXKYLVSIPSLKTPA

SEQ ID NO: 5376 - protein, 36 aa, Artificial Sequence
  GFR-binding peptide
  MOD_RES (1), (3), (36): Xaa is C or S
  MOD_RES (14), (15), (16), (17), (18): Xaa is A or G
  MOD_RES (19), (20), (21), (22): Xaa is A or G or is absent
XKXSKVVMRYKKLXXXXXXXXXFYLISIANLDQPVX

SEQ ID NO: 5377 - protein, 37 aa, Artificial Sequence
  GFR-binding peptide
  MOD_RES (1), (3): Xaa is C or S
  MOD_RES (16), (17), (18), (19), (20): Xaa is A or G
  MOD_RES (21), (22), (23), (24): Xaa is A or G or is absent
XKXALHDELTRYKKLXXXXXXXXXFYLVSIANLQVQT

SEQ ID NO: 5378 - protein, 36 aa, Artificial Sequence
  GFR-binding peptide
  MOD_RES (2), (4): Xaa is C or S
  MOD_RES (15), (16), (17), (18), (19): Xaa is A or G
  MOD_RES (20), (21), (22), (23): Xaa is A or G or is absent
SXKXSKVIMRYKKLXXXXXXXXXFYLISIANLDQSV

SEQ ID NO: 5379 - protein, 39 aa, Artificial Sequence
  GFR-binding peptide
  MOD_RES (1), (3), (36), (37): Xaa is C or S
  MOD_RES (14), (15), (16), (17), (18): Xaa is A or G
  MOD_RES (19), (20), (21), (22): Xaa is A or G or is absent
XKXSKVVMRYKKLXXXXXXXXXFYLISIANLDQPVXXPS

SEQ ID NO: 5380 - protein, 32 aa, Artificial Sequence
  GFR-binding peptide
EAVSMGEYHYKLTPVGMDDKYLVSIPSLKTPV

SEQ ID NO: 5381 - protein, 39 aa, Artificial Sequence
  GFR-binding peptide
  MOD_RES (1), (3), (37): Xaa is C or S
  MOD_RES (15), (16), (17), (18), (19): Xaa is A or G
  MOD_RES (20), (21), (22), (23): Xaa is A or G or is absent
XGXSRVVMNQYNKLXXXXXXXXXLYLVSIASLKTPAXTP

SEQ ID NO: 5382 - protein, 41 aa, Artificial Sequence
  GFR-binding peptide
  MOD_RES (2), (4), (36): Xaa is C or S
HXGXSRVVMNQYNKLIVNSSDDLYLVSIASLKTPAXTPKTV

SEQ ID NO: 5383 - protein, 37 aa, Artificial Sequence
  GFR-binding peptide
  MOD_RES (2), (34), (35): Xaa is C or S
GXARVVMNRYKKLIVNSSDDFYLVSIANLQTPAXXPK

SEQ ID NO: 5384 - protein, 39 aa, Artificial Sequence
  GFR-binding peptide
  MOD_RES (2), (34), (35): Xaa is C or S
GXSRVVMNQYNKLIVNSSDDLYLVSIASLKTPAXXPKPV

SEQ ID NO: 5385 - protein, 34 aa, Artificial Sequence
  GFR-binding peptide
  MOD_RES (1), (1): Xaa is C or S
  MOD_RES (13), (14), (15), (16), (17): Xaa is A or G
  MOD_RES (18), (19), (20), (21): Xaa is A or G or is absent
XGEVVMDYHYKLXXXXXXXXXKYLMSIPSLETPV

SEQ ID NO: 5386 - protein, 32 aa, Artificial Sequence
  GFR-binding peptide
  MOD_RES (11), (12), (13), (14), (15): Xaa is A or G
  MOD_RES (16), (17), (18), (19): Xaa is A or G or is absent
SKVVMRHKRLXXXXXXXXXYYLISTASLDQPV

SEQ ID NO: 5387 - protein, 37 aa, Artificial Sequence
  GFR-binding peptide
  MOD_RES (2), (4): Xaa is C or S
  MOD_RES (16), (17), (18), (19), (20): Xaa is A or G
  MOD_RES (21), (22), (23), (24): Xaa is A or G or is absent
HXGXAKVVMNQYNKLXXXXXXXXXLYLVSIASLKTPA

SEQ ID NO: 5388 - protein, 35 aa, Artificial Sequence
  GFR-binding peptide
  MOD_RES (2), (35): Xaa is C or S
  MOD_RES (13), (14), (15), (16), (17): Xaa is A or G
  MOD_RES (18), (19), (20), (21): Xaa is A or G or is absent
KXSKVVMYHYKLXXXXXXXXXKYLISIPSLDQPVX

SEQ ID NO: 5389 - protein, 40 aa, Artificial Sequence
  GFR-binding peptide
  MOD_RES (1), (3), (35), (36): Xaa is C or S
XGXSRVVMNRHKRLIVNSSDDYYLVSTASLKTPAXXPKPV

SEQ ID NO: 5390 - protein, 40 aa, Artificial Sequence
  GFR-binding peptide
  MOD_RES (2), (4), (35), (36): Xaa is C or S
SXKXSKVIMQYNKLIKPTKGILYLISIASLDQSVXXPSAS

SEQ ID NO: 5391 - protein, 38 aa, Artificial Sequence
  GFR-binding peptide
  MOD_RES (2), (4): Xaa is C or S
  MOD_RES (17), (18), (19), (20), (21): Xaa is A or G
  MOD_RES (22), (23), (24), (25): Xaa is A or G or is absent
EXKXALHDELTYHYKLXXXXXXXXXKYLVSIPSLQVQT

SEQ ID NO: 5392 - protein, 37 aa, Artificial Sequence
  GFR-binding peptide
  MOD_RES (1), (35), (36): Xaa is C or S
  MOD_RES (13), (14), (15), (16), (17): Xaa is A or G
  MOD_RES (18), (19), (20), (21): Xaa is A or G or is absent
XAKVVMNRHKRLXXXXXXXXXYYLVSTASLKTPAXXA

SEQ ID NO: 5393 - protein, 43 aa, Artificial Sequence
  GFR-binding peptide
  MOD_RES (2), (4), (38), (39): Xaa is C or S
  MOD_RES (16), (17), (18), (19), (20): Xaa is A or G
  MOD_RES (21), (22), (23), (24): Xaa is A or G or is absent
RXGXGEVVMDRYKKLXXXXXXXXXFYLMSIANLETPVXXAKPI

SEQ ID NO: 5394 - protein, 40 aa, Artificial Sequence
  GFR-binding peptide
  MOD_RES (34), (35): Xaa is C or S
  MOD_RES (12), (13), (14), (15), (16): Xaa is A or G
  MOD_RES (17), (18), (19), (20): Xaa is A or G or is absent
ARVVMNQYNKLXXXXXXXXXLYLVSIASLQTPAXXPKPVT

SEQ ID NO: 5395 - protein, 35 aa, Artificial Sequence
  GFR-binding peptide
  MOD_RES (31), (32): Xaa is C or S
RVVMNQYNKLIVNSSDDLYLVSIASLQTPAXXPKP

SEQ ID NO: 5396 - protein, 42 aa, Artificial Sequence
  GFR-binding peptide
  MOD_RES (2), (36), (37): Xaa is C or S
  MOD_RES (14), (15), (16), (17), (18): Xaa is A or G
  MOD_RES (19), (20), (21), (22): Xaa is A or G or is absent
GXGEVVMERYKKLXXXXXXXXXFYLMSIANLETPVXXAKPIS

SEQ ID NO: 5397 - protein, 43 aa, Artificial Sequence
  GFR-binding peptide
  MOD_RES (1), (3), (37): Xaa is C or S
  MOD_RES (15), (16), (17), (18), (19): Xaa is A or G
  MOD_RES (20), (21), (22), (23): Xaa is A or G or is absent
XGXSRVVMNRHKRLXXXXXXXXXYYLVSTASLKTPAXTPKTVH

SEQ ID NO: 5398 - protein, 36 aa, Artificial Sequence
  GFR-binding peptide
  MOD_RES (31), (32): Xaa is C or S
SRVIMRHKRLVKPKRGVYYLISTASLAQPVXXPAAS

SEQ ID NO: 5399 - protein, 41 aa, Artificial Sequence
  GFR-binding peptide
  MOD_RES (2), (37), (38): Xaa is C or S
  MOD_RES (15), (16), (17), (18), (19): Xaa is A or G
  MOD_RES (20), (21), (22), (23): Xaa is A or G or is absent
GXEAVSMGERHKRLXXXXXXXXXYYLVSTASLKTPVXXAKG

SEQ ID NO: 5400 - protein, 40 aa, Artificial Sequence
  GFR-binding peptide
  MOD_RES (1), (35), (36): Xaa is C or S
  MOD_RES (13), (14), (15), (16), (17): Xaa is A or G
  MOD_RES (18), (19), (20), (21): Xaa is A or G or is absent
XGEVVMEYHYKLXXXXXXXXXKYLMSIPSLETPVXXAKPI

SEQ ID NO: 5401 - protein, 36 aa, Artificial Sequence
  GFR-binding peptide
  MOD_RES (31), (32): Xaa is C or S
EVVMDQYNKLVVKENEDLYLMSIASLETPVXXAKPI

SEQ ID NO: 5402 - protein, 32 aa, Artificial Sequence
  GFR-binding peptide
  MOD_RES (11), (12), (13), (14), (15): Xaa is A or G
  MOD_RES (16), (17), (18), (19): Xaa is A or G or is absent
HDELTQYNKLXXXXXXXXXLYLVSIASLQVQT

SEQ ID NO: 5403 - protein, 40 aa, Artificial Sequence
  GFR-binding peptide
  MOD_RES (1), (3), (40): Xaa is C or S
XKXALHDELTYHYKLFIPKKRVIEKYLVSIPSLQVQTPRX

SEQ ID NO: 5404 - protein, 37 aa, Artificial Sequence
  GFR-binding peptide
  MOD_RES (2), (4), (35), (36): Xaa is C or S
SXKXSRVIMYHYKLVKPKRGVKYLISIPSLAQPVXXP

SEQ ID NO: 5405 - protein, 43 aa, Artificial Sequence
  GFR-binding peptide
  MOD_RES (2), (4), (38), (39): Xaa is C or S
  MOD_RES (16), (17), (18), (19), (20): Xaa is A or G
  MOD_RES (21), (22), (23), (24): Xaa is A or G or is absent
HXGXARVVMNRHKRLXXXXXXXXXYYLVSTASLQTPAXXPKPV

SEQ ID NO: 5406 - protein, 41 aa, Artificial Sequence
  GFR-binding peptide
  MOD_RES (2), (4), (38), (39): Xaa is C or S
  MOD_RES (16), (17), (18), (19), (20): Xaa is A or G
  MOD_RES (21), (22), (23), (24): Xaa is A or G or is absent
HXGXARVVMNRHKRLXXXXXXXXXYYLVSTASLQTPAXXPK

SEQ ID NO: 5407 - protein, 39 aa, Artificial Sequence
  GFR-binding peptide
  MOD_RES (2), (4), (38), (39): Xaa is C or S
  MOD_RES (16), (17), (18), (19), (20): Xaa is A or G
  MOD_RES (21), (22), (23), (24): Xaa is A or G or is absent
RXGXGEVVMERHKRLXXXXXXXXXYYLMSTASLETPVXX

SEQ ID NO: 5408 - protein, 41 aa, Artificial Sequence
  GFR-binding peptide
  MOD_RES (2), (36), (37): Xaa is C or S
  MOD_RES (14), (15), (16), (17), (18): Xaa is A or G
  MOD_RES (19), (20), (21), (22): Xaa is A or G or is absent
GXGEVVMERHKRLXXXXXXXXXYYLMSTASLETPVXXAKPI

SEQ ID NO: 5409 - protein, 35 aa, Artificial Sequence
  GFR-binding peptide
  MOD_RES (32), (33): Xaa is C or S
AKVVMNYHYKLIVNNSSDKYLVSIPSLKTPAXXAK

SEQ ID NO: 5410 - protein, 44 aa, Artificial Sequence
  GFR-binding peptide
  MOD_RES (1), (3), (40): Xaa is C or S
XKXALHDELTYHYKLFIPKKRVIEKYLVSIPSLQVQTPRXQVNR

SEQ ID NO: 5411 - protein, 39 aa, Artificial Sequence
  GFR-binding peptide
  MOD_RES (1), (3), (36), (37): Xaa is C or S
  MOD_RES (14), (15), (16), (17), (18): Xaa is A or G
  MOD_RES (19), (20), (21), (22): Xaa is A or G or is absent
XKXSKVIMRYKKLXXXXXXXXXFYLISIANLDQSVXXPS

SEQ ID NO: 5412 - protein, 38 aa, Artificial Sequence
  GFR-binding peptide
  MOD_RES (2), (35), (36): Xaa is C or S
  MOD_RES (13), (14), (15), (16), (17): Xaa is A or G
  MOD_RES (18), (19), (20), (21): Xaa is A or G or is absent
KXSRVIMRYKKLXXXXXXXXXFYLISIANLAQPVXXPA

SEQ ID NO: 5413 - protein, 35 aa, Artificial Sequence
  GFR-binding peptide
  MOD_RES (1), (35): Xaa is C or S
  MOD_RES (13), (14), (15), (16), (17): Xaa is A or G
  MOD_RES (18), (19), (20), (21): Xaa is A or G or is absent
XGEVVMDRYKKLXXXXXXXXXFYLMSIANLETPVX

SEQ ID NO: 5414 - protein, 36 aa, Artificial Sequence
  GFR-binding peptide
  MOD_RES (1), (33), (34): Xaa is C or S
XGEVVMDQYNKLVVKENEDLYLMSIASLETPVXXAK

SEQ ID NO: 5415 - protein, 39 aa, Artificial Sequence
  GFR-binding peptide
  MOD_RES (2), (4), (35), (36): Xaa is C or S
SXKXSKVVMYHYKLVKPTRGVKYLISIPSLDQPVXXPSA

SEQ ID NO: 5416 - protein, 38 aa, Artificial Sequence
  GFR-binding peptide
  MOD_RES (2), (36), (37): Xaa is C or S
  MOD_RES (14), (15), (16), (17), (18): Xaa is A or G
  MOD_RES (19), (20), (21), (22): Xaa is A or G or is absent
GXSRVVMNYHYKLXXXXXXXXXKYLVSIPSLKTPAXXP

SEQ ID NO: 5417 - protein, 37 aa, Artificial Sequence
  GFR-binding peptide
  MOD_RES (2), (4), (36), (37): Xaa is C or S
HXGXSRVVMNQYNKLIVNSSDDLYLVSIASLKTPAXX

SEQ ID NO: 5418 - protein, 36 aa, Artificial Sequence
  GFR-binding peptide
  MOD_RES (1), (3), (36): Xaa is C or S
  MOD_RES (14), (15), (16), (17), (18): Xaa is A or G
  MOD_RES (19), (20), (21), (22): Xaa is A or G or is absent
XKXSKVIMYHYKLXXXXXXXXXKYLISIPSLDQSVX

SEQ ID NO: 5419 - protein, 39 aa, Artificial Sequence
  GFR-binding peptide
  MOD_RES (33), (34): Xaa is C or S
  MOD_RES (11), (12), (13), (14), (15): Xaa is A or G
  MOD_RES (16), (17), (18), (19): Xaa is A or G or is absent
EVVMERHKRLXXXXXXXXXYYLMSTASLETPVXXAKPIS

SEQ ID NO: 5420 - protein, 41 aa, Artificial Sequence
  GFR-binding peptide
  MOD_RES (1), (3), (40): Xaa is C or S
  MOD_RES (16), (17), (18), (19), (20): Xaa is A or G
  MOD_RES (21), (22), (23), (24): Xaa is A or G or is absent
XKXALHDELTQYNKLXXXXXXXXXLYLVSIASLQVQTPRXQ

SEQ ID NO: 5421 - protein, 36 aa, Artificial Sequence
  GFR-binding peptide
  MOD_RES (2), (36): Xaa is C or S
  MOD_RES (14), (15), (16), (17), (18): Xaa is A or G
  MOD_RES (19), (20), (21), (22): Xaa is A or G or is absent
GXARVVMNQYNKLXXXXXXXXXLYLVSIASLQTPAX

SEQ ID NO: 5422 - protein, 31 aa, Artificial Sequence
  GFR-binding peptide
  MOD_RES (31), (31): Xaa is C or S
KVVMNRYKKLIVNNSSDFYLVSIANLKTPAX

SEQ ID NO: 5423 - protein, 44 aa, Artificial Sequence
  GFR-binding peptide
  MOD_RES (2), (4), (39), (40): Xaa is C or S
  MOD_RES (17), (18), (19), (20), (21): Xaa is A or G
  MOD_RES (22), (23), (24), (25): Xaa is A or G or is absent
RXGXEAVSMGEQYNKLXXXXXXXXXLYLVSIASLKTPVXXAKGV

SEQ ID NO: 5424 - protein, 38 aa, Artificial Sequence
  GFR-binding peptide
  MOD_RES (2), (4), (37), (38): Xaa is C or S
RXGXEAVSMGERHKRLTPVGMDDYYLVSTASLKTPVXX

SEQ ID NO: 5425 - protein, 41 aa, Artificial Sequence
  GFR-binding peptide
  MOD_RES (1), (3), (35), (36): Xaa is C or S
XGXAKVVMNQYNKLIVNNSSDLYLVSIASLKTPAXXAKPVA

SEQ ID NO: 5426 - protein, 34 aa, Artificial Sequence
  GFR-binding peptide
  MOD_RES (2), (4): Xaa is C or S
SXKXSKVIMRHKRLIKPTKGIYYLISTASLDQSV

SEQ ID NO: 5427 - protein, 36 aa, Artificial Sequence
  GFR-binding peptide
  MOD_RES (33), (34): Xaa is C or S
  MOD_RES (11), (12), (13), (14), (15): Xaa is A or G
  MOD_RES (16), (17), (18), (19): Xaa is A or G or is absent
SRVIMQYNKLXXXXXXXXXLYLISIASLAQPVXXPA

SEQ ID NO: 5428 - protein, 36 aa, Artificial Sequence
  GFR-binding peptide
  MOD_RES (34), (35): Xaa is C or S
  MOD_RES (12), (13), (14), (15), (16): Xaa is A or G
  MOD_RES (17), (18), (19), (20): Xaa is A or G or is absent
AKVVMNRHKRLXXXXXXXXXYYLVSTASLKTPAXXA

SEQ ID NO: 5429 - protein, 34 aa, Artificial Sequence
  GFR-binding peptide
  MOD_RES (1), (32), (33): Xaa is C or S
XSKVVMRHKRLVKPTRGVYYLISTASLDQPVXXP

SEQ ID NO: 5430 - protein, 39 aa, Artificial Sequence
  GFR-binding peptide
  MOD_RES (1), (3), (35), (36): Xaa is C or S
XGXGEVVMDYHYKLVVKENEDKYLMSIPSLETPVXXAKP

SEQ ID NO: 5431 - protein, 44 aa, Artificial Sequence
  GFR-binding peptide
  MOD_RES (1), (3), (38), (39): Xaa is C or S
  MOD_RES (16), (17), (18), (19), (20): Xaa is A or G
  MOD_RES (21), (22), (23), (24): Xaa is A or G or is absent
XGXEAVSMGERHKRLXXXXXXXXXYYLVSTASLKTPVXXAKGVK

SEQ ID NO: 5432 - protein, 36 aa, Artificial Sequence
  GFR-binding peptide
  MOD_RES (2), (2): Xaa is C or S
  MOD_RES (15), (16), (17), (18), (19): Xaa is A or G
  MOD_RES (20), (21), (22), (23): Xaa is A or G or is absent
GXEAVSMGERHKRLXXXXXXXXXYYLVSTASLKTPV

SEQ ID NO: 5433 - protein, 33 aa, Artificial Sequence
  GFR-binding peptide
  MOD_RES (33), (33): Xaa is C or S
  MOD_RES (11), (12), (13), (14), (15): Xaa is A or G
  MOD_RES (16), (17), (18), (19): Xaa is A or G or is absent
KVVMNYHYKLXXXXXXXXXKYLVSIPSLKTPAX

SEQ ID NO: 5434 - protein, 38 aa, Artificial Sequence
  GFR-binding peptide
  MOD_RES (2), (36), (37): Xaa is C or S
  MOD_RES (14), (15), (16), (17), (18): Xaa is A or G
  MOD_RES (19), (20), (21), (22): Xaa is A or G or is absent
GXAKVVMNRHKRLXXXXXXXXXYYLVSTASLKTPAXXA

SEQ ID NO: 5435 - protein, 38 aa, Artificial Sequence
  GFR-binding peptide
  MOD_RES (1), (33), (34): Xaa is C or S
XGEVVMEQYNKLVVKDYEDLYLMSIASLETPVXXAKPI

SEQ ID NO: 5436 - protein, 33 aa, Artificial Sequence
  GFR-binding peptide
  MOD_RES (1), (33): Xaa is C or S
XGEVVMDRHKRLVVKENEDYYLMSTASLETPVX

SEQ ID NO: 5437 - protein, 33 aa, Artificial Sequence
  GFR-binding peptide
  MOD_RES (33), (33): Xaa is C or S
  MOD_RES (11), (12), (13), (14), (15): Xaa is A or G
  MOD_RES (16), (17), (18), (19): Xaa is A or G or is absent
RVVMNYHYKLXXXXXXXXXKYLVSIPSLKTPAX

SEQ ID NO: 5438 - protein, 33 aa, Artificial Sequence
  GFR-binding peptide
  MOD_RES (33), (33): Xaa is C or S
  MOD_RES (11), (12), (13), (14), (15): Xaa is A or G
  MOD_RES (16), (17), (18), (19): Xaa is A or G or is absent
SKVVMRHKRLXXXXXXXXXYYLISTASLDQPVX

SEQ ID NO: 5439 - protein, 40 aa, Artificial Sequence
  GFR-binding peptide
  MOD_RES (1), (3), (37): Xaa is C or S
  MOD_RES (15), (16), (17), (18), (19): Xaa is A or G
  MOD_RES (20), (21), (22), (23): Xaa is A or G or is absent
XGXSRVVMNRYKKLXXXXXXXXXFYLVSIANLKTPAXTPK

SEQ ID NO: 5440 - protein, 35 aa, Artificial Sequence
  GFR-binding peptide
  MOD_RES (1), (1): Xaa is C or S
  MOD_RES (14), (15), (16), (17), (18): Xaa is A or G
  MOD_RES (19), (20), (21), (22): Xaa is A or G or is absent
XALHDELTQYNKLXXXXXXXXXLYLVSIASLQVQT

SEQ ID NO: 5441 - protein, 44 aa, Artificial Sequence
  GFR-binding peptide
  MOD_RES (2), (4), (41): Xaa is C or S
EXKXALHDELTYHYKLFIPKKRVIEKYLVSIPSLQVQTPRXQVN

SEQ ID NO: 5442 - protein, 36 aa, Artificial Sequence
  GFR-binding peptide
  MOD_RES (1), (35), (36): Xaa is C or S
  MOD_RES (13), (14), (15), (16), (17): Xaa is A or G
  MOD_RES (18), (19), (20), (21): Xaa is A or G or is absent
XGEVVMDQYNKLXXXXXXXXXLYLMSIASLETPVXX

SEQ ID NO: 5443 - protein, 32 aa, Artificial Sequence
  GFR-binding peptide
  MOD_RES (31), (32): Xaa is C or S
RVVMNQYNKLIVNSSDDLYLVSIASLKTPAXX

SEQ ID NO: 5444 - protein, 38 aa, Artificial Sequence
  GFR-binding peptide
  MOD_RES (2), (4), (38): Xaa is C or S
  MOD_RES (16), (17), (18), (19), (20): Xaa is A or G
  MOD_RES (21), (22), (23), (24): Xaa is A or G or is absent
RXGXGEVVMDQYNKLXXXXXXXXXLYLMSIASLETPVX

SEQ ID NO: 5445 - protein, 33 aa, Artificial Sequence
  GFR-binding peptide
  MOD_RES (31), (32): Xaa is C or S
EVVMEQYNKLVVKDYEDLYLMSIASLETPVXXA

SEQ ID NO: 5446 - protein, 40 aa, Artificial Sequence
  GFR-binding peptide
  MOD_RES (1), (34), (35): Xaa is C or S
  MOD_RES (12), (13), (14), (15), (16): Xaa is A or G
  MOD_RES (17), (18), (19), (20): Xaa is A or G or is absent
XSRVIMYHYKLXXXXXXXXXKYLISIPSLAQPVXXPAASA

SEQ ID NO: 5447 - protein, 39 aa, Artificial Sequence
  GFR-binding peptide
  MOD_RES (2), (39): Xaa is C or S
KXALHDELTYHYKLFIPKKRVIEKYLVSIPSLQVQTPRX

SEQ ID NO: 5448 - protein, 35 aa, Artificial Sequence
  GFR-binding peptide
  MOD_RES (1), (3): Xaa is C or S
  MOD_RES (14), (15), (16), (17), (18): Xaa is A or G
  MOD_RES (19), (20), (21), (22): Xaa is A or G or is absent
XKXSKVIMRYKKLXXXXXXXXXFYLISIANLDQSV

SEQ ID NO: 5449 - protein, 34 aa, Artificial Sequence
  GFR-binding peptide
  MOD_RES (2), (34): Xaa is C or S
GXGEVVMEYHYKLVVKDYEDKYLMSIPSLETPVX

SEQ ID NO: 5450 - protein, 33 aa, Artificial Sequence
  GFR-binding peptide
  MOD_RES (1), (32), (33): Xaa is C or S
XSKVVMRHKRLVKPTRGVYYLISTASLDQPVXX

SEQ ID NO: 5451 - protein, 33 aa, Artificial Sequence
  GFR-binding peptide
  MOD_RES (12), (13), (14), (15), (16): Xaa is A or G
  MOD_RES (17), (18), (19), (20): Xaa is A or G or is absent
GEVVMERYKKLXXXXXXXXXFYLMSIANLETPV

SEQ ID NO: 5452 - protein, 34 aa, Artificial Sequence
  GFR-binding peptide
  MOD_RES (2), (34): Xaa is C or S
GXAKVVMNQYNKLIVNNSSDLYLVSIASLKTPAX

SEQ ID NO: 5453 - protein, 39 aa, Artificial Sequence
  GFR-binding peptide
  MOD_RES (2), (4), (38), (39): Xaa is C or S
  MOD_RES (16), (17), (18), (19), (20): Xaa is A or G
  MOD_RES (21), (22), (23), (24): Xaa is A or G or is absent
HXGXARVVMNRHKRLXXXXXXXXXYYLVSTASLQTPAXX

SEQ ID NO: 5454 - protein, 36 aa, Artificial Sequence
  GFR-binding peptide
  MOD_RES (32), (33): Xaa is C or S
SRVVMNRYKKLIVNSSDDFYLVSIANLKTPAXXPKP

SEQ ID NO: 5455 - protein, 34 aa, Artificial Sequence
  GFR-binding peptide
  MOD_RES (31), (32): Xaa is C or S
EVVMDQYNKLVVKENEDLYLMSIASLETPVXXAK

SEQ ID NO: 5456 - protein, 41 aa, Artificial Sequence
  GFR-binding peptide
  MOD_RES (1), (3), (37), (38): Xaa is C or S
  MOD_RES (15), (16), (17), (18), (19): Xaa is A or G
  MOD_RES (20), (21), (22), (23): Xaa is A or G or is absent
XGXGEVVMDQYNKLXXXXXXXXXLYLMSIASLETPVXXAKP

SEQ ID NO: 5457 - protein, 31 aa, Artificial Sequence
  GFR-binding peptide
  MOD_RES (1), (1): Xaa is C or S
XSKVIMRYKKLIKPTKGIFYLISIANLDQSV

SEQ ID NO: 5458 - protein, 40 aa, Artificial Sequence
  GFR-binding peptide
  MOD_RES (34), (35): Xaa is C or S
  MOD_RES (12), (13), (14), (15), (16): Xaa is A or G
  MOD_RES (17), (18), (19), (20): Xaa is A or G or is absent
GEVVMDRHKRLXXXXXXXXXYYLMSTASLETPVXXAKPIK

SEQ ID NO: 5459 - protein, 40 aa, Artificial Sequence
  GFR-binding peptide
  MOD_RES (2), (35), (36): Xaa is C or S
  MOD_RES (13), (14), (15), (16), (17): Xaa is A or G
  MOD_RES (18), (19), (20), (21): Xaa is A or G or is absent
KXSRVIMQYNKLXXXXXXXXXLYLISIASLAQPVXXPAAS

SEQ ID NO: 5460 - protein, 41 aa, Artificial Sequence
  GFR-binding peptide
  MOD_RES (2), (4), (37), (38): Xaa is C or S
RXGXEAVSMGEQYNKLTPVGMDDLYLVSIASLKTPVXXAKG

SEQ ID NO: 5461 - protein, 38 aa, Artificial Sequence
  GFR-binding peptide
  MOD_RES (1), (3), (37): Xaa is C or S
  MOD_RES (15), (16), (17), (18), (19): Xaa is A or G
  MOD_RES (20), (21), (22), (23): Xaa is A or G or is absent
XGXSRVVMNRHKRLXXXXXXXXXYYLVSTASLKTPAXT

SEQ ID NO: 5462 - protein, 37 aa, Artificial Sequence
  GFR-binding peptide
  MOD_RES (1), (34), (35): Xaa is C or S
  MOD_RES (12), (13), (14), (15), (16): Xaa is A or G
  MOD_RES (17), (18), (19), (20): Xaa is A or G or is absent
XSRVIMRHKRLXXXXXXXXXYYLISTASLAQPVXXPA

SEQ ID NO: 5463 - protein, 36 aa, Artificial Sequence
  GFR-binding peptide
  MOD_RES (1), (3): Xaa is C or S
  MOD_RES (15), (16), (17), (18), (19): Xaa is A or G
  MOD_RES (20), (21), (22), (23): Xaa is A or G or is absent
XGXGEVVMDQYNKLXXXXXXXXXLYLMSIASLETPV

SEQ ID NO: 5464 - protein, 39 aa, Artificial Sequence
  GFR-binding peptide
  MOD_RES (2), (4), (39): Xaa is C or S
  MOD_RES (17), (18), (19), (20), (21): Xaa is A or G
  MOD_RES (22), (23), (24), (25): Xaa is A or G or is absent
RXGXEAVSMGEQYNKLXXXXXXXXXLYLVSIASLKTPVX

SEQ ID NO: 5465 - protein, 38 aa, Artificial Sequence
  GFR-binding peptide
  MOD_RES (1), (3), (38): Xaa is C or S
  MOD_RES (16), (17), (18), (19), (20): Xaa is A or G
  MOD_RES (21), (22), (23), (24): Xaa is A or G or is absent
XGXEAVSMGERHKRLXXXXXXXXXYYLVSTASLKTPVX

SEQ ID NO: 5466 - protein, 43 aa, Artificial Sequence
  GFR-binding peptide
  MOD_RES (2), (4), (37), (38): Xaa is C or S
  MOD_RES (15), (16), (17), (18), (19): Xaa is A or G
  MOD_RES (20), (21), (22), (23): Xaa is A or G or is absent
SXKXSKVVMYHYKLXXXXXXXXXKYLISIPSLDQPVXXPSASA

SEQ ID NO: 5467 - protein, 41 aa, Artificial Sequence
  GFR-binding peptide
  MOD_RES (2), (35), (36): Xaa is C or S
  MOD_RES (13), (14), (15), (16), (17): Xaa is A or G
  MOD_RES (18), (19), (20), (21): Xaa is A or G or is absent
KXSRVIMYHYKLXXXXXXXXXKYLISIPSLAQPVXXPAASA

SEQ ID NO: 5468 - protein, 31 aa, Artificial Sequence
  GFR-binding peptide
  MOD_RES (31), (31): Xaa is C or S
SRVIMYHYKLVKPKRGVKYLISIPSLAQPVX

SEQ ID NO: 5469 - protein, 37 aa, Artificial Sequence
  GFR-binding peptide
  MOD_RES (31), (32): Xaa is C or S
SKVVMRHKRLVKPTRGVYYLISTASLDQPVXXPSASA

SEQ ID NO: 5470 - protein, 38 aa, Artificial Sequence
  GFR-binding peptide
  MOD_RES (33), (34): Xaa is C or S
  MOD_RES (11), (12), (13), (14), (15): Xaa is A or G
  MOD_RES (16), (17), (18), (19): Xaa is A or G or is absent
SRVIMRHKRLXXXXXXXXXYYLISTASLAQPVXXPAAS

SEQ ID NO: 5471 - protein, 39 aa, Artificial Sequence
  GFR-binding peptide
  MOD_RES (1), (36), (37): Xaa is C or S
  MOD_RES (14), (15), (16), (17), (18): Xaa is A or G
  MOD_RES (19), (20), (21), (22): Xaa is A or G or is absent
XEAVSMGERYKKLXXXXXXXXXFYLVSIANLKTPVXXAK

SEQ ID NO: 5472 - protein, 43 aa, Artificial Sequence
  GFR-binding peptide
  MOD_RES (1), (3), (37), (38): Xaa is C or S
  MOD_RES (15), (16), (17), (18), (19): Xaa is A or G
  MOD_RES (20), (21), (22), (23): Xaa is A or G or is absent
XGXGEVVMDRHKRLXXXXXXXXXYYLMSTASLETPVXXAKPIK

SEQ ID NO: 5473 - protein, 41 aa, Artificial Sequence
  GFR-binding peptide
  MOD_RES (1), (3), (40): Xaa is C or S
  MOD_RES (16), (17), (18), (19), (20): Xaa is A or G
  MOD_RES (21), (22), (23), (24): Xaa is A or G or is absent
XKXALHDELTRHKRLXXXXXXXXXYYLVSTASLQVQTPRXQ

SEQ ID NO: 5474 - protein, 37 aa, Artificial Sequence
  GFR-binding peptide
  MOD_RES (2), (33), (34): Xaa is C or S
KXSRVIMQYNKLVKPKRGVLYLISIASLAQPVXXPAA

SEQ ID NO: 5475 - protein, 36 aa, Artificial Sequence
  GFR-binding peptide
  MOD_RES (1), (33): Xaa is C or S
XSRVVMNRHKRLIVNSSDDYYLVSTASLKTPAXTPK

SEQ ID NO: 5476 - protein, 32 aa, Artificial Sequence
  GFR-binding peptide
  MOD_RES (31), (32): Xaa is C or S
RVVMNRHKRLIVNSSDDYYLVSTASLKTPAXX

SEQ ID NO: 5477 - protein, 44 aa, Artificial Sequence
  GFR-binding peptide
  MOD_RES (2), (4), (38), (39): Xaa is C or S
  MOD_RES (16), (17), (18), (19), (20): Xaa is A or G
  MOD_RES (21), (22), (23), (24): Xaa is A or G or is absent
RXGXGEVVMERYKKLXXXXXXXXXFYLMSIANLETPVXXAKPIS

SEQ ID NO: 5478 - protein, 35 aa, Artificial Sequence
  GFR-binding peptide
  MOD_RES (12), (13), (14), (15), (16): Xaa is A or G
  MOD_RES (17), (18), (19), (20): Xaa is A or G or is absent
LHDELTRYKKLXXXXXXXXXFYLVSIANLQVQTPR

SEQ ID NO: 5479 - protein, 38 aa, Artificial Sequence
  GFR-binding peptide
  MOD_RES (1), (33), (34): Xaa is C or S
XSRVVMNQYNKLIVNSSDDLYLVSIASLKTPAXXPKPV

SEQ ID NO: 5480 - protein, 37 aa, Artificial Sequence
  GFR-binding peptide
  MOD_RES (1), (34), (35): Xaa is C or S
  MOD_RES (12), (13), (14), (15), (16): Xaa is A or G
  MOD_RES (17), (18), (19), (20): Xaa is A or G or is absent
XSRVIMQYNKLXXXXXXXXXLYLISIASLAQPVXXPA

SEQ ID NO: 5481 - protein, 38 aa, Artificial Sequence
  GFR-binding peptide
  MOD_RES (2), (4), (37), (38): Xaa is C or S
RXGXEAVSMGEQYNKLTPVGMDDLYLVSIASLKTPVXX

SEQ ID NO: 5482 - protein, 35 aa, Artificial Sequence
  GFR-binding peptide
  MOD_RES (12), (13), (14), (15), (16): Xaa is A or G
  MOD_RES (17), (18), (19), (20): Xaa is A or G or is absent
LHDELTQYNKLXXXXXXXXXLYLVSIASLQVQTPR

SEQ ID NO: 5483 - protein, 34 aa, Artificial Sequence
  GFR-binding peptide
  MOD_RES (2), (34): Xaa is C or S
GXAKVVMNYHYKLIVNNSSDKYLVSIPSLKTPAX

SEQ ID NO: 5484 - protein, 39 aa, Artificial Sequence
  GFR-binding peptide
  MOD_RES (2), (35), (36): Xaa is C or S
  MOD_RES (13), (14), (15), (16), (17): Xaa is A or G
  MOD_RES (18), (19), (20), (21): Xaa is A or G or is absent
KXSRVIMRYKKLXXXXXXXXXFYLISIANLAQPVXXPAA

SEQ ID NO: 5485 - protein, 39 aa, Artificial Sequence
  GFR-binding peptide
  MOD_RES (2), (37), (38): Xaa is C or S
  MOD_RES (15), (16), (17), (18), (19): Xaa is A or G
  MOD_RES (20), (21), (22), (23): Xaa is A or G or is absent
GXEAVSMGEQYNKLXXXXXXXXXLYLVSIASLKTPVXXA

SEQ ID NO: 5486 - protein, 36 aa, Artificial Sequence
  GFR-binding peptide
  MOD_RES (2), (4), (35), (36): Xaa is C or S
SXKXSKVIMRHKRLIKPTKGIYYLISTASLDQSVXX

SEQ ID NO: 5487 - protein, 43 aa, Artificial Sequence
  GFR-binding peptide
  MOD_RES (2), (4), (38), (39): Xaa is C or S
  MOD_RES (16), (17), (18), (19), (20): Xaa is A or G
  MOD_RES (21), (22), (23), (24): Xaa is A or G or is absent
HXGXSRVVMNRYKKLXXXXXXXXXFYLVSIANLKTPAXXPKPV

SEQ ID NO: 5488 - protein, 38 aa, Artificial Sequence
  GFR-binding peptide
  MOD_RES (2), (34), (35): Xaa is C or S
GXGEVVMDRHKRLVVKENEDYYLMSTASLETPVXXAKP

SEQ ID NO: 5489 - protein, 36 aa, Artificial Sequence
  GFR-binding peptide
  MOD_RES (31), (32): Xaa is C or S
EVVMDYHYKLVVKENEDKYLMSIPSLETPVXXAKPI

SEQ ID NO: 5490 - protein, 36 aa, Artificial Sequence
  GFR-binding peptide
  MOD_RES (32), (33): Xaa is C or S
ARVVMNRHKRLIVNSSDDYYLVSTASLQTPAXXPKP

SEQ ID NO: 5491 - protein, 36 aa, Artificial Sequence
  GFR-binding peptide
  MOD_RES (33), (34): Xaa is C or S
  MOD_RES (11), (12), (13), (14), (15): Xaa is A or G
  MOD_RES (16), (17), (18), (19): Xaa is A or G or is absent
EVVMDRHKRLXXXXXXXXXYYLMSTASLETPVXXAK

SEQ ID NO: 5492 - protein, 32 aa, Artificial Sequence
  GFR-binding peptide
  MOD_RES (31), (32): Xaa is C or S
RVVMNQYNKLIVNSSDDLYLVSIASLQTPAXX

SEQ ID NO: 5493 - protein, 34 aa, Artificial Sequence
  GFR-binding peptide
  MOD_RES (1), (3): Xaa is C or S
XGXAKVVMNYHYKLIVNNSSDKYLVSIPSLKTPA

SEQ ID NO: 5494 - protein, 40 aa, Artificial Sequence
  GFR-binding peptide
  MOD_RES (2), (4), (38): Xaa is C or S
  MOD_RES (16), (17), (18), (19), (20): Xaa is A or G
  MOD_RES (21), (22), (23), (24): Xaa is A or G or is absent
HXGXSRVVMNQYNKLXXXXXXXXXLYLVSIASLKTPAXTP

SEQ ID NO: 5495 - protein, 42 aa, Artificial Sequence
  GFR-binding peptide
  MOD_RES (2), (4), (38), (39): Xaa is C or S
  MOD_RES (16), (17), (18), (19), (20): Xaa is A or G
  MOD_RES (21), (22), (23), (24): Xaa is A or G or is absent
HXGXAKVVMNQYNKLXXXXXXXXXLYLVSIASLKTPAXXAKP

SEQ ID NO: 5496 - protein, 34 aa, Artificial Sequence
  GFR-binding peptide
  MOD_RES (31), (32): Xaa is C or S
SRVIMRHKRLVKPKRGVYYLISTASLAQPVXXPA

SEQ ID NO: 5497 - protein, 38 aa, Artificial Sequence
  GFR-binding peptide
  MOD_RES (2), (4): Xaa is C or S
EXKXALHDELTYHYKLFIPKKRVIEKYLVSIPSLQVQT

SEQ ID NO: 5498 - protein, 35 aa, Artificial Sequence
  GFR-binding peptide
  MOD_RES (2), (2): Xaa is C or S
  MOD_RES (14), (15), (16), (17), (18): Xaa is A or G
  MOD_RES (19), (20), (21), (22): Xaa is A or G or is absent
GXSRVVMNQYNKLXXXXXXXXXLYLVSIASLKTPA

SEQ ID NO: 5499 - protein, 34 aa, Artificial Sequence
  GFR-binding peptide
  MOD_RES (2), (2): Xaa is C or S
  MOD_RES (13), (14), (15), (16), (17): Xaa is A or G
  MOD_RES (18), (19), (20), (21): Xaa is A or G or is absent
KXSRVIMQYNKLXXXXXXXXXLYLISIASLAQPV

SEQ ID NO: 5500 - protein, 35 aa, Artificial Sequence
  GFR-binding peptide
LHDELTRHKRLFIPKKRVIEYYLVSTASLQVQTPR

SEQ ID NO: 5501 - protein, 39 aa, Artificial Sequence
  GFR-binding peptide
  MOD_RES (1), (35), (36): Xaa is C or S
  MOD_RES (13), (14), (15), (16), (17): Xaa is A or G
  MOD_RES (18), (19), (20), (21): Xaa is A or G or is absent
XGEVVMERYKKLXXXXXXXXXFYLMSIANLETPVXXAKP

SEQ ID NO: 5502 - protein, 40 aa, Artificial Sequence
  GFR-binding peptide
  MOD_RES (1), (3), (38), (39): Xaa is C or S
  MOD_RES (16), (17), (18), (19), (20): Xaa is A or G
  MOD_RES (21), (22), (23), (24): Xaa is A or G or is absent
XGXEAVSMGERYKKLXXXXXXXXXFYLVSIANLKTPVXXA

SEQ ID NO: 5503 - protein, 35 aa, Artificial Sequence
  GFR-binding peptide
  MOD_RES (2), (2): Xaa is C or S
  MOD_RES (14), (15), (16), (17), (18): Xaa is A or G
  MOD_RES (19), (20), (21), (22): Xaa is A or G or is absent
GXGEVVMDRYKKLXXXXXXXXXFYLMSIANLETPV

SEQ ID NO: 5504 - protein, 37 aa, Artificial Sequence
  GFR-binding peptide
  MOD_RES (1), (33), (34): Xaa is C or S
XARVVMNYHYKLIVNSSDDKYLVSIPSLQTPAXXPKP

SEQ ID NO: 5505 - protein, 37 aa, Artificial Sequence
  GFR-binding peptide
  MOD_RES (1), (1): Xaa is C or S
XALHDELTQYNKLFIPKKRVIELYLVSIASLQVQTPR

SEQ ID NO: 5506 - protein, 43 aa, Artificial Sequence
  GFR-binding peptide
  MOD_RES (1), (3), (38), (39): Xaa is C or S
  MOD_RES (16), (17), (18), (19), (20): Xaa is A or G
  MOD_RES (21), (22), (23), (24): Xaa is A or G or is absent
XGXEAVSMGERHKRLXXXXXXXXXYYLVSTASLKTPVXXAKGV

SEQ ID NO: 5507 - protein, 40 aa, Artificial Sequence
  GFR-binding peptide
  MOD_RES (1), (3), (36), (37): Xaa is C or S
  MOD_RES (14), (15), (16), (17), (18): Xaa is A or G
  MOD_RES (19), (20), (21), (22): Xaa is A or G or is absent
XKXSKVVMRYKKLXXXXXXXXXFYLISIANLDQPVXXPSA

SEQ ID NO: 5508 - protein, 36 aa, Artificial Sequence
  GFR-binding peptide
  MOD_RES (2), (36): Xaa is C or S
  MOD_RES (14), (15), (16), (17), (18): Xaa is A or G
  MOD_RES (19), (20), (21), (22): Xaa is A or G or is absent
GXGEVVMEQYNKLXXXXXXXXXLYLMSIASLETPVX

SEQ ID NO: 5509 - protein, 41 aa, Artificial Sequence
  GFR-binding peptide
  MOD_RES (1), (35), (36): Xaa is C or S
  MOD_RES (13), (14), (15), (16), (17): Xaa is A or G
  MOD_RES (18), (19), (20), (21): Xaa is A or G or is absent
XAKVVMNYHYKLXXXXXXXXXKYLVSIPSLKTPAXXAKPVA

SEQ ID NO: 5510 - protein, 34 aa, Artificial Sequence
  GFR-binding peptide
  MOD_RES (32), (33): Xaa is C or S
SRVVMNYHYKLIVNSSDDKYLVSIPSLKTPAXXP

SEQ ID NO: 5511 - protein, 41 aa, Artificial Sequence
  GFR-binding peptide
  MOD_RES (1), (35), (36): Xaa is C or S
  MOD_RES (13), (14), (15), (16), (17): Xaa is A or G
  MOD_RES (18), (19), (20), (21): Xaa is A or G or is absent
XGEVVMDQYNKLXXXXXXXXXLYLMSIASLETPVXXAKPIK

SEQ ID NO: 5512 - protein, 35 aa, Artificial Sequence
  GFR-binding peptide
  MOD_RES (2), (4): Xaa is C or S
HXGXARVVMNYHYKLIVNSSDDKYLVSIPSLQTPA

SEQ ID NO: 5513 - protein, 38 aa, Artificial Sequence
  GFR-binding peptide
  MOD_RES (33), (34): Xaa is C or S
  MOD_RES (11), (12), (13), (14), (15): Xaa is A or G
  MOD_RES (16), (17), (18), (19): Xaa is A or G or is absent
RVVMNRHKRLXXXXXXXXXYYLVSTASLQTPAXXPKPV

SEQ ID NO: 5514 - protein, 40 aa, Artificial Sequence
  GFR-binding peptide
  MOD_RES (2), (4): Xaa is C or S
  MOD_RES (17), (18), (19), (20), (21): Xaa is A or G
  MOD_RES (22), (23), (24), (25): Xaa is A or G or is absent
EXKXALHDELTRYKKLXXXXXXXXXFYLVSIANLQVQTPR

SEQ ID NO: 5515 - protein, 34 aa, Artificial Sequence
  GFR-binding peptide
  MOD_RES (32), (32): Xaa is C or S
SRVVMNRHKRLIVNSSDDYYLVSTASLKTPAXTP

SEQ ID NO: 5516 - protein, 42 aa, Artificial Sequence
  GFR-binding peptide
  MOD_RES (2), (36), (37): Xaa is C or S
  MOD_RES (14), (15), (16), (17), (18): Xaa is A or G
  MOD_RES (19), (20), (21), (22): Xaa is A or G or is absent
GXGEVVMEYHYKLXXXXXXXXXKYLMSIPSLETPVXXAKPIS

SEQ ID NO: 5517 - protein, 32 aa, Artificial Sequence
  GFR-binding peptide
  MOD_RES (31), (32): Xaa is C or S
KVVMNYHYKLIVNNSSDKYLVSIPSLKTPAXX

SEQ ID NO: 5518 - protein, 35 aa, Artificial Sequence
  GFR-binding peptide
  MOD_RES (32), (32): Xaa is C or S
SRVVMNRYKKLIVNSSDDFYLVSIANLKTPAXTPK

SEQ ID NO: 5519 - protein, 35 aa, Artificial Sequence
  GFR-binding peptide
  MOD_RES (31), (32): Xaa is C or S
RVVMNRYKKLIVNSSDDFYLVSIANLKTPAXXPKP

SEQ ID NO: 5520 - protein, 37 aa, Artificial Sequence
  GFR-binding peptide
  MOD_RES (1), (35), (36): Xaa is C or S
  MOD_RES (13), (14), (15), (16), (17): Xaa is A or G
  MOD_RES (18), (19), (20), (21): Xaa is A or G or is absent
XSRVVMNRYKKLXXXXXXXXXFYLVSIANLKTPAXXP

SEQ ID NO: 5521 - protein, 41 aa, Artificial Sequence
  GFR-binding peptide
  MOD_RES (2), (4), (36), (37): Xaa is C or S
RXGXGEVVMDRHKRLVVKENEDYYLMSTASLETPVXXAKPI

SEQ ID NO: 5522 - protein, 39 aa, Artificial Sequence
  GFR-binding peptide
  MOD_RES (1), (3), (36), (37): Xaa is C or S
XGXEAVSMGERYKKLTPVGMDDFYLVSIANLKTPVXXAK

SEQ ID NO: 5523 - protein, 35 aa, Artificial Sequence
  GFR-binding peptide
  MOD_RES (2), (35): Xaa is C or S
  MOD_RES (13), (14), (15), (16), (17): Xaa is A or G
  MOD_RES (18), (19), (20), (21): Xaa is A or G or is absent
KXSRVIMRHKRLXXXXXXXXXYYLISTASLAQPVX

SEQ ID NO: 5524 - protein, 34 aa, Artificial Sequence
  GFR-binding peptide
HDELTQYNKLFIPKKRVIELYLVSIASLQVQTPR

SEQ ID NO: 5525 - protein, 38 aa, Artificial Sequence
  GFR-binding peptide
  MOD_RES (2), (2): Xaa is C or S
  MOD_RES (15), (16), (17), (18), (19): Xaa is A or G
  MOD_RES (20), (21), (22), (23): Xaa is A or G or is absent
KXALHDELTYHYKLXXXXXXXXXKYLVSIPSLQVQTPR

SEQ ID NO: 5526 - protein, 36 aa, Artificial Sequence
  GFR-binding peptide
  MOD_RES (2), (2): Xaa is C or S
KXALHDELTRHKRLFIPKKRVIEYYLVSTASLQVQT

SEQ ID NO: 5527 - protein, 32 aa, Artificial Sequence
  GFR-binding peptide
  MOD_RES (32), (32): Xaa is C or S
SRVVMNRHKRLIVNSSDDYYLVSTASLKTPAX

SEQ ID NO: 5528 - protein, 32 aa, Artificial Sequence
  GFR-binding peptide
  MOD_RES (31), (32): Xaa is C or S
RVVMNYHYKLIVNSSDDKYLVSIPSLQTPAXX

SEQ ID NO: 5529 - protein, 35 aa, Artificial Sequence
  GFR-binding peptide
  MOD_RES (33), (34): Xaa is C or S
  MOD_RES (11), (12), (13), (14), (15): Xaa is A or G
  MOD_RES (16), (17), (18), (19): Xaa is A or G or is absent
SKVIMRHKRLXXXXXXXXXYYLISTASLDQSVXXP

SEQ ID NO: 5530 - protein, 38 aa, Artificial Sequence
  GFR-binding peptide
  MOD_RES (2), (36), (37): Xaa is C or S
  MOD_RES (14), (15), (16), (17), (18): Xaa is A or G
  MOD_RES (19), (20), (21), (22): Xaa is A or G or is absent
GXAKVVMNQYNKLXXXXXXXXXLYLVSIASLKTPAXXA

SEQ ID NO: 5531 - protein, 36 aa, Artificial Sequence
  GFR-binding peptide
  MOD_RES (1), (35), (36): Xaa is C or S
  MOD_RES (13), (14), (15), (16), (17): Xaa is A or G
  MOD_RES (18), (19), (20), (21): Xaa is A or G or is absent
XGEVVMDRHKRLXXXXXXXXXYYLMSTASLETPVXX

SEQ ID NO: 5532 - protein, 38 aa, Artificial Sequence
  GFR-binding peptide
  MOD_RES (33), (34): Xaa is C or S
  MOD_RES (11), (12), (13), (14), (15): Xaa is A or G
  MOD_RES (16), (17), (18), (19): Xaa is A or G or is absent
RVVMNRYKKLXXXXXXXXXFYLVSIANLKTPAXXPKPV

SEQ ID NO: 5533 - protein, 32 aa, Artificial Sequence
  GFR-binding peptide
  MOD_RES (1), (32): Xaa is C or S
XSKVIMYHYKLIKPTKGIKYLISIPSLDQSVX

SEQ ID NO: 5534 - protein, 39 aa, Artificial Sequence
  GFR-binding peptide
  MOD_RES (2), (36), (37): Xaa is C or S
  MOD_RES (14), (15), (16), (17), (18): Xaa is A or G
  MOD_RES (19), (20), (21), (22): Xaa is A or G or is absent
GXGEVVMEQYNKLXXXXXXXXXLYLMSIASLETPVXXAK

SEQ ID NO: 5535 - protein, 39 aa, Artificial Sequence
  GFR-binding peptide
  MOD_RES (34), (35): Xaa is C or S
  MOD_RES (12), (13), (14), (15), (16): Xaa is A or G
  MOD_RES (17), (18), (19), (20): Xaa is A or G or is absent
AKVVMNQYNKLXXXXXXXXXLYLVSIASLKTPAXXAKPV

SEQ ID NO: 5536 - protein, 38 aa, Artificial Sequence
  GFR-binding peptide
  MOD_RES (2), (36), (37): Xaa is C or S
  MOD_RES (14), (15), (16), (17), (18): Xaa is A or G
  MOD_RES (19), (20), (21), (22): Xaa is A or G or is absent
GXGEVVMDQYNKLXXXXXXXXXLYLMSIASLETPVXXA

SEQ ID NO: 5537 - protein, 38 aa, Artificial Sequence
  GFR-binding peptide
  MOD_RES (2), (36), (37): Xaa is C or S
  MOD_RES (14), (15), (16), (17), (18): Xaa is A or G
  MOD_RES (19), (20), (21), (22): Xaa is A or G or is absent
GXGEVVMERHKRLXXXXXXXXXYYLMSTASLETPVXXA

SEQ ID NO: 5538 - protein, 39 aa, Artificial Sequence
  GFR-binding peptide
  MOD_RES (1), (33), (34): Xaa is C or S
XAKVVMNRHKRLIVNNSSDYYLVSTASLKTPAXXAKPVA

SEQ ID NO: 5539 - protein, 42 aa, Artificial Sequence
  GFR-binding peptide
  MOD_RES (1), (3), (37), (38): Xaa is C or S
  MOD_RES (15), (16), (17), (18), (19): Xaa is A or G
  MOD_RES (20), (21), (22), (23): Xaa is A or G or is absent
XGXGEVVMERHKRLXXXXXXXXXYYLMSTASLETPVXXAKPI

SEQ ID NO: 5540 - protein, 35 aa, Artificial Sequence
  GFR-binding peptide
  MOD_RES (2), (2): Xaa is C or S
  MOD_RES (14), (15), (16), (17), (18): Xaa is A or G
  MOD_RES (19), (20), (21), (22): Xaa is A or G or is absent
GXAKVVMNRYKKLXXXXXXXXXFYLVSIANLKTPA

SEQ ID NO: 5541 - protein, 40 aa, Artificial Sequence
  GFR-binding peptide
  MOD_RES (1), (35), (36): Xaa is C or S
  MOD_RES (13), (14), (15), (16), (17): Xaa is A or G
  MOD_RES (18), (19), (20), (21): Xaa is A or G or is absent
XAKVVMNQYNKLXXXXXXXXXLYLVSIASLKTPAXXAKPV

SEQ ID NO: 5542 - protein, 35 aa, Artificial Sequence
  GFR-binding peptide
  MOD_RES (31), (32): Xaa is C or S
SKVIMYHYKLIKPTKGIKYLISIPSLDQSVXXPSA

SEQ ID NO: 5543 - protein, 40 aa, Artificial Sequence
  GFR-binding peptide
  MOD_RES (2), (4): Xaa is C or S
  MOD_RES (17), (18), (19), (20), (21): Xaa is A or G
  MOD_RES (22), (23), (24), (25): Xaa is A or G or is absent
EXKXALHDELTRHKRLXXXXXXXXXYYLVSTASLQVQTPR

SEQ ID NO: 5544 - protein, 40 aa, Artificial Sequence
  GFR-binding peptide
  MOD_RES (1), (3), (37), (38): Xaa is C or S
  MOD_RES (15), (16), (17), (18), (19): Xaa is A or G
  MOD_RES (20), (21), (22), (23): Xaa is A or G or is absent
XGXGEVVMERYKKLXXXXXXXXXFYLMSIANLETPVXXAK

SEQ ID NO: 5545 - protein, 35 aa, Artificial Sequence
  GFR-binding peptide
  MOD_RES (33), (34): Xaa is C or S
  MOD_RES (11), (12), (13), (14), (15): Xaa is A or G
  MOD_RES (16), (17), (18), (19): Xaa is A or G or is absent
EVVMDYHYKLXXXXXXXXXKYLMSIPSLETPVXXA

SEQ ID NO: 5546 - protein, 31 aa, Artificial Sequence
  GFR-binding peptide
ARVVMNQYNKLIVNSSDDLYLVSIASLQTPA

SEQ ID NO: 5547 - protein, 36 aa, Artificial Sequence
  GFR-binding peptide
  MOD_RES (1), (3), (36): Xaa is C or S
  MOD_RES (14), (15), (16), (17), (18): Xaa is A or G
  MOD_RES (19), (20), (21), (22): Xaa is A or G or is absent
XKXSRVIMQYNKLXXXXXXXXXLYLISIASLAQPVX

SEQ ID NO: 5548 - protein, 33 aa, Artificial Sequence
  GFR-binding peptide
  MOD_RES (1), (33): Xaa is C or S
XARVVMNRHKRLIVNSSDDYYLVSTASLQTPAX

SEQ ID NO: 5549 - protein, 39 aa, Artificial Sequence
  GFR-binding peptide
  MOD_RES (33), (34): Xaa is C or S
  MOD_RES (11), (12), (13), (14), (15): Xaa is A or G
  MOD_RES (16), (17), (18), (19): Xaa is A or G or is absent
RVVMNYHYKLXXXXXXXXXKYLVSIPSLKTPAXXPKPVY

SEQ ID NO: 5550 - protein, 43 aa, Artificial Sequence
  GFR-binding peptide
  MOD_RES (2), (4), (41): Xaa is C or S
  MOD_RES (17), (18), (19), (20), (21): Xaa is A or G
  MOD_RES (22), (23), (24), (25): Xaa is A or G or is absent
EXKXALHDELTRYKKLXXXXXXXXXFYLVSIANLQVQTPRXQV

SEQ ID NO: 5551 - protein, 34 aa, Artificial Sequence
  GFR-binding peptide
  MOD_RES (2), (4): Xaa is C or S
SXKXSKVVMRYKKLVKPTRGVFYLISIANLDQPV

SEQ ID NO: 5552 - protein, 41 aa, Artificial Sequence
  GFR-binding peptide
  MOD_RES (2), (4), (38): Xaa is C or S
  MOD_RES (16), (17), (18), (19), (20): Xaa is A or G
  MOD_RES (21), (22), (23), (24): Xaa is A or G or is absent
HXGXSRVVMNYHYKLXXXXXXXXXKYLVSIPSLKTPAXTPK

SEQ ID NO: 5553 - protein, 37 aa, Artificial Sequence
  GFR-binding peptide
  MOD_RES (1), (3): Xaa is C or S
XKXALHDELTYHYKLFIPKKRVIEKYLVSIPSLQVQT

SEQ ID NO: 5554 - protein, 37 aa, Artificial Sequence
  GFR-binding peptide
  MOD_RES (1), (3), (35), (36): Xaa is C or S
XGXSRVVMNYHYKLIVNSSDDKYLVSIPSLKTPAXXP

SEQ ID NO: 5555 - protein, 37 aa, Artificial Sequence
  GFR-binding peptide
  MOD_RES (1), (33), (34): Xaa is C or S
XSRVVMNRHKRLIVNSSDDYYLVSTASLKTPAXXPKP

SEQ ID NO: 5556 - protein, 32 aa, Artificial Sequence
  GFR-binding peptide
  MOD_RES (31), (32): Xaa is C or S
SKVVMRHKRLVKPTRGVYYLISTASLDQPVXX

SEQ ID NO: 5557 - protein, 35 aa, Artificial Sequence
  GFR-binding peptide
  MOD_RES (1), (35): Xaa is C or S
  MOD_RES (13), (14), (15), (16), (17): Xaa is A or G
  MOD_RES (18), (19), (20), (21): Xaa is A or G or is absent
XGEVVMEYHYKLXXXXXXXXXKYLMSIPSLETPVX

SEQ ID NO: 5558 - protein, 37 aa, Artificial Sequence
  GFR-binding peptide
  MOD_RES (1), (3): Xaa is C or S
  MOD_RES (16), (17), (18), (19), (20): Xaa is A or G
  MOD_RES (21), (22), (23), (24): Xaa is A or G or is absent
XGXEAVSMGEYHYKLXXXXXXXXXKYLVSIPSLKTPV

SEQ ID NO: 5559 - protein, 42 aa, Artificial Sequence
  GFR-binding peptide
  MOD_RES (2), (4), (39), (40): Xaa is C or S
  MOD_RES (17), (18), (19), (20), (21): Xaa is A or G
  MOD_RES (22), (23), (24), (25): Xaa is A or G or is absent
RXGXEAVSMGERYKKLXXXXXXXXXFYLVSIANLKTPVXXAK

SEQ ID NO: 5560 - protein, 42 aa, Artificial Sequence
  GFR-binding peptide
  MOD_RES (1), (3), (37), (38): Xaa is C or S
  MOD_RES (15), (16), (17), (18), (19): Xaa is A or G
  MOD_RES (20), (21), (22), (23): Xaa is A or G or is absent
XGXARVVMNRHKRLXXXXXXXXXYYLVSTASLQTPAXXPKPV

SEQ ID NO: 5561 - protein, 40 aa, Artificial Sequence
  GFR-binding peptide
  MOD_RES (1), (3), (35), (36): Xaa is C or S
XGXARVVMNYHYKLIVNSSDDKYLVSIPSLQTPAXXPKPV

SEQ ID NO: 5562 - protein, 36 aa, Artificial Sequence
  GFR-binding peptide
  MOD_RES (31), (32): Xaa is C or S
EVVMEQYNKLVVKDYEDLYLMSIASLETPVXXAKPI

SEQ ID NO: 5563 - protein, 36 aa, Artificial Sequence
  GFR-binding peptide
  MOD_RES (2), (36): Xaa is C or S
  MOD_RES (14), (15), (16), (17), (18): Xaa is A or G
  MOD_RES (19), (20), (21), (22): Xaa is A or G or is absent
GXARVVMNRYKKLXXXXXXXXXFYLVSIANLQTPAX

SEQ ID NO: 5564 - protein, 40 aa, Artificial Sequence
  GFR-binding peptide
  MOD_RES (1), (38): Xaa is C or S
XALHDELTYHYKLFIPKKRVIEKYLVSIPSLQVQTPRXQV

SEQ ID NO: 5565 - protein, 38 aa, Artificial Sequence
  GFR-binding peptide
  MOD_RES (2), (37), (38): Xaa is C or S
  MOD_RES (15), (16), (17), (18), (19): Xaa is A or G
  MOD_RES (20), (21), (22), (23): Xaa is A or G or is absent
GXEAVSMGEQYNKLXXXXXXXXXLYLVSIASLKTPVXX

SEQ ID NO: 5566 - protein, 38 aa, Artificial Sequence
  GFR-binding peptide
  MOD_RES (1), (36), (37): Xaa is C or S
  MOD_RES (14), (15), (16), (17), (18): Xaa is A or G
  MOD_RES (19), (20), (21), (22): Xaa is A or G or is absent
XEAVSMGEYHYKLXXXXXXXXXKYLVSIPSLKTPVXXA

SEQ ID NO: 5567 - protein, 38 aa, Artificial Sequence
  GFR-binding peptide
  MOD_RES (34), (35): Xaa is C or S
  MOD_RES (12), (13), (14), (15), (16): Xaa is A or G
  MOD_RES (17), (18), (19), (20): Xaa is A or G or is absent
GEVVMDRHKRLXXXXXXXXXYYLMSTASLETPVXXAKP

SEQ ID NO: 5568 - protein, 36 aa, Artificial Sequence
  GFR-binding peptide
  MOD_RES (34), (35): Xaa is C or S
  MOD_RES (12), (13), (14), (15), (16): Xaa is A or G
  MOD_RES (17), (18), (19), (20): Xaa is A or G or is absent
GEVVMDQYNKLXXXXXXXXXLYLMSIASLETPVXXA

SEQ ID NO: 5569 - protein, 39 aa, Artificial Sequence
  GFR-binding peptide
  MOD_RES (1), (3), (37), (38): Xaa is C or S
  MOD_RES (15), (16), (17), (18), (19): Xaa is A or G
  MOD_RES (20), (21), (22), (23): Xaa is A or G or is absent
XGXGEVVMEYHYKLXXXXXXXXXKYLMSIPSLETPVXXA

SEQ ID NO: 5570 - protein, 38 aa, Artificial Sequence
  GFR-binding peptide
  MOD_RES (33), (33): Xaa is C or S
  MOD_RES (11), (12), (13), (14), (15): Xaa is A or G
  MOD_RES (16), (17), (18), (19): Xaa is A or G or is absent
RVVMNQYNKLXXXXXXXXXLYLVSIASLKTPAXTPKTV

SEQ ID NO: 5571 - protein, 33 aa, Artificial Sequence
  GFR-binding peptide
  MOD_RES (12), (13), (14), (15), (16): Xaa is A or G
  MOD_RES (17), (18), (19), (20): Xaa is A or G or is absent
AKVVMNRYKKLXXXXXXXXXFYLVSIANLKTPA

SEQ ID NO: 5572 - protein, 35 aa, Artificial Sequence
  GFR-binding peptide
  MOD_RES (2), (33), (34): Xaa is C or S
KXSKVVMQYNKLVKPTRGVLYLISIASLDQPVXXP

SEQ ID NO: 5573 - protein, 36 aa, Artificial Sequence
  GFR-binding peptide
  MOD_RES (34), (35): Xaa is C or S
  MOD_RES (12), (13), (14), (15), (16): Xaa is A or G
  MOD_RES (17), (18), (19), (20): Xaa is A or G or is absent
GEVVMDRYKKLXXXXXXXXXFYLMSIANLETPVXXA

SEQ ID NO: 5574 - protein, 36 aa, Artificial Sequence
  GFR-binding peptide
  MOD_RES (35), (36): Xaa is C or S
  MOD_RES (13), (14), (15), (16), (17): Xaa is A or G
  MOD_RES (18), (19), (20), (21): Xaa is A or G or is absent
EAVSMGEYHYKLXXXXXXXXXKYLVSIPSLKTPVXX

SEQ ID NO: 5575 - protein, 42 aa, Artificial Sequence
  GFR-binding peptide
  MOD_RES (1), (3), (37), (38): Xaa is C or S
  MOD_RES (15), (16), (17), (18), (19): Xaa is A or G
  MOD_RES (20), (21), (22), (23): Xaa is A or G or is absent
XGXGEVVMERYKKLXXXXXXXXXFYLMSIANLETPVXXAKPI

SEQ ID NO: 5576 - protein, 34 aa, Artificial Sequence
  GFR-binding peptide
  MOD_RES (11), (12), (13), (14), (15): Xaa is A or G
  MOD_RES (16), (17), (18), (19): Xaa is A or G or is absent
HDELTRHKRLXXXXXXXXXYYLVSTASLQVQTPR

SEQ ID NO: 5577 - protein, 34 aa, Artificial Sequence
  GFR-binding peptide
  MOD_RES (33), (34): Xaa is C or S
  MOD_RES (11), (12), (13), (14), (15): Xaa is A or G
  MOD_RES (16), (17), (18), (19): Xaa is A or G or is absent
SRVIMYHYKLXXXXXXXXXKYLISIPSLAQPVXX

SEQ ID NO: 5578 - protein, 38 aa, Artificial Sequence
  GFR-binding peptide
  MOD_RES (1), (3), (37), (38): Xaa is C or S
  MOD_RES (15), (16), (17), (18), (19): Xaa is A or G
  MOD_RES (20), (21), (22), (23): Xaa is A or G or is absent
XGXGEVVMDRYKKLXXXXXXXXXFYLMSIANLETPVXX

SEQ ID NO: 5579 - protein, 34 aa, Artificial Sequence
  GFR-binding peptide
  MOD_RES (1), (32), (33): Xaa is C or S
XSKVIMYHYKLIKPTKGIKYLISIPSLDQSVXXP

SEQ ID NO: 5580 - protein, 40 aa, Artificial Sequence
  GFR-binding peptide
  MOD_RES (2), (35), (36): Xaa is C or S
  MOD_RES (13), (14), (15), (16), (17): Xaa is A or G
  MOD_RES (18), (19), (20), (21): Xaa is A or G or is absent
KXSRVIMYHYKLXXXXXXXXXKYLISIPSLAQPVXXPAAS

SEQ ID NO: 5581 - protein, 39 aa, Artificial Sequence
  GFR-binding peptide
  MOD_RES (2), (4), (38), (39): Xaa is C or S
  MOD_RES (16), (17), (18), (19), (20): Xaa is A or G
  MOD_RES (21), (22), (23), (24): Xaa is A or G or is absent
RXGXGEVVMDYHYKLXXXXXXXXXKYLMSIPSLETPVXX

SEQ ID NO: 5582 - protein, 31 aa, Artificial Sequence
  GFR-binding peptide
GEVVMEQYNKLVVKDYEDLYLMSIASLETPV

SEQ ID NO: 5583 - protein, 32 aa, Artificial Sequence
  GFR-binding peptide
  MOD_RES (31), (32): Xaa is C or S
KVVMNQYNKLIVNNSSDLYLVSIASLKTPAXX

SEQ ID NO: 5584 - protein, 35 aa, Artificial Sequence
  GFR-binding peptide
  MOD_RES (33), (34): Xaa is C or S
  MOD_RES (11), (12), (13), (14), (15): Xaa is A or G
  MOD_RES (16), (17), (18), (19): Xaa is A or G or is absent
RVVMNQYNKLXXXXXXXXXLYLVSIASLKTPAXXP

SEQ ID NO: 5585 - protein, 39 aa, Artificial Sequence
  GFR-binding peptide
  MOD_RES (1), (3): Xaa is C or S
  MOD_RES (16), (17), (18), (19), (20): Xaa is A or G
  MOD_RES (21), (22), (23), (24): Xaa is A or G or is absent
XKXALHDELTQYNKLXXXXXXXXXLYLVSIASLQVQTPR

SEQ ID NO: 5586 - protein, 37 aa, Artificial Sequence
  GFR-binding peptide
  MOD_RES (2), (35), (36): Xaa is C or S
  MOD_RES (13), (14), (15), (16), (17): Xaa is A or G
  MOD_RES (18), (19), (20), (21): Xaa is A or G or is absent
KXSKVIMRYKKLXXXXXXXXXFYLISIANLDQSVXXP

SEQ ID NO: 5587 - protein, 37 aa, Artificial Sequence
  GFR-binding peptide
  MOD_RES (33), (34): Xaa is C or S
EAVSMGEQYNKLTPVGMDDLYLVSIASLKTPVXXAKG

SEQ ID NO: 5588 - protein, 33 aa, Artificial Sequence
  GFR-binding peptide
  MOD_RES (12), (13), (14), (15), (16): Xaa is A or G
  MOD_RES (17), (18), (19), (20): Xaa is A or G or is absent
AKVVMNQYNKLXXXXXXXXXLYLVSIASLKTPA

SEQ ID NO: 5589 - protein, 37 aa, Artificial Sequence
  GFR-binding peptide
  MOD_RES (1), (3), (36), (37): Xaa is C or S
  MOD_RES (14), (15), (16), (17), (18): Xaa is A or G
  MOD_RES (19), (20), (21), (22): Xaa is A or G or is absent
XKXSKVIMRYKKLXXXXXXXXXFYLISIANLDQSVXX

SEQ ID NO: 5590 - protein, 33 aa, Artificial Sequence
  GFR-binding peptide
  MOD_RES (1), (33): Xaa is C or S
XGEVVMEYHYKLVVKDYEDKYLMSIPSLETPVX

SEQ ID NO: 5591 - protein, 41 aa, Artificial Sequence
  GFR-binding peptide
  MOD_RES (1), (3), (36), (37): Xaa is C or S
  MOD_RES (14), (15), (16), (17), (18): Xaa is A or G
  MOD_RES (19), (20), (21), (22): Xaa is A or G or is absent
XKXSKVIMYHYKLXXXXXXXXXKYLISIPSLDQSVXXPSAS

SEQ ID NO: 5592 - protein, 36 aa, Artificial Sequence
  GFR-binding peptide
  MOD_RES (1), (3), (36): Xaa is C or S
  MOD_RES (14), (15), (16), (17), (18): Xaa is A or G
  MOD_RES (19), (20), (21), (22): Xaa is A or G or is absent
XKXSRVIMRHKRLXXXXXXXXXYYLISTASLAQPVX

SEQ ID NO: 5593 - protein, 39 aa, Artificial Sequence
  GFR-binding peptide
  MOD_RES (1), (3), (37), (38): Xaa is C or S
  MOD_RES (15), (16), (17), (18), (19): Xaa is A or G
  MOD_RES (20), (21), (22), (23): Xaa is A or G or is absent
XGXARVVMNRYKKLXXXXXXXXXFYLVSIANLQTPAXXP

SEQ ID NO: 5594 - protein, 45 aa, Artificial Sequence
  GFR-binding peptide
  MOD_RES (2), (4), (41): Xaa is C or S
  MOD_RES (17), (18), (19), (20), (21): Xaa is A or G
  MOD_RES (22), (23), (24), (25): Xaa is A or G or is absent
EXKXALHDELTRHKRLXXXXXXXXXYYLVSTASLQVQTPRXQVNR

SEQ ID NO: 5595 - protein, 34 aa, Artificial Sequence
  GFR-binding peptide
  MOD_RES (1), (33), (34): Xaa is C or S
XGEVVMEQYNKLVVKDYEDLYLMSIASLETPVXX

SEQ ID NO: 5596 - protein, 37 aa, Artificial Sequence
  GFR-binding peptide
  MOD_RES (1), (34), (35): Xaa is C or S
  MOD_RES (12), (13), (14), (15), (16): Xaa is A or G
  MOD_RES (17), (18), (19), (20): Xaa is A or G or is absent
XSKVVMRYKKLXXXXXXXXXFYLISIANLDQPVXXPS

SEQ ID NO: 5597 - protein, 41 aa, Artificial Sequence
  GFR-binding peptide
  MOD_RES (1), (3), (38), (39): Xaa is C or S
  MOD_RES (16), (17), (18), (19), (20): Xaa is A or G
  MOD_RES (21), (22), (23), (24): Xaa is A or G or is absent
XGXEAVSMGERYKKLXXXXXXXXXFYLVSIANLKTPVXXAK

SEQ ID NO: 5598 - protein, 40 aa, Artificial Sequence
  GFR-binding peptide
  MOD_RES (2), (4), (36), (37): Xaa is C or S
HXGXARVVMNRHKRLIVNSSDDYYLVSTASLQTPAXXPKP

SEQ ID NO: 5599 - protein, 33 aa, Artificial Sequence
  GFR-binding peptide
  MOD_RES (33), (33): Xaa is C or S
  MOD_RES (11), (12), (13), (14), (15): Xaa is A or G
  MOD_RES (16), (17), (18), (19): Xaa is A or G or is absent
SKVVMYHYKLXXXXXXXXXKYLISIPSLDQPVX

SEQ ID NO: 5600 - protein, 39 aa, Artificial Sequence
  GFR-binding peptide
  MOD_RES (2), (4), (36), (37): Xaa is C or S
HXGXARVVMNYHYKLIVNSSDDKYLVSIPSLQTPAXXPK

SEQ ID NO: 5601 - protein, 34 aa, Artificial Sequence
  GFR-binding peptide
  MOD_RES (1), (33), (34): Xaa is C or S
XARVVMNRHKRLIVNSSDDYYLVSTASLQTPAXX

SEQ ID NO: 5602 - protein, 43 aa, Artificial Sequence
  GFR-binding peptide
  MOD_RES (1), (3), (37), (38): Xaa is C or S
  MOD_RES (15), (16), (17), (18), (19): Xaa is A or G
  MOD_RES (20), (21), (22), (23): Xaa is A or G or is absent
XGXSRVVMNYHYKLXXXXXXXXXKYLVSIPSLKTPAXXPKPVY

SEQ ID NO: 5603 - protein, 38 aa, Artificial Sequence
  GFR-binding peptide
  MOD_RES (2), (2): Xaa is C or S
KXALHDELTYHYKLFIPKKRVIEKYLVSIPSLQVQTPR

SEQ ID NO: 5604 - protein, 39 aa, Artificial Sequence
  GFR-binding peptide
  MOD_RES (33), (34): Xaa is C or S
  MOD_RES (11), (12), (13), (14), (15): Xaa is A or G
  MOD_RES (16), (17), (18), (19): Xaa is A or G or is absent
SKVIMQYNKLXXXXXXXXXLYLISIASLDQSVXXPSASA

SEQ ID NO: 5605 - protein, 36 aa, Artificial Sequence
  GFR-binding peptide
  MOD_RES (1), (3), (36): Xaa is C or S
  MOD_RES (14), (15), (16), (17), (18): Xaa is A or G
  MOD_RES (19), (20), (21), (22): Xaa is A or G or is absent
XKXSRVIMRYKKLXXXXXXXXXFYLISIANLAQPVX

SEQ ID NO: 5606 - protein, 36 aa, Artificial Sequence
  GFR-binding peptide
  MOD_RES (34), (35): Xaa is C or S
  MOD_RES (12), (13), (14), (15), (16): Xaa is A or G
  MOD_RES (17), (18), (19), (20): Xaa is A or G or is absent
SRVVMNRYKKLXXXXXXXXXFYLVSIANLKTPAXXP

SEQ ID NO: 5607 - protein, 38 aa, Artificial Sequence
  GFR-binding peptide
  MOD_RES (2), (33), (34): Xaa is C or S
KXSKVIMRYKKLIKPTKGIFYLISIANLDQSVXXPSAS

SEQ ID NO: 5608 - protein, 37 aa, Artificial Sequence
  GFR-binding peptide
  MOD_RES (2), (4): Xaa is C or S
  MOD_RES (16), (17), (18), (19), (20): Xaa is A or G
  MOD_RES (21), (22), (23), (24): Xaa is A or G or is absent
HXGXAKVVMNRHKRLXXXXXXXXXYYLVSTASLKTPA

SEQ ID NO: 5609 - protein, 36 aa, Artificial Sequence
  GFR-binding peptide
  MOD_RES (2), (4), (36): Xaa is C or S
RXGXGEVVMERYKKLVVKDYEDFYLMSIANLETPVX

SEQ ID NO: 5610 - protein, 37 aa, Artificial Sequence
  GFR-binding peptide
  MOD_RES (2), (33), (34): Xaa is C or S
KXSRVIMRYKKLVKPKRGVFYLISIANLAQPVXXPAA

SEQ ID NO: 5611 - protein, 36 aa, Artificial Sequence
  GFR-binding peptide
  MOD_RES (31), (31): Xaa is C or S
RVVMNRHKRLIVNSSDDYYLVSTASLKTPAXTPKTV

SEQ ID NO: 5612 - protein, 41 aa, Artificial Sequence
  GFR-binding peptide
  MOD_RES (1), (35), (36): Xaa is C or S
  MOD_RES (13), (14), (15), (16), (17): Xaa is A or G
  MOD_RES (18), (19), (20), (21): Xaa is A or G or is absent
XGEVVMDYHYKLXXXXXXXXXKYLMSIPSLETPVXXAKPIK

SEQ ID NO: 5613 - protein, 34 aa, Artificial Sequence
  GFR-binding peptide
  MOD_RES (31), (32): Xaa is C or S
SRVIMRYKKLVKPKRGVFYLISIANLAQPVXXPA

SEQ ID NO: 5614 - protein, 37 aa, Artificial Sequence
  GFR-binding peptide
  MOD_RES (31), (32): Xaa is C or S
RVVMNRYKKLIVNSSDDFYLVSIANLQTPAXXPKPVT

SEQ ID NO: 5615 - protein, 34 aa, Artificial Sequence
  GFR-binding peptide
  MOD_RES (1), (1): Xaa is C or S
  MOD_RES (13), (14), (15), (16), (17): Xaa is A or G
  MOD_RES (18), (19), (20), (21): Xaa is A or G or is absent
XARVVMNQYNKLXXXXXXXXXLYLVSIASLQTPA

SEQ ID NO: 5616 - protein, 41 aa, Artificial Sequence
  GFR-binding peptide
  MOD_RES (1), (35), (36): Xaa is C or S
  MOD_RES (13), (14), (15), (16), (17): Xaa is A or G
  MOD_RES (18), (19), (20), (21): Xaa is A or G or is absent
XAKVVMNQYNKLXXXXXXXXXLYLVSIASLKTPAXXAKPVA

SEQ ID NO: 5617 - protein, 40 aa, Artificial Sequence
  GFR-binding peptide
  MOD_RES (2), (4), (36), (37): Xaa is C or S
HXGXARVVMNQYNKLIVNSSDDLYLVSIASLQTPAXXPKP

SEQ ID NO: 5618 - protein, 37 aa, Artificial Sequence
  GFR-binding peptide
  MOD_RES (33), (34): Xaa is C or S
  MOD_RES (11), (12), (13), (14), (15): Xaa is A or G
  MOD_RES (16), (17), (18), (19): Xaa is A or G or is absent
SKVIMRYKKLXXXXXXXXXFYLISIANLDQSVXXPSA

SEQ ID NO: 5619 - protein, 32 aa, Artificial Sequence
  GFR-binding peptide
  MOD_RES (1), (32): Xaa is C or S
XSKVVMRHKRLVKPTRGVYYLISTASLDQPVX

SEQ ID NO: 5620 - protein, 42 aa, Artificial Sequence
  GFR-binding peptide
  MOD_RES (1), (3), (40): Xaa is C or S
  MOD_RES (16), (17), (18), (19), (20): Xaa is A or G
  MOD_RES (21), (22), (23), (24): Xaa is A or G or is absent
XKXALHDELTRHKRLXXXXXXXXXYYLVSTASLQVQTPRXQV

SEQ ID NO: 5621 - protein, 41 aa, Artificial Sequence
  GFR-binding peptide
  MOD_RES (2), (35), (36): Xaa is C or S
  MOD_RES (13), (14), (15), (16), (17): Xaa is A or G
  MOD_RES (18), (19), (20), (21): Xaa is A or G or is absent
KXSKVIMYHYKLXXXXXXXXXKYLISIPSLDQSVXXPSASA

SEQ ID NO: 5622 - protein, 41 aa, Artificial Sequence
  GFR-binding peptide
  MOD_RES (1), (3), (36), (37): Xaa is C or S
  MOD_RES (14), (15), (16), (17), (18): Xaa is A or G
  MOD_RES (19), (20), (21), (22): Xaa is A or G or is absent
XKXSRVIMYHYKLXXXXXXXXXKYLISIPSLAQPVXXPAAS

SEQ ID NO: 5623 - protein, 39 aa, Artificial Sequence
  GFR-binding peptide
  MOD_RES (2), (39): Xaa is C or S
  MOD_RES (15), (16), (17), (18), (19): Xaa is A or G
  MOD_RES (20), (21), (22), (23): Xaa is A or G or is absent
KXALHDELTYHYKLXXXXXXXXXKYLVSIPSLQVQTPRX

SEQ ID NO: 5624 - protein, 40 aa, Artificial Sequence
  GFR-binding peptide
  MOD_RES (1), (3), (37), (38): Xaa is C or S
  MOD_RES (15), (16), (17), (18), (19): Xaa is A or G
  MOD_RES (20), (21), (22), (23): Xaa is A or G or is absent
XGXGEVVMDRHKRLXXXXXXXXXYYLMSTASLETPVXXAK

SEQ ID NO: 5625 - protein, 38 aa, Artificial Sequence
  GFR-binding peptide
  MOD_RES (2), (36), (37): Xaa is C or S
  MOD_RES (14), (15), (16), (17), (18): Xaa is A or G
  MOD_RES (19), (20), (21), (22): Xaa is A or G or is absent
GXARVVMNRHKRLXXXXXXXXXYYLVSTASLQTPAXXP

SEQ ID NO: 5626 - protein, 36 aa, Artificial Sequence
  GFR-binding peptide
  MOD_RES (34), (35): Xaa is C or S
  MOD_RES (12), (13), (14), (15), (16): Xaa is A or G
  MOD_RES (17), (18), (19), (20): Xaa is A or G or is absent
ARVVMNQYNKLXXXXXXXXXLYLVSIASLQTPAXXP

SEQ ID NO: 5627 - protein, 40 aa, Artificial Sequence
  GFR-binding peptide
  MOD_RES (2), (4), (38), (39): Xaa is C or S
  MOD_RES (16), (17), (18), (19), (20): Xaa is A or G
  MOD_RES (21), (22), (23), (24): Xaa is A or G or is absent
HXGXARVVMNYHYKLXXXXXXXXXKYLVSIPSLQTPAXXP

SEQ ID NO: 5628 - protein, 31 aa, Artificial Sequence
  GFR-binding peptide
  MOD_RES (1), (1): Xaa is C or S
XSKVVMRHKRLVKPTRGVYYLISTASLDQPV

SEQ ID NO: 5629 - protein, 41 aa, Artificial Sequence
  GFR-binding peptide
  MOD_RES (2), (4), (35), (36): Xaa is C or S
SXKXSKVIMRYKKLIKPTKGIFYLISIANLDQSVXXPSASA

SEQ ID NO: 5630 - protein, 35 aa, Artificial Sequence
  GFR-binding peptide
  MOD_RES (33), (34): Xaa is C or S
  MOD_RES (11), (12), (13), (14), (15): Xaa is A or G
  MOD_RES (16), (17), (18), (19): Xaa is A or G or is absent
RVVMNYHYKLXXXXXXXXXKYLVSIPSLKTPAXXP

SEQ ID NO: 5631 - protein, 35 aa, Artificial Sequence
  GFR-binding peptide
  MOD_RES (1), (1): Xaa is C or S
  MOD_RES (14), (15), (16), (17), (18): Xaa is A or G
  MOD_RES (19), (20), (21), (22): Xaa is A or G or is absent
XALHDELTYHYKLXXXXXXXXXKYLVSIPSLQVQT

SEQ ID NO: 5632 - protein, 39 aa, Artificial Sequence
  GFR-binding peptide
  MOD_RES (2), (4), (35), (36): Xaa is C or S
SXKXSRVIMRYKKLVKPKRGVFYLISIANLAQPVXXPAA

SEQ ID NO: 5633 - protein, 37 aa, Artificial Sequence
  GFR-binding peptide
  MOD_RES (2), (36), (37): Xaa is C or S
  MOD_RES (14), (15), (16), (17), (18): Xaa is A or G
  MOD_RES (19), (20), (21), (22): Xaa is A or G or is absent
GXSRVVMNRYKKLXXXXXXXXXFYLVSIANLKTPAXX

SEQ ID NO: 5634 - protein, 42 aa, Artificial Sequence
  GFR-binding peptide
  MOD_RES (2), (36), (37): Xaa is C or S
  MOD_RES (14), (15), (16), (17), (18): Xaa is A or G
  MOD_RES (19), (20), (21), (22): Xaa is A or G or is absent
GXSRVVMNRYKKLXXXXXXXXXFYLVSIANLKTPAXXPKPVY

SEQ ID NO: 5635 - protein, 36 aa, Artificial Sequence
  GFR-binding peptide
  MOD_RES (1), (3), (35), (36): Xaa is C or S
XGXAKVVMNQYNKLIVNNSSDLYLVSIASLKTPAXX

SEQ ID NO: 5636 - protein, 34 aa, Artificial Sequence
  GFR-binding peptide
  MOD_RES (1), (1): Xaa is C or S
  MOD_RES (13), (14), (15), (16), (17): Xaa is A or G
  MOD_RES (18), (19), (20), (21): Xaa is A or G or is absent
XAKVVMNYHYKLXXXXXXXXXKYLVSIPSLKTPA

SEQ ID NO: 5637 - protein, 33 aa, Artificial Sequence
  GFR-binding peptide
  MOD_RES (2), (2): Xaa is C or S
GXARVVMNQYNKLIVNSSDDLYLVSIASLQTPA

SEQ ID NO: 5638 - protein, 37 aa, Artificial Sequence
  GFR-binding peptide
  MOD_RES (33), (34): Xaa is C or S
  MOD_RES (11), (12), (13), (14), (15): Xaa is A or G
  MOD_RES (16), (17), (18), (19): Xaa is A or G or is absent
EVVMERYKKLXXXXXXXXXFYLMSIANLETPVXXAKP

SEQ ID NO: 5639 - protein, 40 aa, Artificial Sequence
  GFR-binding peptide
  MOD_RES (1), (36), (37): Xaa is C or S
  MOD_RES (14), (15), (16), (17), (18): Xaa is A or G
  MOD_RES (19), (20), (21), (22): Xaa is A or G or is absent
XEAVSMGEQYNKLXXXXXXXXXLYLVSIASLKTPVXXAKG

SEQ ID NO: 5640 - protein, 40 aa, Artificial Sequence
  GFR-binding peptide
  MOD_RES (1), (3), (35), (36): Xaa is C or S
XGXGEVVMDRYKKLVVKENEDFYLMSIANLETPVXXAKPI

SEQ ID NO: 5641 - protein, 39 aa, Artificial Sequence
  GFR-binding peptide
  MOD_RES (1), (34), (35): Xaa is C or S
XEAVSMGERHKRLTPVGMDDYYLVSTASLKTPVXXAKGV

SEQ ID NO: 5642 - protein, 34 aa, Artificial Sequence
  GFR-binding peptide
  MOD_RES (31), (32): Xaa is C or S
EVVMDYHYKLVVKENEDKYLMSIPSLETPVXXAK

SEQ ID NO: 5643 - protein, 39 aa, Artificial Sequence
  GFR-binding peptide
  MOD_RES (2), (34), (35): Xaa is C or S
GXGEVVMERHKRLVVKDYEDYYLMSTASLETPVXXAKPI

SEQ ID NO: 5644 - protein, 42 aa, Artificial Sequence
  GFR-binding peptide
  MOD_RES (2), (4), (38), (39): Xaa is C or S
  MOD_RES (16), (17), (18), (19), (20): Xaa is A or G
  MOD_RES (21), (22), (23), (24): Xaa is A or G or is absent
RXGXGEVVMEQYNKLXXXXXXXXXLYLMSIASLETPVXXAKP

SEQ ID NO: 5645 - protein, 39 aa, Artificial Sequence
  GFR-binding peptide
  MOD_RES (33), (34): Xaa is C or S
  MOD_RES (11), (12), (13), (14), (15): Xaa is A or G
  MOD_RES (16), (17), (18), (19): Xaa is A or G or is absent
SKVVMRYKKLXXXXXXXXXFYLISIANLDQPVXXPSASA

SEQ ID NO: 5646 - protein, 34 aa, Artificial Sequence
  GFR-binding peptide
  MOD_RES (33), (34): Xaa is C or S
  MOD_RES (11), (12), (13), (14), (15): Xaa is A or G
  MOD_RES (16), (17), (18), (19): Xaa is A or G or is absent
SKVIMYHYKLXXXXXXXXXKYLISIPSLDQSVXX

SEQ ID NO: 5647 - protein, 44 aa, Artificial Sequence
  GFR-binding peptide
  MOD_RES (2), (4), (38), (39): Xaa is C or S
  MOD_RES (16), (17), (18), (19), (20): Xaa is A or G
  MOD_RES (21), (22), (23), (24): Xaa is A or G or is absent
HXGXSRVVMNRYKKLXXXXXXXXXFYLVSIANLKTPAXXPKPVY

SEQ ID NO: 5648 - protein, 39 aa, Artificial Sequence
  GFR-binding peptide
  MOD_RES (36), (36): Xaa is C or S
  MOD_RES (12), (13), (14), (15), (16): Xaa is A or G
  MOD_RES (17), (18), (19), (20): Xaa is A or G or is absent
LHDELTRYKKLXXXXXXXXXFYLVSIANLQVQTPRXQVN

SEQ ID NO: 5649 - protein, 36 aa, Artificial Sequence
  GFR-binding peptide
  MOD_RES (2), (2): Xaa is C or S
  MOD_RES (15), (16), (17), (18), (19): Xaa is A or G
  MOD_RES (20), (21), (22), (23): Xaa is A or G or is absent
GXEAVSMGEQYNKLXXXXXXXXXLYLVSIASLKTPV

SEQ ID NO: 5650 - protein, 38 aa, Artificial Sequence
  GFR-binding peptide
  MOD_RES (2), (4): Xaa is C or S
  MOD_RES (17), (18), (19), (20), (21): Xaa is A or G
  MOD_RES (22), (23), (24), (25): Xaa is A or G or is absent
EXKXALHDELTQYNKLXXXXXXXXXLYLVSIASLQVQT

SEQ ID NO: 5651 - protein, 39 aa, Artificial Sequence
  GFR-binding peptide
  MOD_RES (1), (3), (38), (39): Xaa is C or S
  MOD_RES (16), (17), (18), (19), (20): Xaa is A or G
  MOD_RES (21), (22), (23), (24): Xaa is A or G or is absent
XGXEAVSMGERYKKLXXXXXXXXXFYLVSIANLKTPVXX

SEQ ID NO: 5652 - protein, 41 aa, Artificial Sequence
  GFR-binding peptide
  MOD_RES (1), (3), (37), (38): Xaa is C or S
  MOD_RES (15), (16), (17), (18), (19): Xaa is A or G
  MOD_RES (20), (21), (22), (23): Xaa is A or G or is absent
XGXSRVVMNRYKKLXXXXXXXXXFYLVSIANLKTPAXXPKP

SEQ ID NO: 5653 - protein, 36 aa, Artificial Sequence
  GFR-binding peptide
  MOD_RES (31), (32): Xaa is C or S
EVVMEYHYKLVVKDYEDKYLMSIPSLETPVXXAKPI

SEQ ID NO: 5654 - protein, 39 aa, Artificial Sequence
  GFR-binding peptide
  MOD_RES (2), (37), (38): Xaa is C or S
  MOD_RES (15), (16), (17), (18), (19): Xaa is A or G
  MOD_RES (20), (21), (22), (23): Xaa is A or G or is absent
GXEAVSMGERHKRLXXXXXXXXXYYLVSTASLKTPVXXA

SEQ ID NO: 5655 - protein, 42 aa, Artificial Sequence
  GFR-binding peptide
  MOD_RES (1), (3), (36), (37): Xaa is C or S
  MOD_RES (14), (15), (16), (17), (18): Xaa is A or G
  MOD_RES (19), (20), (21), (22): Xaa is A or G or is absent
XKXSKVVMRYKKLXXXXXXXXXFYLISIANLDQPVXXPSASA

SEQ ID NO: 5656 - protein, 43 aa, Artificial Sequence
  GFR-binding peptide
  MOD_RES (2), (4), (37), (38): Xaa is C or S
  MOD_RES (15), (16), (17), (18), (19): Xaa is A or G
  MOD_RES (20), (21), (22), (23): Xaa is A or G or is absent
SXKXSKVVMRYKKLXXXXXXXXXFYLISIANLDQPVXXPSASA

SEQ ID NO: 5657 - protein, 33 aa, Artificial Sequence
  GFR-binding peptide
  MOD_RES (1), (3): Xaa is C or S
XKXSKVVMRYKKLVKPTRGVFYLISIANLDQPV

SEQ ID NO: 5658 - protein, 40 aa, Artificial Sequence
  GFR-binding peptide
  MOD_RES (1), (35): Xaa is C or S
  MOD_RES (13), (14), (15), (16), (17): Xaa is A or G
  MOD_RES (18), (19), (20), (21): Xaa is A or G or is absent
XSRVVMNQYNKLXXXXXXXXXLYLVSIASLKTPAXTPKTV

SEQ ID NO: 5659 - protein, 40 aa, Artificial Sequence
  GFR-binding peptide
  MOD_RES (2), (4), (36), (37): Xaa is C or S
RXGXGEVVMEQYNKLVVKDYEDLYLMSIASLETPVXXAKP

SEQ ID NO: 5660 - protein, 41 aa, Artificial Sequence
  GFR-binding peptide
  MOD_RES (2), (4), (36), (37): Xaa is C or S
HXGXARVVMNYHYKLIVNSSDDKYLVSIPSLQTPAXXPKPV

SEQ ID NO: 5661 - protein, 35 aa, Artificial Sequence
  GFR-binding peptide
  MOD_RES (2), (2): Xaa is C or S
  MOD_RES (14), (15), (16), (17), (18): Xaa is A or G
  MOD_RES (19), (20), (21), (22): Xaa is A or G or is absent
GXGEVVMDRHKRLXXXXXXXXXYYLMSTASLETPV

SEQ ID NO: 5662 - protein, 39 aa, Artificial Sequence
  GFR-binding peptide
  MOD_RES (1), (36), (37): Xaa is C or S
  MOD_RES (14), (15), (16), (17), (18): Xaa is A or G
  MOD_RES (19), (20), (21), (22): Xaa is A or G or is absent
XEAVSMGERHKRLXXXXXXXXXYYLVSTASLKTPVXXAK

SEQ ID NO: 5663 - protein, 39 aa, Artificial Sequence
  GFR-binding peptide
  MOD_RES (1), (3), (35): Xaa is C or S
XGXSRVVMNQYNKLIVNSSDDLYLVSIASLKTPAXTPKT

SEQ ID NO: 5664 - protein, 41 aa, Artificial Sequence
  GFR-binding peptide
  MOD_RES (2), (4), (38), (39): Xaa is C or S
  MOD_RES (16), (17), (18), (19), (20): Xaa is A or G
  MOD_RES (21), (22), (23), (24): Xaa is A or G or is absent
RXGXGEVVMDYHYKLXXXXXXXXXKYLMSIPSLETPVXXAK

SEQ ID NO: 5665 - protein, 35 aa, Artificial Sequence
  GFR-binding peptide
  MOD_RES (1), (35): Xaa is C or S
  MOD_RES (13), (14), (15), (16), (17): Xaa is A or G
  MOD_RES (18), (19), (20), (21): Xaa is A or G or is absent
XAKVVMNYHYKLXXXXXXXXXKYLVSIPSLKTPAX

SEQ ID NO: 5666 - protein, 38 aa, Artificial Sequence
  GFR-binding peptide
  MOD_RES (1), (3), (37): Xaa is C or S
  MOD_RES (15), (16), (17), (18), (19): Xaa is A or G
  MOD_RES (20), (21), (22), (23): Xaa is A or G or is absent
XGXSRVVMNRYKKLXXXXXXXXXFYLVSIANLKTPAXT

SEQ ID NO: 5667 - protein, 33 aa, Artificial Sequence
  GFR-binding peptide
  MOD_RES (2), (2): Xaa is C or S
GXSRVVMNQYNKLIVNSSDDLYLVSIASLKTPA

SEQ ID NO: 5668 - protein, 39 aa, Artificial Sequence
  GFR-binding peptide
  MOD_RES (2), (4), (37), (38): Xaa is C or S
  MOD_RES (15), (16), (17), (18), (19): Xaa is A or G
  MOD_RES (20), (21), (22), (23): Xaa is A or G or is absent
SXKXSRVIMYHYKLXXXXXXXXXKYLISIPSLAQPVXXP

SEQ ID NO: 5669 - protein, 36 aa, Artificial Sequence
  GFR-binding peptide
  MOD_RES (1), (3), (35), (36): Xaa is C or S
XGXARVVMNRHKRLIVNSSDDYYLVSTASLQTPAXX

SEQ ID NO: 5670 - protein, 36 aa, Artificial Sequence
  GFR-binding peptide
  MOD_RES (33), (34): Xaa is C or S
  MOD_RES (11), (12), (13), (14), (15): Xaa is A or G
  MOD_RES (16), (17), (18), (19): Xaa is A or G or is absent
SKVVMRYKKLXXXXXXXXXFYLISIANLDQPVXXPS

SEQ ID NO: 5671 - protein, 37 aa, Artificial Sequence
  GFR-binding peptide
  MOD_RES (1), (34), (35): Xaa is C or S
  MOD_RES (12), (13), (14), (15), (16): Xaa is A or G
  MOD_RES (17), (18), (19), (20): Xaa is A or G or is absent
XSKVIMRYKKLXXXXXXXXXFYLISIANLDQSVXXPS

SEQ ID NO: 5672 - protein, 31 aa, Artificial Sequence
  GFR-binding peptide
  MOD_RES (31), (31): Xaa is C or S
RVVMNRYKKLIVNSSDDFYLVSIANLKTPAX

SEQ ID NO: 5673 - protein, 38 aa, Artificial Sequence
  GFR-binding peptide
  MOD_RES (1), (33), (34): Xaa is C or S
XGEVVMDRHKRLVVKENEDYYLMSTASLETPVXXAKPI

SEQ ID NO: 5674 - protein, 40 aa, Artificial Sequence
  GFR-binding peptide
  MOD_RES (37), (37): Xaa is C or S
ALHDELTYHYKLFIPKKRVIEKYLVSIPSLQVQTPRXQVN

SEQ ID NO: 5675 - protein, 37 aa, Artificial Sequence
  GFR-binding peptide
  MOD_RES (1), (3), (35): Xaa is C or S
XGXSRVVMNRHKRLIVNSSDDYYLVSTASLKTPAXTP

SEQ ID NO: 5676 - protein, 42 aa, Artificial Sequence
  GFR-binding peptide
  MOD_RES (1), (3), (37): Xaa is C or S
  MOD_RES (15), (16), (17), (18), (19): Xaa is A or G
  MOD_RES (20), (21), (22), (23): Xaa is A or G or is absent
XGXSRVVMNRHKRLXXXXXXXXXYYLVSTASLKTPAXTPKTV

SEQ ID NO: 5677 - protein, 33 aa, Artificial Sequence
  GFR-binding peptide
  MOD_RES (2), (33): Xaa is C or S
KXSKVIMQYNKLIKPTKGILYLISIASLDQSVX

SEQ ID NO: 5678 - protein, 40 aa, Artificial Sequence
  GFR-binding peptide
  MOD_RES (1), (35), (36): Xaa is C or S
  MOD_RES (13), (14), (15), (16), (17): Xaa is A or G
  MOD_RES (18), (19), (20), (21): Xaa is A or G or is absent
XARVVMNQYNKLXXXXXXXXXLYLVSIASLQTPAXXPKPV

SEQ ID NO: 5679 - protein, 35 aa, Artificial Sequence
  GFR-binding peptide
  MOD_RES (1), (3), (35): Xaa is C or S
XGXGEVVMERYKKLVVKDYEDFYLMSIANLETPVX

SEQ ID NO: 5680 - protein, 39 aa, Artificial Sequence
  GFR-binding peptide
  MOD_RES (34), (35): Xaa is C or S
  MOD_RES (12), (13), (14), (15), (16): Xaa is A or G
  MOD_RES (17), (18), (19), (20): Xaa is A or G or is absent
AKVVMNRYKKLXXXXXXXXXFYLVSIANLKTPAXXAKPV

SEQ ID NO: 5681 - protein, 40 aa, Artificial Sequence
  GFR-binding peptide
  MOD_RES (2), (36), (37): Xaa is C or S
  MOD_RES (14), (15), (16), (17), (18): Xaa is A or G
  MOD_RES (19), (20), (21), (22): Xaa is A or G or is absent
GXSRVVMNYHYKLXXXXXXXXXKYLVSIPSLKTPAXXPKP

SEQ ID NO: 5682 - protein, 37 aa, Artificial Sequence
  GFR-binding peptide
  MOD_RES (1), (3), (36), (37): Xaa is C or S
  MOD_RES (14), (15), (16), (17), (18): Xaa is A or G
  MOD_RES (19), (20), (21), (22): Xaa is A or G or is absent
XKXSRVIMRYKKLXXXXXXXXXFYLISIANLAQPVXX

SEQ ID NO: 5683 - protein, 37 aa, Artificial Sequence
  GFR-binding peptide
  MOD_RES (2), (34), (35): Xaa is C or S
GXGEVVMDRYKKLVVKENEDFYLMSIANLETPVXXAK

SEQ ID NO: 5684 - protein, 37 aa, Artificial Sequence
  GFR-binding peptide
  MOD_RES (1), (35), (36): Xaa is C or S
  MOD_RES (13), (14), (15), (16), (17): Xaa is A or G
  MOD_RES (18), (19), (20), (21): Xaa is A or G or is absent
XSRVVMNRHKRLXXXXXXXXXYYLVSTASLKTPAXXP

SEQ ID NO: 5685 - protein, 36 aa, Artificial Sequence
  GFR-binding peptide
  MOD_RES (1), (3): Xaa is C or S
  MOD_RES (15), (16), (17), (18), (19): Xaa is A or G
  MOD_RES (20), (21), (22), (23): Xaa is A or G or is absent
XGXARVVMNRYKKLXXXXXXXXXFYLVSIANLQTPA

SEQ ID NO: 5686 - protein, 31 aa, Artificial Sequence
  GFR-binding peptide
AKVVMNRHKRLIVNNSSDYYLVSTASLKTPA

SEQ ID NO: 5687 - protein, 33 aa, Artificial Sequence
  GFR-binding peptide
  MOD_RES (12), (13), (14), (15), (16): Xaa is A or G
  MOD_RES (17), (18), (19), (20): Xaa is A or G or is absent
SRVVMNQYNKLXXXXXXXXXLYLVSIASLKTPA

SEQ ID NO: 5688 - protein, 35 aa, Artificial Sequence
  GFR-binding peptide
  MOD_RES (1), (32), (33): Xaa is C or S
XSRVIMRYKKLVKPKRGVFYLISIANLAQPVXXPA

SEQ ID NO: 5689 - protein, 43 aa, Artificial Sequence
  GFR-binding peptide
  MOD_RES (2), (4), (39), (40): Xaa is C or S
  MOD_RES (17), (18), (19), (20), (21): Xaa is A or G
  MOD_RES (22), (23), (24), (25): Xaa is A or G or is absent
RXGXEAVSMGERHKRLXXXXXXXXXYYLVSTASLKTPVXXAKG

SEQ ID NO: 5690 - protein, 43 aa, Artificial Sequence
  GFR-binding peptide
  MOD_RES (1), (3), (37), (38): Xaa is C or S
  MOD_RES (15), (16), (17), (18), (19): Xaa is A or G
  MOD_RES (20), (21), (22), (23): Xaa is A or G or is absent
XGXSRVVMNQYNKLXXXXXXXXXLYLVSIASLKTPAXXPKPVY

SEQ ID NO: 5691 - protein, 35 aa, Artificial Sequence
  GFR-binding peptide
  MOD_RES (2), (33), (34): Xaa is C or S
KXSKVVMRYKKLVKPTRGVFYLISIANLDQPVXXP

SEQ ID NO: 5692 - protein, 36 aa, Artificial Sequence
  GFR-binding peptide
  MOD_RES (1), (33), (34): Xaa is C or S
XAKVVMNQYNKLIVNNSSDLYLVSIASLKTPAXXAK

SEQ ID NO: 5693 - protein, 36 aa, Artificial Sequence
  GFR-binding peptide
  MOD_RES (34), (35): Xaa is C or S
  MOD_RES (12), (13), (14), (15), (16): Xaa is A or G
  MOD_RES (17), (18), (19), (20): Xaa is A or G or is absent
GEVVMEQYNKLXXXXXXXXXLYLMSIASLETPVXXA

SEQ ID NO: 5694 - protein, 35 aa, Artificial Sequence
  GFR-binding peptide
  MOD_RES (31), (32): Xaa is C or S
KVVMNRHKRLIVNNSSDYYLVSTASLKTPAXXAKP

SEQ ID NO: 5695 - protein, 33 aa, Artificial Sequence
  GFR-binding peptide
  MOD_RES (12), (13), (14), (15), (16): Xaa is A or G
  MOD_RES (17), (18), (19), (20): Xaa is A or G or is absent
LHDELTRYKKLXXXXXXXXXFYLVSIANLQVQT

SEQ ID NO: 5696 - protein, 30 aa, Artificial Sequence
  GFR-binding peptide
EVVMDQYNKLVVKENEDLYLMSIASLETPV

SEQ ID NO: 5697 - protein, 34 aa, Artificial Sequence
  GFR-binding peptide
HDELTYHYKLFIPKKRVIEKYLVSIPSLQVQTPR

SEQ ID NO: 5698 - protein, 38 aa, Artificial Sequence
  GFR-binding peptide
  MOD_RES (1), (3), (37), (38): Xaa is C or S
  MOD_RES (15), (16), (17), (18), (19): Xaa is A or G
  MOD_RES (20), (21), (22), (23): Xaa is A or G or is absent
XGXAKVVMNYHYKLXXXXXXXXXKYLVSIPSLKTPAXX

SEQ ID NO: 5699 - protein, 33 aa, Artificial Sequence
  GFR-binding peptide
  MOD_RES (12), (13), (14), (15), (16): Xaa is A or G
  MOD_RES (17), (18), (19), (20): Xaa is A or G or is absent
SRVVMNRYKKLXXXXXXXXXFYLVSIANLKTPA

SEQ ID NO: 5700 - protein, 41 aa, Artificial Sequence
  GFR-binding peptide
  MOD_RES (2), (4), (35), (36): Xaa is C or S
SXKXSKVVMRHKRLVKPTRGVYYLISTASLDQPVXXPSASA

SEQ ID NO: 5701 - protein, 31 aa, Artificial Sequence
  GFR-binding peptide
GEVVMERYKKLVVKDYEDFYLMSIANLETPV

SEQ ID NO: 5702 - protein, 39 aa, Artificial Sequence
  GFR-binding peptide
  MOD_RES (2), (36), (37): Xaa is C or S
  MOD_RES (14), (15), (16), (17), (18): Xaa is A or G
  MOD_RES (19), (20), (21), (22): Xaa is A or G or is absent
GXSRVVMNYHYKLXXXXXXXXXKYLVSIPSLKTPAXXPK

SEQ ID NO: 5703 - protein, 39 aa, Artificial Sequence
  GFR-binding peptide
  MOD_RES (2), (4), (38), (39): Xaa is C or S
  MOD_RES (16), (17), (18), (19), (20): Xaa is A or G
  MOD_RES (21), (22), (23), (24): Xaa is A or G or is absent
HXGXAKVVMNQYNKLXXXXXXXXXLYLVSIASLKTPAXX

SEQ ID NO: 5704 - protein, 34 aa, Artificial Sequence
  GFR-binding peptide
  MOD_RES (12), (13), (14), (15), (16): Xaa is A or G
  MOD_RES (17), (18), (19), (20): Xaa is A or G or is absent
LHDELTQYNKLXXXXXXXXXLYLVSIASLQVQTP

SEQ ID NO: 5705 - protein, 37 aa, Artificial Sequence
  GFR-binding peptide
  MOD_RES (2), (4): Xaa is C or S
  MOD_RES (16), (17), (18), (19), (20): Xaa is A or G
  MOD_RES (21), (22), (23), (24): Xaa is A or G or is absent
HXGXARVVMNQYNKLXXXXXXXXXLYLVSIASLQTPA

SEQ ID NO: 5706 - protein, 41 aa, Artificial Sequence
  GFR-binding peptide
  MOD_RES (2), (4), (37), (38): Xaa is C or S
  MOD_RES (15), (16), (17), (18), (19): Xaa is A or G
  MOD_RES (20), (21), (22), (23): Xaa is A or G or is absent
SXKXSRVIMYHYKLXXXXXXXXXKYLISIPSLAQPVXXPAA

SEQ ID NO: 5707 - protein, 38 aa, Artificial Sequence
  GFR-binding peptide
  MOD_RES (2), (4), (35), (36): Xaa is C or S
SXKXSRVIMYHYKLVKPKRGVKYLISIPSLAQPVXXPA

SEQ ID NO: 5708 - protein, 35 aa, Artificial Sequence
  GFR-binding peptide
  MOD_RES (2), (4): Xaa is C or S
RXGXGEVVMDQYNKLVVKENEDLYLMSIASLETPV

SEQ ID NO: 5709 - protein, 35 aa, Artificial Sequence
  GFR-binding peptide
  MOD_RES (1), (35): Xaa is C or S
  MOD_RES (13), (14), (15), (16), (17): Xaa is A or G
  MOD_RES (18), (19), (20), (21): Xaa is A or G or is absent
XGEVVMEQYNKLXXXXXXXXXLYLMSIASLETPVX

SEQ ID NO: 5710 - protein, 38 aa, Artificial Sequence
  GFR-binding peptide
  MOD_RES (2), (34), (35): Xaa is C or S
GXAKVVMNRHKRLIVNNSSDYYLVSTASLKTPAXXAKP

SEQ ID NO: 5711 - protein, 37 aa, Artificial Sequence
  GFR-binding peptide
  MOD_RES (32), (33): Xaa is C or S
SRVVMNRHKRLIVNSSDDYYLVSTASLKTPAXXPKPV

SEQ ID NO: 5712 - protein, 39 aa, Artificial Sequence
  GFR-binding peptide
  MOD_RES (2), (34), (35): Xaa is C or S
GXGEVVMDRYKKLVVKENEDFYLMSIANLETPVXXAKPI

SEQ ID NO: 5713 - protein, 36 aa, Artificial Sequence
  GFR-binding peptide
  MOD_RES (2), (4): Xaa is C or S
  MOD_RES (15), (16), (17), (18), (19): Xaa is A or G
  MOD_RES (20), (21), (22), (23): Xaa is A or G or is absent
SXKXSRVIMYHYKLXXXXXXXXXKYLISIPSLAQPV

SEQ ID NO: 5714 - protein, 36 aa, Artificial Sequence
  GFR-binding peptide
  MOD_RES (33), (34): Xaa is C or S
  MOD_RES (11), (12), (13), (14), (15): Xaa is A or G
  MOD_RES (16), (17), (18), (19): Xaa is A or G or is absent
RVVMNQYNKLXXXXXXXXXLYLVSIASLKTPAXXPK

SEQ ID NO: 5715 - protein, 37 aa, Artificial Sequence
  GFR-binding peptide
  MOD_RES (1), (33), (34): Xaa is C or S
XSRVVMNYHYKLIVNSSDDKYLVSIPSLKTPAXXPKP

SEQ ID NO: 5716 - protein, 36 aa, Artificial Sequence
  GFR-binding peptide
  MOD_RES (1), (3), (35), (36): Xaa is C or S
XGXGEVVMDYHYKLVVKENEDKYLMSIPSLETPVXX

SEQ ID NO: 5717 - protein, 41 aa, Artificial Sequence
  GFR-binding peptide
  MOD_RES (2), (4), (39), (40): Xaa is C or S
  MOD_RES (17), (18), (19), (20), (21): Xaa is A or G
  MOD_RES (22), (23), (24), (25): Xaa is A or G or is absent
RXGXEAVSMGEYHYKLXXXXXXXXXKYLVSIPSLKTPVXXA

SEQ ID NO: 5718 - protein, 33 aa, Artificial Sequence
  GFR-binding peptide
  MOD_RES (33), (33): Xaa is C or S
EAVSMGERHKRLTPVGMDDYYLVSTASLKTPVX

SEQ ID NO: 5719 - protein, 35 aa, Artificial Sequence
  GFR-binding peptide
  MOD_RES (31), (32): Xaa is C or S
SKVVMRYKKLVKPTRGVFYLISIANLDQPVXXPSA

SEQ ID NO: 5720 - protein, 36 aa, Artificial Sequence
  GFR-binding peptide
  MOD_RES (2), (4), (36): Xaa is C or S
HXGXARVVMNRHKRLIVNSSDDYYLVSTASLQTPAX

SEQ ID NO: 5721 - protein, 38 aa, Artificial Sequence
  GFR-binding peptide
  MOD_RES (1), (35), (36): Xaa is C or S
  MOD_RES (13), (14), (15), (16), (17): Xaa is A or G
  MOD_RES (18), (19), (20), (21): Xaa is A or G or is absent
XGEVVMERYKKLXXXXXXXXXFYLMSIANLETPVXXAK

SEQ ID NO: 5722 - protein, 38 aa, Artificial Sequence
  GFR-binding peptide
  MOD_RES (35), (35): Xaa is C or S
HDELTQYNKLFIPKKRVIELYLVSIASLQVQTPRXQVN

SEQ ID NO: 5723 - protein, 37 aa, Artificial Sequence
  GFR-binding peptide
  MOD_RES (2), (4): Xaa is C or S
  MOD_RES (16), (17), (18), (19), (20): Xaa is A or G
  MOD_RES (21), (22), (23), (24): Xaa is A or G or is absent
RXGXGEVVMERHKRLXXXXXXXXXYYLMSTASLETPV

SEQ ID NO: 5724 - protein, 38 aa, Artificial Sequence
  GFR-binding peptide
  MOD_RES (2), (33), (34): Xaa is C or S
KXSKVIMQYNKLIKPTKGILYLISIASLDQSVXXPSAS

SEQ ID NO: 5725 - protein, 39 aa, Artificial Sequence
  GFR-binding peptide
  MOD_RES (35), (35): Xaa is C or S
  MOD_RES (11), (12), (13), (14), (15): Xaa is A or G
  MOD_RES (16), (17), (18), (19): Xaa is A or G or is absent
HDELTRYKKLXXXXXXXXXFYLVSIANLQVQTPRXQVNR

SEQ ID NO: 5726 - protein, 40 aa, Artificial Sequence
  GFR-binding peptide
  MOD_RES (2), (4), (38), (39): Xaa is C or S
  MOD_RES (16), (17), (18), (19), (20): Xaa is A or G
  MOD_RES (21), (22), (23), (24): Xaa is A or G or is absent
RXGXGEVVMEQYNKLXXXXXXXXXLYLMSIASLETPVXXA

SEQ ID NO: 5727 - protein, 31 aa, Artificial Sequence
  GFR-binding peptide
  MOD_RES (31), (31): Xaa is C or S
EVVMDYHYKLVVKENEDKYLMSIPSLETPVX

SEQ ID NO: 5728 - protein, 35 aa, Artificial Sequence
  GFR-binding peptide
  MOD_RES (34), (35): Xaa is C or S
  MOD_RES (12), (13), (14), (15), (16): Xaa is A or G
  MOD_RES (17), (18), (19), (20): Xaa is A or G or is absent
ARVVMNYHYKLXXXXXXXXXKYLVSIPSLQTPAXX

SEQ ID NO: 5729 - protein, 34 aa, Artificial Sequence
  GFR-binding peptide
  MOD_RES (1), (33), (34): Xaa is C or S
XGEVVMEYHYKLVVKDYEDKYLMSIPSLETPVXX

SEQ ID NO: 5730 - protein, 39 aa, Artificial Sequence
  GFR-binding peptide
  MOD_RES (33), (34): Xaa is C or S
  MOD_RES (11), (12), (13), (14), (15): Xaa is A or G
  MOD_RES (16), (17), (18), (19): Xaa is A or G or is absent
SRVIMYHYKLXXXXXXXXXKYLISIPSLAQPVXXPAASA

SEQ ID NO: 5731 - protein, 41 aa, Artificial Sequence
  GFR-binding peptide
  MOD_RES (1), (3), (35), (36): Xaa is C or S
XGXAKVVMNRYKKLIVNNSSDFYLVSIANLKTPAXXAKPVA

SEQ ID NO: 5732 - protein, 37 aa, Artificial Sequence
  GFR-binding peptide
  MOD_RES (1), (34), (35): Xaa is C or S
  MOD_RES (12), (13), (14), (15), (16): Xaa is A or G
  MOD_RES (17), (18), (19), (20): Xaa is A or G or is absent
XSKVIMRHKRLXXXXXXXXXYYLISTASLDQSVXXPS

SEQ ID NO: 5733 - protein, 39 aa, Artificial Sequence
  GFR-binding peptide
  MOD_RES (2), (4), (35), (36): Xaa is C or S
SXKXSKVIMRYKKLIKPTKGIFYLISIANLDQSVXXPSA

SEQ ID NO: 5734 - protein, 38 aa, Artificial Sequence
  GFR-binding peptide
  MOD_RES (2), (4), (36), (37): Xaa is C or S
HXGXARVVMNRYKKLIVNSSDDFYLVSIANLQTPAXXP

SEQ ID NO: 5735 - protein, 42 aa, Artificial Sequence
  GFR-binding peptide
  MOD_RES (2), (4), (38), (39): Xaa is C or S
  MOD_RES (16), (17), (18), (19), (20): Xaa is A or G
  MOD_RES (21), (22), (23), (24): Xaa is A or G or is absent
HXGXARVVMNYHYKLXXXXXXXXXKYLVSIPSLQTPAXXPKP

SEQ ID NO: 5736 - protein, 33 aa, Artificial Sequence
  GFR-binding peptide
  MOD_RES (2), (2): Xaa is C or S
GXSRVVMNYHYKLIVNSSDDKYLVSIPSLKTPA

SEQ ID NO: 5737 - protein, 42 aa, Artificial Sequence
  GFR-binding peptide
  MOD_RES (1), (3), (36), (37): Xaa is C or S
XGXEAVSMGEYHYKLTPVGMDDKYLVSIPSLKTPVXXAKGVK

SEQ ID NO: 5738 - protein, 37 aa, Artificial Sequence
  GFR-binding peptide
  MOD_RES (32), (33): Xaa is C or S
AKVVMNQYNKLIVNNSSDLYLVSIASLKTPAXXAKPV

SEQ ID NO: 5739 - protein, 37 aa, Artificial Sequence
  GFR-binding peptide
  MOD_RES (2), (4), (37): Xaa is C or S
  MOD_RES (15), (16), (17), (18), (19): Xaa is A or G
  MOD_RES (20), (21), (22), (23): Xaa is A or G or is absent
SXKXSRVIMQYNKLXXXXXXXXXLYLISIASLAQPVX

SEQ ID NO: 5740 - protein, 36 aa, Artificial Sequence
  GFR-binding peptide
  MOD_RES (33), (33): Xaa is C or S
  MOD_RES (11), (12), (13), (14), (15): Xaa is A or G
  MOD_RES (16), (17), (18), (19): Xaa is A or G or is absent
RVVMNRHKRLXXXXXXXXXYYLVSTASLKTPAXTPK

SEQ ID NO: 5741 - protein, 36 aa, Artificial Sequence
  GFR-binding peptide
  MOD_RES (31), (32): Xaa is C or S
EVVMDRHKRLVVKENEDYYLMSTASLETPVXXAKPI

SEQ ID NO: 5742 - protein, 35 aa, Artificial Sequence
  GFR-binding peptide
  MOD_RES (2), (4): Xaa is C or S
HXGXARVVMNRYKKLIVNSSDDFYLVSIANLQTPA

SEQ ID NO: 5743 - protein, 37 aa, Artificial Sequence
  GFR-binding peptide
  MOD_RES (1), (34), (35): Xaa is C or S
  MOD_RES (12), (13), (14), (15), (16): Xaa is A or G
  MOD_RES (17), (18), (19), (20): Xaa is A or G or is absent
XSKVIMQYNKLXXXXXXXXXLYLISIASLDQSVXXPS

SEQ ID NO: 5744 - protein, 35 aa, Artificial Sequence
  GFR-binding peptide
  MOD_RES (33), (34): Xaa is C or S
  MOD_RES (11), (12), (13), (14), (15): Xaa is A or G
  MOD_RES (16), (17), (18), (19): Xaa is A or G or is absent
RVVMNRHKRLXXXXXXXXXYYLVSTASLKTPAXXP

SEQ ID NO: 5745 - protein, 42 aa, Artificial Sequence
  GFR-binding peptide
  MOD_RES (2), (4), (37), (38): Xaa is C or S
  MOD_RES (15), (16), (17), (18), (19): Xaa is A or G
  MOD_RES (20), (21), (22), (23): Xaa is A or G or is absent
SXKXSKVIMQYNKLXXXXXXXXXLYLISIASLDQSVXXPSAS

SEQ ID NO: 5746 - protein, 32 aa, Artificial Sequence
  GFR-binding peptide
  MOD_RES (11), (12), (13), (14), (15): Xaa is A or G
  MOD_RES (16), (17), (18), (19): Xaa is A or G or is absent
SKVIMRYKKLXXXXXXXXXFYLISIANLDQSV

SEQ ID NO: 5747 - protein, 43 aa, Artificial Sequence
  GFR-binding peptide
  MOD_RES (2), (37), (38): Xaa is C or S
  MOD_RES (15), (16), (17), (18), (19): Xaa is A or G
  MOD_RES (20), (21), (22), (23): Xaa is A or G or is absent
GXEAVSMGERHKRLXXXXXXXXXYYLVSTASLKTPVXXAKGVK

SEQ ID NO: 5748 - protein, 35 aa, Artificial Sequence
  GFR-binding peptide
  MOD_RES (31), (32): Xaa is C or S
RVVMNRHKRLIVNSSDDYYLVSTASLQTPAXXPKP

SEQ ID NO: 5749 - protein, 37 aa, Artificial Sequence
  GFR-binding peptide
  MOD_RES (1), (3), (35), (36): Xaa is C or S
XGXGEVVMEYHYKLVVKDYEDKYLMSIPSLETPVXXA

SEQ ID NO: 5750 - protein, 39 aa, Artificial Sequence
  GFR-binding peptide
  MOD_RES (1), (35), (36): Xaa is C or S
  MOD_RES (13), (14), (15), (16), (17): Xaa is A or G
  MOD_RES (18), (19), (20), (21): Xaa is A or G or is absent
XARVVMNRYKKLXXXXXXXXXFYLVSIANLQTPAXXPKP

SEQ ID NO: 5751 - protein, 40 aa, Artificial Sequence
  GFR-binding peptide
  MOD_RES (1), (3), (37), (38): Xaa is C or S
  MOD_RES (15), (16), (17), (18), (19): Xaa is A or G
  MOD_RES (20), (21), (22), (23): Xaa is A or G or is absent
XGXGEVVMERHKRLXXXXXXXXXYYLMSTASLETPVXXAK

SEQ ID NO: 5752 - protein, 38 aa, Artificial Sequence
  GFR-binding peptide
  MOD_RES (2), (35), (36): Xaa is C or S
  MOD_RES (13), (14), (15), (16), (17): Xaa is A or G
  MOD_RES (18), (19), (20), (21): Xaa is A or G or is absent
KXSKVVMRHKRLXXXXXXXXXYYLISTASLDQPVXXPS

SEQ ID NO: 5753 - protein, 38 aa, Artificial Sequence
  GFR-binding peptide
  MOD_RES (2), (4), (37), (38): Xaa is C or S
  MOD_RES (15), (16), (17), (18), (19): Xaa is A or G
  MOD_RES (20), (21), (22), (23): Xaa is A or G or is absent
SXKXSRVIMRYKKLXXXXXXXXXFYLISIANLAQPVXX

SEQ ID NO: 5754 - protein, 34 aa, Artificial Sequence
  GFR-binding peptide
  MOD_RES (31), (32): Xaa is C or S
SRVIMYHYKLVKPKRGVKYLISIPSLAQPVXXPA

SEQ ID NO: 5755 - protein, 34 aa, Artificial Sequence
  GFR-binding peptide
  MOD_RES (34), (34): Xaa is C or S
  MOD_RES (12), (13), (14), (15), (16): Xaa is A or G
  MOD_RES (17), (18), (19), (20): Xaa is A or G or is absent
GEVVMEYHYKLXXXXXXXXXKYLMSIPSLETPVX

SEQ ID NO: 5756 - protein, 35 aa, Artificial Sequence
  GFR-binding peptide
  MOD_RES (2), (4): Xaa is C or S
HXGXAKVVMNRHKRLIVNNSSDYYLVSTASLKTPA

SEQ ID NO: 5757 - protein, 34 aa, Artificial Sequence
  GFR-binding peptide
LHDELTRHKRLFIPKKRVIEYYLVSTASLQVQTP

SEQ ID NO: 5758 - protein, 37 aa, Artificial Sequence
  GFR-binding peptide
  MOD_RES (1), (3): Xaa is C or S
  MOD_RES (16), (17), (18), (19), (20): Xaa is A or G
  MOD_RES (21), (22), (23), (24): Xaa is A or G or is absent
XGXEAVSMGERYKKLXXXXXXXXXFYLVSIANLKTPV

SEQ ID NO: 5759 - protein, 38 aa, Artificial Sequence
  GFR-binding peptide
  MOD_RES (1), (35), (36): Xaa is C or S
  MOD_RES (13), (14), (15), (16), (17): Xaa is A or G
  MOD_RES (18), (19), (20), (21): Xaa is A or G or is absent
XAKVVMNRYKKLXXXXXXXXXFYLVSIANLKTPAXXAK

SEQ ID NO: 5760 - protein, 33 aa, Artificial Sequence
  GFR-binding peptide
  MOD_RES (31), (31): Xaa is C or S
RVVMNRYKKLIVNSSDDFYLVSIANLKTPAXTP

SEQ ID NO: 5761 - protein, 42 aa, Artificial Sequence
  GFR-binding peptide
  MOD_RES (1), (3), (37), (38): Xaa is C or S
  MOD_RES (15), (16), (17), (18), (19): Xaa is A or G
  MOD_RES (20), (21), (22), (23): Xaa is A or G or is absent
XGXSRVVMNYHYKLXXXXXXXXXKYLVSIPSLKTPAXXPKPV

SEQ ID NO: 5762 - protein, 38 aa, Artificial Sequence
  GFR-binding peptide
  MOD_RES (33), (34): Xaa is C or S
  MOD_RES (11), (12), (13), (14), (15): Xaa is A or G
  MOD_RES (16), (17), (18), (19): Xaa is A or G or is absent
SKVIMQYNKLXXXXXXXXXLYLISIASLDQSVXXPSAS

SEQ ID NO: 5763 - protein, 34 aa, Artificial Sequence
  GFR-binding peptide
  MOD_RES (33), (34): Xaa is C or S
  MOD_RES (11), (12), (13), (14), (15): Xaa is A or G
  MOD_RES (16), (17), (18), (19): Xaa is A or G or is absent
SRVIMQYNKLXXXXXXXXXLYLISIASLAQPVXX

SEQ ID NO: 5764 - protein, 38 aa, Artificial Sequence
  GFR-binding peptide
  MOD_RES (1), (34), (35): Xaa is C or S
  MOD_RES (12), (13), (14), (15), (16): Xaa is A or G
  MOD_RES (17), (18), (19), (20): Xaa is A or G or is absent
XSRVIMRHKRLXXXXXXXXXYYLISTASLAQPVXXPAA

SEQ ID NO: 5765 - protein, 39 aa, Artificial Sequence
  GFR-binding peptide
  MOD_RES (1), (35), (36): Xaa is C or S
  MOD_RES (13), (14), (15), (16), (17): Xaa is A or G
  MOD_RES (18), (19), (20), (21): Xaa is A or G or is absent
XARVVMNQYNKLXXXXXXXXXLYLVSIASLQTPAXXPKP

SEQ ID NO: 5766 - protein, 38 aa, Artificial Sequence
  GFR-binding peptide
  MOD_RES (1), (34), (35): Xaa is C or S
  MOD_RES (12), (13), (14), (15), (16): Xaa is A or G
  MOD_RES (17), (18), (19), (20): Xaa is A or G or is absent
XSRVIMQYNKLXXXXXXXXXLYLISIASLAQPVXXPAA

SEQ ID NO: 5767 - protein, 40 aa, Artificial Sequence
  GFR-binding peptide
  MOD_RES (34), (34): Xaa is C or S
  MOD_RES (12), (13), (14), (15), (16): Xaa is A or G
  MOD_RES (17), (18), (19), (20): Xaa is A or G or is absent
SRVVMNRHKRLXXXXXXXXXYYLVSTASLKTPAXTPKTVH

SEQ ID NO: 5768 - protein, 36 aa, Artificial Sequence
  GFR-binding peptide
  MOD_RES (1), (32), (33): Xaa is C or S
XSKVVMYHYKLVKPTRGVKYLISIPSLDQPVXXPSA

SEQ ID NO: 5769 - protein, 34 aa, Artificial Sequence
  GFR-binding peptide
  MOD_RES (1), (33), (34): Xaa is C or S
XGEVVMERYKKLVVKDYEDFYLMSIANLETPVXX

SEQ ID NO: 5770 - protein, 35 aa, Artificial Sequence
  GFR-binding peptide
  MOD_RES (1), (1): Xaa is C or S
  MOD_RES (14), (15), (16), (17), (18): Xaa is A or G
  MOD_RES (19), (20), (21), (22): Xaa is A or G or is absent
XEAVSMGEQYNKLXXXXXXXXXLYLVSIASLKTPV

SEQ ID NO: 5771 - protein, 37 aa, Artificial Sequence
  GFR-binding peptide
  MOD_RES (2), (33), (34): Xaa is C or S
KXSKVVMRYKKLVKPTRGVFYLISIANLDQPVXXPSA

SEQ ID NO: 5772 - protein, 37 aa, Artificial Sequence
  GFR-binding peptide
  MOD_RES (33), (33): Xaa is C or S
  MOD_RES (11), (12), (13), (14), (15): Xaa is A or G
  MOD_RES (16), (17), (18), (19): Xaa is A or G or is absent
RVVMNRYKKLXXXXXXXXXFYLVSIANLKTPAXTPKT

SEQ ID NO: 5773 - protein, 38 aa, Artificial Sequence
  GFR-binding peptide
  MOD_RES (1), (35), (36): Xaa is C or S
  MOD_RES (13), (14), (15), (16), (17): Xaa is A or G
  MOD_RES (18), (19), (20), (21): Xaa is A or G or is absent
XAKVVMNQYNKLXXXXXXXXXLYLVSIASLKTPAXXAK

SEQ ID NO: 5774 - protein, 36 aa, Artificial Sequence
  GFR-binding peptide
  MOD_RES (2), (35), (36): Xaa is C or S
GXEAVSMGERYKKLTPVGMDDFYLVSIANLKTPVXX

SEQ ID NO: 5775 - protein, 34 aa, Artificial Sequence
  GFR-binding peptide
  MOD_RES (2), (2): Xaa is C or S
  MOD_RES (13), (14), (15), (16), (17): Xaa is A or G
  MOD_RES (18), (19), (20), (21): Xaa is A or G or is absent
KXSRVIMRHKRLXXXXXXXXXYYLISTASLAQPV

SEQ ID NO: 5776 - protein, 39 aa, Artificial Sequence
  GFR-binding peptide
  MOD_RES (2), (4), (37), (38): Xaa is C or S
RXGXEAVSMGEYHYKLTPVGMDDKYLVSIPSLKTPVXXA

SEQ ID NO: 5777 - protein, 41 aa, Artificial Sequence
  GFR-binding peptide
  MOD_RES (2), (4), (37), (38): Xaa is C or S
RXGXEAVSMGERHKRLTPVGMDDYYLVSTASLKTPVXXAKG

SEQ ID NO: 5778 - protein, 43 aa, Artificial Sequence
  GFR-binding peptide
  MOD_RES (2), (37), (38): Xaa is C or S
  MOD_RES (15), (16), (17), (18), (19): Xaa is A or G
  MOD_RES (20), (21), (22), (23): Xaa is A or G or is absent
GXEAVSMGEQYNKLXXXXXXXXXLYLVSIASLKTPVXXAKGVK

SEQ ID NO: 5779 - protein, 42 aa, Artificial Sequence
  GFR-binding peptide
  MOD_RES (2), (4), (41): Xaa is C or S
EXKXALHDELTQYNKLFIPKKRVIELYLVSIASLQVQTPRXQ

SEQ ID NO: 5780 - protein, 35 aa, Artificial Sequence
  GFR-binding peptide
  MOD_RES (2), (33), (34): Xaa is C or S
KXSKVVMYHYKLVKPTRGVKYLISIPSLDQPVXXP

SEQ ID NO: 5781 - protein, 32 aa, Artificial Sequence
  GFR-binding peptide
  MOD_RES (31), (31): Xaa is C or S
RVVMNRYKKLIVNSSDDFYLVSIANLKTPAXT

SEQ ID NO: 5782 - protein, 36 aa, Artificial Sequence
  GFR-binding peptide
  MOD_RES (2), (36): Xaa is C or S
  MOD_RES (14), (15), (16), (17), (18): Xaa is A or G
  MOD_RES (19), (20), (21), (22): Xaa is A or G or is absent
GXGEVVMEYHYKLXXXXXXXXXKYLMSIPSLETPVX

SEQ ID NO: 5783 - protein, 32 aa, Artificial Sequence
  GFR-binding peptide
  MOD_RES (1), (32): Xaa is C or S
XSKVIMRYKKLIKPTKGIFYLISIANLDQSVX

SEQ ID NO: 5784 - protein, 38 aa, Artificial Sequence
  GFR-binding peptide
  MOD_RES (32), (33): Xaa is C or S
GEVVMEQYNKLVVKDYEDLYLMSIASLETPVXXAKPIS

SEQ ID NO: 5785 - protein, 42 aa, Artificial Sequence
  GFR-binding peptide
  MOD_RES (2), (36): Xaa is C or S
  MOD_RES (14), (15), (16), (17), (18): Xaa is A or G
  MOD_RES (19), (20), (21), (22): Xaa is A or G or is absent
GXSRVVMNRYKKLXXXXXXXXXFYLVSIANLKTPAXTPKTVH

SEQ ID NO: 5786 - protein, 36 aa, Artificial Sequence
  GFR-binding peptide
  MOD_RES (2), (34), (35): Xaa is C or S
GXGEVVMDRHKRLVVKENEDYYLMSTASLETPVXXA

SEQ ID NO: 5787 - protein, 40 aa, Artificial Sequence
  GFR-binding peptide
  MOD_RES (1), (3), (35): Xaa is C or S
XGXSRVVMNQYNKLIVNSSDDLYLVSIASLKTPAXTPKTV

SEQ ID NO: 5788 - protein, 36 aa, Artificial Sequence
  GFR-binding peptide
  MOD_RES (34), (35): Xaa is C or S
  MOD_RES (12), (13), (14), (15), (16): Xaa is A or G
  MOD_RES (17), (18), (19), (20): Xaa is A or G or is absent
GEVVMERYKKLXXXXXXXXXFYLMSIANLETPVXXA

SEQ ID NO: 5789 - protein, 33 aa, Artificial Sequence
  GFR-binding peptide
  MOD_RES (1), (1): Xaa is C or S
  MOD_RES (12), (13), (14), (15), (16): Xaa is A or G
  MOD_RES (17), (18), (19), (20): Xaa is A or G or is absent
XSKVVMRHKRLXXXXXXXXXYYLISTASLDQPV

SEQ ID NO: 5790 - protein, 37 aa, Artificial Sequence
  GFR-binding peptide
  MOD_RES (33), (34): Xaa is C or S
EAVSMGERHKRLTPVGMDDYYLVSTASLKTPVXXAKG

SEQ ID NO: 5791 - protein, 39 aa, Artificial Sequence
  GFR-binding peptide
  MOD_RES (2), (4), (36), (37): Xaa is C or S
RXGXGEVVMDRHKRLVVKENEDYYLMSTASLETPVXXAK

SEQ ID NO: 5792 - protein, 40 aa, Artificial Sequence
  GFR-binding peptide
  MOD_RES (2), (4): Xaa is C or S
EXKXALHDELTQYNKLFIPKKRVIELYLVSIASLQVQTPR

SEQ ID NO: 5793 - protein, 39 aa, Artificial Sequence
  GFR-binding peptide
  MOD_RES (1), (33), (34): Xaa is C or S
XSRVVMNRHKRLIVNSSDDYYLVSTASLKTPAXXPKPVY

SEQ ID NO: 5794 - protein, 39 aa, Artificial Sequence
  GFR-binding peptide
  MOD_RES (33), (34): Xaa is C or S
EAVSMGEYHYKLTPVGMDDKYLVSIPSLKTPVXXAKGVK

SEQ ID NO: 5795 - protein, 38 aa, Artificial Sequence
  GFR-binding peptide
  MOD_RES (2), (4): Xaa is C or S
EXKXALHDELTRHKRLFIPKKRVIEYYLVSTASLQVQT

SEQ ID NO: 5796 - protein, 34 aa, Artificial Sequence
  GFR-binding peptide
  MOD_RES (33), (34): Xaa is C or S
  MOD_RES (11), (12), (13), (14), (15): Xaa is A or G
  MOD_RES (16), (17), (18), (19): Xaa is A or G or is absent
EVVMEYHYKLXXXXXXXXXKYLMSIPSLETPVXX

SEQ ID NO: 5797 - protein, 39 aa, Artificial Sequence
  GFR-binding peptide
  MOD_RES (1), (3), (37), (38): Xaa is C or S
  MOD_RES (15), (16), (17), (18), (19): Xaa is A or G
  MOD_RES (20), (21), (22), (23): Xaa is A or G or is absent
XGXGEVVMDRHKRLXXXXXXXXXYYLMSTASLETPVXXA

SEQ ID NO: 5798 - protein, 42 aa, Artificial Sequence
  GFR-binding peptide
  MOD_RES (2), (4), (36), (37): Xaa is C or S
RXGXGEVVMEQYNKLVVKDYEDLYLMSIASLETPVXXAKPIS

SEQ ID NO: 5799 - protein, 32 aa, Artificial Sequence
  GFR-binding peptide
  MOD_RES (1), (32): Xaa is C or S
XSKVVMQYNKLVKPTRGVLYLISIASLDQPVX

SEQ ID NO: 5800 - protein, 37 aa, Artificial Sequence
  GFR-binding peptide
  MOD_RES (32), (33): Xaa is C or S
GEVVMDRHKRLVVKENEDYYLMSTASLETPVXXAKPI

SEQ ID NO: 5801 - protein, 38 aa, Artificial Sequence
  GFR-binding peptide
  MOD_RES (2), (4), (38): Xaa is C or S
  MOD_RES (16), (17), (18), (19), (20): Xaa is A or G
  MOD_RES (21), (22), (23), (24): Xaa is A or G or is absent
HXGXSRVVMNQYNKLXXXXXXXXXLYLVSIASLKTPAX

SEQ ID NO: 5802 - protein, 39 aa, Artificial Sequence
  GFR-binding peptide
  MOD_RES (1), (3), (36), (37): Xaa is C or S
XGXEAVSMGEQYNKLTPVGMDDLYLVSIASLKTPVXXAK

SEQ ID NO: 5803 - protein, 38 aa, Artificial Sequence
  GFR-binding peptide
  MOD_RES (2), (4), (37), (38): Xaa is C or S
  MOD_RES (15), (16), (17), (18), (19): Xaa is A or G
  MOD_RES (20), (21), (22), (23): Xaa is A or G or is absent
SXKXSKVVMQYNKLXXXXXXXXXLYLISIASLDQPVXX

SEQ ID NO: 5804 - protein, 36 aa, Artificial Sequence
  GFR-binding peptide
  MOD_RES (1), (35), (36): Xaa is C or S
  MOD_RES (13), (14), (15), (16), (17): Xaa is A or G
  MOD_RES (18), (19), (20), (21): Xaa is A or G or is absent
XSRVVMNQYNKLXXXXXXXXXLYLVSIASLKTPAXX

SEQ ID NO: 5805 - protein, 34 aa, Artificial Sequence
  GFR-binding peptide
HDELTRHKRLFIPKKRVIEYYLVSTASLQVQTPR

SEQ ID NO: 5806 - protein, 34 aa, Artificial Sequence
  GFR-binding peptide
  MOD_RES (1), (3): Xaa is C or S
XGXGEVVMERHKRLVVKDYEDYYLMSTASLETPV

SEQ ID NO: 5807 - protein, 40 aa, Artificial Sequence
  GFR-binding peptide
  MOD_RES (1), (3), (37), (38): Xaa is C or S
  MOD_RES (15), (16), (17), (18), (19): Xaa is A or G
  MOD_RES (20), (21), (22), (23): Xaa is A or G or is absent
XGXARVVMNRHKRLXXXXXXXXXYYLVSTASLQTPAXXPK

SEQ ID NO: 5808 - protein, 38 aa, Artificial Sequence
  GFR-binding peptide
  MOD_RES (1), (3), (36), (37): Xaa is C or S
  MOD_RES (14), (15), (16), (17), (18): Xaa is A or G
  MOD_RES (19), (20), (21), (22): Xaa is A or G or is absent
XKXSRVIMYHYKLXXXXXXXXXKYLISIPSLAQPVXXP

SEQ ID NO: 5809 - protein, 37 aa, Artificial Sequence
  GFR-binding peptide
  MOD_RES (34), (34): Xaa is C or S
  MOD_RES (12), (13), (14), (15), (16): Xaa is A or G
  MOD_RES (17), (18), (19), (20): Xaa is A or G or is absent
SRVVMNYHYKLXXXXXXXXXKYLVSIPSLKTPAXTPK

SEQ ID NO: 5810 - protein, 31 aa, Artificial Sequence
  GFR-binding peptide
  MOD_RES (1), (1): Xaa is C or S
XSKVIMQYNKLIKPTKGILYLISIASLDQSV

SEQ ID NO: 5811 - protein, 36 aa, Artificial Sequence
  GFR-binding peptide
  MOD_RES (2), (34), (35): Xaa is C or S
GXAKVVMNQYNKLIVNNSSDLYLVSIASLKTPAXXA

SEQ ID NO: 5812 - protein, 39 aa, Artificial Sequence
  GFR-binding peptide
  MOD_RES (1), (33), (34): Xaa is C or S
XGEVVMDRHKRLVVKENEDYYLMSTASLETPVXXAKPIK

SEQ ID NO: 5813 - protein, 34 aa, Artificial Sequence
  GFR-binding peptide
  MOD_RES (2), (4): Xaa is C or S
SXKXSKVIMQYNKLIKPTKGILYLISIASLDQSV

SEQ ID NO: 5814 - protein, 30 aa, Artificial Sequence
  GFR-binding peptide
SRVIMRYKKLVKPKRGVFYLISIANLAQPV

SEQ ID NO: 5815 - protein, 41 aa, Artificial Sequence
  GFR-binding peptide
  MOD_RES (2), (4), (38), (39): Xaa is C or S
  MOD_RES (16), (17), (18), (19), (20): Xaa is A or G
  MOD_RES (21), (22), (23), (24): Xaa is A or G or is absent
HXGXSRVVMNRYKKLXXXXXXXXXFYLVSIANLKTPAXXPK

SEQ ID NO: 5816 - protein, 38 aa, Artificial Sequence
  GFR-binding peptide
  MOD_RES (2), (33), (34): Xaa is C or S
KXSKVVMQYNKLVKPTRGVLYLISIASLDQPVXXPSAS

SEQ ID NO: 5817 - protein, 38 aa, Artificial Sequence
  GFR-binding peptide
  MOD_RES (32), (33): Xaa is C or S
ARVVMNYHYKLIVNSSDDKYLVSIPSLQTPAXXPKPVT

SEQ ID NO: 5818 - protein, 38 aa, Artificial Sequence
  GFR-binding peptide
  MOD_RES (1), (3), (34), (35): Xaa is C or S
XKXSKVIMQYNKLIKPTKGILYLISIASLDQSVXXPSA

SEQ ID NO: 5819 - protein, 31 aa, Artificial Sequence
  GFR-binding peptide
SRVVMNYHYKLIVNSSDDKYLVSIPSLKTPA

SEQ ID NO: 5820 - protein, 39 aa, Artificial Sequence
  GFR-binding peptide
  MOD_RES (2), (36), (37): Xaa is C or S
  MOD_RES (14), (15), (16), (17), (18): Xaa is A or G
  MOD_RES (19), (20), (21), (22): Xaa is A or G or is absent
GXSRVVMNRYKKLXXXXXXXXXFYLVSIANLKTPAXXPK

SEQ ID NO: 5821 - protein, 41 aa, Artificial Sequence
  GFR-binding peptide
  MOD_RES (1), (36), (37): Xaa is C or S
  MOD_RES (14), (15), (16), (17), (18): Xaa is A or G
  MOD_RES (19), (20), (21), (22): Xaa is A or G or is absent
XEAVSMGEQYNKLXXXXXXXXXLYLVSIASLKTPVXXAKGV

SEQ ID NO: 5822 - protein, 35 aa, Artificial Sequence
  GFR-binding peptide
  MOD_RES (1), (32), (33): Xaa is C or S
XSRVIMQYNKLVKPKRGVLYLISIASLAQPVXXPA

SEQ ID NO: 5823 - protein, 39 aa, Artificial Sequence
  GFR-binding peptide
  MOD_RES (34), (35): Xaa is C or S
  MOD_RES (12), (13), (14), (15), (16): Xaa is A or G
  MOD_RES (17), (18), (19), (20): Xaa is A or G or is absent
SRVVMNQYNKLXXXXXXXXXLYLVSIASLKTPAXXPKPV

SEQ ID NO: 5824 - protein, 37 aa, Artificial Sequence
  GFR-binding peptide
  MOD_RES (1), (1): Xaa is C or S
  MOD_RES (14), (15), (16), (17), (18): Xaa is A or G
  MOD_RES (19), (20), (21), (22): Xaa is A or G or is absent
XALHDELTRYKKLXXXXXXXXXFYLVSIANLQVQTPR

SEQ ID NO: 5825 - protein, 40 aa, Artificial Sequence
  GFR-binding peptide
  MOD_RES (2), (4), (36), (37): Xaa is C or S
RXGXGEVVMDYHYKLVVKENEDKYLMSIPSLETPVXXAKP

SEQ ID NO: 5826 - protein, 34 aa, Artificial Sequence
  GFR-binding peptide
  MOD_RES (32), (33): Xaa is C or S
ARVVMNRYKKLIVNSSDDFYLVSIANLQTPAXXP

SEQ ID NO: 5827 - protein, 38 aa, Artificial Sequence
  GFR-binding peptide
  MOD_RES (33), (34): Xaa is C or S
  MOD_RES (11), (12), (13), (14), (15): Xaa is A or G
  MOD_RES (16), (17), (18), (19): Xaa is A or G or is absent
EVVMDYHYKLXXXXXXXXXKYLMSIPSLETPVXXAKPI

SEQ ID NO: 5828 - protein, 40 aa, Artificial Sequence
  GFR-binding peptide
  MOD_RES (1), (35): Xaa is C or S
  MOD_RES (13), (14), (15), (16), (17): Xaa is A or G
  MOD_RES (18), (19), (20), (21): Xaa is A or G or is absent
XSRVVMNYHYKLXXXXXXXXXKYLVSIPSLKTPAXTPKTV

SEQ ID NO: 5829 - protein, 36 aa, Artificial Sequence
  GFR-binding peptide
  MOD_RES (2), (2): Xaa is C or S
KXALHDELTQYNKLFIPKKRVIELYLVSIASLQVQT

SEQ ID NO: 5830 - protein, 38 aa, Artificial Sequence
  GFR-binding peptide
  MOD_RES (2), (4), (36), (37): Xaa is C or S
HXGXARVVMNYHYKLIVNSSDDKYLVSIPSLQTPAXXP

SEQ ID NO: 5831 - protein, 36 aa, Artificial Sequence
  GFR-binding peptide
  MOD_RES (2), (2): Xaa is C or S
  MOD_RES (15), (16), (17), (18), (19): Xaa is A or G
  MOD_RES (20), (21), (22), (23): Xaa is A or G or is absent
GXEAVSMGERYKKLXXXXXXXXXFYLVSIANLKTPV

SEQ ID NO: 5832 - protein, 34 aa, Artificial Sequence
  GFR-binding peptide
  MOD_RES (2), (34): Xaa is C or S
GXSRVVMNRHKRLIVNSSDDYYLVSTASLKTPAX

SEQ ID NO: 5833 - protein, 36 aa, Artificial Sequence
  GFR-binding peptide
  MOD_RES (33), (34): Xaa is C or S
  MOD_RES (11), (12), (13), (14), (15): Xaa is A or G
  MOD_RES (16), (17), (18), (19): Xaa is A or G or is absent
RVVMNYHYKLXXXXXXXXXKYLVSIPSLKTPAXXPK

SEQ ID NO: 5834 - protein, 33 aa, Artificial Sequence
  GFR-binding peptide
  MOD_RES (2), (2): Xaa is C or S
GXGEVVMDQYNKLVVKENEDLYLMSIASLETPV

SEQ ID NO: 5835 - protein, 36 aa, Artificial Sequence
  GFR-binding peptide
  MOD_RES (31), (31): Xaa is C or S
RVVMNRYKKLIVNSSDDFYLVSIANLKTPAXTPKTV

SEQ ID NO: 5836 - protein, 37 aa, Artificial Sequence
  GFR-binding peptide
  MOD_RES (2), (35), (36): Xaa is C or S
  MOD_RES (13), (14), (15), (16), (17): Xaa is A or G
  MOD_RES (18), (19), (20), (21): Xaa is A or G or is absent
KXSKVIMQYNKLXXXXXXXXXLYLISIASLDQSVXXP

SEQ ID NO: 5837 - protein, 39 aa, Artificial Sequence
  GFR-binding peptide
  MOD_RES (1), (33): Xaa is C or S
XSRVVMNYHYKLIVNSSDDKYLVSIPSLKTPAXTPKTVH

SEQ ID NO: 5838 - protein, 39 aa, Artificial Sequence
  GFR-binding peptide
  MOD_RES (2), (4), (36), (37): Xaa is C or S
RXGXGEVVMEYHYKLVVKDYEDKYLMSIPSLETPVXXAK

SEQ ID NO: 5839 - protein, 34 aa, Artificial Sequence
  GFR-binding peptide
  MOD_RES (31), (32): Xaa is C or S
SRVIMQYNKLVKPKRGVLYLISIASLAQPVXXPA

SEQ ID NO: 5840 - protein, 41 aa, Artificial Sequence
  GFR-binding peptide
  MOD_RES (1), (3), (36), (37): Xaa is C or S
  MOD_RES (14), (15), (16), (17), (18): Xaa is A or G
  MOD_RES (19), (20), (21), (22): Xaa is A or G or is absent
XKXSKVVMQYNKLXXXXXXXXXLYLISIASLDQPVXXPSAS

SEQ ID NO: 5841 - protein, 36 aa, Artificial Sequence
  GFR-binding peptide
  MOD_RES (2), (33), (34): Xaa is C or S
KXSRVIMRYKKLVKPKRGVFYLISIANLAQPVXXPA

SEQ ID NO: 5842 - protein, 37 aa, Artificial Sequence
  GFR-binding peptide
  MOD_RES (2), (4), (36), (37): Xaa is C or S
HXGXSRVVMNRHKRLIVNSSDDYYLVSTASLKTPAXX

SEQ ID NO: 5843 - protein, 34 aa, Artificial Sequence
  GFR-binding peptide
  MOD_RES (32), (33): Xaa is C or S
AKVVMNRHKRLIVNNSSDYYLVSTASLKTPAXXA

SEQ ID NO: 5844 - protein, 36 aa, Artificial Sequence
  GFR-binding peptide
  MOD_RES (1), (3), (35), (36): Xaa is C or S
XGXSRVVMNYHYKLIVNSSDDKYLVSIPSLKTPAXX

SEQ ID NO: 5845 - protein, 40 aa, Artificial Sequence
  GFR-binding peptide
  MOD_RES (1), (36), (37): Xaa is C or S
  MOD_RES (14), (15), (16), (17), (18): Xaa is A or G
  MOD_RES (19), (20), (21), (22): Xaa is A or G or is absent
XEAVSMGEYHYKLXXXXXXXXXKYLVSIPSLKTPVXXAKG

SEQ ID NO: 5846 - protein, 39 aa, Artificial Sequence
  GFR-binding peptide
  MOD_RES (2), (4), (38): Xaa is C or S
  MOD_RES (16), (17), (18), (19), (20): Xaa is A or G
  MOD_RES (21), (22), (23), (24): Xaa is A or G or is absent
HXGXSRVVMNRYKKLXXXXXXXXXFYLVSIANLKTPAXT

SEQ ID NO: 5847 - protein, 39 aa, Artificial Sequence
  GFR-binding peptide
  MOD_RES (33), (34): Xaa is C or S
  MOD_RES (11), (12), (13), (14), (15): Xaa is A or G
  MOD_RES (16), (17), (18), (19): Xaa is A or G or is absent
SRVIMQYNKLXXXXXXXXXLYLISIASLAQPVXXPAASA

SEQ ID NO: 5848 - protein, 35 aa, Artificial Sequence
  GFR-binding peptide
  MOD_RES (2), (33), (34): Xaa is C or S
KXSKVIMRYKKLIKPTKGIFYLISIANLDQSVXXP

SEQ ID NO: 5849 - protein, 39 aa, Artificial Sequence
  GFR-binding peptide
  MOD_RES (2), (34), (35): Xaa is C or S
GXAKVVMNRYKKLIVNNSSDFYLVSIANLKTPAXXAKPV

SEQ ID NO: 5850 - protein, 36 aa, Artificial Sequence
  GFR-binding peptide
  MOD_RES (36), (36): Xaa is C or S
  MOD_RES (12), (13), (14), (15), (16): Xaa is A or G
  MOD_RES (17), (18), (19), (20): Xaa is A or G or is absent
LHDELTRYKKLXXXXXXXXXFYLVSIANLQVQTPRX

SEQ ID NO: 5851 - protein, 34 aa, Artificial Sequence
  GFR-binding peptide
  MOD_RES (34), (34): Xaa is C or S
  MOD_RES (12), (13), (14), (15), (16): Xaa is A or G
  MOD_RES (17), (18), (19), (20): Xaa is A or G or is absent
GEVVMDYHYKLXXXXXXXXXKYLMSIPSLETPVX

SEQ ID NO: 5852 - protein, 38 aa, Artificial Sequence
  GFR-binding peptide
  MOD_RES (33), (34): Xaa is C or S
  MOD_RES (11), (12), (13), (14), (15): Xaa is A or G
  MOD_RES (16), (17), (18), (19): Xaa is A or G or is absent
SKVIMYHYKLXXXXXXXXXKYLISIPSLDQSVXXPSAS

SEQ ID NO: 5853 - protein, 37 aa, Artificial Sequence
  GFR-binding peptide
  MOD_RES (32), (33): Xaa is C or S
AKVVMNRYKKLIVNNSSDFYLVSIANLKTPAXXAKPV

SEQ ID NO: 5854 - protein, 38 aa, Artificial Sequence
  GFR-binding peptide
  MOD_RES (33), (34): Xaa is C or S
  MOD_RES (11), (12), (13), (14), (15): Xaa is A or G
  MOD_RES (16), (17), (18), (19): Xaa is A or G or is absent
SRVIMYHYKLXXXXXXXXXKYLISIPSLAQPVXXPAAS

SEQ ID NO: 5855 - protein, 36 aa, Artificial Sequence
  GFR-binding peptide
  MOD_RES (2), (4): Xaa is C or S
  MOD_RES (15), (16), (17), (18), (19): Xaa is A or G
  MOD_RES (20), (21), (22), (23): Xaa is A or G or is absent
SXKXSKVIMRHKRLXXXXXXXXXYYLISTASLDQSV

SEQ ID NO: 5856 - protein, 39 aa, Artificial Sequence
  GFR-binding peptide
  MOD_RES (2), (33), (34): Xaa is C or S
KXSKVIMYHYKLIKPTKGIKYLISIPSLDQSVXXPSASA

SEQ ID NO: 5857 - protein, 33 aa, Artificial Sequence
  GFR-binding peptide
  MOD_RES (33), (33): Xaa is C or S
EAVSMGEYHYKLTPVGMDDKYLVSIPSLKTPVX

SEQ ID NO: 5858 - protein, 32 aa, Artificial Sequence
  GFR-binding peptide
HDELTQYNKLFIPKKRVIELYLVSIASLQVQT

SEQ ID NO: 5859 - protein, 35 aa, Artificial Sequence
  GFR-binding peptide
  MOD_RES (2), (34), (35): Xaa is C or S
GXARVVMNYHYKLIVNSSDDKYLVSIPSLQTPAXX

SEQ ID NO: 5860 - protein, 41 aa, Artificial Sequence
  GFR-binding peptide
  MOD_RES (2), (4), (38), (39): Xaa is C or S
  MOD_RES (16), (17), (18), (19), (20): Xaa is A or G
  MOD_RES (21), (22), (23), (24): Xaa is A or G or is absent
RXGXGEVVMDRYKKLXXXXXXXXXFYLMSIANLETPVXXAK

SEQ ID NO: 5861 - protein, 37 aa, Artificial Sequence
  GFR-binding peptide
  MOD_RES (31), (32): Xaa is C or S
KVVMNRYKKLIVNNSSDFYLVSIANLKTPAXXAKPVA

SEQ ID NO: 5862 - protein, 41 aa, Artificial Sequence
  GFR-binding peptide
  MOD_RES (1), (3), (37), (38): Xaa is C or S
  MOD_RES (15), (16), (17), (18), (19): Xaa is A or G
  MOD_RES (20), (21), (22), (23): Xaa is A or G or is absent
XGXGEVVMERHKRLXXXXXXXXXYYLMSTASLETPVXXAKP

SEQ ID NO: 5863 - protein, 36 aa, Artificial Sequence
  GFR-binding peptide
  MOD_RES (32), (32): Xaa is C or S
SRVVMNQYNKLIVNSSDDLYLVSIASLKTPAXTPKT

SEQ ID NO: 5864 - protein, 37 aa, Artificial Sequence
  GFR-binding peptide
  MOD_RES (2), (4), (35), (36): Xaa is C or S
SXKXSKVIMRHKRLIKPTKGIYYLISTASLDQSVXXP

SEQ ID NO: 5865 - protein, 34 aa, Artificial Sequence
  GFR-binding peptide
  MOD_RES (32), (33): Xaa is C or S
ARVVMNQYNKLIVNSSDDLYLVSIASLQTPAXXP

SEQ ID NO: 5866 - protein, 36 aa, Artificial Sequence
  GFR-binding peptide
  MOD_RES (2), (35), (36): Xaa is C or S
  MOD_RES (13), (14), (15), (16), (17): Xaa is A or G
  MOD_RES (18), (19), (20), (21): Xaa is A or G or is absent
KXSKVIMYHYKLXXXXXXXXXKYLISIPSLDQSVXX

SEQ ID NO: 5867 - protein, 31 aa, Artificial Sequence
  GFR-binding peptide
ARVVMNRYKKLIVNSSDDFYLVSIANLQTPA

SEQ ID NO: 5868 - protein, 40 aa, Artificial Sequence
  GFR-binding peptide
  MOD_RES (2), (4), (38), (39): Xaa is C or S
  MOD_RES (16), (17), (18), (19), (20): Xaa is A or G
  MOD_RES (21), (22), (23), (24): Xaa is A or G or is absent
RXGXGEVVMERYKKLXXXXXXXXXFYLMSIANLETPVXXA

SEQ ID NO: 5869 - protein, 40 aa, Artificial Sequence
  GFR-binding peptide
  MOD_RES (1), (3), (37), (38): Xaa is C or S
  MOD_RES (15), (16), (17), (18), (19): Xaa is A or G
  MOD_RES (20), (21), (22), (23): Xaa is A or G or is absent
XGXSRVVMNQYNKLXXXXXXXXXLYLVSIASLKTPAXXPK

SEQ ID NO: 5870 - protein, 40 aa, Artificial Sequence
  GFR-binding peptide
  MOD_RES (2), (34), (35): Xaa is C or S
GXAKVVMNYHYKLIVNNSSDKYLVSIPSLKTPAXXAKPVA

SEQ ID NO: 5871 - protein, 37 aa, Artificial Sequence
  GFR-binding peptide
  MOD_RES (1), (33), (34): Xaa is C or S
XARVVMNRYKKLIVNSSDDFYLVSIANLQTPAXXPKP

SEQ ID NO: 5872 - protein, 39 aa, Artificial Sequence
  GFR-binding peptide
  MOD_RES (1), (33): Xaa is C or S
XSRVVMNRYKKLIVNSSDDFYLVSIANLKTPAXTPKTVH

SEQ ID NO: 5873 - protein, 32 aa, Artificial Sequence
  GFR-binding peptide
  MOD_RES (31), (32): Xaa is C or S
KVVMNRYKKLIVNNSSDFYLVSIANLKTPAXX

SEQ ID NO: 5874 - protein, 34 aa, Artificial Sequence
  GFR-binding peptide
  MOD_RES (33), (34): Xaa is C or S
  MOD_RES (11), (12), (13), (14), (15): Xaa is A or G
  MOD_RES (16), (17), (18), (19): Xaa is A or G or is absent
EVVMEQYNKLXXXXXXXXXLYLMSIASLETPVXX

SEQ ID NO: 5875 - protein, 45 aa, Artificial Sequence
  GFR-binding peptide
  MOD_RES (2), (4), (41): Xaa is C or S
  MOD_RES (17), (18), (19), (20), (21): Xaa is A or G
  MOD_RES (22), (23), (24), (25): Xaa is A or G or is absent
EXKXALHDELTYHYKLXXXXXXXXXKYLVSIPSLQVQTPRXQVNR

SEQ ID NO: 5876 - protein, 38 aa, Artificial Sequence
  GFR-binding peptide
  MOD_RES (1), (33), (34): Xaa is C or S
XAKVVMNRHKRLIVNNSSDYYLVSTASLKTPAXXAKPV

SEQ ID NO: 5877 - protein, 39 aa, Artificial Sequence
  GFR-binding peptide
  MOD_RES (1), (3), (38), (39): Xaa is C or S
  MOD_RES (16), (17), (18), (19), (20): Xaa is A or G
  MOD_RES (21), (22), (23), (24): Xaa is A or G or is absent
XGXEAVSMGEYHYKLXXXXXXXXXKYLVSIPSLKTPVXX

SEQ ID NO: 5878 - protein, 34 aa, Artificial Sequence
  GFR-binding peptide
  MOD_RES (1), (1): Xaa is C or S
  MOD_RES (13), (14), (15), (16), (17): Xaa is A or G
  MOD_RES (18), (19), (20), (21): Xaa is A or G or is absent
XGEVVMDRYKKLXXXXXXXXXFYLMSIANLETPV

SEQ ID NO: 5879 - protein, 37 aa, Artificial Sequence
  GFR-binding peptide
  MOD_RES (36), (36): Xaa is C or S
LHDELTYHYKLFIPKKRVIEKYLVSIPSLQVQTPRXQ

SEQ ID NO: 5880 - protein, 36 aa, Artificial Sequence
  GFR-binding peptide
  MOD_RES (33), (34): Xaa is C or S
  MOD_RES (11), (12), (13), (14), (15): Xaa is A or G
  MOD_RES (16), (17), (18), (19): Xaa is A or G or is absent
EVVMDQYNKLXXXXXXXXXLYLMSIASLETPVXXAK

SEQ ID NO: 5881 - protein, 39 aa, Artificial Sequence
  GFR-binding peptide
  MOD_RES (1), (34), (35): Xaa is C or S
  MOD_RES (12), (13), (14), (15), (16): Xaa is A or G
  MOD_RES (17), (18), (19), (20): Xaa is A or G or is absent
XSKVIMRHKRLXXXXXXXXXYYLISTASLDQSVXXPSAS

SEQ ID NO: 5882 - protein, 43 aa, Artificial Sequence
  GFR-binding peptide
  MOD_RES (2), (4), (37), (38): Xaa is C or S
  MOD_RES (15), (16), (17), (18), (19): Xaa is A or G
  MOD_RES (20), (21), (22), (23): Xaa is A or G or is absent
SXKXSRVIMRYKKLXXXXXXXXXFYLISIANLAQPVXXPAASA

SEQ ID NO: 5883 - protein, 41 aa, Artificial Sequence
  GFR-binding peptide
  MOD_RES (2), (4), (35), (36): Xaa is C or S
SXKXSRVIMRYKKLVKPKRGVFYLISIANLAQPVXXPAASA

SEQ ID NO: 5884 - protein, 35 aa, Artificial Sequence
  GFR-binding peptide
  MOD_RES (31), (32): Xaa is C or S
SKVIMQYNKLIKPTKGILYLISIASLDQSVXXPSA

SEQ ID NO: 5885 - protein, 35 aa, Artificial Sequence
  GFR-binding peptide
  MOD_RES (2), (34), (35): Xaa is C or S
GXGEVVMERYKKLVVKDYEDFYLMSIANLETPVXX

SEQ ID NO: 5886 - protein, 36 aa, Artificial Sequence
  GFR-binding peptide
  MOD_RES (2), (4), (36): Xaa is C or S
HXGXAKVVMNRYKKLIVNNSSDFYLVSIANLKTPAX

SEQ ID NO: 5887 - protein, 42 aa, Artificial Sequence
  GFR-binding peptide
  MOD_RES (2), (36): Xaa is C or S
  MOD_RES (14), (15), (16), (17), (18): Xaa is A or G
  MOD_RES (19), (20), (21), (22): Xaa is A or G or is absent
GXSRVVMNYHYKLXXXXXXXXXKYLVSIPSLKTPAXTPKTVH

SEQ ID NO: 5888 - protein, 39 aa, Artificial Sequence
  GFR-binding peptide
  MOD_RES (1), (34), (35): Xaa is C or S
  MOD_RES (12), (13), (14), (15), (16): Xaa is A or G
  MOD_RES (17), (18), (19), (20): Xaa is A or G or is absent
XSKVIMQYNKLXXXXXXXXXLYLISIASLDQSVXXPSAS

SEQ ID NO: 5889 - protein, 38 aa, Artificial Sequence
  GFR-binding peptide
  MOD_RES (1), (3): Xaa is C or S
  MOD_RES (16), (17), (18), (19), (20): Xaa is A or G
  MOD_RES (21), (22), (23), (24): Xaa is A or G or is absent
XKXALHDELTYHYKLXXXXXXXXXKYLVSIPSLQVQTP

SEQ ID NO: 5890 - protein, 38 aa, Artificial Sequence
  GFR-binding peptide
  MOD_RES (1), (3), (35), (36): Xaa is C or S
XGXAKVVMNQYNKLIVNNSSDLYLVSIASLKTPAXXAK

SEQ ID NO: 5891 - protein, 35 aa, Artificial Sequence
  GFR-binding peptide
  MOD_RES (1), (35): Xaa is C or S
  MOD_RES (13), (14), (15), (16), (17): Xaa is A or G
  MOD_RES (18), (19), (20), (21): Xaa is A or G or is absent
XAKVVMNQYNKLXXXXXXXXXLYLVSIASLKTPAX

SEQ ID NO: 5892 - protein, 37 aa, Artificial Sequence
  GFR-binding peptide
  MOD_RES (2), (33), (34): Xaa is C or S
KXSKVIMRHKRLIKPTKGIYYLISTASLDQSVXXPSA

SEQ ID NO: 5893 - protein, 33 aa, Artificial Sequence
  GFR-binding peptide
  MOD_RES (1), (32), (33): Xaa is C or S
XSKVIMRHKRLIKPTKGIYYLISTASLDQSVXX

SEQ ID NO: 5894 - protein, 33 aa, Artificial Sequence
  GFR-binding peptide
  MOD_RES (1), (1): Xaa is C or S
  MOD_RES (12), (13), (14), (15), (16): Xaa is A or G
  MOD_RES (17), (18), (19), (20): Xaa is A or G or is absent
XSRVIMQYNKLXXXXXXXXXLYLISIASLAQPV

SEQ ID NO: 5895 - protein, 44 aa, Artificial Sequence
  GFR-binding peptide
  MOD_RES (2), (4), (38), (39): Xaa is C or S
  MOD_RES (16), (17), (18), (19), (20): Xaa is A or G
  MOD_RES (21), (22), (23), (24): Xaa is A or G or is absent
RXGXGEVVMDYHYKLXXXXXXXXXKYLMSIPSLETPVXXAKPIK

SEQ ID NO: 5896 - protein, 38 aa, Artificial Sequence
  GFR-binding peptide
  MOD_RES (2), (4), (38): Xaa is C or S
  MOD_RES (16), (17), (18), (19), (20): Xaa is A or G
  MOD_RES (21), (22), (23), (24): Xaa is A or G or is absent
HXGXSRVVMNRHKRLXXXXXXXXXYYLVSTASLKTPAX

SEQ ID NO: 5897 - protein, 34 aa, Artificial Sequence
  GFR-binding peptide
  MOD_RES (2), (2): Xaa is C or S
  MOD_RES (13), (14), (15), (16), (17): Xaa is A or G
  MOD_RES (18), (19), (20), (21): Xaa is A or G or is absent
KXSKVVMYHYKLXXXXXXXXXKYLISIPSLDQPV

SEQ ID NO: 5898 - protein, 31 aa, Artificial Sequence
  GFR-binding peptide
GEVVMDYHYKLVVKENEDKYLMSIPSLETPV

SEQ ID NO: 5899 - protein, 36 aa, Artificial Sequence
  GFR-binding peptide
  MOD_RES (1), (3): Xaa is C or S
  MOD_RES (15), (16), (17), (18), (19): Xaa is A or G
  MOD_RES (20), (21), (22), (23): Xaa is A or G or is absent
XGXGEVVMEQYNKLXXXXXXXXXLYLMSIASLETPV

SEQ ID NO: 5900 - protein, 40 aa, Artificial Sequence
  GFR-binding peptide
  MOD_RES (2), (37), (38): Xaa is C or S
  MOD_RES (15), (16), (17), (18), (19): Xaa is A or G
  MOD_RES (20), (21), (22), (23): Xaa is A or G or is absent
GXEAVSMGEYHYKLXXXXXXXXXKYLVSIPSLKTPVXXAK

SEQ ID NO: 5901 - protein, 42 aa, Artificial Sequence
  GFR-binding peptide
  MOD_RES (2), (4), (38), (39): Xaa is C or S
  MOD_RES (16), (17), (18), (19), (20): Xaa is A or G
  MOD_RES (21), (22), (23), (24): Xaa is A or G or is absent
HXGXARVVMNRYKKLXXXXXXXXXFYLVSIANLQTPAXXPKP

SEQ ID NO: 5902 - protein, 32 aa, Artificial Sequence
  GFR-binding peptide
  MOD_RES (2), (2): Xaa is C or S
KXSKVVMQYNKLVKPTRGVLYLISIASLDQPV

SEQ ID NO: 5903 - protein, 39 aa, Artificial Sequence
  GFR-binding peptide
  MOD_RES (2), (4), (37), (38): Xaa is C or S
  MOD_RES (15), (16), (17), (18), (19): Xaa is A or G
  MOD_RES (20), (21), (22), (23): Xaa is A or G or is absent
SXKXSKVIMRHKRLXXXXXXXXXYYLISTASLDQSVXXP

SEQ ID NO: 5904 - protein, 39 aa, Artificial Sequence
  GFR-binding peptide
  MOD_RES (2), (4), (37), (38): Xaa is C or S
  MOD_RES (15), (16), (17), (18), (19): Xaa is A or G
  MOD_RES (20), (21), (22), (23): Xaa is A or G or is absent
SXKXSRVIMRYKKLXXXXXXXXXFYLISIANLAQPVXXP

SEQ ID NO: 5905 - protein, 38 aa, Artificial Sequence
  GFR-binding peptide
  MOD_RES (1), (35), (36): Xaa is C or S
  MOD_RES (13), (14), (15), (16), (17): Xaa is A or G
  MOD_RES (18), (19), (20), (21): Xaa is A or G or is absent
XGEVVMEQYNKLXXXXXXXXXLYLMSIASLETPVXXAK

SEQ ID NO: 5906 - protein, 33 aa, Artificial Sequence
  GFR-binding peptide
  MOD_RES (1), (1): Xaa is C or S
  MOD_RES (12), (13), (14), (15), (16): Xaa is A or G
  MOD_RES (17), (18), (19), (20): Xaa is A or G or is absent
XSRVIMRHKRLXXXXXXXXXYYLISTASLAQPV

SEQ ID NO: 5907 - protein, 39 aa, Artificial Sequence
  GFR-binding peptide
  MOD_RES (2), (4), (36), (37): Xaa is C or S
HXGXARVVMNRYKKLIVNSSDDFYLVSIANLQTPAXXPK

SEQ ID NO: 5908 - protein, 36 aa, Artificial Sequence
  GFR-binding peptide
  MOD_RES (2), (33), (34): Xaa is C or S
KXSRVIMYHYKLVKPKRGVKYLISIPSLAQPVXXPA

SEQ ID NO: 5909 - protein, 38 aa, Artificial Sequence
  GFR-binding peptide
  MOD_RES (2), (36): Xaa is C or S
  MOD_RES (14), (15), (16), (17), (18): Xaa is A or G
  MOD_RES (19), (20), (21), (22): Xaa is A or G or is absent
GXSRVVMNQYNKLXXXXXXXXXLYLVSIASLKTPAXTP

SEQ ID NO: 5910 - protein, 42 aa, Artificial Sequence
  GFR-binding peptide
  MOD_RES (2), (4), (41): Xaa is C or S
EXKXALHDELTRYKKLFIPKKRVIEFYLVSIANLQVQTPRXQ

SEQ ID NO: 5911 - protein, 39 aa, Artificial Sequence
  GFR-binding peptide
  MOD_RES (2), (4), (35), (36): Xaa is C or S
SXKXSKVVMRHKRLVKPTRGVYYLISTASLDQPVXXPSA

SEQ ID NO: 5912 - protein, 40 aa, Artificial Sequence
  GFR-binding peptide
  MOD_RES (2), (4), (38), (39): Xaa is C or S
  MOD_RES (16), (17), (18), (19), (20): Xaa is A or G
  MOD_RES (21), (22), (23), (24): Xaa is A or G or is absent
HXGXARVVMNRYKKLXXXXXXXXXFYLVSIANLQTPAXXP

SEQ ID NO: 5913 - protein, 36 aa, Artificial Sequence
  GFR-binding peptide
  MOD_RES (34), (35): Xaa is C or S
  MOD_RES (12), (13), (14), (15), (16): Xaa is A or G
  MOD_RES (17), (18), (19), (20): Xaa is A or G or is absent
ARVVMNYHYKLXXXXXXXXXKYLVSIPSLQTPAXXP

SEQ ID NO: 5914 - protein, 30 aa, Artificial Sequence
  GFR-binding peptide
EVVMDYHYKLVVKENEDKYLMSIPSLETPV

SEQ ID NO: 5915 - protein, 39 aa, Artificial Sequence
  GFR-binding peptide
  MOD_RES (2), (4): Xaa is C or S
  MOD_RES (17), (18), (19), (20), (21): Xaa is A or G
  MOD_RES (22), (23), (24), (25): Xaa is A or G or is absent
EXKXALHDELTQYNKLXXXXXXXXXLYLVSIASLQVQTP

SEQ ID NO: 5916 - protein, 38 aa, Artificial Sequence
  GFR-binding peptide
  MOD_RES (32), (33): Xaa is C or S
GEVVMERYKKLVVKDYEDFYLMSIANLETPVXXAKPIS

SEQ ID NO: 5917 - protein, 39 aa, Artificial Sequence
  GFR-binding peptide
  MOD_RES (34), (35): Xaa is C or S
  MOD_RES (12), (13), (14), (15), (16): Xaa is A or G
  MOD_RES (17), (18), (19), (20): Xaa is A or G or is absent
SRVVMNRYKKLXXXXXXXXXFYLVSIANLKTPAXXPKPV

SEQ ID NO: 5918 - protein, 40 aa, Artificial Sequence
  GFR-binding peptide
  MOD_RES (2), (4), (35), (36): Xaa is C or S
SXKXSKVIMRYKKLIKPTKGIFYLISIANLDQSVXXPSAS

SEQ ID NO: 5919 - protein, 37 aa, Artificial Sequence
  GFR-binding peptide
  MOD_RES (2), (34): Xaa is C or S
GXSRVVMNQYNKLIVNSSDDLYLVSIASLKTPAXTPK

SEQ ID NO: 5920 - protein, 41 aa, Artificial Sequence
  GFR-binding peptide
  MOD_RES (2), (39): Xaa is C or S
KXALHDELTYHYKLFIPKKRVIEKYLVSIPSLQVQTPRXQV

SEQ ID NO: 5921 - protein, 40 aa, Artificial Sequence
  GFR-binding peptide
  MOD_RES (2), (36), (37): Xaa is C or S
  MOD_RES (14), (15), (16), (17), (18): Xaa is A or G
  MOD_RES (19), (20), (21), (22): Xaa is A or G or is absent
GXSRVVMNRYKKLXXXXXXXXXFYLVSIANLKTPAXXPKP

SEQ ID NO: 5922 - protein, 36 aa, Artificial Sequence
  GFR-binding peptide
  MOD_RES (1), (3), (36): Xaa is C or S
  MOD_RES (14), (15), (16), (17), (18): Xaa is A or G
  MOD_RES (19), (20), (21), (22): Xaa is A or G or is absent
XKXSKVVMRHKRLXXXXXXXXXYYLISTASLDQPVX

SEQ ID NO: 5923 - protein, 39 aa, Artificial Sequence
  GFR-binding peptide
  MOD_RES (1), (38): Xaa is C or S
XALHDELTQYNKLFIPKKRVIELYLVSIASLQVQTPRXQ

SEQ ID NO: 5924 - protein, 33 aa, Artificial Sequence
  GFR-binding peptide
  MOD_RES (31), (31): Xaa is C or S
RVVMNRHKRLIVNSSDDYYLVSTASLKTPAXTP

SEQ ID NO: 5925 - protein, 34 aa, Artificial Sequence
  GFR-binding peptide
  MOD_RES (2), (34): Xaa is C or S
GXGEVVMDYHYKLVVKENEDKYLMSIPSLETPVX

SEQ ID NO: 5926 - protein, 39 aa, Artificial Sequence
  GFR-binding peptide
  MOD_RES (2), (33), (34): Xaa is C or S
KXSKVIMRYKKLIKPTKGIFYLISIANLDQSVXXPSASA

SEQ ID NO: 5927 - protein, 38 aa, Artificial Sequence
  GFR-binding peptide
  MOD_RES (2), (4): Xaa is C or S
  MOD_RES (17), (18), (19), (20), (21): Xaa is A or G
  MOD_RES (22), (23), (24), (25): Xaa is A or G or is absent
EXKXALHDELTRHKRLXXXXXXXXXYYLVSTASLQVQT

SEQ ID NO: 5928 - protein, 37 aa, Artificial Sequence
  GFR-binding peptide
  MOD_RES (1), (3), (36), (37): Xaa is C or S
XGXEAVSMGERYKKLTPVGMDDFYLVSIANLKTPVXX

SEQ ID NO: 5929 - protein, 41 aa, Artificial Sequence
  GFR-binding peptide
  MOD_RES (2), (4), (37), (38): Xaa is C or S
  MOD_RES (15), (16), (17), (18), (19): Xaa is A or G
  MOD_RES (20), (21), (22), (23): Xaa is A or G or is absent
SXKXSKVVMQYNKLXXXXXXXXXLYLISIASLDQPVXXPSA

SEQ ID NO: 5930 - protein, 34 aa, Artificial Sequence
  GFR-binding peptide
  MOD_RES (1), (1): Xaa is C or S
  MOD_RES (13), (14), (15), (16), (17): Xaa is A or G
  MOD_RES (18), (19), (20), (21): Xaa is A or G or is absent
XGEVVMERHKRLXXXXXXXXXYYLMSTASLETPV

SEQ ID NO: 5931 - protein, 37 aa, Artificial Sequence
  GFR-binding peptide
  MOD_RES (2), (37): Xaa is C or S
  MOD_RES (15), (16), (17), (18), (19): Xaa is A or G
  MOD_RES (20), (21), (22), (23): Xaa is A or G or is absent
GXEAVSMGEYHYKLXXXXXXXXXKYLVSIPSLKTPVX

SEQ ID NO: 5932 - protein, 41 aa, Artificial Sequence
  GFR-binding peptide
  MOD_RES (2), (4), (36), (37): Xaa is C or S
HXGXARVVMNRYKKLIVNSSDDFYLVSIANLQTPAXXPKPV

SEQ ID NO: 5933 - protein, 39 aa, Artificial Sequence
  GFR-binding peptide
  MOD_RES (37), (37): Xaa is C or S
  MOD_RES (13), (14), (15), (16), (17): Xaa is A or G
  MOD_RES (18), (19), (20), (21): Xaa is A or G or is absent
ALHDELTRHKRLXXXXXXXXXYYLVSTASLQVQTPRXQV

SEQ ID NO: 5934 - protein, 40 aa, Artificial Sequence
  GFR-binding peptide
  MOD_RES (1), (34), (35): Xaa is C or S
XEAVSMGERYKKLTPVGMDDFYLVSIANLKTPVXXAKGVK

SEQ ID NO: 5935 - protein, 40 aa, Artificial Sequence
  GFR-binding peptide
  MOD_RES (1), (38): Xaa is C or S
XALHDELTRYKKLFIPKKRVIEFYLVSIANLQVQTPRXQV

SEQ ID NO: 5936 - protein, 37 aa, Artificial Sequence
  GFR-binding peptide
  MOD_RES (1), (36), (37): Xaa is C or S
  MOD_RES (14), (15), (16), (17), (18): Xaa is A or G
  MOD_RES (19), (20), (21), (22): Xaa is A or G or is absent
XEAVSMGERYKKLXXXXXXXXXFYLVSIANLKTPVXX

SEQ ID NO: 5937 - protein, 32 aa, Artificial Sequence
  GFR-binding peptide
  MOD_RES (32), (32): Xaa is C or S
AKVVMNRYKKLIVNNSSDFYLVSIANLKTPAX

SEQ ID NO: 5938 - protein, 39 aa, Artificial Sequence
  GFR-binding peptide
  MOD_RES (33), (34): Xaa is C or S
  MOD_RES (11), (12), (13), (14), (15): Xaa is A or G
  MOD_RES (16), (17), (18), (19): Xaa is A or G or is absent
EVVMEYHYKLXXXXXXXXXKYLMSIPSLETPVXXAKPIS

SEQ ID NO: 5939 - protein, 38 aa, Artificial Sequence
  GFR-binding peptide
  MOD_RES (37), (37): Xaa is C or S
ALHDELTYHYKLFIPKKRVIEKYLVSIPSLQVQTPRXQ

SEQ ID NO: 5940 - protein, 34 aa, Artificial Sequence
  GFR-binding peptide
  MOD_RES (1), (3), (34): Xaa is C or S
XKXSRVIMRYKKLVKPKRGVFYLISIANLAQPVX

SEQ ID NO: 5941 - protein, 33 aa, Artificial Sequence
  GFR-binding peptide
  MOD_RES (12), (13), (14), (15), (16): Xaa is A or G
  MOD_RES (17), (18), (19), (20): Xaa is A or G or is absent
GEVVMEQYNKLXXXXXXXXXLYLMSIASLETPV

SEQ ID NO: 5942 - protein, 40 aa, Artificial Sequence
  GFR-binding peptide
  MOD_RES (36), (36): Xaa is C or S
LHDELTRYKKLFIPKKRVIEFYLVSIANLQVQTPRXQVNR

SEQ ID NO: 5943 - protein, 40 aa, Artificial Sequence
  GFR-binding peptide
  MOD_RES (2), (35), (36): Xaa is C or S
  MOD_RES (13), (14), (15), (16), (17): Xaa is A or G
  MOD_RES (18), (19), (20), (21): Xaa is A or G or is absent
KXSRVIMRYKKLXXXXXXXXXFYLISIANLAQPVXXPAAS

SEQ ID NO: 5944 - protein, 32 aa, Artificial Sequence
  GFR-binding peptide
  MOD_RES (31), (31): Xaa is C or S
RVVMNRHKRLIVNSSDDYYLVSTASLKTPAXT

SEQ ID NO: 5945 - protein, 37 aa, Artificial Sequence
  GFR-binding peptide
  MOD_RES (2), (34), (35): Xaa is C or S
GXAKVVMNRHKRLIVNNSSDYYLVSTASLKTPAXXAK

SEQ ID NO: 5946 - protein, 36 aa, Artificial Sequence
  GFR-binding peptide
  MOD_RES (2), (4), (36): Xaa is C or S
HXGXAKVVMNYHYKLIVNNSSDKYLVSIPSLKTPAX

SEQ ID NO: 5947 - protein, 32 aa, Artificial Sequence
  GFR-binding peptide
  MOD_RES (1), (1): Xaa is C or S
XAKVVMNRHKRLIVNNSSDYYLVSTASLKTPA

SEQ ID NO: 5948 - protein, 35 aa, Artificial Sequence
  GFR-binding peptide
  MOD_RES (2), (34): Xaa is C or S
GXSRVVMNRYKKLIVNSSDDFYLVSIANLKTPAXT

SEQ ID NO: 5949 - protein, 41 aa, Artificial Sequence
  GFR-binding peptide
  MOD_RES (1), (3), (38), (39): Xaa is C or S
  MOD_RES (16), (17), (18), (19), (20): Xaa is A or G
  MOD_RES (21), (22), (23), (24): Xaa is A or G or is absent
XGXEAVSMGEQYNKLXXXXXXXXXLYLVSIASLKTPVXXAK

SEQ ID NO: 5950 - protein, 37 aa, Artificial Sequence
  GFR-binding peptide
  MOD_RES (2), (34), (35): Xaa is C or S
GXGEVVMERHKRLVVKDYEDYYLMSTASLETPVXXAK

SEQ ID NO: 5951 - protein, 36 aa, Artificial Sequence
  GFR-binding peptide
  MOD_RES (1), (32), (33): Xaa is C or S
XSKVVMRHKRLVKPTRGVYYLISTASLDQPVXXPSA

SEQ ID NO: 5952 - protein, 37 aa, Artificial Sequence
  GFR-binding peptide
  MOD_RES (1), (35), (36): Xaa is C or S
  MOD_RES (13), (14), (15), (16), (17): Xaa is A or G
  MOD_RES (18), (19), (20), (21): Xaa is A or G or is absent
XGEVVMDYHYKLXXXXXXXXXKYLMSIPSLETPVXXA

SEQ ID NO: 5953 - protein, 36 aa, Artificial Sequence
  GFR-binding peptide
  MOD_RES (2), (36): Xaa is C or S
  MOD_RES (14), (15), (16), (17), (18): Xaa is A or G
  MOD_RES (19), (20), (21), (22): Xaa is A or G or is absent
GXGEVVMDYHYKLXXXXXXXXXKYLMSIPSLETPVX

SEQ ID NO: 5954 - protein, 33 aa, Artificial Sequence
  GFR-binding peptide
  MOD_RES (12), (13), (14), (15), (16): Xaa is A or G
  MOD_RES (17), (18), (19), (20): Xaa is A or G or is absent
GEVVMDYHYKLXXXXXXXXXKYLMSIPSLETPV

SEQ ID NO: 5955 - protein, 37 aa, Artificial Sequence
  GFR-binding peptide
  MOD_RES (33), (34): Xaa is C or S
EAVSMGEYHYKLTPVGMDDKYLVSIPSLKTPVXXAKG

SEQ ID NO: 5956 - protein, 36 aa, Artificial Sequence
  GFR-binding peptide
  MOD_RES (2), (4): Xaa is C or S
  MOD_RES (15), (16), (17), (18), (19): Xaa is A or G
  MOD_RES (20), (21), (22), (23): Xaa is A or G or is absent
SXKXSKVVMQYNKLXXXXXXXXXLYLISIASLDQPV

SEQ ID NO: 5957 - protein, 33 aa, Artificial Sequence
  GFR-binding peptide
  MOD_RES (33), (33): Xaa is C or S
  MOD_RES (11), (12), (13), (14), (15): Xaa is A or G
  MOD_RES (16), (17), (18), (19): Xaa is A or G or is absent
SKVIMRYKKLXXXXXXXXXFYLISIANLDQSVX

SEQ ID NO: 5958 - protein, 42 aa, Artificial Sequence
  GFR-binding peptide
  MOD_RES (2), (4), (37), (38): Xaa is C or S
RXGXEAVSMGERHKRLTPVGMDDYYLVSTASLKTPVXXAKGV

SEQ ID NO: 5959 - protein, 40 aa, Artificial Sequence
  GFR-binding peptide
  MOD_RES (2), (39): Xaa is C or S
KXALHDELTQYNKLFIPKKRVIELYLVSIASLQVQTPRXQ

SEQ ID NO: 5960 - protein, 38 aa, Artificial Sequence
  GFR-binding peptide
  MOD_RES (36), (36): Xaa is C or S
LHDELTRYKKLFIPKKRVIEFYLVSIANLQVQTPRXQV

SEQ ID NO: 5961 - protein, 36 aa, Artificial Sequence
  GFR-binding peptide
  MOD_RES (32), (32): Xaa is C or S
SRVVMNRYKKLIVNSSDDFYLVSIANLKTPAXTPKT

SEQ ID NO: 5962 - protein, 41 aa, Artificial Sequence
  GFR-binding peptide
  MOD_RES (2), (4), (38), (39): Xaa is C or S
  MOD_RES (16), (17), (18), (19), (20): Xaa is A or G
  MOD_RES (21), (22), (23), (24): Xaa is A or G or is absent
HXGXARVVMNQYNKLXXXXXXXXXLYLVSIASLQTPAXXPK

SEQ ID NO: 5963 - protein, 38 aa, Artificial Sequence
  GFR-binding peptide
  MOD_RES (1), (3), (35): Xaa is C or S
XGXSRVVMNRYKKLIVNSSDDFYLVSIANLKTPAXTPK

SEQ ID NO: 5964 - protein, 38 aa, Artificial Sequence
  GFR-binding peptide
  MOD_RES (2), (34), (35): Xaa is C or S
GXGEVVMDRYKKLVVKENEDFYLMSIANLETPVXXAKP

SEQ ID NO: 5965 - protein, 38 aa, Artificial Sequence
  GFR-binding peptide
  MOD_RES (1), (34), (35): Xaa is C or S
  MOD_RES (12), (13), (14), (15), (16): Xaa is A or G
  MOD_RES (17), (18), (19), (20): Xaa is A or G or is absent
XSKVVMYHYKLXXXXXXXXXKYLISIPSLDQPVXXPSA

SEQ ID NO: 5966 - protein, 34 aa, Artificial Sequence
  GFR-binding peptide
  MOD_RES (31), (32): Xaa is C or S
KVVMNRYKKLIVNNSSDFYLVSIANLKTPAXXAK

SEQ ID NO: 5967 - protein, 41 aa, Artificial Sequence
  GFR-binding peptide
  MOD_RES (1), (35), (36): Xaa is C or S
  MOD_RES (13), (14), (15), (16), (17): Xaa is A or G
  MOD_RES (18), (19), (20), (21): Xaa is A or G or is absent
XGEVVMDRYKKLXXXXXXXXXFYLMSIANLETPVXXAKPIK

SEQ ID NO: 5968 - protein, 37 aa, Artificial Sequence
  GFR-binding peptide
  MOD_RES (33), (34): Xaa is C or S
  MOD_RES (11), (12), (13), (14), (15): Xaa is A or G
  MOD_RES (16), (17), (18), (19): Xaa is A or G or is absent
RVVMNRYKKLXXXXXXXXXFYLVSIANLQTPAXXPKP

SEQ ID NO: 5969 - protein, 34 aa, Artificial Sequence
  GFR-binding peptide
  MOD_RES (2), (34): Xaa is C or S
GXGEVVMEQYNKLVVKDYEDLYLMSIASLETPVX

SEQ ID NO: 5970 - protein, 40 aa, Artificial Sequence
  GFR-binding peptide
  MOD_RES (1), (34), (35): Xaa is C or S
  MOD_RES (12), (13), (14), (15), (16): Xaa is A or G
  MOD_RES (17), (18), (19), (20): Xaa is A or G or is absent
XSKVVMRHKRLXXXXXXXXXYYLISTASLDQPVXXPSASA

SEQ ID NO: 5971 - protein, 38 aa, Artificial Sequence
  GFR-binding peptide
  MOD_RES (32), (33): Xaa is C or S
AKVVMNYHYKLIVNNSSDKYLVSIPSLKTPAXXAKPVA

SEQ ID NO: 5972 - protein, 32 aa, Artificial Sequence
  GFR-binding peptide
  MOD_RES (2), (2): Xaa is C or S
KXSKVIMYHYKLIKPTKGIKYLISIPSLDQSV

SEQ ID NO: 5973 - protein, 39 aa, Artificial Sequence
  GFR-binding peptide
  MOD_RES (1), (34), (35): Xaa is C or S
XEAVSMGERYKKLTPVGMDDFYLVSIANLKTPVXXAKGV

SEQ ID NO: 5974 - protein, 35 aa, Artificial Sequence
  GFR-binding peptide
  MOD_RES (2), (34), (35): Xaa is C or S
GXSRVVMNQYNKLIVNSSDDLYLVSIASLKTPAXX

SEQ ID NO: 5975 - protein, 34 aa, Artificial Sequence
  GFR-binding peptide
  MOD_RES (1), (3): Xaa is C or S
XGXGEVVMDRHKRLVVKENEDYYLMSTASLETPV

SEQ ID NO: 5976 - protein, 30 aa, Artificial Sequence
  GFR-binding peptide
SRVIMYHYKLVKPKRGVKYLISIPSLAQPV

SEQ ID NO: 5977 - protein, 39 aa, Artificial Sequence
  GFR-binding peptide
  MOD_RES (2), (4), (38), (39): Xaa is C or S
  MOD_RES (16), (17), (18), (19), (20): Xaa is A or G
  MOD_RES (21), (22), (23), (24): Xaa is A or G or is absent
HXGXAKVVMNRHKRLXXXXXXXXXYYLVSTASLKTPAXX

SEQ ID NO: 5978 - protein, 37 aa, Artificial Sequence
  GFR-binding peptide
  MOD_RES (1), (3), (35), (36): Xaa is C or S
XGXGEVVMDYHYKLVVKENEDKYLMSIPSLETPVXXA

SEQ ID NO: 5979 - protein, 36 aa, Artificial Sequence
  GFR-binding peptide
  MOD_RES (1), (3), (36): Xaa is C or S
  MOD_RES (14), (15), (16), (17), (18): Xaa is A or G
  MOD_RES (19), (20), (21), (22): Xaa is A or G or is absent
XKXSKVVMQYNKLXXXXXXXXXLYLISIASLDQPVX

SEQ ID NO: 5980 - protein, 36 aa, Artificial Sequence
  GFR-binding peptide
  MOD_RES (2), (36): Xaa is C or S
  MOD_RES (14), (15), (16), (17), (18): Xaa is A or G
  MOD_RES (19), (20), (21), (22): Xaa is A or G or is absent
GXARVVMNYHYKLXXXXXXXXXKYLVSIPSLQTPAX

SEQ ID NO: 5981 - protein, 40 aa, Artificial Sequence
  GFR-binding peptide
  MOD_RES (1), (35), (36): Xaa is C or S
  MOD_RES (13), (14), (15), (16), (17): Xaa is A or G
  MOD_RES (18), (19), (20), (21): Xaa is A or G or is absent
XAKVVMNRYKKLXXXXXXXXXFYLVSIANLKTPAXXAKPV

SEQ ID NO: 5982 - protein, 40 aa, Artificial Sequence
  GFR-binding peptide
  MOD_RES (1), (35): Xaa is C or S
  MOD_RES (13), (14), (15), (16), (17): Xaa is A or G
  MOD_RES (18), (19), (20), (21): Xaa is A or G or is absent
XSRVVMNRYKKLXXXXXXXXXFYLVSIANLKTPAXTPKTV

SEQ ID NO: 5983 - protein, 32 aa, Artificial Sequence
  GFR-binding peptide
  MOD_RES (11), (12), (13), (14), (15): Xaa is A or G
  MOD_RES (16), (17), (18), (19): Xaa is A or G or is absent
SRVIMRYKKLXXXXXXXXXFYLISIANLAQPV

SEQ ID NO: 5984 - protein, 36 aa, Artificial Sequence
  GFR-binding peptide
  MOD_RES (31), (31): Xaa is C or S
RVVMNQYNKLIVNSSDDLYLVSIASLKTPAXTPKTV

SEQ ID NO: 5985 - protein, 39 aa, Artificial Sequence
  GFR-binding peptide
  MOD_RES (37), (37): Xaa is C or S
  MOD_RES (13), (14), (15), (16), (17): Xaa is A or G
  MOD_RES (18), (19), (20), (21): Xaa is A or G or is absent
ALHDELTQYNKLXXXXXXXXXLYLVSIASLQVQTPRXQV

SEQ ID NO: 5986 - protein, 42 aa, Artificial Sequence
  GFR-binding peptide
  MOD_RES (1), (3), (36), (37): Xaa is C or S
  MOD_RES (14), (15), (16), (17), (18): Xaa is A or G
  MOD_RES (19), (20), (21), (22): Xaa is A or G or is absent
XKXSKVIMRYKKLXXXXXXXXXFYLISIANLDQSVXXPSASA

SEQ ID NO: 5987 - protein, 31 aa, Artificial Sequence
  GFR-binding peptide
  MOD_RES (31), (31): Xaa is C or S
KVVMNRHKRLIVNNSSDYYLVSTASLKTPAX

SEQ ID NO: 5988 - protein, 35 aa, Artificial Sequence
  GFR-binding peptide
  MOD_RES (1), (35): Xaa is C or S
  MOD_RES (13), (14), (15), (16), (17): Xaa is A or G
  MOD_RES (18), (19), (20), (21): Xaa is A or G or is absent
XAKVVMNRHKRLXXXXXXXXXYYLVSTASLKTPAX

SEQ ID NO: 5989 - protein, 40 aa, Artificial Sequence
  GFR-binding peptide
  MOD_RES (1), (34), (35): Xaa is C or S
  MOD_RES (12), (13), (14), (15), (16): Xaa is A or G
  MOD_RES (17), (18), (19), (20): Xaa is A or G or is absent
XSKVVMQYNKLXXXXXXXXXLYLISIASLDQPVXXPSASA

SEQ ID NO: 5990 - protein, 40 aa, Artificial Sequence
  GFR-binding peptide
  MOD_RES (36), (36): Xaa is C or S
LHDELTQYNKLFIPKKRVIELYLVSIASLQVQTPRXQVNR

SEQ ID NO: 5991 - protein, 37 aa, Artificial Sequence
  GFR-binding peptide
  MOD_RES (1), (33), (34): Xaa is C or S
XGEVVMDYHYKLVVKENEDKYLMSIPSLETPVXXAKP

SEQ ID NO: 5992 - protein, 35 aa, Artificial Sequence
  GFR-binding peptide
  MOD_RES (31), (32): Xaa is C or S
RVVMNRYKKLIVNSSDDFYLVSIANLQTPAXXPKP

SEQ ID NO: 5993 - protein, 33 aa, Artificial Sequence
  GFR-binding peptide
  MOD_RES (32), (33): Xaa is C or S
GEVVMEYHYKLVVKDYEDKYLMSIPSLETPVXX

SEQ ID NO: 5994 - protein, 39 aa, Artificial Sequence
  GFR-binding peptide
  MOD_RES (1), (3), (35), (36): Xaa is C or S
XGXSRVVMNYHYKLIVNSSDDKYLVSIPSLKTPAXXPKP

SEQ ID NO: 5995 - protein, 40 aa, Artificial Sequence
  GFR-binding peptide
  MOD_RES (2), (36): Xaa is C or S
  MOD_RES (14), (15), (16), (17), (18): Xaa is A or G
  MOD_RES (19), (20), (21), (22): Xaa is A or G or is absent
GXSRVVMNRHKRLXXXXXXXXXYYLVSTASLKTPAXTPKT

SEQ ID NO: 5996 - protein, 35 aa, Artificial Sequence
  GFR-binding peptide
  MOD_RES (33), (34): Xaa is C or S
  MOD_RES (11), (12), (13), (14), (15): Xaa is A or G
  MOD_RES (16), (17), (18), (19): Xaa is A or G or is absent
SKVIMYHYKLXXXXXXXXXKYLISIPSLDQSVXXP

SEQ ID NO: 5997 - protein, 36 aa, Artificial Sequence
  GFR-binding peptide
  MOD_RES (1), (33), (34): Xaa is C or S
XGEVVMDYHYKLVVKENEDKYLMSIPSLETPVXXAK

SEQ ID NO: 5998 - protein, 35 aa, Artificial Sequence
  GFR-binding peptide
  MOD_RES (2), (4): Xaa is C or S
RXGXGEVVMERHKRLVVKDYEDYYLMSTASLETPV

SEQ ID NO: 5999 - protein, 36 aa, Artificial Sequence
  GFR-binding peptide
  MOD_RES (2), (2): Xaa is C or S
  MOD_RES (15), (16), (17), (18), (19): Xaa is A or G
  MOD_RES (20), (21), (22), (23): Xaa is A or G or is absent
KXALHDELTQYNKLXXXXXXXXXLYLVSIASLQVQT

SEQ ID NO: 6000 - protein, 41 aa, Artificial Sequence
  GFR-binding peptide
  MOD_RES (2), (36), (37): Xaa is C or S
  MOD_RES (14), (15), (16), (17), (18): Xaa is A or G
  MOD_RES (19), (20), (21), (22): Xaa is A or G or is absent
GXSRVVMNYHYKLXXXXXXXXXKYLVSIPSLKTPAXXPKPV

SEQ ID NO: 6001 - protein, 35 aa, Artificial Sequence
  GFR-binding peptide
  MOD_RES (31), (32): Xaa is C or S
SKVIMRHKRLIKPTKGIYYLISTASLDQSVXXPSA

SEQ ID NO: 6002 - protein, 39 aa, Artificial Sequence
  GFR-binding peptide
  MOD_RES (2), (34): Xaa is C or S
GXSRVVMNRYKKLIVNSSDDFYLVSIANLKTPAXTPKTV

SEQ ID NO: 6003 - protein, 43 aa, Artificial Sequence
  GFR-binding peptide
  MOD_RES (2), (4), (37), (38): Xaa is C or S
RXGXEAVSMGEQYNKLTPVGMDDLYLVSIASLKTPVXXAKGVK

SEQ ID NO: 6004 - protein, 39 aa, Artificial Sequence
  GFR-binding peptide
  MOD_RES (1), (34), (35): Xaa is C or S
  MOD_RES (12), (13), (14), (15), (16): Xaa is A or G
  MOD_RES (17), (18), (19), (20): Xaa is A or G or is absent
XSKVVMYHYKLXXXXXXXXXKYLISIPSLDQPVXXPSAS

SEQ ID NO: 6005 - protein, 42 aa, Artificial Sequence
  GFR-binding peptide
  MOD_RES (2), (36), (37): Xaa is C or S
  MOD_RES (14), (15), (16), (17), (18): Xaa is A or G
  MOD_RES (19), (20), (21), (22): Xaa is A or G or is absent
GXARVVMNRYKKLXXXXXXXXXFYLVSIANLQTPAXXPKPVT

SEQ ID NO: 6006 - protein, 36 aa, Artificial Sequence
  GFR-binding peptide
  MOD_RES (32), (33): Xaa is C or S
GEVVMERHKRLVVKDYEDYYLMSTASLETPVXXAKP

SEQ ID NO: 6007 - protein, 38 aa, Artificial Sequence
  GFR-binding peptide
  MOD_RES (2), (4), (37), (38): Xaa is C or S
  MOD_RES (15), (16), (17), (18), (19): Xaa is A or G
  MOD_RES (20), (21), (22), (23): Xaa is A or G or is absent
SXKXSKVIMRHKRLXXXXXXXXXYYLISTASLDQSVXX

SEQ ID NO: 6008 - protein, 35 aa, Artificial Sequence
  GFR-binding peptide
  MOD_RES (1), (3), (35): Xaa is C or S
XGXSRVVMNRYKKLIVNSSDDFYLVSIANLKTPAX

SEQ ID NO: 6009 - protein, 35 aa, Artificial Sequence
  GFR-binding peptide
  MOD_RES (1), (35): Xaa is C or S
  MOD_RES (13), (14), (15), (16), (17): Xaa is A or G
  MOD_RES (18), (19), (20), (21): Xaa is A or G or is absent
XARVVMNRHKRLXXXXXXXXXYYLVSTASLQTPAX

SEQ ID NO: 6010 - protein, 36 aa, Artificial Sequence
  GFR-binding peptide
  MOD_RES (2), (34), (35): Xaa is C or S
GXSRVVMNRHKRLIVNSSDDYYLVSTASLKTPAXXP

SEQ ID NO: 6011 - protein, 42 aa, Artificial Sequence
  GFR-binding peptide
  MOD_RES (2), (36), (37): Xaa is C or S
  MOD_RES (14), (15), (16), (17), (18): Xaa is A or G
  MOD_RES (19), (20), (21), (22): Xaa is A or G or is absent
GXGEVVMDRHKRLXXXXXXXXXYYLMSTASLETPVXXAKPIK

SEQ ID NO: 6012 - protein, 37 aa, Artificial Sequence
  GFR-binding peptide
  MOD_RES (34), (35): Xaa is C or S
  MOD_RES (12), (13), (14), (15), (16): Xaa is A or G
  MOD_RES (17), (18), (19), (20): Xaa is A or G or is absent
GEVVMERHKRLXXXXXXXXXYYLMSTASLETPVXXAK

SEQ ID NO: 6013 - protein, 35 aa, Artificial Sequence
  GFR-binding peptide
  MOD_RES (34), (35): Xaa is C or S
  MOD_RES (12), (13), (14), (15), (16): Xaa is A or G
  MOD_RES (17), (18), (19), (20): Xaa is A or G or is absent
AKVVMNRYKKLXXXXXXXXXFYLVSIANLKTPAXX

SEQ ID NO: 6014 - protein, 40 aa, Artificial Sequence
  GFR-binding peptide
  MOD_RES (1), (3), (36), (37): Xaa is C or S
  MOD_RES (14), (15), (16), (17), (18): Xaa is A or G
  MOD_RES (19), (20), (21), (22): Xaa is A or G or is absent
XKXSKVIMRYKKLXXXXXXXXXFYLISIANLDQSVXXPSA

SEQ ID NO: 6015 - protein, 39 aa, Artificial Sequence
  GFR-binding peptide
  MOD_RES (2), (4): Xaa is C or S
EXKXALHDELTRHKRLFIPKKRVIEYYLVSTASLQVQTP

SEQ ID NO: 6016 - protein, 37 aa, Artificial Sequence
  GFR-binding peptide
  MOD_RES (1), (35), (36): Xaa is C or S
  MOD_RES (13), (14), (15), (16), (17): Xaa is A or G
  MOD_RES (18), (19), (20), (21): Xaa is A or G or is absent
XSRVVMNQYNKLXXXXXXXXXLYLVSIASLKTPAXXP

SEQ ID NO: 6017 - protein, 36 aa, Artificial Sequence
  GFR-binding peptide
  MOD_RES (2), (4), (35), (36): Xaa is C or S
SXKXSRVIMYHYKLVKPKRGVKYLISIPSLAQPVXX

SEQ ID NO: 6018 - protein, 39 aa, Artificial Sequence
  GFR-binding peptide
  MOD_RES (1), (35), (36): Xaa is C or S
  MOD_RES (13), (14), (15), (16), (17): Xaa is A or G
  MOD_RES (18), (19), (20), (21): Xaa is A or G or is absent
XARVVMNYHYKLXXXXXXXXXKYLVSIPSLQTPAXXPKP

SEQ ID NO: 6019 - protein, 33 aa, Artificial Sequence
  GFR-binding peptide
  MOD_RES (31), (32): Xaa is C or S
EVVMERHKRLVVKDYEDYYLMSTASLETPVXXA

SEQ ID NO: 6020 - protein, 41 aa, Artificial Sequence
  GFR-binding peptide
  MOD_RES (1), (35), (36): Xaa is C or S
  MOD_RES (13), (14), (15), (16), (17): Xaa is A or G
  MOD_RES (18), (19), (20), (21): Xaa is A or G or is absent
XGEVVMERHKRLXXXXXXXXXYYLMSTASLETPVXXAKPIS

SEQ ID NO: 6021 - protein, 35 aa, Artificial Sequence
  GFR-binding peptide
  MOD_RES (1), (34), (35): Xaa is C or S
  MOD_RES (12), (13), (14), (15), (16): Xaa is A or G
  MOD_RES (17), (18), (19), (20): Xaa is A or G or is absent
XSKVVMRHKRLXXXXXXXXXYYLISTASLDQPVXX

SEQ ID NO: 6022 - protein, 42 aa, Artificial Sequence
  GFR-binding peptide
  MOD_RES (1), (38): Xaa is C or S
XALHDELTQYNKLFIPKKRVIELYLVSIASLQVQTPRXQVNR

SEQ ID NO: 6023 - protein, 34 aa, Artificial Sequence
  GFR-binding peptide
  MOD_RES (1), (33), (34): Xaa is C or S
XAKVVMNRHKRLIVNNSSDYYLVSTASLKTPAXX

SEQ ID NO: 6024 - protein, 42 aa, Artificial Sequence
  GFR-binding peptide
  MOD_RES (2), (4), (37), (38): Xaa is C or S
  MOD_RES (15), (16), (17), (18), (19): Xaa is A or G
  MOD_RES (20), (21), (22), (23): Xaa is A or G or is absent
SXKXSKVVMRHKRLXXXXXXXXXYYLISTASLDQPVXXPSAS

SEQ ID NO: 6025 - protein, 36 aa, Artificial Sequence
  GFR-binding peptide
  MOD_RES (32), (33): Xaa is C or S
AKVVMNYHYKLIVNNSSDKYLVSIPSLKTPAXXAKP

SEQ ID NO: 6026 - protein, 39 aa, Artificial Sequence
  GFR-binding peptide
  MOD_RES (1), (3), (37): Xaa is C or S
  MOD_RES (15), (16), (17), (18), (19): Xaa is A or G
  MOD_RES (20), (21), (22), (23): Xaa is A or G or is absent
XGXSRVVMNYHYKLXXXXXXXXXKYLVSIPSLKTPAXTP

SEQ ID NO: 6027 - protein, 33 aa, Artificial Sequence
  GFR-binding peptide
  MOD_RES (2), (2): Xaa is C or S
GXARVVMNYHYKLIVNSSDDKYLVSIPSLQTPA

SEQ ID NO: 6028 - protein, 32 aa, Artificial Sequence
  GFR-binding peptide
  MOD_RES (1), (32): Xaa is C or S
XSKVIMQYNKLIKPTKGILYLISIASLDQSVX

SEQ ID NO: 6029 - protein, 40 aa, Artificial Sequence
  GFR-binding peptide
  MOD_RES (2), (34), (35): Xaa is C or S
GXGEVVMERHKRLVVKDYEDYYLMSTASLETPVXXAKPIS

SEQ ID NO: 6030 - protein, 40 aa, Artificial Sequence
  GFR-binding peptide
  MOD_RES (2), (34): Xaa is C or S
GXSRVVMNRHKRLIVNSSDDYYLVSTASLKTPAXTPKTVH

SEQ ID NO: 6031 - protein, 34 aa, Artificial Sequence
  GFR-binding peptide
  MOD_RES (34), (34): Xaa is C or S
  MOD_RES (12), (13), (14), (15), (16): Xaa is A or G
  MOD_RES (17), (18), (19), (20): Xaa is A or G or is absent
SRVVMNQYNKLXXXXXXXXXLYLVSIASLKTPAX

SEQ ID NO: 6032 - protein, 43 aa, Artificial Sequence
  GFR-binding peptide
  MOD_RES (1), (3), (37), (38): Xaa is C or S
  MOD_RES (15), (16), (17), (18), (19): Xaa is A or G
  MOD_RES (20), (21), (22), (23): Xaa is A or G or is absent
XGXGEVVMERHKRLXXXXXXXXXYYLMSTASLETPVXXAKPIS

SEQ ID NO: 6033 - protein, 40 aa, Artificial Sequence
  GFR-binding peptide
  MOD_RES (2), (36), (37): Xaa is C or S
  MOD_RES (14), (15), (16), (17), (18): Xaa is A or G
  MOD_RES (19), (20), (21), (22): Xaa is A or G or is absent
GXAKVVMNQYNKLXXXXXXXXXLYLVSIASLKTPAXXAKP

SEQ ID NO: 6034 - protein, 36 aa, Artificial Sequence
  GFR-binding peptide
  MOD_RES (32), (33): Xaa is C or S
SRVVMNQYNKLIVNSSDDLYLVSIASLKTPAXXPKP

SEQ ID NO: 6035 - protein, 34 aa, Artificial Sequence
  GFR-binding peptide
  MOD_RES (32), (33): Xaa is C or S
GEVVMEQYNKLVVKDYEDLYLMSIASLETPVXXA

SEQ ID NO: 6036 - protein, 42 aa, Artificial Sequence
  GFR-binding peptide
  MOD_RES (1), (3), (38), (39): Xaa is C or S
  MOD_RES (16), (17), (18), (19), (20): Xaa is A or G
  MOD_RES (21), (22), (23), (24): Xaa is A or G or is absent
XGXEAVSMGEYHYKLXXXXXXXXXKYLVSIPSLKTPVXXAKG

SEQ ID NO: 6037 - protein, 34 aa, Artificial Sequence
  GFR-binding peptide
  MOD_RES (34), (34): Xaa is C or S
  MOD_RES (12), (13), (14), (15), (16): Xaa is A or G
  MOD_RES (17), (18), (19), (20): Xaa is A or G or is absent
AKVVMNRYKKLXXXXXXXXXFYLVSIANLKTPAX

SEQ ID NO: 6038 - protein, 41 aa, Artificial Sequence
  GFR-binding peptide
  MOD_RES (1), (35): Xaa is C or S
  MOD_RES (13), (14), (15), (16), (17): Xaa is A or G
  MOD_RES (18), (19), (20), (21): Xaa is A or G or is absent
XSRVVMNRYKKLXXXXXXXXXFYLVSIANLKTPAXTPKTVH

SEQ ID NO: 6039 - protein, 37 aa, Artificial Sequence
  GFR-binding peptide
  MOD_RES (2), (4): Xaa is C or S
  MOD_RES (16), (17), (18), (19), (20): Xaa is A or G
  MOD_RES (21), (22), (23), (24): Xaa is A or G or is absent
RXGXGEVVMDYHYKLXXXXXXXXXKYLMSIPSLETPV

SEQ ID NO: 6040 - protein, 39 aa, Artificial Sequence
  GFR-binding peptide
  MOD_RES (1), (3), (37), (38): Xaa is C or S
  MOD_RES (15), (16), (17), (18), (19): Xaa is A or G
  MOD_RES (20), (21), (22), (23): Xaa is A or G or is absent
XGXGEVVMERYKKLXXXXXXXXXFYLMSIANLETPVXXA

SEQ ID NO: 6041 - protein, 41 aa, Artificial Sequence
  GFR-binding peptide
  MOD_RES (2), (4), (36), (37): Xaa is C or S
HXGXAKVVMNYHYKLIVNNSSDKYLVSIPSLKTPAXXAKPV

SEQ ID NO: 6042 - protein, 34 aa, Artificial Sequence
  GFR-binding peptide
  MOD_RES (1), (1): Xaa is C or S
  MOD_RES (13), (14), (15), (16), (17): Xaa is A or G
  MOD_RES (18), (19), (20), (21): Xaa is A or G or is absent
XARVVMNRHKRLXXXXXXXXXYYLVSTASLQTPA

SEQ ID NO: 6043 - protein, 41 aa, Artificial Sequence
  GFR-binding peptide
  MOD_RES (2), (4), (36), (37): Xaa is C or S
HXGXSRVVMNQYNKLIVNSSDDLYLVSIASLKTPAXXPKPV

SEQ ID NO: 6044 - protein, 32 aa, Artificial Sequence
  GFR-binding peptide
  MOD_RES (2), (2): Xaa is C or S
KXSKVIMRYKKLIKPTKGIFYLISIANLDQSV

SEQ ID NO: 6045 - protein, 37 aa, Artificial Sequence
  GFR-binding peptide
  MOD_RES (2), (4), (37): Xaa is C or S
  MOD_RES (15), (16), (17), (18), (19): Xaa is A or G
  MOD_RES (20), (21), (22), (23): Xaa is A or G or is absent
SXKXSKVVMRHKRLXXXXXXXXXYYLISTASLDQPVX

SEQ ID NO: 6046 - protein, 42 aa, Artificial Sequence
  GFR-binding peptide
  MOD_RES (1), (3), (36), (37): Xaa is C or S
  MOD_RES (14), (15), (16), (17), (18): Xaa is A or G
  MOD_RES (19), (20), (21), (22): Xaa is A or G or is absent
XKXSRVIMRYKKLXXXXXXXXXFYLISIANLAQPVXXPAASA

SEQ ID NO: 6047 - protein, 38 aa, Artificial Sequence
  GFR-binding peptide
  MOD_RES (36), (36): Xaa is C or S
LHDELTQYNKLFIPKKRVIELYLVSIASLQVQTPRXQV

SEQ ID NO: 6048 - protein, 41 aa, Artificial Sequence
  GFR-binding peptide
  MOD_RES (1), (3), (37), (38): Xaa is C or S
  MOD_RES (15), (16), (17), (18), (19): Xaa is A or G
  MOD_RES (20), (21), (22), (23): Xaa is A or G or is absent
XGXAKVVMNQYNKLXXXXXXXXXLYLVSIASLKTPAXXAKP

SEQ ID NO: 6049 - protein, 41 aa, Artificial Sequence
  GFR-binding peptide
  MOD_RES (1), (35), (36): Xaa is C or S
  MOD_RES (13), (14), (15), (16), (17): Xaa is A or G
  MOD_RES (18), (19), (20), (21): Xaa is A or G or is absent
XARVVMNRYKKLXXXXXXXXXFYLVSIANLQTPAXXPKPVT

SEQ ID NO: 6050 - protein, 37 aa, Artificial Sequence
  GFR-binding peptide
  MOD_RES (2), (4), (36), (37): Xaa is C or S
HXGXARVVMNQYNKLIVNSSDDLYLVSIASLQTPAXX

SEQ ID NO: 6051 - protein, 39 aa, Artificial Sequence
  GFR-binding peptide
  MOD_RES (35), (35): Xaa is C or S
HDELTRYKKLFIPKKRVIEFYLVSIANLQVQTPRXQVNR

SEQ ID NO: 6052 - protein, 38 aa, Artificial Sequence
  GFR-binding peptide
  MOD_RES (33), (34): Xaa is C or S
  MOD_RES (11), (12), (13), (14), (15): Xaa is A or G
  MOD_RES (16), (17), (18), (19): Xaa is A or G or is absent
EVVMDRHKRLXXXXXXXXXYYLMSTASLETPVXXAKPI

SEQ ID NO: 6053 - protein, 44 aa, Artificial Sequence
  GFR-binding peptide
  MOD_RES (1), (3), (38), (39): Xaa is C or S
  MOD_RES (16), (17), (18), (19), (20): Xaa is A or G
  MOD_RES (21), (22), (23), (24): Xaa is A or G or is absent
XGXEAVSMGEQYNKLXXXXXXXXXLYLVSIASLKTPVXXAKGVK

SEQ ID NO: 6054 - protein, 35 aa, Artificial Sequence
  GFR-binding peptide
  MOD_RES (31), (32): Xaa is C or S
KVVMNYHYKLIVNNSSDKYLVSIPSLKTPAXXAKP

SEQ ID NO: 6055 - protein, 36 aa, Artificial Sequence
  GFR-binding peptide
  MOD_RES (1), (33), (34): Xaa is C or S
XGEVVMDRYKKLVVKENEDFYLMSIANLETPVXXAK

SEQ ID NO: 6056 - protein, 43 aa, Artificial Sequence
  GFR-binding peptide
  MOD_RES (2), (4), (38), (39): Xaa is C or S
  MOD_RES (16), (17), (18), (19), (20): Xaa is A or G
  MOD_RES (21), (22), (23), (24): Xaa is A or G or is absent
HXGXAKVVMNYHYKLXXXXXXXXXKYLVSIPSLKTPAXXAKPV

SEQ ID NO: 6057 - protein, 42 aa, Artificial Sequence
  GFR-binding peptide
  MOD_RES (2), (39): Xaa is C or S
KXALHDELTYHYKLFIPKKRVIEKYLVSIPSLQVQTPRXQVN

SEQ ID NO: 6058 - protein, 37 aa, Artificial Sequence
  GFR-binding peptide
  MOD_RES (1), (35), (36): Xaa is C or S
  MOD_RES (13), (14), (15), (16), (17): Xaa is A or G
  MOD_RES (18), (19), (20), (21): Xaa is A or G or is absent
XSRVVMNYHYKLXXXXXXXXXKYLVSIPSLKTPAXXP

SEQ ID NO: 6059 - protein, 39 aa, Artificial Sequence
  GFR-binding peptide
  MOD_RES (1), (3), (35), (36): Xaa is C or S
XGXAKVVMNQYNKLIVNNSSDLYLVSIASLKTPAXXAKP

SEQ ID NO: 6060 - protein, 35 aa, Artificial Sequence
  GFR-binding peptide
  MOD_RES (2), (33), (34): Xaa is C or S
KXSKVIMYHYKLIKPTKGIKYLISIPSLDQSVXXP

SEQ ID NO: 6061 - protein, 43 aa, Artificial Sequence
  GFR-binding peptide
  MOD_RES (1), (3), (37), (38): Xaa is C or S
  MOD_RES (15), (16), (17), (18), (19): Xaa is A or G
  MOD_RES (20), (21), (22), (23): Xaa is A or G or is absent
XGXARVVMNQYNKLXXXXXXXXXLYLVSIASLQTPAXXPKPVT

SEQ ID NO: 6062 - protein, 37 aa, Artificial Sequence
  GFR-binding peptide
  MOD_RES (2), (35), (36): Xaa is C or S
GXEAVSMGEYHYKLTPVGMDDKYLVSIPSLKTPVXXA

SEQ ID NO: 6063 - protein, 43 aa, Artificial Sequence
  GFR-binding peptide
  MOD_RES (2), (4), (38), (39): Xaa is C or S
  MOD_RES (16), (17), (18), (19), (20): Xaa is A or G
  MOD_RES (21), (22), (23), (24): Xaa is A or G or is absent
HXGXSRVVMNQYNKLXXXXXXXXXLYLVSIASLKTPAXXPKPV

SEQ ID NO: 6064 - protein, 35 aa, Artificial Sequence
  GFR-binding peptide
  MOD_RES (31), (32): Xaa is C or S
KVVMNQYNKLIVNNSSDLYLVSIASLKTPAXXAKP

SEQ ID NO: 6065 - protein, 40 aa, Artificial Sequence
  GFR-binding peptide
  MOD_RES (1), (38): Xaa is C or S
  MOD_RES (14), (15), (16), (17), (18): Xaa is A or G
  MOD_RES (19), (20), (21), (22): Xaa is A or G or is absent
XALHDELTRHKRLXXXXXXXXXYYLVSTASLQVQTPRXQV

SEQ ID NO: 6066 - protein, 38 aa, Artificial Sequence
  GFR-binding peptide
  MOD_RES (1), (3), (35), (36): Xaa is C or S
XGXARVVMNYHYKLIVNSSDDKYLVSIPSLQTPAXXPK

SEQ ID NO: 6067 - protein, 40 aa, Artificial Sequence
  GFR-binding peptide
  MOD_RES (2), (34), (35): Xaa is C or S
GXARVVMNRHKRLIVNSSDDYYLVSTASLQTPAXXPKPVT

SEQ ID NO: 6068 - protein, 37 aa, Artificial Sequence
  GFR-binding peptide
  MOD_RES (2), (4): Xaa is C or S
  MOD_RES (16), (17), (18), (19), (20): Xaa is A or G
  MOD_RES (21), (22), (23), (24): Xaa is A or G or is absent
HXGXSRVVMNRYKKLXXXXXXXXXFYLVSIANLKTPA

SEQ ID NO: 6069 - protein, 33 aa, Artificial Sequence
  GFR-binding peptide
  MOD_RES (1), (32), (33): Xaa is C or S
XSKVIMYHYKLIKPTKGIKYLISIPSLDQSVXX

SEQ ID NO: 6070 - protein, 31 aa, Artificial Sequence
  GFR-binding peptide
  MOD_RES (31), (31): Xaa is C or S
RVVMNRHKRLIVNSSDDYYLVSTASLQTPAX

SEQ ID NO: 6071 - protein, 39 aa, Artificial Sequence
  GFR-binding peptide
  MOD_RES (2), (4), (37), (38): Xaa is C or S
  MOD_RES (15), (16), (17), (18), (19): Xaa is A or G
  MOD_RES (20), (21), (22), (23): Xaa is A or G or is absent
SXKXSKVVMQYNKLXXXXXXXXXLYLISIASLDQPVXXP

SEQ ID NO: 6072 - protein, 36 aa, Artificial Sequence
  GFR-binding peptide
  MOD_RES (34), (34): Xaa is C or S
  MOD_RES (12), (13), (14), (15), (16): Xaa is A or G
  MOD_RES (17), (18), (19), (20): Xaa is A or G or is absent
SRVVMNRYKKLXXXXXXXXXFYLVSIANLKTPAXTP

SEQ ID NO: 6073 - protein, 36 aa, Artificial Sequence
  GFR-binding peptide
  MOD_RES (2), (36): Xaa is C or S
  MOD_RES (14), (15), (16), (17), (18): Xaa is A or G
  MOD_RES (19), (20), (21), (22): Xaa is A or G or is absent
GXAKVVMNYHYKLXXXXXXXXXKYLVSIPSLKTPAX

SEQ ID NO: 6074 - protein, 35 aa, Artificial Sequence
  GFR-binding peptide
  MOD_RES (33), (34): Xaa is C or S
  MOD_RES (11), (12), (13), (14), (15): Xaa is A or G
  MOD_RES (16), (17), (18), (19): Xaa is A or G or is absent
SKVIMQYNKLXXXXXXXXXLYLISIASLDQSVXXP

SEQ ID NO: 6075 - protein, 36 aa, Artificial Sequence
  GFR-binding peptide
  MOD_RES (34), (34): Xaa is C or S
  MOD_RES (12), (13), (14), (15), (16): Xaa is A or G
  MOD_RES (17), (18), (19), (20): Xaa is A or G or is absent
SRVVMNQYNKLXXXXXXXXXLYLVSIASLKTPAXTP

SEQ ID NO: 6076 - protein, 39 aa, Artificial Sequence
  GFR-binding peptide
  MOD_RES (33), (34): Xaa is C or S
  MOD_RES (11), (12), (13), (14), (15): Xaa is A or G
  MOD_RES (16), (17), (18), (19): Xaa is A or G or is absent
SKVIMRHKRLXXXXXXXXXYYLISTASLDQSVXXPSASA

SEQ ID NO: 6077 - protein, 36 aa, Artificial Sequence
  GFR-binding peptide
  MOD_RES (1), (3), (35), (36): Xaa is C or S
XGXGEVVMEYHYKLVVKDYEDKYLMSIPSLETPVXX

SEQ ID NO: 6078 - protein, 36 aa, Artificial Sequence
  GFR-binding peptide
  MOD_RES (31), (32): Xaa is C or S
EVVMDRYKKLVVKENEDFYLMSIANLETPVXXAKPI

SEQ ID NO: 6079 - protein, 38 aa, Artificial Sequence
  GFR-binding peptide
  MOD_RES (2), (34), (35): Xaa is C or S
GXARVVMNRYKKLIVNSSDDFYLVSIANLQTPAXXPKP

SEQ ID NO: 6080 - protein, 34 aa, Artificial Sequence
  GFR-binding peptide
  MOD_RES (2), (33), (34): Xaa is C or S
KXSKVVMQYNKLVKPTRGVLYLISIASLDQPVXX

SEQ ID NO: 6081 - protein, 38 aa, Artificial Sequence
  GFR-binding peptide
  MOD_RES (1), (35), (36): Xaa is C or S
  MOD_RES (13), (14), (15), (16), (17): Xaa is A or G
  MOD_RES (18), (19), (20), (21): Xaa is A or G or is absent
XGEVVMEYHYKLXXXXXXXXXKYLMSIPSLETPVXXAK

SEQ ID NO: 6082 - protein, 40 aa, Artificial Sequence
  GFR-binding peptide
  MOD_RES (2), (4), (36): Xaa is C or S
HXGXSRVVMNQYNKLIVNSSDDLYLVSIASLKTPAXTPKT

SEQ ID NO: 6083 - protein, 42 aa, Artificial Sequence
  GFR-binding peptide
  MOD_RES (1), (3), (40): Xaa is C or S
XKXALHDELTRHKRLFIPKKRVIEYYLVSTASLQVQTPRXQV

SEQ ID NO: 6084 - protein, 37 aa, Artificial Sequence
  GFR-binding peptide
  MOD_RES (31), (32): Xaa is C or S
KVVMNQYNKLIVNNSSDLYLVSIASLKTPAXXAKPVA

SEQ ID NO: 6085 - protein, 41 aa, Artificial Sequence
  GFR-binding peptide
  MOD_RES (2), (35), (36): Xaa is C or S
  MOD_RES (13), (14), (15), (16), (17): Xaa is A or G
  MOD_RES (18), (19), (20), (21): Xaa is A or G or is absent
KXSRVIMRYKKLXXXXXXXXXFYLISIANLAQPVXXPAASA

SEQ ID NO: 6086 - protein, 37 aa, Artificial Sequence
  GFR-binding peptide
  MOD_RES (33), (34): Xaa is C or S
  MOD_RES (11), (12), (13), (14), (15): Xaa is A or G
  MOD_RES (16), (17), (18), (19): Xaa is A or G or is absent
SRVIMRYKKLXXXXXXXXXFYLISIANLAQPVXXPAA

SEQ ID NO: 6087 - protein, 35 aa, Artificial Sequence
  GFR-binding peptide
  MOD_RES (1), (34), (35): Xaa is C or S
  MOD_RES (12), (13), (14), (15), (16): Xaa is A or G
  MOD_RES (17), (18), (19), (20): Xaa is A or G or is absent
XSKVVMQYNKLXXXXXXXXXLYLISIASLDQPVXX

SEQ ID NO: 6088 - protein, 42 aa, Artificial Sequence
  GFR-binding peptide
  MOD_RES (1), (3), (36), (37): Xaa is C or S
XGXEAVSMGERYKKLTPVGMDDFYLVSIANLKTPVXXAKGVK

SEQ ID NO: 6089 - protein, 40 aa, Artificial Sequence
  GFR-binding peptide
  MOD_RES (1), (3), (40): Xaa is C or S
  MOD_RES (16), (17), (18), (19), (20): Xaa is A or G
  MOD_RES (21), (22), (23), (24): Xaa is A or G or is absent
XKXALHDELTRYKKLXXXXXXXXXFYLVSIANLQVQTPRX

SEQ ID NO: 6090 - protein, 40 aa, Artificial Sequence
  GFR-binding peptide
  MOD_RES (2), (39): Xaa is C or S
KXALHDELTRHKRLFIPKKRVIEYYLVSTASLQVQTPRXQ

SEQ ID NO: 6091 - protein, 30 aa, Artificial Sequence
  GFR-binding peptide
EVVMDRYKKLVVKENEDFYLMSIANLETPV

SEQ ID NO: 6092 - protein, 40 aa, Artificial Sequence
  GFR-binding peptide
  MOD_RES (34), (35): Xaa is C or S
  MOD_RES (12), (13), (14), (15), (16): Xaa is A or G
  MOD_RES (17), (18), (19), (20): Xaa is A or G or is absent
SRVVMNYHYKLXXXXXXXXXKYLVSIPSLKTPAXXPKPVY

SEQ ID NO: 6093 - protein, 31 aa, Artificial Sequence
  GFR-binding peptide
  MOD_RES (31), (31): Xaa is C or S
RVVMNRYKKLIVNSSDDFYLVSIANLQTPAX

SEQ ID NO: 6094 - protein, 42 aa, Artificial Sequence
  GFR-binding peptide
  MOD_RES (2), (4), (37), (38): Xaa is C or S
RXGXEAVSMGEQYNKLTPVGMDDLYLVSIASLKTPVXXAKGV

SEQ ID NO: 6095 - protein, 34 aa, Artificial Sequence
  GFR-binding peptide
  MOD_RES (13), (14), (15), (16), (17): Xaa is A or G
  MOD_RES (18), (19), (20), (21): Xaa is A or G or is absent
EAVSMGEYHYKLXXXXXXXXXKYLVSIPSLKTPV

SEQ ID NO: 6096 - protein, 44 aa, Artificial Sequence
  GFR-binding peptide
  MOD_RES (2), (4), (38), (39): Xaa is C or S
  MOD_RES (16), (17), (18), (19), (20): Xaa is A or G
  MOD_RES (21), (22), (23), (24): Xaa is A or G or is absent
HXGXAKVVMNRYKKLXXXXXXXXXFYLVSIANLKTPAXXAKPVA

SEQ ID NO: 6097 - protein, 35 aa, Artificial Sequence
  GFR-binding peptide
  MOD_RES (33), (34): Xaa is C or S
  MOD_RES (11), (12), (13), (14), (15): Xaa is A or G
  MOD_RES (16), (17), (18), (19): Xaa is A or G or is absent
SRVIMYHYKLXXXXXXXXXKYLISIPSLAQPVXXP

SEQ ID NO: 6098 - protein, 39 aa, Artificial Sequence
  GFR-binding peptide
  MOD_RES (34), (35): Xaa is C or S
  MOD_RES (12), (13), (14), (15), (16): Xaa is A or G
  MOD_RES (17), (18), (19), (20): Xaa is A or G or is absent
ARVVMNYHYKLXXXXXXXXXKYLVSIPSLQTPAXXPKPV

SEQ ID NO: 6099 - protein, 37 aa, Artificial Sequence
  GFR-binding peptide
  MOD_RES (33), (34): Xaa is C or S
  MOD_RES (11), (12), (13), (14), (15): Xaa is A or G
  MOD_RES (16), (17), (18), (19): Xaa is A or G or is absent
KVVMNRYKKLXXXXXXXXXFYLVSIANLKTPAXXAKP

SEQ ID NO: 6100 - protein, 42 aa, Artificial Sequence
  GFR-binding peptide
  MOD_RES (2), (4), (36), (37): Xaa is C or S
HXGXAKVVMNRHKRLIVNNSSDYYLVSTASLKTPAXXAKPVA

SEQ ID NO: 6101 - protein, 37 aa, Artificial Sequence
  GFR-binding peptide
  MOD_RES (35), (36): Xaa is C or S
  MOD_RES (13), (14), (15), (16), (17): Xaa is A or G
  MOD_RES (18), (19), (20), (21): Xaa is A or G or is absent
EAVSMGERHKRLXXXXXXXXXYYLVSTASLKTPVXXA

SEQ ID NO: 6102 - protein, 38 aa, Artificial Sequence
  GFR-binding peptide
  MOD_RES (1), (36), (37): Xaa is C or S
  MOD_RES (14), (15), (16), (17), (18): Xaa is A or G
  MOD_RES (19), (20), (21), (22): Xaa is A or G or is absent
XEAVSMGERYKKLXXXXXXXXXFYLVSIANLKTPVXXA

SEQ ID NO: 6103 - protein, 40 aa, Artificial Sequence
  GFR-binding peptide
  MOD_RES (1), (3), (36), (37): Xaa is C or S
XGXEAVSMGEYHYKLTPVGMDDKYLVSIPSLKTPVXXAKG

SEQ ID NO: 6104 - protein, 37 aa, Artificial Sequence
  GFR-binding peptide
  MOD_RES (2), (34): Xaa is C or S
GXSRVVMNYHYKLIVNSSDDKYLVSIPSLKTPAXTPK

SEQ ID NO: 6105 - protein, 33 aa, Artificial Sequence
  GFR-binding peptide
  MOD_RES (1), (3): Xaa is C or S
XKXSRVIMRYKKLVKPKRGVFYLISIANLAQPV

SEQ ID NO: 6106 - protein, 39 aa, Artificial Sequence
  GFR-binding peptide
  MOD_RES (34), (35): Xaa is C or S
  MOD_RES (12), (13), (14), (15), (16): Xaa is A or G
  MOD_RES (17), (18), (19), (20): Xaa is A or G or is absent
GEVVMDRHKRLXXXXXXXXXYYLMSTASLETPVXXAKPI

SEQ ID NO: 6107 - protein, 39 aa, Artificial Sequence
  GFR-binding peptide
  MOD_RES (33), (34): Xaa is C or S
  MOD_RES (11), (12), (13), (14), (15): Xaa is A or G
  MOD_RES (16), (17), (18), (19): Xaa is A or G or is absent
EVVMDRYKKLXXXXXXXXXFYLMSIANLETPVXXAKPIK

SEQ ID NO: 6108 - protein, 35 aa, Artificial Sequence
  GFR-binding peptide
  MOD_RES (1), (3), (35): Xaa is C or S
XGXARVVMNRYKKLIVNSSDDFYLVSIANLQTPAX

SEQ ID NO: 6109 - protein, 40 aa, Artificial Sequence
  GFR-binding peptide
  MOD_RES (2), (35), (36): Xaa is C or S
  MOD_RES (13), (14), (15), (16), (17): Xaa is A or G
  MOD_RES (18), (19), (20), (21): Xaa is A or G or is absent
KXSKVIMRYKKLXXXXXXXXXFYLISIANLDQSVXXPSAS

SEQ ID NO: 6110 - protein, 37 aa, Artificial Sequence
  GFR-binding peptide
  MOD_RES (2), (35), (36): Xaa is C or S
GXEAVSMGERHKRLTPVGMDDYYLVSTASLKTPVXXA

SEQ ID NO: 6111 - protein, 40 aa, Artificial Sequence
  GFR-binding peptide
  MOD_RES (2), (4): Xaa is C or S
  MOD_RES (17), (18), (19), (20), (21): Xaa is A or G
  MOD_RES (22), (23), (24), (25): Xaa is A or G or is absent
EXKXALHDELTQYNKLXXXXXXXXXLYLVSIASLQVQTPR

SEQ ID NO: 6112 - protein, 35 aa, Artificial Sequence
  GFR-binding peptide
  MOD_RES (1), (35): Xaa is C or S
  MOD_RES (13), (14), (15), (16), (17): Xaa is A or G
  MOD_RES (18), (19), (20), (21): Xaa is A or G or is absent
XGEVVMERHKRLXXXXXXXXXYYLMSTASLETPVX

SEQ ID NO: 6113 - protein, 35 aa, Artificial Sequence
  GFR-binding peptide
  MOD_RES (31), (32): Xaa is C or S
SKVVMQYNKLVKPTRGVLYLISIASLDQPVXXPSA

SEQ ID NO: 6114 - protein, 35 aa, Artificial Sequence
  GFR-binding peptide
  MOD_RES (33), (34): Xaa is C or S
  MOD_RES (11), (12), (13), (14), (15): Xaa is A or G
  MOD_RES (16), (17), (18), (19): Xaa is A or G or is absent
EVVMDRHKRLXXXXXXXXXYYLMSTASLETPVXXA

SEQ ID NO: 6115 - protein, 42 aa, Artificial Sequence
  GFR-binding peptide
  MOD_RES (2), (36), (37): Xaa is C or S
  MOD_RES (14), (15), (16), (17), (18): Xaa is A or G
  MOD_RES (19), (20), (21), (22): Xaa is A or G or is absent
GXSRVVMNYHYKLXXXXXXXXXKYLVSIPSLKTPAXXPKPVY

SEQ ID NO: 6116 - protein, 37 aa, Artificial Sequence
  GFR-binding peptide
  MOD_RES (35), (36): Xaa is C or S
  MOD_RES (13), (14), (15), (16), (17): Xaa is A or G
  MOD_RES (18), (19), (20), (21): Xaa is A or G or is absent
EAVSMGEQYNKLXXXXXXXXXLYLVSIASLKTPVXXA

SEQ ID NO: 6117 - protein, 35 aa, Artificial Sequence
  GFR-binding peptide
  MOD_RES (1), (3), (35): Xaa is C or S
XGXAKVVMNRHKRLIVNNSSDYYLVSTASLKTPAX

SEQ ID NO: 6118 - protein, 40 aa, Artificial Sequence
  GFR-binding peptide
  MOD_RES (2), (4), (38), (39): Xaa is C or S
  MOD_RES (16), (17), (18), (19), (20): Xaa is A or G
  MOD_RES (21), (22), (23), (24): Xaa is A or G or is absent
HXGXAKVVMNRHKRLXXXXXXXXXYYLVSTASLKTPAXXA

SEQ ID NO: 6119 - protein, 33 aa, Artificial Sequence
  GFR-binding peptide
  MOD_RES (1), (33): Xaa is C or S
XAKVVMNRHKRLIVNNSSDYYLVSTASLKTPAX

SEQ ID NO: 6120 - protein, 34 aa, Artificial Sequence
  GFR-binding peptide
  MOD_RES (32), (33): Xaa is C or S
GEVVMERYKKLVVKDYEDFYLMSIANLETPVXXA

SEQ ID NO: 6121 - protein, 34 aa, Artificial Sequence
  GFR-binding peptide
  MOD_RES (33), (34): Xaa is C or S
  MOD_RES (11), (12), (13), (14), (15): Xaa is A or G
  MOD_RES (16), (17), (18), (19): Xaa is A or G or is absent
KVVMNYHYKLXXXXXXXXXKYLVSIPSLKTPAXX

SEQ ID NO: 6122 - protein, 35 aa, Artificial Sequence
  GFR-binding peptide
  MOD_RES (2), (35): Xaa is C or S
  MOD_RES (13), (14), (15), (16), (17): Xaa is A or G
  MOD_RES (18), (19), (20), (21): Xaa is A or G or is absent
KXSKVVMQYNKLXXXXXXXXXLYLISIASLDQPVX

SEQ ID NO: 6123 - protein, 37 aa, Artificial Sequence
  GFR-binding peptide
  MOD_RES (1), (33), (34): Xaa is C or S
XGEVVMDRYKKLVVKENEDFYLMSIANLETPVXXAKP

SEQ ID NO: 6124 - protein, 37 aa, Artificial Sequence
  GFR-binding peptide
  MOD_RES (2), (36), (37): Xaa is C or S
  MOD_RES (14), (15), (16), (17), (18): Xaa is A or G
  MOD_RES (19), (20), (21), (22): Xaa is A or G or is absent
GXSRVVMNYHYKLXXXXXXXXXKYLVSIPSLKTPAXX

SEQ ID NO: 6125 - protein, 38 aa, Artificial Sequence
  GFR-binding peptide
  MOD_RES (1), (3), (35), (36): Xaa is C or S
XGXSRVVMNYHYKLIVNSSDDKYLVSIPSLKTPAXXPK

SEQ ID NO: 6126 - protein, 38 aa, Artificial Sequence
  GFR-binding peptide
  MOD_RES (32), (32): Xaa is C or S
SRVVMNRYKKLIVNSSDDFYLVSIANLKTPAXTPKTVH

SEQ ID NO: 6127 - protein, 34 aa, Artificial Sequence
  GFR-binding peptide
  MOD_RES (33), (34): Xaa is C or S
  MOD_RES (11), (12), (13), (14), (15): Xaa is A or G
  MOD_RES (16), (17), (18), (19): Xaa is A or G or is absent
EVVMDRYKKLXXXXXXXXXFYLMSIANLETPVXX

SEQ ID NO: 6128 - protein, 38 aa, Artificial Sequence
  GFR-binding peptide
  MOD_RES (2), (34): Xaa is C or S
GXSRVVMNYHYKLIVNSSDDKYLVSIPSLKTPAXTPKT

SEQ ID NO: 6129 - protein, 39 aa, Artificial Sequence
  GFR-binding peptide
  MOD_RES (1), (3): Xaa is C or S
XKXALHDELTQYNKLFIPKKRVIELYLVSIASLQVQTPR

SEQ ID NO: 6130 - protein, 44 aa, Artificial Sequence
  GFR-binding peptide
  MOD_RES (2), (4), (38): Xaa is C or S
  MOD_RES (16), (17), (18), (19), (20): Xaa is A or G
  MOD_RES (21), (22), (23), (24): Xaa is A or G or is absent
HXGXSRVVMNYHYKLXXXXXXXXXKYLVSIPSLKTPAXTPKTVH

SEQ ID NO: 6131 - protein, 37 aa, Artificial Sequence
  GFR-binding peptide
  MOD_RES (2), (4): Xaa is C or S
  MOD_RES (16), (17), (18), (19), (20): Xaa is A or G
  MOD_RES (21), (22), (23), (24): Xaa is A or G or is absent
HXGXARVVMNRHKRLXXXXXXXXXYYLVSTASLQTPA

SEQ ID NO: 6132 - protein, 30 aa, Artificial Sequence
  GFR-binding peptide
SRVIMQYNKLVKPKRGVLYLISIASLAQPV

SEQ ID NO: 6133 - protein, 39 aa, Artificial Sequence
  GFR-binding peptide
  MOD_RES (33), (34): Xaa is C or S
  MOD_RES (11), (12), (13), (14), (15): Xaa is A or G
  MOD_RES (16), (17), (18), (19): Xaa is A or G or is absent
RVVMNRHKRLXXXXXXXXXYYLVSTASLKTPAXXPKPVY

SEQ ID NO: 6134 - protein, 40 aa, Artificial Sequence
  GFR-binding peptide
  MOD_RES (2), (34), (35): Xaa is C or S
GXGEVVMDRYKKLVVKENEDFYLMSIANLETPVXXAKPIK

SEQ ID NO: 6135 - protein, 33 aa, Artificial Sequence
  GFR-binding peptide
  MOD_RES (12), (13), (14), (15), (16): Xaa is A or G
  MOD_RES (17), (18), (19), (20): Xaa is A or G or is absent
ARVVMNYHYKLXXXXXXXXXKYLVSIPSLQTPA

SEQ ID NO: 6136 - protein, 37 aa, Artificial Sequence
  GFR-binding peptide
  MOD_RES (1), (3), (34), (35): Xaa is C or S
XKXSKVIMQYNKLIKPTKGILYLISIASLDQSVXXPS

SEQ ID NO: 6137 - protein, 44 aa, Artificial Sequence
  GFR-binding peptide
  MOD_RES (2), (4), (41): Xaa is C or S
  MOD_RES (17), (18), (19), (20), (21): Xaa is A or G
  MOD_RES (22), (23), (24), (25): Xaa is A or G or is absent
EXKXALHDELTRHKRLXXXXXXXXXYYLVSTASLQVQTPRXQVN

SEQ ID NO: 6138 - protein, 40 aa, Artificial Sequence
  GFR-binding peptide
  MOD_RES (1), (35), (36): Xaa is C or S
  MOD_RES (13), (14), (15), (16), (17): Xaa is A or G
  MOD_RES (18), (19), (20), (21): Xaa is A or G or is absent
XGEVVMEQYNKLXXXXXXXXXLYLMSIASLETPVXXAKPI

SEQ ID NO: 6139 - protein, 38 aa, Artificial Sequence
  GFR-binding peptide
  MOD_RES (35), (35): Xaa is C or S
HDELTRHKRLFIPKKRVIEYYLVSTASLQVQTPRXQVN

SEQ ID NO: 6140 - protein, 43 aa, Artificial Sequence
  GFR-binding peptide
  MOD_RES (2), (4), (41): Xaa is C or S
EXKXALHDELTRYKKLFIPKKRVIEFYLVSIANLQVQTPRXQV

SEQ ID NO: 6141 - protein, 37 aa, Artificial Sequence
  GFR-binding peptide
  MOD_RES (1), (33), (34): Xaa is C or S
XAKVVMNQYNKLIVNNSSDLYLVSIASLKTPAXXAKP

SEQ ID NO: 6142 - protein, 32 aa, Artificial Sequence
  GFR-binding peptide
  MOD_RES (31), (32): Xaa is C or S
RVVMNRHKRLIVNSSDDYYLVSTASLQTPAXX

SEQ ID NO: 6143 - protein, 35 aa, Artificial Sequence
  GFR-binding peptide
  MOD_RES (13), (14), (15), (16), (17): Xaa is A or G
  MOD_RES (18), (19), (20), (21): Xaa is A or G or is absent
ALHDELTRYKKLXXXXXXXXXFYLVSIANLQVQTP

SEQ ID NO: 6144 - protein, 40 aa, Artificial Sequence
  GFR-binding peptide
  MOD_RES (1), (3), (36), (37): Xaa is C or S
  MOD_RES (14), (15), (16), (17), (18): Xaa is A or G
  MOD_RES (19), (20), (21), (22): Xaa is A or G or is absent
XKXSRVIMRYKKLXXXXXXXXXFYLISIANLAQPVXXPAA

SEQ ID NO: 6145 - protein, 38 aa, Artificial Sequence
  GFR-binding peptide
  MOD_RES (2), (4), (36), (37): Xaa is C or S
RXGXGEVVMDRHKRLVVKENEDYYLMSTASLETPVXXA

SEQ ID NO: 6146 - protein, 37 aa, Artificial Sequence
  GFR-binding peptide
  MOD_RES (2), (33), (34): Xaa is C or S
KXSKVVMYHYKLVKPTRGVKYLISIPSLDQPVXXPSA

SEQ ID NO: 6147 - protein, 38 aa, Artificial Sequence
  GFR-binding peptide
  MOD_RES (33), (34): Xaa is C or S
  MOD_RES (11), (12), (13), (14), (15): Xaa is A or G
  MOD_RES (16), (17), (18), (19): Xaa is A or G or is absent
SKVIMRHKRLXXXXXXXXXYYLISTASLDQSVXXPSAS

SEQ ID NO: 6148 - protein, 37 aa, Artificial Sequence
  GFR-binding peptide
  MOD_RES (2), (4): Xaa is C or S
  MOD_RES (16), (17), (18), (19), (20): Xaa is A or G
  MOD_RES (21), (22), (23), (24): Xaa is A or G or is absent
RXGXGEVVMEQYNKLXXXXXXXXXLYLMSIASLETPV

SEQ ID NO: 6149 - protein, 34 aa, Artificial Sequence
  GFR-binding peptide
  MOD_RES (34), (34): Xaa is C or S
  MOD_RES (12), (13), (14), (15), (16): Xaa is A or G
  MOD_RES (17), (18), (19), (20): Xaa is A or G or is absent
SRVVMNRYKKLXXXXXXXXXFYLVSIANLKTPAX

SEQ ID NO: 6150 - protein, 34 aa, Artificial Sequence
  GFR-binding peptide
  MOD_RES (33), (34): Xaa is C or S
  MOD_RES (11), (12), (13), (14), (15): Xaa is A or G
  MOD_RES (16), (17), (18), (19): Xaa is A or G or is absent
RVVMNYHYKLXXXXXXXXXKYLVSIPSLKTPAXX

SEQ ID NO: 6151 - protein, 40 aa, Artificial Sequence
  GFR-binding peptide
  MOD_RES (2), (36), (37): Xaa is C or S
  MOD_RES (14), (15), (16), (17), (18): Xaa is A or G
  MOD_RES (19), (20), (21), (22): Xaa is A or G or is absent
GXGEVVMDQYNKLXXXXXXXXXLYLMSIASLETPVXXAKP

SEQ ID NO: 6152 - protein, 37 aa, Artificial Sequence
  GFR-binding peptide
  MOD_RES (1), (34), (35): Xaa is C or S
  MOD_RES (12), (13), (14), (15), (16): Xaa is A or G
  MOD_RES (17), (18), (19), (20): Xaa is A or G or is absent
XSKVVMYHYKLXXXXXXXXXKYLISIPSLDQPVXXPS

SEQ ID NO: 6153 - protein, 38 aa, Artificial Sequence
  GFR-binding peptide
  MOD_RES (1), (33): Xaa is C or S
XSRVVMNRHKRLIVNSSDDYYLVSTASLKTPAXTPKTV

SEQ ID NO: 6154 - protein, 36 aa, Artificial Sequence
  GFR-binding peptide
  MOD_RES (1), (3): Xaa is C or S
  MOD_RES (15), (16), (17), (18), (19): Xaa is A or G
  MOD_RES (20), (21), (22), (23): Xaa is A or G or is absent
XGXGEVVMDYHYKLXXXXXXXXXKYLMSIPSLETPV

SEQ ID NO: 6155 - protein, 40 aa, Artificial Sequence
  GFR-binding peptide
  MOD_RES (2), (34), (35): Xaa is C or S
GXAKVVMNQYNKLIVNNSSDLYLVSIASLKTPAXXAKPVA

SEQ ID NO: 6156 - protein, 36 aa, Artificial Sequence
  GFR-binding peptide
  MOD_RES (1), (3), (36): Xaa is C or S
XGXEAVSMGEQYNKLTPVGMDDLYLVSIASLKTPVX

SEQ ID NO: 6157 - protein, 35 aa, Artificial Sequence
  GFR-binding peptide
  MOD_RES (2), (34), (35): Xaa is C or S
GXARVVMNQYNKLIVNSSDDLYLVSIASLQTPAXX

SEQ ID NO: 6158 - protein, 39 aa, Artificial Sequence
  GFR-binding peptide
  MOD_RES (2), (4), (36), (37): Xaa is C or S
HXGXSRVVMNQYNKLIVNSSDDLYLVSIASLKTPAXXPK

SEQ ID NO: 6159 - protein, 38 aa, Artificial Sequence
  GFR-binding peptide
  MOD_RES (2), (4), (38): Xaa is C or S
  MOD_RES (16), (17), (18), (19), (20): Xaa is A or G
  MOD_RES (21), (22), (23), (24): Xaa is A or G or is absent
RXGXGEVVMDRYKKLXXXXXXXXXFYLMSIANLETPVX

SEQ ID NO: 6160 - protein, 37 aa, Artificial Sequence
  GFR-binding peptide
  MOD_RES (2), (4), (37): Xaa is C or S
  MOD_RES (15), (16), (17), (18), (19): Xaa is A or G
  MOD_RES (20), (21), (22), (23): Xaa is A or G or is absent
SXKXSKVIMYHYKLXXXXXXXXXKYLISIPSLDQSVX

SEQ ID NO: 6161 - protein, 32 aa, Artificial Sequence
  GFR-binding peptide
  MOD_RES (32), (32): Xaa is C or S
AKVVMNQYNKLIVNNSSDLYLVSIASLKTPAX

SEQ ID NO: 6162 - protein, 34 aa, Artificial Sequence
  GFR-binding peptide
  MOD_RES (1), (1): Xaa is C or S
  MOD_RES (13), (14), (15), (16), (17): Xaa is A or G
  MOD_RES (18), (19), (20), (21): Xaa is A or G or is absent
XAKVVMNRHKRLXXXXXXXXXYYLVSTASLKTPA

SEQ ID NO: 6163 - protein, 36 aa, Artificial Sequence
  GFR-binding peptide
  MOD_RES (31), (31): Xaa is C or S
RVVMNYHYKLIVNSSDDKYLVSIPSLKTPAXTPKTV

SEQ ID NO: 6164 - protein, 40 aa, Artificial Sequence
  GFR-binding peptide
  MOD_RES (2), (4), (36), (37): Xaa is C or S
HXGXSRVVMNRHKRLIVNSSDDYYLVSTASLKTPAXXPKP

SEQ ID NO: 6165 - protein, 39 aa, Artificial Sequence
  GFR-binding peptide
  MOD_RES (1), (3), (37), (38): Xaa is C or S
  MOD_RES (15), (16), (17), (18), (19): Xaa is A or G
  MOD_RES (20), (21), (22), (23): Xaa is A or G or is absent
XGXAKVVMNRHKRLXXXXXXXXXYYLVSTASLKTPAXXA

SEQ ID NO: 6166 - protein, 41 aa, Artificial Sequence
  GFR-binding peptide
  MOD_RES (1), (3), (36), (37): Xaa is C or S
  MOD_RES (14), (15), (16), (17), (18): Xaa is A or G
  MOD_RES (19), (20), (21), (22): Xaa is A or G or is absent
XKXSKVVMRHKRLXXXXXXXXXYYLISTASLDQPVXXPSAS

SEQ ID NO: 6167 - protein, 38 aa, Artificial Sequence
  GFR-binding peptide
  MOD_RES (2), (34), (35): Xaa is C or S
GXSRVVMNRYKKLIVNSSDDFYLVSIANLKTPAXXPKP

SEQ ID NO: 6168 - protein, 37 aa, Artificial Sequence
  GFR-binding peptide
  MOD_RES (1), (3), (34), (35): Xaa is C or S
XKXSKVVMQYNKLVKPTRGVLYLISIASLDQPVXXPS

SEQ ID NO: 6169 - protein, 41 aa, Artificial Sequence
  GFR-binding peptide
  MOD_RES (1), (3), (40): Xaa is C or S
XKXALHDELTRYKKLFIPKKRVIEFYLVSIANLQVQTPRXQ

SEQ ID NO: 6170 - protein, 38 aa, Artificial Sequence
  GFR-binding peptide
  MOD_RES (1), (3), (38): Xaa is C or S
  MOD_RES (16), (17), (18), (19), (20): Xaa is A or G
  MOD_RES (21), (22), (23), (24): Xaa is A or G or is absent
XGXEAVSMGEQYNKLXXXXXXXXXLYLVSIASLKTPVX

SEQ ID NO: 6171 - protein, 35 aa, Artificial Sequence
  GFR-binding peptide
  MOD_RES (34), (35): Xaa is C or S
  MOD_RES (12), (13), (14), (15), (16): Xaa is A or G
  MOD_RES (17), (18), (19), (20): Xaa is A or G or is absent
SRVVMNRYKKLXXXXXXXXXFYLVSIANLKTPAXX

SEQ ID NO: 6172 - protein, 36 aa, Artificial Sequence
  GFR-binding peptide
  MOD_RES (2), (34), (35): Xaa is C or S
GXAKVVMNYHYKLIVNNSSDKYLVSIPSLKTPAXXA

SEQ ID NO: 6173 - protein, 39 aa, Artificial Sequence
  GFR-binding peptide
  MOD_RES (2), (36), (37): Xaa is C or S
  MOD_RES (14), (15), (16), (17), (18): Xaa is A or G
  MOD_RES (19), (20), (21), (22): Xaa is A or G or is absent
GXAKVVMNQYNKLXXXXXXXXXLYLVSIASLKTPAXXAK

SEQ ID NO: 6174 - protein, 35 aa, Artificial Sequence
  GFR-binding peptide
  MOD_RES (2), (4), (35): Xaa is C or S
SXKXSKVIMRYKKLIKPTKGIFYLISIANLDQSVX

SEQ ID NO: 6175 - protein, 36 aa, Artificial Sequence
  GFR-binding peptide
  MOD_RES (1), (34), (35): Xaa is C or S
  MOD_RES (12), (13), (14), (15), (16): Xaa is A or G
  MOD_RES (17), (18), (19), (20): Xaa is A or G or is absent
XSKVIMYHYKLXXXXXXXXXKYLISIPSLDQSVXXP

SEQ ID NO: 6176 - protein, 36 aa, Artificial Sequence
  GFR-binding peptide
  MOD_RES (1), (35), (36): Xaa is C or S
  MOD_RES (13), (14), (15), (16), (17): Xaa is A or G
  MOD_RES (18), (19), (20), (21): Xaa is A or G or is absent
XSRVVMNYHYKLXXXXXXXXXKYLVSIPSLKTPAXX

SEQ ID NO: 6177 - protein, 39 aa, Artificial Sequence
  GFR-binding peptide
  MOD_RES (2), (4), (36), (37): Xaa is C or S
HXGXAKVVMNYHYKLIVNNSSDKYLVSIPSLKTPAXXAK

SEQ ID NO: 6178 - protein, 34 aa, Artificial Sequence
  GFR-binding peptide
  MOD_RES (12), (13), (14), (15), (16): Xaa is A or G
  MOD_RES (17), (18), (19), (20): Xaa is A or G or is absent
LHDELTRYKKLXXXXXXXXXFYLVSIANLQVQTP

SEQ ID NO: 6179 - protein, 33 aa, Artificial Sequence
  GFR-binding peptide
  MOD_RES (31), (32): Xaa is C or S
EVVMERYKKLVVKDYEDFYLMSIANLETPVXXA

SEQ ID NO: 6180 - protein, 33 aa, Artificial Sequence
  GFR-binding peptide
  MOD_RES (2), (33): Xaa is C or S
KXSKVVMQYNKLVKPTRGVLYLISIASLDQPVX

SEQ ID NO: 6181 - protein, 38 aa, Artificial Sequence
  GFR-binding peptide
  MOD_RES (6), (7): Xaa is C or S
KIPKAXXVPTELNAISMLYFDENEKVVLKKYRDMVVEG

SEQ ID NO: 6182 - protein, 43 aa, Artificial Sequence
  GFR-binding peptide
  MOD_RES (5), (6), (40), (42): Xaa is C or S
  MOD_RES (20), (21), (22), (23), (24): Xaa is A or G
  MOD_RES (25), (26), (27), (28): Xaa is A or G or is absent
IPKAXXVPTELSAISMLYLXXXXXXXXXLKNYQEMVVEGXGXR

SEQ ID NO: 6183 - protein, 35 aa, Artificial Sequence
  GFR-binding peptide
  MOD_RES (32), (34): Xaa is C or S
APTQLSAISVLYLDDSSNVILKNYQNMVVRAXGXH

SEQ ID NO: 6184 - protein, 34 aa, Artificial Sequence
  GFR-binding peptide
  MOD_RES (14), (15), (16), (17), (18): Xaa is A or G
  MOD_RES (19), (20), (21), (22): Xaa is A or G or is absent
VPTKLNAISVLYFXXXXXXXXXLKKYREGMSVAE

SEQ ID NO: 6185 - protein, 38 aa, Artificial Sequence
  GFR-binding peptide
  MOD_RES (1), (38): Xaa is C or S
  MOD_RES (17), (18), (19), (20), (21): Xaa is A or G
  MOD_RES (22), (23), (24), (25): Xaa is A or G or is absent
XRPTQVQLSATSVLYYXXXXXXXXXLRKHRTLEDHLAX

SEQ ID NO: 6186 - protein, 42 aa, Artificial Sequence
  GFR-binding peptide
  MOD_RES (4), (5), (40), (42): Xaa is C or S
  MOD_RES (19), (20), (21), (22), (23): Xaa is A or G
  MOD_RES (24), (25), (26), (27): Xaa is A or G or is absent
GKAXXVPTKLNAISVLYFXXXXXXXXXLKKYREGMSVAEXGX

SEQ ID NO: 6187 - protein, 40 aa, Artificial Sequence
  GFR-binding peptide
  MOD_RES (4), (5), (38), (40): Xaa is C or S
  MOD_RES (19), (20), (21), (22), (23): Xaa is A or G
  MOD_RES (24), (25), (26), (27): Xaa is A or G or is absent
AAPXXVPQALSAISILYLXXXXXXXXXLKNYQMIVRSXKX

SEQ ID NO: 6188 - protein, 38 aa, Artificial Sequence
  GFR-binding peptide
  MOD_RES (7), (7): Xaa is C or S
HVTKPTXAPTKLSATSVLYYDDSSNVILRKHRNMVVRS

SEQ ID NO: 6189 - protein, 33 aa, Artificial Sequence
  GFR-binding peptide
  MOD_RES (32), (32): Xaa is C or S
VPTELNAISMLYFDENEKVVLKKYRDMVVEGXG

SEQ ID NO: 6190 - protein, 38 aa, Artificial Sequence
  GFR-binding peptide
  MOD_RES (2), (3), (36), (38): Xaa is C or S
  MOD_RES (17), (18), (19), (20), (21): Xaa is A or G
  MOD_RES (22), (23), (24), (25): Xaa is A or G or is absent
PXXVSQDLSPISILYKXXXXXXXXXLKYHYMIVKSXKX

SEQ ID NO: 6191 - protein, 38 aa, Artificial Sequence
  GFR-binding peptide
  MOD_RES (1), (2), (36), (38): Xaa is C or S
  MOD_RES (16), (17), (18), (19), (20): Xaa is A or G
  MOD_RES (21), (22), (23), (24): Xaa is A or G or is absent
XXAPTKLSAISVLYLXXXXXXXXXLKNYQNMVVRSXGX

SEQ ID NO: 6192 - protein, 36 aa, Artificial Sequence
  GFR-binding peptide
  MOD_RES (3), (4), (36): Xaa is C or S
KPXXAPTKLSPISVLYKDDSSNVILKYHYNMVVRSX

SEQ ID NO: 6193 - protein, 32 aa, Artificial Sequence
  GFR-binding peptide
  MOD_RES (1), (32): Xaa is C or S
XVPQDLSPISILYKVGRTPKVLKYHYMVVKSX

SEQ ID NO: 6194 - protein, 37 aa, Artificial Sequence
  GFR-binding peptide
  MOD_RES (4), (5): Xaa is C or S
  MOD_RES (19), (20), (21), (22), (23): Xaa is A or G
  MOD_RES (24), (25), (26), (27): Xaa is A or G or is absent
PKPXXAPTKLSATSVLYYXXXXXXXXXLRKHRNMVVR

SEQ ID NO: 6195 - protein, 38 aa, Artificial Sequence
  GFR-binding peptide
  MOD_RES (4), (5), (36), (38): Xaa is C or S
AAPXXVPQALSAISILYLVGRKPKVLKNYQMIVRSXKX

SEQ ID NO: 6196 - protein, 35 aa, Artificial Sequence
  GFR-binding peptide
  MOD_RES (1), (35): Xaa is C or S
  MOD_RES (15), (16), (17), (18), (19): Xaa is A or G
  MOD_RES (20), (21), (22), (23): Xaa is A or G or is absent
XAPTKLSATSVLYYXXXXXXXXXLRKHRNMVVRSX

SEQ ID NO: 6197 - protein, 39 aa, Artificial Sequence
  GFR-binding peptide
  MOD_RES (5), (6), (39): Xaa is C or S
  MOD_RES (20), (21), (22), (23), (24): Xaa is A or G
  MOD_RES (25), (26), (27), (28): Xaa is A or G or is absent
SAAPXXVPQALSATSILYYXXXXXXXXXLRKHRMIVRSX

SEQ ID NO: 6198 - protein, 38 aa, Artificial Sequence
  GFR-binding peptide
  MOD_RES (6), (7): Xaa is C or S
YVPKPXXAPTKLSATSVLYYDDSSNVILRKHRNMVVRS

SEQ ID NO: 6199 - protein, 35 aa, Artificial Sequence
  GFR-binding peptide
  MOD_RES (4), (5): Xaa is C or S
ASPXXVSQDLNAISILYFIGKTPKILKKYRMIVKS

SEQ ID NO: 6200 - protein, 42 aa, Artificial Sequence
  GFR-binding peptide
  MOD_RES (5), (6), (40), (42): Xaa is C or S
  MOD_RES (20), (21), (22), (23), (24): Xaa is A or G
  MOD_RES (25), (26), (27), (28): Xaa is A or G or is absent
IPKAXXVPTELSPISMLYKXXXXXXXXXLKYHYEMVVEGXGX

SEQ ID NO: 6201 - protein, 39 aa, Artificial Sequence
  GFR-binding peptide
  MOD_RES (3), (4), (38): Xaa is C or S
  MOD_RES (18), (19), (20), (21), (22): Xaa is A or G
  MOD_RES (23), (24), (25), (26): Xaa is A or G or is absent
KPXXAPTQLSATSVLYYXXXXXXXXXLRKHRNMVVRAXG

SEQ ID NO: 6202 - protein, 35 aa, Artificial Sequence
  GFR-binding peptide
  MOD_RES (15), (16), (17), (18), (19): Xaa is A or G
  MOD_RES (20), (21), (22), (23): Xaa is A or G or is absent
PTQVQLSATSVLYYXXXXXXXXXLRKHRTLEDHLA

SEQ ID NO: 6203 - protein, 38 aa, Artificial Sequence
  GFR-binding peptide
  MOD_RES (1), (2), (35), (37): Xaa is C or S
  MOD_RES (16), (17), (18), (19), (20): Xaa is A or G
  MOD_RES (21), (22), (23), (24): Xaa is A or G or is absent
XXVPQDLSPISILYKXXXXXXXXXLKYHYMVVKSXKXS

SEQ ID NO: 6204 - protein, 39 aa, Artificial Sequence
  GFR-binding peptide
  MOD_RES (1), (2), (37), (39): Xaa is C or S
  MOD_RES (16), (17), (18), (19), (20): Xaa is A or G
  MOD_RES (21), (22), (23), (24): Xaa is A or G or is absent
XXVPTKLSAISVLYLXXXXXXXXXLKNYQEGMSVAEXGX

SEQ ID NO: 6205 - protein, 33 aa, Artificial Sequence
  GFR-binding peptide
  MOD_RES (14), (15), (16), (17), (18): Xaa is A or G
  MOD_RES (19), (20), (21), (22): Xaa is A or G or is absent
VPTELSATSMLYYXXXXXXXXXLRKHRDMVVEG

SEQ ID NO: 6206 - protein, 32 aa, Artificial Sequence
  GFR-binding peptide
  MOD_RES (14), (15), (16), (17), (18): Xaa is A or G
  MOD_RES (19), (20), (21), (22): Xaa is A or G or is absent
VPTELSAISMLYLXXXXXXXXXLKNYQDMVVE

SEQ ID NO: 6207 - protein, 38 aa, Artificial Sequence
  GFR-binding peptide
  MOD_RES (3), (4), (38): Xaa is C or S
  MOD_RES (18), (19), (20), (21), (22): Xaa is A or G
  MOD_RES (23), (24), (25), (26): Xaa is A or G or is absent
KPXXAPTKLNAISVLYFXXXXXXXXXLKKYRNMVVRSX

SEQ ID NO: 6208 - protein, 39 aa, Artificial Sequence
  GFR-binding peptide
  MOD_RES (4), (5), (37), (39): Xaa is C or S
PKAXXVPTELNAISMLYFDENEKVVLKKYRDMVVEGXGX

SEQ ID NO: 6209 - protein, 35 aa, Artificial Sequence
  GFR-binding peptide
  MOD_RES (3), (4), (35): Xaa is C or S
SPXXVSQDLSAISILYLIGKTPKILKNYQMIVKSX

SEQ ID NO: 6210 - protein, 32 aa, Artificial Sequence
  GFR-binding peptide
  MOD_RES (1), (2): Xaa is C or S
XXVSQDLSPISILYKIGKTPKILKYHYMIVKS

SEQ ID NO: 6211 - protein, 40 aa, Artificial Sequence
  GFR-binding peptide
  MOD_RES (4), (5), (38), (40): Xaa is C or S
  MOD_RES (19), (20), (21), (22), (23): Xaa is A or G
  MOD_RES (24), (25), (26), (27): Xaa is A or G or is absent
ASPXXVSQDLSAISILYLXXXXXXXXXLKNYQMIVKSXKX

SEQ ID NO: 6212 - protein, 41 aa, Artificial Sequence
  GFR-binding peptide
  MOD_RES (6), (7), (41): Xaa is C or S
  MOD_RES (21), (22), (23), (24), (25): Xaa is A or G
  MOD_RES (26), (27), (28), (29): Xaa is A or G or is absent
SIPKAXXVPTELSPISMLYKXXXXXXXXXLKYHYEMVVEGX

SEQ ID NO: 6213 - protein, 34 aa, Artificial Sequence
  GFR-binding peptide
  MOD_RES (33), (33): Xaa is C or S
  MOD_RES (14), (15), (16), (17), (18): Xaa is A or G
  MOD_RES (19), (20), (21), (22): Xaa is A or G or is absent
VPQDLSAISILYLXXXXXXXXXLKNYQMVVKSXK

SEQ ID NO: 6214 - protein, 34 aa, Artificial Sequence
  GFR-binding peptide
  MOD_RES (2), (3): Xaa is C or S
AXXVPTELSATSMLYYDENEKVVLRKHRDMVVEG

SEQ ID NO: 6215 - protein, 32 aa, Artificial Sequence
  GFR-binding peptide
  MOD_RES (14), (15), (16), (17), (18): Xaa is A or G
  MOD_RES (19), (20), (21), (22): Xaa is A or G or is absent
TQVQLSATSVLYYXXXXXXXXXLRKHRTLEDH

SEQ ID NO: 6216 - protein, 30 aa, Artificial Sequence
  GFR-binding peptide
VPTELSPISMLYKDEYDKVVLKYHYEMVVE

SEQ ID NO: 6217 - protein, 43 aa, Artificial Sequence
  GFR-binding peptide
  MOD_RES (5), (6), (40), (42): Xaa is C or S
  MOD_RES (20), (21), (22), (23), (24): Xaa is A or G
  MOD_RES (25), (26), (27), (28): Xaa is A or G or is absent
IPKAXXVPTELSPISMLYKXXXXXXXXXLKYHYDMVVEGXGXR

SEQ ID NO: 6218 - protein, 37 aa, Artificial Sequence
  GFR-binding peptide
  MOD_RES (6), (7): Xaa is C or S
TVPKPXXAPTQLSAISVLYLDDSSNVILKNYQNMVVR

SEQ ID NO: 6219 - protein, 44 aa, Artificial Sequence
  GFR-binding peptide
  MOD_RES (6), (7), (41), (43): Xaa is C or S
  MOD_RES (21), (22), (23), (24), (25): Xaa is A or G
  MOD_RES (26), (27), (28), (29): Xaa is A or G or is absent
KIPKAXXVPTELSAISMLYLXXXXXXXXXLKNYQDMVVEGXGXR

SEQ ID NO: 6220 - protein, 32 aa, Artificial Sequence
  GFR-binding peptide
  MOD_RES (1), (1): Xaa is C or S
XVPTELSPISMLYKDEYDKVVLKYHYEMVVEG

SEQ ID NO: 6221 - protein, 35 aa, Artificial Sequence
  GFR-binding peptide
  MOD_RES (2), (3), (35): Xaa is C or S
AXXVPTELSATSMLYYDEYDKVVLRKHREMVVEGX

SEQ ID NO: 6222 - protein, 35 aa, Artificial Sequence
  GFR-binding peptide
  MOD_RES (1), (34): Xaa is C or S
XVPTKLSATSVLYYDDMGVPTLRKHREGMSVAEXG

SEQ ID NO: 6223 - protein, 36 aa, Artificial Sequence
  GFR-binding peptide
  MOD_RES (2), (2): Xaa is C or S
QXRPTQVQLSATSVLYYEIVRKKPIFLRKHRTLEDH

SEQ ID NO: 6224 - protein, 38 aa, Artificial Sequence
  GFR-binding peptide
  MOD_RES (7), (7): Xaa is C or S
HVTKPTXAPTKLSAISVLYLDDSSNVILKNYQNMVVRS

SEQ ID NO: 6225 - protein, 32 aa, Artificial Sequence
  GFR-binding peptide
  MOD_RES (32), (32): Xaa is C or S
VPTELSPISMLYKDEYDKVVLKYHYEMVVEGX

SEQ ID NO: 6226 - protein, 40 aa, Artificial Sequence
  GFR-binding peptide
  MOD_RES (5), (6), (39): Xaa is C or S
VGKAXXVPTKLSAISVLYLDDMGVPTLKNYQEGMSVAEXG

SEQ ID NO: 6227 - protein, 38 aa, Artificial Sequence
  GFR-binding peptide
  MOD_RES (3), (3): Xaa is C or S
  MOD_RES (19), (20), (21), (22), (23): Xaa is A or G
  MOD_RES (24), (25), (26), (27): Xaa is A or G or is absent
VQXRPTQVQLSAISVLYLXXXXXXXXXLKNYQTLEDHL

SEQ ID NO: 6228 - protein, 39 aa, Artificial Sequence
  GFR-binding peptide
  MOD_RES (1), (38): Xaa is C or S
  MOD_RES (17), (18), (19), (20), (21): Xaa is A or G
  MOD_RES (22), (23), (24), (25): Xaa is A or G or is absent
XRPTQVQLSATSVLYYXXXXXXXXXLRKHRTLEDHLAXK

SEQ ID NO: 6229 - protein, 39 aa, Artificial Sequence
  GFR-binding peptide
  MOD_RES (1), (2), (36), (38): Xaa is C or S
  MOD_RES (16), (17), (18), (19), (20): Xaa is A or G
  MOD_RES (21), (22), (23), (24): Xaa is A or G or is absent
XXAPTKLSATSVLYYXXXXXXXXXLRKHRNMVVRSXGXH

SEQ ID NO: 6230 - protein, 37 aa, Artificial Sequence
  GFR-binding peptide
  MOD_RES (34), (36): Xaa is C or S
  MOD_RES (14), (15), (16), (17), (18): Xaa is A or G
  MOD_RES (19), (20), (21), (22): Xaa is A or G or is absent
APTKLNAISVLYFXXXXXXXXXLKKYRNMVVKAXGXH

SEQ ID NO: 6231 - protein, 36 aa, Artificial Sequence
  GFR-binding peptide
  MOD_RES (16), (17), (18), (19), (20): Xaa is A or G
  MOD_RES (21), (22), (23), (24): Xaa is A or G or is absent
RPTQVQLNAISVLYFXXXXXXXXXLKKYRTLEDHLA

SEQ ID NO: 6232 - protein, 38 aa, Artificial Sequence
  GFR-binding peptide
  MOD_RES (4), (5), (37): Xaa is C or S
PKAXXVPTELSATSMLYYDEYDKVVLRKHREMVVEGXG

SEQ ID NO: 6233 - protein, 34 aa, Artificial Sequence
  GFR-binding peptide
  MOD_RES (1), (34): Xaa is C or S
  MOD_RES (15), (16), (17), (18), (19): Xaa is A or G
  MOD_RES (20), (21), (22), (23): Xaa is A or G or is absent
XVSQDLSPISILYKXXXXXXXXXLKYHYMIVKSX

SEQ ID NO: 6234 - protein, 42 aa, Artificial Sequence
  GFR-binding peptide
  MOD_RES (5), (6), (39), (41): Xaa is C or S
  MOD_RES (20), (21), (22), (23), (24): Xaa is A or G
  MOD_RES (25), (26), (27), (28): Xaa is A or G or is absent
SASPXXVSQDLSPISILYKXXXXXXXXXLKYHYMIVKSXKXS

SEQ ID NO: 6235 - protein, 36 aa, Artificial Sequence
  GFR-binding peptide
  MOD_RES (1), (2), (36): Xaa is C or S
  MOD_RES (16), (17), (18), (19), (20): Xaa is A or G
  MOD_RES (21), (22), (23), (24): Xaa is A or G or is absent
XXAPTKLSATSVLYYXXXXXXXXXLRKHRNMVVRSX

SEQ ID NO: 6236 - protein, 33 aa, Artificial Sequence
  GFR-binding peptide
  MOD_RES (33), (33): Xaa is C or S
  MOD_RES (14), (15), (16), (17), (18): Xaa is A or G
  MOD_RES (19), (20), (21), (22): Xaa is A or G or is absent
VPQDLSPISILYKXXXXXXXXXLKYHYMVVKSX

SEQ ID NO: 6237 - protein, 37 aa, Artificial Sequence
  GFR-binding peptide
  MOD_RES (35), (37): Xaa is C or S
  MOD_RES (14), (15), (16), (17), (18): Xaa is A or G
  MOD_RES (19), (20), (21), (22): Xaa is A or G or is absent
TQVQLSATSVLYYXXXXXXXXXLRKHRTLEDHLAXKX

SEQ ID NO: 6238 - protein, 35 aa, Artificial Sequence
  GFR-binding peptide
  MOD_RES (1), (32), (34): Xaa is C or S
XVSQDLSAISILYLIGKTPKILKNYQMIVKSXKXS

SEQ ID NO: 6239 - protein, 40 aa, Artificial Sequence
  GFR-binding peptide
  MOD_RES (4), (5), (38), (40): Xaa is C or S
GKAXXVPTKLNAISVLYFDDMGVPTLKKYREGMSVAEXGX

SEQ ID NO: 6240 - protein, 36 aa, Artificial Sequence
  GFR-binding peptide
  MOD_RES (34), (36): Xaa is C or S
  MOD_RES (14), (15), (16), (17), (18): Xaa is A or G
  MOD_RES (19), (20), (21), (22): Xaa is A or G or is absent
APTKLSPISVLYKXXXXXXXXXLKYHYNMVVRSXGX

SEQ ID NO: 6241 - protein, 39 aa, Artificial Sequence
  GFR-binding peptide
  MOD_RES (4), (5), (38): Xaa is C or S
  MOD_RES (19), (20), (21), (22), (23): Xaa is A or G
  MOD_RES (24), (25), (26), (27): Xaa is A or G or is absent
ASPXXVSQDLSAISILYLXXXXXXXXXLKNYQMIVKSXK

SEQ ID NO: 6242 - protein, 37 aa, Artificial Sequence
  GFR-binding peptide
  MOD_RES (2), (3), (35), (37): Xaa is C or S
AXXAPTKLSAISVLYLDSSNNVILKNYQNMVVKAXGX

SEQ ID NO: 6243 - protein, 39 aa, Artificial Sequence
  GFR-binding peptide
  MOD_RES (3), (4), (38): Xaa is C or S
  MOD_RES (18), (19), (20), (21), (22): Xaa is A or G
  MOD_RES (23), (24), (25), (26): Xaa is A or G or is absent
KAXXVPTELSAISMLYLXXXXXXXXXLKNYQDMVVEGXG

SEQ ID NO: 6244 - protein, 38 aa, Artificial Sequence
  GFR-binding peptide
  MOD_RES (1), (38): Xaa is C or S
XRPTQVQLSATSVLYYEIVRKKPIFLRKHRTLEDHLAX

SEQ ID NO: 6245 - protein, 37 aa, Artificial Sequence
  GFR-binding peptide
  MOD_RES (4), (5), (37): Xaa is C or S
PKPXXAPTQLSAISVLYLDDSSNVILKNYQNMVVRAX

SEQ ID NO: 6246 - protein, 39 aa, Artificial Sequence
  GFR-binding peptide
  MOD_RES (6), (7): Xaa is C or S
  MOD_RES (21), (22), (23), (24), (25): Xaa is A or G
  MOD_RES (26), (27), (28), (29): Xaa is A or G or is absent
ASASPXXVPQDLSPISILYKXXXXXXXXXLKYHYMVVKS

SEQ ID NO: 6247 - protein, 30 aa, Artificial Sequence
  GFR-binding peptide
VPQALSATSILYYVGRKPKVLRKHRMIVRS

SEQ ID NO: 6248 - protein, 41 aa, Artificial Sequence
  GFR-binding peptide
  MOD_RES (5), (39), (41): Xaa is C or S
  MOD_RES (19), (20), (21), (22), (23): Xaa is A or G
  MOD_RES (24), (25), (26), (27): Xaa is A or G or is absent
TKPTXAPTKLSAISVLYLXXXXXXXXXLKNYQNMVVRSXGX

SEQ ID NO: 6249 - protein, 34 aa, Artificial Sequence
  GFR-binding peptide
  MOD_RES (3), (4): Xaa is C or S
SPXXVSQDLSAISILYLIGKTPKILKNYQMIVKS

SEQ ID NO: 6250 - protein, 43 aa, Artificial Sequence
  GFR-binding peptide
  MOD_RES (4), (41), (43): Xaa is C or S
  MOD_RES (20), (21), (22), (23), (24): Xaa is A or G
  MOD_RES (25), (26), (27), (28): Xaa is A or G or is absent
NVQXRPTQVQLSATSVLYYXXXXXXXXXLRKHRTLEDHLAXKX

SEQ ID NO: 6251 - protein, 39 aa, Artificial Sequence
  GFR-binding peptide
  MOD_RES (6), (7): Xaa is C or S
  MOD_RES (21), (22), (23), (24), (25): Xaa is A or G
  MOD_RES (26), (27), (28), (29): Xaa is A or G or is absent
AVPKAXXAPTKLSATSVLYYXXXXXXXXXLRKHRNMVVK

SEQ ID NO: 6252 - protein, 35 aa, Artificial Sequence
  GFR-binding peptide
  MOD_RES (34), (34): Xaa is C or S
  MOD_RES (14), (15), (16), (17), (18): Xaa is A or G
  MOD_RES (19), (20), (21), (22): Xaa is A or G or is absent
VPTELSATSMLYYXXXXXXXXXLRKHREMVVEGXG

SEQ ID NO: 6253 - protein, 43 aa, Artificial Sequence
  GFR-binding peptide
  MOD_RES (5), (6), (40), (42): Xaa is C or S
  MOD_RES (20), (21), (22), (23), (24): Xaa is A or G
  MOD_RES (25), (26), (27), (28): Xaa is A or G or is absent
VPKPXXAPTKLSPISVLYKXXXXXXXXXLKYHYNMVVRSXGXH

SEQ ID NO: 6254 - protein, 38 aa, Artificial Sequence
  GFR-binding peptide
  MOD_RES (4), (5): Xaa is C or S
  MOD_RES (19), (20), (21), (22), (23): Xaa is A or G
  MOD_RES (24), (25), (26), (27): Xaa is A or G or is absent
PKPXXAPTKLSAISVLYLXXXXXXXXXLKNYQNMVVRS

SEQ ID NO: 6255 - protein, 33 aa, Artificial Sequence
  GFR-binding peptide
  MOD_RES (1), (32): Xaa is C or S
XVSQDLSPISILYKIGKTPKILKYHYMIVKSXK

SEQ ID NO: 6256 - protein, 42 aa, Artificial Sequence
  GFR-binding peptide
  MOD_RES (5), (6), (40), (42): Xaa is C or S
  MOD_RES (20), (21), (22), (23), (24): Xaa is A or G
  MOD_RES (25), (26), (27), (28): Xaa is A or G or is absent
VPKAXXAPTKLSAISVLYLXXXXXXXXXLKNYQNMVVKAXGX

SEQ ID NO: 6257 - protein, 36 aa, Artificial Sequence
  GFR-binding peptide
  MOD_RES (1), (1): Xaa is C or S
XRPTQVQLSPISVLYKEIVRKKPIFLKYHYTLEDHL

SEQ ID NO: 6258 - protein, 43 aa, Artificial Sequence
  GFR-binding peptide
  MOD_RES (5), (6), (40), (42): Xaa is C or S
  MOD_RES (20), (21), (22), (23), (24): Xaa is A or G
  MOD_RES (25), (26), (27), (28): Xaa is A or G or is absent
IPKAXXVPTELSATSMLYYXXXXXXXXXLRKHRDMVVEGXGXR

SEQ ID NO: 6259 - protein, 34 aa, Artificial Sequence
  GFR-binding peptide
  MOD_RES (1), (34): Xaa is C or S
  MOD_RES (15), (16), (17), (18), (19): Xaa is A or G
  MOD_RES (20), (21), (22), (23): Xaa is A or G or is absent
XVPQDLNAISILYFXXXXXXXXXLKKYRMVVKSX

SEQ ID NO: 6260 - protein, 43 aa, Artificial Sequence
  GFR-binding peptide
  MOD_RES (5), (6), (40), (42): Xaa is C or S
  MOD_RES (20), (21), (22), (23), (24): Xaa is A or G
  MOD_RES (25), (26), (27), (28): Xaa is A or G or is absent
VPKPXXAPTQLNAISVLYFXXXXXXXXXLKKYRNMVVRAXGXH

SEQ ID NO: 6261 - protein, 33 aa, Artificial Sequence
  GFR-binding peptide
  MOD_RES (1), (1): Xaa is C or S
  MOD_RES (15), (16), (17), (18), (19): Xaa is A or G
  MOD_RES (20), (21), (22), (23): Xaa is A or G or is absent
XVPQALNAISILYFXXXXXXXXXLKKYRMIVRS

SEQ ID NO: 6262 - protein, 38 aa, Artificial Sequence
  GFR-binding peptide
  MOD_RES (4), (5), (38): Xaa is C or S
  MOD_RES (19), (20), (21), (22), (23): Xaa is A or G
  MOD_RES (24), (25), (26), (27): Xaa is A or G or is absent
ASPXXVPQDLNAISILYFXXXXXXXXXLKKYRMVVKSX

SEQ ID NO: 6263 - protein, 37 aa, Artificial Sequence
  GFR-binding peptide
  MOD_RES (1), (35), (37): Xaa is C or S
  MOD_RES (15), (16), (17), (18), (19): Xaa is A or G
  MOD_RES (20), (21), (22), (23): Xaa is A or G or is absent
XVPTELNAISMLYFXXXXXXXXXLKKYREMVVEGXGX

SEQ ID NO: 6264 - protein, 39 aa, Artificial Sequence
  GFR-binding peptide
  MOD_RES (3), (4), (38): Xaa is C or S
  MOD_RES (18), (19), (20), (21), (22): Xaa is A or G
  MOD_RES (23), (24), (25), (26): Xaa is A or G or is absent
KAXXAPTKLSATSVLYYXXXXXXXXXLRKHRNMVVKAXG

SEQ ID NO: 6265 - protein, 34 aa, Artificial Sequence
  GFR-binding peptide
  MOD_RES (1), (2), (34): Xaa is C or S
XXAPTKLSAISVLYLDDSSNVILKNYQNMVVRSX

SEQ ID NO: 6266 - protein, 39 aa, Artificial Sequence
  GFR-binding peptide
  MOD_RES (6), (7): Xaa is C or S
  MOD_RES (21), (22), (23), (24), (25): Xaa is A or G
  MOD_RES (26), (27), (28), (29): Xaa is A or G or is absent
ASAAPXXVPQALNAISILYFXXXXXXXXXLKKYRMIVRS

SEQ ID NO: 6267 - protein, 41 aa, Artificial Sequence
  GFR-binding peptide
  MOD_RES (4), (5), (38), (40): Xaa is C or S
  MOD_RES (19), (20), (21), (22), (23): Xaa is A or G
  MOD_RES (24), (25), (26), (27): Xaa is A or G or is absent
AAPXXVPQALSAISILYLXXXXXXXXXLKNYQMIVRSXKXS

SEQ ID NO: 6268 - protein, 42 aa, Artificial Sequence
  GFR-binding peptide
  MOD_RES (3), (40), (42): Xaa is C or S
VQXRPTQVQLNAISVLYFEIVRKKPIFLKKYRTLEDHLAXKX

SEQ ID NO: 6269 - protein, 33 aa, Artificial Sequence
  GFR-binding peptide
PTQVQLSATSVLYYEIVRKKPIFLRKHRTLEDH

SEQ ID NO: 6270 - protein, 35 aa, Artificial Sequence
  GFR-binding peptide
  MOD_RES (1), (2): Xaa is C or S
  MOD_RES (16), (17), (18), (19), (20): Xaa is A or G
  MOD_RES (21), (22), (23), (24): Xaa is A or G or is absent
XXAPTKLSAISVLYLXXXXXXXXXLKNYQNMVVRS

SEQ ID NO: 6271 - protein, 33 aa, Artificial Sequence
  GFR-binding peptide
  MOD_RES (32), (32): Xaa is C or S
APTQLSATSVLYYDDSSNVILRKHRNMVVRAXG

SEQ ID NO: 6272 - protein, 37 aa, Artificial Sequence
  GFR-binding peptide
  MOD_RES (5), (6): Xaa is C or S
IPKAXXVPTELSPISMLYKDEYDKVVLKYHYEMVVEG

SEQ ID NO: 6273 - protein, 35 aa, Artificial Sequence
  GFR-binding peptide
  MOD_RES (15), (16), (17), (18), (19): Xaa is A or G
  MOD_RES (20), (21), (22), (23): Xaa is A or G or is absent
PTQVQLSAISVLYLXXXXXXXXXLKNYQTLEDHLA

SEQ ID NO: 6274 - protein, 39 aa, Artificial Sequence
  GFR-binding peptide
  MOD_RES (36), (38): Xaa is C or S
  MOD_RES (15), (16), (17), (18), (19): Xaa is A or G
  MOD_RES (20), (21), (22), (23): Xaa is A or G or is absent
PTQVQLSATSVLYYXXXXXXXXXLRKHRTLEDHLAXKXE

SEQ ID NO: 6275 - protein, 34 aa, Artificial Sequence
  GFR-binding peptide
RPTQVQLNAISVLYFEIVRKKPIFLKKYRTLEDH

SEQ ID NO: 6276 - protein, 38 aa, Artificial Sequence
  GFR-binding peptide
  MOD_RES (5), (6), (38): Xaa is C or S
VPKAXXAPTKLSPISVLYKDSSNNVILKYHYNMVVKAX

SEQ ID NO: 6277 - protein, 37 aa, Artificial Sequence
  GFR-binding peptide
  MOD_RES (35), (37): Xaa is C or S
  MOD_RES (14), (15), (16), (17), (18): Xaa is A or G
  MOD_RES (19), (20), (21), (22): Xaa is A or G or is absent
TQVQLSPISVLYKXXXXXXXXXLKYHYTLEDHLAXKX

SEQ ID NO: 6278 - protein, 39 aa, Artificial Sequence
  GFR-binding peptide
  MOD_RES (5), (6), (38): Xaa is C or S
VPKPXXAPTKLSATSVLYYDDSSNVILRKHRNMVVRSXG

SEQ ID NO: 6279 - protein, 37 aa, Artificial Sequence
  GFR-binding peptide
  MOD_RES (1), (34), (36): Xaa is C or S
XVPTKLSATSVLYYDDMGVPTLRKHREGMSVAEXGXR

SEQ ID NO: 6280 - protein, 42 aa, Artificial Sequence
  GFR-binding peptide
  MOD_RES (4), (5), (39), (41): Xaa is C or S
  MOD_RES (19), (20), (21), (22), (23): Xaa is A or G
  MOD_RES (24), (25), (26), (27): Xaa is A or G or is absent
PKPXXAPTKLSAISVLYLXXXXXXXXXLKNYQNMVVRSXGXH

SEQ ID NO: 6281 - protein, 38 aa, Artificial Sequence
  GFR-binding peptide
  MOD_RES (1), (2), (36), (38): Xaa is C or S
  MOD_RES (16), (17), (18), (19), (20): Xaa is A or G
  MOD_RES (21), (22), (23), (24): Xaa is A or G or is absent
XXVPTELSPISMLYKXXXXXXXXXLKYHYDMVVEGXGX

SEQ ID NO: 6282 - protein, 39 aa, Artificial Sequence
  GFR-binding peptide
  MOD_RES (3), (4), (38): Xaa is C or S
  MOD_RES (18), (19), (20), (21), (22): Xaa is A or G
  MOD_RES (23), (24), (25), (26): Xaa is A or G or is absent
KAXXAPTKLNAISVLYFXXXXXXXXXLKKYRNMVVKAXG

SEQ ID NO: 6283 - protein, 38 aa, Artificial Sequence
  GFR-binding peptide
  MOD_RES (1), (2), (36), (38): Xaa is C or S
  MOD_RES (16), (17), (18), (19), (20): Xaa is A or G
  MOD_RES (21), (22), (23), (24): Xaa is A or G or is absent
XXVPTELSAISMLYLXXXXXXXXXLKNYQEMVVEGXGX

SEQ ID NO: 6284 - protein, 42 aa, Artificial Sequence
  GFR-binding peptide
  MOD_RES (6), (7), (41): Xaa is C or S
  MOD_RES (21), (22), (23), (24), (25): Xaa is A or G
  MOD_RES (26), (27), (28), (29): Xaa is A or G or is absent
KIPKAXXVPTELSPISMLYKXXXXXXXXXLKYHYDMVVEGXG

SEQ ID NO: 6285 - protein, 37 aa, Artificial Sequence
  GFR-binding peptide
  MOD_RES (6), (7): Xaa is C or S
TVPKPXXAPTQLSPISVLYKDDSSNVILKYHYNMVVR

SEQ ID NO: 6286 - protein, 36 aa, Artificial Sequence
  GFR-binding peptide
  MOD_RES (2), (3), (34), (36): Xaa is C or S
PXXVPQDLSPISILYKVGRTPKVLKYHYMVVKSXKX

SEQ ID NO: 6287 - protein, 34 aa, Artificial Sequence
  GFR-binding peptide
  MOD_RES (1), (2): Xaa is C or S
  MOD_RES (16), (17), (18), (19), (20): Xaa is A or G
  MOD_RES (21), (22), (23), (24): Xaa is A or G or is absent
XXVSQDLSAISILYLXXXXXXXXXLKNYQMIVKS

SEQ ID NO: 6288 - protein, 44 aa, Artificial Sequence
  GFR-binding peptide
  MOD_RES (6), (7), (42), (44): Xaa is C or S
  MOD_RES (21), (22), (23), (24), (25): Xaa is A or G
  MOD_RES (26), (27), (28), (29): Xaa is A or G or is absent
KVGKAXXVPTKLNAISVLYFXXXXXXXXXLKKYREGMSVAEXGX

SEQ ID NO: 6289 - protein, 39 aa, Artificial Sequence
  GFR-binding peptide
  MOD_RES (2), (3), (37), (39): Xaa is C or S
  MOD_RES (17), (18), (19), (20), (21): Xaa is A or G
  MOD_RES (22), (23), (24), (25): Xaa is A or G or is absent
PXXAPTKLNAISVLYFXXXXXXXXXLKKYRNMVVRSXGX

SEQ ID NO: 6290 - protein, 35 aa, Artificial Sequence
  GFR-binding peptide
  MOD_RES (3), (4), (35): Xaa is C or S
SPXXVSQDLNAISILYFIGKTPKILKKYRMIVKSX

SEQ ID NO: 6291 - protein, 40 aa, Artificial Sequence
  GFR-binding peptide
  MOD_RES (2), (3), (38), (40): Xaa is C or S
  MOD_RES (17), (18), (19), (20), (21): Xaa is A or G
  MOD_RES (22), (23), (24), (25): Xaa is A or G or is absent
AXXVPTKLSPISVLYKXXXXXXXXXLKYHYEGMSVAEXGX

SEQ ID NO: 6292 - protein, 40 aa, Artificial Sequence
  GFR-binding peptide
  MOD_RES (5), (5): Xaa is C or S
RNVQXRPTQVQLSPISVLYKEIVRKKPIFLKYHYTLEDHL

SEQ ID NO: 6293 - protein, 35 aa, Artificial Sequence
  GFR-binding peptide
  MOD_RES (1), (33), (35): Xaa is C or S
XVPTELSPISMLYKDENEKVVLKYHYDMVVEGXGX

SEQ ID NO: 6294 - protein, 41 aa, Artificial Sequence
  GFR-binding peptide
  MOD_RES (5), (6), (40): Xaa is C or S
  MOD_RES (20), (21), (22), (23), (24): Xaa is A or G
  MOD_RES (25), (26), (27), (28): Xaa is A or G or is absent
IPKAXXVPTELNAISMLYFXXXXXXXXXLKKYRDMVVEGXG

SEQ ID NO: 6295 - protein, 39 aa, Artificial Sequence
  GFR-binding peptide
  MOD_RES (2), (3), (37), (39): Xaa is C or S
  MOD_RES (17), (18), (19), (20), (21): Xaa is A or G
  MOD_RES (22), (23), (24), (25): Xaa is A or G or is absent
AXXVPTELSATSMLYYXXXXXXXXXLRKHREMVVEGXGX

SEQ ID NO: 6296 - protein, 38 aa, Artificial Sequence
  GFR-binding peptide
  MOD_RES (2), (2): Xaa is C or S
QXRPTQVQLNAISVLYFEIVRKKPIFLKKYRTLEDHLA

SEQ ID NO: 6297 - protein, 35 aa, Artificial Sequence
  GFR-binding peptide
  MOD_RES (2), (3): Xaa is C or S
  MOD_RES (17), (18), (19), (20), (21): Xaa is A or G
  MOD_RES (22), (23), (24), (25): Xaa is A or G or is absent
PXXVPQALSATSILYYXXXXXXXXXLRKHRMIVRS

SEQ ID NO: 6298 - protein, 36 aa, Artificial Sequence
  GFR-binding peptide
  MOD_RES (2), (3), (36): Xaa is C or S
  MOD_RES (17), (18), (19), (20), (21): Xaa is A or G
  MOD_RES (22), (23), (24), (25): Xaa is A or G or is absent
PXXVSQDLNAISILYFXXXXXXXXXLKKYRMIVKSX

SEQ ID NO: 6299 - protein, 37 aa, Artificial Sequence
  GFR-binding peptide
  MOD_RES (1), (35), (37): Xaa is C or S
  MOD_RES (15), (16), (17), (18), (19): Xaa is A or G
  MOD_RES (20), (21), (22), (23): Xaa is A or G or is absent
XAPTKLNAISVLYFXXXXXXXXXLKKYRNMVVRSXGX

SEQ ID NO: 6300 - protein, 34 aa, Artificial Sequence
  GFR-binding peptide
  MOD_RES (2), (3), (34): Xaa is C or S
PXXVSQDLSATSILYYIGKTPKILRKHRMIVKSX

SEQ ID NO: 6301 - protein, 41 aa, Artificial Sequence
  GFR-binding peptide
  MOD_RES (6), (7), (39), (41): Xaa is C or S
TVPKPXXAPTQLSPISVLYKDDSSNVILKYHYNMVVRAXGX

SEQ ID NO: 6302 - protein, 38 aa, Artificial Sequence
  GFR-binding peptide
  MOD_RES (2), (3), (35), (37): Xaa is C or S
AXXAPTKLNAISVLYFDSSNNVILKKYRNMVVKAXGXH

SEQ ID NO: 6303 - protein, 34 aa, Artificial Sequence
  GFR-binding peptide
  MOD_RES (1), (2): Xaa is C or S
  MOD_RES (16), (17), (18), (19), (20): Xaa is A or G
  MOD_RES (21), (22), (23), (24): Xaa is A or G or is absent
XXAPTKLSAISVLYLXXXXXXXXXLKNYQNMVVK

SEQ ID NO: 6304 - protein, 36 aa, Artificial Sequence
  GFR-binding peptide
  MOD_RES (2), (3), (35): Xaa is C or S
PXXAPTQLSATSVLYYDDSSNVILRKHRNMVVRAXG

SEQ ID NO: 6305 - protein, 40 aa, Artificial Sequence
  GFR-binding peptide
  MOD_RES (4), (5), (37), (39): Xaa is C or S
PKPXXAPTQLSPISVLYKDDSSNVILKYHYNMVVRAXGXH

SEQ ID NO: 6306 - protein, 39 aa, Artificial Sequence
  GFR-binding peptide
  MOD_RES (1), (2), (36), (38): Xaa is C or S
  MOD_RES (16), (17), (18), (19), (20): Xaa is A or G
  MOD_RES (21), (22), (23), (24): Xaa is A or G or is absent
XXAPTQLNAISVLYFXXXXXXXXXLKKYRNMVVRAXGXH

SEQ ID NO: 6307 - protein, 38 aa, Artificial Sequence
  GFR-binding peptide
  MOD_RES (5), (6): Xaa is C or S
  MOD_RES (20), (21), (22), (23), (24): Xaa is A or G
  MOD_RES (25), (26), (27), (28): Xaa is A or G or is absent
SASPXXVSQDLNAISILYFXXXXXXXXXLKKYRMIVKS

SEQ ID NO: 6308 - protein, 34 aa, Artificial Sequence
  GFR-binding peptide
  MOD_RES (1), (2): Xaa is C or S
  MOD_RES (16), (17), (18), (19), (20): Xaa is A or G
  MOD_RES (21), (22), (23), (24): Xaa is A or G or is absent
XXAPTKLSAISVLYLXXXXXXXXXLKNYQNMVVR

SEQ ID NO: 6309 - protein, 32 aa, Artificial Sequence
  GFR-binding peptide
  MOD_RES (2), (2): Xaa is C or S
TXAPTKLSAISVLYLDDSSNVILKNYQNMVVR

SEQ ID NO: 6310 - protein, 34 aa, Artificial Sequence
  GFR-binding peptide
  MOD_RES (3), (4): Xaa is C or S
SPXXVSQDLSPISILYKIGKTPKILKYHYMIVKS

SEQ ID NO: 6311 - protein, 38 aa, Artificial Sequence
  GFR-binding peptide
  MOD_RES (2), (3), (35), (37): Xaa is C or S
AXXVPTELSPISMLYKDENEKVVLKYHYDMVVEGXGXR

SEQ ID NO: 6312 - protein, 36 aa, Artificial Sequence
  GFR-binding peptide
  MOD_RES (1), (2), (35): Xaa is C or S
  MOD_RES (16), (17), (18), (19), (20): Xaa is A or G
  MOD_RES (21), (22), (23), (24): Xaa is A or G or is absent
XXVSQDLSATSILYYXXXXXXXXXLRKHRMIVKSXK

SEQ ID NO: 6313 - protein, 41 aa, Artificial Sequence
  GFR-binding peptide
  MOD_RES (5), (5): Xaa is C or S
RNVQXRPTQVQLSATSVLYYEIVRKKPIFLRKHRTLEDHLA

SEQ ID NO: 6314 - protein, 39 aa, Artificial Sequence
  GFR-binding peptide
  MOD_RES (4), (5), (37), (39): Xaa is C or S
PKPXXAPTQLSPISVLYKDDSSNVILKYHYNMVVRAXGX

SEQ ID NO: 6315 - protein, 36 aa, Artificial Sequence
  GFR-binding peptide
  MOD_RES (2), (2): Xaa is C or S
QXRPTQVQLSPISVLYKEIVRKKPIFLKYHYTLEDH

SEQ ID NO: 6316 - protein, 38 aa, Artificial Sequence
  GFR-binding peptide
  MOD_RES (5), (6), (38): Xaa is C or S
VPKPXXAPTQLSPISVLYKDDSSNVILKYHYNMVVRAX

SEQ ID NO: 6317 - protein, 36 aa, Artificial Sequence
  GFR-binding peptide
  MOD_RES (4), (5), (36): Xaa is C or S
ASPXXVSQDLNAISILYFIGKTPKILKKYRMIVKSX

SEQ ID NO: 6318 - protein, 37 aa, Artificial Sequence
  GFR-binding peptide
  MOD_RES (3), (4), (35), (37): Xaa is C or S
SPXXVPQDLSATSILYYVGRTPKVLRKHRMVVKSXKX

SEQ ID NO: 6319 - protein, 40 aa, Artificial Sequence
  GFR-binding peptide
  MOD_RES (4), (5), (37), (39): Xaa is C or S
PKAXXVPTELSPISMLYKDEYDKVVLKYHYEMVVEGXGXR

SEQ ID NO: 6320 - protein, 44 aa, Artificial Sequence
  GFR-binding peptide
  MOD_RES (5), (42), (44): Xaa is C or S
  MOD_RES (21), (22), (23), (24), (25): Xaa is A or G
  MOD_RES (26), (27), (28), (29): Xaa is A or G or is absent
RNVQXRPTQVQLSAISVLYLXXXXXXXXXLKNYQTLEDHLAXKX

SEQ ID NO: 6321 - protein, 41 aa, Artificial Sequence
  GFR-binding peptide
  MOD_RES (4), (41): Xaa is C or S
NVQXRPTQVQLNAISVLYFEIVRKKPIFLKKYRTLEDHLAX

SEQ ID NO: 6322 - protein, 37 aa, Artificial Sequence
  GFR-binding peptide
  MOD_RES (2), (3), (37): Xaa is C or S
  MOD_RES (17), (18), (19), (20), (21): Xaa is A or G
  MOD_RES (22), (23), (24), (25): Xaa is A or G or is absent
AXXVPTELSAISMLYLXXXXXXXXXLKNYQDMVVEGX

SEQ ID NO: 6323 - protein, 35 aa, Artificial Sequence
  GFR-binding peptide
  MOD_RES (1), (34): Xaa is C or S
  MOD_RES (15), (16), (17), (18), (19): Xaa is A or G
  MOD_RES (20), (21), (22), (23): Xaa is A or G or is absent
XVSQDLSAISILYLXXXXXXXXXLKNYQMIVKSXK

SEQ ID NO: 6324 - protein, 35 aa, Artificial Sequence
  GFR-binding peptide
  MOD_RES (1), (34): Xaa is C or S
  MOD_RES (15), (16), (17), (18), (19): Xaa is A or G
  MOD_RES (20), (21), (22), (23): Xaa is A or G or is absent
XVPQDLSATSILYYXXXXXXXXXLRKHRMVVKSXK

SEQ ID NO: 6325 - protein, 35 aa, Artificial Sequence
  GFR-binding peptide
  MOD_RES (34), (34): Xaa is C or S
  MOD_RES (14), (15), (16), (17), (18): Xaa is A or G
  MOD_RES (19), (20), (21), (22): Xaa is A or G or is absent
VPTELNAISMLYFXXXXXXXXXLKKYREMVVEGXG

SEQ ID NO: 6326 - protein, 36 aa, Artificial Sequence
  GFR-binding peptide
  MOD_RES (3), (4), (36): Xaa is C or S
KAXXVPTELSPISMLYKDEYDKVVLKYHYEMVVEGX

SEQ ID NO: 6327 - protein, 32 aa, Artificial Sequence
  GFR-binding peptide
  MOD_RES (1), (1): Xaa is C or S
XAPTKLSPISVLYKDSSNNVILKYHYNMVVKA

SEQ ID NO: 6328 - protein, 37 aa, Artificial Sequence
  GFR-binding peptide
  MOD_RES (1), (2), (34), (36): Xaa is C or S
XXVPTELSATSMLYYDEYDKVVLRKHREMVVEGXGXR

SEQ ID NO: 6329 - protein, 41 aa, Artificial Sequence
  GFR-binding peptide
  MOD_RES (5), (5): Xaa is C or S
RNVQXRPTQVQLSAISVLYLEIVRKKPIFLKNYQTLEDHLA

SEQ ID NO: 6330 - protein, 40 aa, Artificial Sequence
  GFR-binding peptide
  MOD_RES (6), (7): Xaa is C or S
  MOD_RES (21), (22), (23), (24), (25): Xaa is A or G
  MOD_RES (26), (27), (28), (29): Xaa is A or G or is absent
SIPKAXXVPTELSATSMLYYXXXXXXXXXLRKHREMVVEG

SEQ ID NO: 6331 - protein, 35 aa, Artificial Sequence
  GFR-binding peptide
  MOD_RES (2), (3), (35): Xaa is C or S
PXXAPTQLSATSVLYYDDSSNVILRKHRNMVVRAX

SEQ ID NO: 6332 - protein, 37 aa, Artificial Sequence
  GFR-binding peptide
  MOD_RES (1), (2), (36): Xaa is C or S
  MOD_RES (16), (17), (18), (19), (20): Xaa is A or G
  MOD_RES (21), (22), (23), (24): Xaa is A or G or is absent
XXVPTELSPISMLYKXXXXXXXXXLKYHYEMVVEGXG

SEQ ID NO: 6333 - protein, 36 aa, Artificial Sequence
  GFR-binding peptide
  MOD_RES (36), (36): Xaa is C or S
  MOD_RES (15), (16), (17), (18), (19): Xaa is A or G
  MOD_RES (20), (21), (22), (23): Xaa is A or G or is absent
PTQVQLSPISVLYKXXXXXXXXXLKYHYTLEDHLAX

SEQ ID NO: 6334 - protein, 42 aa, Artificial Sequence
  GFR-binding peptide
  MOD_RES (5), (6), (40), (42): Xaa is C or S
  MOD_RES (20), (21), (22), (23), (24): Xaa is A or G
  MOD_RES (25), (26), (27), (28): Xaa is A or G or is absent
VPKPXXAPTKLNAISVLYFXXXXXXXXXLKKYRNMVVRSXGX

SEQ ID NO: 6335 - protein, 42 aa, Artificial Sequence
  GFR-binding peptide
  MOD_RES (4), (41): Xaa is C or S
  MOD_RES (20), (21), (22), (23), (24): Xaa is A or G
  MOD_RES (25), (26), (27), (28): Xaa is A or G or is absent
NVQXRPTQVQLSAISVLYLXXXXXXXXXLKNYQTLEDHLAXK

SEQ ID NO: 6336 - protein, 41 aa, Artificial Sequence
  GFR-binding peptide
  MOD_RES (5), (6), (40): Xaa is C or S
  MOD_RES (20), (21), (22), (23), (24): Xaa is A or G
  MOD_RES (25), (26), (27), (28): Xaa is A or G or is absent
IPKAXXVPTELSATSMLYYXXXXXXXXXLRKHRDMVVEGXG

SEQ ID NO: 6337 - protein, 34 aa, Artificial Sequence
  GFR-binding peptide
  MOD_RES (1), (32), (34): Xaa is C or S
XVPQALSAISILYLVGRKPKVLKNYQMIVRSXKX

SEQ ID NO: 6338 - protein, 33 aa, Artificial Sequence
  GFR-binding peptide
  MOD_RES (2), (3): Xaa is C or S
AXXVPTELNAISMLYFDENEKVVLKKYRDMVVE

SEQ ID NO: 6339 - protein, 36 aa, Artificial Sequence
  GFR-binding peptide
  MOD_RES (3), (4): Xaa is C or S
KAXXVPTKLSATSVLYYDDMGVPTLRKHREGMSVAE

SEQ ID NO: 6340 - protein, 32 aa, Artificial Sequence
  GFR-binding peptide
  MOD_RES (14), (15), (16), (17), (18): Xaa is A or G
  MOD_RES (19), (20), (21), (22): Xaa is A or G or is absent
TQVQLSPISVLYKXXXXXXXXXLKYHYTLEDH

SEQ ID NO: 6341 - protein, 35 aa, Artificial Sequence
  GFR-binding peptide
  MOD_RES (4), (5): Xaa is C or S
PKAXXVPTELSATSMLYYDEYDKVVLRKHREMVVE

SEQ ID NO: 6342 - protein, 43 aa, Artificial Sequence
  GFR-binding peptide
  MOD_RES (6), (7), (40), (42): Xaa is C or S
  MOD_RES (21), (22), (23), (24), (25): Xaa is A or G
  MOD_RES (26), (27), (28), (29): Xaa is A or G or is absent
ASAAPXXVPQALSATSILYYXXXXXXXXXLRKHRMIVRSXKXS

SEQ ID NO: 6343 - protein, 37 aa, Artificial Sequence
  GFR-binding peptide
  MOD_RES (36), (36): Xaa is C or S
PTQVQLSATSVLYYEIVRKKPIFLRKHRTLEDHLAXK

SEQ ID NO: 6344 - protein, 37 aa, Artificial Sequence
  GFR-binding peptide
  MOD_RES (2), (36): Xaa is C or S
  MOD_RES (16), (17), (18), (19), (20): Xaa is A or G
  MOD_RES (21), (22), (23), (24): Xaa is A or G or is absent
TXAPTKLSPISVLYKXXXXXXXXXLKYHYNMVVRSXG

SEQ ID NO: 6345 - protein, 39 aa, Artificial Sequence
  GFR-binding peptide
  MOD_RES (4), (5), (38): Xaa is C or S
  MOD_RES (19), (20), (21), (22), (23): Xaa is A or G
  MOD_RES (24), (25), (26), (27): Xaa is A or G or is absent
ASPXXVPQDLSATSILYYXXXXXXXXXLRKHRMVVKSXK

SEQ ID NO: 6346 - protein, 41 aa, Artificial Sequence
  GFR-binding peptide
  MOD_RES (2), (39), (41): Xaa is C or S
QXRPTQVQLSPISVLYKEIVRKKPIFLKYHYTLEDHLAXKX

SEQ ID NO: 6347 - protein, 31 aa, Artificial Sequence
  GFR-binding peptide
  MOD_RES (1), (1): Xaa is C or S
XVPTELNAISMLYFDENEKVVLKKYRDMVVE

SEQ ID NO: 6348 - protein, 33 aa, Artificial Sequence
  GFR-binding peptide
  MOD_RES (2), (2): Xaa is C or S
TXAPTKLSATSVLYYDDSSNVILRKHRNMVVRS

SEQ ID NO: 6349 - protein, 41 aa, Artificial Sequence
  GFR-binding peptide
  MOD_RES (4), (5), (39), (41): Xaa is C or S
  MOD_RES (19), (20), (21), (22), (23): Xaa is A or G
  MOD_RES (24), (25), (26), (27): Xaa is A or G or is absent
PKPXXAPTQLSATSVLYYXXXXXXXXXLRKHRNMVVRAXGX

SEQ ID NO: 6350 - protein, 35 aa, Artificial Sequence
  GFR-binding peptide
  MOD_RES (34), (34): Xaa is C or S
  MOD_RES (14), (15), (16), (17), (18): Xaa is A or G
  MOD_RES (19), (20), (21), (22): Xaa is A or G or is absent
APTQLSPISVLYKXXXXXXXXXLKYHYNMVVRAXG

SEQ ID NO: 6351 - protein, 38 aa, Artificial Sequence
  GFR-binding peptide
  MOD_RES (5), (6): Xaa is C or S
  MOD_RES (20), (21), (22), (23), (24): Xaa is A or G
  MOD_RES (25), (26), (27), (28): Xaa is A or G or is absent
IPKAXXVPTELSAISMLYLXXXXXXXXXLKNYQDMVVE

SEQ ID NO: 6352 - protein, 40 aa, Artificial Sequence
  GFR-binding peptide
  MOD_RES (4), (5), (37), (39): Xaa is C or S
PKAXXVPTELNAISMLYFDENEKVVLKKYRDMVVEGXGXR

SEQ ID NO: 6353 - protein, 34 aa, Artificial Sequence
  GFR-binding peptide
  MOD_RES (32), (34): Xaa is C or S
APTKLSATSVLYYDDSSNVILRKHRNMVVRSXGX

SEQ ID NO: 6354 - protein, 32 aa, Artificial Sequence
  GFR-binding peptide
  MOD_RES (1), (2): Xaa is C or S
XXVSQDLSAISILYLIGKTPKILKNYQMIVKS

SEQ ID NO: 6355 - protein, 33 aa, Artificial Sequence
  GFR-binding peptide
  MOD_RES (1), (1): Xaa is C or S
  MOD_RES (15), (16), (17), (18), (19): Xaa is A or G
  MOD_RES (20), (21), (22), (23): Xaa is A or G or is absent
XVPTELNAISMLYFXXXXXXXXXLKKYREMVVE

SEQ ID NO: 6356 - protein, 39 aa, Artificial Sequence
  GFR-binding peptide
  MOD_RES (6), (7): Xaa is C or S
  MOD_RES (21), (22), (23), (24), (25): Xaa is A or G
  MOD_RES (26), (27), (28), (29): Xaa is A or G or is absent
AVPKAXXAPTKLSPISVLYKXXXXXXXXXLKYHYNMVVK

SEQ ID NO: 6357 - protein, 42 aa, Artificial Sequence
  GFR-binding peptide
  MOD_RES (5), (42): Xaa is C or S
RNVQXRPTQVQLSPISVLYKEIVRKKPIFLKYHYTLEDHLAX

SEQ ID NO: 6358 - protein, 35 aa, Artificial Sequence
  GFR-binding peptide
  MOD_RES (1), (1): Xaa is C or S
  MOD_RES (15), (16), (17), (18), (19): Xaa is A or G
  MOD_RES (20), (21), (22), (23): Xaa is A or G or is absent
XVPTKLSATSVLYYXXXXXXXXXLRKHREGMSVAE

SEQ ID NO: 6359 - protein, 38 aa, Artificial Sequence
  GFR-binding peptide
  MOD_RES (6), (7), (38): Xaa is C or S
ASAAPXXVPQALSAISILYLVGRKPKVLKNYQMIVRSX

SEQ ID NO: 6360 - protein, 36 aa, Artificial Sequence
  GFR-binding peptide
  MOD_RES (1), (35): Xaa is C or S
  MOD_RES (15), (16), (17), (18), (19): Xaa is A or G
  MOD_RES (20), (21), (22), (23): Xaa is A or G or is absent
XAPTKLSATSVLYYXXXXXXXXXLRKHRNMVVRSXG

SEQ ID NO: 6361 - protein, 33 aa, Artificial Sequence
  GFR-binding peptide
  MOD_RES (1), (1): Xaa is C or S
  MOD_RES (15), (16), (17), (18), (19): Xaa is A or G
  MOD_RES (20), (21), (22), (23): Xaa is A or G or is absent
XVPQDLSAISILYLXXXXXXXXXLKNYQMVVKS

SEQ ID NO: 6362 - protein, 35 aa, Artificial Sequence
  GFR-binding peptide
  MOD_RES (1), (1): Xaa is C or S
  MOD_RES (15), (16), (17), (18), (19): Xaa is A or G
  MOD_RES (20), (21), (22), (23): Xaa is A or G or is absent
XVPTKLSAISVLYLXXXXXXXXXLKNYQEGMSVAE

SEQ ID NO: 6363 - protein, 32 aa, Artificial Sequence
  GFR-binding peptide
  MOD_RES (1), (32): Xaa is C or S
XVPQALSAISILYLVGRKPKVLKNYQMIVRSX

SEQ ID NO: 6364 - protein, 41 aa, Artificial Sequence
  GFR-binding peptide
  MOD_RES (3), (40): Xaa is C or S
  MOD_RES (19), (20), (21), (22), (23): Xaa is A or G
  MOD_RES (24), (25), (26), (27): Xaa is A or G or is absent
VQXRPTQVQLSPISVLYKXXXXXXXXXLKYHYTLEDHLAXK

SEQ ID NO: 6365 - protein, 39 aa, Artificial Sequence
  GFR-binding peptide
  MOD_RES (6), (7): Xaa is C or S
  MOD_RES (21), (22), (23), (24), (25): Xaa is A or G
  MOD_RES (26), (27), (28), (29): Xaa is A or G or is absent
TVPKPXXAPTQLSPISVLYKXXXXXXXXXLKYHYNMVVR

SEQ ID NO: 6366 - protein, 40 aa, Artificial Sequence
  GFR-binding peptide
  MOD_RES (2), (3), (38), (40): Xaa is C or S
  MOD_RES (17), (18), (19), (20), (21): Xaa is A or G
  MOD_RES (22), (23), (24), (25): Xaa is A or G or is absent
AXXVPTKLSATSVLYYXXXXXXXXXLRKHREGMSVAEXGX

SEQ ID NO: 6367 - protein, 32 aa, Artificial Sequence
  GFR-binding peptide
  MOD_RES (14), (15), (16), (17), (18): Xaa is A or G
  MOD_RES (19), (20), (21), (22): Xaa is A or G or is absent
APTQLNAISVLYFXXXXXXXXXLKKYRNMVVR

SEQ ID NO: 6368 - protein, 35 aa, Artificial Sequence
  GFR-binding peptide
  MOD_RES (1), (2): Xaa is C or S
  MOD_RES (16), (17), (18), (19), (20): Xaa is A or G
  MOD_RES (21), (22), (23), (24): Xaa is A or G or is absent
XXAPTKLSAISVLYLXXXXXXXXXLKNYQNMVVKA

SEQ ID NO: 6369 - protein, 37 aa, Artificial Sequence
  GFR-binding peptide
  MOD_RES (5), (6): Xaa is C or S
VPKPXXAPTKLSPISVLYKDDSSNVILKYHYNMVVRS

SEQ ID NO: 6370 - protein, 43 aa, Artificial Sequence
  GFR-binding peptide
  MOD_RES (4), (5), (40), (42): Xaa is C or S
  MOD_RES (19), (20), (21), (22), (23): Xaa is A or G
  MOD_RES (24), (25), (26), (27): Xaa is A or G or is absent
GKAXXVPTKLNAISVLYFXXXXXXXXXLKKYREGMSVAEXGXR

SEQ ID NO: 6371 - protein, 31 aa, Artificial Sequence
  GFR-binding peptide
  MOD_RES (31), (31): Xaa is C or S
VPQDLSAISILYLVGRTPKVLKNYQMVVKSX

SEQ ID NO: 6372 - protein, 40 aa, Artificial Sequence
  GFR-binding peptide
  MOD_RES (6), (7), (38), (40): Xaa is C or S
ASAAPXXVPQALSPISILYKVGRKPKVLKYHYMIVRSXKX

SEQ ID NO: 6373 - protein, 39 aa, Artificial Sequence
  GFR-binding peptide
  MOD_RES (3), (4), (38): Xaa is C or S
  MOD_RES (18), (19), (20), (21), (22): Xaa is A or G
  MOD_RES (23), (24), (25), (26): Xaa is A or G or is absent
KPXXAPTQLNAISVLYFXXXXXXXXXLKKYRNMVVRAXG

SEQ ID NO: 6374 - protein, 38 aa, Artificial Sequence
  GFR-binding peptide
  MOD_RES (35), (37): Xaa is C or S
  MOD_RES (14), (15), (16), (17), (18): Xaa is A or G
  MOD_RES (19), (20), (21), (22): Xaa is A or G or is absent
VPTKLNAISVLYFXXXXXXXXXLKKYREGMSVAEXGXR

SEQ ID NO: 6375 - protein, 35 aa, Artificial Sequence
  GFR-binding peptide
  MOD_RES (4), (5): Xaa is C or S
PKAXXVPTELSPISMLYKDEYDKVVLKYHYEMVVE

SEQ ID NO: 6376 - protein, 36 aa, Artificial Sequence
  GFR-binding peptide
  MOD_RES (3), (4): Xaa is C or S
  MOD_RES (18), (19), (20), (21), (22): Xaa is A or G
  MOD_RES (23), (24), (25), (26): Xaa is A or G or is absent
KAXXVPTELSPISMLYKXXXXXXXXXLKYHYEMVVE

SEQ ID NO: 6377 - protein, 37 aa, Artificial Sequence
  GFR-binding peptide
  MOD_RES (2), (3), (35), (37): Xaa is C or S
PXXAPTQLSPISVLYKDDSSNVILKYHYNMVVRAXGX

SEQ ID NO: 6378 - protein, 35 aa, Artificial Sequence
  GFR-binding peptide
  MOD_RES (35), (35): Xaa is C or S
  MOD_RES (14), (15), (16), (17), (18): Xaa is A or G
  MOD_RES (19), (20), (21), (22): Xaa is A or G or is absent
VPTKLNAISVLYFXXXXXXXXXLKKYREGMSVAEX

SEQ ID NO: 6379 - protein, 40 aa, Artificial Sequence
  GFR-binding peptide
  MOD_RES (3), (4), (37), (39): Xaa is C or S
  MOD_RES (18), (19), (20), (21), (22): Xaa is A or G
  MOD_RES (23), (24), (25), (26): Xaa is A or G or is absent
APXXVPQALSAISILYLXXXXXXXXXLKNYQMIVRSXKXS

SEQ ID NO: 6380 - protein, 38 aa, Artificial Sequence
  GFR-binding peptide
  MOD_RES (6), (7): Xaa is C or S
YVPKPXXAPTKLSAISVLYLDDSSNVILKNYQNMVVRS

SEQ ID NO: 6381 - protein, 39 aa, Artificial Sequence
  GFR-binding peptide
  MOD_RES (4), (5), (36), (38): Xaa is C or S
ASPXXVPQDLNAISILYFVGRTPKVLKKYRMVVKSXKXS

SEQ ID NO: 6382 - protein, 37 aa, Artificial Sequence
  GFR-binding peptide
  MOD_RES (4), (4): Xaa is C or S
  MOD_RES (18), (19), (20), (21), (22): Xaa is A or G
  MOD_RES (23), (24), (25), (26): Xaa is A or G or is absent
KPTXAPTKLNAISVLYFXXXXXXXXXLKKYRNMVVRS

SEQ ID NO: 6383 - protein, 39 aa, Artificial Sequence
  GFR-binding peptide
  MOD_RES (5), (6): Xaa is C or S
  MOD_RES (20), (21), (22), (23), (24): Xaa is A or G
  MOD_RES (25), (26), (27), (28): Xaa is A or G or is absent
IPKAXXVPTELNAISMLYFXXXXXXXXXLKKYREMVVEG

SEQ ID NO: 6384 - protein, 35 aa, Artificial Sequence
  GFR-binding peptide
  MOD_RES (33), (35): Xaa is C or S
  MOD_RES (14), (15), (16), (17), (18): Xaa is A or G
  MOD_RES (19), (20), (21), (22): Xaa is A or G or is absent
VSQDLSAISILYLXXXXXXXXXLKNYQMIVKSXKX

SEQ ID NO: 6385 - protein, 40 aa, Artificial Sequence
  GFR-binding peptide
  MOD_RES (5), (6), (37), (39): Xaa is C or S
SASPXXVPQDLSPISILYKVGRTPKVLKYHYMVVKSXKXS

SEQ ID NO: 6386 - protein, 43 aa, Artificial Sequence
  GFR-binding peptide
  MOD_RES (5), (6), (40), (42): Xaa is C or S
  MOD_RES (20), (21), (22), (23), (24): Xaa is A or G
  MOD_RES (25), (26), (27), (28): Xaa is A or G or is absent
IPKAXXVPTELSATSMLYYXXXXXXXXXLRKHREMVVEGXGXR

SEQ ID NO: 6387 - protein, 40 aa, Artificial Sequence
  GFR-binding peptide
  MOD_RES (7), (39): Xaa is C or S
HVTKPTXAPTKLSAISVLYLDDSSNVILKNYQNMVVRSXG

SEQ ID NO: 6388 - protein, 33 aa, Artificial Sequence
  GFR-binding peptide
TQVQLSAISVLYLEIVRKKPIFLKNYQTLEDHL

SEQ ID NO: 6389 - protein, 34 aa, Artificial Sequence
  GFR-binding peptide
  MOD_RES (2), (3), (34): Xaa is C or S
PXXVPQALSATSILYYVGRKPKVLRKHRMIVRSX

SEQ ID NO: 6390 - protein, 38 aa, Artificial Sequence
  GFR-binding peptide
  MOD_RES (4), (5): Xaa is C or S
  MOD_RES (19), (20), (21), (22), (23): Xaa is A or G
  MOD_RES (24), (25), (26), (27): Xaa is A or G or is absent
PKAXXVPTELSPISMLYKXXXXXXXXXLKYHYEMVVEG

SEQ ID NO: 6391 - protein, 38 aa, Artificial Sequence
  GFR-binding peptide
  MOD_RES (4), (5), (37): Xaa is C or S
PKAXXVPTELSPISMLYKDENEKVVLKYHYDMVVEGXG

SEQ ID NO: 6392 - protein, 34 aa, Artificial Sequence
  GFR-binding peptide
  MOD_RES (32), (34): Xaa is C or S
APTKLSAISVLYLDDSSNVILKNYQNMVVRSXGX

SEQ ID NO: 6393 - protein, 33 aa, Artificial Sequence
  GFR-binding peptide
PTQVQLSPISVLYKEIVRKKPIFLKYHYTLEDH

SEQ ID NO: 6394 - protein, 38 aa, Artificial Sequence
  GFR-binding peptide
  MOD_RES (3), (4), (35), (37): Xaa is C or S
SPXXVPQDLSAISILYLVGRTPKVLKNYQMVVKSXKXS

SEQ ID NO: 6395 - protein, 37 aa, Artificial Sequence
  GFR-binding peptide
  MOD_RES (4), (5): Xaa is C or S
  MOD_RES (19), (20), (21), (22), (23): Xaa is A or G
  MOD_RES (24), (25), (26), (27): Xaa is A or G or is absent
PKAXXVPTELSATSMLYYXXXXXXXXXLRKHRDMVVE

SEQ ID NO: 6396 - protein, 34 aa, Artificial Sequence
  GFR-binding peptide
  MOD_RES (31), (33): Xaa is C or S
VSQDLSPISILYKIGKTPKILKYHYMIVKSXKXS

SEQ ID NO: 6397 - protein, 34 aa, Artificial Sequence
  GFR-binding peptide
  MOD_RES (1), (1): Xaa is C or S
  MOD_RES (15), (16), (17), (18), (19): Xaa is A or G
  MOD_RES (20), (21), (22), (23): Xaa is A or G or is absent
XAPTQLSATSVLYYXXXXXXXXXLRKHRNMVVRA

SEQ ID NO: 6398 - protein, 38 aa, Artificial Sequence
  GFR-binding peptide
  MOD_RES (1), (35), (37): Xaa is C or S
  MOD_RES (15), (16), (17), (18), (19): Xaa is A or G
  MOD_RES (20), (21), (22), (23): Xaa is A or G or is absent
XAPTQLSPISVLYKXXXXXXXXXLKYHYNMVVRAXGXH

SEQ ID NO: 6399 - protein, 38 aa, Artificial Sequence
  GFR-binding peptide
  MOD_RES (3), (4), (37): Xaa is C or S
  MOD_RES (18), (19), (20), (21), (22): Xaa is A or G
  MOD_RES (23), (24), (25), (26): Xaa is A or G or is absent
SPXXVSQDLSPISILYKXXXXXXXXXLKYHYMIVKSXK

SEQ ID NO: 6400 - protein, 32 aa, Artificial Sequence
  GFR-binding peptide
  MOD_RES (2), (2): Xaa is C or S
TXAPTKLSPISVLYKDDSSNVILKYHYNMVVR

SEQ ID NO: 6401 - protein, 43 aa, Artificial Sequence
  GFR-binding peptide
  MOD_RES (5), (42): Xaa is C or S
  MOD_RES (21), (22), (23), (24), (25): Xaa is A or G
  MOD_RES (26), (27), (28), (29): Xaa is A or G or is absent
RNVQXRPTQVQLSPISVLYKXXXXXXXXXLKYHYTLEDHLAXK

SEQ ID NO: 6402 - protein, 35 aa, Artificial Sequence
  GFR-binding peptide
  MOD_RES (3), (3): Xaa is C or S
  MOD_RES (17), (18), (19), (20), (21): Xaa is A or G
  MOD_RES (22), (23), (24), (25): Xaa is A or G or is absent
PTXAPTKLSPISVLYKXXXXXXXXXLKYHYNMVVR

SEQ ID NO: 6403 - protein, 39 aa, Artificial Sequence
  GFR-binding peptide
  MOD_RES (37), (39): Xaa is C or S
  MOD_RES (16), (17), (18), (19), (20): Xaa is A or G
  MOD_RES (21), (22), (23), (24): Xaa is A or G or is absent
RPTQVQLNAISVLYFXXXXXXXXXLKKYRTLEDHLAXKX

SEQ ID NO: 6404 - protein, 36 aa, Artificial Sequence
  GFR-binding peptide
  MOD_RES (1), (35): Xaa is C or S
  MOD_RES (15), (16), (17), (18), (19): Xaa is A or G
  MOD_RES (20), (21), (22), (23): Xaa is A or G or is absent
XAPTKLSAISVLYLXXXXXXXXXLKNYQNMVVKAXG

SEQ ID NO: 6405 - protein, 38 aa, Artificial Sequence
  GFR-binding peptide
  MOD_RES (3), (4), (37): Xaa is C or S
KAXXVPTKLSAISVLYLDDMGVPTLKNYQEGMSVAEXG

SEQ ID NO: 6406 - protein, 39 aa, Artificial Sequence
  GFR-binding peptide
  MOD_RES (6), (7), (39): Xaa is C or S
TVPKPXXAPTQLSPISVLYKDDSSNVILKYHYNMVVRAX

SEQ ID NO: 6407 - protein, 38 aa, Artificial Sequence
  GFR-binding peptide
  MOD_RES (3), (4), (36), (38): Xaa is C or S
KAXXVPTELSPISMLYKDEYDKVVLKYHYEMVVEGXGX

SEQ ID NO: 6408 - protein, 39 aa, Artificial Sequence
  GFR-binding peptide
  MOD_RES (4), (5): Xaa is C or S
  MOD_RES (19), (20), (21), (22), (23): Xaa is A or G
  MOD_RES (24), (25), (26), (27): Xaa is A or G or is absent
GKAXXVPTKLNAISVLYFXXXXXXXXXLKKYREGMSVAE

SEQ ID NO: 6409 - protein, 33 aa, Artificial Sequence
  GFR-binding peptide
  MOD_RES (2), (2): Xaa is C or S
TXAPTKLSAISVLYLDDSSNVILKNYQNMVVRS

SEQ ID NO: 6410 - protein, 42 aa, Artificial Sequence
  GFR-binding peptide
  MOD_RES (6), (40), (42): Xaa is C or S
  MOD_RES (20), (21), (22), (23), (24): Xaa is A or G
  MOD_RES (25), (26), (27), (28): Xaa is A or G or is absent
VTKPTXAPTKLSPISVLYKXXXXXXXXXLKYHYNMVVRSXGX

SEQ ID NO: 6411 - protein, 37 aa, Artificial Sequence
  GFR-binding peptide
  MOD_RES (4), (5): Xaa is C or S
  MOD_RES (19), (20), (21), (22), (23): Xaa is A or G
  MOD_RES (24), (25), (26), (27): Xaa is A or G or is absent
PKAXXVPTELSAISMLYLXXXXXXXXXLKNYQEMVVE

SEQ ID NO: 6412 - protein, 38 aa, Artificial Sequence
  GFR-binding peptide
  MOD_RES (4), (5): Xaa is C or S
  MOD_RES (19), (20), (21), (22), (23): Xaa is A or G
  MOD_RES (24), (25), (26), (27): Xaa is A or G or is absent
PKAXXVPTELSATSMLYYXXXXXXXXXLRKHREMVVEG

SEQ ID NO: 6413 - protein, 32 aa, Artificial Sequence
  GFR-binding peptide
  MOD_RES (31), (31): Xaa is C or S
VPQALSATSILYYVGRKPKVLRKHRMIVRSXK

SEQ ID NO: 6414 - protein, 34 aa, Artificial Sequence
  GFR-binding peptide
  MOD_RES (1), (1): Xaa is C or S
  MOD_RES (15), (16), (17), (18), (19): Xaa is A or G
  MOD_RES (20), (21), (22), (23): Xaa is A or G or is absent
XAPTQLSPISVLYKXXXXXXXXXLKYHYNMVVRA

SEQ ID NO: 6415 - protein, 34 aa, Artificial Sequence
  GFR-binding peptide
  MOD_RES (1), (1): Xaa is C or S
  MOD_RES (15), (16), (17), (18), (19): Xaa is A or G
  MOD_RES (20), (21), (22), (23): Xaa is A or G or is absent
XAPTKLSAISVLYLXXXXXXXXXLKNYQNMVVKA

SEQ ID NO: 6416 - protein, 36 aa, Artificial Sequence
  GFR-binding peptide
  MOD_RES (1), (35): Xaa is C or S
  MOD_RES (15), (16), (17), (18), (19): Xaa is A or G
  MOD_RES (20), (21), (22), (23): Xaa is A or G or is absent
XVPTELSATSMLYYXXXXXXXXXLRKHRDMVVEGXG

SEQ ID NO: 6417 - protein, 44 aa, Artificial Sequence
  GFR-binding peptide
  MOD_RES (5), (42), (44): Xaa is C or S
  MOD_RES (21), (22), (23), (24), (25): Xaa is A or G
  MOD_RES (26), (27), (28), (29): Xaa is A or G or is absent
RNVQXRPTQVQLSPISVLYKXXXXXXXXXLKYHYTLEDHLAXKX

SEQ ID NO: 6418 - protein, 39 aa, Artificial Sequence
  GFR-binding peptide
  MOD_RES (5), (6), (37), (39): Xaa is C or S
SASPXXVSQDLSAISILYLIGKTPKILKNYQMIVKSXKX

SEQ ID NO: 6419 - protein, 37 aa, Artificial Sequence
  GFR-binding peptide
  MOD_RES (2), (36): Xaa is C or S
  MOD_RES (16), (17), (18), (19), (20): Xaa is A or G
  MOD_RES (21), (22), (23), (24): Xaa is A or G or is absent
TXAPTKLSAISVLYLXXXXXXXXXLKNYQNMVVRSXG

SEQ ID NO: 6420 - protein, 33 aa, Artificial Sequence
  GFR-binding peptide
PTQVQLNAISVLYFEIVRKKPIFLKKYRTLEDH

SEQ ID NO: 6421 - protein, 35 aa, Artificial Sequence
  GFR-binding peptide
  MOD_RES (2), (34): Xaa is C or S
TXAPTKLSATSVLYYDDSSNVILRKHRNMVVRSXG

SEQ ID NO: 6422 - protein, 36 aa, Artificial Sequence
  GFR-binding peptide
  MOD_RES (3), (4), (36): Xaa is C or S
KPXXAPTQLSPISVLYKDDSSNVILKYHYNMVVRAX

SEQ ID NO: 6423 - protein, 39 aa, Artificial Sequence
  GFR-binding peptide
  MOD_RES (2), (39): Xaa is C or S
  MOD_RES (18), (19), (20), (21), (22): Xaa is A or G
  MOD_RES (23), (24), (25), (26): Xaa is A or G or is absent
QXRPTQVQLNAISVLYFXXXXXXXXXLKKYRTLEDHLAX

SEQ ID NO: 6424 - protein, 39 aa, Artificial Sequence
  GFR-binding peptide
  MOD_RES (2), (36), (38): Xaa is C or S
  MOD_RES (16), (17), (18), (19), (20): Xaa is A or G
  MOD_RES (21), (22), (23), (24): Xaa is A or G or is absent
TXAPTKLSAISVLYLXXXXXXXXXLKNYQNMVVRSXGXH

SEQ ID NO: 6425 - protein, 36 aa, Artificial Sequence
  GFR-binding peptide
  MOD_RES (2), (3): Xaa is C or S
  MOD_RES (17), (18), (19), (20), (21): Xaa is A or G
  MOD_RES (22), (23), (24), (25): Xaa is A or G or is absent
PXXAPTKLSPISVLYKXXXXXXXXXLKYHYNMVVRS

SEQ ID NO: 6426 - protein, 34 aa, Artificial Sequence
  GFR-binding peptide
  MOD_RES (2), (3): Xaa is C or S
AXXVPTELSATSMLYYDEYDKVVLRKHREMVVEG

SEQ ID NO: 6427 - protein, 38 aa, Artificial Sequence
  GFR-binding peptide
  MOD_RES (37), (37): Xaa is C or S
  MOD_RES (16), (17), (18), (19), (20): Xaa is A or G
  MOD_RES (21), (22), (23), (24): Xaa is A or G or is absent
RPTQVQLSAISVLYLXXXXXXXXXLKNYQTLEDHLAXK

SEQ ID NO: 6428 - protein, 38 aa, Artificial Sequence
  GFR-binding peptide
  MOD_RES (4), (5), (38): Xaa is C or S
  MOD_RES (19), (20), (21), (22), (23): Xaa is A or G
  MOD_RES (24), (25), (26), (27): Xaa is A or G or is absent
ASPXXVSQDLSAISILYLXXXXXXXXXLKNYQMIVKSX

SEQ ID NO: 6429 - protein, 39 aa, Artificial Sequence
  GFR-binding peptide
  MOD_RES (5), (5): Xaa is C or S
RNVQXRPTQVQLSPISVLYKEIVRKKPIFLKYHYTLEDH

SEQ ID NO: 6430 - protein, 33 aa, Artificial Sequence
  GFR-binding peptide
  MOD_RES (32), (32): Xaa is C or S
APTKLNAISVLYFDSSNNVILKKYRNMVVKAXG

SEQ ID NO: 6431 - protein, 36 aa, Artificial Sequence
  GFR-binding peptide
  MOD_RES (1), (2), (34), (36): Xaa is C or S
XXAPTKLNAISVLYFDSSNNVILKKYRNMVVKAXGX

SEQ ID NO: 6432 - protein, 37 aa, Artificial Sequence
  GFR-binding peptide
  MOD_RES (4), (5), (36): Xaa is C or S
ASPXXVSQDLNAISILYFIGKTPKILKKYRMIVKSXK

SEQ ID NO: 6433 - protein, 43 aa, Artificial Sequence
  GFR-binding peptide
  MOD_RES (6), (7), (41), (43): Xaa is C or S
  MOD_RES (21), (22), (23), (24), (25): Xaa is A or G
  MOD_RES (26), (27), (28), (29): Xaa is A or G or is absent
AVPKAXXAPTKLSAISVLYLXXXXXXXXXLKNYQNMVVKAXGX

SEQ ID NO: 6434 - protein, 40 aa, Artificial Sequence
  GFR-binding peptide
  MOD_RES (6), (7): Xaa is C or S
  MOD_RES (21), (22), (23), (24), (25): Xaa is A or G
  MOD_RES (26), (27), (28), (29): Xaa is A or G or is absent
SIPKAXXVPTELSAISMLYLXXXXXXXXXLKNYQEMVVEG

SEQ ID NO: 6435 - protein, 41 aa, Artificial Sequence
  GFR-binding peptide
  MOD_RES (4), (5), (39), (41): Xaa is C or S
  MOD_RES (19), (20), (21), (22), (23): Xaa is A or G
  MOD_RES (24), (25), (26), (27): Xaa is A or G or is absent
PKAXXAPTKLNAISVLYFXXXXXXXXXLKKYRNMVVKAXGX

SEQ ID NO: 6436 - protein, 41 aa, Artificial Sequence
  GFR-binding peptide
  MOD_RES (5), (6), (38), (40): Xaa is C or S
IPKAXXVPTELNAISMLYFDENEKVVLKKYRDMVVEGXGXR

SEQ ID NO: 6437 - protein, 41 aa, Artificial Sequence
  GFR-binding peptide
  MOD_RES (3), (4), (38), (40): Xaa is C or S
  MOD_RES (18), (19), (20), (21), (22): Xaa is A or G
  MOD_RES (23), (24), (25), (26): Xaa is A or G or is absent
KAXXAPTKLSAISVLYLXXXXXXXXXLKNYQNMVVKAXGXH

SEQ ID NO: 6438 - protein, 38 aa, Artificial Sequence
  GFR-binding peptide
  MOD_RES (3), (4), (38): Xaa is C or S
  MOD_RES (18), (19), (20), (21), (22): Xaa is A or G
  MOD_RES (23), (24), (25), (26): Xaa is A or G or is absent
KAXXAPTKLSATSVLYYXXXXXXXXXLRKHRNMVVKAX

SEQ ID NO: 6439 - protein, 35 aa, Artificial Sequence
  GFR-binding peptide
  MOD_RES (1), (2), (34): Xaa is C or S
XXVPTELSATSMLYYDENEKVVLRKHRDMVVEGXG

SEQ ID NO: 6440 - protein, 35 aa, Artificial Sequence
  GFR-binding peptide
  MOD_RES (3), (4): Xaa is C or S
KPXXAPTQLSATSVLYYDDSSNVILRKHRNMVVRA

SEQ ID NO: 6441 - protein, 38 aa, Artificial Sequence
  GFR-binding peptide
  MOD_RES (3), (4), (37): Xaa is C or S
  MOD_RES (18), (19), (20), (21), (22): Xaa is A or G
  MOD_RES (23), (24), (25), (26): Xaa is A or G or is absent
SPXXVPQDLSAISILYLXXXXXXXXXLKNYQMVVKSXK

SEQ ID NO: 6442 - protein, 34 aa, Artificial Sequence
  GFR-binding peptide
  MOD_RES (2), (34): Xaa is C or S
TXAPTKLSAISVLYLDDSSNVILKNYQNMVVRSX

SEQ ID NO: 6443 - protein, 41 aa, Artificial Sequence
  GFR-binding peptide
  MOD_RES (3), (4), (38), (40): Xaa is C or S
  MOD_RES (18), (19), (20), (21), (22): Xaa is A or G
  MOD_RES (23), (24), (25), (26): Xaa is A or G or is absent
KAXXVPTELNAISMLYFXXXXXXXXXLKKYREMVVEGXGXR

SEQ ID NO: 6444 - protein, 35 aa, Artificial Sequence
  GFR-binding peptide
  MOD_RES (1), (2), (34): Xaa is C or S
XXAPTKLSPISVLYKDDSSNVILKYHYNMVVRSXG

SEQ ID NO: 6445 - protein, 36 aa, Artificial Sequence
  GFR-binding peptide
  MOD_RES (4), (5): Xaa is C or S
PKAXXVPTELNAISMLYFDEYDKVVLKKYREMVVEG

SEQ ID NO: 6446 - protein, 33 aa, Artificial Sequence
  GFR-binding peptide
  MOD_RES (2), (3): Xaa is C or S
PXXAPTQLSPISVLYKDDSSNVILKYHYNMVVR

SEQ ID NO: 6447 - protein, 35 aa, Artificial Sequence
  GFR-binding peptide
  MOD_RES (33), (35): Xaa is C or S
  MOD_RES (14), (15), (16), (17), (18): Xaa is A or G
  MOD_RES (19), (20), (21), (22): Xaa is A or G or is absent
VPQALSPISILYKXXXXXXXXXLKYHYMIVRSXKX

SEQ ID NO: 6448 - protein, 37 aa, Artificial Sequence
  GFR-binding peptide
  MOD_RES (34), (36): Xaa is C or S
  MOD_RES (14), (15), (16), (17), (18): Xaa is A or G
  MOD_RES (19), (20), (21), (22): Xaa is A or G or is absent
APTKLSAISVLYLXXXXXXXXXLKNYQNMVVRSXGXH

SEQ ID NO: 6449 - protein, 34 aa, Artificial Sequence
  GFR-binding peptide
  MOD_RES (31), (33): Xaa is C or S
VPQALNAISILYFVGRKPKVLKKYRMIVRSXKXS

SEQ ID NO: 6450 - protein, 38 aa, Artificial Sequence
  GFR-binding peptide
  MOD_RES (5), (6): Xaa is C or S
VGKAXXVPTKLSAISVLYLDDMGVPTLKNYQEGMSVAE

SEQ ID NO: 6451 - protein, 36 aa, Artificial Sequence
  GFR-binding peptide
  MOD_RES (1), (34), (36): Xaa is C or S
  MOD_RES (15), (16), (17), (18), (19): Xaa is A or G
  MOD_RES (20), (21), (22), (23): Xaa is A or G or is absent
XVSQDLSATSILYYXXXXXXXXXLRKHRMIVKSXKX

SEQ ID NO: 6452 - protein, 38 aa, Artificial Sequence
  GFR-binding peptide
  MOD_RES (3), (4), (36), (38): Xaa is C or S
KAXXAPTKLSPISVLYKDSSNNVILKYHYNMVVKAXGX

SEQ ID NO: 6453 - protein, 36 aa, Artificial Sequence
  GFR-binding peptide
  MOD_RES (1), (33), (35): Xaa is C or S
XVPTELSATSMLYYDEYDKVVLRKHREMVVEGXGXR

SEQ ID NO: 6454 - protein, 40 aa, Artificial Sequence
  GFR-binding peptide
  MOD_RES (5), (6), (38), (40): Xaa is C or S
IPKAXXVPTELSPISMLYKDENEKVVLKYHYDMVVEGXGX

SEQ ID NO: 6455 - protein, 36 aa, Artificial Sequence
  GFR-binding peptide
  MOD_RES (1), (34), (36): Xaa is C or S
  MOD_RES (15), (16), (17), (18), (19): Xaa is A or G
  MOD_RES (20), (21), (22), (23): Xaa is A or G or is absent
XVPQALSPISILYKXXXXXXXXXLKYHYMIVRSXKX

SEQ ID NO: 6456 - protein, 34 aa, Artificial Sequence
  GFR-binding peptide
  MOD_RES (2), (3): Xaa is C or S
PXXAPTQLSPISVLYKDDSSNVILKYHYNMVVRA

SEQ ID NO: 6457 - protein, 39 aa, Artificial Sequence
  GFR-binding peptide
  MOD_RES (4), (5), (38): Xaa is C or S
GKAXXVPTKLSATSVLYYDDMGVPTLRKHREGMSVAEXG

SEQ ID NO: 6458 - protein, 35 aa, Artificial Sequence
  GFR-binding peptide
  MOD_RES (2), (3), (35): Xaa is C or S
AXXVPTELNAISMLYFDEYDKVVLKKYREMVVEGX

SEQ ID NO: 6459 - protein, 34 aa, Artificial Sequence
  GFR-binding peptide
  MOD_RES (33), (33): Xaa is C or S
  MOD_RES (14), (15), (16), (17), (18): Xaa is A or G
  MOD_RES (19), (20), (21), (22): Xaa is A or G or is absent
VPQDLSATSILYYXXXXXXXXXLRKHRMVVKSXK

SEQ ID NO: 6460 - protein, 39 aa, Artificial Sequence
  GFR-binding peptide
  MOD_RES (6), (7): Xaa is C or S
  MOD_RES (21), (22), (23), (24), (25): Xaa is A or G
  MOD_RES (26), (27), (28), (29): Xaa is A or G or is absent
TVPKPXXAPTQLSATSVLYYXXXXXXXXXLRKHRNMVVR

SEQ ID NO: 6461 - protein, 39 aa, Artificial Sequence
  GFR-binding peptide
  MOD_RES (5), (6), (37), (39): Xaa is C or S
SASPXXVPQDLSAISILYLVGRTPKVLKNYQMVVKSXKX

SEQ ID NO: 6462 - protein, 35 aa, Artificial Sequence
  GFR-binding peptide
  MOD_RES (33), (35): Xaa is C or S
  MOD_RES (14), (15), (16), (17), (18): Xaa is A or G
  MOD_RES (19), (20), (21), (22): Xaa is A or G or is absent
VSQDLSATSILYYXXXXXXXXXLRKHRMIVKSXKX

SEQ ID NO: 6463 - protein, 42 aa, Artificial Sequence
  GFR-binding peptide
  MOD_RES (6), (7), (41): Xaa is C or S
  MOD_RES (21), (22), (23), (24), (25): Xaa is A or G
  MOD_RES (26), (27), (28), (29): Xaa is A or G or is absent
AVPKAXXAPTKLSATSVLYYXXXXXXXXXLRKHRNMVVKAXG

SEQ ID NO: 6464 - protein, 39 aa, Artificial Sequence
  GFR-binding peptide
  MOD_RES (4), (5), (39): Xaa is C or S
  MOD_RES (19), (20), (21), (22), (23): Xaa is A or G
  MOD_RES (24), (25), (26), (27): Xaa is A or G or is absent
PKAXXAPTKLSPISVLYKXXXXXXXXXLKYHYNMVVKAX

SEQ ID NO: 6465 - protein, 36 aa, Artificial Sequence
  GFR-binding peptide
  MOD_RES (33), (35): Xaa is C or S
  MOD_RES (14), (15), (16), (17), (18): Xaa is A or G
  MOD_RES (19), (20), (21), (22): Xaa is A or G or is absent
VPQALSATSILYYXXXXXXXXXLRKHRMIVRSXKXS

SEQ ID NO: 6466 - protein, 42 aa, Artificial Sequence
  GFR-binding peptide
  MOD_RES (4), (5), (39), (41): Xaa is C or S
  MOD_RES (19), (20), (21), (22), (23): Xaa is A or G
  MOD_RES (24), (25), (26), (27): Xaa is A or G or is absent
PKPXXAPTKLSPISVLYKXXXXXXXXXLKYHYNMVVRSXGXH

SEQ ID NO: 6467 - protein, 38 aa, Artificial Sequence
  GFR-binding peptide
  MOD_RES (2), (3), (36), (38): Xaa is C or S
  MOD_RES (17), (18), (19), (20), (21): Xaa is A or G
  MOD_RES (22), (23), (24), (25): Xaa is A or G or is absent
PXXVPQALNAISILYFXXXXXXXXXLKKYRMIVRSXKX

SEQ ID NO: 6468 - protein, 34 aa, Artificial Sequence
  GFR-binding peptide
PTQVQLNAISVLYFEIVRKKPIFLKKYRTLEDHL

SEQ ID NO: 6469 - protein, 42 aa, Artificial Sequence
  GFR-binding peptide
  MOD_RES (5), (6), (40), (42): Xaa is C or S
  MOD_RES (20), (21), (22), (23), (24): Xaa is A or G
  MOD_RES (25), (26), (27), (28): Xaa is A or G or is absent
IPKAXXVPTELSPISMLYKXXXXXXXXXLKYHYDMVVEGXGX

SEQ ID NO: 6470 - protein, 36 aa, Artificial Sequence
  GFR-binding peptide
  MOD_RES (34), (36): Xaa is C or S
  MOD_RES (14), (15), (16), (17), (18): Xaa is A or G
  MOD_RES (19), (20), (21), (22): Xaa is A or G or is absent
APTKLNAISVLYFXXXXXXXXXLKKYRNMVVKAXGX

SEQ ID NO: 6471 - protein, 37 aa, Artificial Sequence
  GFR-binding peptide
  MOD_RES (3), (3): Xaa is C or S
  MOD_RES (19), (20), (21), (22), (23): Xaa is A or G
  MOD_RES (24), (25), (26), (27): Xaa is A or G or is absent
VQXRPTQVQLSAISVLYLXXXXXXXXXLKNYQTLEDH

SEQ ID NO: 6472 - protein, 37 aa, Artificial Sequence
  GFR-binding peptide
  MOD_RES (35), (37): Xaa is C or S
  MOD_RES (14), (15), (16), (17), (18): Xaa is A or G
  MOD_RES (19), (20), (21), (22): Xaa is A or G or is absent
TQVQLSAISVLYLXXXXXXXXXLKNYQTLEDHLAXKX

SEQ ID NO: 6473 - protein, 36 aa, Artificial Sequence
  GFR-binding peptide
  MOD_RES (4), (5), (36): Xaa is C or S
ASPXXVSQDLSAISILYLIGKTPKILKNYQMIVKSX

SEQ ID NO: 6474 - protein, 38 aa, Artificial Sequence
  GFR-binding peptide
  MOD_RES (4), (5), (38): Xaa is C or S
  MOD_RES (19), (20), (21), (22), (23): Xaa is A or G
  MOD_RES (24), (25), (26), (27): Xaa is A or G or is absent
ASPXXVSQDLSATSILYYXXXXXXXXXLRKHRMIVKSX

SEQ ID NO: 6475 - protein, 38 aa, Artificial Sequence
  GFR-binding peptide
  MOD_RES (3), (4), (35), (37): Xaa is C or S
SPXXVSQDLSPISILYKIGKTPKILKYHYMIVKSXKXS

SEQ ID NO: 6476 - protein, 43 aa, Artificial Sequence
  GFR-binding peptide
  MOD_RES (5), (42): Xaa is C or S
RNVQXRPTQVQLNAISVLYFEIVRKKPIFLKKYRTLEDHLAXK

SEQ ID NO: 6477 - protein, 37 aa, Artificial Sequence
  GFR-binding peptide
  MOD_RES (1), (2), (35), (37): Xaa is C or S
  MOD_RES (16), (17), (18), (19), (20): Xaa is A or G
  MOD_RES (21), (22), (23), (24): Xaa is A or G or is absent
XXVSQDLSAISILYLXXXXXXXXXLKNYQMIVKSXKX

SEQ ID NO: 6478 - protein, 33 aa, Artificial Sequence
  GFR-binding peptide
  MOD_RES (2), (3): Xaa is C or S
PXXAPTQLSAISVLYLDDSSNVILKNYQNMVVR

SEQ ID NO: 6479 - protein, 43 aa, Artificial Sequence
  GFR-binding peptide
  MOD_RES (4), (5), (40), (42): Xaa is C or S
  MOD_RES (19), (20), (21), (22), (23): Xaa is A or G
  MOD_RES (24), (25), (26), (27): Xaa is A or G or is absent
GKAXXVPTKLSPISVLYKXXXXXXXXXLKYHYEGMSVAEXGXR

SEQ ID NO: 6480 - protein, 42 aa, Artificial Sequence
  GFR-binding peptide
  MOD_RES (7), (39), (41): Xaa is C or S
HVTKPTXAPTKLSAISVLYLDDSSNVILKNYQNMVVRSXGXH

SEQ ID NO: 6481 - protein, 41 aa, Artificial Sequence
  GFR-binding peptide
  MOD_RES (6), (40): Xaa is C or S
  MOD_RES (20), (21), (22), (23), (24): Xaa is A or G
  MOD_RES (25), (26), (27), (28): Xaa is A or G or is absent
VTKPTXAPTKLSAISVLYLXXXXXXXXXLKNYQNMVVRSXG

SEQ ID NO: 6482 - protein, 36 aa, Artificial Sequence
  GFR-binding peptide
  MOD_RES (1), (1): Xaa is C or S
XRPTQVQLSATSVLYYEIVRKKPIFLRKHRTLEDHL

SEQ ID NO: 6483 - protein, 39 aa, Artificial Sequence
  GFR-binding peptide
  MOD_RES (2), (39): Xaa is C or S
QXRPTQVQLNAISVLYFEIVRKKPIFLKKYRTLEDHLAX

SEQ ID NO: 6484 - protein, 36 aa, Artificial Sequence
  GFR-binding peptide
  MOD_RES (2), (36): Xaa is C or S
  MOD_RES (16), (17), (18), (19), (20): Xaa is A or G
  MOD_RES (21), (22), (23), (24): Xaa is A or G or is absent
TXAPTKLNAISVLYFXXXXXXXXXLKKYRNMVVRSX

SEQ ID NO: 6485 - protein, 41 aa, Artificial Sequence
  GFR-binding peptide
  MOD_RES (5), (6), (40): Xaa is C or S
  MOD_RES (20), (21), (22), (23), (24): Xaa is A or G
  MOD_RES (25), (26), (27), (28): Xaa is A or G or is absent
VPKPXXAPTKLNAISVLYFXXXXXXXXXLKKYRNMVVRSXG

SEQ ID NO: 6486 - protein, 34 aa, Artificial Sequence
  GFR-binding peptide
  MOD_RES (31), (33): Xaa is C or S
VPQDLSATSILYYVGRTPKVLRKHRMVVKSXKXS

SEQ ID NO: 6487 - protein, 34 aa, Artificial Sequence
  GFR-binding peptide
  MOD_RES (1), (2), (34): Xaa is C or S
XXAPTQLSAISVLYLDDSSNVILKNYQNMVVRAX

SEQ ID NO: 6488 - protein, 36 aa, Artificial Sequence
  GFR-binding peptide
  MOD_RES (4), (5): Xaa is C or S
PKPXXAPTKLSATSVLYYDDSSNVILRKHRNMVVRS

SEQ ID NO: 6489 - protein, 36 aa, Artificial Sequence
  GFR-binding peptide
  MOD_RES (2), (3), (36): Xaa is C or S
  MOD_RES (17), (18), (19), (20), (21): Xaa is A or G
  MOD_RES (22), (23), (24), (25): Xaa is A or G or is absent
PXXVPQDLSATSILYYXXXXXXXXXLRKHRMVVKSX

SEQ ID NO: 6490 - protein, 44 aa, Artificial Sequence
  GFR-binding peptide
  MOD_RES (6), (7), (41), (43): Xaa is C or S
  MOD_RES (21), (22), (23), (24), (25): Xaa is A or G
  MOD_RES (26), (27), (28), (29): Xaa is A or G or is absent
SIPKAXXVPTELSAISMLYLXXXXXXXXXLKNYQEMVVEGXGXR

SEQ ID NO: 6491 - protein, 32 aa, Artificial Sequence
  GFR-binding peptide
  MOD_RES (14), (15), (16), (17), (18): Xaa is A or G
  MOD_RES (19), (20), (21), (22): Xaa is A or G or is absent
APTKLNAISVLYFXXXXXXXXXLKKYRNMVVR

SEQ ID NO: 6492 - protein, 39 aa, Artificial Sequence
  GFR-binding peptide
  MOD_RES (3), (37), (39): Xaa is C or S
  MOD_RES (17), (18), (19), (20), (21): Xaa is A or G
  MOD_RES (22), (23), (24), (25): Xaa is A or G or is absent
PTXAPTKLNAISVLYFXXXXXXXXXLKKYRNMVVRSXGX

SEQ ID NO: 6493 - protein, 43 aa, Artificial Sequence
  GFR-binding peptide
  MOD_RES (6), (7), (41), (43): Xaa is C or S
  MOD_RES (21), (22), (23), (24), (25): Xaa is A or G
  MOD_RES (26), (27), (28), (29): Xaa is A or G or is absent
AVPKAXXAPTKLSPISVLYKXXXXXXXXXLKYHYNMVVKAXGX

SEQ ID NO: 6494 - protein, 35 aa, Artificial Sequence
  GFR-binding peptide
  MOD_RES (1), (32), (34): Xaa is C or S
XVPQDLSATSILYYVGRTPKVLRKHRMVVKSXKXS

SEQ ID NO: 6495 - protein, 36 aa, Artificial Sequence
  GFR-binding peptide
  MOD_RES (3), (35): Xaa is C or S
PTXAPTKLSPISVLYKDDSSNVILKYHYNMVVRSXG

SEQ ID NO: 6496 - protein, 32 aa, Artificial Sequence
  GFR-binding peptide
  MOD_RES (14), (15), (16), (17), (18): Xaa is A or G
  MOD_RES (19), (20), (21), (22): Xaa is A or G or is absent
APTKLNAISVLYFXXXXXXXXXLKKYRNMVVK

SEQ ID NO: 6497 - protein, 39 aa, Artificial Sequence
  GFR-binding peptide
  MOD_RES (1), (2), (37), (39): Xaa is C or S
  MOD_RES (16), (17), (18), (19), (20): Xaa is A or G
  MOD_RES (21), (22), (23), (24): Xaa is A or G or is absent
XXVPTKLSATSVLYYXXXXXXXXXLRKHREGMSVAEXGX

SEQ ID NO: 6498 - protein, 33 aa, Artificial Sequence
  GFR-binding peptide
  MOD_RES (33), (33): Xaa is C or S
  MOD_RES (14), (15), (16), (17), (18): Xaa is A or G
  MOD_RES (19), (20), (21), (22): Xaa is A or G or is absent
VSQDLNAISILYFXXXXXXXXXLKKYRMIVKSX

SEQ ID NO: 6499 - protein, 43 aa, Artificial Sequence
  GFR-binding peptide
  MOD_RES (5), (6), (40), (42): Xaa is C or S
  MOD_RES (20), (21), (22), (23), (24): Xaa is A or G
  MOD_RES (25), (26), (27), (28): Xaa is A or G or is absent
VPKPXXAPTKLSATSVLYYXXXXXXXXXLRKHRNMVVRSXGXH

SEQ ID NO: 6500 - protein, 35 aa, Artificial Sequence
  GFR-binding peptide
  MOD_RES (2), (3): Xaa is C or S
  MOD_RES (17), (18), (19), (20), (21): Xaa is A or G
  MOD_RES (22), (23), (24), (25): Xaa is A or G or is absent
PXXVPQALNAISILYFXXXXXXXXXLKKYRMIVRS

SEQ ID NO: 6501 - protein, 38 aa, Artificial Sequence
  GFR-binding peptide
  MOD_RES (37), (37): Xaa is C or S
RPTQVQLNAISVLYFEIVRKKPIFLKKYRTLEDHLAXK

SEQ ID NO: 6502 - protein, 38 aa, Artificial Sequence
  GFR-binding peptide
  MOD_RES (4), (4): Xaa is C or S
NVQXRPTQVQLSPISVLYKEIVRKKPIFLKYHYTLEDH

SEQ ID NO: 6503 - protein, 37 aa, Artificial Sequence
  GFR-binding peptide
  MOD_RES (37), (37): Xaa is C or S
RPTQVQLSPISVLYKEIVRKKPIFLKYHYTLEDHLAX

SEQ ID NO: 6504 - protein, 40 aa, Artificial Sequence
  GFR-binding peptide
  MOD_RES (5), (6), (37), (39): Xaa is C or S
SASPXXVPQDLSAISILYLVGRTPKVLKNYQMVVKSXKXS

SEQ ID NO: 6505 - protein, 39 aa, Artificial Sequence
  GFR-binding peptide
  MOD_RES (4), (5), (37), (39): Xaa is C or S
PKAXXVPTELSATSMLYYDEYDKVVLRKHREMVVEGXGX

SEQ ID NO: 6506 - protein, 36 aa, Artificial Sequence
  GFR-binding peptide
  MOD_RES (2), (3), (36): Xaa is C or S
  MOD_RES (17), (18), (19), (20), (21): Xaa is A or G
  MOD_RES (22), (23), (24), (25): Xaa is A or G or is absent
PXXVPQDLSAISILYLXXXXXXXXXLKNYQMVVKSX

SEQ ID NO: 6507 - protein, 41 aa, Artificial Sequence
  GFR-binding peptide
  MOD_RES (6), (7), (39), (41): Xaa is C or S
TVPKPXXAPTQLSAISVLYLDDSSNVILKNYQNMVVRAXGX

SEQ ID NO: 6508 - protein, 33 aa, Artificial Sequence
  GFR-binding peptide
  MOD_RES (1), (33): Xaa is C or S
XAPTQLSAISVLYLDDSSNVILKNYQNMVVRAX

SEQ ID NO: 6509 - protein, 42 aa, Artificial Sequence
  GFR-binding peptide
  MOD_RES (5), (6), (39), (41): Xaa is C or S
  MOD_RES (20), (21), (22), (23), (24): Xaa is A or G
  MOD_RES (25), (26), (27), (28): Xaa is A or G or is absent
SAAPXXVPQALSATSILYYXXXXXXXXXLRKHRMIVRSXKXS

SEQ ID NO: 6510 - protein, 33 aa, Artificial Sequence
  GFR-binding peptide
  MOD_RES (2), (3): Xaa is C or S
PXXVPQDLSATSILYYVGRTPKVLRKHRMVVKS

SEQ ID NO: 6511 - protein, 35 aa, Artificial Sequence
  GFR-binding peptide
  MOD_RES (1), (2): Xaa is C or S
  MOD_RES (16), (17), (18), (19), (20): Xaa is A or G
  MOD_RES (21), (22), (23), (24): Xaa is A or G or is absent
XXVPTELSPISMLYKXXXXXXXXXLKYHYDMVVEG

SEQ ID NO: 6512 - protein, 41 aa, Artificial Sequence
  GFR-binding peptide
  MOD_RES (6), (7), (38), (40): Xaa is C or S
ASASPXXVSQDLSPISILYKIGKTPKILKYHYMIVKSXKXS

SEQ ID NO: 6513 - protein, 31 aa, Artificial Sequence
  GFR-binding peptide
  MOD_RES (1), (1): Xaa is C or S
XVPTELNAISMLYFDEYDKVVLKKYREMVVE

SEQ ID NO: 6514 - protein, 37 aa, Artificial Sequence
  GFR-binding peptide
  MOD_RES (6), (6): Xaa is C or S
VTKPTXAPTKLSAISVLYLDDSSNVILKNYQNMVVRS

SEQ ID NO: 6515 - protein, 35 aa, Artificial Sequence
  GFR-binding peptide
  MOD_RES (2), (2): Xaa is C or S
  MOD_RES (16), (17), (18), (19), (20): Xaa is A or G
  MOD_RES (21), (22), (23), (24): Xaa is A or G or is absent
TXAPTKLSAISVLYLXXXXXXXXXLKNYQNMVVRS

SEQ ID NO: 6516 - protein, 36 aa, Artificial Sequence
  GFR-binding peptide
  MOD_RES (3), (4): Xaa is C or S
  MOD_RES (18), (19), (20), (21), (22): Xaa is A or G
  MOD_RES (23), (24), (25), (26): Xaa is A or G or is absent
KAXXVPTELSATSMLYYXXXXXXXXXLRKHREMVVE

SEQ ID NO: 6517 - protein, 35 aa, Artificial Sequence
  GFR-binding peptide
PTQVQLSAISVLYLEIVRKKPIFLKNYQTLEDHLA

SEQ ID NO: 6518 - protein, 41 aa, Artificial Sequence
  GFR-binding peptide
  MOD_RES (6), (7), (40): Xaa is C or S
  MOD_RES (21), (22), (23), (24), (25): Xaa is A or G
  MOD_RES (26), (27), (28), (29): Xaa is A or G or is absent
ASAAPXXVPQALSAISILYLXXXXXXXXXLKNYQMIVRSXK

SEQ ID NO: 6519 - protein, 37 aa, Artificial Sequence
  GFR-binding peptide
  MOD_RES (36), (36): Xaa is C or S
PTQVQLSAISVLYLEIVRKKPIFLKNYQTLEDHLAXK

SEQ ID NO: 6520 - protein, 39 aa, Artificial Sequence
  GFR-binding peptide
  MOD_RES (2), (3), (38): Xaa is C or S
  MOD_RES (17), (18), (19), (20), (21): Xaa is A or G
  MOD_RES (22), (23), (24), (25): Xaa is A or G or is absent
AXXVPTKLSPISVLYKXXXXXXXXXLKYHYEGMSVAEXG

SEQ ID NO: 6521 - protein, 39 aa, Artificial Sequence
  GFR-binding peptide
  MOD_RES (2), (3), (36), (38): Xaa is C or S
  MOD_RES (17), (18), (19), (20), (21): Xaa is A or G
  MOD_RES (22), (23), (24), (25): Xaa is A or G or is absent
PXXVPQDLNAISILYFXXXXXXXXXLKKYRMVVKSXKXS

SEQ ID NO: 6522 - protein, 37 aa, Artificial Sequence
  GFR-binding peptide
  MOD_RES (4), (5), (37): Xaa is C or S
PKPXXAPTKLSAISVLYLDDSSNVILKNYQNMVVRSX

SEQ ID NO: 6523 - protein, 38 aa, Artificial Sequence
  GFR-binding peptide
  MOD_RES (5), (5): Xaa is C or S
  MOD_RES (19), (20), (21), (22), (23): Xaa is A or G
  MOD_RES (24), (25), (26), (27): Xaa is A or G or is absent
TKPTXAPTKLSAISVLYLXXXXXXXXXLKNYQNMVVRS

SEQ ID NO: 6524 - protein, 39 aa, Artificial Sequence
  GFR-binding peptide
  MOD_RES (4), (38): Xaa is C or S
  MOD_RES (18), (19), (20), (21), (22): Xaa is A or G
  MOD_RES (23), (24), (25), (26): Xaa is A or G or is absent
KPTXAPTKLSATSVLYYXXXXXXXXXLRKHRNMVVRSXG

SEQ ID NO: 6525 - protein, 37 aa, Artificial Sequence
  GFR-binding peptide
  MOD_RES (5), (6): Xaa is C or S
IPKAXXVPTELSPISMLYKDENEKVVLKYHYDMVVEG

SEQ ID NO: 6526 - protein, 37 aa, Artificial Sequence
  GFR-binding peptide
  MOD_RES (6), (7): Xaa is C or S
KIPKAXXVPTELNAISMLYFDENEKVVLKKYRDMVVE

SEQ ID NO: 6527 - protein, 43 aa, Artificial Sequence
  GFR-binding peptide
  MOD_RES (6), (7), (40), (42): Xaa is C or S
  MOD_RES (21), (22), (23), (24), (25): Xaa is A or G
  MOD_RES (26), (27), (28), (29): Xaa is A or G or is absent
ASASPXXVSQDLSPISILYKXXXXXXXXXLKYHYMIVKSXKXS

SEQ ID NO: 6528 - protein, 35 aa, Artificial Sequence
  GFR-binding peptide
PTQVQLSATSVLYYEIVRKKPIFLRKHRTLEDHLA

SEQ ID NO: 6529 - protein, 37 aa, Artificial Sequence
  GFR-binding peptide
  MOD_RES (5), (37): Xaa is C or S
TKPTXAPTKLSAISVLYLDDSSNVILKNYQNMVVRSX

SEQ ID NO: 6530 - protein, 32 aa, Artificial Sequence
  GFR-binding peptide
  MOD_RES (32), (32): Xaa is C or S
APTKLSAISVLYLDDSSNVILKNYQNMVVRSX

SEQ ID NO: 6531 - protein, 42 aa, Artificial Sequence
  GFR-binding peptide
  MOD_RES (5), (42): Xaa is C or S
  MOD_RES (21), (22), (23), (24), (25): Xaa is A or G
  MOD_RES (26), (27), (28), (29): Xaa is A or G or is absent
RNVQXRPTQVQLSAISVLYLXXXXXXXXXLKNYQTLEDHLAX

SEQ ID NO: 6532 - protein, 39 aa, Artificial Sequence
  GFR-binding peptide
  MOD_RES (5), (6), (38): Xaa is C or S
VPKPXXAPTQLSPISVLYKDDSSNVILKYHYNMVVRAXG

SEQ ID NO: 6533 - protein, 39 aa, Artificial Sequence
  GFR-binding peptide
  MOD_RES (1), (2), (36), (38): Xaa is C or S
  MOD_RES (16), (17), (18), (19), (20): Xaa is A or G
  MOD_RES (21), (22), (23), (24): Xaa is A or G or is absent
XXAPTKLSPISVLYKXXXXXXXXXLKYHYNMVVRSXGXH

SEQ ID NO: 6534 - protein, 37 aa, Artificial Sequence
  GFR-binding peptide
  MOD_RES (1), (2), (37): Xaa is C or S
  MOD_RES (16), (17), (18), (19), (20): Xaa is A or G
  MOD_RES (21), (22), (23), (24): Xaa is A or G or is absent
XXVPTKLSPISVLYKXXXXXXXXXLKYHYEGMSVAEX

SEQ ID NO: 6535 - protein, 39 aa, Artificial Sequence
  GFR-binding peptide
  MOD_RES (4), (5), (36), (38): Xaa is C or S
AAPXXVPQALSAISILYLVGRKPKVLKNYQMIVRSXKXS

SEQ ID NO: 6536 - protein, 39 aa, Artificial Sequence
  GFR-binding peptide
  MOD_RES (6), (6): Xaa is C or S
  MOD_RES (20), (21), (22), (23), (24): Xaa is A or G
  MOD_RES (25), (26), (27), (28): Xaa is A or G or is absent
VTKPTXAPTKLSPISVLYKXXXXXXXXXLKYHYNMVVRS

SEQ ID NO: 6537 - protein, 39 aa, Artificial Sequence
  GFR-binding peptide
  MOD_RES (4), (5), (38): Xaa is C or S
  MOD_RES (19), (20), (21), (22), (23): Xaa is A or G
  MOD_RES (24), (25), (26), (27): Xaa is A or G or is absent
ASPXXVSQDLSATSILYYXXXXXXXXXLRKHRMIVKSXK

SEQ ID NO: 6538 - protein, 42 aa, Artificial Sequence
  GFR-binding peptide
  MOD_RES (5), (42): Xaa is C or S
  MOD_RES (21), (22), (23), (24), (25): Xaa is A or G
  MOD_RES (26), (27), (28), (29): Xaa is A or G or is absent
RNVQXRPTQVQLSPISVLYKXXXXXXXXXLKYHYTLEDHLAX

SEQ ID NO: 6539 - protein, 37 aa, Artificial Sequence
  GFR-binding peptide
  MOD_RES (1), (2), (35), (37): Xaa is C or S
  MOD_RES (16), (17), (18), (19), (20): Xaa is A or G
  MOD_RES (21), (22), (23), (24): Xaa is A or G or is absent
XXVSQDLSATSILYYXXXXXXXXXLRKHRMIVKSXKX

SEQ ID NO: 6540 - protein, 36 aa, Artificial Sequence
  GFR-binding peptide
  MOD_RES (34), (36): Xaa is C or S
  MOD_RES (14), (15), (16), (17), (18): Xaa is A or G
  MOD_RES (19), (20), (21), (22): Xaa is A or G or is absent
APTKLSAISVLYLXXXXXXXXXLKNYQNMVVRSXGX

SEQ ID NO: 6541 - protein, 38 aa, Artificial Sequence
  GFR-binding peptide
  MOD_RES (1), (2), (36), (38): Xaa is C or S
  MOD_RES (16), (17), (18), (19), (20): Xaa is A or G
  MOD_RES (21), (22), (23), (24): Xaa is A or G or is absent
XXAPTQLNAISVLYFXXXXXXXXXLKKYRNMVVRAXGX

SEQ ID NO: 6542 - protein, 35 aa, Artificial Sequence
  GFR-binding peptide
  MOD_RES (1), (32), (34): Xaa is C or S
XVPQALNAISILYFVGRKPKVLKKYRMIVRSXKXS

SEQ ID NO: 6543 - protein, 37 aa, Artificial Sequence
  GFR-binding peptide
  MOD_RES (4), (5), (36): Xaa is C or S
ASPXXVSQDLSAISILYLIGKTPKILKNYQMIVKSXK

SEQ ID NO: 6544 - protein, 35 aa, Artificial Sequence
  GFR-binding peptide
  MOD_RES (1), (2), (33), (35): Xaa is C or S
XXVPQALSAISILYLVGRKPKVLKNYQMIVRSXKX

SEQ ID NO: 6545 - protein, 38 aa, Artificial Sequence
  GFR-binding peptide
  MOD_RES (1), (2), (36), (38): Xaa is C or S
  MOD_RES (16), (17), (18), (19), (20): Xaa is A or G
  MOD_RES (21), (22), (23), (24): Xaa is A or G or is absent
XXAPTKLNAISVLYFXXXXXXXXXLKKYRNMVVKAXGX

SEQ ID NO: 6546 - protein, 37 aa, Artificial Sequence
  GFR-binding peptide
  MOD_RES (4), (5): Xaa is C or S
  MOD_RES (19), (20), (21), (22), (23): Xaa is A or G
  MOD_RES (24), (25), (26), (27): Xaa is A or G or is absent
PKAXXVPTELNAISMLYFXXXXXXXXXLKKYRDMVVE

SEQ ID NO: 6547 - protein, 36 aa, Artificial Sequence
  GFR-binding peptide
  MOD_RES (1), (35): Xaa is C or S
  MOD_RES (15), (16), (17), (18), (19): Xaa is A or G
  MOD_RES (20), (21), (22), (23): Xaa is A or G or is absent
XVPTELNAISMLYFXXXXXXXXXLKKYRDMVVEGXG

SEQ ID NO: 6548 - protein, 38 aa, Artificial Sequence
  GFR-binding peptide
  MOD_RES (1), (38): Xaa is C or S
XRPTQVQLNAISVLYFEIVRKKPIFLKKYRTLEDHLAX

SEQ ID NO: 6549 - protein, 38 aa, Artificial Sequence
  GFR-binding peptide
  MOD_RES (3), (4), (38): Xaa is C or S
  MOD_RES (18), (19), (20), (21), (22): Xaa is A or G
  MOD_RES (23), (24), (25), (26): Xaa is A or G or is absent
KPXXAPTQLSATSVLYYXXXXXXXXXLRKHRNMVVRAX

SEQ ID NO: 6550 - protein, 33 aa, Artificial Sequence
  GFR-binding peptide
  MOD_RES (33), (33): Xaa is C or S
  MOD_RES (14), (15), (16), (17), (18): Xaa is A or G
  MOD_RES (19), (20), (21), (22): Xaa is A or G or is absent
VPQDLSAISILYLXXXXXXXXXLKNYQMVVKSX

SEQ ID NO: 6551 - protein, 34 aa, Artificial Sequence
  GFR-binding peptide
  MOD_RES (4), (4): Xaa is C or S
KPTXAPTKLSAISVLYLDDSSNVILKNYQNMVVR

SEQ ID NO: 6552 - protein, 40 aa, Artificial Sequence
  GFR-binding peptide
  MOD_RES (2), (3), (37), (39): Xaa is C or S
  MOD_RES (17), (18), (19), (20), (21): Xaa is A or G
  MOD_RES (22), (23), (24), (25): Xaa is A or G or is absent
AXXVPTELSATSMLYYXXXXXXXXXLRKHRDMVVEGXGXR

SEQ ID NO: 6553 - protein, 31 aa, Artificial Sequence
  GFR-binding peptide
  MOD_RES (1), (1): Xaa is C or S
XAPTKLSPISVLYKDSSNNVILKYHYNMVVK

SEQ ID NO: 6554 - protein, 38 aa, Artificial Sequence
  GFR-binding peptide
  MOD_RES (3), (4): Xaa is C or S
  MOD_RES (18), (19), (20), (21), (22): Xaa is A or G
  MOD_RES (23), (24), (25), (26): Xaa is A or G or is absent
KAXXVPTKLSPISVLYKXXXXXXXXXLKYHYEGMSVAE

SEQ ID NO: 6555 - protein, 38 aa, Artificial Sequence
  GFR-binding peptide
  MOD_RES (2), (3), (37): Xaa is C or S
  MOD_RES (17), (18), (19), (20), (21): Xaa is A or G
  MOD_RES (22), (23), (24), (25): Xaa is A or G or is absent
AXXVPTELSPISMLYKXXXXXXXXXLKYHYDMVVEGXG

SEQ ID NO: 6556 - protein, 38 aa, Artificial Sequence
  GFR-binding peptide
  MOD_RES (1), (35), (37): Xaa is C or S
  MOD_RES (15), (16), (17), (18), (19): Xaa is A or G
  MOD_RES (20), (21), (22), (23): Xaa is A or G or is absent
XAPTKLNAISVLYFXXXXXXXXXLKKYRNMVVKAXGXH

SEQ ID NO: 6557 - protein, 37 aa, Artificial Sequence
  GFR-binding peptide
  MOD_RES (6), (7): Xaa is C or S
TVPKPXXAPTQLSATSVLYYDDSSNVILRKHRNMVVR

SEQ ID NO: 6558 - protein, 36 aa, Artificial Sequence
  GFR-binding peptide
  MOD_RES (1), (34), (36): Xaa is C or S
  MOD_RES (15), (16), (17), (18), (19): Xaa is A or G
  MOD_RES (20), (21), (22), (23): Xaa is A or G or is absent
XVSQDLSAISILYLXXXXXXXXXLKNYQMIVKSXKX

SEQ ID NO: 6559 - protein, 38 aa, Artificial Sequence
  GFR-binding peptide
  MOD_RES (4), (5): Xaa is C or S
  MOD_RES (19), (20), (21), (22), (23): Xaa is A or G
  MOD_RES (24), (25), (26), (27): Xaa is A or G or is absent
PKPXXAPTQLSATSVLYYXXXXXXXXXLRKHRNMVVRA

SEQ ID NO: 6560 - protein, 35 aa, Artificial Sequence
  GFR-binding peptide
  MOD_RES (35), (35): Xaa is C or S
  MOD_RES (14), (15), (16), (17), (18): Xaa is A or G
  MOD_RES (19), (20), (21), (22): Xaa is A or G or is absent
VPTKLSATSVLYYXXXXXXXXXLRKHREGMSVAEX

SEQ ID NO: 6561 - protein, 35 aa, Artificial Sequence
  GFR-binding peptide
  MOD_RES (2), (3), (35): Xaa is C or S
AXXVPTELSATSMLYYDENEKVVLRKHRDMVVEGX

SEQ ID NO: 6562 - protein, 35 aa, Artificial Sequence
  GFR-binding peptide
  MOD_RES (4), (4): Xaa is C or S
KPTXAPTKLSAISVLYLDDSSNVILKNYQNMVVRS

SEQ ID NO: 6563 - protein, 42 aa, Artificial Sequence
  GFR-binding peptide
  MOD_RES (7), (41): Xaa is C or S
  MOD_RES (21), (22), (23), (24), (25): Xaa is A or G
  MOD_RES (26), (27), (28), (29): Xaa is A or G or is absent
HVTKPTXAPTKLSATSVLYYXXXXXXXXXLRKHRNMVVRSXG

SEQ ID NO: 6564 - protein, 36 aa, Artificial Sequence
  GFR-binding peptide
  MOD_RES (2), (34), (36): Xaa is C or S
TXAPTKLSPISVLYKDDSSNVILKYHYNMVVRSXGX

SEQ ID NO: 6565 - protein, 36 aa, Artificial Sequence
  GFR-binding peptide
  MOD_RES (36), (36): Xaa is C or S
PTQVQLSPISVLYKEIVRKKPIFLKYHYTLEDHLAX

SEQ ID NO: 6566 - protein, 38 aa, Artificial Sequence
  GFR-binding peptide
  MOD_RES (4), (5): Xaa is C or S
  MOD_RES (19), (20), (21), (22), (23): Xaa is A or G
  MOD_RES (24), (25), (26), (27): Xaa is A or G or is absent
PKAXXAPTKLSPISVLYKXXXXXXXXXLKYHYNMVVKA

SEQ ID NO: 6567 - protein, 38 aa, Artificial Sequence
  GFR-binding peptide
  MOD_RES (5), (6), (38): Xaa is C or S
VPKPXXAPTKLSPISVLYKDDSSNVILKYHYNMVVRSX

SEQ ID NO: 6568 - protein, 38 aa, Artificial Sequence
  GFR-binding peptide
  MOD_RES (1), (2), (35), (37): Xaa is C or S
  MOD_RES (16), (17), (18), (19), (20): Xaa is A or G
  MOD_RES (21), (22), (23), (24): Xaa is A or G or is absent
XXVPQALSPISILYKXXXXXXXXXLKYHYMIVRSXKXS

SEQ ID NO: 6569 - protein, 36 aa, Artificial Sequence
  GFR-binding peptide
  MOD_RES (33), (35): Xaa is C or S
  MOD_RES (14), (15), (16), (17), (18): Xaa is A or G
  MOD_RES (19), (20), (21), (22): Xaa is A or G or is absent
VPQDLSATSILYYXXXXXXXXXLRKHRMVVKSXKXS

SEQ ID NO: 6570 - protein, 34 aa, Artificial Sequence
  GFR-binding peptide
  MOD_RES (1), (1): Xaa is C or S
  MOD_RES (15), (16), (17), (18), (19): Xaa is A or G
  MOD_RES (20), (21), (22), (23): Xaa is A or G or is absent
XAPTKLSATSVLYYXXXXXXXXXLRKHRNMVVKA

SEQ ID NO: 6571 - protein, 32 aa, Artificial Sequence
  GFR-binding peptide
  MOD_RES (1), (2): Xaa is C or S
XXVPTELSPISMLYKDENEKVVLKYHYDMVVE

SEQ ID NO: 6572 - protein, 36 aa, Artificial Sequence
  GFR-binding peptide
  MOD_RES (4), (5): Xaa is C or S
PKAXXAPTKLNAISVLYFDSSNNVILKKYRNMVVKA

SEQ ID NO: 6573 - protein, 43 aa, Artificial Sequence
  GFR-binding peptide
  MOD_RES (5), (6), (41), (43): Xaa is C or S
  MOD_RES (20), (21), (22), (23), (24): Xaa is A or G
  MOD_RES (25), (26), (27), (28): Xaa is A or G or is absent
VGKAXXVPTKLNAISVLYFXXXXXXXXXLKKYREGMSVAEXGX

SEQ ID NO: 6574 - protein, 41 aa, Artificial Sequence
  GFR-binding peptide
  MOD_RES (6), (7), (41): Xaa is C or S
  MOD_RES (21), (22), (23), (24), (25): Xaa is A or G
  MOD_RES (26), (27), (28), (29): Xaa is A or G or is absent
SIPKAXXVPTELSAISMLYLXXXXXXXXXLKNYQEMVVEGX

SEQ ID NO: 6575 - protein, 34 aa, Artificial Sequence
  GFR-binding peptide
  MOD_RES (31), (33): Xaa is C or S
VPQDLSAISILYLVGRTPKVLKNYQMVVKSXKXS

SEQ ID NO: 6576 - protein, 36 aa, Artificial Sequence
  GFR-binding peptide
  MOD_RES (1), (2), (35): Xaa is C or S
  MOD_RES (16), (17), (18), (19), (20): Xaa is A or G
  MOD_RES (21), (22), (23), (24): Xaa is A or G or is absent
XXVPQDLSATSILYYXXXXXXXXXLRKHRMVVKSXK

SEQ ID NO: 6577 - protein, 35 aa, Artificial Sequence
  GFR-binding peptide
  MOD_RES (2), (3): Xaa is C or S
  MOD_RES (17), (18), (19), (20), (21): Xaa is A or G
  MOD_RES (22), (23), (24), (25): Xaa is A or G or is absent
AXXVPTELSPISMLYKXXXXXXXXXLKYHYEMVVE

SEQ ID NO: 6578 - protein, 39 aa, Artificial Sequence
  GFR-binding peptide
  MOD_RES (2), (39): Xaa is C or S
  MOD_RES (18), (19), (20), (21), (22): Xaa is A or G
  MOD_RES (23), (24), (25), (26): Xaa is A or G or is absent
QXRPTQVQLSATSVLYYXXXXXXXXXLRKHRTLEDHLAX

SEQ ID NO: 6579 - protein, 34 aa, Artificial Sequence
  GFR-binding peptide
  MOD_RES (1), (2), (33): Xaa is C or S
XXVSQDLSPISILYKIGKTPKILKYHYMIVKSXK

SEQ ID NO: 6580 - protein, 30 aa, Artificial Sequence
  GFR-binding peptide
VPQDLNAISILYFVGRTPKVLKKYRMVVKS

SEQ ID NO: 6581 - protein, 35 aa, Artificial Sequence
  GFR-binding peptide
  MOD_RES (3), (3): Xaa is C or S
  MOD_RES (17), (18), (19), (20), (21): Xaa is A or G
  MOD_RES (22), (23), (24), (25): Xaa is A or G or is absent
PTXAPTKLSATSVLYYXXXXXXXXXLRKHRNMVVR

SEQ ID NO: 6582 - protein, 37 aa, Artificial Sequence
  GFR-binding peptide
  MOD_RES (3), (4): Xaa is C or S
  MOD_RES (18), (19), (20), (21), (22): Xaa is A or G
  MOD_RES (23), (24), (25), (26): Xaa is A or G or is absent
KAXXVPTELSATSMLYYXXXXXXXXXLRKHRDMVVEG

SEQ ID NO: 6583 - protein, 37 aa, Artificial Sequence
  GFR-binding peptide
  MOD_RES (4), (5): Xaa is C or S
  MOD_RES (19), (20), (21), (22), (23): Xaa is A or G
  MOD_RES (24), (25), (26), (27): Xaa is A or G or is absent
PKPXXAPTQLSATSVLYYXXXXXXXXXLRKHRNMVVR

SEQ ID NO: 6584 - protein, 37 aa, Artificial Sequence
  GFR-binding peptide
  MOD_RES (1), (2), (35), (37): Xaa is C or S
  MOD_RES (16), (17), (18), (19), (20): Xaa is A or G
  MOD_RES (21), (22), (23), (24): Xaa is A or G or is absent
XXVPQALSPISILYKXXXXXXXXXLKYHYMIVRSXKX

SEQ ID NO: 6585 - protein, 34 aa, Artificial Sequence
  GFR-binding peptide
  MOD_RES (34), (34): Xaa is C or S
  MOD_RES (14), (15), (16), (17), (18): Xaa is A or G
  MOD_RES (19), (20), (21), (22): Xaa is A or G or is absent
VPTELSAISMLYLXXXXXXXXXLKNYQEMVVEGX

SEQ ID NO: 6586 - protein, 33 aa, Artificial Sequence
  GFR-binding peptide
  MOD_RES (1), (1): Xaa is C or S
  MOD_RES (15), (16), (17), (18), (19): Xaa is A or G
  MOD_RES (20), (21), (22), (23): Xaa is A or G or is absent
XVPQALSATSILYYXXXXXXXXXLRKHRMIVRS

SEQ ID NO: 6587 - protein, 32 aa, Artificial Sequence
  GFR-binding peptide
  MOD_RES (14), (15), (16), (17), (18): Xaa is A or G
  MOD_RES (19), (20), (21), (22): Xaa is A or G or is absent
TQVQLNAISVLYFXXXXXXXXXLKKYRTLEDH

SEQ ID NO: 6588 - protein, 32 aa, Artificial Sequence
  GFR-binding peptide
  MOD_RES (14), (15), (16), (17), (18): Xaa is A or G
  MOD_RES (19), (20), (21), (22): Xaa is A or G or is absent
APTQLSATSVLYYXXXXXXXXXLRKHRNMVVR

SEQ ID NO: 6589 - protein, 34 aa, Artificial Sequence
  GFR-binding peptide
  MOD_RES (1), (1): Xaa is C or S
  MOD_RES (15), (16), (17), (18), (19): Xaa is A or G
  MOD_RES (20), (21), (22), (23): Xaa is A or G or is absent
XVPTELSAISMLYLXXXXXXXXXLKNYQEMVVEG

SEQ ID NO: 6590 - protein, 34 aa, Artificial Sequence
  GFR-binding peptide
  MOD_RES (1), (34): Xaa is C or S
XVPTKLSAISVLYLDDMGVPTLKNYQEGMSVAEX

SEQ ID NO: 6591 - protein, 37 aa, Artificial Sequence
  GFR-binding peptide
  MOD_RES (4), (5): Xaa is C or S
  MOD_RES (19), (20), (21), (22), (23): Xaa is A or G
  MOD_RES (24), (25), (26), (27): Xaa is A or G or is absent
PKAXXAPTKLSPISVLYKXXXXXXXXXLKYHYNMVVK

SEQ ID NO: 6592 - protein, 34 aa, Artificial Sequence
  GFR-binding peptide
  MOD_RES (4), (4): Xaa is C or S
KPTXAPTKLSPISVLYKDDSSNVILKYHYNMVVR

SEQ ID NO: 6593 - protein, 39 aa, Artificial Sequence
  GFR-binding peptide
  MOD_RES (2), (3), (37), (39): Xaa is C or S
  MOD_RES (17), (18), (19), (20), (21): Xaa is A or G
  MOD_RES (22), (23), (24), (25): Xaa is A or G or is absent
AXXAPTKLSAISVLYLXXXXXXXXXLKNYQNMVVKAXGX

SEQ ID NO: 6594 - protein, 35 aa, Artificial Sequence
  GFR-binding peptide
  MOD_RES (1), (2): Xaa is C or S
  MOD_RES (16), (17), (18), (19), (20): Xaa is A or G
  MOD_RES (21), (22), (23), (24): Xaa is A or G or is absent
XXVPTELSAISMLYLXXXXXXXXXLKNYQEMVVEG

SEQ ID NO: 6595 - protein, 40 aa, Artificial Sequence
  GFR-binding peptide
  MOD_RES (2), (3), (37), (39): Xaa is C or S
  MOD_RES (17), (18), (19), (20), (21): Xaa is A or G
  MOD_RES (22), (23), (24), (25): Xaa is A or G or is absent
PXXAPTKLSATSVLYYXXXXXXXXXLRKHRNMVVRSXGXH

SEQ ID NO: 6596 - protein, 35 aa, Artificial Sequence
  GFR-binding peptide
  MOD_RES (1), (34): Xaa is C or S
  MOD_RES (15), (16), (17), (18), (19): Xaa is A or G
  MOD_RES (20), (21), (22), (23): Xaa is A or G or is absent
XVSQDLSATSILYYXXXXXXXXXLRKHRMIVKSXK

SEQ ID NO: 6597 - protein, 37 aa, Artificial Sequence
  GFR-binding peptide
  MOD_RES (2), (3), (37): Xaa is C or S
  MOD_RES (17), (18), (19), (20), (21): Xaa is A or G
  MOD_RES (22), (23), (24), (25): Xaa is A or G or is absent
AXXVPTELSATSMLYYXXXXXXXXXLRKHRDMVVEGX

SEQ ID NO: 6598 - protein, 44 aa, Artificial Sequence
  GFR-binding peptide
  MOD_RES (5), (42), (44): Xaa is C or S
RNVQXRPTQVQLNAISVLYFEIVRKKPIFLKKYRTLEDHLAXKX

SEQ ID NO: 6599 - protein, 39 aa, Artificial Sequence
  GFR-binding peptide
  MOD_RES (2), (3), (36), (38): Xaa is C or S
  MOD_RES (17), (18), (19), (20), (21): Xaa is A or G
  MOD_RES (22), (23), (24), (25): Xaa is A or G or is absent
PXXVSQDLSPISILYKXXXXXXXXXLKYHYMIVKSXKXS

SEQ ID NO: 6600 - protein, 42 aa, Artificial Sequence
  GFR-binding peptide
  MOD_RES (4), (5), (39), (41): Xaa is C or S
  MOD_RES (19), (20), (21), (22), (23): Xaa is A or G
  MOD_RES (24), (25), (26), (27): Xaa is A or G or is absent
PKPXXAPTKLSATSVLYYXXXXXXXXXLRKHRNMVVRSXGXH

SEQ ID NO: 6601 - protein, 39 aa, Artificial Sequence
  GFR-binding peptide
  MOD_RES (5), (37), (39): Xaa is C or S
TKPTXAPTKLSATSVLYYDDSSNVILRKHRNMVVRSXGX

SEQ ID NO: 6602 - protein, 36 aa, Artificial Sequence
  GFR-binding peptide
  MOD_RES (1), (2), (35): Xaa is C or S
  MOD_RES (16), (17), (18), (19), (20): Xaa is A or G
  MOD_RES (21), (22), (23), (24): Xaa is A or G or is absent
XXVSQDLSAISILYLXXXXXXXXXLKNYQMIVKSXK

SEQ ID NO: 6603 - protein, 41 aa, Artificial Sequence
  GFR-binding peptide
  MOD_RES (4), (41): Xaa is C or S
NVQXRPTQVQLSATSVLYYEIVRKKPIFLRKHRTLEDHLAX

SEQ ID NO: 6604 - protein, 34 aa, Artificial Sequence
  GFR-binding peptide
  MOD_RES (1), (1): Xaa is C or S
  MOD_RES (15), (16), (17), (18), (19): Xaa is A or G
  MOD_RES (20), (21), (22), (23): Xaa is A or G or is absent
XAPTKLSATSVLYYXXXXXXXXXLRKHRNMVVRS

SEQ ID NO: 6605 - protein, 36 aa, Artificial Sequence
  GFR-binding peptide
  MOD_RES (1), (2), (34), (36): Xaa is C or S
XXAPTQLSPISVLYKDDSSNVILKYHYNMVVRAXGX

SEQ ID NO: 6606 - protein, 38 aa, Artificial Sequence
  GFR-binding peptide
  MOD_RES (37), (37): Xaa is C or S
  MOD_RES (16), (17), (18), (19), (20): Xaa is A or G
  MOD_RES (21), (22), (23), (24): Xaa is A or G or is absent
RPTQVQLSATSVLYYXXXXXXXXXLRKHRTLEDHLAXK

SEQ ID NO: 6607 - protein, 37 aa, Artificial Sequence
  GFR-binding peptide
  MOD_RES (4), (5): Xaa is C or S
  MOD_RES (19), (20), (21), (22), (23): Xaa is A or G
  MOD_RES (24), (25), (26), (27): Xaa is A or G or is absent
PKPXXAPTKLNAISVLYFXXXXXXXXXLKKYRNMVVR

SEQ ID NO: 6608 - protein, 36 aa, Artificial Sequence
  GFR-binding peptide
  MOD_RES (2), (3), (35): Xaa is C or S
PXXAPTKLSAISVLYLDDSSNVILKNYQNMVVRSXG

SEQ ID NO: 6609 - protein, 39 aa, Artificial Sequence
  GFR-binding peptide
  MOD_RES (4), (5), (36), (38): Xaa is C or S
AAPXXVPQALSATSILYYVGRKPKVLRKHRMIVRSXKXS

SEQ ID NO: 6610 - protein, 30 aa, Artificial Sequence
  GFR-binding peptide
APTKLSAISVLYLDDSSNVILKNYQNMVVR

SEQ ID NO: 6611 - protein, 33 aa, Artificial Sequence
  GFR-binding peptide
  MOD_RES (1), (2): Xaa is C or S
XXAPTQLSAISVLYLDDSSNVILKNYQNMVVRA

SEQ ID NO: 6612 - protein, 38 aa, Artificial Sequence
  GFR-binding peptide
  MOD_RES (5), (6), (38): Xaa is C or S
IPKAXXVPTELSATSMLYYDEYDKVVLRKHREMVVEGX

SEQ ID NO: 6613 - protein, 31 aa, Artificial Sequence
  GFR-binding peptide
  MOD_RES (1), (1): Xaa is C or S
XAPTKLSAISVLYLDSSNNVILKNYQNMVVK

SEQ ID NO: 6614 - protein, 41 aa, Artificial Sequence
  GFR-binding peptide
  MOD_RES (5), (6), (39), (41): Xaa is C or S
VGKAXXVPTKLSATSVLYYDDMGVPTLRKHREGMSVAEXGX

SEQ ID NO: 6615 - protein, 35 aa, Artificial Sequence
  GFR-binding peptide
  MOD_RES (2), (3), (35): Xaa is C or S
AXXAPTKLNAISVLYFDSSNNVILKKYRNMVVKAX

SEQ ID NO: 6616 - protein, 31 aa, Artificial Sequence
  GFR-binding peptide
  MOD_RES (31), (31): Xaa is C or S
VPQDLNAISILYFVGRTPKVLKKYRMVVKSX

SEQ ID NO: 6617 - protein, 39 aa, Artificial Sequence
  GFR-binding peptide
  MOD_RES (5), (6), (39): Xaa is C or S
  MOD_RES (20), (21), (22), (23), (24): Xaa is A or G
  MOD_RES (25), (26), (27), (28): Xaa is A or G or is absent
SAAPXXVPQALSAISILYLXXXXXXXXXLKNYQMIVRSX

SEQ ID NO: 6618 - protein, 36 aa, Artificial Sequence
  GFR-binding peptide
  MOD_RES (2), (3), (34), (36): Xaa is C or S
PXXVPQALSATSILYYVGRKPKVLRKHRMIVRSXKX

SEQ ID NO: 6619 - protein, 33 aa, Artificial Sequence
  GFR-binding peptide
  MOD_RES (1), (1): Xaa is C or S
  MOD_RES (15), (16), (17), (18), (19): Xaa is A or G
  MOD_RES (20), (21), (22), (23): Xaa is A or G or is absent
XVPTELSATSMLYYXXXXXXXXXLRKHREMVVE

SEQ ID NO: 6620 - protein, 39 aa, Artificial Sequence
  GFR-binding peptide
  MOD_RES (6), (7): Xaa is C or S
KVGKAXXVPTKLSATSVLYYDDMGVPTLRKHREGMSVAE

SEQ ID NO: 6621 - protein, 41 aa, Artificial Sequence
  GFR-binding peptide
  MOD_RES (4), (5), (38), (40): Xaa is C or S
  MOD_RES (19), (20), (21), (22), (23): Xaa is A or G
  MOD_RES (24), (25), (26), (27): Xaa is A or G or is absent
ASPXXVSQDLNAISILYFXXXXXXXXXLKKYRMIVKSXKXS

SEQ ID NO: 6622 - protein, 39 aa, Artificial Sequence
  GFR-binding peptide
  MOD_RES (4), (5), (36), (38): Xaa is C or S
AAPXXVPQALSPISILYKVGRKPKVLKYHYMIVRSXKXS

SEQ ID NO: 6623 - protein, 39 aa, Artificial Sequence
  GFR-binding peptide
  MOD_RES (6), (7): Xaa is C or S
  MOD_RES (21), (22), (23), (24), (25): Xaa is A or G
  MOD_RES (26), (27), (28), (29): Xaa is A or G or is absent
YVPKPXXAPTKLSAISVLYLXXXXXXXXXLKNYQNMVVR

SEQ ID NO: 6624 - protein, 36 aa, Artificial Sequence
  GFR-binding peptide
  MOD_RES (33), (35): Xaa is C or S
VPTKLSAISVLYLDDMGVPTLKNYQEGMSVAEXGXR

SEQ ID NO: 6625 - protein, 37 aa, Artificial Sequence
  GFR-binding peptide
  MOD_RES (2), (3), (36): Xaa is C or S
AXXVPTKLNAISVLYFDDMGVPTLKKYREGMSVAEXG

SEQ ID NO: 6626 - protein, 40 aa, Artificial Sequence
  GFR-binding peptide
  MOD_RES (3), (4), (38), (40): Xaa is C or S
  MOD_RES (18), (19), (20), (21), (22): Xaa is A or G
  MOD_RES (23), (24), (25), (26): Xaa is A or G or is absent
KAXXAPTKLSPISVLYKXXXXXXXXXLKYHYNMVVKAXGX

SEQ ID NO: 6627 - protein, 43 aa, Artificial Sequence
  GFR-binding peptide
  MOD_RES (4), (41), (43): Xaa is C or S
  MOD_RES (20), (21), (22), (23), (24): Xaa is A or G
  MOD_RES (25), (26), (27), (28): Xaa is A or G or is absent
NVQXRPTQVQLSPISVLYKXXXXXXXXXLKYHYTLEDHLAXKX

SEQ ID NO: 6628 - protein, 37 aa, Artificial Sequence
  GFR-binding peptide
  MOD_RES (2), (3), (37): Xaa is C or S
  MOD_RES (17), (18), (19), (20), (21): Xaa is A or G
  MOD_RES (22), (23), (24), (25): Xaa is A or G or is absent
AXXVPTELSPISMLYKXXXXXXXXXLKYHYEMVVEGX

SEQ ID NO: 6629 - protein, 36 aa, Artificial Sequence
  GFR-binding peptide
  MOD_RES (35), (35): Xaa is C or S
  MOD_RES (14), (15), (16), (17), (18): Xaa is A or G
  MOD_RES (19), (20), (21), (22): Xaa is A or G or is absent
TQVQLSPISVLYKXXXXXXXXXLKYHYTLEDHLAXK

SEQ ID NO: 6630 - protein, 40 aa, Artificial Sequence
  GFR-binding peptide
  MOD_RES (4), (38), (40): Xaa is C or S
  MOD_RES (18), (19), (20), (21), (22): Xaa is A or G
  MOD_RES (23), (24), (25), (26): Xaa is A or G or is absent
KPTXAPTKLSPISVLYKXXXXXXXXXLKYHYNMVVRSXGX

SEQ ID NO: 6631 - protein, 37 aa, Artificial Sequence
  GFR-binding peptide
  MOD_RES (36), (36): Xaa is C or S
  MOD_RES (15), (16), (17), (18), (19): Xaa is A or G
  MOD_RES (20), (21), (22), (23): Xaa is A or G or is absent
PTQVQLNAISVLYFXXXXXXXXXLKKYRTLEDHLAXK

SEQ ID NO: 6632 - protein, 37 aa, Artificial Sequence
  GFR-binding peptide
  MOD_RES (2), (3), (37): Xaa is C or S
  MOD_RES (17), (18), (19), (20), (21): Xaa is A or G
  MOD_RES (22), (23), (24), (25): Xaa is A or G or is absent
PXXAPTQLNAISVLYFXXXXXXXXXLKKYRNMVVRAX

SEQ ID NO: 6633 - protein, 37 aa, Artificial Sequence
  GFR-binding peptide
  MOD_RES (34), (36): Xaa is C or S
  MOD_RES (14), (15), (16), (17), (18): Xaa is A or G
  MOD_RES (19), (20), (21), (22): Xaa is A or G or is absent
APTKLSATSVLYYXXXXXXXXXLRKHRNMVVRSXGXH

SEQ ID NO: 6634 - protein, 41 aa, Artificial Sequence
  GFR-binding peptide
  MOD_RES (6), (7), (39), (41): Xaa is C or S
AVPKAXXAPTKLSPISVLYKDSSNNVILKYHYNMVVKAXGX

SEQ ID NO: 6635 - protein, 40 aa, Artificial Sequence
  GFR-binding peptide
  MOD_RES (6), (7), (40): Xaa is C or S
  MOD_RES (21), (22), (23), (24), (25): Xaa is A or G
  MOD_RES (26), (27), (28), (29): Xaa is A or G or is absent
ASASPXXVPQDLNAISILYFXXXXXXXXXLKKYRMVVKSX

SEQ ID NO: 6636 - protein, 36 aa, Artificial Sequence
  GFR-binding peptide
  MOD_RES (36), (36): Xaa is C or S
PTQVQLSAISVLYLEIVRKKPIFLKNYQTLEDHLAX

SEQ ID NO: 6637 - protein, 32 aa, Artificial Sequence
  GFR-binding peptide
  MOD_RES (14), (15), (16), (17), (18): Xaa is A or G
  MOD_RES (19), (20), (21), (22): Xaa is A or G or is absent
APTKLSAISVLYLXXXXXXXXXLKNYQNMVVR

SEQ ID NO: 6638 - protein, 37 aa, Artificial Sequence
  GFR-binding peptide
  MOD_RES (4), (5), (37): Xaa is C or S
PKAXXVPTELSATSMLYYDENEKVVLRKHRDMVVEGX

SEQ ID NO: 6639 - protein, 44 aa, Artificial Sequence
  GFR-binding peptide
  MOD_RES (6), (7), (41), (43): Xaa is C or S
  MOD_RES (21), (22), (23), (24), (25): Xaa is A or G
  MOD_RES (26), (27), (28), (29): Xaa is A or G or is absent
SIPKAXXVPTELSPISMLYKXXXXXXXXXLKYHYEMVVEGXGXR

SEQ ID NO: 6640 - protein, 33 aa, Artificial Sequence
  GFR-binding peptide
  MOD_RES (31), (33): Xaa is C or S
VSQDLSATSILYYIGKTPKILRKHRMIVKSXKX

SEQ ID NO: 6641 - protein, 40 aa, Artificial Sequence
  GFR-binding peptide
  MOD_RES (5), (6), (37), (39): Xaa is C or S
SASPXXVPQDLSATSILYYVGRTPKVLRKHRMVVKSXKXS

SEQ ID NO: 6642 - protein, 35 aa, Artificial Sequence
  GFR-binding peptide
  MOD_RES (1), (34): Xaa is C or S
  MOD_RES (15), (16), (17), (18), (19): Xaa is A or G
  MOD_RES (20), (21), (22), (23): Xaa is A or G or is absent
XVPQALSPISILYKXXXXXXXXXLKYHYMIVRSXK

SEQ ID NO: 6643 - protein, 44 aa, Artificial Sequence
  GFR-binding peptide
  MOD_RES (4), (41), (43): Xaa is C or S
  MOD_RES (20), (21), (22), (23), (24): Xaa is A or G
  MOD_RES (25), (26), (27), (28): Xaa is A or G or is absent
NVQXRPTQVQLSAISVLYLXXXXXXXXXLKNYQTLEDHLAXKXE

SEQ ID NO: 6644 - protein, 41 aa, Artificial Sequence
  GFR-binding peptide
  MOD_RES (6), (7), (41): Xaa is C or S
  MOD_RES (21), (22), (23), (24), (25): Xaa is A or G
  MOD_RES (26), (27), (28), (29): Xaa is A or G or is absent
AVPKAXXAPTKLSATSVLYYXXXXXXXXXLRKHRNMVVKAX

SEQ ID NO: 6645 - protein, 37 aa, Artificial Sequence
  GFR-binding peptide
  MOD_RES (3), (4), (37): Xaa is C or S
  MOD_RES (18), (19), (20), (21), (22): Xaa is A or G
  MOD_RES (23), (24), (25), (26): Xaa is A or G or is absent
APXXVPQALNAISILYFXXXXXXXXXLKKYRMIVRSX

SEQ ID NO: 6646 - protein, 34 aa, Artificial Sequence
  GFR-binding peptide
  MOD_RES (1), (2), (33): Xaa is C or S
XXVPQDLSPISILYKVGRTPKVLKYHYMVVKSXK

SEQ ID NO: 6647 - protein, 39 aa, Artificial Sequence
  GFR-binding peptide
  MOD_RES (2), (39): Xaa is C or S
QXRPTQVQLSATSVLYYEIVRKKPIFLRKHRTLEDHLAX

SEQ ID NO: 6648 - protein, 42 aa, Artificial Sequence
  GFR-binding peptide
  MOD_RES (5), (6), (41): Xaa is C or S
  MOD_RES (20), (21), (22), (23), (24): Xaa is A or G
  MOD_RES (25), (26), (27), (28): Xaa is A or G or is absent
VGKAXXVPTKLSATSVLYYXXXXXXXXXLRKHREGMSVAEXG

SEQ ID NO: 6649 - protein, 41 aa, Artificial Sequence
  GFR-binding peptide
  MOD_RES (4), (5), (39), (41): Xaa is C or S
  MOD_RES (19), (20), (21), (22), (23): Xaa is A or G
  MOD_RES (24), (25), (26), (27): Xaa is A or G or is absent
PKAXXVPTELSAISMLYLXXXXXXXXXLKNYQEMVVEGXGX

SEQ ID NO: 6650 - protein, 33 aa, Artificial Sequence
  GFR-binding peptide
  MOD_RES (1), (2): Xaa is C or S
XXAPTKLSATSVLYYDDSSNVILRKHRNMVVRS

SEQ ID NO: 6651 - protein, 41 aa, Artificial Sequence
  GFR-binding peptide
  MOD_RES (5), (5): Xaa is C or S
RNVQXRPTQVQLSPISVLYKEIVRKKPIFLKYHYTLEDHLA

SEQ ID NO: 6652 - protein, 35 aa, Artificial Sequence
  GFR-binding peptide
  MOD_RES (2), (3): Xaa is C or S
  MOD_RES (17), (18), (19), (20), (21): Xaa is A or G
  MOD_RES (22), (23), (24), (25): Xaa is A or G or is absent
PXXVPQDLNAISILYFXXXXXXXXXLKKYRMVVKS

SEQ ID NO: 6653 - protein, 35 aa, Artificial Sequence
  GFR-binding peptide
  MOD_RES (1), (32), (34): Xaa is C or S
XVSQDLSPISILYKIGKTPKILKYHYMIVKSXKXS

SEQ ID NO: 6654 - protein, 37 aa, Artificial Sequence
  GFR-binding peptide
  MOD_RES (3), (4), (35), (37): Xaa is C or S
APXXVPQALSAISILYLVGRKPKVLKNYQMIVRSXKX

SEQ ID NO: 6655 - protein, 36 aa, Artificial Sequence
  GFR-binding peptide
  MOD_RES (4), (5): Xaa is C or S
PKAXXVPTELNAISMLYFDENEKVVLKKYRDMVVEG

SEQ ID NO: 6656 - protein, 39 aa, Artificial Sequence
  GFR-binding peptide
  MOD_RES (3), (3): Xaa is C or S
  MOD_RES (19), (20), (21), (22), (23): Xaa is A or G
  MOD_RES (24), (25), (26), (27): Xaa is A or G or is absent
VQXRPTQVQLNAISVLYFXXXXXXXXXLKKYRTLEDHLA

SEQ ID NO: 6657 - protein, 32 aa, Artificial Sequence
  GFR-binding peptide
  MOD_RES (1), (2): Xaa is C or S
XXVPQDLSAISILYLVGRTPKVLKNYQMVVKS

SEQ ID NO: 6658 - protein, 43 aa, Artificial Sequence
  GFR-binding peptide
  MOD_RES (5), (6), (40), (42): Xaa is C or S
  MOD_RES (20), (21), (22), (23), (24): Xaa is A or G
  MOD_RES (25), (26), (27), (28): Xaa is A or G or is absent
VPKAXXAPTKLNAISVLYFXXXXXXXXXLKKYRNMVVKAXGXH

SEQ ID NO: 6659 - protein, 34 aa, Artificial Sequence
  GFR-binding peptide
  MOD_RES (3), (4): Xaa is C or S
KPXXAPTKLSATSVLYYDDSSNVILRKHRNMVVR

SEQ ID NO: 6660 - protein, 33 aa, Artificial Sequence
  GFR-binding peptide
  MOD_RES (1), (33): Xaa is C or S
XAPTKLSATSVLYYDDSSNVILRKHRNMVVRSX

SEQ ID NO: 6661 - protein, 39 aa, Artificial Sequence
  GFR-binding peptide
  MOD_RES (6), (7), (39): Xaa is C or S
AVPKAXXAPTKLSPISVLYKDSSNNVILKYHYNMVVKAX

SEQ ID NO: 6662 - protein, 42 aa, Artificial Sequence
  GFR-binding peptide
  MOD_RES (5), (6), (40), (42): Xaa is C or S
  MOD_RES (20), (21), (22), (23), (24): Xaa is A or G
  MOD_RES (25), (26), (27), (28): Xaa is A or G or is absent
VPKAXXAPTKLSPISVLYKXXXXXXXXXLKYHYNMVVKAXGX

SEQ ID NO: 6663 - protein, 40 aa, Artificial Sequence
  GFR-binding peptide
  MOD_RES (3), (4), (37), (39): Xaa is C or S
  MOD_RES (18), (19), (20), (21), (22): Xaa is A or G
  MOD_RES (23), (24), (25), (26): Xaa is A or G or is absent
APXXVPQALSPISILYKXXXXXXXXXLKYHYMIVRSXKXS

SEQ ID NO: 6664 - protein, 37 aa, Artificial Sequence
  GFR-binding peptide
  MOD_RES (4), (5): Xaa is C or S
GKAXXVPTKLNAISVLYFDDMGVPTLKKYREGMSVAE

SEQ ID NO: 6665 - protein, 34 aa, Artificial Sequence
  GFR-binding peptide
  MOD_RES (1), (2), (34): Xaa is C or S
XXAPTKLSPISVLYKDSSNNVILKYHYNMVVKAX

SEQ ID NO: 6666 - protein, 36 aa, Artificial Sequence
  GFR-binding peptide
  MOD_RES (3), (4), (35): Xaa is C or S
SPXXVSQDLSPISILYKIGKTPKILKYHYMIVKSXK

SEQ ID NO: 6667 - protein, 41 aa, Artificial Sequence
  GFR-binding peptide
  MOD_RES (5), (39), (41): Xaa is C or S
  MOD_RES (19), (20), (21), (22), (23): Xaa is A or G
  MOD_RES (24), (25), (26), (27): Xaa is A or G or is absent
TKPTXAPTKLSPISVLYKXXXXXXXXXLKYHYNMVVRSXGX

SEQ ID NO: 6668 - protein, 36 aa, Artificial Sequence
  GFR-binding peptide
  MOD_RES (4), (36): Xaa is C or S
KPTXAPTKLSPISVLYKDDSSNVILKYHYNMVVRSX

SEQ ID NO: 6669 - protein, 40 aa, Artificial Sequence
  GFR-binding peptide
  MOD_RES (5), (6), (40): Xaa is C or S
  MOD_RES (20), (21), (22), (23), (24): Xaa is A or G
  MOD_RES (25), (26), (27), (28): Xaa is A or G or is absent
IPKAXXVPTELNAISMLYFXXXXXXXXXLKKYREMVVEGX

SEQ ID NO: 6670 - protein, 35 aa, Artificial Sequence
  GFR-binding peptide
  MOD_RES (3), (4): Xaa is C or S
KAXXVPTELNAISMLYFDENEKVVLKKYRDMVVEG

SEQ ID NO: 6671 - protein, 36 aa, Artificial Sequence
  GFR-binding peptide
  MOD_RES (1), (35): Xaa is C or S
  MOD_RES (15), (16), (17), (18), (19): Xaa is A or G
  MOD_RES (20), (21), (22), (23): Xaa is A or G or is absent
XVPTELNAISMLYFXXXXXXXXXLKKYREMVVEGXG

SEQ ID NO: 6672 - protein, 33 aa, Artificial Sequence
  GFR-binding peptide
  MOD_RES (33), (33): Xaa is C or S
  MOD_RES (14), (15), (16), (17), (18): Xaa is A or G
  MOD_RES (19), (20), (21), (22): Xaa is A or G or is absent
VPQALNAISILYFXXXXXXXXXLKKYRMIVRSX

SEQ ID NO: 6673 - protein, 34 aa, Artificial Sequence
  GFR-binding peptide
  MOD_RES (1), (2): Xaa is C or S
  MOD_RES (16), (17), (18), (19), (20): Xaa is A or G
  MOD_RES (21), (22), (23), (24): Xaa is A or G or is absent
XXAPTQLSATSVLYYXXXXXXXXXLRKHRNMVVR

SEQ ID NO: 6674 - protein, 34 aa, Artificial Sequence
  GFR-binding peptide
  MOD_RES (1), (1): Xaa is C or S
  MOD_RES (15), (16), (17), (18), (19): Xaa is A or G
  MOD_RES (20), (21), (22), (23): Xaa is A or G or is absent
XAPTQLSAISVLYLXXXXXXXXXLKNYQNMVVRA

SEQ ID NO: 6675 - protein, 39 aa, Artificial Sequence
  GFR-binding peptide
  MOD_RES (2), (36), (38): Xaa is C or S
  MOD_RES (16), (17), (18), (19), (20): Xaa is A or G
  MOD_RES (21), (22), (23), (24): Xaa is A or G or is absent
TXAPTKLSATSVLYYXXXXXXXXXLRKHRNMVVRSXGXH

SEQ ID NO: 6676 - protein, 34 aa, Artificial Sequence
  GFR-binding peptide
  MOD_RES (1), (32), (34): Xaa is C or S
XVPQDLSATSILYYVGRTPKVLRKHRMVVKSXKX

SEQ ID NO: 6677 - protein, 38 aa, Artificial Sequence
  GFR-binding peptide
  MOD_RES (2), (3), (37): Xaa is C or S
  MOD_RES (17), (18), (19), (20), (21): Xaa is A or G
  MOD_RES (22), (23), (24), (25): Xaa is A or G or is absent
PXXAPTKLSAISVLYLXXXXXXXXXLKNYQNMVVRSXG

SEQ ID NO: 6678 - protein, 36 aa, Artificial Sequence
  GFR-binding peptide
  MOD_RES (1), (33), (35): Xaa is C or S
XAPTKLSATSVLYYDDSSNVILRKHRNMVVRSXGXH

SEQ ID NO: 6679 - protein, 33 aa, Artificial Sequence
  GFR-binding peptide
  MOD_RES (1), (2): Xaa is C or S
XXVPTELNAISMLYFDENEKVVLKKYRDMVVEG

SEQ ID NO: 6680 - protein, 41 aa, Artificial Sequence
  GFR-binding peptide
  MOD_RES (3), (4), (38), (40): Xaa is C or S
  MOD_RES (18), (19), (20), (21), (22): Xaa is A or G
  MOD_RES (23), (24), (25), (26): Xaa is A or G or is absent
KAXXAPTKLSATSVLYYXXXXXXXXXLRKHRNMVVKAXGXH

SEQ ID NO: 6681 - protein, 32 aa, Artificial Sequence
  GFR-binding peptide
  MOD_RES (14), (15), (16), (17), (18): Xaa is A or G
  MOD_RES (19), (20), (21), (22): Xaa is A or G or is absent
APTKLSATSVLYYXXXXXXXXXLRKHRNMVVR

SEQ ID NO: 6682 - protein, 36 aa, Artificial Sequence
  GFR-binding peptide
  MOD_RES (2), (3), (34), (36): Xaa is C or S
PXXVSQDLSPISILYKIGKTPKILKYHYMIVKSXKX

SEQ ID NO: 6683 - protein, 39 aa, Artificial Sequence
  GFR-binding peptide
  MOD_RES (6), (7): Xaa is C or S
  MOD_RES (21), (22), (23), (24), (25): Xaa is A or G
  MOD_RES (26), (27), (28), (29): Xaa is A or G or is absent
KIPKAXXVPTELSPISMLYKXXXXXXXXXLKYHYDMVVE

SEQ ID NO: 6684 - protein, 33 aa, Artificial Sequence
  GFR-binding peptide
  MOD_RES (2), (3): Xaa is C or S
PXXVPQDLSPISILYKVGRTPKVLKYHYMVVKS

SEQ ID NO: 6685 - protein, 40 aa, Artificial Sequence
  GFR-binding peptide
  MOD_RES (5), (6), (40): Xaa is C or S
  MOD_RES (20), (21), (22), (23), (24): Xaa is A or G
  MOD_RES (25), (26), (27), (28): Xaa is A or G or is absent
IPKAXXVPTELSPISMLYKXXXXXXXXXLKYHYDMVVEGX

SEQ ID NO: 6686 - protein, 32 aa, Artificial Sequence
  GFR-binding peptide
  MOD_RES (14), (15), (16), (17), (18): Xaa is A or G
  MOD_RES (19), (20), (21), (22): Xaa is A or G or is absent
APTKLSATSVLYYXXXXXXXXXLRKHRNMVVK

SEQ ID NO: 6687 - protein, 32 aa, Artificial Sequence
  GFR-binding peptide
  MOD_RES (1), (32): Xaa is C or S
XVSQDLSATSILYYIGKTPKILRKHRMIVKSX

SEQ ID NO: 6688 - protein, 32 aa, Artificial Sequence
  GFR-binding peptide
  MOD_RES (1), (2): Xaa is C or S
XXVPQDLSPISILYKVGRTPKVLKYHYMVVKS

SEQ ID NO: 6689 - protein, 39 aa, Artificial Sequence
  GFR-binding peptide
  MOD_RES (2), (3), (36), (38): Xaa is C or S
  MOD_RES (17), (18), (19), (20), (21): Xaa is A or G
  MOD_RES (22), (23), (24), (25): Xaa is A or G or is absent
PXXVPQALSAISILYLXXXXXXXXXLKNYQMIVRSXKXS

SEQ ID NO: 6690 - protein, 40 aa, Artificial Sequence
  GFR-binding peptide
  MOD_RES (3), (4), (38), (40): Xaa is C or S
  MOD_RES (18), (19), (20), (21), (22): Xaa is A or G
  MOD_RES (23), (24), (25), (26): Xaa is A or G or is absent
KAXXAPTKLSAISVLYLXXXXXXXXXLKNYQNMVVKAXGX

SEQ ID NO: 6691 - protein, 39 aa, Artificial Sequence
  GFR-binding peptide
  MOD_RES (5), (6), (37), (39): Xaa is C or S
SAAPXXVPQALSATSILYYVGRKPKVLRKHRMIVRSXKX

SEQ ID NO: 6692 - protein, 38 aa, Artificial Sequence
  GFR-binding peptide
  MOD_RES (3), (4), (38): Xaa is C or S
  MOD_RES (18), (19), (20), (21), (22): Xaa is A or G
  MOD_RES (23), (24), (25), (26): Xaa is A or G or is absent
KAXXVPTELSPISMLYKXXXXXXXXXLKYHYDMVVEGX

SEQ ID NO: 6693 - protein, 37 aa, Artificial Sequence
  GFR-binding peptide
  MOD_RES (1), (2), (37): Xaa is C or S
  MOD_RES (16), (17), (18), (19), (20): Xaa is A or G
  MOD_RES (21), (22), (23), (24): Xaa is A or G or is absent
XXVPTKLSAISVLYLXXXXXXXXXLKNYQEGMSVAEX

SEQ ID NO: 6694 - protein, 39 aa, Artificial Sequence
  GFR-binding peptide
  MOD_RES (3), (4), (36), (38): Xaa is C or S
KPXXAPTKLSPISVLYKDDSSNVILKYHYNMVVRSXGXH

SEQ ID NO: 6695 - protein, 33 aa, Artificial Sequence
  GFR-binding peptide
TQVQLSATSVLYYEIVRKKPIFLRKHRTLEDHL

SEQ ID NO: 6696 - protein, 42 aa, Artificial Sequence
  GFR-binding peptide
  MOD_RES (5), (6), (40), (42): Xaa is C or S
  MOD_RES (20), (21), (22), (23), (24): Xaa is A or G
  MOD_RES (25), (26), (27), (28): Xaa is A or G or is absent
IPKAXXVPTELSATSMLYYXXXXXXXXXLRKHRDMVVEGXGX

SEQ ID NO: 6697 - protein, 36 aa, Artificial Sequence
  GFR-binding peptide
  MOD_RES (3), (4): Xaa is C or S
  MOD_RES (18), (19), (20), (21), (22): Xaa is A or G
  MOD_RES (23), (24), (25), (26): Xaa is A or G or is absent
SPXXVSQDLSATSILYYXXXXXXXXXLRKHRMIVKS

SEQ ID NO: 6698 - protein, 39 aa, Artificial Sequence
  GFR-binding peptide
  MOD_RES (1), (36), (38): Xaa is C or S
  MOD_RES (15), (16), (17), (18), (19): Xaa is A or G
  MOD_RES (20), (21), (22), (23): Xaa is A or G or is absent
XVPTKLSATSVLYYXXXXXXXXXLRKHREGMSVAEXGXR

SEQ ID NO: 6699 - protein, 39 aa, Artificial Sequence
  GFR-binding peptide
  MOD_RES (5), (6), (37), (39): Xaa is C or S
SAAPXXVPQALSPISILYKVGRKPKVLKYHYMIVRSXKX

SEQ ID NO: 6700 - protein, 35 aa, Artificial Sequence
  GFR-binding peptide
  MOD_RES (1), (2): Xaa is C or S
  MOD_RES (16), (17), (18), (19), (20): Xaa is A or G
  MOD_RES (21), (22), (23), (24): Xaa is A or G or is absent
XXVPTELSATSMLYYXXXXXXXXXLRKHRDMVVEG

SEQ ID NO: 6701 - protein, 34 aa, Artificial Sequence
  GFR-binding peptide
  MOD_RES (1), (2): Xaa is C or S
  MOD_RES (16), (17), (18), (19), (20): Xaa is A or G
  MOD_RES (21), (22), (23), (24): Xaa is A or G or is absent
XXVPQDLSPISILYKXXXXXXXXXLKYHYMVVKS

SEQ ID NO: 6702 - protein, 34 aa, Artificial Sequence
  GFR-binding peptide
  MOD_RES (1), (1): Xaa is C or S
  MOD_RES (15), (16), (17), (18), (19): Xaa is A or G
  MOD_RES (20), (21), (22), (23): Xaa is A or G or is absent
XAPTKLSPISVLYKXXXXXXXXXLKYHYNMVVKA

SEQ ID NO: 6703 - protein, 38 aa, Artificial Sequence
  GFR-binding peptide
  MOD_RES (3), (35), (37): Xaa is C or S
PTXAPTKLSPISVLYKDDSSNVILKYHYNMVVRSXGXH

SEQ ID NO: 6704 - protein, 37 aa, Artificial Sequence
  GFR-binding peptide
  MOD_RES (5), (6), (37): Xaa is C or S
SASPXXVPQDLSATSILYYVGRTPKVLRKHRMVVKSX

SEQ ID NO: 6705 - protein, 40 aa, Artificial Sequence
  GFR-binding peptide
  MOD_RES (5), (39): Xaa is C or S
  MOD_RES (19), (20), (21), (22), (23): Xaa is A or G
  MOD_RES (24), (25), (26), (27): Xaa is A or G or is absent
TKPTXAPTKLNAISVLYFXXXXXXXXXLKKYRNMVVRSXG

SEQ ID NO: 6706 - protein, 33 aa, Artificial Sequence
  GFR-binding peptide
  MOD_RES (31), (33): Xaa is C or S
VPQALSAISILYLVGRKPKVLKNYQMIVRSXKX

SEQ ID NO: 6707 - protein, 34 aa, Artificial Sequence
  GFR-binding peptide
  MOD_RES (34), (34): Xaa is C or S
  MOD_RES (14), (15), (16), (17), (18): Xaa is A or G
  MOD_RES (19), (20), (21), (22): Xaa is A or G or is absent
VPTELSPISMLYKXXXXXXXXXLKYHYEMVVEGX

SEQ ID NO: 6708 - protein, 40 aa, Artificial Sequence
  GFR-binding peptide
  MOD_RES (3), (4), (38), (40): Xaa is C or S
  MOD_RES (18), (19), (20), (21), (22): Xaa is A or G
  MOD_RES (23), (24), (25), (26): Xaa is A or G or is absent
KPXXAPTQLNAISVLYFXXXXXXXXXLKKYRNMVVRAXGX

SEQ ID NO: 6709 - protein, 39 aa, Artificial Sequence
  GFR-binding peptide
  MOD_RES (4), (5), (39): Xaa is C or S
  MOD_RES (19), (20), (21), (22), (23): Xaa is A or G
  MOD_RES (24), (25), (26), (27): Xaa is A or G or is absent
PKPXXAPTKLSATSVLYYXXXXXXXXXLRKHRNMVVRSX

SEQ ID NO: 6710 - protein, 38 aa, Artificial Sequence
  GFR-binding peptide
  MOD_RES (6), (7): Xaa is C or S
SIPKAXXVPTELSATSMLYYDEYDKVVLRKHREMVVEG

SEQ ID NO: 6711 - protein, 43 aa, Artificial Sequence
  GFR-binding peptide
  MOD_RES (6), (7), (41), (43): Xaa is C or S
  MOD_RES (21), (22), (23), (24), (25): Xaa is A or G
  MOD_RES (26), (27), (28), (29): Xaa is A or G or is absent
SIPKAXXVPTELNAISMLYFXXXXXXXXXLKKYREMVVEGXGX

SEQ ID NO: 6712 - protein, 37 aa, Artificial Sequence
  GFR-binding peptide
  MOD_RES (35), (37): Xaa is C or S
TQVQLNAISVLYFEIVRKKPIFLKKYRTLEDHLAXKX

SEQ ID NO: 6713 - protein, 38 aa, Artificial Sequence
  GFR-binding peptide
  MOD_RES (2), (3), (35), (37): Xaa is C or S
AXXVPTELNAISMLYFDEYDKVVLKKYREMVVEGXGXR

SEQ ID NO: 6714 - protein, 35 aa, Artificial Sequence
  GFR-binding peptide
  MOD_RES (1), (33), (35): Xaa is C or S
XVPTELSATSMLYYDENEKVVLRKHRDMVVEGXGX

SEQ ID NO: 6715 - protein, 40 aa, Artificial Sequence
  GFR-binding peptide
  MOD_RES (5), (6), (39): Xaa is C or S
  MOD_RES (20), (21), (22), (23), (24): Xaa is A or G
  MOD_RES (25), (26), (27), (28): Xaa is A or G or is absent
SAAPXXVPQALSATSILYYXXXXXXXXXLRKHRMIVRSXK

SEQ ID NO: 6716 - protein, 36 aa, Artificial Sequence
  GFR-binding peptide
  MOD_RES (36), (36): Xaa is C or S
  MOD_RES (15), (16), (17), (18), (19): Xaa is A or G
  MOD_RES (20), (21), (22), (23): Xaa is A or G or is absent
PTQVQLSAISVLYLXXXXXXXXXLKNYQTLEDHLAX

SEQ ID NO: 6717 - protein, 35 aa, Artificial Sequence
  GFR-binding peptide
  MOD_RES (15), (16), (17), (18), (19): Xaa is A or G
  MOD_RES (20), (21), (22), (23): Xaa is A or G or is absent
PTQVQLSPISVLYKXXXXXXXXXLKYHYTLEDHLA

SEQ ID NO: 6718 - protein, 40 aa, Artificial Sequence
  GFR-binding peptide
  MOD_RES (3), (4), (38), (40): Xaa is C or S
  MOD_RES (18), (19), (20), (21), (22): Xaa is A or G
  MOD_RES (23), (24), (25), (26): Xaa is A or G or is absent
KPXXAPTKLNAISVLYFXXXXXXXXXLKKYRNMVVRSXGX

SEQ ID NO: 6719 - protein, 35 aa, Artificial Sequence
  GFR-binding peptide
  MOD_RES (1), (32), (34): Xaa is C or S
XVPQDLSAISILYLVGRTPKVLKNYQMVVKSXKXS

SEQ ID NO: 6720 - protein, 44 aa, Artificial Sequence
  GFR-binding peptide
  MOD_RES (7), (41), (43): Xaa is C or S
  MOD_RES (21), (22), (23), (24), (25): Xaa is A or G
  MOD_RES (26), (27), (28), (29): Xaa is A or G or is absent
HVTKPTXAPTKLNAISVLYFXXXXXXXXXLKKYRNMVVRSXGXH

SEQ ID NO: 6721 - protein, 36 aa, Artificial Sequence
  GFR-binding peptide
  MOD_RES (1), (2), (35): Xaa is C or S
  MOD_RES (16), (17), (18), (19), (20): Xaa is A or G
  MOD_RES (21), (22), (23), (24): Xaa is A or G or is absent
XXVPQALSPISILYKXXXXXXXXXLKYHYMIVRSXK

SEQ ID NO: 6722 - protein, 37 aa, Artificial Sequence
  GFR-binding peptide
  MOD_RES (35), (37): Xaa is C or S
  MOD_RES (14), (15), (16), (17), (18): Xaa is A or G
  MOD_RES (19), (20), (21), (22): Xaa is A or G or is absent
VPTKLSAISVLYLXXXXXXXXXLKNYQEGMSVAEXGX

SEQ ID NO: 6723 - protein, 42 aa, Artificial Sequence
  GFR-binding peptide
  MOD_RES (6), (7), (42): Xaa is C or S
  MOD_RES (21), (22), (23), (24), (25): Xaa is A or G
  MOD_RES (26), (27), (28), (29): Xaa is A or G or is absent
KVGKAXXVPTKLSATSVLYYXXXXXXXXXLRKHREGMSVAEX

SEQ ID NO: 6724 - protein, 39 aa, Artificial Sequence
  GFR-binding peptide
  MOD_RES (6), (7): Xaa is C or S
  MOD_RES (21), (22), (23), (24), (25): Xaa is A or G
  MOD_RES (26), (27), (28), (29): Xaa is A or G or is absent
ASAAPXXVPQALSATSILYYXXXXXXXXXLRKHRMIVRS

SEQ ID NO: 6725 - protein, 38 aa, Artificial Sequence
  GFR-binding peptide
  MOD_RES (2), (3), (38): Xaa is C or S
  MOD_RES (17), (18), (19), (20), (21): Xaa is A or G
  MOD_RES (22), (23), (24), (25): Xaa is A or G or is absent
AXXVPTKLSATSVLYYXXXXXXXXXLRKHREGMSVAEX

SEQ ID NO: 6726 - protein, 39 aa, Artificial Sequence
  GFR-binding peptide
  MOD_RES (5), (6), (39): Xaa is C or S
  MOD_RES (20), (21), (22), (23), (24): Xaa is A or G
  MOD_RES (25), (26), (27), (28): Xaa is A or G or is absent
SASPXXVSQDLNAISILYFXXXXXXXXXLKKYRMIVKSX

SEQ ID NO: 6727 - protein, 35 aa, Artificial Sequence
  GFR-binding peptide
  MOD_RES (1), (2), (35): Xaa is C or S
  MOD_RES (16), (17), (18), (19), (20): Xaa is A or G
  MOD_RES (21), (22), (23), (24): Xaa is A or G or is absent
XXVPQDLNAISILYFXXXXXXXXXLKKYRMVVKSX

SEQ ID NO: 6728 - protein, 33 aa, Artificial Sequence
  GFR-binding peptide
  MOD_RES (1), (1): Xaa is C or S
  MOD_RES (15), (16), (17), (18), (19): Xaa is A or G
  MOD_RES (20), (21), (22), (23): Xaa is A or G or is absent
XVPTELSPISMLYKXXXXXXXXXLKYHYEMVVE

SEQ ID NO: 6729 - protein, 39 aa, Artificial Sequence
  GFR-binding peptide
  MOD_RES (36), (38): Xaa is C or S
  MOD_RES (15), (16), (17), (18), (19): Xaa is A or G
  MOD_RES (20), (21), (22), (23): Xaa is A or G or is absent
PTQVQLNAISVLYFXXXXXXXXXLKKYRTLEDHLAXKXE

SEQ ID NO: 6730 - protein, 39 aa, Artificial Sequence
  GFR-binding peptide
  MOD_RES (5), (6), (39): Xaa is C or S
  MOD_RES (20), (21), (22), (23), (24): Xaa is A or G
  MOD_RES (25), (26), (27), (28): Xaa is A or G or is absent
SASPXXVPQDLSATSILYYXXXXXXXXXLRKHRMVVKSX

SEQ ID NO: 6731 - protein, 34 aa, Artificial Sequence
  GFR-binding peptide
  MOD_RES (2), (3), (34): Xaa is C or S
PXXVPQDLSPISILYKVGRTPKVLKYHYMVVKSX

SEQ ID NO: 6732 - protein, 34 aa, Artificial Sequence
  GFR-binding peptide
  MOD_RES (2), (3): Xaa is C or S
AXXAPTKLNAISVLYFDSSNNVILKKYRNMVVKA

SEQ ID NO: 6733 - protein, 33 aa, Artificial Sequence
  GFR-binding peptide
  MOD_RES (1), (2): Xaa is C or S
XXAPTKLSAISVLYLDDSSNVILKNYQNMVVRS

SEQ ID NO: 6734 - protein, 33 aa, Artificial Sequence
  GFR-binding peptide
  MOD_RES (32), (32): Xaa is C or S
APTKLSATSVLYYDDSSNVILRKHRNMVVRSXG

SEQ ID NO: 6735 - protein, 37 aa, Artificial Sequence
  GFR-binding peptide
  MOD_RES (1), (2), (36): Xaa is C or S
  MOD_RES (16), (17), (18), (19), (20): Xaa is A or G
  MOD_RES (21), (22), (23), (24): Xaa is A or G or is absent
XXVPTELSAISMLYLXXXXXXXXXLKNYQDMVVEGXG

SEQ ID NO: 6736 - protein, 33 aa, Artificial Sequence
  GFR-binding peptide
  MOD_RES (1), (33): Xaa is C or S
XAPTKLSAISVLYLDDSSNVILKNYQNMVVRSX

SEQ ID NO: 6737 - protein, 31 aa, Artificial Sequence
  GFR-binding peptide
VPTELSATSMLYYDEYDKVVLRKHREMVVEG

SEQ ID NO: 6738 - protein, 37 aa, Artificial Sequence
  GFR-binding peptide
  MOD_RES (4), (5), (36): Xaa is C or S
AAPXXVPQALSPISILYKVGRKPKVLKYHYMIVRSXK

SEQ ID NO: 6739 - protein, 40 aa, Artificial Sequence
  GFR-binding peptide
  MOD_RES (2), (3), (37), (39): Xaa is C or S
  MOD_RES (17), (18), (19), (20), (21): Xaa is A or G
  MOD_RES (22), (23), (24), (25): Xaa is A or G or is absent
PXXAPTKLNAISVLYFXXXXXXXXXLKKYRNMVVRSXGXH

SEQ ID NO: 6740 - protein, 43 aa, Artificial Sequence
  GFR-binding peptide
  MOD_RES (6), (7), (40), (42): Xaa is C or S
  MOD_RES (21), (22), (23), (24), (25): Xaa is A or G
  MOD_RES (26), (27), (28), (29): Xaa is A or G or is absent
ASASPXXVSQDLSATSILYYXXXXXXXXXLRKHRMIVKSXKXS

SEQ ID NO: 6741 - protein, 41 aa, Artificial Sequence
  GFR-binding peptide
  MOD_RES (5), (5): Xaa is C or S
  MOD_RES (21), (22), (23), (24), (25): Xaa is A or G
  MOD_RES (26), (27), (28), (29): Xaa is A or G or is absent
RNVQXRPTQVQLSAISVLYLXXXXXXXXXLKNYQTLEDHLA

SEQ ID NO: 6742 - protein, 40 aa, Artificial Sequence
  GFR-binding peptide
  MOD_RES (2), (3), (37), (39): Xaa is C or S
  MOD_RES (17), (18), (19), (20), (21): Xaa is A or G
  MOD_RES (22), (23), (24), (25): Xaa is A or G or is absent
AXXVPTELSPISMLYKXXXXXXXXXLKYHYDMVVEGXGXR

SEQ ID NO: 6743 - protein, 34 aa, Artificial Sequence
  GFR-binding peptide
  MOD_RES (32), (34): Xaa is C or S
VPTELSPISMLYKDENEKVVLKYHYDMVVEGXGX

SEQ ID NO: 6744 - protein, 41 aa, Artificial Sequence
  GFR-binding peptide
  MOD_RES (3), (4), (38), (40): Xaa is C or S
  MOD_RES (18), (19), (20), (21), (22): Xaa is A or G
  MOD_RES (23), (24), (25), (26): Xaa is A or G or is absent
KAXXAPTKLSPISVLYKXXXXXXXXXLKYHYNMVVKAXGXH

SEQ ID NO: 6745 - protein, 32 aa, Artificial Sequence
  GFR-binding peptide
  MOD_RES (14), (15), (16), (17), (18): Xaa is A or G
  MOD_RES (19), (20), (21), (22): Xaa is A or G or is absent
APTKLSAISVLYLXXXXXXXXXLKNYQNMVVK

SEQ ID NO: 6746 - protein, 39 aa, Artificial Sequence
  GFR-binding peptide
  MOD_RES (5), (6), (39): Xaa is C or S
  MOD_RES (20), (21), (22), (23), (24): Xaa is A or G
  MOD_RES (25), (26), (27), (28): Xaa is A or G or is absent
SASPXXVPQDLSAISILYLXXXXXXXXXLKNYQMVVKSX

SEQ ID NO: 6747 - protein, 39 aa, Artificial Sequence
  GFR-binding peptide
  MOD_RES (4), (5), (38): Xaa is C or S
  MOD_RES (19), (20), (21), (22), (23): Xaa is A or G
  MOD_RES (24), (25), (26), (27): Xaa is A or G or is absent
ASPXXVPQDLSPISILYKXXXXXXXXXLKYHYMVVKSXK

SEQ ID NO: 6748 - protein, 37 aa, Artificial Sequence
  GFR-binding peptide
  MOD_RES (2), (3), (36): Xaa is C or S
  MOD_RES (17), (18), (19), (20), (21): Xaa is A or G
  MOD_RES (22), (23), (24), (25): Xaa is A or G or is absent
PXXVPQALNAISILYFXXXXXXXXXLKKYRMIVRSXK

SEQ ID NO: 6749 - protein, 39 aa, Artificial Sequence
  GFR-binding peptide
  MOD_RES (3), (4), (39): Xaa is C or S
  MOD_RES (18), (19), (20), (21), (22): Xaa is A or G
  MOD_RES (23), (24), (25), (26): Xaa is A or G or is absent
KAXXVPTKLSPISVLYKXXXXXXXXXLKYHYEGMSVAEX

SEQ ID NO: 6750 - protein, 37 aa, Artificial Sequence
  GFR-binding peptide
  MOD_RES (2), (3), (34), (36): Xaa is C or S
PXXVPQDLNAISILYFVGRTPKVLKKYRMVVKSXKXS

SEQ ID NO: 6751 - protein, 36 aa, Artificial Sequence
  GFR-binding peptide
  MOD_RES (1), (2), (36): Xaa is C or S
  MOD_RES (16), (17), (18), (19), (20): Xaa is A or G
  MOD_RES (21), (22), (23), (24): Xaa is A or G or is absent
XXAPTKLNAISVLYFXXXXXXXXXLKKYRNMVVKAX

SEQ ID NO: 6752 - protein, 34 aa, Artificial Sequence
  GFR-binding peptide
  MOD_RES (34), (34): Xaa is C or S
  MOD_RES (14), (15), (16), (17), (18): Xaa is A or G
  MOD_RES (19), (20), (21), (22): Xaa is A or G or is absent
VPTELSATSMLYYXXXXXXXXXLRKHRDMVVEGX

SEQ ID NO: 6753 - protein, 42 aa, Artificial Sequence
  GFR-binding peptide
  MOD_RES (6), (7), (41): Xaa is C or S
  MOD_RES (21), (22), (23), (24), (25): Xaa is A or G
  MOD_RES (26), (27), (28), (29): Xaa is A or G or is absent
KIPKAXXVPTELSAISMLYLXXXXXXXXXLKNYQDMVVEGXG

SEQ ID NO: 6754 - protein, 35 aa, Artificial Sequence
  GFR-binding peptide
  MOD_RES (1), (35): Xaa is C or S
  MOD_RES (15), (16), (17), (18), (19): Xaa is A or G
  MOD_RES (20), (21), (22), (23): Xaa is A or G or is absent
XAPTQLSPISVLYKXXXXXXXXXLKYHYNMVVRAX

SEQ ID NO: 6755 - protein, 41 aa, Artificial Sequence
  GFR-binding peptide
  MOD_RES (5), (5): Xaa is C or S
  MOD_RES (21), (22), (23), (24), (25): Xaa is A or G
  MOD_RES (26), (27), (28), (29): Xaa is A or G or is absent
RNVQXRPTQVQLSATSVLYYXXXXXXXXXLRKHRTLEDHLA

SEQ ID NO: 6756 - protein, 34 aa, Artificial Sequence
  GFR-binding peptide
  MOD_RES (1), (2): Xaa is C or S
  MOD_RES (16), (17), (18), (19), (20): Xaa is A or G
  MOD_RES (21), (22), (23), (24): Xaa is A or G or is absent
XXVPTELSAISMLYLXXXXXXXXXLKNYQDMVVE

SEQ ID NO: 6757 - protein, 32 aa, Artificial Sequence
  GFR-binding peptide
  MOD_RES (1), (1): Xaa is C or S
XAPTQLSAISVLYLDDSSNVILKNYQNMVVRA

SEQ ID NO: 6758 - protein, 44 aa, Artificial Sequence
  GFR-binding peptide
  MOD_RES (6), (7), (41), (43): Xaa is C or S
  MOD_RES (21), (22), (23), (24), (25): Xaa is A or G
  MOD_RES (26), (27), (28), (29): Xaa is A or G or is absent
SIPKAXXVPTELSATSMLYYXXXXXXXXXLRKHREMVVEGXGXR

SEQ ID NO: 6759 - protein, 31 aa, Artificial Sequence
  GFR-binding peptide
  MOD_RES (1), (1): Xaa is C or S
XAPTKLSPISVLYKDDSSNVILKYHYNMVVR

SEQ ID NO: 6760 - protein, 38 aa, Artificial Sequence
  GFR-binding peptide
  MOD_RES (2), (3), (35), (37): Xaa is C or S
PXXAPTKLSPISVLYKDDSSNVILKYHYNMVVRSXGXH

SEQ ID NO: 6761 - protein, 38 aa, Artificial Sequence
  GFR-binding peptide
  MOD_RES (1), (2), (35), (37): Xaa is C or S
  MOD_RES (16), (17), (18), (19), (20): Xaa is A or G
  MOD_RES (21), (22), (23), (24): Xaa is A or G or is absent
XXVPQALSATSILYYXXXXXXXXXLRKHRMIVRSXKXS

SEQ ID NO: 6762 - protein, 36 aa, Artificial Sequence
  GFR-binding peptide
  MOD_RES (33), (35): Xaa is C or S
  MOD_RES (14), (15), (16), (17), (18): Xaa is A or G
  MOD_RES (19), (20), (21), (22): Xaa is A or G or is absent
VPQDLSPISILYKXXXXXXXXXLKYHYMVVKSXKXS

SEQ ID NO: 6763 - protein, 35 aa, Artificial Sequence
  GFR-binding peptide
  MOD_RES (4), (5): Xaa is C or S
PKPXXAPTKLSAISVLYLDDSSNVILKNYQNMVVR

SEQ ID NO: 6764 - protein, 39 aa, Artificial Sequence
  GFR-binding peptide
  MOD_RES (6), (7): Xaa is C or S
  MOD_RES (21), (22), (23), (24), (25): Xaa is A or G
  MOD_RES (26), (27), (28), (29): Xaa is A or G or is absent
KIPKAXXVPTELSAISMLYLXXXXXXXXXLKNYQDMVVE

SEQ ID NO: 6765 - protein, 42 aa, Artificial Sequence
  GFR-binding peptide
  MOD_RES (5), (6), (39), (41): Xaa is C or S
  MOD_RES (20), (21), (22), (23), (24): Xaa is A or G
  MOD_RES (25), (26), (27), (28): Xaa is A or G or is absent
SASPXXVPQDLNAISILYFXXXXXXXXXLKKYRMVVKSXKXS

SEQ ID NO: 6766 - protein, 38 aa, Artificial Sequence
  GFR-binding peptide
  MOD_RES (1), (2), (36), (38): Xaa is C or S
  MOD_RES (16), (17), (18), (19), (20): Xaa is A or G
  MOD_RES (21), (22), (23), (24): Xaa is A or G or is absent
XXVPTELSAISMLYLXXXXXXXXXLKNYQDMVVEGXGX

SEQ ID NO: 6767 - protein, 38 aa, Artificial Sequence
  GFR-binding peptide
  MOD_RES (2), (2): Xaa is C or S
  MOD_RES (18), (19), (20), (21), (22): Xaa is A or G
  MOD_RES (23), (24), (25), (26): Xaa is A or G or is absent
QXRPTQVQLNAISVLYFXXXXXXXXXLKKYRTLEDHLA

SEQ ID NO: 6768 - protein, 40 aa, Artificial Sequence
  GFR-binding peptide
  MOD_RES (4), (5), (38), (40): Xaa is C or S
GKAXXVPTKLSAISVLYLDDMGVPTLKNYQEGMSVAEXGX

SEQ ID NO: 6769 - protein, 33 aa, Artificial Sequence
  GFR-binding peptide
  MOD_RES (1), (1): Xaa is C or S
XVPTKLNAISVLYFDDMGVPTLKKYREGMSVAE

SEQ ID NO: 6770 - protein, 35 aa, Artificial Sequence
  GFR-binding peptide
  MOD_RES (2), (3): Xaa is C or S
  MOD_RES (17), (18), (19), (20), (21): Xaa is A or G
  MOD_RES (22), (23), (24), (25): Xaa is A or G or is absent
AXXVPTELNAISMLYFXXXXXXXXXLKKYREMVVE

SEQ ID NO: 6771 - protein, 40 aa, Artificial Sequence
  GFR-binding peptide
  MOD_RES (5), (6), (40): Xaa is C or S
  MOD_RES (20), (21), (22), (23), (24): Xaa is A or G
  MOD_RES (25), (26), (27), (28): Xaa is A or G or is absent
VPKPXXAPTKLNAISVLYFXXXXXXXXXLKKYRNMVVRSX

SEQ ID NO: 6772 - protein, 41 aa, Artificial Sequence
  GFR-binding peptide
  MOD_RES (6), (7), (40): Xaa is C or S
KVGKAXXVPTKLSAISVLYLDDMGVPTLKNYQEGMSVAEXG

SEQ ID NO: 6773 - protein, 39 aa, Artificial Sequence
  GFR-binding peptide
  MOD_RES (1), (2), (36), (38): Xaa is C or S
  MOD_RES (16), (17), (18), (19), (20): Xaa is A or G
  MOD_RES (21), (22), (23), (24): Xaa is A or G or is absent
XXAPTKLNAISVLYFXXXXXXXXXLKKYRNMVVKAXGXH

SEQ ID NO: 6774 - protein, 41 aa, Artificial Sequence
  GFR-binding peptide
  MOD_RES (2), (3), (38), (40): Xaa is C or S
  MOD_RES (17), (18), (19), (20), (21): Xaa is A or G
  MOD_RES (22), (23), (24), (25): Xaa is A or G or is absent
AXXVPTKLSAISVLYLXXXXXXXXXLKNYQEGMSVAEXGXR

SEQ ID NO: 6775 - protein, 40 aa, Artificial Sequence
  GFR-binding peptide
  MOD_RES (3), (4), (37), (39): Xaa is C or S
  MOD_RES (18), (19), (20), (21), (22): Xaa is A or G
  MOD_RES (23), (24), (25), (26): Xaa is A or G or is absent
SPXXVSQDLNAISILYFXXXXXXXXXLKKYRMIVKSXKXS

SEQ ID NO: 6776 - protein, 37 aa, Artificial Sequence
  GFR-binding peptide
  MOD_RES (35), (37): Xaa is C or S
  MOD_RES (14), (15), (16), (17), (18): Xaa is A or G
  MOD_RES (19), (20), (21), (22): Xaa is A or G or is absent
VPTKLSATSVLYYXXXXXXXXXLRKHREGMSVAEXGX

SEQ ID NO: 6777 - protein, 39 aa, Artificial Sequence
  GFR-binding peptide
  MOD_RES (3), (4), (38): Xaa is C or S
  MOD_RES (18), (19), (20), (21), (22): Xaa is A or G
  MOD_RES (23), (24), (25), (26): Xaa is A or G or is absent
KAXXVPTELSPISMLYKXXXXXXXXXLKYHYEMVVEGXG

SEQ ID NO: 6778 - protein, 42 aa, Artificial Sequence
  GFR-binding peptide
  MOD_RES (5), (6), (41): Xaa is C or S
  MOD_RES (20), (21), (22), (23), (24): Xaa is A or G
  MOD_RES (25), (26), (27), (28): Xaa is A or G or is absent
VGKAXXVPTKLSAISVLYLXXXXXXXXXLKNYQEGMSVAEXG

SEQ ID NO: 6779 - protein, 40 aa, Artificial Sequence
  GFR-binding peptide
  MOD_RES (5), (6), (37), (39): Xaa is C or S
SASPXXVSQDLSPISILYKIGKTPKILKYHYMIVKSXKXS

SEQ ID NO: 6780 - protein, 40 aa, Artificial Sequence
  GFR-binding peptide
  MOD_RES (6), (7), (38), (40): Xaa is C or S
ASASPXXVPQDLSAISILYLVGRTPKVLKNYQMVVKSXKX

SEQ ID NO: 6781 - protein, 40 aa, Artificial Sequence
  GFR-binding peptide
  MOD_RES (2), (3), (38), (40): Xaa is C or S
  MOD_RES (17), (18), (19), (20), (21): Xaa is A or G
  MOD_RES (22), (23), (24), (25): Xaa is A or G or is absent
AXXVPTKLSAISVLYLXXXXXXXXXLKNYQEGMSVAEXGX

SEQ ID NO: 6782 - protein, 37 aa, Artificial Sequence
  GFR-binding peptide
  MOD_RES (34), (36): Xaa is C or S
  MOD_RES (14), (15), (16), (17), (18): Xaa is A or G
  MOD_RES (19), (20), (21), (22): Xaa is A or G or is absent
APTQLNAISVLYFXXXXXXXXXLKKYRNMVVRAXGXH

SEQ ID NO: 6783 - protein, 35 aa, Artificial Sequence
  GFR-binding peptide
  MOD_RES (1), (2), (35): Xaa is C or S
XXVPTKLSAISVLYLDDMGVPTLKNYQEGMSVAEX

SEQ ID NO: 6784 - protein, 36 aa, Artificial Sequence
  GFR-binding peptide
  MOD_RES (35), (35): Xaa is C or S
TQVQLNAISVLYFEIVRKKPIFLKKYRTLEDHLAXK

SEQ ID NO: 6785 - protein, 38 aa, Artificial Sequence
  GFR-binding peptide
  MOD_RES (4), (5), (37): Xaa is C or S
PKPXXAPTKLSATSVLYYDDSSNVILRKHRNMVVRSXG

SEQ ID NO: 6786 - protein, 37 aa, Artificial Sequence
  GFR-binding peptide
  MOD_RES (1), (34), (36): Xaa is C or S
  MOD_RES (15), (16), (17), (18), (19): Xaa is A or G
  MOD_RES (20), (21), (22), (23): Xaa is A or G or is absent
XVSQDLSAISILYLXXXXXXXXXLKNYQMIVKSXKXS

SEQ ID NO: 6787 - protein, 36 aa, Artificial Sequence
  GFR-binding peptide
  MOD_RES (2), (3): Xaa is C or S
  MOD_RES (17), (18), (19), (20), (21): Xaa is A or G
  MOD_RES (22), (23), (24), (25): Xaa is A or G or is absent
AXXAPTKLNAISVLYFXXXXXXXXXLKKYRNMVVKA

SEQ ID NO: 6788 - protein, 41 aa, Artificial Sequence
  GFR-binding peptide
  MOD_RES (6), (7), (39), (41): Xaa is C or S
SIPKAXXVPTELSATSMLYYDEYDKVVLRKHREMVVEGXGX

SEQ ID NO: 6789 - protein, 37 aa, Artificial Sequence
  GFR-binding peptide
  MOD_RES (4), (5), (37): Xaa is C or S
PKAXXAPTKLNAISVLYFDSSNNVILKKYRNMVVKAX

SEQ ID NO: 6790 - protein, 35 aa, Artificial Sequence
  GFR-binding peptide
  MOD_RES (1), (2), (33), (35): Xaa is C or S
XXVPQDLSATSILYYVGRTPKVLRKHRMVVKSXKX

SEQ ID NO: 6791 - protein, 38 aa, Artificial Sequence
  GFR-binding peptide
  MOD_RES (4), (5), (37): Xaa is C or S
PKAXXAPTKLSPISVLYKDSSNNVILKYHYNMVVKAXG

SEQ ID NO: 6792 - protein, 38 aa, Artificial Sequence
  GFR-binding peptide
  MOD_RES (4), (5): Xaa is C or S
  MOD_RES (19), (20), (21), (22), (23): Xaa is A or G
  MOD_RES (24), (25), (26), (27): Xaa is A or G or is absent
PKPXXAPTKLSPISVLYKXXXXXXXXXLKYHYNMVVRS

SEQ ID NO: 6793 - protein, 40 aa, Artificial Sequence
  GFR-binding peptide
  MOD_RES (2), (3), (37), (39): Xaa is C or S
  MOD_RES (17), (18), (19), (20), (21): Xaa is A or G
  MOD_RES (22), (23), (24), (25): Xaa is A or G or is absent
PXXAPTKLSPISVLYKXXXXXXXXXLKYHYNMVVRSXGXH

SEQ ID NO: 6794 - protein, 35 aa, Artificial Sequence
  GFR-binding peptide
  MOD_RES (3), (4): Xaa is C or S
KPXXAPTKLSAISVLYLDDSSNVILKNYQNMVVRS

SEQ ID NO: 6795 - protein, 38 aa, Artificial Sequence
  GFR-binding peptide
  MOD_RES (4), (5): Xaa is C or S
  MOD_RES (19), (20), (21), (22), (23): Xaa is A or G
  MOD_RES (24), (25), (26), (27): Xaa is A or G or is absent
PKPXXAPTKLSATSVLYYXXXXXXXXXLRKHRNMVVRS

SEQ ID NO: 6796 - protein, 38 aa, Artificial Sequence
  GFR-binding peptide
  MOD_RES (35), (37): Xaa is C or S
  MOD_RES (14), (15), (16), (17), (18): Xaa is A or G
  MOD_RES (19), (20), (21), (22): Xaa is A or G or is absent
VPTKLSPISVLYKXXXXXXXXXLKYHYEGMSVAEXGXR

SEQ ID NO: 6797 - protein, 34 aa, Artificial Sequence
  GFR-binding peptide
  MOD_RES (34), (34): Xaa is C or S
  MOD_RES (14), (15), (16), (17), (18): Xaa is A or G
  MOD_RES (19), (20), (21), (22): Xaa is A or G or is absent
APTQLNAISVLYFXXXXXXXXXLKKYRNMVVRAX

SEQ ID NO: 6798 - protein, 34 aa, Artificial Sequence
  GFR-binding peptide
  MOD_RES (31), (33): Xaa is C or S
VPQDLSPISILYKVGRTPKVLKYHYMVVKSXKXS

SEQ ID NO: 6799 - protein, 38 aa, Artificial Sequence
  GFR-binding peptide
  MOD_RES (3), (4), (35), (37): Xaa is C or S
SPXXVPQDLSATSILYYVGRTPKVLRKHRMVVKSXKXS

SEQ ID NO: 6800 - protein, 39 aa, Artificial Sequence
  GFR-binding peptide
  MOD_RES (4), (38): Xaa is C or S
  MOD_RES (18), (19), (20), (21), (22): Xaa is A or G
  MOD_RES (23), (24), (25), (26): Xaa is A or G or is absent
KPTXAPTKLNAISVLYFXXXXXXXXXLKKYRNMVVRSXG

SEQ ID NO: 6801 - protein, 38 aa, Artificial Sequence
  GFR-binding peptide
  MOD_RES (4), (5), (38): Xaa is C or S
  MOD_RES (19), (20), (21), (22), (23): Xaa is A or G
  MOD_RES (24), (25), (26), (27): Xaa is A or G or is absent
AAPXXVPQALNAISILYFXXXXXXXXXLKKYRMIVRSX

SEQ ID NO: 6802 - protein, 32 aa, Artificial Sequence
  GFR-binding peptide
  MOD_RES (14), (15), (16), (17), (18): Xaa is A or G
  MOD_RES (19), (20), (21), (22): Xaa is A or G or is absent
APTKLSPISVLYKXXXXXXXXXLKYHYNMVVK

SEQ ID NO: 6803 - protein, 41 aa, Artificial Sequence
  GFR-binding peptide
  MOD_RES (7), (39), (41): Xaa is C or S
HVTKPTXAPTKLSATSVLYYDDSSNVILRKHRNMVVRSXGX

SEQ ID NO: 6804 - protein, 40 aa, Artificial Sequence
  GFR-binding peptide
  MOD_RES (6), (7), (40): Xaa is C or S
  MOD_RES (21), (22), (23), (24), (25): Xaa is A or G
  MOD_RES (26), (27), (28), (29): Xaa is A or G or is absent
ASASPXXVSQDLSPISILYKXXXXXXXXXLKYHYMIVKSX

SEQ ID NO: 6805 - protein, 31 aa, Artificial Sequence
  GFR-binding peptide
  MOD_RES (1), (1): Xaa is C or S
XVPQALSAISILYLVGRKPKVLKNYQMIVRS

SEQ ID NO: 6806 - protein, 41 aa, Artificial Sequence
  GFR-binding peptide
  MOD_RES (6), (7), (39), (41): Xaa is C or S
TVPKPXXAPTQLSATSVLYYDDSSNVILRKHRNMVVRAXGX

SEQ ID NO: 6807 - protein, 39 aa, Artificial Sequence
  GFR-binding peptide
  MOD_RES (6), (38): Xaa is C or S
VTKPTXAPTKLSATSVLYYDDSSNVILRKHRNMVVRSXG

SEQ ID NO: 6808 - protein, 31 aa, Artificial Sequence
  GFR-binding peptide
  MOD_RES (1), (1): Xaa is C or S
XAPTKLSAISVLYLDDSSNVILKNYQNMVVR

SEQ ID NO: 6809 - protein, 41 aa, Artificial Sequence
  GFR-binding peptide
  MOD_RES (6), (38), (40): Xaa is C or S
VTKPTXAPTKLSATSVLYYDDSSNVILRKHRNMVVRSXGXH

SEQ ID NO: 6810 - protein, 35 aa, Artificial Sequence
  GFR-binding peptide
  MOD_RES (4), (5): Xaa is C or S
PKPXXAPTKLSPISVLYKDDSSNVILKYHYNMVVR

SEQ ID NO: 6811 - protein, 39 aa, Artificial Sequence
  GFR-binding peptide
  MOD_RES (3), (4), (37), (39): Xaa is C or S
  MOD_RES (18), (19), (20), (21), (22): Xaa is A or G
  MOD_RES (23), (24), (25), (26): Xaa is A or G or is absent
APXXVPQALSATSILYYXXXXXXXXXLRKHRMIVRSXKX

SEQ ID NO: 6812 - protein, 37 aa, Artificial Sequence
  GFR-binding peptide
  MOD_RES (3), (37): Xaa is C or S
  MOD_RES (17), (18), (19), (20), (21): Xaa is A or G
  MOD_RES (22), (23), (24), (25): Xaa is A or G or is absent
PTXAPTKLSPISVLYKXXXXXXXXXLKYHYNMVVRSX

SEQ ID NO: 6813 - protein, 35 aa, Artificial Sequence
  GFR-binding peptide
  MOD_RES (32), (34): Xaa is C or S
APTKLSATSVLYYDDSSNVILRKHRNMVVRSXGXH

SEQ ID NO: 6814 - protein, 36 aa, Artificial Sequence
  GFR-binding peptide
  MOD_RES (34), (36): Xaa is C or S
  MOD_RES (14), (15), (16), (17), (18): Xaa is A or G
  MOD_RES (19), (20), (21), (22): Xaa is A or G or is absent
VPTELSATSMLYYXXXXXXXXXLRKHREMVVEGXGX

SEQ ID NO: 6815 - protein, 34 aa, Artificial Sequence
  GFR-binding peptide
  MOD_RES (2), (3): Xaa is C or S
AXXAPTKLSAISVLYLDSSNNVILKNYQNMVVKA

SEQ ID NO: 6816 - protein, 36 aa, Artificial Sequence
  GFR-binding peptide
  MOD_RES (3), (4): Xaa is C or S
  MOD_RES (18), (19), (20), (21), (22): Xaa is A or G
  MOD_RES (23), (24), (25), (26): Xaa is A or G or is absent
SPXXVPQDLSAISILYLXXXXXXXXXLKNYQMVVKS

SEQ ID NO: 6817 - protein, 41 aa, Artificial Sequence
  GFR-binding peptide
  MOD_RES (5), (6), (38), (40): Xaa is C or S
VPKPXXAPTQLSAISVLYLDDSSNVILKNYQNMVVRAXGXH

SEQ ID NO: 6818 - protein, 32 aa, Artificial Sequence
  GFR-binding peptide
  MOD_RES (14), (15), (16), (17), (18): Xaa is A or G
  MOD_RES (19), (20), (21), (22): Xaa is A or G or is absent
APTKLSPISVLYKXXXXXXXXXLKYHYNMVVR

SEQ ID NO: 6819 - protein, 37 aa, Artificial Sequence
  GFR-binding peptide
  MOD_RES (1), (2), (36): Xaa is C or S
  MOD_RES (16), (17), (18), (19), (20): Xaa is A or G
  MOD_RES (21), (22), (23), (24): Xaa is A or G or is absent
XXAPTQLSATSVLYYXXXXXXXXXLRKHRNMVVRAXG

SEQ ID NO: 6820 - protein, 37 aa, Artificial Sequence
  GFR-binding peptide
  MOD_RES (3), (4), (37): Xaa is C or S
KAXXVPTKLSATSVLYYDDMGVPTLRKHREGMSVAEX

SEQ ID NO: 6821 - protein, 37 aa, Artificial Sequence
  GFR-binding peptide
  MOD_RES (3), (3): Xaa is C or S
  MOD_RES (19), (20), (21), (22), (23): Xaa is A or G
  MOD_RES (24), (25), (26), (27): Xaa is A or G or is absent
VQXRPTQVQLNAISVLYFXXXXXXXXXLKKYRTLEDH

SEQ ID NO: 6822 - protein, 32 aa, Artificial Sequence
  GFR-binding peptide
  MOD_RES (1), (2): Xaa is C or S
XXVPTELSPISMLYKDEYDKVVLKYHYEMVVE

SEQ ID NO: 6823 - protein, 40 aa, Artificial Sequence
  GFR-binding peptide
  MOD_RES (6), (7), (39): Xaa is C or S
TVPKPXXAPTQLSPISVLYKDDSSNVILKYHYNMVVRAXG

SEQ ID NO: 6824 - protein, 33 aa, Artificial Sequence
  GFR-binding peptide
  MOD_RES (1), (1): Xaa is C or S
  MOD_RES (15), (16), (17), (18), (19): Xaa is A or G
  MOD_RES (20), (21), (22), (23): Xaa is A or G or is absent
XVPQALSPISILYKXXXXXXXXXLKYHYMIVRS

SEQ ID NO: 6825 - protein, 38 aa, Artificial Sequence
  GFR-binding peptide
  MOD_RES (1), (2), (35), (37): Xaa is C or S
  MOD_RES (16), (17), (18), (19), (20): Xaa is A or G
  MOD_RES (21), (22), (23), (24): Xaa is A or G or is absent
XXVPQALSAISILYLXXXXXXXXXLKNYQMIVRSXKXS

SEQ ID NO: 6826 - protein, 36 aa, Artificial Sequence
  GFR-binding peptide
  MOD_RES (3), (4): Xaa is C or S
  MOD_RES (18), (19), (20), (21), (22): Xaa is A or G
  MOD_RES (23), (24), (25), (26): Xaa is A or G or is absent
SPXXVSQDLSPISILYKXXXXXXXXXLKYHYMIVKS

SEQ ID NO: 6827 - protein, 38 aa, Artificial Sequence
  GFR-binding peptide
  MOD_RES (3), (3): Xaa is C or S
  MOD_RES (19), (20), (21), (22), (23): Xaa is A or G
  MOD_RES (24), (25), (26), (27): Xaa is A or G or is absent
VQXRPTQVQLSATSVLYYXXXXXXXXXLRKHRTLEDHL

SEQ ID NO: 6828 - protein, 40 aa, Artificial Sequence
  GFR-binding peptide
  MOD_RES (6), (7): Xaa is C or S
  MOD_RES (21), (22), (23), (24), (25): Xaa is A or G
  MOD_RES (26), (27), (28), (29): Xaa is A or G or is absent
SIPKAXXVPTELSPISMLYKXXXXXXXXXLKYHYEMVVEG

SEQ ID NO: 6829 - protein, 38 aa, Artificial Sequence
  GFR-binding peptide
  MOD_RES (3), (3): Xaa is C or S
  MOD_RES (19), (20), (21), (22), (23): Xaa is A or G
  MOD_RES (24), (25), (26), (27): Xaa is A or G or is absent
VQXRPTQVQLSPISVLYKXXXXXXXXXLKYHYTLEDHL

SEQ ID NO: 6830 - protein, 39 aa, Artificial Sequence
  GFR-binding peptide
  MOD_RES (3), (4), (37), (39): Xaa is C or S
  MOD_RES (18), (19), (20), (21), (22): Xaa is A or G
  MOD_RES (23), (24), (25), (26): Xaa is A or G or is absent
SPXXVSQDLSATSILYYXXXXXXXXXLRKHRMIVKSXKX

SEQ ID NO: 6831 - protein, 40 aa, Artificial Sequence
  GFR-binding peptide
  MOD_RES (6), (7), (38), (40): Xaa is C or S
ASAAPXXVPQALNAISILYFVGRKPKVLKKYRMIVRSXKX

SEQ ID NO: 6832 - protein, 39 aa, Artificial Sequence
  GFR-binding peptide
  MOD_RES (6), (6): Xaa is C or S
  MOD_RES (20), (21), (22), (23), (24): Xaa is A or G
  MOD_RES (25), (26), (27), (28): Xaa is A or G or is absent
VTKPTXAPTKLSAISVLYLXXXXXXXXXLKNYQNMVVRS

SEQ ID NO: 6833 - protein, 36 aa, Artificial Sequence
  GFR-binding peptide
  MOD_RES (4), (5), (36): Xaa is C or S
AAPXXVPQALSPISILYKVGRKPKVLKYHYMIVRSX

SEQ ID NO: 6834 - protein, 40 aa, Artificial Sequence
  GFR-binding peptide
  MOD_RES (5), (6), (40): Xaa is C or S
  MOD_RES (20), (21), (22), (23), (24): Xaa is A or G
  MOD_RES (25), (26), (27), (28): Xaa is A or G or is absent
VPKPXXAPTQLNAISVLYFXXXXXXXXXLKKYRNMVVRAX

SEQ ID NO: 6835 - protein, 37 aa, Artificial Sequence
  GFR-binding peptide
  MOD_RES (34), (36): Xaa is C or S
  MOD_RES (14), (15), (16), (17), (18): Xaa is A or G
  MOD_RES (19), (20), (21), (22): Xaa is A or G or is absent
APTKLSPISVLYKXXXXXXXXXLKYHYNMVVRSXGXH

SEQ ID NO: 6836 - protein, 40 aa, Artificial Sequence
  GFR-binding peptide
  MOD_RES (3), (4), (38), (40): Xaa is C or S
  MOD_RES (18), (19), (20), (21), (22): Xaa is A or G
  MOD_RES (23), (24), (25), (26): Xaa is A or G or is absent
KAXXAPTKLSATSVLYYXXXXXXXXXLRKHRNMVVKAXGX

SEQ ID NO: 6837 - protein, 37 aa, Artificial Sequence
  GFR-binding peptide
  MOD_RES (1), (2), (36): Xaa is C or S
  MOD_RES (16), (17), (18), (19), (20): Xaa is A or G
  MOD_RES (21), (22), (23), (24): Xaa is A or G or is absent
XXAPTKLSATSVLYYXXXXXXXXXLRKHRNMVVKAXG

SEQ ID NO: 6838 - protein, 41 aa, Artificial Sequence
  GFR-binding peptide
  MOD_RES (2), (39), (41): Xaa is C or S
QXRPTQVQLSAISVLYLEIVRKKPIFLKNYQTLEDHLAXKX

SEQ ID NO: 6839 - protein, 32 aa, Artificial Sequence
  GFR-binding peptide
  MOD_RES (1), (1): Xaa is C or S
XAPTQLSATSVLYYDDSSNVILRKHRNMVVRA

SEQ ID NO: 6840 - protein, 33 aa, Artificial Sequence
  GFR-binding peptide
  MOD_RES (1), (2), (33): Xaa is C or S
XXVPQDLNAISILYFVGRTPKVLKKYRMVVKSX

SEQ ID NO: 6841 - protein, 38 aa, Artificial Sequence
  GFR-binding peptide
  MOD_RES (5), (6): Xaa is C or S
  MOD_RES (20), (21), (22), (23), (24): Xaa is A or G
  MOD_RES (25), (26), (27), (28): Xaa is A or G or is absent
VPKPXXAPTKLSPISVLYKXXXXXXXXXLKYHYNMVVR

SEQ ID NO: 6842 - protein, 37 aa, Artificial Sequence
  GFR-binding peptide
  MOD_RES (2), (2): Xaa is C or S
QXRPTQVQLSATSVLYYEIVRKKPIFLRKHRTLEDHL

SEQ ID NO: 6843 - protein, 30 aa, Artificial Sequence
  GFR-binding peptide
APTKLSAISVLYLDSSNNVILKNYQNMVVK

SEQ ID NO: 6844 - protein, 38 aa, Artificial Sequence
  GFR-binding peptide
  MOD_RES (1), (35), (37): Xaa is C or S
  MOD_RES (15), (16), (17), (18), (19): Xaa is A or G
  MOD_RES (20), (21), (22), (23): Xaa is A or G or is absent
XAPTQLSAISVLYLXXXXXXXXXLKNYQNMVVRAXGXH

SEQ ID NO: 6845 - protein, 38 aa, Artificial Sequence
  GFR-binding peptide
  MOD_RES (3), (4), (38): Xaa is C or S
  MOD_RES (18), (19), (20), (21), (22): Xaa is A or G
  MOD_RES (23), (24), (25), (26): Xaa is A or G or is absent
KPXXAPTQLSAISVLYLXXXXXXXXXLKNYQNMVVRAX

SEQ ID NO: 6846 - protein, 37 aa, Artificial Sequence
  GFR-binding peptide
  MOD_RES (2), (3), (34), (36): Xaa is C or S
PXXVPQALSATSILYYVGRKPKVLRKHRMIVRSXKXS

SEQ ID NO: 6847 - protein, 37 aa, Artificial Sequence
  GFR-binding peptide
  MOD_RES (3), (4), (36): Xaa is C or S
KAXXVPTELSPISMLYKDEYDKVVLKYHYEMVVEGXG

SEQ ID NO: 6848 - protein, 39 aa, Artificial Sequence
  GFR-binding peptide
  MOD_RES (5), (6), (38): Xaa is C or S
IPKAXXVPTELSPISMLYKDEYDKVVLKYHYEMVVEGXG

SEQ ID NO: 6849 - protein, 35 aa, Artificial Sequence
  GFR-binding peptide
  MOD_RES (1), (2), (35): Xaa is C or S
  MOD_RES (16), (17), (18), (19), (20): Xaa is A or G
  MOD_RES (21), (22), (23), (24): Xaa is A or G or is absent
XXVPQALNAISILYFXXXXXXXXXLKKYRMIVRSX

SEQ ID NO: 6850 - protein, 36 aa, Artificial Sequence
  GFR-binding peptide
  MOD_RES (4), (4): Xaa is C or S
  MOD_RES (18), (19), (20), (21), (22): Xaa is A or G
  MOD_RES (23), (24), (25), (26): Xaa is A or G or is absent
KPTXAPTKLSAISVLYLXXXXXXXXXLKNYQNMVVR

SEQ ID NO: 6851 - protein, 36 aa, Artificial Sequence
  GFR-binding peptide
  MOD_RES (1), (33), (35): Xaa is C or S
XVPTELSPISMLYKDENEKVVLKYHYDMVVEGXGXR

SEQ ID NO: 6852 - protein, 39 aa, Artificial Sequence
  GFR-binding peptide
  MOD_RES (4), (5), (37), (39): Xaa is C or S
PKPXXAPTQLSATSVLYYDDSSNVILRKHRNMVVRAXGX

SEQ ID NO: 6853 - protein, 37 aa, Artificial Sequence
  GFR-binding peptide
  MOD_RES (2), (3), (37): Xaa is C or S
  MOD_RES (17), (18), (19), (20), (21): Xaa is A or G
  MOD_RES (22), (23), (24), (25): Xaa is A or G or is absent
AXXVPTELSAISMLYLXXXXXXXXXLKNYQEMVVEGX

SEQ ID NO: 6854 - protein, 41 aa, Artificial Sequence
  GFR-binding peptide
  MOD_RES (4), (5), (39), (41): Xaa is C or S
  MOD_RES (19), (20), (21), (22), (23): Xaa is A or G
  MOD_RES (24), (25), (26), (27): Xaa is A or G or is absent
PKAXXVPTELSATSMLYYXXXXXXXXXLRKHRDMVVEGXGX

SEQ ID NO: 6855 - protein, 34 aa, Artificial Sequence
  GFR-binding peptide
  MOD_RES (33), (33): Xaa is C or S
VPTKLSATSVLYYDDMGVPTLRKHREGMSVAEXG

SEQ ID NO: 6856 - protein, 39 aa, Artificial Sequence
  GFR-binding peptide
  MOD_RES (3), (4), (38): Xaa is C or S
  MOD_RES (18), (19), (20), (21), (22): Xaa is A or G
  MOD_RES (23), (24), (25), (26): Xaa is A or G or is absent
KAXXVPTELSPISMLYKXXXXXXXXXLKYHYDMVVEGXG

SEQ ID NO: 6857 - protein, 33 aa, Artificial Sequence
  GFR-binding peptide
  MOD_RES (32), (32): Xaa is C or S
VPTELNAISMLYFDEYDKVVLKKYREMVVEGXG

SEQ ID NO: 6858 - protein, 37 aa, Artificial Sequence
  GFR-binding peptide
  MOD_RES (1), (35), (37): Xaa is C or S
  MOD_RES (15), (16), (17), (18), (19): Xaa is A or G
  MOD_RES (20), (21), (22), (23): Xaa is A or G or is absent
XVPTELSAISMLYLXXXXXXXXXLKNYQDMVVEGXGX

SEQ ID NO: 6859 - protein, 36 aa, Artificial Sequence
  GFR-binding peptide
RPTQVQLNAISVLYFEIVRKKPIFLKKYRTLEDHLA

SEQ ID NO: 6860 - protein, 35 aa, Artificial Sequence
  GFR-binding peptide
  MOD_RES (3), (4), (35): Xaa is C or S
APXXVPQALSPISILYKVGRKPKVLKYHYMIVRSX

SEQ ID NO: 6861 - protein, 34 aa, Artificial Sequence
  GFR-binding peptide
  MOD_RES (2), (3): Xaa is C or S
PXXAPTKLSATSVLYYDDSSNVILRKHRNMVVRS

SEQ ID NO: 6862 - protein, 38 aa, Artificial Sequence
  GFR-binding peptide
  MOD_RES (4), (5): Xaa is C or S
  MOD_RES (19), (20), (21), (22), (23): Xaa is A or G
  MOD_RES (24), (25), (26), (27): Xaa is A or G or is absent
PKPXXAPTQLSAISVLYLXXXXXXXXXLKNYQNMVVRA

SEQ ID NO: 6863 - protein, 37 aa, Artificial Sequence
  GFR-binding peptide
  MOD_RES (4), (5): Xaa is C or S
  MOD_RES (19), (20), (21), (22), (23): Xaa is A or G
  MOD_RES (24), (25), (26), (27): Xaa is A or G or is absent
PKPXXAPTQLSPISVLYKXXXXXXXXXLKYHYNMVVR

SEQ ID NO: 6864 - protein, 43 aa, Artificial Sequence
  GFR-binding peptide
  MOD_RES (6), (7), (40), (42): Xaa is C or S
  MOD_RES (21), (22), (23), (24), (25): Xaa is A or G
  MOD_RES (26), (27), (28), (29): Xaa is A or G or is absent
ASASPXXVSQDLSAISILYLXXXXXXXXXLKNYQMIVKSXKXS

SEQ ID NO: 6865 - protein, 35 aa, Artificial Sequence
  GFR-binding peptide
  MOD_RES (1), (2), (35): Xaa is C or S
  MOD_RES (16), (17), (18), (19), (20): Xaa is A or G
  MOD_RES (21), (22), (23), (24): Xaa is A or G or is absent
XXVSQDLSATSILYYXXXXXXXXXLRKHRMIVKSX

SEQ ID NO: 6866 - protein, 38 aa, Artificial Sequence
  GFR-binding peptide
  MOD_RES (5), (37): Xaa is C or S
TKPTXAPTKLSATSVLYYDDSSNVILRKHRNMVVRSXG

SEQ ID NO: 6867 - protein, 33 aa, Artificial Sequence
  GFR-binding peptide
  MOD_RES (2), (3): Xaa is C or S
PXXVSQDLSATSILYYIGKTPKILRKHRMIVKS

SEQ ID NO: 6868 - protein, 37 aa, Artificial Sequence
  GFR-binding peptide
  MOD_RES (6), (6): Xaa is C or S
VTKPTXAPTKLSATSVLYYDDSSNVILRKHRNMVVRS

SEQ ID NO: 6869 - protein, 40 aa, Artificial Sequence
  GFR-binding peptide
  MOD_RES (3), (4), (37), (39): Xaa is C or S
  MOD_RES (18), (19), (20), (21), (22): Xaa is A or G
  MOD_RES (23), (24), (25), (26): Xaa is A or G or is absent
SPXXVPQDLNAISILYFXXXXXXXXXLKKYRMVVKSXKXS

SEQ ID NO: 6870 - protein, 35 aa, Artificial Sequence
  GFR-binding peptide
  MOD_RES (1), (33), (35): Xaa is C or S
XAPTKLSAISVLYLDDSSNVILKNYQNMVVRSXGX

SEQ ID NO: 6871 - protein, 35 aa, Artificial Sequence
  GFR-binding peptide
  MOD_RES (1), (2): Xaa is C or S
  MOD_RES (16), (17), (18), (19), (20): Xaa is A or G
  MOD_RES (21), (22), (23), (24): Xaa is A or G or is absent
XXAPTQLSATSVLYYXXXXXXXXXLRKHRNMVVRA

SEQ ID NO: 6872 - protein, 35 aa, Artificial Sequence
  GFR-binding peptide
  MOD_RES (3), (4): Xaa is C or S
KPXXAPTQLSAISVLYLDDSSNVILKNYQNMVVRA

SEQ ID NO: 6873 - protein, 38 aa, Artificial Sequence
  GFR-binding peptide
  MOD_RES (3), (4): Xaa is C or S
  MOD_RES (18), (19), (20), (21), (22): Xaa is A or G
  MOD_RES (23), (24), (25), (26): Xaa is A or G or is absent
KAXXVPTKLSAISVLYLXXXXXXXXXLKNYQEGMSVAE

SEQ ID NO: 6874 - protein, 39 aa, Artificial Sequence
  GFR-binding peptide
  MOD_RES (4), (4): Xaa is C or S
NVQXRPTQVQLSPISVLYKEIVRKKPIFLKYHYTLEDHL

SEQ ID NO: 6875 - protein, 35 aa, Artificial Sequence
  GFR-binding peptide
  MOD_RES (1), (2), (35): Xaa is C or S
  MOD_RES (16), (17), (18), (19), (20): Xaa is A or G
  MOD_RES (21), (22), (23), (24): Xaa is A or G or is absent
XXVSQDLSAISILYLXXXXXXXXXLKNYQMIVKSX

SEQ ID NO: 6876 - protein, 40 aa, Artificial Sequence
  GFR-binding peptide
  MOD_RES (5), (6), (37), (39): Xaa is C or S
SAAPXXVPQALSATSILYYVGRKPKVLRKHRMIVRSXKXS

SEQ ID NO: 6877 - protein, 35 aa, Artificial Sequence
  GFR-binding peptide
  MOD_RES (2), (3), (34): Xaa is C or S
PXXVSQDLSAISILYLIGKTPKILKNYQMIVKSXK

SEQ ID NO: 6878 - protein, 38 aa, Artificial Sequence
  GFR-binding peptide
  MOD_RES (3), (4): Xaa is C or S
  MOD_RES (18), (19), (20), (21), (22): Xaa is A or G
  MOD_RES (23), (24), (25), (26): Xaa is A or G or is absent
KAXXVPTKLSATSVLYYXXXXXXXXXLRKHREGMSVAE

SEQ ID NO: 6879 - protein, 35 aa, Artificial Sequence
  GFR-binding peptide
  MOD_RES (3), (3): Xaa is C or S
  MOD_RES (17), (18), (19), (20), (21): Xaa is A or G
  MOD_RES (22), (23), (24), (25): Xaa is A or G or is absent
PTXAPTKLNAISVLYFXXXXXXXXXLKKYRNMVVR

SEQ ID NO: 6880 - protein, 41 aa, Artificial Sequence
  GFR-binding peptide
  MOD_RES (5), (6), (38), (40): Xaa is C or S
IPKAXXVPTELSPISMLYKDEYDKVVLKYHYEMVVEGXGXR

SEQ ID NO: 6881 - protein, 42 aa, Artificial Sequence
  GFR-binding peptide
  MOD_RES (6), (7), (39), (41): Xaa is C or S
KIPKAXXVPTELSATSMLYYDENEKVVLRKHRDMVVEGXGXR

SEQ ID NO: 6882 - protein, 36 aa, Artificial Sequence
  GFR-binding peptide
  MOD_RES (2), (3), (36): Xaa is C or S
  MOD_RES (17), (18), (19), (20), (21): Xaa is A or G
  MOD_RES (22), (23), (24), (25): Xaa is A or G or is absent
PXXVPQDLSPISILYKXXXXXXXXXLKYHYMVVKSX

SEQ ID NO: 6883 - protein, 39 aa, Artificial Sequence
  GFR-binding peptide
  MOD_RES (4), (5), (38): Xaa is C or S
  MOD_RES (19), (20), (21), (22), (23): Xaa is A or G
  MOD_RES (24), (25), (26), (27): Xaa is A or G or is absent
ASPXXVPQDLSAISILYLXXXXXXXXXLKNYQMVVKSXK

SEQ ID NO: 6884 - protein, 40 aa, Artificial Sequence
  GFR-binding peptide
  MOD_RES (2), (39): Xaa is C or S
QXRPTQVQLSPISVLYKEIVRKKPIFLKYHYTLEDHLAXK

SEQ ID NO: 6885 - protein, 38 aa, Artificial Sequence
  GFR-binding peptide
  MOD_RES (4), (36), (38): Xaa is C or S
KPTXAPTKLSAISVLYLDDSSNVILKNYQNMVVRSXGX

SEQ ID NO: 6886 - protein, 35 aa, Artificial Sequence
  GFR-binding peptide
  MOD_RES (3), (4): Xaa is C or S
KAXXVPTELNAISMLYFDEYDKVVLKKYREMVVEG

SEQ ID NO: 6887 - protein, 37 aa, Artificial Sequence
  GFR-binding peptide
  MOD_RES (36), (36): Xaa is C or S
PTQVQLSPISVLYKEIVRKKPIFLKYHYTLEDHLAXK

SEQ ID NO: 6888 - protein, 37 aa, Artificial Sequence
  GFR-binding peptide
  MOD_RES (4), (5), (36): Xaa is C or S
ASPXXVPQDLSATSILYYVGRTPKVLRKHRMVVKSXK

SEQ ID NO: 6889 - protein, 37 aa, Artificial Sequence
  GFR-binding peptide
  MOD_RES (37), (37): Xaa is C or S
  MOD_RES (16), (17), (18), (19), (20): Xaa is A or G
  MOD_RES (21), (22), (23), (24): Xaa is A or G or is absent
RPTQVQLSPISVLYKXXXXXXXXXLKYHYTLEDHLAX

SEQ ID NO: 6890 - protein, 37 aa, Artificial Sequence
  GFR-binding peptide
  MOD_RES (4), (5), (36): Xaa is C or S
ASPXXVPQDLSAISILYLVGRTPKVLKNYQMVVKSXK

SEQ ID NO: 6891 - protein, 35 aa, Artificial Sequence
  GFR-binding peptide
  MOD_RES (1), (1): Xaa is C or S
  MOD_RES (15), (16), (17), (18), (19): Xaa is A or G
  MOD_RES (20), (21), (22), (23): Xaa is A or G or is absent
XVPTKLSPISVLYKXXXXXXXXXLKYHYEGMSVAE

SEQ ID NO: 6892 - protein, 35 aa, Artificial Sequence
  GFR-binding peptide
  MOD_RES (1), (2): Xaa is C or S
  MOD_RES (16), (17), (18), (19), (20): Xaa is A or G
  MOD_RES (21), (22), (23), (24): Xaa is A or G or is absent
XXAPTKLSPISVLYKXXXXXXXXXLKYHYNMVVRS

SEQ ID NO: 6893 - protein, 41 aa, Artificial Sequence
  GFR-binding peptide
  MOD_RES (6), (7), (38), (40): Xaa is C or S
ASASPXXVPQDLSAISILYLVGRTPKVLKNYQMVVKSXKXS

SEQ ID NO: 6894 - protein, 41 aa, Artificial Sequence
  GFR-binding peptide
  MOD_RES (5), (5): Xaa is C or S
  MOD_RES (21), (22), (23), (24), (25): Xaa is A or G
  MOD_RES (26), (27), (28), (29): Xaa is A or G or is absent
RNVQXRPTQVQLSPISVLYKXXXXXXXXXLKYHYTLEDHLA

SEQ ID NO: 6895 - protein, 44 aa, Artificial Sequence
  GFR-binding peptide
  MOD_RES (6), (7), (41), (43): Xaa is C or S
  MOD_RES (21), (22), (23), (24), (25): Xaa is A or G
  MOD_RES (26), (27), (28), (29): Xaa is A or G or is absent
AVPKAXXAPTKLSAISVLYLXXXXXXXXXLKNYQNMVVKAXGXH

SEQ ID NO: 6896 - protein, 39 aa, Artificial Sequence
  GFR-binding peptide
  MOD_RES (4), (5), (39): Xaa is C or S
  MOD_RES (19), (20), (21), (22), (23): Xaa is A or G
  MOD_RES (24), (25), (26), (27): Xaa is A or G or is absent
PKPXXAPTKLSAISVLYLXXXXXXXXXLKNYQNMVVRSX

SEQ ID NO: 6897 - protein, 43 aa, Artificial Sequence
  GFR-binding peptide
  MOD_RES (5), (6), (40), (42): Xaa is C or S
  MOD_RES (20), (21), (22), (23), (24): Xaa is A or G
  MOD_RES (25), (26), (27), (28): Xaa is A or G or is absent
IPKAXXVPTELSAISMLYLXXXXXXXXXLKNYQDMVVEGXGXR

SEQ ID NO: 6898 - protein, 38 aa, Artificial Sequence
  GFR-binding peptide
  MOD_RES (2), (3), (36), (38): Xaa is C or S
  MOD_RES (17), (18), (19), (20), (21): Xaa is A or G
  MOD_RES (22), (23), (24), (25): Xaa is A or G or is absent
PXXVPQDLNAISILYFXXXXXXXXXLKKYRMVVKSXKX

SEQ ID NO: 6899 - protein, 33 aa, Artificial Sequence
  GFR-binding peptide
  MOD_RES (1), (2): Xaa is C or S
XXAPTKLSPISVLYKDSSNNVILKYHYNMVVKA

SEQ ID NO: 6900 - protein, 38 aa, Artificial Sequence
  GFR-binding peptide
  MOD_RES (1), (2), (36), (38): Xaa is C or S
  MOD_RES (16), (17), (18), (19), (20): Xaa is A or G
  MOD_RES (21), (22), (23), (24): Xaa is A or G or is absent
XXVPTELSPISMLYKXXXXXXXXXLKYHYEMVVEGXGX

SEQ ID NO: 6901 - protein, 37 aa, Artificial Sequence
  GFR-binding peptide
  MOD_RES (3), (4): Xaa is C or S
  MOD_RES (18), (19), (20), (21), (22): Xaa is A or G
  MOD_RES (23), (24), (25), (26): Xaa is A or G or is absent
KPXXAPTQLNAISVLYFXXXXXXXXXLKKYRNMVVRA

SEQ ID NO: 6902 - protein, 40 aa, Artificial Sequence
  GFR-binding peptide
  MOD_RES (2), (3), (37), (39): Xaa is C or S
  MOD_RES (17), (18), (19), (20), (21): Xaa is A or G
  MOD_RES (22), (23), (24), (25): Xaa is A or G or is absent
AXXAPTKLNAISVLYFXXXXXXXXXLKKYRNMVVKAXGXH

SEQ ID NO: 6903 - protein, 40 aa, Artificial Sequence
  GFR-binding peptide
  MOD_RES (4), (38), (40): Xaa is C or S
  MOD_RES (18), (19), (20), (21), (22): Xaa is A or G
  MOD_RES (23), (24), (25), (26): Xaa is A or G or is absent
KPTXAPTKLSAISVLYLXXXXXXXXXLKNYQNMVVRSXGX

SEQ ID NO: 6904 - protein, 36 aa, Artificial Sequence
  GFR-binding peptide
  MOD_RES (3), (35): Xaa is C or S
PTXAPTKLSATSVLYYDDSSNVILRKHRNMVVRSXG

SEQ ID NO: 6905 - protein, 32 aa, Artificial Sequence
  GFR-binding peptide
  MOD_RES (14), (15), (16), (17), (18): Xaa is A or G
  MOD_RES (19), (20), (21), (22): Xaa is A or G or is absent
VPTELNAISMLYFXXXXXXXXXLKKYRDMVVE

SEQ ID NO: 6906 - protein, 37 aa, Artificial Sequence
  GFR-binding peptide
  MOD_RES (4), (5): Xaa is C or S
  MOD_RES (19), (20), (21), (22), (23): Xaa is A or G
  MOD_RES (24), (25), (26), (27): Xaa is A or G or is absent
ASPXXVSQDLSPISILYKXXXXXXXXXLKYHYMIVKS

SEQ ID NO: 6907 - protein, 41 aa, Artificial Sequence
  GFR-binding peptide
  MOD_RES (4), (41): Xaa is C or S
  MOD_RES (20), (21), (22), (23), (24): Xaa is A or G
  MOD_RES (25), (26), (27), (28): Xaa is A or G or is absent
NVQXRPTQVQLSATSVLYYXXXXXXXXXLRKHRTLEDHLAX

SEQ ID NO: 6908 - protein, 40 aa, Artificial Sequence
  GFR-binding peptide
  MOD_RES (6), (7), (39): Xaa is C or S
YVPKPXXAPTKLSPISVLYKDDSSNVILKYHYNMVVRSXG

SEQ ID NO: 6909 - protein, 39 aa, Artificial Sequence
  GFR-binding peptide
  MOD_RES (6), (7), (38): Xaa is C or S
ASASPXXVPQDLSPISILYKVGRTPKVLKYHYMVVKSXK

SEQ ID NO: 6910 - protein, 42 aa, Artificial Sequence
  GFR-binding peptide
  MOD_RES (2), (39), (41): Xaa is C or S
  MOD_RES (18), (19), (20), (21), (22): Xaa is A or G
  MOD_RES (23), (24), (25), (26): Xaa is A or G or is absent
QXRPTQVQLSAISVLYLXXXXXXXXXLKNYQTLEDHLAXKXE

SEQ ID NO: 6911 - protein, 45 aa, Artificial Sequence
  GFR-binding peptide
  MOD_RES (5), (42), (44): Xaa is C or S
  MOD_RES (21), (22), (23), (24), (25): Xaa is A or G
  MOD_RES (26), (27), (28), (29): Xaa is A or G or is absent
RNVQXRPTQVQLSAISVLYLXXXXXXXXXLKNYQTLEDHLAXKXE

SEQ ID NO: 6912 - protein, 36 aa, Artificial Sequence
  GFR-binding peptide
  MOD_RES (34), (36): Xaa is C or S
  MOD_RES (14), (15), (16), (17), (18): Xaa is A or G
  MOD_RES (19), (20), (21), (22): Xaa is A or G or is absent
APTKLSATSVLYYXXXXXXXXXLRKHRNMVVRSXGX

SEQ ID NO: 6913 - protein, 38 aa, Artificial Sequence
  GFR-binding peptide
  MOD_RES (5), (5): Xaa is C or S
  MOD_RES (19), (20), (21), (22), (23): Xaa is A or G
  MOD_RES (24), (25), (26), (27): Xaa is A or G or is absent
TKPTXAPTKLSATSVLYYXXXXXXXXXLRKHRNMVVRS

SEQ ID NO: 6914 - protein, 39 aa, Artificial Sequence
  GFR-binding peptide
  MOD_RES (6), (7), (39): Xaa is C or S
YVPKPXXAPTKLSPISVLYKDDSSNVILKYHYNMVVRSX

SEQ ID NO: 6915 - protein, 35 aa, Artificial Sequence
  GFR-binding peptide
  MOD_RES (34), (34): Xaa is C or S
  MOD_RES (14), (15), (16), (17), (18): Xaa is A or G
  MOD_RES (19), (20), (21), (22): Xaa is A or G or is absent
APTKLSPISVLYKXXXXXXXXXLKYHYNMVVKAXG

SEQ ID NO: 6916 - protein, 31 aa, Artificial Sequence
  GFR-binding peptide
  MOD_RES (1), (1): Xaa is C or S
XVSQDLNAISILYFIGKTPKILKKYRMIVKS

SEQ ID NO: 6917 - protein, 41 aa, Artificial Sequence
  GFR-binding peptide
  MOD_RES (4), (5), (40): Xaa is C or S
  MOD_RES (19), (20), (21), (22), (23): Xaa is A or G
  MOD_RES (24), (25), (26), (27): Xaa is A or G or is absent
GKAXXVPTKLNAISVLYFXXXXXXXXXLKKYREGMSVAEXG

SEQ ID NO: 6918 - protein, 40 aa, Artificial Sequence
  GFR-binding peptide
  MOD_RES (4), (5), (38), (40): Xaa is C or S
  MOD_RES (19), (20), (21), (22), (23): Xaa is A or G
  MOD_RES (24), (25), (26), (27): Xaa is A or G or is absent
ASPXXVSQDLSATSILYYXXXXXXXXXLRKHRMIVKSXKX

SEQ ID NO: 6919 - protein, 32 aa, Artificial Sequence
  GFR-binding peptide
  MOD_RES (1), (2): Xaa is C or S
XXVSQDLSATSILYYIGKTPKILRKHRMIVKS

SEQ ID NO: 6920 - protein, 34 aa, Artificial Sequence
  GFR-binding peptide
  MOD_RES (1), (2): Xaa is C or S
  MOD_RES (16), (17), (18), (19), (20): Xaa is A or G
  MOD_RES (21), (22), (23), (24): Xaa is A or G or is absent
XXVSQDLNAISILYFXXXXXXXXXLKKYRMIVKS

SEQ ID NO: 6921 - protein, 41 aa, Artificial Sequence
  GFR-binding peptide
  MOD_RES (5), (6), (40): Xaa is C or S
  MOD_RES (20), (21), (22), (23), (24): Xaa is A or G
  MOD_RES (25), (26), (27), (28): Xaa is A or G or is absent
VPKPXXAPTQLSATSVLYYXXXXXXXXXLRKHRNMVVRAXG

SEQ ID NO: 6922 - protein, 38 aa, Artificial Sequence
  GFR-binding peptide
  MOD_RES (35), (37): Xaa is C or S
  MOD_RES (14), (15), (16), (17), (18): Xaa is A or G
  MOD_RES (19), (20), (21), (22): Xaa is A or G or is absent
TQVQLNAISVLYFXXXXXXXXXLKKYRTLEDHLAXKXE

SEQ ID NO: 6923 - protein, 41 aa, Artificial Sequence
  GFR-binding peptide
  MOD_RES (2), (39), (41): Xaa is C or S
QXRPTQVQLSATSVLYYEIVRKKPIFLRKHRTLEDHLAXKX

SEQ ID NO: 6924 - protein, 35 aa, Artificial Sequence
  GFR-binding peptide
  MOD_RES (2), (3), (35): Xaa is C or S
PXXAPTQLSAISVLYLDDSSNVILKNYQNMVVRAX

SEQ ID NO: 6925 - protein, 40 aa, Artificial Sequence
  GFR-binding peptide
  MOD_RES (2), (3), (37), (39): Xaa is C or S
  MOD_RES (17), (18), (19), (20), (21): Xaa is A or G
  MOD_RES (22), (23), (24), (25): Xaa is A or G or is absent
AXXVPTELSATSMLYYXXXXXXXXXLRKHREMVVEGXGXR

SEQ ID NO: 6926 - protein, 35 aa, Artificial Sequence
  GFR-binding peptide
  MOD_RES (35), (35): Xaa is C or S
  MOD_RES (14), (15), (16), (17), (18): Xaa is A or G
  MOD_RES (19), (20), (21), (22): Xaa is A or G or is absent
TQVQLNAISVLYFXXXXXXXXXLKKYRTLEDHLAX

SEQ ID NO: 6927 - protein, 35 aa, Artificial Sequence
  GFR-binding peptide
  MOD_RES (4), (5): Xaa is C or S
PKAXXVPTELSPISMLYKDENEKVVLKYHYDMVVE

SEQ ID NO: 6928 - protein, 34 aa, Artificial Sequence
  GFR-binding peptide
  MOD_RES (32), (34): Xaa is C or S
APTQLSATSVLYYDDSSNVILRKHRNMVVRAXGX

SEQ ID NO: 6929 - protein, 34 aa, Artificial Sequence
  GFR-binding peptide
  MOD_RES (2), (3), (34): Xaa is C or S
PXXVPQALNAISILYFVGRKPKVLKKYRMIVRSX

SEQ ID NO: 6930 - protein, 38 aa, Artificial Sequence
  GFR-binding peptide
  MOD_RES (6), (7), (38): Xaa is C or S
ASAAPXXVPQALNAISILYFVGRKPKVLKKYRMIVRSX

SEQ ID NO: 6931 - protein, 38 aa, Artificial Sequence
  GFR-binding peptide
  MOD_RES (4), (4): Xaa is C or S
  MOD_RES (20), (21), (22), (23), (24): Xaa is A or G
  MOD_RES (25), (26), (27), (28): Xaa is A or G or is absent
NVQXRPTQVQLSAISVLYLXXXXXXXXXLKNYQTLEDH

SEQ ID NO: 6932 - protein, 38 aa, Artificial Sequence
  GFR-binding peptide
  MOD_RES (1), (35), (37): Xaa is C or S
  MOD_RES (15), (16), (17), (18), (19): Xaa is A or G
  MOD_RES (20), (21), (22), (23): Xaa is A or G or is absent
XAPTQLSATSVLYYXXXXXXXXXLRKHRNMVVRAXGXH

SEQ ID NO: 6933 - protein, 40 aa, Artificial Sequence
  GFR-binding peptide
  MOD_RES (4), (5), (38), (40): Xaa is C or S
  MOD_RES (19), (20), (21), (22), (23): Xaa is A or G
  MOD_RES (24), (25), (26), (27): Xaa is A or G or is absent
AAPXXVPQALSATSILYYXXXXXXXXXLRKHRMIVRSXKX

SEQ ID NO: 6934 - protein, 33 aa, Artificial Sequence
  GFR-binding peptide
  MOD_RES (14), (15), (16), (17), (18): Xaa is A or G
  MOD_RES (19), (20), (21), (22): Xaa is A or G or is absent
APTQLSAISVLYLXXXXXXXXXLKNYQNMVVRA

SEQ ID NO: 6935 - protein, 39 aa, Artificial Sequence
  GFR-binding peptide
  MOD_RES (1), (2), (36), (38): Xaa is C or S
  MOD_RES (16), (17), (18), (19), (20): Xaa is A or G
  MOD_RES (21), (22), (23), (24): Xaa is A or G or is absent
XXAPTKLSAISVLYLXXXXXXXXXLKNYQNMVVRSXGXH

SEQ ID NO: 6936 - protein, 38 aa, Artificial Sequence
  GFR-binding peptide
  MOD_RES (1), (38): Xaa is C or S
  MOD_RES (17), (18), (19), (20), (21): Xaa is A or G
  MOD_RES (22), (23), (24), (25): Xaa is A or G or is absent
XRPTQVQLNAISVLYFXXXXXXXXXLKKYRTLEDHLAX

SEQ ID NO: 6937 - protein, 40 aa, Artificial Sequence
  GFR-binding peptide
  MOD_RES (4), (5), (39): Xaa is C or S
  MOD_RES (19), (20), (21), (22), (23): Xaa is A or G
  MOD_RES (24), (25), (26), (27): Xaa is A or G or is absent
PKAXXVPTELSPISMLYKXXXXXXXXXLKYHYDMVVEGXG

SEQ ID NO: 6938 - protein, 32 aa, Artificial Sequence
  GFR-binding peptide
  MOD_RES (14), (15), (16), (17), (18): Xaa is A or G
  MOD_RES (19), (20), (21), (22): Xaa is A or G or is absent
APTQLSPISVLYKXXXXXXXXXLKYHYNMVVR

SEQ ID NO: 6939 - protein, 39 aa, Artificial Sequence
  GFR-binding peptide
  MOD_RES (4), (5), (38): Xaa is C or S
  MOD_RES (19), (20), (21), (22), (23): Xaa is A or G
  MOD_RES (24), (25), (26), (27): Xaa is A or G or is absent
AAPXXVPQALSPISILYKXXXXXXXXXLKYHYMIVRSXK

SEQ ID NO: 6940 - protein, 41 aa, Artificial Sequence
  GFR-binding peptide
  MOD_RES (3), (40): Xaa is C or S
VQXRPTQVQLSATSVLYYEIVRKKPIFLRKHRTLEDHLAXK

SEQ ID NO: 6941 - protein, 37 aa, Artificial Sequence
  GFR-binding peptide
  MOD_RES (2), (3), (35), (37): Xaa is C or S
AXXVPTELNAISMLYFDENEKVVLKKYRDMVVEGXGX

SEQ ID NO: 6942 - protein, 40 aa, Artificial Sequence
  GFR-binding peptide
  MOD_RES (6), (7): Xaa is C or S
  MOD_RES (21), (22), (23), (24), (25): Xaa is A or G
  MOD_RES (26), (27), (28), (29): Xaa is A or G or is absent
YVPKPXXAPTKLSAISVLYLXXXXXXXXXLKNYQNMVVRS

SEQ ID NO: 6943 - protein, 40 aa, Artificial Sequence
  GFR-binding peptide
  MOD_RES (3), (40): Xaa is C or S
  MOD_RES (19), (20), (21), (22), (23): Xaa is A or G
  MOD_RES (24), (25), (26), (27): Xaa is A or G or is absent
VQXRPTQVQLNAISVLYFXXXXXXXXXLKKYRTLEDHLAX

SEQ ID NO: 6944 - protein, 37 aa, Artificial Sequence
  GFR-binding peptide
  MOD_RES (4), (5): Xaa is C or S
  MOD_RES (19), (20), (21), (22), (23): Xaa is A or G
  MOD_RES (24), (25), (26), (27): Xaa is A or G or is absent
ASPXXVSQDLSATSILYYXXXXXXXXXLRKHRMIVKS

SEQ ID NO: 6945 - protein, 36 aa, Artificial Sequence
  GFR-binding peptide
  MOD_RES (1), (2), (34), (36): Xaa is C or S
XXVPTELSATSMLYYDENEKVVLRKHRDMVVEGXGX

SEQ ID NO: 6946 - protein, 40 aa, Artificial Sequence
  GFR-binding peptide
  MOD_RES (6), (7), (38), (40): Xaa is C or S
ASASPXXVSQDLSAISILYLIGKTPKILKNYQMIVKSXKX

SEQ ID NO: 6947 - protein, 37 aa, Artificial Sequence
  GFR-binding peptide
  MOD_RES (3), (4): Xaa is C or S
  MOD_RES (18), (19), (20), (21), (22): Xaa is A or G
  MOD_RES (23), (24), (25), (26): Xaa is A or G or is absent
KAXXVPTELSAISMLYLXXXXXXXXXLKNYQDMVVEG

SEQ ID NO: 6948 - protein, 40 aa, Artificial Sequence
  GFR-binding peptide
  MOD_RES (6), (7), (40): Xaa is C or S
  MOD_RES (21), (22), (23), (24), (25): Xaa is A or G
  MOD_RES (26), (27), (28), (29): Xaa is A or G or is absent
ASASPXXVSQDLSATSILYYXXXXXXXXXLRKHRMIVKSX

SEQ ID NO: 6949 - protein, 36 aa, Artificial Sequence
  GFR-binding peptide
  MOD_RES (4), (5): Xaa is C or S
PKPXXAPTQLSPISVLYKDDSSNVILKYHYNMVVRA

SEQ ID NO: 6950 - protein, 35 aa, Artificial Sequence
  GFR-binding peptide
  MOD_RES (33), (35): Xaa is C or S
  MOD_RES (14), (15), (16), (17), (18): Xaa is A or G
  MOD_RES (19), (20), (21), (22): Xaa is A or G or is absent
VPQDLSPISILYKXXXXXXXXXLKYHYMVVKSXKX

SEQ ID NO: 6951 - protein, 38 aa, Artificial Sequence
  GFR-binding peptide
  MOD_RES (3), (37): Xaa is C or S
  MOD_RES (17), (18), (19), (20), (21): Xaa is A or G
  MOD_RES (22), (23), (24), (25): Xaa is A or G or is absent
PTXAPTKLSATSVLYYXXXXXXXXXLRKHRNMVVRSXG

SEQ ID NO: 6952 - protein, 35 aa, Artificial Sequence
  GFR-binding peptide
  MOD_RES (2), (3): Xaa is C or S
AXXVPTKLSATSVLYYDDMGVPTLRKHREGMSVAE

SEQ ID NO: 6953 - protein, 41 aa, Artificial Sequence
  GFR-binding peptide
  MOD_RES (5), (6), (40): Xaa is C or S
  MOD_RES (20), (21), (22), (23), (24): Xaa is A or G
  MOD_RES (25), (26), (27), (28): Xaa is A or G or is absent
VPKAXXAPTKLSATSVLYYXXXXXXXXXLRKHRNMVVKAXG

SEQ ID NO: 6954 - protein, 40 aa, Artificial Sequence
  GFR-binding peptide
  MOD_RES (4), (5), (39): Xaa is C or S
  MOD_RES (19), (20), (21), (22), (23): Xaa is A or G
  MOD_RES (24), (25), (26), (27): Xaa is A or G or is absent
PKPXXAPTKLSAISVLYLXXXXXXXXXLKNYQNMVVRSXG

SEQ ID NO: 6955 - protein, 37 aa, Artificial Sequence
  GFR-binding peptide
  MOD_RES (4), (5): Xaa is C or S
  MOD_RES (19), (20), (21), (22), (23): Xaa is A or G
  MOD_RES (24), (25), (26), (27): Xaa is A or G or is absent
ASPXXVPQDLSAISILYLXXXXXXXXXLKNYQMVVKS

SEQ ID NO: 6956 - protein, 34 aa, Artificial Sequence
  GFR-binding peptide
  MOD_RES (3), (4): Xaa is C or S
KPXXAPTKLSPISVLYKDDSSNVILKYHYNMVVR

SEQ ID NO: 6957 - protein, 37 aa, Artificial Sequence
  GFR-binding peptide
  MOD_RES (4), (5): Xaa is C or S
  MOD_RES (19), (20), (21), (22), (23): Xaa is A or G
  MOD_RES (24), (25), (26), (27): Xaa is A or G or is absent
PKPXXAPTKLSPISVLYKXXXXXXXXXLKYHYNMVVR

SEQ ID NO: 6958 - protein, 39 aa, Artificial Sequence
  GFR-binding peptide
  MOD_RES (4), (5), (38): Xaa is C or S
  MOD_RES (19), (20), (21), (22), (23): Xaa is A or G
  MOD_RES (24), (25), (26), (27): Xaa is A or G or is absent
AAPXXVPQALSAISILYLXXXXXXXXXLKNYQMIVRSXK

SEQ ID NO: 6959 - protein, 34 aa, Artificial Sequence
  GFR-binding peptide
  MOD_RES (3), (3): Xaa is C or S
PTXAPTKLSPISVLYKDDSSNVILKYHYNMVVRS

SEQ ID NO: 6960 - protein, 33 aa, Artificial Sequence
  GFR-binding peptide
  MOD_RES (32), (32): Xaa is C or S
APTKLSAISVLYLDSSNNVILKNYQNMVVKAXG

SEQ ID NO: 6961 - protein, 37 aa, Artificial Sequence
  GFR-binding peptide
  MOD_RES (1), (34), (36): Xaa is C or S
  MOD_RES (15), (16), (17), (18), (19): Xaa is A or G
  MOD_RES (20), (21), (22), (23): Xaa is A or G or is absent
XVPQDLNAISILYFXXXXXXXXXLKKYRMVVKSXKXS

SEQ ID NO: 6962 - protein, 40 aa, Artificial Sequence
  GFR-binding peptide
  MOD_RES (6), (7), (40): Xaa is C or S
  MOD_RES (21), (22), (23), (24), (25): Xaa is A or G
  MOD_RES (26), (27), (28), (29): Xaa is A or G or is absent
ASASPXXVSQDLSAISILYLXXXXXXXXXLKNYQMIVKSX

SEQ ID NO: 6963 - protein, 38 aa, Artificial Sequence
  GFR-binding peptide
  MOD_RES (4), (5), (38): Xaa is C or S
  MOD_RES (19), (20), (21), (22), (23): Xaa is A or G
  MOD_RES (24), (25), (26), (27): Xaa is A or G or is absent
ASPXXVSQDLSPISILYKXXXXXXXXXLKYHYMIVKSX

SEQ ID NO: 6964 - protein, 41 aa, Artificial Sequence
  GFR-binding peptide
  MOD_RES (6), (40): Xaa is C or S
  MOD_RES (20), (21), (22), (23), (24): Xaa is A or G
  MOD_RES (25), (26), (27), (28): Xaa is A or G or is absent
VTKPTXAPTKLSPISVLYKXXXXXXXXXLKYHYNMVVRSXG

SEQ ID NO: 6965 - protein, 37 aa, Artificial Sequence
  GFR-binding peptide
  MOD_RES (1), (2), (36): Xaa is C or S
  MOD_RES (16), (17), (18), (19), (20): Xaa is A or G
  MOD_RES (21), (22), (23), (24): Xaa is A or G or is absent
XXAPTKLSAISVLYLXXXXXXXXXLKNYQNMVVRSXG

SEQ ID NO: 6966 - protein, 35 aa, Artificial Sequence
  GFR-binding peptide
  MOD_RES (2), (3): Xaa is C or S
  MOD_RES (17), (18), (19), (20), (21): Xaa is A or G
  MOD_RES (22), (23), (24), (25): Xaa is A or G or is absent
AXXVPTELSATSMLYYXXXXXXXXXLRKHREMVVE

SEQ ID NO: 6967 - protein, 40 aa, Artificial Sequence
  GFR-binding peptide
  MOD_RES (4), (5), (38), (40): Xaa is C or S
  MOD_RES (19), (20), (21), (22), (23): Xaa is A or G
  MOD_RES (24), (25), (26), (27): Xaa is A or G or is absent
ASPXXVPQDLSPISILYKXXXXXXXXXLKYHYMVVKSXKX

SEQ ID NO: 6968 - protein, 37 aa, Artificial Sequence
  GFR-binding peptide
  MOD_RES (3), (4), (36): Xaa is C or S
KAXXAPTKLSPISVLYKDSSNNVILKYHYNMVVKAXG

SEQ ID NO: 6969 - protein, 38 aa, Artificial Sequence
  GFR-binding peptide
  MOD_RES (4), (38): Xaa is C or S
  MOD_RES (18), (19), (20), (21), (22): Xaa is A or G
  MOD_RES (23), (24), (25), (26): Xaa is A or G or is absent
KPTXAPTKLNAISVLYFXXXXXXXXXLKKYRNMVVRSX

SEQ ID NO: 6970 - protein, 35 aa, Artificial Sequence
  GFR-binding peptide
  MOD_RES (1), (2): Xaa is C or S
  MOD_RES (16), (17), (18), (19), (20): Xaa is A or G
  MOD_RES (21), (22), (23), (24): Xaa is A or G or is absent
XXAPTQLSAISVLYLXXXXXXXXXLKNYQNMVVRA

SEQ ID NO: 6971 - protein, 39 aa, Artificial Sequence
  GFR-binding peptide
  MOD_RES (1), (38): Xaa is C or S
  MOD_RES (17), (18), (19), (20), (21): Xaa is A or G
  MOD_RES (22), (23), (24), (25): Xaa is A or G or is absent
XRPTQVQLSAISVLYLXXXXXXXXXLKNYQTLEDHLAXK

SEQ ID NO: 6972 - protein, 32 aa, Artificial Sequence
  GFR-binding peptide
  MOD_RES (1), (2): Xaa is C or S
XXVPTELSATSMLYYDENEKVVLRKHRDMVVE

SEQ ID NO: 6973 - protein, 36 aa, Artificial Sequence
  GFR-binding peptide
  MOD_RES (34), (36): Xaa is C or S
  MOD_RES (14), (15), (16), (17), (18): Xaa is A or G
  MOD_RES (19), (20), (21), (22): Xaa is A or G or is absent
APTKLSAISVLYLXXXXXXXXXLKNYQNMVVKAXGX

SEQ ID NO: 6974 - protein, 37 aa, Artificial Sequence
  GFR-binding peptide
  MOD_RES (2), (3), (35), (37): Xaa is C or S
PXXAPTQLSAISVLYLDDSSNVILKNYQNMVVRAXGX

SEQ ID NO: 6975 - protein, 38 aa, Artificial Sequence
  GFR-binding peptide
  MOD_RES (4), (5): Xaa is C or S
  MOD_RES (19), (20), (21), (22), (23): Xaa is A or G
  MOD_RES (24), (25), (26), (27): Xaa is A or G or is absent
PKAXXVPTELNAISMLYFXXXXXXXXXLKKYRDMVVEG

SEQ ID NO: 6976 - protein, 32 aa, Artificial Sequence
  GFR-binding peptide
  MOD_RES (14), (15), (16), (17), (18): Xaa is A or G
  MOD_RES (19), (20), (21), (22): Xaa is A or G or is absent
VSQDLSAISILYLXXXXXXXXXLKNYQMIVKS

SEQ ID NO: 6977 - protein, 38 aa, Artificial Sequence
  GFR-binding peptide
  MOD_RES (5), (6), (37): Xaa is C or S
SASPXXVPQDLSPISILYKVGRTPKVLKYHYMVVKSXK

SEQ ID NO: 6978 - protein, 37 aa, Artificial Sequence
  GFR-binding peptide
  MOD_RES (2), (2): Xaa is C or S
  MOD_RES (18), (19), (20), (21), (22): Xaa is A or G
  MOD_RES (23), (24), (25), (26): Xaa is A or G or is absent
QXRPTQVQLNAISVLYFXXXXXXXXXLKKYRTLEDHL

SEQ ID NO: 6979 - protein, 41 aa, Artificial Sequence
  GFR-binding peptide
  MOD_RES (3), (40): Xaa is C or S
VQXRPTQVQLSAISVLYLEIVRKKPIFLKNYQTLEDHLAXK

SEQ ID NO: 6980 - protein, 35 aa, Artificial Sequence
  GFR-binding peptide
  MOD_RES (1), (1): Xaa is C or S
  MOD_RES (17), (18), (19), (20), (21): Xaa is A or G
  MOD_RES (22), (23), (24), (25): Xaa is A or G or is absent
XRPTQVQLNAISVLYFXXXXXXXXXLKKYRTLEDH

SEQ ID NO: 6981 - protein, 33 aa, Artificial Sequence
  GFR-binding peptide
  MOD_RES (1), (1): Xaa is C or S
  MOD_RES (15), (16), (17), (18), (19): Xaa is A or G
  MOD_RES (20), (21), (22), (23): Xaa is A or G or is absent
XVPQALSAISILYLXXXXXXXXXLKNYQMIVRS

SEQ ID NO: 6982 - protein, 32 aa, Artificial Sequence
  GFR-binding peptide
  MOD_RES (1), (32): Xaa is C or S
XVPQALSATSILYYVGRKPKVLRKHRMIVRSX

SEQ ID NO: 6983 - protein, 32 aa, Artificial Sequence
  GFR-binding peptide
  MOD_RES (1), (2): Xaa is C or S
XXVPQALSATSILYYVGRKPKVLRKHRMIVRS

SEQ ID NO: 6984 - protein, 34 aa, Artificial Sequence
  GFR-binding peptide
  MOD_RES (3), (4): Xaa is C or S
KPXXAPTKLSAISVLYLDDSSNVILKNYQNMVVR

SEQ ID NO: 6985 - protein, 33 aa, Artificial Sequence
  GFR-binding peptide
  MOD_RES (31), (33): Xaa is C or S
VPQDLSATSILYYVGRTPKVLRKHRMVVKSXKX

SEQ ID NO: 6986 - protein, 31 aa, Artificial Sequence
  GFR-binding peptide
  MOD_RES (1), (1): Xaa is C or S
XVPQALNAISILYFVGRKPKVLKKYRMIVRS

SEQ ID NO: 6987 - protein, 36 aa, Artificial Sequence
  GFR-binding peptide
  MOD_RES (1), (2), (33), (35): Xaa is C or S
XXVPQALSATSILYYVGRKPKVLRKHRMIVRSXKXS

SEQ ID NO: 6988 - protein, 38 aa, Artificial Sequence
  GFR-binding peptide
  MOD_RES (1), (35), (37): Xaa is C or S
  MOD_RES (15), (16), (17), (18), (19): Xaa is A or G
  MOD_RES (20), (21), (22), (23): Xaa is A or G or is absent
XAPTKLSPISVLYKXXXXXXXXXLKYHYNMVVKAXGXH

SEQ ID NO: 6989 - protein, 38 aa, Artificial Sequence
  GFR-binding peptide
  MOD_RES (4), (5), (37): Xaa is C or S
PKAXXVPTELSPISMLYKDEYDKVVLKYHYEMVVEGXG

SEQ ID NO: 6990 - protein, 38 aa, Artificial Sequence
  GFR-binding peptide
  MOD_RES (1), (2), (36), (38): Xaa is C or S
  MOD_RES (16), (17), (18), (19), (20): Xaa is A or G
  MOD_RES (21), (22), (23), (24): Xaa is A or G or is absent
XXAPTKLSPISVLYKXXXXXXXXXLKYHYNMVVRSXGX

SEQ ID NO: 6991 - protein, 34 aa, Artificial Sequence
  GFR-binding peptide
  MOD_RES (3), (4): Xaa is C or S
KAXXVPTELSATSMLYYDENEKVVLRKHRDMVVE

SEQ ID NO: 6992 - protein, 38 aa, Artificial Sequence
  GFR-binding peptide
  MOD_RES (6), (7), (38): Xaa is C or S
ASASPXXVSQDLSPISILYKIGKTPKILKYHYMIVKSX

SEQ ID NO: 6993 - protein, 38 aa, Artificial Sequence
  GFR-binding peptide
  MOD_RES (6), (7): Xaa is C or S
TVPKPXXAPTQLSAISVLYLDDSSNVILKNYQNMVVRA

SEQ ID NO: 6994 - protein, 38 aa, Artificial Sequence
  GFR-binding peptide
  MOD_RES (3), (4), (37): Xaa is C or S
  MOD_RES (18), (19), (20), (21), (22): Xaa is A or G
  MOD_RES (23), (24), (25), (26): Xaa is A or G or is absent
SPXXVPQDLSPISILYKXXXXXXXXXLKYHYMVVKSXK

SEQ ID NO: 6995 - protein, 38 aa, Artificial Sequence
  GFR-binding peptide
  MOD_RES (35), (37): Xaa is C or S
TQVQLSAISVLYLEIVRKKPIFLKNYQTLEDHLAXKXE

SEQ ID NO: 6996 - protein, 36 aa, Artificial Sequence
  GFR-binding peptide
  MOD_RES (34), (36): Xaa is C or S
  MOD_RES (14), (15), (16), (17), (18): Xaa is A or G
  MOD_RES (19), (20), (21), (22): Xaa is A or G or is absent
APTQLSPISVLYKXXXXXXXXXLKYHYNMVVRAXGX

SEQ ID NO: 6997 - protein, 44 aa, Artificial Sequence
  GFR-binding peptide
  MOD_RES (4), (41), (43): Xaa is C or S
NVQXRPTQVQLSAISVLYLEIVRKKPIFLKNYQTLEDHLAXKXE

SEQ ID NO: 6998 - protein, 33 aa, Artificial Sequence
  GFR-binding peptide
  MOD_RES (14), (15), (16), (17), (18): Xaa is A or G
  MOD_RES (19), (20), (21), (22): Xaa is A or G or is absent
VPTELSAISMLYLXXXXXXXXXLKNYQDMVVEG

SEQ ID NO: 6999 - protein, 37 aa, Artificial Sequence
  GFR-binding peptide
  MOD_RES (4), (5): Xaa is C or S
  MOD_RES (19), (20), (21), (22), (23): Xaa is A or G
  MOD_RES (24), (25), (26), (27): Xaa is A or G or is absent
PKAXXVPTELSPISMLYKXXXXXXXXXLKYHYDMVVE

SEQ ID NO: 7000 - protein, 38 aa, Artificial Sequence
  GFR-binding peptide
  MOD_RES (2), (3), (35), (37): Xaa is C or S
AXXVPTELSATSMLYYDEYDKVVLRKHREMVVEGXGXR

SEQ ID NO: 7001 - protein, 34 aa, Artificial Sequence
  GFR-binding peptide
  MOD_RES (1), (32), (34): Xaa is C or S
XVSQDLSATSILYYIGKTPKILRKHRMIVKSXKX

SEQ ID NO: 7002 - protein, 40 aa, Artificial Sequence
  GFR-binding peptide
  MOD_RES (4), (5), (39): Xaa is C or S
  MOD_RES (19), (20), (21), (22), (23): Xaa is A or G
  MOD_RES (24), (25), (26), (27): Xaa is A or G or is absent
PKAXXVPTELSATSMLYYXXXXXXXXXLRKHREMVVEGXG

SEQ ID NO: 7003 - protein, 37 aa, Artificial Sequence
  GFR-binding peptide
  MOD_RES (3), (4), (36): Xaa is C or S
KPXXAPTKLSATSVLYYDDSSNVILRKHRNMVVRSXG

SEQ ID NO: 7004 - protein, 38 aa, Artificial Sequence
  GFR-binding peptide
  MOD_RES (5), (6): Xaa is C or S
  MOD_RES (20), (21), (22), (23), (24): Xaa is A or G
  MOD_RES (25), (26), (27), (28): Xaa is A or G or is absent
VPKPXXAPTKLSATSVLYYXXXXXXXXXLRKHRNMVVR

SEQ ID NO: 7005 - protein, 37 aa, Artificial Sequence
  GFR-binding peptide
  MOD_RES (2), (34), (36): Xaa is C or S
TXAPTKLSPISVLYKDDSSNVILKYHYNMVVRSXGXH

SEQ ID NO: 7006 - protein, 35 aa, Artificial Sequence
  GFR-binding peptide
  MOD_RES (33), (35): Xaa is C or S
  MOD_RES (14), (15), (16), (17), (18): Xaa is A or G
  MOD_RES (19), (20), (21), (22): Xaa is A or G or is absent
VPQDLNAISILYFXXXXXXXXXLKKYRMVVKSXKX

SEQ ID NO: 7007 - protein, 36 aa, Artificial Sequence
  GFR-binding peptide
  MOD_RES (1), (2), (33), (35): Xaa is C or S
XXVPQDLNAISILYFVGRTPKVLKKYRMVVKSXKXS

SEQ ID NO: 7008 - protein, 40 aa, Artificial Sequence
  GFR-binding peptide
  MOD_RES (3), (4), (37), (39): Xaa is C or S
KAXXVPTKLNAISVLYFDDMGVPTLKKYREGMSVAEXGXR

SEQ ID NO: 7009 - protein, 33 aa, Artificial Sequence
  GFR-binding peptide
  MOD_RES (1), (32): Xaa is C or S
XVPQDLSPISILYKVGRTPKVLKYHYMVVKSXK

SEQ ID NO: 7010 - protein, 34 aa, Artificial Sequence
  GFR-binding peptide
  MOD_RES (2), (3), (34): Xaa is C or S
PXXVPQALSAISILYLVGRKPKVLKNYQMIVRSX

SEQ ID NO: 7011 - protein, 33 aa, Artificial Sequence
  GFR-binding peptide
  MOD_RES (1), (1): Xaa is C or S
  MOD_RES (15), (16), (17), (18), (19): Xaa is A or G
  MOD_RES (20), (21), (22), (23): Xaa is A or G or is absent
XVPTELSAISMLYLXXXXXXXXXLKNYQEMVVE

SEQ ID NO: 7012 - protein, 38 aa, Artificial Sequence
  GFR-binding peptide
  MOD_RES (3), (4), (35), (37): Xaa is C or S
APXXVPQALSATSILYYVGRKPKVLRKHRMIVRSXKXS

SEQ ID NO: 7013 - protein, 34 aa, Artificial Sequence
  GFR-binding peptide
  MOD_RES (1), (33): Xaa is C or S
XVPTELSATSMLYYDENEKVVLRKHRDMVVEGXG

SEQ ID NO: 7014 - protein, 34 aa, Artificial Sequence
  GFR-binding peptide
  MOD_RES (1), (34): Xaa is C or S
  MOD_RES (15), (16), (17), (18), (19): Xaa is A or G
  MOD_RES (20), (21), (22), (23): Xaa is A or G or is absent
XVPQALSATSILYYXXXXXXXXXLRKHRMIVRSX

SEQ ID NO: 7015 - protein, 39 aa, Artificial Sequence
  GFR-binding peptide
  MOD_RES (3), (4), (37), (39): Xaa is C or S
  MOD_RES (18), (19), (20), (21), (22): Xaa is A or G
  MOD_RES (23), (24), (25), (26): Xaa is A or G or is absent
SPXXVSQDLSAISILYLXXXXXXXXXLKNYQMIVKSXKX

SEQ ID NO: 7016 - protein, 34 aa, Artificial Sequence
  GFR-binding peptide
  MOD_RES (1), (33): Xaa is C or S
XAPTKLSPISVLYKDDSSNVILKYHYNMVVRSXG

SEQ ID NO: 7017 - protein, 37 aa, Artificial Sequence
  GFR-binding peptide
  MOD_RES (1), (2), (34), (36): Xaa is C or S
XXAPTKLNAISVLYFDSSNNVILKKYRNMVVKAXGXH

SEQ ID NO: 7018 - protein, 36 aa, Artificial Sequence
  GFR-binding peptide
  MOD_RES (2), (3), (36): Xaa is C or S
AXXVPTKLNAISVLYFDDMGVPTLKKYREGMSVAEX

SEQ ID NO: 7019 - protein, 42 aa, Artificial Sequence
  GFR-binding peptide
  MOD_RES (3), (40), (42): Xaa is C or S
  MOD_RES (19), (20), (21), (22), (23): Xaa is A or G
  MOD_RES (24), (25), (26), (27): Xaa is A or G or is absent
VQXRPTQVQLSAISVLYLXXXXXXXXXLKNYQTLEDHLAXKX

SEQ ID NO: 7020 - protein, 34 aa, Artificial Sequence
  GFR-binding peptide
  MOD_RES (34), (34): Xaa is C or S
  MOD_RES (14), (15), (16), (17), (18): Xaa is A or G
  MOD_RES (19), (20), (21), (22): Xaa is A or G or is absent
APTKLNAISVLYFXXXXXXXXXLKKYRNMVVKAX

SEQ ID NO: 7021 - protein, 41 aa, Artificial Sequence
  GFR-binding peptide
  MOD_RES (4), (38), (40): Xaa is C or S
  MOD_RES (18), (19), (20), (21), (22): Xaa is A or G
  MOD_RES (23), (24), (25), (26): Xaa is A or G or is absent
KPTXAPTKLSAISVLYLXXXXXXXXXLKNYQNMVVRSXGXH

SEQ ID NO: 7022 - protein, 36 aa, Artificial Sequence
  GFR-binding peptide
  MOD_RES (34), (36): Xaa is C or S
  MOD_RES (14), (15), (16), (17), (18): Xaa is A or G
  MOD_RES (19), (20), (21), (22): Xaa is A or G or is absent
VPTELSPISMLYKXXXXXXXXXLKYHYEMVVEGXGX

SEQ ID NO: 7023 - protein, 36 aa, Artificial Sequence
  GFR-binding peptide
  MOD_RES (1), (35): Xaa is C or S
  MOD_RES (15), (16), (17), (18), (19): Xaa is A or G
  MOD_RES (20), (21), (22), (23): Xaa is A or G or is absent
XAPTKLNAISVLYFXXXXXXXXXLKKYRNMVVRSXG

SEQ ID NO: 7024 - protein, 36 aa, Artificial Sequence
  GFR-binding peptide
  MOD_RES (2), (3): Xaa is C or S
  MOD_RES (17), (18), (19), (20), (21): Xaa is A or G
  MOD_RES (22), (23), (24), (25): Xaa is A or G or is absent
AXXVPTELSPISMLYKXXXXXXXXXLKYHYEMVVEG

SEQ ID NO: 7025 - protein, 36 aa, Artificial Sequence
  GFR-binding peptide
  MOD_RES (1), (2), (34), (36): Xaa is C or S
XXVPTELNAISMLYFDEYDKVVLKKYREMVVEGXGX

SEQ ID NO: 7026 - protein, 42 aa, Artificial Sequence
  GFR-binding peptide
  MOD_RES (4), (5), (39), (41): Xaa is C or S
  MOD_RES (19), (20), (21), (22), (23): Xaa is A or G
  MOD_RES (24), (25), (26), (27): Xaa is A or G or is absent
PKAXXAPTKLNAISVLYFXXXXXXXXXLKKYRNMVVKAXGXH

SEQ ID NO: 7027 - protein, 39 aa, Artificial Sequence
  GFR-binding peptide
  MOD_RES (6), (6): Xaa is C or S
  MOD_RES (20), (21), (22), (23), (24): Xaa is A or G
  MOD_RES (25), (26), (27), (28): Xaa is A or G or is absent
VTKPTXAPTKLSATSVLYYXXXXXXXXXLRKHRNMVVRS

SEQ ID NO: 7028 - protein, 34 aa, Artificial Sequence
  GFR-binding peptide
  MOD_RES (1), (34): Xaa is C or S
  MOD_RES (15), (16), (17), (18), (19): Xaa is A or G
  MOD_RES (20), (21), (22), (23): Xaa is A or G or is absent
XVPQALSAISILYLXXXXXXXXXLKNYQMIVRSX

SEQ ID NO: 7029 - protein, 35 aa, Artificial Sequence
  GFR-binding peptide
PTQVQLSPISVLYKEIVRKKPIFLKYHYTLEDHLA

SEQ ID NO: 7030 - protein, 38 aa, Artificial Sequence
  GFR-binding peptide
  MOD_RES (4), (5): Xaa is C or S
  MOD_RES (19), (20), (21), (22), (23): Xaa is A or G
  MOD_RES (24), (25), (26), (27): Xaa is A or G or is absent
PKAXXAPTKLSATSVLYYXXXXXXXXXLRKHRNMVVKA

SEQ ID NO: 7031 - protein, 41 aa, Artificial Sequence
  GFR-binding peptide
  MOD_RES (5), (6), (39), (41): Xaa is C or S
  MOD_RES (20), (21), (22), (23), (24): Xaa is A or G
  MOD_RES (25), (26), (27), (28): Xaa is A or G or is absent
SASPXXVPQDLNAISILYFXXXXXXXXXLKKYRMVVKSXKX

SEQ ID NO: 7032 - protein, 38 aa, Artificial Sequence
  GFR-binding peptide
  MOD_RES (36), (38): Xaa is C or S
  MOD_RES (15), (16), (17), (18), (19): Xaa is A or G
  MOD_RES (20), (21), (22), (23): Xaa is A or G or is absent
PTQVQLNAISVLYFXXXXXXXXXLKKYRTLEDHLAXKX

SEQ ID NO: 7033 - protein, 39 aa, Artificial Sequence
  GFR-binding peptide
  MOD_RES (36), (38): Xaa is C or S
  MOD_RES (15), (16), (17), (18), (19): Xaa is A or G
  MOD_RES (20), (21), (22), (23): Xaa is A or G or is absent
PTQVQLSPISVLYKXXXXXXXXXLKYHYTLEDHLAXKXE

SEQ ID NO: 7034 - protein, 37 aa, Artificial Sequence
  GFR-binding peptide
  MOD_RES (2), (3), (35), (37): Xaa is C or S
AXXVPTELSATSMLYYDEYDKVVLRKHREMVVEGXGX

SEQ ID NO: 7035 - protein, 38 aa, Artificial Sequence
  GFR-binding peptide
  MOD_RES (1), (2), (37): Xaa is C or S
  MOD_RES (16), (17), (18), (19), (20): Xaa is A or G
  MOD_RES (21), (22), (23), (24): Xaa is A or G or is absent
XXVPTKLSPISVLYKXXXXXXXXXLKYHYEGMSVAEXG

SEQ ID NO: 7036 - protein, 34 aa, Artificial Sequence
  GFR-binding peptide
  MOD_RES (33), (33): Xaa is C or S
  MOD_RES (14), (15), (16), (17), (18): Xaa is A or G
  MOD_RES (19), (20), (21), (22): Xaa is A or G or is absent
VPQALSPISILYKXXXXXXXXXLKYHYMIVRSXK

SEQ ID NO: 7037 - protein, 42 aa, Artificial Sequence
  GFR-binding peptide
  MOD_RES (6), (40), (42): Xaa is C or S
  MOD_RES (20), (21), (22), (23), (24): Xaa is A or G
  MOD_RES (25), (26), (27), (28): Xaa is A or G or is absent
VTKPTXAPTKLSAISVLYLXXXXXXXXXLKNYQNMVVRSXGX

SEQ ID NO: 7038 - protein, 36 aa, Artificial Sequence
  GFR-binding peptide
  MOD_RES (3), (4), (35): Xaa is C or S
SPXXVPQDLSPISILYKVGRTPKVLKYHYMVVKSXK

SEQ ID NO: 7039 - protein, 38 aa, Artificial Sequence
  GFR-binding peptide
  MOD_RES (5), (6): Xaa is C or S
VGKAXXVPTKLNAISVLYFDDMGVPTLKKYREGMSVAE

SEQ ID NO: 7040 - protein, 33 aa, Artificial Sequence
  GFR-binding peptide
TQVQLSPISVLYKEIVRKKPIFLKYHYTLEDHL

SEQ ID NO: 7041 - protein, 40 aa, Artificial Sequence
  GFR-binding peptide
  MOD_RES (4), (5), (37), (39): Xaa is C or S
PKAXXAPTKLSPISVLYKDSSNNVILKYHYNMVVKAXGXH

SEQ ID NO: 7042 - protein, 33 aa, Artificial Sequence
  GFR-binding peptide
  MOD_RES (1), (32): Xaa is C or S
XVPQALSATSILYYVGRKPKVLRKHRMIVRSXK

SEQ ID NO: 7043 - protein, 39 aa, Artificial Sequence
  GFR-binding peptide
  MOD_RES (5), (6): Xaa is C or S
  MOD_RES (20), (21), (22), (23), (24): Xaa is A or G
  MOD_RES (25), (26), (27), (28): Xaa is A or G or is absent
VPKPXXAPTQLNAISVLYFXXXXXXXXXLKKYRNMVVRA

SEQ ID NO: 7044 - protein, 34 aa, Artificial Sequence
  GFR-binding peptide
  MOD_RES (1), (2): Xaa is C or S
  MOD_RES (16), (17), (18), (19), (20): Xaa is A or G
  MOD_RES (21), (22), (23), (24): Xaa is A or G or is absent
XXAPTQLNAISVLYFXXXXXXXXXLKKYRNMVVR

SEQ ID NO: 7045 - protein, 40 aa, Artificial Sequence
  GFR-binding peptide
  MOD_RES (4), (5), (37), (39): Xaa is C or S
PKPXXAPTKLSAISVLYLDDSSNVILKNYQNMVVRSXGXH

SEQ ID NO: 7046 - protein, 37 aa, Artificial Sequence
  GFR-binding peptide
  MOD_RES (3), (37): Xaa is C or S
  MOD_RES (17), (18), (19), (20), (21): Xaa is A or G
  MOD_RES (22), (23), (24), (25): Xaa is A or G or is absent
PTXAPTKLSAISVLYLXXXXXXXXXLKNYQNMVVRSX

SEQ ID NO: 7047 - protein, 40 aa, Artificial Sequence
  GFR-binding peptide
  MOD_RES (2), (39): Xaa is C or S
  MOD_RES (18), (19), (20), (21), (22): Xaa is A or G
  MOD_RES (23), (24), (25), (26): Xaa is A or G or is absent
QXRPTQVQLNAISVLYFXXXXXXXXXLKKYRTLEDHLAXK

SEQ ID NO: 7048 - protein, 43 aa, Artificial Sequence
  GFR-binding peptide
  MOD_RES (6), (7), (42): Xaa is C or S
  MOD_RES (21), (22), (23), (24), (25): Xaa is A or G
  MOD_RES (26), (27), (28), (29): Xaa is A or G or is absent
KVGKAXXVPTKLSPISVLYKXXXXXXXXXLKYHYEGMSVAEXG

SEQ ID NO: 7049 - protein, 43 aa, Artificial Sequence
  GFR-binding peptide
  MOD_RES (6), (7), (40), (42): Xaa is C or S
  MOD_RES (21), (22), (23), (24), (25): Xaa is A or G
  MOD_RES (26), (27), (28), (29): Xaa is A or G or is absent
ASAAPXXVPQALSPISILYKXXXXXXXXXLKYHYMIVRSXKXS

SEQ ID NO: 7050 - protein, 34 aa, Artificial Sequence
  GFR-binding peptide
  MOD_RES (1), (1): Xaa is C or S
  MOD_RES (15), (16), (17), (18), (19): Xaa is A or G
  MOD_RES (20), (21), (22), (23): Xaa is A or G or is absent
XAPTKLSPISVLYKXXXXXXXXXLKYHYNMVVRS

SEQ ID NO: 7051 - protein, 41 aa, Artificial Sequence
  GFR-binding peptide
  MOD_RES (6), (7), (40): Xaa is C or S
  MOD_RES (21), (22), (23), (24), (25): Xaa is A or G
  MOD_RES (26), (27), (28), (29): Xaa is A or G or is absent
ASASPXXVSQDLSATSILYYXXXXXXXXXLRKHRMIVKSXK

SEQ ID NO: 7052 - protein, 35 aa, Artificial Sequence
  GFR-binding peptide
  MOD_RES (1), (2), (35): Xaa is C or S
XXVPTKLNAISVLYFDDMGVPTLKKYREGMSVAEX

SEQ ID NO: 7053 - protein, 40 aa, Artificial Sequence
  GFR-binding peptide
  MOD_RES (5), (6), (38), (40): Xaa is C or S
VPKAXXAPTKLNAISVLYFDSSNNVILKKYRNMVVKAXGX

SEQ ID NO: 7054 - protein, 39 aa, Artificial Sequence
  GFR-binding peptide
  MOD_RES (5), (5): Xaa is C or S
  MOD_RES (21), (22), (23), (24), (25): Xaa is A or G
  MOD_RES (26), (27), (28), (29): Xaa is A or G or is absent
RNVQXRPTQVQLSAISVLYLXXXXXXXXXLKNYQTLEDH

SEQ ID NO: 7055 - protein, 37 aa, Artificial Sequence
  GFR-binding peptide
  MOD_RES (1), (2), (36): Xaa is C or S
  MOD_RES (16), (17), (18), (19), (20): Xaa is A or G
  MOD_RES (21), (22), (23), (24): Xaa is A or G or is absent
XXVPTELSAISMLYLXXXXXXXXXLKNYQEMVVEGXG

SEQ ID NO: 7056 - protein, 35 aa, Artificial Sequence
  GFR-binding peptide
RPTQVQLSPISVLYKEIVRKKPIFLKYHYTLEDHL

SEQ ID NO: 7057 - protein, 39 aa, Artificial Sequence
  GFR-binding peptide
  MOD_RES (4), (5), (38): Xaa is C or S
  MOD_RES (19), (20), (21), (22), (23): Xaa is A or G
  MOD_RES (24), (25), (26), (27): Xaa is A or G or is absent
ASPXXVSQDLSPISILYKXXXXXXXXXLKYHYMIVKSXK

SEQ ID NO: 7058 - protein, 35 aa, Artificial Sequence
  GFR-binding peptide
  MOD_RES (34), (34): Xaa is C or S
  MOD_RES (14), (15), (16), (17), (18): Xaa is A or G
  MOD_RES (19), (20), (21), (22): Xaa is A or G or is absent
APTKLSATSVLYYXXXXXXXXXLRKHRNMVVRSXG

SEQ ID NO: 7059 - protein, 41 aa, Artificial Sequence
  GFR-binding peptide
  MOD_RES (6), (7), (38), (40): Xaa is C or S
ASASPXXVPQDLSPISILYKVGRTPKVLKYHYMVVKSXKXS

SEQ ID NO: 7060 - protein, 36 aa, Artificial Sequence
  GFR-binding peptide
  MOD_RES (1), (2), (35): Xaa is C or S
XXVPTKLSATSVLYYDDMGVPTLRKHREGMSVAEXG

SEQ ID NO: 7061 - protein, 43 aa, Artificial Sequence
  GFR-binding peptide
  MOD_RES (6), (7), (40), (42): Xaa is C or S
  MOD_RES (21), (22), (23), (24), (25): Xaa is A or G
  MOD_RES (26), (27), (28), (29): Xaa is A or G or is absent
ASASPXXVPQDLSAISILYLXXXXXXXXXLKNYQMVVKSXKXS

SEQ ID NO: 7062 - protein, 36 aa, Artificial Sequence
  GFR-binding peptide
  MOD_RES (5), (6): Xaa is C or S
IPKAXXVPTELSATSMLYYDEYDKVVLRKHREMVVE

SEQ ID NO: 7063 - protein, 42 aa, Artificial Sequence
  GFR-binding peptide
  MOD_RES (6), (7), (39), (41): Xaa is C or S
KIPKAXXVPTELNAISMLYFDENEKVVLKKYRDMVVEGXGXR

SEQ ID NO: 7064 - protein, 39 aa, Artificial Sequence
  GFR-binding peptide
  MOD_RES (6), (7), (39): Xaa is C or S
KIPKAXXVPTELSPISMLYKDENEKVVLKYHYDMVVEGX

SEQ ID NO: 7065 - protein, 34 aa, Artificial Sequence
  GFR-binding peptide
  MOD_RES (1), (2): Xaa is C or S
  MOD_RES (16), (17), (18), (19), (20): Xaa is A or G
  MOD_RES (21), (22), (23), (24): Xaa is A or G or is absent
XXVPQDLSATSILYYXXXXXXXXXLRKHRMVVKS

SEQ ID NO: 7066 - protein, 34 aa, Artificial Sequence
  GFR-binding peptide
  MOD_RES (34), (34): Xaa is C or S
  MOD_RES (14), (15), (16), (17), (18): Xaa is A or G
  MOD_RES (19), (20), (21), (22): Xaa is A or G or is absent
VPTELSAISMLYLXXXXXXXXXLKNYQDMVVEGX

SEQ ID NO: 7067 - protein, 39 aa, Artificial Sequence
  GFR-binding peptide
  MOD_RES (3), (4), (37), (39): Xaa is C or S
  MOD_RES (18), (19), (20), (21), (22): Xaa is A or G
  MOD_RES (23), (24), (25), (26): Xaa is A or G or is absent
SPXXVPQDLSPISILYKXXXXXXXXXLKYHYMVVKSXKX

SEQ ID NO: 7068 - protein, 39 aa, Artificial Sequence
  GFR-binding peptide
  MOD_RES (2), (36), (38): Xaa is C or S
  MOD_RES (16), (17), (18), (19), (20): Xaa is A or G
  MOD_RES (21), (22), (23), (24): Xaa is A or G or is absent
TXAPTKLSPISVLYKXXXXXXXXXLKYHYNMVVRSXGXH

SEQ ID NO: 7069 - protein, 33 aa, Artificial Sequence
  GFR-binding peptide
  MOD_RES (1), (2): Xaa is C or S
XXAPTQLSATSVLYYDDSSNVILRKHRNMVVRA

SEQ ID NO: 7070 - protein, 42 aa, Artificial Sequence
  GFR-binding peptide
  MOD_RES (4), (5), (39), (41): Xaa is C or S
  MOD_RES (19), (20), (21), (22), (23): Xaa is A or G
  MOD_RES (24), (25), (26), (27): Xaa is A or G or is absent
PKPXXAPTQLSAISVLYLXXXXXXXXXLKNYQNMVVRAXGXH

SEQ ID NO: 7071 - protein, 42 aa, Artificial Sequence
  GFR-binding peptide
  MOD_RES (4), (41): Xaa is C or S
  MOD_RES (20), (21), (22), (23), (24): Xaa is A or G
  MOD_RES (25), (26), (27), (28): Xaa is A or G or is absent
NVQXRPTQVQLSATSVLYYXXXXXXXXXLRKHRTLEDHLAXK

SEQ ID NO: 7072 - protein, 35 aa, Artificial Sequence
  GFR-binding peptide
  MOD_RES (1), (2): Xaa is C or S
  MOD_RES (16), (17), (18), (19), (20): Xaa is A or G
  MOD_RES (21), (22), (23), (24): Xaa is A or G or is absent
XXAPTKLSPISVLYKXXXXXXXXXLKYHYNMVVKA

SEQ ID NO: 7073 - protein, 33 aa, Artificial Sequence
  GFR-binding peptide
  MOD_RES (1), (2), (33): Xaa is C or S
XXVPQDLSAISILYLVGRTPKVLKNYQMVVKSX

SEQ ID NO: 7074 - protein, 31 aa, Artificial Sequence
  GFR-binding peptide
  MOD_RES (31), (31): Xaa is C or S
VPQALSPISILYKVGRKPKVLKYHYMIVRSX

SEQ ID NO: 7075 - protein, 38 aa, Artificial Sequence
  GFR-binding peptide
  MOD_RES (6), (7), (38): Xaa is C or S
ASASPXXVSQDLSATSILYYIGKTPKILRKHRMIVKSX

SEQ ID NO: 7076 - protein, 33 aa, Artificial Sequence
  GFR-binding peptide
  MOD_RES (1), (1): Xaa is C or S
XVPTKLSAISVLYLDDMGVPTLKNYQEGMSVAE

SEQ ID NO: 7077 - protein, 36 aa, Artificial Sequence
  GFR-binding peptide
  MOD_RES (2), (3), (34), (36): Xaa is C or S
PXXVSQDLSATSILYYIGKTPKILRKHRMIVKSXKX

SEQ ID NO: 7078 - protein, 41 aa, Artificial Sequence
  GFR-binding peptide
  MOD_RES (6), (7), (40): Xaa is C or S
  MOD_RES (21), (22), (23), (24), (25): Xaa is A or G
  MOD_RES (26), (27), (28), (29): Xaa is A or G or is absent
ASAAPXXVPQALSATSILYYXXXXXXXXXLRKHRMIVRSXK

SEQ ID NO: 7079 - protein, 40 aa, Artificial Sequence
  GFR-binding peptide
  MOD_RES (2), (3), (37), (39): Xaa is C or S
  MOD_RES (17), (18), (19), (20), (21): Xaa is A or G
  MOD_RES (22), (23), (24), (25): Xaa is A or G or is absent
AXXVPTELSPISMLYKXXXXXXXXXLKYHYEMVVEGXGXR

SEQ ID NO: 7080 - protein, 33 aa, Artificial Sequence
  GFR-binding peptide
  MOD_RES (2), (3): Xaa is C or S
PXXVPQDLSAISILYLVGRTPKVLKNYQMVVKS

SEQ ID NO: 7081 - protein, 34 aa, Artificial Sequence
  GFR-binding peptide
  MOD_RES (1), (2), (33): Xaa is C or S
XXVPQALSATSILYYVGRKPKVLRKHRMIVRSXK

SEQ ID NO: 7082 - protein, 33 aa, Artificial Sequence
  GFR-binding peptide
  MOD_RES (2), (3): Xaa is C or S
PXXVPQALNAISILYFVGRKPKVLKKYRMIVRS

SEQ ID NO: 7083 - protein, 36 aa, Artificial Sequence
  GFR-binding peptide
  MOD_RES (2), (3): Xaa is C or S
  MOD_RES (17), (18), (19), (20), (21): Xaa is A or G
  MOD_RES (22), (23), (24), (25): Xaa is A or G or is absent
PXXAPTKLSATSVLYYXXXXXXXXXLRKHRNMVVRS

SEQ ID NO: 7084 - protein, 43 aa, Artificial Sequence
  GFR-binding peptide
  MOD_RES (3), (40), (42): Xaa is C or S
  MOD_RES (19), (20), (21), (22), (23): Xaa is A or G
  MOD_RES (24), (25), (26), (27): Xaa is A or G or is absent
VQXRPTQVQLSAISVLYLXXXXXXXXXLKNYQTLEDHLAXKXE

SEQ ID NO: 7085 - protein, 32 aa, Artificial Sequence
  GFR-binding peptide
  MOD_RES (32), (32): Xaa is C or S
APTKLSPISVLYKDSSNNVILKYHYNMVVKAX

SEQ ID NO: 7086 - protein, 41 aa, Artificial Sequence
  GFR-binding peptide
  MOD_RES (4), (5), (39), (41): Xaa is C or S
  MOD_RES (19), (20), (21), (22), (23): Xaa is A or G
  MOD_RES (24), (25), (26), (27): Xaa is A or G or is absent
PKAXXVPTELSPISMLYKXXXXXXXXXLKYHYDMVVEGXGX

SEQ ID NO: 7087 - protein, 32 aa, Artificial Sequence
  GFR-binding peptide
  MOD_RES (31), (31): Xaa is C or S
VPQALSAISILYLVGRKPKVLKNYQMIVRSXK

SEQ ID NO: 7088 - protein, 35 aa, Artificial Sequence
  GFR-binding peptide
  MOD_RES (1), (35): Xaa is C or S
  MOD_RES (15), (16), (17), (18), (19): Xaa is A or G
  MOD_RES (20), (21), (22), (23): Xaa is A or G or is absent
XAPTKLNAISVLYFXXXXXXXXXLKKYRNMVVKAX

SEQ ID NO: 7089 - protein, 37 aa, Artificial Sequence
  GFR-binding peptide
  MOD_RES (1), (34), (36): Xaa is C or S
  MOD_RES (15), (16), (17), (18), (19): Xaa is A or G
  MOD_RES (20), (21), (22), (23): Xaa is A or G or is absent
XVPQALSPISILYKXXXXXXXXXLKYHYMIVRSXKXS

SEQ ID NO: 7090 - protein, 39 aa, Artificial Sequence
  GFR-binding peptide
  MOD_RES (3), (4), (37), (39): Xaa is C or S
  MOD_RES (18), (19), (20), (21), (22): Xaa is A or G
  MOD_RES (23), (24), (25), (26): Xaa is A or G or is absent
APXXVPQALSAISILYLXXXXXXXXXLKNYQMIVRSXKX

SEQ ID NO: 7091 - protein, 36 aa, Artificial Sequence
  GFR-binding peptide
  MOD_RES (1), (33), (35): Xaa is C or S
XAPTQLSAISVLYLDDSSNVILKNYQNMVVRAXGXH

SEQ ID NO: 7092 - protein, 32 aa, Artificial Sequence
  GFR-binding peptide
  MOD_RES (31), (31): Xaa is C or S
VSQDLSATSILYYIGKTPKILRKHRMIVKSXK

SEQ ID NO: 7093 - protein, 36 aa, Artificial Sequence
  GFR-binding peptide
  MOD_RES (3), (4), (36): Xaa is C or S
KAXXAPTKLSPISVLYKDSSNNVILKYHYNMVVKAX

SEQ ID NO: 7094 - protein, 32 aa, Artificial Sequence
  GFR-binding peptide
  MOD_RES (14), (15), (16), (17), (18): Xaa is A or G
  MOD_RES (19), (20), (21), (22): Xaa is A or G or is absent
APTQLSAISVLYLXXXXXXXXXLKNYQNMVVR

SEQ ID NO: 7095 - protein, 37 aa, Artificial Sequence
  GFR-binding peptide
  MOD_RES (1), (35), (37): Xaa is C or S
  MOD_RES (15), (16), (17), (18), (19): Xaa is A or G
  MOD_RES (20), (21), (22), (23): Xaa is A or G or is absent
XAPTKLSATSVLYYXXXXXXXXXLRKHRNMVVKAXGX

SEQ ID NO: 7096 - protein, 37 aa, Artificial Sequence
  GFR-binding peptide
  MOD_RES (3), (3): Xaa is C or S
  MOD_RES (19), (20), (21), (22), (23): Xaa is A or G
  MOD_RES (24), (25), (26), (27): Xaa is A or G or is absent
VQXRPTQVQLSATSVLYYXXXXXXXXXLRKHRTLEDH

SEQ ID NO: 7097 - protein, 40 aa, Artificial Sequence
  GFR-binding peptide
  MOD_RES (5), (6), (40): Xaa is C or S
  MOD_RES (20), (21), (22), (23), (24): Xaa is A or G
  MOD_RES (25), (26), (27), (28): Xaa is A or G or is absent
VPKAXXAPTKLSATSVLYYXXXXXXXXXLRKHRNMVVKAX

SEQ ID NO: 7098 - protein, 30 aa, Artificial Sequence
  GFR-binding peptide
VPTELSATSMLYYDEYDKVVLRKHREMVVE

SEQ ID NO: 7099 - protein, 42 aa, Artificial Sequence
  GFR-binding peptide
  MOD_RES (6), (7), (39), (41): Xaa is C or S
YVPKPXXAPTKLSAISVLYLDDSSNVILKNYQNMVVRSXGXH

SEQ ID NO: 7100 - protein, 35 aa, Artificial Sequence
  GFR-binding peptide
  MOD_RES (32), (34): Xaa is C or S
VPTELSPISMLYKDENEKVVLKYHYDMVVEGXGXR

SEQ ID NO: 7101 - protein, 42 aa, Artificial Sequence
  GFR-binding peptide
  MOD_RES (5), (6), (40), (42): Xaa is C or S
  MOD_RES (20), (21), (22), (23), (24): Xaa is A or G
  MOD_RES (25), (26), (27), (28): Xaa is A or G or is absent
IPKAXXVPTELSAISMLYLXXXXXXXXXLKNYQDMVVEGXGX

SEQ ID NO: 7102 - protein, 42 aa, Artificial Sequence
  GFR-binding peptide
  MOD_RES (6), (7), (39), (41): Xaa is C or S
SIPKAXXVPTELNAISMLYFDEYDKVVLKKYREMVVEGXGXR

SEQ ID NO: 7103 - protein, 37 aa, Artificial Sequence
  GFR-binding peptide
  MOD_RES (5), (5): Xaa is C or S
  MOD_RES (19), (20), (21), (22), (23): Xaa is A or G
  MOD_RES (24), (25), (26), (27): Xaa is A or G or is absent
TKPTXAPTKLSPISVLYKXXXXXXXXXLKYHYNMVVR

SEQ ID NO: 7104 - protein, 38 aa, Artificial Sequence
  GFR-binding peptide
  MOD_RES (1), (2), (36), (38): Xaa is C or S
  MOD_RES (16), (17), (18), (19), (20): Xaa is A or G
  MOD_RES (21), (22), (23), (24): Xaa is A or G or is absent
XXAPTKLNAISVLYFXXXXXXXXXLKKYRNMVVRSXGX

SEQ ID NO: 7105 - protein, 33 aa, Artificial Sequence
  GFR-binding peptide
  MOD_RES (14), (15), (16), (17), (18): Xaa is A or G
  MOD_RES (19), (20), (21), (22): Xaa is A or G or is absent
APTKLSATSVLYYXXXXXXXXXLRKHRNMVVKA

SEQ ID NO: 7106 - protein, 35 aa, Artificial Sequence
  GFR-binding peptide
  MOD_RES (2), (3): Xaa is C or S
  MOD_RES (17), (18), (19), (20), (21): Xaa is A or G
  MOD_RES (22), (23), (24), (25): Xaa is A or G or is absent
PXXAPTQLSAISVLYLXXXXXXXXXLKNYQNMVVR

SEQ ID NO: 7107 - protein, 39 aa, Artificial Sequence
  GFR-binding peptide
  MOD_RES (6), (7), (39): Xaa is C or S
SIPKAXXVPTELSPISMLYKDEYDKVVLKYHYEMVVEGX

SEQ ID NO: 7108 - protein, 41 aa, Artificial Sequence
  GFR-binding peptide
  MOD_RES (6), (7), (40): Xaa is C or S
KVGKAXXVPTKLNAISVLYFDDMGVPTLKKYREGMSVAEXG

SEQ ID NO: 7109 - protein, 40 aa, Artificial Sequence
  GFR-binding peptide
  MOD_RES (4), (5), (39): Xaa is C or S
  MOD_RES (19), (20), (21), (22), (23): Xaa is A or G
  MOD_RES (24), (25), (26), (27): Xaa is A or G or is absent
PKPXXAPTQLSATSVLYYXXXXXXXXXLRKHRNMVVRAXG

SEQ ID NO: 7110 - protein, 33 aa, Artificial Sequence
  GFR-binding peptide
  MOD_RES (1), (32): Xaa is C or S
XVPQALNAISILYFVGRKPKVLKKYRMIVRSXK

SEQ ID NO: 7111 - protein, 41 aa, Artificial Sequence
  GFR-binding peptide
  MOD_RES (6), (7), (40): Xaa is C or S
  MOD_RES (21), (22), (23), (24), (25): Xaa is A or G
  MOD_RES (26), (27), (28), (29): Xaa is A or G or is absent
ASASPXXVPQDLSATSILYYXXXXXXXXXLRKHRMVVKSXK

SEQ ID NO: 7112 - protein, 35 aa, Artificial Sequence
  GFR-binding peptide
  MOD_RES (1), (35): Xaa is C or S
  MOD_RES (15), (16), (17), (18), (19): Xaa is A or G
  MOD_RES (20), (21), (22), (23): Xaa is A or G or is absent
XAPTQLNAISVLYFXXXXXXXXXLKKYRNMVVRAX

SEQ ID NO: 7113 - protein, 34 aa, Artificial Sequence
  GFR-binding peptide
  MOD_RES (3), (4): Xaa is C or S
SPXXVPQDLSATSILYYVGRTPKVLRKHRMVVKS

SEQ ID NO: 7114 - protein, 37 aa, Artificial Sequence
  GFR-binding peptide
  MOD_RES (1), (2), (35), (37): Xaa is C or S
  MOD_RES (16), (17), (18), (19), (20): Xaa is A or G
  MOD_RES (21), (22), (23), (24): Xaa is A or G or is absent
XXVPQALSATSILYYXXXXXXXXXLRKHRMIVRSXKX

SEQ ID NO: 7115 - protein, 35 aa, Artificial Sequence
  GFR-binding peptide
  MOD_RES (1), (2), (33), (35): Xaa is C or S
XXVPQALSPISILYKVGRKPKVLKYHYMIVRSXKX

SEQ ID NO: 7116 - protein, 39 aa, Artificial Sequence
  GFR-binding peptide
  MOD_RES (4), (5), (39): Xaa is C or S
  MOD_RES (19), (20), (21), (22), (23): Xaa is A or G
  MOD_RES (24), (25), (26), (27): Xaa is A or G or is absent
PKAXXAPTKLSATSVLYYXXXXXXXXXLRKHRNMVVKAX

SEQ ID NO: 7117 - protein, 36 aa, Artificial Sequence
  GFR-binding peptide
  MOD_RES (1), (33), (35): Xaa is C or S
XAPTKLSAISVLYLDDSSNVILKNYQNMVVRSXGXH

SEQ ID NO: 7118 - protein, 37 aa, Artificial Sequence
  GFR-binding peptide
  MOD_RES (4), (5), (37): Xaa is C or S
PKPXXAPTQLSATSVLYYDDSSNVILRKHRNMVVRAX

SEQ ID NO: 7119 - protein, 42 aa, Artificial Sequence
  GFR-binding peptide
  MOD_RES (6), (7), (41): Xaa is C or S
  MOD_RES (21), (22), (23), (24), (25): Xaa is A or G
  MOD_RES (26), (27), (28), (29): Xaa is A or G or is absent
TVPKPXXAPTQLSATSVLYYXXXXXXXXXLRKHRNMVVRAXG

SEQ ID NO: 7120 - protein, 32 aa, Artificial Sequence
  GFR-binding peptide
  MOD_RES (32), (32): Xaa is C or S
APTKLSPISVLYKDDSSNVILKYHYNMVVRSX

SEQ ID NO: 7121 - protein, 41 aa, Artificial Sequence
  GFR-binding peptide
  MOD_RES (5), (6), (39), (41): Xaa is C or S
  MOD_RES (20), (21), (22), (23), (24): Xaa is A or G
  MOD_RES (25), (26), (27), (28): Xaa is A or G or is absent
SASPXXVSQDLNAISILYFXXXXXXXXXLKKYRMIVKSXKX

SEQ ID NO: 7122 - protein, 42 aa, Artificial Sequence
  GFR-binding peptide
  MOD_RES (4), (5), (39), (41): Xaa is C or S
  MOD_RES (19), (20), (21), (22), (23): Xaa is A or G
  MOD_RES (24), (25), (26), (27): Xaa is A or G or is absent
PKAXXVPTELSATSMLYYXXXXXXXXXLRKHRDMVVEGXGXR

SEQ ID NO: 7123 - protein, 33 aa, Artificial Sequence
  GFR-binding peptide
  MOD_RES (1), (32): Xaa is C or S
XVPQALSPISILYKVGRKPKVLKYHYMIVRSXK

SEQ ID NO: 7124 - protein, 35 aa, Artificial Sequence
  GFR-binding peptide
  MOD_RES (35), (35): Xaa is C or S
TQVQLSAISVLYLEIVRKKPIFLKNYQTLEDHLAX

SEQ ID NO: 7125 - protein, 36 aa, Artificial Sequence
  GFR-binding peptide
  MOD_RES (1), (2), (36): Xaa is C or S
  MOD_RES (16), (17), (18), (19), (20): Xaa is A or G
  MOD_RES (21), (22), (23), (24): Xaa is A or G or is absent
XXAPTKLSPISVLYKXXXXXXXXXLKYHYNMVVKAX

SEQ ID NO: 7126 - protein, 37 aa, Artificial Sequence
  GFR-binding peptide
  MOD_RES (34), (36): Xaa is C or S
  MOD_RES (14), (15), (16), (17), (18): Xaa is A or G
  MOD_RES (19), (20), (21), (22): Xaa is A or G or is absent
VPTELSAISMLYLXXXXXXXXXLKNYQDMVVEGXGXR

SEQ ID NO: 7127 - protein, 39 aa, Artificial Sequence
  GFR-binding peptide
  MOD_RES (3), (4), (39): Xaa is C or S
  MOD_RES (18), (19), (20), (21), (22): Xaa is A or G
  MOD_RES (23), (24), (25), (26): Xaa is A or G or is absent
KAXXVPTKLSAISVLYLXXXXXXXXXLKNYQEGMSVAEX

SEQ ID NO: 7128 - protein, 35 aa, Artificial Sequence
  GFR-binding peptide
  MOD_RES (34), (34): Xaa is C or S
  MOD_RES (14), (15), (16), (17), (18): Xaa is A or G
  MOD_RES (19), (20), (21), (22): Xaa is A or G or is absent
APTKLNAISVLYFXXXXXXXXXLKKYRNMVVRSXG

SEQ ID NO: 7129 - protein, 41 aa, Artificial Sequence
  GFR-binding peptide
  MOD_RES (4), (5), (39), (41): Xaa is C or S
  MOD_RES (19), (20), (21), (22), (23): Xaa is A or G
  MOD_RES (24), (25), (26), (27): Xaa is A or G or is absent
PKPXXAPTKLSATSVLYYXXXXXXXXXLRKHRNMVVRSXGX

SEQ ID NO: 7130 - protein, 36 aa, Artificial Sequence
  GFR-binding peptide
  MOD_RES (2), (3), (35): Xaa is C or S
PXXAPTQLSAISVLYLDDSSNVILKNYQNMVVRAXG

SEQ ID NO: 7131 - protein, 37 aa, Artificial Sequence
  GFR-binding peptide
  MOD_RES (7), (7): Xaa is C or S
HVTKPTXAPTKLSAISVLYLDDSSNVILKNYQNMVVR

SEQ ID NO: 7132 - protein, 43 aa, Artificial Sequence
  GFR-binding peptide
  MOD_RES (5), (42): Xaa is C or S
RNVQXRPTQVQLSAISVLYLEIVRKKPIFLKNYQTLEDHLAXK

SEQ ID NO: 7133 - protein, 32 aa, Artificial Sequence
  GFR-binding peptide
  MOD_RES (14), (15), (16), (17), (18): Xaa is A or G
  MOD_RES (19), (20), (21), (22): Xaa is A or G or is absent
VPTELSATSMLYYXXXXXXXXXLRKHRDMVVE

SEQ ID NO: 7134 - protein, 31 aa, Artificial Sequence
  GFR-binding peptide
  MOD_RES (1), (1): Xaa is C or S
XVPTELSPISMLYKDEYDKVVLKYHYEMVVE

SEQ ID NO: 7135 - protein, 36 aa, Artificial Sequence
  GFR-binding peptide
  MOD_RES (2), (3), (34), (36): Xaa is C or S
PXXVPQDLSATSILYYVGRTPKVLRKHRMVVKSXKX

SEQ ID NO: 7136 - protein, 41 aa, Artificial Sequence
  GFR-binding peptide
  MOD_RES (6), (7): Xaa is C or S
  MOD_RES (21), (22), (23), (24), (25): Xaa is A or G
  MOD_RES (26), (27), (28), (29): Xaa is A or G or is absent
KVGKAXXVPTKLSAISVLYLXXXXXXXXXLKNYQEGMSVAE

SEQ ID NO: 7137 - protein, 41 aa, Artificial Sequence
  GFR-binding peptide
  MOD_RES (3), (4), (38), (40): Xaa is C or S
  MOD_RES (18), (19), (20), (21), (22): Xaa is A or G
  MOD_RES (23), (24), (25), (26): Xaa is A or G or is absent
KPXXAPTQLSPISVLYKXXXXXXXXXLKYHYNMVVRAXGXH

SEQ ID NO: 7138 - protein, 34 aa, Artificial Sequence
  GFR-binding peptide
  MOD_RES (1), (34): Xaa is C or S
XVPTKLSATSVLYYDDMGVPTLRKHREGMSVAEX

SEQ ID NO: 7139 - protein, 38 aa, Artificial Sequence
  GFR-binding peptide
  MOD_RES (36), (38): Xaa is C or S
PTQVQLSATSVLYYEIVRKKPIFLRKHRTLEDHLAXKX

SEQ ID NO: 7140 - protein, 37 aa, Artificial Sequence
  GFR-binding peptide
  MOD_RES (6), (7): Xaa is C or S
YVPKPXXAPTKLSATSVLYYDDSSNVILRKHRNMVVR

SEQ ID NO: 7141 - protein, 40 aa, Artificial Sequence
  GFR-binding peptide
  MOD_RES (5), (6), (40): Xaa is C or S
  MOD_RES (20), (21), (22), (23), (24): Xaa is A or G
  MOD_RES (25), (26), (27), (28): Xaa is A or G or is absent
VPKPXXAPTKLSPISVLYKXXXXXXXXXLKYHYNMVVRSX

SEQ ID NO: 7142 - protein, 38 aa, Artificial Sequence
  GFR-binding peptide
  MOD_RES (35), (37): Xaa is C or S
TQVQLNAISVLYFEIVRKKPIFLKKYRTLEDHLAXKXE

SEQ ID NO: 7143 - protein, 43 aa, Artificial Sequence
  GFR-binding peptide
  MOD_RES (6), (7), (41), (43): Xaa is C or S
  MOD_RES (21), (22), (23), (24), (25): Xaa is A or G
  MOD_RES (26), (27), (28), (29): Xaa is A or G or is absent
TVPKPXXAPTQLSATSVLYYXXXXXXXXXLRKHRNMVVRAXGX

SEQ ID NO: 7144 - protein, 37 aa, Artificial Sequence
  GFR-binding peptide
  MOD_RES (5), (6): Xaa is C or S
VPKAXXAPTKLSPISVLYKDSSNNVILKYHYNMVVKA

SEQ ID NO: 7145 - protein, 34 aa, Artificial Sequence
  GFR-binding peptide
  MOD_RES (33), (33): Xaa is C or S
VPTKLNAISVLYFDDMGVPTLKKYREGMSVAEXG

SEQ ID NO: 7146 - protein, 43 aa, Artificial Sequence
  GFR-binding peptide
  MOD_RES (7), (41), (43): Xaa is C or S
  MOD_RES (21), (22), (23), (24), (25): Xaa is A or G
  MOD_RES (26), (27), (28), (29): Xaa is A or G or is absent
HVTKPTXAPTKLNAISVLYFXXXXXXXXXLKKYRNMVVRSXGX

SEQ ID NO: 7147 - protein, 43 aa, Artificial Sequence
  GFR-binding peptide
  MOD_RES (4), (41), (43): Xaa is C or S
  MOD_RES (20), (21), (22), (23), (24): Xaa is A or G
  MOD_RES (25), (26), (27), (28): Xaa is A or G or is absent
NVQXRPTQVQLNAISVLYFXXXXXXXXXLKKYRTLEDHLAXKX

SEQ ID NO: 7148 - protein, 33 aa, Artificial Sequence
  GFR-binding peptide
  MOD_RES (33), (33): Xaa is C or S
VPTKLSATSVLYYDDMGVPTLRKHREGMSVAEX

SEQ ID NO: 7149 - protein, 30 aa, Artificial Sequence
  GFR-binding peptide
VSQDLSATSILYYIGKTPKILRKHRMIVKS

SEQ ID NO: 7150 - protein, 40 aa, Artificial Sequence
  GFR-binding peptide
  MOD_RES (3), (4), (38), (40): Xaa is C or S
  MOD_RES (18), (19), (20), (21), (22): Xaa is A or G
  MOD_RES (23), (24), (25), (26): Xaa is A or G or is absent
KAXXVPTELNAISMLYFXXXXXXXXXLKKYRDMVVEGXGX

SEQ ID NO: 7151 - protein, 37 aa, Artificial Sequence
  GFR-binding peptide
  MOD_RES (1), (35), (37): Xaa is C or S
  MOD_RES (15), (16), (17), (18), (19): Xaa is A or G
  MOD_RES (20), (21), (22), (23): Xaa is A or G or is absent
XAPTKLSAISVLYLXXXXXXXXXLKNYQNMVVRSXGX

SEQ ID NO: 7152 - protein, 36 aa, Artificial Sequence
  GFR-binding peptide
  MOD_RES (1), (33), (35): Xaa is C or S
XAPTKLSAISVLYLDSSNNVILKNYQNMVVKAXGXH

SEQ ID NO: 7153 - protein, 38 aa, Artificial Sequence
  GFR-binding peptide
  MOD_RES (2), (3), (37): Xaa is C or S
  MOD_RES (17), (18), (19), (20), (21): Xaa is A or G
  MOD_RES (22), (23), (24), (25): Xaa is A or G or is absent
AXXVPTELSPISMLYKXXXXXXXXXLKYHYEMVVEGXG

SEQ ID NO: 7154 - protein, 40 aa, Artificial Sequence
  GFR-binding peptide
  MOD_RES (3), (40): Xaa is C or S
VQXRPTQVQLSAISVLYLEIVRKKPIFLKNYQTLEDHLAX

SEQ ID NO: 7155 - protein, 39 aa, Artificial Sequence
  GFR-binding peptide
  MOD_RES (6), (7): Xaa is C or S
KVGKAXXVPTKLSAISVLYLDDMGVPTLKNYQEGMSVAE

SEQ ID NO: 7156 - protein, 40 aa, Artificial Sequence
  GFR-binding peptide
  MOD_RES (4), (5), (38), (40): Xaa is C or S
  MOD_RES (19), (20), (21), (22), (23): Xaa is A or G
  MOD_RES (24), (25), (26), (27): Xaa is A or G or is absent
AAPXXVPQALSPISILYKXXXXXXXXXLKYHYMIVRSXKX

SEQ ID NO: 7157 - protein, 38 aa, Artificial Sequence
  GFR-binding peptide
  MOD_RES (5), (5): Xaa is C or S
  MOD_RES (19), (20), (21), (22), (23): Xaa is A or G
  MOD_RES (24), (25), (26), (27): Xaa is A or G or is absent
TKPTXAPTKLSPISVLYKXXXXXXXXXLKYHYNMVVRS

SEQ ID NO: 7158 - protein, 35 aa, Artificial Sequence
  GFR-binding peptide
  MOD_RES (32), (34): Xaa is C or S
VPTELSPISMLYKDEYDKVVLKYHYEMVVEGXGXR

SEQ ID NO: 7159 - protein, 39 aa, Artificial Sequence
  GFR-binding peptide
  MOD_RES (6), (7), (39): Xaa is C or S
SIPKAXXVPTELNAISMLYFDEYDKVVLKKYREMVVEGX

SEQ ID NO: 7160 - protein, 40 aa, Artificial Sequence
  GFR-binding peptide
  MOD_RES (3), (4), (37), (39): Xaa is C or S
  MOD_RES (18), (19), (20), (21), (22): Xaa is A or G
  MOD_RES (23), (24), (25), (26): Xaa is A or G or is absent
SPXXVSQDLSPISILYKXXXXXXXXXLKYHYMIVKSXKXS

SEQ ID NO: 7161 - protein, 38 aa, Artificial Sequence
  GFR-binding peptide
  MOD_RES (2), (3), (36), (38): Xaa is C or S
  MOD_RES (17), (18), (19), (20), (21): Xaa is A or G
  MOD_RES (22), (23), (24), (25): Xaa is A or G or is absent
PXXVPQDLSAISILYLXXXXXXXXXLKNYQMVVKSXKX

SEQ ID NO: 7162 - protein, 41 aa, Artificial Sequence
  GFR-binding peptide
  MOD_RES (6), (7), (38), (40): Xaa is C or S
ASASPXXVSQDLSATSILYYIGKTPKILRKHRMIVKSXKXS

SEQ ID NO: 7163 - protein, 39 aa, Artificial Sequence
  GFR-binding peptide
  MOD_RES (6), (7), (38): Xaa is C or S
ASAAPXXVPQALSATSILYYVGRKPKVLRKHRMIVRSXK

SEQ ID NO: 7164 - protein, 43 aa, Artificial Sequence
  GFR-binding peptide
  MOD_RES (3), (40), (42): Xaa is C or S
  MOD_RES (19), (20), (21), (22), (23): Xaa is A or G
  MOD_RES (24), (25), (26), (27): Xaa is A or G or is absent
VQXRPTQVQLSPISVLYKXXXXXXXXXLKYHYTLEDHLAXKXE

SEQ ID NO: 7165 - protein, 41 aa, Artificial Sequence
  GFR-binding peptide
  MOD_RES (6), (7): Xaa is C or S
  MOD_RES (21), (22), (23), (24), (25): Xaa is A or G
  MOD_RES (26), (27), (28), (29): Xaa is A or G or is absent
KVGKAXXVPTKLSATSVLYYXXXXXXXXXLRKHREGMSVAE

SEQ ID NO: 7166 - protein, 36 aa, Artificial Sequence
  GFR-binding peptide
  MOD_RES (1), (35): Xaa is C or S
  MOD_RES (15), (16), (17), (18), (19): Xaa is A or G
  MOD_RES (20), (21), (22), (23): Xaa is A or G or is absent
XAPTQLSATSVLYYXXXXXXXXXLRKHRNMVVRAXG

SEQ ID NO: 7167 - protein, 41 aa, Artificial Sequence
  GFR-binding peptide
  MOD_RES (4), (38), (40): Xaa is C or S
  MOD_RES (18), (19), (20), (21), (22): Xaa is A or G
  MOD_RES (23), (24), (25), (26): Xaa is A or G or is absent
KPTXAPTKLSATSVLYYXXXXXXXXXLRKHRNMVVRSXGXH

SEQ ID NO: 7168 - protein, 37 aa, Artificial Sequence
  GFR-binding peptide
  MOD_RES (5), (6), (37): Xaa is C or S
SASPXXVSQDLSAISILYLIGKTPKILKNYQMIVKSX

SEQ ID NO: 7169 - protein, 37 aa, Artificial Sequence
  GFR-binding peptide
  MOD_RES (1), (34), (36): Xaa is C or S
  MOD_RES (15), (16), (17), (18), (19): Xaa is A or G
  MOD_RES (20), (21), (22), (23): Xaa is A or G or is absent
XVPQDLSPISILYKXXXXXXXXXLKYHYMVVKSXKXS

SEQ ID NO: 7170 - protein, 37 aa, Artificial Sequence
  GFR-binding peptide
  MOD_RES (2), (3), (36): Xaa is C or S
  MOD_RES (17), (18), (19), (20), (21): Xaa is A or G
  MOD_RES (22), (23), (24), (25): Xaa is A or G or is absent
PXXVPQDLNAISILYFXXXXXXXXXLKKYRMVVKSXK

SEQ ID NO: 7171 - protein, 37 aa, Artificial Sequence
  GFR-binding peptide
  MOD_RES (5), (6), (37): Xaa is C or S
SASPXXVSQDLNAISILYFIGKTPKILKKYRMIVKSX

SEQ ID NO: 7172 - protein, 40 aa, Artificial Sequence
  GFR-binding peptide
  MOD_RES (4), (5), (37), (39): Xaa is C or S
PKAXXVPTELSATSMLYYDENEKVVLRKHRDMVVEGXGXR

SEQ ID NO: 7173 - protein, 41 aa, Artificial Sequence
  GFR-binding peptide
  MOD_RES (6), (7), (41): Xaa is C or S
  MOD_RES (21), (22), (23), (24), (25): Xaa is A or G
  MOD_RES (26), (27), (28), (29): Xaa is A or G or is absent
YVPKPXXAPTKLSAISVLYLXXXXXXXXXLKNYQNMVVRSX

SEQ ID NO: 7174 - protein, 40 aa, Artificial Sequence
  GFR-binding peptide
  MOD_RES (4), (4): Xaa is C or S
  MOD_RES (20), (21), (22), (23), (24): Xaa is A or G
  MOD_RES (25), (26), (27), (28): Xaa is A or G or is absent
NVQXRPTQVQLSATSVLYYXXXXXXXXXLRKHRTLEDHLA

SEQ ID NO: 7175 - protein, 40 aa, Artificial Sequence
  GFR-binding peptide
  MOD_RES (3), (40): Xaa is C or S
VQXRPTQVQLSATSVLYYEIVRKKPIFLRKHRTLEDHLAX

SEQ ID NO: 7176 - protein, 36 aa, Artificial Sequence
  GFR-binding peptide
  MOD_RES (33), (35): Xaa is C or S
  MOD_RES (14), (15), (16), (17), (18): Xaa is A or G
  MOD_RES (19), (20), (21), (22): Xaa is A or G or is absent
VPQALSAISILYLXXXXXXXXXLKNYQMIVRSXKXS

SEQ ID NO: 7177 - protein, 42 aa, Artificial Sequence
  GFR-binding peptide
  MOD_RES (4), (5), (39), (41): Xaa is C or S
  MOD_RES (19), (20), (21), (22), (23): Xaa is A or G
  MOD_RES (24), (25), (26), (27): Xaa is A or G or is absent
PKPXXAPTKLNAISVLYFXXXXXXXXXLKKYRNMVVRSXGXH

SEQ ID NO: 7178 - protein, 35 aa, Artificial Sequence
  GFR-binding peptide
  MOD_RES (1), (2), (33), (35): Xaa is C or S
XXVSQDLSATSILYYIGKTPKILRKHRMIVKSXKX

SEQ ID NO: 7179 - protein, 37 aa, Artificial Sequence
  GFR-binding peptide
  MOD_RES (2), (3), (36): Xaa is C or S
  MOD_RES (17), (18), (19), (20), (21): Xaa is A or G
  MOD_RES (22), (23), (24), (25): Xaa is A or G or is absent
PXXVPQDLSAISILYLXXXXXXXXXLKNYQMVVKSXK

SEQ ID NO: 7180 - protein, 40 aa, Artificial Sequence
  GFR-binding peptide
  MOD_RES (6), (7): Xaa is C or S
  MOD_RES (21), (22), (23), (24), (25): Xaa is A or G
  MOD_RES (26), (27), (28), (29): Xaa is A or G or is absent
YVPKPXXAPTKLSATSVLYYXXXXXXXXXLRKHRNMVVRS

SEQ ID NO: 7181 - protein, 33 aa, Artificial Sequence
  GFR-binding peptide
  MOD_RES (1), (1): Xaa is C or S
  MOD_RES (15), (16), (17), (18), (19): Xaa is A or G
  MOD_RES (20), (21), (22), (23): Xaa is A or G or is absent
XVSQDLSATSILYYXXXXXXXXXLRKHRMIVKS

SEQ ID NO: 7182 - protein, 36 aa, Artificial Sequence
  GFR-binding peptide
  MOD_RES (2), (3), (35): Xaa is C or S
PXXAPTQLSPISVLYKDDSSNVILKYHYNMVVRAXG

SEQ ID NO: 7183 - protein, 35 aa, Artificial Sequence
  GFR-binding peptide
  MOD_RES (32), (34): Xaa is C or S
APTKLSAISVLYLDSSNNVILKNYQNMVVKAXGXH

SEQ ID NO: 7184 - protein, 38 aa, Artificial Sequence
  GFR-binding peptide
  MOD_RES (1), (2), (35), (37): Xaa is C or S
  MOD_RES (16), (17), (18), (19), (20): Xaa is A or G
  MOD_RES (21), (22), (23), (24): Xaa is A or G or is absent
XXVSQDLSPISILYKXXXXXXXXXLKYHYMIVKSXKXS

SEQ ID NO: 7185 - protein, 43 aa, Artificial Sequence
  GFR-binding peptide
  MOD_RES (6), (7), (41), (43): Xaa is C or S
  MOD_RES (21), (22), (23), (24), (25): Xaa is A or G
  MOD_RES (26), (27), (28), (29): Xaa is A or G or is absent
KIPKAXXVPTELNAISMLYFXXXXXXXXXLKKYRDMVVEGXGX

SEQ ID NO: 7186 - protein, 31 aa, Artificial Sequence
  GFR-binding peptide
  MOD_RES (1), (1): Xaa is C or S
XVPQALSATSILYYVGRKPKVLRKHRMIVRS

SEQ ID NO: 7187 - protein, 36 aa, Artificial Sequence
  GFR-binding peptide
  MOD_RES (1), (2), (36): Xaa is C or S
  MOD_RES (16), (17), (18), (19), (20): Xaa is A or G
  MOD_RES (21), (22), (23), (24): Xaa is A or G or is absent
XXAPTQLSAISVLYLXXXXXXXXXLKNYQNMVVRAX

SEQ ID NO: 7188 - protein, 39 aa, Artificial Sequence
  GFR-binding peptide
  MOD_RES (5), (6): Xaa is C or S
  MOD_RES (20), (21), (22), (23), (24): Xaa is A or G
  MOD_RES (25), (26), (27), (28): Xaa is A or G or is absent
VPKAXXAPTKLSATSVLYYXXXXXXXXXLRKHRNMVVKA

SEQ ID NO: 7189 - protein, 34 aa, Artificial Sequence
  GFR-binding peptide
  MOD_RES (2), (3), (34): Xaa is C or S
PXXVPQALSPISILYKVGRKPKVLKYHYMIVRSX

SEQ ID NO: 7190 - protein, 40 aa, Artificial Sequence
  GFR-binding peptide
  MOD_RES (4), (4): Xaa is C or S
  MOD_RES (20), (21), (22), (23), (24): Xaa is A or G
  MOD_RES (25), (26), (27), (28): Xaa is A or G or is absent
NVQXRPTQVQLSAISVLYLXXXXXXXXXLKNYQTLEDHLA

SEQ ID NO: 7191 - protein, 42 aa, Artificial Sequence
  GFR-binding peptide
  MOD_RES (5), (6), (39), (41): Xaa is C or S
  MOD_RES (20), (21), (22), (23), (24): Xaa is A or G
  MOD_RES (25), (26), (27), (28): Xaa is A or G or is absent
SASPXXVPQDLSPISILYKXXXXXXXXXLKYHYMVVKSXKXS

SEQ ID NO: 7192 - protein, 31 aa, Artificial Sequence
  GFR-binding peptide
APTKLSPISVLYKDSSNNVILKYHYNMVVKA

SEQ ID NO: 7193 - protein, 33 aa, Artificial Sequence
  GFR-binding peptide
  MOD_RES (2), (3): Xaa is C or S
AXXAPTKLNAISVLYFDSSNNVILKKYRNMVVK

SEQ ID NO: 7194 - protein, 33 aa, Artificial Sequence
  GFR-binding peptide
PTQVQLSAISVLYLEIVRKKPIFLKNYQTLEDH

SEQ ID NO: 7195 - protein, 37 aa, Artificial Sequence
  GFR-binding peptide
  MOD_RES (1), (2), (34), (36): Xaa is C or S
XXVPTELNAISMLYFDEYDKVVLKKYREMVVEGXGXR

SEQ ID NO: 7196 - protein, 37 aa, Artificial Sequence
  GFR-binding peptide
  MOD_RES (1), (2), (34), (36): Xaa is C or S
XXAPTQLSPISVLYKDDSSNVILKYHYNMVVRAXGXH

SEQ ID NO: 7197 - protein, 36 aa, Artificial Sequence
  GFR-binding peptide
  MOD_RES (1), (2), (36): Xaa is C or S
  MOD_RES (16), (17), (18), (19), (20): Xaa is A or G
  MOD_RES (21), (22), (23), (24): Xaa is A or G or is absent
XXAPTQLNAISVLYFXXXXXXXXXLKKYRNMVVRAX

SEQ ID NO: 7198 - protein, 41 aa, Artificial Sequence
  GFR-binding peptide
  MOD_RES (5), (39), (41): Xaa is C or S
  MOD_RES (19), (20), (21), (22), (23): Xaa is A or G
  MOD_RES (24), (25), (26), (27): Xaa is A or G or is absent
TKPTXAPTKLNAISVLYFXXXXXXXXXLKKYRNMVVRSXGX

SEQ ID NO: 7199 - protein, 37 aa, Artificial Sequence
  GFR-binding peptide
  MOD_RES (1), (35), (37): Xaa is C or S
  MOD_RES (15), (16), (17), (18), (19): Xaa is A or G
  MOD_RES (20), (21), (22), (23): Xaa is A or G or is absent
XAPTQLNAISVLYFXXXXXXXXXLKKYRNMVVRAXGX

SEQ ID NO: 7200 - protein, 37 aa, Artificial Sequence
  GFR-binding peptide
  MOD_RES (3), (4), (35), (37): Xaa is C or S
APXXVPQALNAISILYFVGRKPKVLKKYRMIVRSXKX

SEQ ID NO: 7201 - protein, 37 aa, Artificial Sequence
  GFR-binding peptide
  MOD_RES (1), (35), (37): Xaa is C or S
  MOD_RES (15), (16), (17), (18), (19): Xaa is A or G
  MOD_RES (20), (21), (22), (23): Xaa is A or G or is absent
XAPTQLSATSVLYYXXXXXXXXXLRKHRNMVVRAXGX

SEQ ID NO: 7202 - protein, 34 aa, Artificial Sequence
  GFR-binding peptide
  MOD_RES (14), (15), (16), (17), (18): Xaa is A or G
  MOD_RES (19), (20), (21), (22): Xaa is A or G or is absent
TQVQLSATSVLYYXXXXXXXXXLRKHRTLEDHLA

SEQ ID NO: 7203 - protein, 36 aa, Artificial Sequence
  GFR-binding peptide
  MOD_RES (3), (4), (35): Xaa is C or S
SPXXVPQDLSAISILYLVGRTPKVLKNYQMVVKSXK

SEQ ID NO: 7204 - protein, 42 aa, Artificial Sequence
  GFR-binding peptide
  MOD_RES (5), (6), (40), (42): Xaa is C or S
  MOD_RES (20), (21), (22), (23), (24): Xaa is A or G
  MOD_RES (25), (26), (27), (28): Xaa is A or G or is absent
VPKPXXAPTQLNAISVLYFXXXXXXXXXLKKYRNMVVRAXGX

SEQ ID NO: 7205 - protein, 40 aa, Artificial Sequence
  GFR-binding peptide
  MOD_RES (6), (7), (39): Xaa is C or S
SIPKAXXVPTELSPISMLYKDEYDKVVLKYHYEMVVEGXG

SEQ ID NO: 7206 - protein, 37 aa, Artificial Sequence
  GFR-binding peptide
  MOD_RES (4), (5), (37): Xaa is C or S
PKAXXVPTELSATSMLYYDEYDKVVLRKHREMVVEGX

SEQ ID NO: 7207 - protein, 36 aa, Artificial Sequence
  GFR-binding peptide
  MOD_RES (2), (3), (34), (36): Xaa is C or S
PXXVPQDLSAISILYLVGRTPKVLKNYQMVVKSXKX

SEQ ID NO: 7208 - protein, 36 aa, Artificial Sequence
  GFR-binding peptide
  MOD_RES (1), (2), (36): Xaa is C or S
  MOD_RES (16), (17), (18), (19), (20): Xaa is A or G
  MOD_RES (21), (22), (23), (24): Xaa is A or G or is absent
XXVPTELSPISMLYKXXXXXXXXXLKYHYEMVVEGX

SEQ ID NO: 7209 - protein, 38 aa, Artificial Sequence
  GFR-binding peptide
  MOD_RES (1), (35), (37): Xaa is C or S
  MOD_RES (15), (16), (17), (18), (19): Xaa is A or G
  MOD_RES (20), (21), (22), (23): Xaa is A or G or is absent
XAPTKLSAISVLYLXXXXXXXXXLKNYQNMVVKAXGXH

SEQ ID NO: 7210 - protein, 39 aa, Artificial Sequence
  GFR-binding peptide
  MOD_RES (5), (6): Xaa is C or S
  MOD_RES (20), (21), (22), (23), (24): Xaa is A or G
  MOD_RES (25), (26), (27), (28): Xaa is A or G or is absent
IPKAXXVPTELSAISMLYLXXXXXXXXXLKNYQDMVVEG

SEQ ID NO: 7211 - protein, 34 aa, Artificial Sequence
  GFR-binding peptide
  MOD_RES (14), (15), (16), (17), (18): Xaa is A or G
  MOD_RES (19), (20), (21), (22): Xaa is A or G or is absent
TQVQLSAISVLYLXXXXXXXXXLKNYQTLEDHLA

SEQ ID NO: 7212 - protein, 40 aa, Artificial Sequence
  GFR-binding peptide
  MOD_RES (1), (38), (40): Xaa is C or S
XRPTQVQLSATSVLYYEIVRKKPIFLRKHRTLEDHLAXKX

SEQ ID NO: 7213 - protein, 37 aa, Artificial Sequence
  GFR-binding peptide
  MOD_RES (6), (7): Xaa is C or S
ASAAPXXVPQALSATSILYYVGRKPKVLRKHRMIVRS

SEQ ID NO: 7214 - protein, 36 aa, Artificial Sequence
  GFR-binding peptide
  MOD_RES (1), (33), (35): Xaa is C or S
XVPTELNAISMLYFDENEKVVLKKYRDMVVEGXGXR

SEQ ID NO: 7215 - protein, 32 aa, Artificial Sequence
  GFR-binding peptide
  MOD_RES (14), (15), (16), (17), (18): Xaa is A or G
  MOD_RES (19), (20), (21), (22): Xaa is A or G or is absent
VPQALSAISILYLXXXXXXXXXLKNYQMIVRS

SEQ ID NO: 7216 - protein, 36 aa, Artificial Sequence
  GFR-binding peptide
  MOD_RES (5), (6): Xaa is C or S
SASPXXVPQDLSATSILYYVGRTPKVLRKHRMVVKS

SEQ ID NO: 7217 - protein, 35 aa, Artificial Sequence
  GFR-binding peptide
RPTQVQLSAISVLYLEIVRKKPIFLKNYQTLEDHL

SEQ ID NO: 7218 - protein, 36 aa, Artificial Sequence
  GFR-binding peptide
  MOD_RES (3), (4): Xaa is C or S
KAXXVPTKLSAISVLYLDDMGVPTLKNYQEGMSVAE

SEQ ID NO: 7219 - protein, 41 aa, Artificial Sequence
  GFR-binding peptide
  MOD_RES (4), (5), (38), (40): Xaa is C or S
  MOD_RES (19), (20), (21), (22), (23): Xaa is A or G
  MOD_RES (24), (25), (26), (27): Xaa is A or G or is absent
ASPXXVPQDLSATSILYYXXXXXXXXXLRKHRMVVKSXKXS

SEQ ID NO: 7220 - protein, 41 aa, Artificial Sequence
  GFR-binding peptide
  MOD_RES (3), (4), (38), (40): Xaa is C or S
  MOD_RES (18), (19), (20), (21), (22): Xaa is A or G
  MOD_RES (23), (24), (25), (26): Xaa is A or G or is absent
KAXXVPTELSPISMLYKXXXXXXXXXLKYHYEMVVEGXGXR

SEQ ID NO: 7221 - protein, 34 aa, Artificial Sequence
  GFR-binding peptide
  MOD_RES (1), (2), (34): Xaa is C or S
XXAPTKLSATSVLYYDDSSNVILRKHRNMVVRSX

SEQ ID NO: 7222 - protein, 40 aa, Artificial Sequence
  GFR-binding peptide
  MOD_RES (4), (5), (39): Xaa is C or S
  MOD_RES (19), (20), (21), (22), (23): Xaa is A or G
  MOD_RES (24), (25), (26), (27): Xaa is A or G or is absent
PKAXXVPTELSATSMLYYXXXXXXXXXLRKHRDMVVEGXG

SEQ ID NO: 7223 - protein, 34 aa, Artificial Sequence
  GFR-binding peptide
  MOD_RES (1), (2), (34): Xaa is C or S
XXAPTKLSAISVLYLDSSNNVILKNYQNMVVKAX

SEQ ID NO: 7224 - protein, 37 aa, Artificial Sequence
  GFR-binding peptide
  MOD_RES (3), (4), (37): Xaa is C or S
  MOD_RES (18), (19), (20), (21), (22): Xaa is A or G
  MOD_RES (23), (24), (25), (26): Xaa is A or G or is absent
SPXXVSQDLSPISILYKXXXXXXXXXLKYHYMIVKSX

SEQ ID NO: 7225 - protein, 36 aa, Artificial Sequence
  GFR-binding peptide
  MOD_RES (1), (36): Xaa is C or S
  MOD_RES (15), (16), (17), (18), (19): Xaa is A or G
  MOD_RES (20), (21), (22), (23): Xaa is A or G or is absent
XVPTKLSAISVLYLXXXXXXXXXLKNYQEGMSVAEX

SEQ ID NO: 7226 - protein, 40 aa, Artificial Sequence
  GFR-binding peptide
  MOD_RES (5), (6), (39): Xaa is C or S
  MOD_RES (20), (21), (22), (23), (24): Xaa is A or G
  MOD_RES (25), (26), (27), (28): Xaa is A or G or is absent
SASPXXVSQDLSATSILYYXXXXXXXXXLRKHRMIVKSXK

SEQ ID NO: 7227 - protein, 40 aa, Artificial Sequence
  GFR-binding peptide
  MOD_RES (4), (4): Xaa is C or S
NVQXRPTQVQLNAISVLYFEIVRKKPIFLKKYRTLEDHLA

SEQ ID NO: 7228 - protein, 35 aa, Artificial Sequence
  GFR-binding peptide
  MOD_RES (35), (35): Xaa is C or S
  MOD_RES (14), (15), (16), (17), (18): Xaa is A or G
  MOD_RES (19), (20), (21), (22): Xaa is A or G or is absent
TQVQLSATSVLYYXXXXXXXXXLRKHRTLEDHLAX

SEQ ID NO: 7229 - protein, 39 aa, Artificial Sequence
  GFR-binding peptide
  MOD_RES (5), (6), (38): Xaa is C or S
VPKAXXAPTKLSPISVLYKDSSNNVILKYHYNMVVKAXG

SEQ ID NO: 7230 - protein, 41 aa, Artificial Sequence
  GFR-binding peptide
  MOD_RES (5), (6), (38), (40): Xaa is C or S
VPKPXXAPTKLSATSVLYYDDSSNVILRKHRNMVVRSXGXH

SEQ ID NO: 7231 - protein, 37 aa, Artificial Sequence
  GFR-binding peptide
  MOD_RES (6), (7): Xaa is C or S
SIPKAXXVPTELSPISMLYKDEYDKVVLKYHYEMVVE

SEQ ID NO: 7232 - protein, 34 aa, Artificial Sequence
  GFR-binding peptide
  MOD_RES (2), (34): Xaa is C or S
TXAPTKLSPISVLYKDDSSNVILKYHYNMVVRSX

SEQ ID NO: 7233 - protein, 35 aa, Artificial Sequence
  GFR-binding peptide
  MOD_RES (34), (34): Xaa is C or S
  MOD_RES (14), (15), (16), (17), (18): Xaa is A or G
  MOD_RES (19), (20), (21), (22): Xaa is A or G or is absent
APTKLSPISVLYKXXXXXXXXXLKYHYNMVVRSXG

SEQ ID NO: 7234 - protein, 40 aa, Artificial Sequence
  GFR-binding peptide
  MOD_RES (6), (7), (40): Xaa is C or S
  MOD_RES (21), (22), (23), (24), (25): Xaa is A or G
  MOD_RES (26), (27), (28), (29): Xaa is A or G or is absent
ASAAPXXVPQALNAISILYFXXXXXXXXXLKKYRMIVRSX

SEQ ID NO: 7235 - protein, 42 aa, Artificial Sequence
  GFR-binding peptide
  MOD_RES (6), (7), (41): Xaa is C or S
  MOD_RES (21), (22), (23), (24), (25): Xaa is A or G
  MOD_RES (26), (27), (28), (29): Xaa is A or G or is absent
YVPKPXXAPTKLSATSVLYYXXXXXXXXXLRKHRNMVVRSXG

SEQ ID NO: 7236 - protein, 39 aa, Artificial Sequence
  GFR-binding peptide
  MOD_RES (6), (7): Xaa is C or S
  MOD_RES (21), (22), (23), (24), (25): Xaa is A or G
  MOD_RES (26), (27), (28), (29): Xaa is A or G or is absent
YVPKPXXAPTKLNAISVLYFXXXXXXXXXLKKYRNMVVR

SEQ ID NO: 7237 - protein, 36 aa, Artificial Sequence
  GFR-binding peptide
  MOD_RES (3), (4), (35): Xaa is C or S
SPXXVSQDLSAISILYLIGKTPKILKNYQMIVKSXK

SEQ ID NO: 7238 - protein, 31 aa, Artificial Sequence
  GFR-binding peptide
VPTELSATSMLYYDENEKVVLRKHRDMVVEG

SEQ ID NO: 7239 - protein, 36 aa, Artificial Sequence
  GFR-binding peptide
  MOD_RES (3), (4): Xaa is C or S
  MOD_RES (18), (19), (20), (21), (22): Xaa is A or G
  MOD_RES (23), (24), (25), (26): Xaa is A or G or is absent
SPXXVSQDLNAISILYFXXXXXXXXXLKKYRMIVKS

SEQ ID NO: 7240 - protein, 39 aa, Artificial Sequence
  GFR-binding peptide
  MOD_RES (4), (5), (39): Xaa is C or S
  MOD_RES (19), (20), (21), (22), (23): Xaa is A or G
  MOD_RES (24), (25), (26), (27): Xaa is A or G or is absent
PKAXXVPTELSATSMLYYXXXXXXXXXLRKHREMVVEGX

SEQ ID NO: 7241 - protein, 35 aa, Artificial Sequence
  GFR-binding peptide
  MOD_RES (3), (4): Xaa is C or S
KAXXVPTELSPISMLYKDEYDKVVLKYHYEMVVEG

SEQ ID NO: 7242 - protein, 31 aa, Artificial Sequence
  GFR-binding peptide
VPTELSPISMLYKDEYDKVVLKYHYEMVVEG

SEQ ID NO: 7243 - protein, 35 aa, Artificial Sequence
  GFR-binding peptide
  MOD_RES (1), (1): Xaa is C or S
  MOD_RES (17), (18), (19), (20), (21): Xaa is A or G
  MOD_RES (22), (23), (24), (25): Xaa is A or G or is absent
XRPTQVQLSPISVLYKXXXXXXXXXLKYHYTLEDH

SEQ ID NO: 7244 - protein, 36 aa, Artificial Sequence
  GFR-binding peptide
  MOD_RES (2), (3), (36): Xaa is C or S
  MOD_RES (17), (18), (19), (20), (21): Xaa is A or G
  MOD_RES (22), (23), (24), (25): Xaa is A or G or is absent
PXXVPQALSPISILYKXXXXXXXXXLKYHYMIVRSX

SEQ ID NO: 7245 - protein, 33 aa, Artificial Sequence
  GFR-binding peptide
  MOD_RES (14), (15), (16), (17), (18): Xaa is A or G
  MOD_RES (19), (20), (21), (22): Xaa is A or G or is absent
APTKLSPISVLYKXXXXXXXXXLKYHYNMVVRS

SEQ ID NO: 7246 - protein, 34 aa, Artificial Sequence
  GFR-binding peptide
TQVQLNAISVLYFEIVRKKPIFLKKYRTLEDHLA

SEQ ID NO: 7247 - protein, 40 aa, Artificial Sequence
  GFR-binding peptide
  MOD_RES (5), (37), (39): Xaa is C or S
TKPTXAPTKLSPISVLYKDDSSNVILKYHYNMVVRSXGXH

SEQ ID NO: 7248 - protein, 43 aa, Artificial Sequence
  GFR-binding peptide
  MOD_RES (5), (6), (40), (42): Xaa is C or S
  MOD_RES (20), (21), (22), (23), (24): Xaa is A or G
  MOD_RES (25), (26), (27), (28): Xaa is A or G or is absent
IPKAXXVPTELNAISMLYFXXXXXXXXXLKKYREMVVEGXGXR

SEQ ID NO: 7249 - protein, 34 aa, Artificial Sequence
  GFR-binding peptide
  MOD_RES (1), (1): Xaa is C or S
  MOD_RES (15), (16), (17), (18), (19): Xaa is A or G
  MOD_RES (20), (21), (22), (23): Xaa is A or G or is absent
XVPTELSATSMLYYXXXXXXXXXLRKHRDMVVEG

SEQ ID NO: 7250 - protein, 37 aa, Artificial Sequence
  GFR-binding peptide
  MOD_RES (5), (37): Xaa is C or S
TKPTXAPTKLSPISVLYKDDSSNVILKYHYNMVVRSX

SEQ ID NO: 7251 - protein, 38 aa, Artificial Sequence
  GFR-binding peptide
  MOD_RES (3), (4), (37): Xaa is C or S
  MOD_RES (18), (19), (20), (21), (22): Xaa is A or G
  MOD_RES (23), (24), (25), (26): Xaa is A or G or is absent
SPXXVSQDLSATSILYYXXXXXXXXXLRKHRMIVKSXK

SEQ ID NO: 7252 - protein, 35 aa, Artificial Sequence
  GFR-binding peptide
  MOD_RES (2), (3), (35): Xaa is C or S
AXXAPTKLSAISVLYLDSSNNVILKNYQNMVVKAX

SEQ ID NO: 7253 - protein, 38 aa, Artificial Sequence
  GFR-binding peptide
  MOD_RES (1), (2), (36), (38): Xaa is C or S
  MOD_RES (16), (17), (18), (19), (20): Xaa is A or G
  MOD_RES (21), (22), (23), (24): Xaa is A or G or is absent
XXAPTKLSATSVLYYXXXXXXXXXLRKHRNMVVRSXGX

SEQ ID NO: 7254 - protein, 38 aa, Artificial Sequence
  GFR-binding peptide
  MOD_RES (3), (4), (38): Xaa is C or S
  MOD_RES (18), (19), (20), (21), (22): Xaa is A or G
  MOD_RES (23), (24), (25), (26): Xaa is A or G or is absent
KAXXVPTELSAISMLYLXXXXXXXXXLKNYQDMVVEGX

SEQ ID NO: 7255 - protein, 37 aa, Artificial Sequence
  GFR-binding peptide
  MOD_RES (4), (5): Xaa is C or S
  MOD_RES (19), (20), (21), (22), (23): Xaa is A or G
  MOD_RES (24), (25), (26), (27): Xaa is A or G or is absent
PKAXXVPTELSAISMLYLXXXXXXXXXLKNYQDMVVE

SEQ ID NO: 7256 - protein, 40 aa, Artificial Sequence
  GFR-binding peptide
  MOD_RES (5), (6), (37), (39): Xaa is C or S
SASPXXVPQDLNAISILYFVGRTPKVLKKYRMVVKSXKXS

SEQ ID NO: 7257 - protein, 40 aa, Artificial Sequence
  GFR-binding peptide
  MOD_RES (4), (5), (39): Xaa is C or S
  MOD_RES (19), (20), (21), (22), (23): Xaa is A or G
  MOD_RES (24), (25), (26), (27): Xaa is A or G or is absent
PKPXXAPTQLNAISVLYFXXXXXXXXXLKKYRNMVVRAXG

SEQ ID NO: 7258 - protein, 35 aa, Artificial Sequence
  GFR-binding peptide
  MOD_RES (1), (2): Xaa is C or S
  MOD_RES (16), (17), (18), (19), (20): Xaa is A or G
  MOD_RES (21), (22), (23), (24): Xaa is A or G or is absent
XXVPTELSAISMLYLXXXXXXXXXLKNYQDMVVEG

SEQ ID NO: 7259 - protein, 30 aa, Artificial Sequence
  GFR-binding peptide
VPQDLSAISILYLVGRTPKVLKNYQMVVKS

SEQ ID NO: 7260 - protein, 42 aa, Artificial Sequence
  GFR-binding peptide
  MOD_RES (4), (5), (40), (42): Xaa is C or S
  MOD_RES (19), (20), (21), (22), (23): Xaa is A or G
  MOD_RES (24), (25), (26), (27): Xaa is A or G or is absent
GKAXXVPTKLSATSVLYYXXXXXXXXXLRKHREGMSVAEXGX

SEQ ID NO: 7261 - protein, 32 aa, Artificial Sequence
  GFR-binding peptide
  MOD_RES (14), (15), (16), (17), (18): Xaa is A or G
  MOD_RES (19), (20), (21), (22): Xaa is A or G or is absent
VPTELSPISMLYKXXXXXXXXXLKYHYDMVVE

SEQ ID NO: 7262 - protein, 42 aa, Artificial Sequence
  GFR-binding peptide
  MOD_RES (4), (5), (40), (42): Xaa is C or S
  MOD_RES (19), (20), (21), (22), (23): Xaa is A or G
  MOD_RES (24), (25), (26), (27): Xaa is A or G or is absent
GKAXXVPTKLSAISVLYLXXXXXXXXXLKNYQEGMSVAEXGX

SEQ ID NO: 7263 - protein, 40 aa, Artificial Sequence
  GFR-binding peptide
  MOD_RES (4), (5), (39): Xaa is C or S
  MOD_RES (19), (20), (21), (22), (23): Xaa is A or G
  MOD_RES (24), (25), (26), (27): Xaa is A or G or is absent
PKAXXAPTKLSATSVLYYXXXXXXXXXLRKHRNMVVKAXG

SEQ ID NO: 7264 - protein, 40 aa, Artificial Sequence
  GFR-binding peptide
  MOD_RES (3), (4), (37), (39): Xaa is C or S
KAXXVPTKLSAISVLYLDDMGVPTLKNYQEGMSVAEXGXR

SEQ ID NO: 7265 - protein, 40 aa, Artificial Sequence
  GFR-binding peptide
  MOD_RES (4), (5), (38), (40): Xaa is C or S
GKAXXVPTKLSATSVLYYDDMGVPTLRKHREGMSVAEXGX

SEQ ID NO: 7266 - protein, 37 aa, Artificial Sequence
  GFR-binding peptide
  MOD_RES (3), (4): Xaa is C or S
  MOD_RES (18), (19), (20), (21), (22): Xaa is A or G
  MOD_RES (23), (24), (25), (26): Xaa is A or G or is absent
KAXXVPTELSAISMLYLXXXXXXXXXLKNYQEMVVEG

SEQ ID NO: 7267 - protein, 33 aa, Artificial Sequence
  GFR-binding peptide
  MOD_RES (1), (2): Xaa is C or S
XXVPTELSPISMLYKDENEKVVLKYHYDMVVEG

SEQ ID NO: 7268 - protein, 38 aa, Artificial Sequence
  GFR-binding peptide
  MOD_RES (2), (3), (36), (38): Xaa is C or S
  MOD_RES (17), (18), (19), (20), (21): Xaa is A or G
  MOD_RES (22), (23), (24), (25): Xaa is A or G or is absent
PXXVSQDLSATSILYYXXXXXXXXXLRKHRMIVKSXKX

SEQ ID NO: 7269 - protein, 45 aa, Artificial Sequence
  GFR-binding peptide
  MOD_RES (5), (42), (44): Xaa is C or S
  MOD_RES (21), (22), (23), (24), (25): Xaa is A or G
  MOD_RES (26), (27), (28), (29): Xaa is A or G or is absent
RNVQXRPTQVQLNAISVLYFXXXXXXXXXLKKYRTLEDHLAXKXE

SEQ ID NO: 7270 - protein, 37 aa, Artificial Sequence
  GFR-binding peptide
  MOD_RES (2), (2): Xaa is C or S
QXRPTQVQLNAISVLYFEIVRKKPIFLKKYRTLEDHL

SEQ ID NO: 7271 - protein, 33 aa, Artificial Sequence
  GFR-binding peptide
  MOD_RES (14), (15), (16), (17), (18): Xaa is A or G
  MOD_RES (19), (20), (21), (22): Xaa is A or G or is absent
APTKLSATSVLYYXXXXXXXXXLRKHRNMVVRS

SEQ ID NO: 7272 - protein, 36 aa, Artificial Sequence
  GFR-binding peptide
  MOD_RES (3), (4): Xaa is C or S
  MOD_RES (18), (19), (20), (21), (22): Xaa is A or G
  MOD_RES (23), (24), (25), (26): Xaa is A or G or is absent
KAXXAPTKLSAISVLYLXXXXXXXXXLKNYQNMVVK

SEQ ID NO: 7273 - protein, 40 aa, Artificial Sequence
  GFR-binding peptide
  MOD_RES (4), (38), (40): Xaa is C or S
  MOD_RES (18), (19), (20), (21), (22): Xaa is A or G
  MOD_RES (23), (24), (25), (26): Xaa is A or G or is absent
KPTXAPTKLSATSVLYYXXXXXXXXXLRKHRNMVVRSXGX

SEQ ID NO: 7274 - protein, 38 aa, Artificial Sequence
  GFR-binding peptide
  MOD_RES (6), (7), (38): Xaa is C or S
ASASPXXVPQDLSAISILYLVGRTPKVLKNYQMVVKSX

SEQ ID NO: 7275 - protein, 38 aa, Artificial Sequence
  GFR-binding peptide
  MOD_RES (3), (4), (37): Xaa is C or S
  MOD_RES (18), (19), (20), (21), (22): Xaa is A or G
  MOD_RES (23), (24), (25), (26): Xaa is A or G or is absent
APXXVPQALSPISILYKXXXXXXXXXLKYHYMIVRSXK

SEQ ID NO: 7276 - protein, 38 aa, Artificial Sequence
  GFR-binding peptide
  MOD_RES (36), (38): Xaa is C or S
PTQVQLSAISVLYLEIVRKKPIFLKNYQTLEDHLAXKX

SEQ ID NO: 7277 - protein, 44 aa, Artificial Sequence
  GFR-binding peptide
  MOD_RES (6), (7), (41), (43): Xaa is C or S
  MOD_RES (21), (22), (23), (24), (25): Xaa is A or G
  MOD_RES (26), (27), (28), (29): Xaa is A or G or is absent
AVPKAXXAPTKLSATSVLYYXXXXXXXXXLRKHRNMVVKAXGXH

SEQ ID NO: 7278 - protein, 41 aa, Artificial Sequence
  GFR-binding peptide
  MOD_RES (4), (5), (38), (40): Xaa is C or S
  MOD_RES (19), (20), (21), (22), (23): Xaa is A or G
  MOD_RES (24), (25), (26), (27): Xaa is A or G or is absent
ASPXXVSQDLSPISILYKXXXXXXXXXLKYHYMIVKSXKXS

SEQ ID NO: 7279 - protein, 34 aa, Artificial Sequence
  GFR-binding peptide
  MOD_RES (3), (4): Xaa is C or S
KAXXVPTELNAISMLYFDEYDKVVLKKYREMVVE

SEQ ID NO: 7280 - protein, 36 aa, Artificial Sequence
  GFR-binding peptide
  MOD_RES (1), (33), (35): Xaa is C or S
XAPTQLSPISVLYKDDSSNVILKYHYNMVVRAXGXH

SEQ ID NO: 7281 - protein, 39 aa, Artificial Sequence
  GFR-binding peptide
  MOD_RES (5), (6), (38): Xaa is C or S
IPKAXXVPTELNAISMLYFDEYDKVVLKKYREMVVEGXG

SEQ ID NO: 7282 - protein, 36 aa, Artificial Sequence
  GFR-binding peptide
  MOD_RES (2), (3), (36): Xaa is C or S
AXXVPTKLSAISVLYLDDMGVPTLKNYQEGMSVAEX

SEQ ID NO: 7283 - protein, 37 aa, Artificial Sequence
  GFR-binding peptide
  MOD_RES (1), (35), (37): Xaa is C or S
  MOD_RES (15), (16), (17), (18), (19): Xaa is A or G
  MOD_RES (20), (21), (22), (23): Xaa is A or G or is absent
XVPTELSAISMLYLXXXXXXXXXLKNYQEMVVEGXGX

SEQ ID NO: 7284 - protein, 33 aa, Artificial Sequence
  GFR-binding peptide
  MOD_RES (32), (32): Xaa is C or S
VPTELSPISMLYKDEYDKVVLKYHYEMVVEGXG

SEQ ID NO: 7285 - protein, 38 aa, Artificial Sequence
  GFR-binding peptide
  MOD_RES (3), (4), (36), (38): Xaa is C or S
KAXXVPTELSATSMLYYDEYDKVVLRKHREMVVEGXGX

SEQ ID NO: 7286 - protein, 34 aa, Artificial Sequence
  GFR-binding peptide
  MOD_RES (1), (2), (33): Xaa is C or S
XXVPQDLSATSILYYVGRTPKVLRKHRMVVKSXK

SEQ ID NO: 7287 - protein, 37 aa, Artificial Sequence
  GFR-binding peptide
  MOD_RES (3), (4): Xaa is C or S
  MOD_RES (18), (19), (20), (21), (22): Xaa is A or G
  MOD_RES (23), (24), (25), (26): Xaa is A or G or is absent
KAXXVPTELNAISMLYFXXXXXXXXXLKKYREMVVEG

SEQ ID NO: 7288 - protein, 42 aa, Artificial Sequence
  GFR-binding peptide
  MOD_RES (5), (6), (40), (42): Xaa is C or S
  MOD_RES (20), (21), (22), (23), (24): Xaa is A or G
  MOD_RES (25), (26), (27), (28): Xaa is A or G or is absent
VPKAXXAPTKLNAISVLYFXXXXXXXXXLKKYRNMVVKAXGX

SEQ ID NO: 7289 - protein, 34 aa, Artificial Sequence
  GFR-binding peptide
  MOD_RES (31), (33): Xaa is C or S
VSQDLNAISILYFIGKTPKILKKYRMIVKSXKXS

SEQ ID NO: 7290 - protein, 39 aa, Artificial Sequence
  GFR-binding peptide
  MOD_RES (4), (5), (37), (39): Xaa is C or S
PKAXXAPTKLSPISVLYKDSSNNVILKYHYNMVVKAXGX

SEQ ID NO: 7291 - protein, 37 aa, Artificial Sequence
  GFR-binding peptide
  MOD_RES (6), (7): Xaa is C or S
SIPKAXXVPTELSATSMLYYDEYDKVVLRKHREMVVE

SEQ ID NO: 7292 - protein, 35 aa, Artificial Sequence
  GFR-binding peptide
  MOD_RES (2), (3): Xaa is C or S
  MOD_RES (17), (18), (19), (20), (21): Xaa is A or G
  MOD_RES (22), (23), (24), (25): Xaa is A or G or is absent
PXXVPQDLSPISILYKXXXXXXXXXLKYHYMVVKS

SEQ ID NO: 7293 - protein, 35 aa, Artificial Sequence
  GFR-binding peptide
  MOD_RES (4), (5): Xaa is C or S
PKAXXVPTELNAISMLYFDENEKVVLKKYRDMVVE

SEQ ID NO: 7294 - protein, 35 aa, Artificial Sequence
  GFR-binding peptide
  MOD_RES (33), (35): Xaa is C or S
VPTKLSAISVLYLDDMGVPTLKNYQEGMSVAEXGX

SEQ ID NO: 7295 - protein, 41 aa, Artificial Sequence
  GFR-binding peptide
  MOD_RES (1), (38), (40): Xaa is C or S
XRPTQVQLSPISVLYKEIVRKKPIFLKYHYTLEDHLAXKXE

SEQ ID NO: 7296 - protein, 35 aa, Artificial Sequence
  GFR-binding peptide
  MOD_RES (2), (34): Xaa is C or S
TXAPTKLSPISVLYKDDSSNVILKYHYNMVVRSXG

SEQ ID NO: 7297 - protein, 35 aa, Artificial Sequence
  GFR-binding peptide
  MOD_RES (1), (2): Xaa is C or S
  MOD_RES (16), (17), (18), (19), (20): Xaa is A or G
  MOD_RES (21), (22), (23), (24): Xaa is A or G or is absent
XXVPTELNAISMLYFXXXXXXXXXLKKYRDMVVEG

SEQ ID NO: 7298 - protein, 40 aa, Artificial Sequence
  GFR-binding peptide
  MOD_RES (4), (5), (38), (40): Xaa is C or S
  MOD_RES (19), (20), (21), (22), (23): Xaa is A or G
  MOD_RES (24), (25), (26), (27): Xaa is A or G or is absent
ASPXXVSQDLSPISILYKXXXXXXXXXLKYHYMIVKSXKX

SEQ ID NO: 7299 - protein, 40 aa, Artificial Sequence
  GFR-binding peptide
  MOD_RES (5), (6), (40): Xaa is C or S
  MOD_RES (20), (21), (22), (23), (24): Xaa is A or G
  MOD_RES (25), (26), (27), (28): Xaa is A or G or is absent
IPKAXXVPTELSATSMLYYXXXXXXXXXLRKHRDMVVEGX

SEQ ID NO: 7300 - protein, 38 aa, Artificial Sequence
  GFR-binding peptide
  MOD_RES (1), (2), (35), (37): Xaa is C or S
  MOD_RES (16), (17), (18), (19), (20): Xaa is A or G
  MOD_RES (21), (22), (23), (24): Xaa is A or G or is absent
XXVPQDLSATSILYYXXXXXXXXXLRKHRMVVKSXKXS

SEQ ID NO: 7301 - protein, 38 aa, Artificial Sequence
  GFR-binding peptide
  MOD_RES (2), (3), (36), (38): Xaa is C or S
  MOD_RES (17), (18), (19), (20), (21): Xaa is A or G
  MOD_RES (22), (23), (24), (25): Xaa is A or G or is absent
PXXVPQDLSATSILYYXXXXXXXXXLRKHRMVVKSXKX

SEQ ID NO: 7302 - protein, 41 aa, Artificial Sequence
  GFR-binding peptide
  MOD_RES (5), (6), (39), (41): Xaa is C or S
  MOD_RES (20), (21), (22), (23), (24): Xaa is A or G
  MOD_RES (25), (26), (27), (28): Xaa is A or G or is absent
SAAPXXVPQALNAISILYFXXXXXXXXXLKKYRMIVRSXKX

SEQ ID NO: 7303 - protein, 37 aa, Artificial Sequence
  GFR-binding peptide
  MOD_RES (4), (5): Xaa is C or S
  MOD_RES (19), (20), (21), (22), (23): Xaa is A or G
  MOD_RES (24), (25), (26), (27): Xaa is A or G or is absent
PKPXXAPTKLSAISVLYLXXXXXXXXXLKNYQNMVVR

SEQ ID NO: 7304 - protein, 30 aa, Artificial Sequence
  GFR-binding peptide
VPQDLSPISILYKVGRTPKVLKYHYMVVKS

SEQ ID NO: 7305 - protein, 34 aa, Artificial Sequence
  GFR-binding peptide
  MOD_RES (1), (2): Xaa is C or S
  MOD_RES (16), (17), (18), (19), (20): Xaa is A or G
  MOD_RES (21), (22), (23), (24): Xaa is A or G or is absent
XXVPQDLNAISILYFXXXXXXXXXLKKYRMVVKS

SEQ ID NO: 7306 - protein, 32 aa, Artificial Sequence
  GFR-binding peptide
  MOD_RES (14), (15), (16), (17), (18): Xaa is A or G
  MOD_RES (19), (20), (21), (22): Xaa is A or G or is absent
VSQDLSPISILYKXXXXXXXXXLKYHYMIVKS

SEQ ID NO: 7307 - protein, 33 aa, Artificial Sequence
  GFR-binding peptide
  MOD_RES (1), (1): Xaa is C or S
  MOD_RES (15), (16), (17), (18), (19): Xaa is A or G
  MOD_RES (20), (21), (22), (23): Xaa is A or G or is absent
XVSQDLSPISILYKXXXXXXXXXLKYHYMIVKS

SEQ ID NO: 7308 - protein, 39 aa, Artificial Sequence
  GFR-binding peptide
  MOD_RES (3), (4), (38): Xaa is C or S
  MOD_RES (18), (19), (20), (21), (22): Xaa is A or G
  MOD_RES (23), (24), (25), (26): Xaa is A or G or is absent
KPXXAPTKLSAISVLYLXXXXXXXXXLKNYQNMVVRSXG

SEQ ID NO: 7309 - protein, 36 aa, Artificial Sequence
  GFR-binding peptide
  MOD_RES (2), (3): Xaa is C or S
  MOD_RES (17), (18), (19), (20), (21): Xaa is A or G
  MOD_RES (22), (23), (24), (25): Xaa is A or G or is absent
AXXAPTKLSPISVLYKXXXXXXXXXLKYHYNMVVKA

SEQ ID NO: 7310 - protein, 37 aa, Artificial Sequence
  GFR-binding peptide
  MOD_RES (3), (4), (35), (37): Xaa is C or S
SPXXVPQDLSPISILYKVGRTPKVLKYHYMVVKSXKX

SEQ ID NO: 7311 - protein, 40 aa, Artificial Sequence
  GFR-binding peptide
  MOD_RES (5), (6), (37), (39): Xaa is C or S
SASPXXVSQDLSATSILYYIGKTPKILRKHRMIVKSXKXS

SEQ ID NO: 7312 - protein, 38 aa, Artificial Sequence
  GFR-binding peptide
  MOD_RES (4), (5), (36), (38): Xaa is C or S
AAPXXVPQALSPISILYKVGRKPKVLKYHYMIVRSXKX

SEQ ID NO: 7313 - protein, 40 aa, Artificial Sequence
  GFR-binding peptide
  MOD_RES (4), (5), (37), (39): Xaa is C or S
PKPXXAPTKLSPISVLYKDDSSNVILKYHYNMVVRSXGXH

SEQ ID NO: 7314 - protein, 42 aa, Artificial Sequence
  GFR-binding peptide
  MOD_RES (4), (5), (39), (41): Xaa is C or S
  MOD_RES (19), (20), (21), (22), (23): Xaa is A or G
  MOD_RES (24), (25), (26), (27): Xaa is A or G or is absent
PKAXXAPTKLSPISVLYKXXXXXXXXXLKYHYNMVVKAXGXH

SEQ ID NO: 7315 - protein, 39 aa, Artificial Sequence
  GFR-binding peptide
  MOD_RES (5), (39): Xaa is C or S
  MOD_RES (19), (20), (21), (22), (23): Xaa is A or G
  MOD_RES (24), (25), (26), (27): Xaa is A or G or is absent
TKPTXAPTKLNAISVLYFXXXXXXXXXLKKYRNMVVRSX

SEQ ID NO: 7316 - protein, 35 aa, Artificial Sequence
  GFR-binding peptide
  MOD_RES (34), (34): Xaa is C or S
  MOD_RES (14), (15), (16), (17), (18): Xaa is A or G
  MOD_RES (19), (20), (21), (22): Xaa is A or G or is absent
VPTELSPISMLYKXXXXXXXXXLKYHYDMVVEGXG

SEQ ID NO: 7317 - protein, 43 aa, Artificial Sequence
  GFR-binding peptide
  MOD_RES (5), (6), (41), (43): Xaa is C or S
  MOD_RES (20), (21), (22), (23), (24): Xaa is A or G
  MOD_RES (25), (26), (27), (28): Xaa is A or G or is absent
VGKAXXVPTKLSPISVLYKXXXXXXXXXLKYHYEGMSVAEXGX

SEQ ID NO: 7318 - protein, 39 aa, Artificial Sequence
  GFR-binding peptide
  MOD_RES (5), (39): Xaa is C or S
  MOD_RES (19), (20), (21), (22), (23): Xaa is A or G
  MOD_RES (24), (25), (26), (27): Xaa is A or G or is absent
TKPTXAPTKLSPISVLYKXXXXXXXXXLKYHYNMVVRSX

SEQ ID NO: 7319 - protein, 34 aa, Artificial Sequence
  GFR-binding peptide
  MOD_RES (3), (3): Xaa is C or S
PTXAPTKLSAISVLYLDDSSNVILKNYQNMVVRS

SEQ ID NO: 7320 - protein, 40 aa, Artificial Sequence
  GFR-binding peptide
  MOD_RES (1), (38), (40): Xaa is C or S
XRPTQVQLSAISVLYLEIVRKKPIFLKNYQTLEDHLAXKX

SEQ ID NO: 7321 - protein, 34 aa, Artificial Sequence
  GFR-binding peptide
  MOD_RES (1), (1): Xaa is C or S
  MOD_RES (15), (16), (17), (18), (19): Xaa is A or G
  MOD_RES (20), (21), (22), (23): Xaa is A or G or is absent
XVPTELNAISMLYFXXXXXXXXXLKKYRDMVVEG

SEQ ID NO: 7322 - protein, 37 aa, Artificial Sequence
  GFR-binding peptide
  MOD_RES (2), (3), (34), (36): Xaa is C or S
PXXVSQDLNAISILYFIGKTPKILKKYRMIVKSXKXS

SEQ ID NO: 7323 - protein, 37 aa, Artificial Sequence
  GFR-binding peptide
  MOD_RES (1), (2), (35), (37): Xaa is C or S
  MOD_RES (16), (17), (18), (19), (20): Xaa is A or G
  MOD_RES (21), (22), (23), (24): Xaa is A or G or is absent
XXVPQALSAISILYLXXXXXXXXXLKNYQMIVRSXKX

SEQ ID NO: 7324 - protein, 34 aa, Artificial Sequence
  GFR-binding peptide
  MOD_RES (1), (33): Xaa is C or S
XAPTQLSAISVLYLDDSSNVILKNYQNMVVRAXG

SEQ ID NO: 7325 - protein, 37 aa, Artificial Sequence
  GFR-binding peptide
  MOD_RES (3), (37): Xaa is C or S
  MOD_RES (17), (18), (19), (20), (21): Xaa is A or G
  MOD_RES (22), (23), (24), (25): Xaa is A or G or is absent
PTXAPTKLNAISVLYFXXXXXXXXXLKKYRNMVVRSX

SEQ ID NO: 7326 - protein, 38 aa, Artificial Sequence
  GFR-binding peptide
  MOD_RES (4), (4): Xaa is C or S
NVQXRPTQVQLNAISVLYFEIVRKKPIFLKKYRTLEDH

SEQ ID NO: 7327 - protein, 41 aa, Artificial Sequence
  GFR-binding peptide
  MOD_RES (4), (5), (38), (40): Xaa is C or S
  MOD_RES (19), (20), (21), (22), (23): Xaa is A or G
  MOD_RES (24), (25), (26), (27): Xaa is A or G or is absent
ASPXXVPQDLNAISILYFXXXXXXXXXLKKYRMVVKSXKXS

SEQ ID NO: 7328 - protein, 40 aa, Artificial Sequence
  GFR-binding peptide
  MOD_RES (6), (7), (39): Xaa is C or S
AVPKAXXAPTKLNAISVLYFDSSNNVILKKYRNMVVKAXG

SEQ ID NO: 7329 - protein, 34 aa, Artificial Sequence
  GFR-binding peptide
  MOD_RES (2), (3), (34): Xaa is C or S
PXXVSQDLSAISILYLIGKTPKILKNYQMIVKSX

SEQ ID NO: 7330 - protein, 35 aa, Artificial Sequence
  GFR-binding peptide
  MOD_RES (35), (35): Xaa is C or S
TQVQLNAISVLYFEIVRKKPIFLKKYRTLEDHLAX

SEQ ID NO: 7331 - protein, 32 aa, Artificial Sequence
  GFR-binding peptide
  MOD_RES (32), (32): Xaa is C or S
APTQLSPISVLYKDDSSNVILKYHYNMVVRAX

SEQ ID NO: 7332 - protein, 36 aa, Artificial Sequence
  GFR-binding peptide
  MOD_RES (2), (3), (34), (36): Xaa is C or S
PXXVSQDLNAISILYFIGKTPKILKKYRMIVKSXKX

SEQ ID NO: 7333 - protein, 38 aa, Artificial Sequence
  GFR-binding peptide
  MOD_RES (3), (4), (35), (37): Xaa is C or S
SPXXVSQDLSAISILYLIGKTPKILKNYQMIVKSXKXS

SEQ ID NO: 7334 - protein, 38 aa, Artificial Sequence
  GFR-binding peptide
  MOD_RES (4), (5): Xaa is C or S
  MOD_RES (19), (20), (21), (22), (23): Xaa is A or G
  MOD_RES (24), (25), (26), (27): Xaa is A or G or is absent
PKAXXAPTKLSAISVLYLXXXXXXXXXLKNYQNMVVKA

SEQ ID NO: 7335 - protein, 36 aa, Artificial Sequence
  GFR-binding peptide
  MOD_RES (4), (5): Xaa is C or S
PKAXXAPTKLSAISVLYLDSSNNVILKNYQNMVVKA

SEQ ID NO: 7336 - protein, 38 aa, Artificial Sequence
  GFR-binding peptide
  MOD_RES (4), (5): Xaa is C or S
  MOD_RES (19), (20), (21), (22), (23): Xaa is A or G
  MOD_RES (24), (25), (26), (27): Xaa is A or G or is absent
PKAXXAPTKLNAISVLYFXXXXXXXXXLKKYRNMVVKA

SEQ ID NO: 7337 - protein, 39 aa, Artificial Sequence
  GFR-binding peptide
  MOD_RES (3), (3): Xaa is C or S
VQXRPTQVQLNAISVLYFEIVRKKPIFLKKYRTLEDHLA

SEQ ID NO: 7338 - protein, 35 aa, Artificial Sequence
  GFR-binding peptide
  MOD_RES (1), (2), (35): Xaa is C or S
  MOD_RES (16), (17), (18), (19), (20): Xaa is A or G
  MOD_RES (21), (22), (23), (24): Xaa is A or G or is absent
XXVPQDLSPISILYKXXXXXXXXXLKYHYMVVKSX

SEQ ID NO: 7339 - protein, 36 aa, Artificial Sequence
  GFR-binding peptide
  MOD_RES (1), (34), (36): Xaa is C or S
  MOD_RES (15), (16), (17), (18), (19): Xaa is A or G
  MOD_RES (20), (21), (22), (23): Xaa is A or G or is absent
XVPQDLSPISILYKXXXXXXXXXLKYHYMVVKSXKX

SEQ ID NO: 7340 - protein, 34 aa, Artificial Sequence
  GFR-binding peptide
  MOD_RES (1), (34): Xaa is C or S
  MOD_RES (15), (16), (17), (18), (19): Xaa is A or G
  MOD_RES (20), (21), (22), (23): Xaa is A or G or is absent
XVPQALSPISILYKXXXXXXXXXLKYHYMIVRSX

SEQ ID NO: 7341 - protein, 36 aa, Artificial Sequence
  GFR-binding peptide
  MOD_RES (4), (5): Xaa is C or S
PKPXXAPTQLSAISVLYLDDSSNVILKNYQNMVVRA

SEQ ID NO: 7342 - protein, 35 aa, Artificial Sequence
  GFR-binding peptide
  MOD_RES (2), (3), (34): Xaa is C or S
PXXVPQALSATSILYYVGRKPKVLRKHRMIVRSXK

SEQ ID NO: 7343 - protein, 37 aa, Artificial Sequence
  GFR-binding peptide
  MOD_RES (2), (3), (36): Xaa is C or S
AXXVPTKLSAISVLYLDDMGVPTLKNYQEGMSVAEXG

SEQ ID NO: 7344 - protein, 41 aa, Artificial Sequence
  GFR-binding peptide
  MOD_RES (5), (39), (41): Xaa is C or S
  MOD_RES (19), (20), (21), (22), (23): Xaa is A or G
  MOD_RES (24), (25), (26), (27): Xaa is A or G or is absent
TKPTXAPTKLSATSVLYYXXXXXXXXXLRKHRNMVVRSXGX

SEQ ID NO: 7345 - protein, 39 aa, Artificial Sequence
  GFR-binding peptide
  MOD_RES (36), (38): Xaa is C or S
PTQVQLNAISVLYFEIVRKKPIFLKKYRTLEDHLAXKXE

SEQ ID NO: 7346 - protein, 38 aa, Artificial Sequence
  GFR-binding peptide
  MOD_RES (1), (35), (37): Xaa is C or S
  MOD_RES (15), (16), (17), (18), (19): Xaa is A or G
  MOD_RES (20), (21), (22), (23): Xaa is A or G or is absent
XAPTKLSATSVLYYXXXXXXXXXLRKHRNMVVKAXGXH

SEQ ID NO: 7347 - protein, 38 aa, Artificial Sequence
  GFR-binding peptide
  MOD_RES (3), (4), (36), (38): Xaa is C or S
KAXXAPTKLNAISVLYFDSSNNVILKKYRNMVVKAXGX

SEQ ID NO: 7348 - protein, 37 aa, Artificial Sequence
  GFR-binding peptide
  MOD_RES (1), (2), (36): Xaa is C or S
  MOD_RES (16), (17), (18), (19), (20): Xaa is A or G
  MOD_RES (21), (22), (23), (24): Xaa is A or G or is absent
XXAPTKLSATSVLYYXXXXXXXXXLRKHRNMVVRSXG

SEQ ID NO: 7349 - protein, 35 aa, Artificial Sequence
  GFR-binding peptide
  MOD_RES (1), (35): Xaa is C or S
  MOD_RES (15), (16), (17), (18), (19): Xaa is A or G
  MOD_RES (20), (21), (22), (23): Xaa is A or G or is absent
XVPTELSATSMLYYXXXXXXXXXLRKHRDMVVEGX

SEQ ID NO: 7350 - protein, 34 aa, Artificial Sequence
  GFR-binding peptide
  MOD_RES (1), (2), (33): Xaa is C or S
XXVPQALSAISILYLVGRKPKVLKNYQMIVRSXK

SEQ ID NO: 7351 - protein, 39 aa, Artificial Sequence
  GFR-binding peptide
  MOD_RES (4), (5), (39): Xaa is C or S
  MOD_RES (19), (20), (21), (22), (23): Xaa is A or G
  MOD_RES (24), (25), (26), (27): Xaa is A or G or is absent
PKAXXVPTELSAISMLYLXXXXXXXXXLKNYQEMVVEGX

SEQ ID NO: 7352 - protein, 34 aa, Artificial Sequence
  GFR-binding peptide
  MOD_RES (33), (33): Xaa is C or S
  MOD_RES (14), (15), (16), (17), (18): Xaa is A or G
  MOD_RES (19), (20), (21), (22): Xaa is A or G or is absent
VPQALNAISILYFXXXXXXXXXLKKYRMIVRSXK

SEQ ID NO: 7353 - protein, 40 aa, Artificial Sequence
  GFR-binding peptide
  MOD_RES (2), (3), (37), (39): Xaa is C or S
  MOD_RES (17), (18), (19), (20), (21): Xaa is A or G
  MOD_RES (22), (23), (24), (25): Xaa is A or G or is absent
AXXVPTELNAISMLYFXXXXXXXXXLKKYRDMVVEGXGXR

SEQ ID NO: 7354 - protein, 34 aa, Artificial Sequence
  GFR-binding peptide
  MOD_RES (2), (3): Xaa is C or S
PXXAPTKLSAISVLYLDDSSNVILKNYQNMVVRS

SEQ ID NO: 7355 - protein, 37 aa, Artificial Sequence
  GFR-binding peptide
  MOD_RES (1), (34), (36): Xaa is C or S
XVPTKLNAISVLYFDDMGVPTLKKYREGMSVAEXGXR

SEQ ID NO: 7356 - protein, 33 aa, Artificial Sequence
  GFR-binding peptide
  MOD_RES (32), (32): Xaa is C or S
APTKLSPISVLYKDSSNNVILKYHYNMVVKAXG

SEQ ID NO: 7357 - protein, 39 aa, Artificial Sequence
  GFR-binding peptide
  MOD_RES (6), (7), (39): Xaa is C or S
SIPKAXXVPTELSATSMLYYDEYDKVVLRKHREMVVEGX

SEQ ID NO: 7358 - protein, 41 aa, Artificial Sequence
  GFR-binding peptide
  MOD_RES (5), (6), (39), (41): Xaa is C or S
VGKAXXVPTKLSAISVLYLDDMGVPTLKNYQEGMSVAEXGX

SEQ ID NO: 7359 - protein, 39 aa, Artificial Sequence
  GFR-binding peptide
  MOD_RES (6), (7), (38): Xaa is C or S
ASAAPXXVPQALNAISILYFVGRKPKVLKKYRMIVRSXK

SEQ ID NO: 7360 - protein, 35 aa, Artificial Sequence
  GFR-binding peptide
  MOD_RES (3), (4): Xaa is C or S
KPXXAPTQLSPISVLYKDDSSNVILKYHYNMVVRA

SEQ ID NO: 7361 - protein, 33 aa, Artificial Sequence
  GFR-binding peptide
  MOD_RES (14), (15), (16), (17), (18): Xaa is A or G
  MOD_RES (19), (20), (21), (22): Xaa is A or G or is absent
APTKLSPISVLYKXXXXXXXXXLKYHYNMVVKA

SEQ ID NO: 7362 - protein, 39 aa, Artificial Sequence
  GFR-binding peptide
  MOD_RES (3), (4), (36), (38): Xaa is C or S
KAXXVPTELSATSMLYYDEYDKVVLRKHREMVVEGXGXR

SEQ ID NO: 7363 - protein, 39 aa, Artificial Sequence
  GFR-binding peptide
  MOD_RES (2), (3), (37), (39): Xaa is C or S
  MOD_RES (17), (18), (19), (20), (21): Xaa is A or G
  MOD_RES (22), (23), (24), (25): Xaa is A or G or is absent
AXXVPTELSAISMLYLXXXXXXXXXLKNYQEMVVEGXGX

SEQ ID NO: 7364 - protein, 33 aa, Artificial Sequence
  GFR-binding peptide
  MOD_RES (1), (33): Xaa is C or S
XVPTELSPISMLYKDENEKVVLKYHYDMVVEGX

SEQ ID NO: 7365 - protein, 35 aa, Artificial Sequence
  GFR-binding peptide
  MOD_RES (32), (34): Xaa is C or S
VPTELNAISMLYFDEYDKVVLKKYREMVVEGXGXR

SEQ ID NO: 7366 - protein, 36 aa, Artificial Sequence
  GFR-binding peptide
  MOD_RES (5), (6): Xaa is C or S
SASPXXVSQDLNAISILYFIGKTPKILKKYRMIVKS

SEQ ID NO: 7367 - protein, 32 aa, Artificial Sequence
  GFR-binding peptide
  MOD_RES (14), (15), (16), (17), (18): Xaa is A or G
  MOD_RES (19), (20), (21), (22): Xaa is A or G or is absent
VSQDLSATSILYYXXXXXXXXXLRKHRMIVKS

SEQ ID NO: 7368 - protein, 42 aa, Artificial Sequence
  GFR-binding peptide
  MOD_RES (5), (39), (41): Xaa is C or S
  MOD_RES (19), (20), (21), (22), (23): Xaa is A or G
  MOD_RES (24), (25), (26), (27): Xaa is A or G or is absent
TKPTXAPTKLNAISVLYFXXXXXXXXXLKKYRNMVVRSXGXH

SEQ ID NO: 7369 - protein, 35 aa, Artificial Sequence
  GFR-binding peptide
  MOD_RES (3), (35): Xaa is C or S
PTXAPTKLSATSVLYYDDSSNVILRKHRNMVVRSX

SEQ ID NO: 7370 - protein, 37 aa, Artificial Sequence
  GFR-binding peptide
  MOD_RES (4), (5): Xaa is C or S
  MOD_RES (19), (20), (21), (22), (23): Xaa is A or G
  MOD_RES (24), (25), (26), (27): Xaa is A or G or is absent
PKAXXAPTKLSAISVLYLXXXXXXXXXLKNYQNMVVK

SEQ ID NO: 7371 - protein, 34 aa, Artificial Sequence
  GFR-binding peptide
  MOD_RES (2), (2): Xaa is C or S
  MOD_RES (16), (17), (18), (19), (20): Xaa is A or G
  MOD_RES (21), (22), (23), (24): Xaa is A or G or is absent
TXAPTKLSATSVLYYXXXXXXXXXLRKHRNMVVR

SEQ ID NO: 7372 - protein, 35 aa, Artificial Sequence
  GFR-binding peptide
  MOD_RES (1), (2), (34): Xaa is C or S
XXAPTKLSATSVLYYDDSSNVILRKHRNMVVRSXG

SEQ ID NO: 7373 - protein, 30 aa, Artificial Sequence
  GFR-binding peptide
VSQDLNAISILYFIGKTPKILKKYRMIVKS

SEQ ID NO: 7374 - protein, 38 aa, Artificial Sequence
  GFR-binding peptide
  MOD_RES (1), (35), (37): Xaa is C or S
  MOD_RES (15), (16), (17), (18), (19): Xaa is A or G
  MOD_RES (20), (21), (22), (23): Xaa is A or G or is absent
XAPTKLSPISVLYKXXXXXXXXXLKYHYNMVVRSXGXH

SEQ ID NO: 7375 - protein, 38 aa, Artificial Sequence
  GFR-binding peptide
  MOD_RES (3), (4), (35), (37): Xaa is C or S
SPXXVSQDLNAISILYFIGKTPKILKKYRMIVKSXKXS

SEQ ID NO: 7376 - protein, 43 aa, Artificial Sequence
  GFR-binding peptide
  MOD_RES (5), (42): Xaa is C or S
  MOD_RES (21), (22), (23), (24), (25): Xaa is A or G
  MOD_RES (26), (27), (28), (29): Xaa is A or G or is absent
RNVQXRPTQVQLSAISVLYLXXXXXXXXXLKNYQTLEDHLAXK

SEQ ID NO: 7377 - protein, 36 aa, Artificial Sequence
  GFR-binding peptide
  MOD_RES (1), (2), (35): Xaa is C or S
  MOD_RES (16), (17), (18), (19), (20): Xaa is A or G
  MOD_RES (21), (22), (23), (24): Xaa is A or G or is absent
XXVPQALSAISILYLXXXXXXXXXLKNYQMIVRSXK

SEQ ID NO: 7378 - protein, 40 aa, Artificial Sequence
  GFR-binding peptide
  MOD_RES (4), (5), (39): Xaa is C or S
  MOD_RES (19), (20), (21), (22), (23): Xaa is A or G
  MOD_RES (24), (25), (26), (27): Xaa is A or G or is absent
PKAXXVPTELNAISMLYFXXXXXXXXXLKKYRDMVVEGXG

SEQ ID NO: 7379 - protein, 32 aa, Artificial Sequence
  GFR-binding peptide
  MOD_RES (32), (32): Xaa is C or S
APTKLSATSVLYYDDSSNVILRKHRNMVVRSX

SEQ ID NO: 7380 - protein, 44 aa, Artificial Sequence
  GFR-binding peptide
  MOD_RES (5), (42), (44): Xaa is C or S
RNVQXRPTQVQLSATSVLYYEIVRKKPIFLRKHRTLEDHLAXKX

SEQ ID NO: 7381 - protein, 37 aa, Artificial Sequence
  GFR-binding peptide
  MOD_RES (1), (2), (36): Xaa is C or S
  MOD_RES (16), (17), (18), (19), (20): Xaa is A or G
  MOD_RES (21), (22), (23), (24): Xaa is A or G or is absent
XXVPTELSPISMLYKXXXXXXXXXLKYHYDMVVEGXG

SEQ ID NO: 7382 - protein, 42 aa, Artificial Sequence
  GFR-binding peptide
  MOD_RES (6), (7), (42): Xaa is C or S
  MOD_RES (21), (22), (23), (24), (25): Xaa is A or G
  MOD_RES (26), (27), (28), (29): Xaa is A or G or is absent
KVGKAXXVPTKLSPISVLYKXXXXXXXXXLKYHYEGMSVAEX

SEQ ID NO: 7383 - protein, 37 aa, Artificial Sequence
  GFR-binding peptide
  MOD_RES (3), (4): Xaa is C or S
  MOD_RES (18), (19), (20), (21), (22): Xaa is A or G
  MOD_RES (23), (24), (25), (26): Xaa is A or G or is absent
KAXXAPTKLNAISVLYFXXXXXXXXXLKKYRNMVVKA

SEQ ID NO: 7384 - protein, 38 aa, Artificial Sequence
  GFR-binding peptide
  MOD_RES (6), (7): Xaa is C or S
TVPKPXXAPTQLSATSVLYYDDSSNVILRKHRNMVVRA

SEQ ID NO: 7385 - protein, 36 aa, Artificial Sequence
  GFR-binding peptide
  MOD_RES (2), (2): Xaa is C or S
  MOD_RES (18), (19), (20), (21), (22): Xaa is A or G
  MOD_RES (23), (24), (25), (26): Xaa is A or G or is absent
QXRPTQVQLSAISVLYLXXXXXXXXXLKNYQTLEDH

SEQ ID NO: 7386 - protein, 34 aa, Artificial Sequence
  GFR-binding peptide
  MOD_RES (1), (2), (34): Xaa is C or S
XXAPTQLSPISVLYKDDSSNVILKYHYNMVVRAX

SEQ ID NO: 7387 - protein, 39 aa, Artificial Sequence
  GFR-binding peptide
  MOD_RES (3), (4), (36), (38): Xaa is C or S
KPXXAPTQLSATSVLYYDDSSNVILRKHRNMVVRAXGXH

SEQ ID NO: 7388 - protein, 38 aa, Artificial Sequence
  GFR-binding peptide
  MOD_RES (1), (2), (36), (38): Xaa is C or S
  MOD_RES (16), (17), (18), (19), (20): Xaa is A or G
  MOD_RES (21), (22), (23), (24): Xaa is A or G or is absent
XXVPTELSATSMLYYXXXXXXXXXLRKHRDMVVEGXGX

SEQ ID NO: 7389 - protein, 42 aa, Artificial Sequence
  GFR-binding peptide
  MOD_RES (3), (40), (42): Xaa is C or S
  MOD_RES (19), (20), (21), (22), (23): Xaa is A or G
  MOD_RES (24), (25), (26), (27): Xaa is A or G or is absent
VQXRPTQVQLSPISVLYKXXXXXXXXXLKYHYTLEDHLAXKX

SEQ ID NO: 7390 - protein, 36 aa, Artificial Sequence
  GFR-binding peptide
  MOD_RES (1), (34), (36): Xaa is C or S
  MOD_RES (15), (16), (17), (18), (19): Xaa is A or G
  MOD_RES (20), (21), (22), (23): Xaa is A or G or is absent
XVSQDLNAISILYFXXXXXXXXXLKKYRMIVKSXKX

SEQ ID NO: 7391 - protein, 39 aa, Artificial Sequence
  GFR-binding peptide
  MOD_RES (5), (6), (38): Xaa is C or S
VPKAXXAPTKLSAISVLYLDSSNNVILKNYQNMVVKAXG

SEQ ID NO: 7392 - protein, 40 aa, Artificial Sequence
  GFR-binding peptide
  MOD_RES (3), (4), (38), (40): Xaa is C or S
  MOD_RES (18), (19), (20), (21), (22): Xaa is A or G
  MOD_RES (23), (24), (25), (26): Xaa is A or G or is absent
KAXXVPTELSPISMLYKXXXXXXXXXLKYHYEMVVEGXGX

SEQ ID NO: 7393 - protein, 40 aa, Artificial Sequence
  GFR-binding peptide
  MOD_RES (6), (7), (38), (40): Xaa is C or S
ASASPXXVSQDLSPISILYKIGKTPKILKYHYMIVKSXKX

SEQ ID NO: 7394 - protein, 41 aa, Artificial Sequence
  GFR-binding peptide
  MOD_RES (5), (6), (39), (41): Xaa is C or S
VGKAXXVPTKLNAISVLYFDDMGVPTLKKYREGMSVAEXGX

SEQ ID NO: 7395 - protein, 40 aa, Artificial Sequence
  GFR-binding peptide
  MOD_RES (4), (4): Xaa is C or S
  MOD_RES (20), (21), (22), (23), (24): Xaa is A or G
  MOD_RES (25), (26), (27), (28): Xaa is A or G or is absent
NVQXRPTQVQLNAISVLYFXXXXXXXXXLKKYRTLEDHLA

SEQ ID NO: 7396 - protein, 42 aa, Artificial Sequence
  GFR-binding peptide
  MOD_RES (6), (7), (40), (42): Xaa is C or S
  MOD_RES (21), (22), (23), (24), (25): Xaa is A or G
  MOD_RES (26), (27), (28), (29): Xaa is A or G or is absent
ASASPXXVPQDLSATSILYYXXXXXXXXXLRKHRMVVKSXKX

SEQ ID NO: 7397 - protein, 38 aa, Artificial Sequence
  GFR-binding peptide
  MOD_RES (3), (35), (37): Xaa is C or S
PTXAPTKLSAISVLYLDDSSNVILKNYQNMVVRSXGXH

SEQ ID NO: 7398 - protein, 36 aa, Artificial Sequence
  GFR-binding peptide
  MOD_RES (1), (2), (34), (36): Xaa is C or S
XXAPTKLSPISVLYKDSSNNVILKYHYNMVVKAXGX

SEQ ID NO: 7399 - protein, 34 aa, Artificial Sequence
  GFR-binding peptide
PTQVQLSPISVLYKEIVRKKPIFLKYHYTLEDHL

SEQ ID NO: 7400 - protein, 38 aa, Artificial Sequence
  GFR-binding peptide
  MOD_RES (2), (3), (36), (38): Xaa is C or S
AXXVPTKLSATSVLYYDDMGVPTLRKHREGMSVAEXGX

SEQ ID NO: 7401 - protein, 42 aa, Artificial Sequence
  GFR-binding peptide
  MOD_RES (6), (7), (40), (42): Xaa is C or S
  MOD_RES (21), (22), (23), (24), (25): Xaa is A or G
  MOD_RES (26), (27), (28), (29): Xaa is A or G or is absent
ASASPXXVPQDLSAISILYLXXXXXXXXXLKNYQMVVKSXKX

SEQ ID NO: 7402 - protein, 43 aa, Artificial Sequence
  GFR-binding peptide
  MOD_RES (5), (42): Xaa is C or S
  MOD_RES (21), (22), (23), (24), (25): Xaa is A or G
  MOD_RES (26), (27), (28), (29): Xaa is A or G or is absent
RNVQXRPTQVQLSATSVLYYXXXXXXXXXLRKHRTLEDHLAXK

SEQ ID NO: 7403 - protein, 35 aa, Artificial Sequence
  GFR-binding peptide
  MOD_RES (33), (35): Xaa is C or S
  MOD_RES (14), (15), (16), (17), (18): Xaa is A or G
  MOD_RES (19), (20), (21), (22): Xaa is A or G or is absent
VPQALSATSILYYXXXXXXXXXLRKHRMIVRSXKX

SEQ ID NO: 7404 - protein, 39 aa, Artificial Sequence
  GFR-binding peptide
  MOD_RES (3), (4), (38): Xaa is C or S
  MOD_RES (18), (19), (20), (21), (22): Xaa is A or G
  MOD_RES (23), (24), (25), (26): Xaa is A or G or is absent
KPXXAPTKLSATSVLYYXXXXXXXXXLRKHRNMVVRSXG

SEQ ID NO: 7405 - protein, 39 aa, Artificial Sequence
  GFR-binding peptide
  MOD_RES (1), (2), (36), (38): Xaa is C or S
  MOD_RES (16), (17), (18), (19), (20): Xaa is A or G
  MOD_RES (21), (22), (23), (24): Xaa is A or G or is absent
XXVPTELSATSMLYYXXXXXXXXXLRKHRDMVVEGXGXR

SEQ ID NO: 7406 - protein, 37 aa, Artificial Sequence
  GFR-binding peptide
  MOD_RES (1), (35), (37): Xaa is C or S
  MOD_RES (15), (16), (17), (18), (19): Xaa is A or G
  MOD_RES (20), (21), (22), (23): Xaa is A or G or is absent
XVPTELSPISMLYKXXXXXXXXXLKYHYEMVVEGXGX

SEQ ID NO: 7407 - protein, 38 aa, Artificial Sequence
  GFR-binding peptide
  MOD_RES (4), (5), (38): Xaa is C or S
GKAXXVPTKLNAISVLYFDDMGVPTLKKYREGMSVAEX

SEQ ID NO: 7408 - protein, 39 aa, Artificial Sequence
  GFR-binding peptide
  MOD_RES (5), (6), (37), (39): Xaa is C or S
SAAPXXVPQALNAISILYFVGRKPKVLKKYRMIVRSXKX

SEQ ID NO: 7409 - protein, 36 aa, Artificial Sequence
  GFR-binding peptide
  MOD_RES (5), (6): Xaa is C or S
VPKPXXAPTKLSPISVLYKDDSSNVILKYHYNMVVR

SEQ ID NO: 7410 - protein, 35 aa, Artificial Sequence
  GFR-binding peptide
  MOD_RES (4), (5): Xaa is C or S
PKAXXVPTELSATSMLYYDENEKVVLRKHRDMVVE

SEQ ID NO: 7411 - protein, 40 aa, Artificial Sequence
  GFR-binding peptide
  MOD_RES (2), (3), (37), (39): Xaa is C or S
  MOD_RES (17), (18), (19), (20), (21): Xaa is A or G
  MOD_RES (22), (23), (24), (25): Xaa is A or G or is absent
PXXAPTQLSATSVLYYXXXXXXXXXLRKHRNMVVRAXGXH

SEQ ID NO: 7412 - protein, 34 aa, Artificial Sequence
  GFR-binding peptide
TQVQLSAISVLYLEIVRKKPIFLKNYQTLEDHLA

SEQ ID NO: 7413 - protein, 34 aa, Artificial Sequence
  GFR-binding peptide
  MOD_RES (3), (4): Xaa is C or S
SPXXVPQDLNAISILYFVGRTPKVLKKYRMVVKS

SEQ ID NO: 7414 - protein, 34 aa, Artificial Sequence
  GFR-binding peptide
TQVQLSATSVLYYEIVRKKPIFLRKHRTLEDHLA

SEQ ID NO: 7415 - protein, 42 aa, Artificial Sequence
  GFR-binding peptide
  MOD_RES (6), (7), (39), (41): Xaa is C or S
SIPKAXXVPTELSPISMLYKDEYDKVVLKYHYEMVVEGXGXR

SEQ ID NO: 7416 - protein, 38 aa, Artificial Sequence
  GFR-binding peptide
  MOD_RES (5), (6): Xaa is C or S
  MOD_RES (20), (21), (22), (23), (24): Xaa is A or G
  MOD_RES (25), (26), (27), (28): Xaa is A or G or is absent
IPKAXXVPTELSAISMLYLXXXXXXXXXLKNYQEMVVE

SEQ ID NO: 7417 - protein, 35 aa, Artificial Sequence
  GFR-binding peptide
  MOD_RES (1), (1): Xaa is C or S
  MOD_RES (17), (18), (19), (20), (21): Xaa is A or G
  MOD_RES (22), (23), (24), (25): Xaa is A or G or is absent
XRPTQVQLSATSVLYYXXXXXXXXXLRKHRTLEDH

SEQ ID NO: 7418 - protein, 39 aa, Artificial Sequence
  GFR-binding peptide
  MOD_RES (3), (4), (36), (38): Xaa is C or S
KAXXVPTELSPISMLYKDENEKVVLKYHYDMVVEGXGXR

SEQ ID NO: 7419 - protein, 40 aa, Artificial Sequence
  GFR-binding peptide
  MOD_RES (3), (4), (37), (39): Xaa is C or S
  MOD_RES (18), (19), (20), (21), (22): Xaa is A or G
  MOD_RES (23), (24), (25), (26): Xaa is A or G or is absent
SPXXVSQDLSAISILYLXXXXXXXXXLKNYQMIVKSXKXS

SEQ ID NO: 7420 - protein, 35 aa, Artificial Sequence
  GFR-binding peptide
  MOD_RES (1), (34): Xaa is C or S
XVPTKLNAISVLYFDDMGVPTLKKYREGMSVAEXG

SEQ ID NO: 7421 - protein, 43 aa, Artificial Sequence
  GFR-binding peptide
  MOD_RES (5), (42): Xaa is C or S
RNVQXRPTQVQLSATSVLYYEIVRKKPIFLRKHRTLEDHLAXK

SEQ ID NO: 7422 - protein, 33 aa, Artificial Sequence
  GFR-binding peptide
  MOD_RES (14), (15), (16), (17), (18): Xaa is A or G
  MOD_RES (19), (20), (21), (22): Xaa is A or G or is absent
TQVQLSPISVLYKXXXXXXXXXLKYHYTLEDHL

SEQ ID NO: 7423 - protein, 33 aa, Artificial Sequence
  GFR-binding peptide
  MOD_RES (1), (33): Xaa is C or S
XVPTELNAISMLYFDENEKVVLKKYRDMVVEGX

SEQ ID NO: 7424 - protein, 37 aa, Artificial Sequence
  GFR-binding peptide
  MOD_RES (1), (2), (35), (37): Xaa is C or S
  MOD_RES (16), (17), (18), (19), (20): Xaa is A or G
  MOD_RES (21), (22), (23), (24): Xaa is A or G or is absent
XXVSQDLSPISILYKXXXXXXXXXLKYHYMIVKSXKX

SEQ ID NO: 7425 - protein, 43 aa, Artificial Sequence
  GFR-binding peptide
  MOD_RES (6), (7), (41), (43): Xaa is C or S
  MOD_RES (21), (22), (23), (24), (25): Xaa is A or G
  MOD_RES (26), (27), (28), (29): Xaa is A or G or is absent
TVPKPXXAPTQLNAISVLYFXXXXXXXXXLKKYRNMVVRAXGX

SEQ ID NO: 7426 - protein, 37 aa, Artificial Sequence
  GFR-binding peptide
  MOD_RES (3), (4), (37): Xaa is C or S
  MOD_RES (18), (19), (20), (21), (22): Xaa is A or G
  MOD_RES (23), (24), (25), (26): Xaa is A or G or is absent
SPXXVPQDLSATSILYYXXXXXXXXXLRKHRMVVKSX

SEQ ID NO: 7427 - protein, 38 aa, Artificial Sequence
  GFR-binding peptide
  MOD_RES (5), (6): Xaa is C or S
  MOD_RES (20), (21), (22), (23), (24): Xaa is A or G
  MOD_RES (25), (26), (27), (28): Xaa is A or G or is absent
IPKAXXVPTELNAISMLYFXXXXXXXXXLKKYRDMVVE

SEQ ID NO: 7428 - protein, 34 aa, Artificial Sequence
  GFR-binding peptide
  MOD_RES (1), (2), (34): Xaa is C or S
XXVPTELNAISMLYFDENEKVVLKKYRDMVVEGX

SEQ ID NO: 7429 - protein, 39 aa, Artificial Sequence
  GFR-binding peptide
  MOD_RES (6), (7): Xaa is C or S
KVGKAXXVPTKLNAISVLYFDDMGVPTLKKYREGMSVAE

SEQ ID NO: 7430 - protein, 35 aa, Artificial Sequence
  GFR-binding peptide
  MOD_RES (1), (2), (34): Xaa is C or S
XXAPTQLSATSVLYYDDSSNVILRKHRNMVVRAXG

SEQ ID NO: 7431 - protein, 37 aa, Artificial Sequence
  GFR-binding peptide
  MOD_RES (3), (4), (35), (37): Xaa is C or S
APXXVPQALSPISILYKVGRKPKVLKYHYMIVRSXKX

SEQ ID NO: 7432 - protein, 37 aa, Artificial Sequence
  GFR-binding peptide
  MOD_RES (2), (3), (36): Xaa is C or S
  MOD_RES (17), (18), (19), (20), (21): Xaa is A or G
  MOD_RES (22), (23), (24), (25): Xaa is A or G or is absent
PXXVPQDLSATSILYYXXXXXXXXXLRKHRMVVKSXK

SEQ ID NO: 7433 - protein, 40 aa, Artificial Sequence
  GFR-binding peptide
  MOD_RES (6), (7), (40): Xaa is C or S
  MOD_RES (21), (22), (23), (24), (25): Xaa is A or G
  MOD_RES (26), (27), (28), (29): Xaa is A or G or is absent
ASASPXXVPQDLSPISILYKXXXXXXXXXLKYHYMVVKSX

SEQ ID NO: 7434 - protein, 35 aa, Artificial Sequence
  GFR-binding peptide
  MOD_RES (1), (34): Xaa is C or S
  MOD_RES (15), (16), (17), (18), (19): Xaa is A or G
  MOD_RES (20), (21), (22), (23): Xaa is A or G or is absent
XVPQALNAISILYFXXXXXXXXXLKKYRMIVRSXK

SEQ ID NO: 7435 - protein, 34 aa, Artificial Sequence
  GFR-binding peptide
  MOD_RES (1), (2), (34): Xaa is C or S
XXVPTELSPISMLYKDENEKVVLKYHYDMVVEGX

SEQ ID NO: 7436 - protein, 36 aa, Artificial Sequence
  GFR-binding peptide
  MOD_RES (1), (2), (33), (35): Xaa is C or S
XXVSQDLNAISILYFIGKTPKILKKYRMIVKSXKXS

SEQ ID NO: 7437 - protein, 36 aa, Artificial Sequence
  GFR-binding peptide
  MOD_RES (1), (2), (36): Xaa is C or S
  MOD_RES (16), (17), (18), (19), (20): Xaa is A or G
  MOD_RES (21), (22), (23), (24): Xaa is A or G or is absent
XXVPTELNAISMLYFXXXXXXXXXLKKYRDMVVEGX

SEQ ID NO: 7438 - protein, 38 aa, Artificial Sequence
  GFR-binding peptide
  MOD_RES (1), (36), (38): Xaa is C or S
  MOD_RES (15), (16), (17), (18), (19): Xaa is A or G
  MOD_RES (20), (21), (22), (23): Xaa is A or G or is absent
XVPTKLSPISVLYKXXXXXXXXXLKYHYEGMSVAEXGX

SEQ ID NO: 7439 - protein, 42 aa, Artificial Sequence
  GFR-binding peptide
  MOD_RES (4), (5), (39), (41): Xaa is C or S
  MOD_RES (19), (20), (21), (22), (23): Xaa is A or G
  MOD_RES (24), (25), (26), (27): Xaa is A or G or is absent
PKPXXAPTQLSATSVLYYXXXXXXXXXLRKHRNMVVRAXGXH

SEQ ID NO: 7440 - protein, 32 aa, Artificial Sequence
  GFR-binding peptide
  MOD_RES (32), (32): Xaa is C or S
APTQLSAISVLYLDDSSNVILKNYQNMVVRAX

SEQ ID NO: 7441 - protein, 38 aa, Artificial Sequence
  GFR-binding peptide
  MOD_RES (5), (6), (38): Xaa is C or S
IPKAXXVPTELNAISMLYFDEYDKVVLKKYREMVVEGX

SEQ ID NO: 7442 - protein, 37 aa, Artificial Sequence
  GFR-binding peptide
  MOD_RES (6), (7): Xaa is C or S
YVPKPXXAPTKLSAISVLYLDDSSNVILKNYQNMVVR

SEQ ID NO: 7443 - protein, 42 aa, Artificial Sequence
  GFR-binding peptide
  MOD_RES (6), (7), (41): Xaa is C or S
  MOD_RES (21), (22), (23), (24), (25): Xaa is A or G
  MOD_RES (26), (27), (28), (29): Xaa is A or G or is absent
SIPKAXXVPTELSATSMLYYXXXXXXXXXLRKHREMVVEGXG

SEQ ID NO: 7444 - protein, 43 aa, Artificial Sequence
  GFR-binding peptide
  MOD_RES (5), (6), (40), (42): Xaa is C or S
  MOD_RES (20), (21), (22), (23), (24): Xaa is A or G
  MOD_RES (25), (26), (27), (28): Xaa is A or G or is absent
VPKPXXAPTQLSPISVLYKXXXXXXXXXLKYHYNMVVRAXGXH

SEQ ID NO: 7445 - protein, 38 aa, Artificial Sequence
  GFR-binding peptide
  MOD_RES (2), (3), (37): Xaa is C or S
  MOD_RES (17), (18), (19), (20), (21): Xaa is A or G
  MOD_RES (22), (23), (24), (25): Xaa is A or G or is absent
AXXVPTELNAISMLYFXXXXXXXXXLKKYREMVVEGXG

SEQ ID NO: 7446 - protein, 37 aa, Artificial Sequence
  GFR-binding peptide
  MOD_RES (3), (4), (37): Xaa is C or S
  MOD_RES (18), (19), (20), (21), (22): Xaa is A or G
  MOD_RES (23), (24), (25), (26): Xaa is A or G or is absent
SPXXVPQDLSAISILYLXXXXXXXXXLKNYQMVVKSX

SEQ ID NO: 7447 - protein, 39 aa, Artificial Sequence
  GFR-binding peptide
  MOD_RES (5), (37), (39): Xaa is C or S
TKPTXAPTKLSPISVLYKDDSSNVILKYHYNMVVRSXGX

SEQ ID NO: 7448 - protein, 35 aa, Artificial Sequence
  GFR-binding peptide
  MOD_RES (33), (35): Xaa is C or S
  MOD_RES (14), (15), (16), (17), (18): Xaa is A or G
  MOD_RES (19), (20), (21), (22): Xaa is A or G or is absent
VSQDLSPISILYKXXXXXXXXXLKYHYMIVKSXKX

SEQ ID NO: 7449 - protein, 44 aa, Artificial Sequence
  GFR-binding peptide
  MOD_RES (6), (7), (42), (44): Xaa is C or S
  MOD_RES (21), (22), (23), (24), (25): Xaa is A or G
  MOD_RES (26), (27), (28), (29): Xaa is A or G or is absent
KVGKAXXVPTKLSPISVLYKXXXXXXXXXLKYHYEGMSVAEXGX

SEQ ID NO: 7450 - protein, 39 aa, Artificial Sequence
  GFR-binding peptide
  MOD_RES (1), (36), (38): Xaa is C or S
  MOD_RES (15), (16), (17), (18), (19): Xaa is A or G
  MOD_RES (20), (21), (22), (23): Xaa is A or G or is absent
XVPTKLSPISVLYKXXXXXXXXXLKYHYEGMSVAEXGXR

SEQ ID NO: 7451 - protein, 35 aa, Artificial Sequence
  GFR-binding peptide
  MOD_RES (3), (4): Xaa is C or S
KAXXVPTELSATSMLYYDENEKVVLRKHRDMVVEG

SEQ ID NO: 7452 - protein, 40 aa, Artificial Sequence
  GFR-binding peptide
  MOD_RES (6), (7), (38), (40): Xaa is C or S
ASASPXXVPQDLSATSILYYVGRTPKVLRKHRMVVKSXKX

SEQ ID NO: 7453 - protein, 39 aa, Artificial Sequence
  GFR-binding peptide
  MOD_RES (5), (6), (37), (39): Xaa is C or S
SASPXXVPQDLSPISILYKVGRTPKVLKYHYMVVKSXKX

SEQ ID NO: 7454 - protein, 32 aa, Artificial Sequence
  GFR-binding peptide
  MOD_RES (1), (1): Xaa is C or S
XVPTELSATSMLYYDEYDKVVLRKHREMVVEG

SEQ ID NO: 7455 - protein, 36 aa, Artificial Sequence
  GFR-binding peptide
  MOD_RES (1), (2), (34), (36): Xaa is C or S
XXAPTQLSAISVLYLDDSSNVILKNYQNMVVRAXGX

SEQ ID NO: 7456 - protein, 34 aa, Artificial Sequence
  GFR-binding peptide
  MOD_RES (1), (2): Xaa is C or S
  MOD_RES (16), (17), (18), (19), (20): Xaa is A or G
  MOD_RES (21), (22), (23), (24): Xaa is A or G or is absent
XXAPTKLNAISVLYFXXXXXXXXXLKKYRNMVVK

SEQ ID NO: 7457 - protein, 37 aa, Artificial Sequence
  GFR-binding peptide
  MOD_RES (1), (34), (36): Xaa is C or S
  MOD_RES (15), (16), (17), (18), (19): Xaa is A or G
  MOD_RES (20), (21), (22), (23): Xaa is A or G or is absent
XVPQDLSAISILYLXXXXXXXXXLKNYQMVVKSXKXS

SEQ ID NO: 7458 - protein, 37 aa, Artificial Sequence
  GFR-binding peptide
  MOD_RES (1), (1): Xaa is C or S
  MOD_RES (17), (18), (19), (20), (21): Xaa is A or G
  MOD_RES (22), (23), (24), (25): Xaa is A or G or is absent
XRPTQVQLNAISVLYFXXXXXXXXXLKKYRTLEDHLA

SEQ ID NO: 7459 - protein, 35 aa, Artificial Sequence
  GFR-binding peptide
  MOD_RES (1), (2), (35): Xaa is C or S
  MOD_RES (16), (17), (18), (19), (20): Xaa is A or G
  MOD_RES (21), (22), (23), (24): Xaa is A or G or is absent
XXVSQDLSPISILYKXXXXXXXXXLKYHYMIVKSX

SEQ ID NO: 7460 - protein, 36 aa, Artificial Sequence
  GFR-binding peptide
  MOD_RES (5), (5): Xaa is C or S
TKPTXAPTKLSPISVLYKDDSSNVILKYHYNMVVRS

SEQ ID NO: 7461 - protein, 39 aa, Artificial Sequence
  GFR-binding peptide
  MOD_RES (5), (6): Xaa is C or S
  MOD_RES (20), (21), (22), (23), (24): Xaa is A or G
  MOD_RES (25), (26), (27), (28): Xaa is A or G or is absent
VPKAXXAPTKLSPISVLYKXXXXXXXXXLKYHYNMVVKA

SEQ ID NO: 7462 - protein, 41 aa, Artificial Sequence
  GFR-binding peptide
  MOD_RES (6), (7), (39), (41): Xaa is C or S
KIPKAXXVPTELNAISMLYFDENEKVVLKKYRDMVVEGXGX

SEQ ID NO: 7463 - protein, 34 aa, Artificial Sequence
  GFR-binding peptide
  MOD_RES (1), (2): Xaa is C or S
  MOD_RES (16), (17), (18), (19), (20): Xaa is A or G
  MOD_RES (21), (22), (23), (24): Xaa is A or G or is absent
XXAPTKLNAISVLYFXXXXXXXXXLKKYRNMVVR

SEQ ID NO: 7464 - protein, 34 aa, Artificial Sequence
  GFR-binding peptide
  MOD_RES (15), (16), (17), (18), (19): Xaa is A or G
  MOD_RES (20), (21), (22), (23): Xaa is A or G or is absent
PTQVQLSATSVLYYXXXXXXXXXLRKHRTLEDHL

SEQ ID NO: 7465 - protein, 35 aa, Artificial Sequence
  GFR-binding peptide
  MOD_RES (1), (2), (34): Xaa is C or S
XXAPTKLSAISVLYLDSSNNVILKNYQNMVVKAXG

SEQ ID NO: 7466 - protein, 37 aa, Artificial Sequence
  GFR-binding peptide
  MOD_RES (1), (35), (37): Xaa is C or S
  MOD_RES (15), (16), (17), (18), (19): Xaa is A or G
  MOD_RES (20), (21), (22), (23): Xaa is A or G or is absent
XVPTELSPISMLYKXXXXXXXXXLKYHYDMVVEGXGX

SEQ ID NO: 7467 - protein, 39 aa, Artificial Sequence
  GFR-binding peptide
  MOD_RES (4), (5), (39): Xaa is C or S
  MOD_RES (19), (20), (21), (22), (23): Xaa is A or G
  MOD_RES (24), (25), (26), (27): Xaa is A or G or is absent
PKAXXAPTKLSAISVLYLXXXXXXXXXLKNYQNMVVKAX

SEQ ID NO: 7468 - protein, 40 aa, Artificial Sequence
  GFR-binding peptide
  MOD_RES (5), (6), (40): Xaa is C or S
  MOD_RES (20), (21), (22), (23), (24): Xaa is A or G
  MOD_RES (25), (26), (27), (28): Xaa is A or G or is absent
IPKAXXVPTELSAISMLYLXXXXXXXXXLKNYQDMVVEGX

SEQ ID NO: 7469 - protein, 40 aa, Artificial Sequence
  GFR-binding peptide
  MOD_RES (5), (6), (38), (40): Xaa is C or S
IPKAXXVPTELSATSMLYYDEYDKVVLRKHREMVVEGXGX

SEQ ID NO: 7470 - protein, 39 aa, Artificial Sequence
  GFR-binding peptide
  MOD_RES (2), (3), (37), (39): Xaa is C or S
  MOD_RES (17), (18), (19), (20), (21): Xaa is A or G
  MOD_RES (22), (23), (24), (25): Xaa is A or G or is absent
AXXVPTELSPISMLYKXXXXXXXXXLKYHYDMVVEGXGX

SEQ ID NO: 7471 - protein, 41 aa, Artificial Sequence
  GFR-binding peptide
  MOD_RES (4), (5), (39), (41): Xaa is C or S
  MOD_RES (19), (20), (21), (22), (23): Xaa is A or G
  MOD_RES (24), (25), (26), (27): Xaa is A or G or is absent
PKPXXAPTQLSPISVLYKXXXXXXXXXLKYHYNMVVRAXGX

SEQ ID NO: 7472 - protein, 41 aa, Artificial Sequence
  GFR-binding peptide
  MOD_RES (1), (38), (40): Xaa is C or S
XRPTQVQLSAISVLYLEIVRKKPIFLKNYQTLEDHLAXKXE

SEQ ID NO: 7473 - protein, 36 aa, Artificial Sequence
  GFR-binding peptide
  MOD_RES (2), (3): Xaa is C or S
  MOD_RES (17), (18), (19), (20), (21): Xaa is A or G
  MOD_RES (22), (23), (24), (25): Xaa is A or G or is absent
AXXVPTELSATSMLYYXXXXXXXXXLRKHREMVVEG

SEQ ID NO: 7474 - protein, 39 aa, Artificial Sequence
  GFR-binding peptide
  MOD_RES (4), (5), (39): Xaa is C or S
  MOD_RES (19), (20), (21), (22), (23): Xaa is A or G
  MOD_RES (24), (25), (26), (27): Xaa is A or G or is absent
PKPXXAPTKLSPISVLYKXXXXXXXXXLKYHYNMVVRSX

SEQ ID NO: 7475 - protein, 34 aa, Artificial Sequence
  GFR-binding peptide
  MOD_RES (2), (3), (34): Xaa is C or S
PXXVSQDLNAISILYFIGKTPKILKKYRMIVKSX

SEQ ID NO: 7476 - protein, 35 aa, Artificial Sequence
  GFR-binding peptide
  MOD_RES (2), (3): Xaa is C or S
  MOD_RES (17), (18), (19), (20), (21): Xaa is A or G
  MOD_RES (22), (23), (24), (25): Xaa is A or G or is absent
PXXVPQDLSATSILYYXXXXXXXXXLRKHRMVVKS

SEQ ID NO: 7477 - protein, 38 aa, Artificial Sequence
  GFR-binding peptide
  MOD_RES (5), (6), (37): Xaa is C or S
SASPXXVSQDLSATSILYYIGKTPKILRKHRMIVKSXK

SEQ ID NO: 7478 - protein, 35 aa, Artificial Sequence
  GFR-binding peptide
  MOD_RES (2), (3): Xaa is C or S
  MOD_RES (17), (18), (19), (20), (21): Xaa is A or G
  MOD_RES (22), (23), (24), (25): Xaa is A or G or is absent
AXXVPTELSAISMLYLXXXXXXXXXLKNYQEMVVE

SEQ ID NO: 7479 - protein, 37 aa, Artificial Sequence
  GFR-binding peptide
  MOD_RES (4), (5): Xaa is C or S
  MOD_RES (19), (20), (21), (22), (23): Xaa is A or G
  MOD_RES (24), (25), (26), (27): Xaa is A or G or is absent
AAPXXVPQALSPISILYKXXXXXXXXXLKYHYMIVRS

SEQ ID NO: 7480 - protein, 38 aa, Artificial Sequence
  GFR-binding peptide
  MOD_RES (1), (2), (36), (38): Xaa is C or S
  MOD_RES (16), (17), (18), (19), (20): Xaa is A or G
  MOD_RES (21), (22), (23), (24): Xaa is A or G or is absent
XXVPTELNAISMLYFXXXXXXXXXLKKYREMVVEGXGX

SEQ ID NO: 7481 - protein, 38 aa, Artificial Sequence
  GFR-binding peptide
  MOD_RES (3), (4), (37): Xaa is C or S
  MOD_RES (18), (19), (20), (21), (22): Xaa is A or G
  MOD_RES (23), (24), (25), (26): Xaa is A or G or is absent
APXXVPQALSAISILYLXXXXXXXXXLKNYQMIVRSXK

SEQ ID NO: 7482 - protein, 41 aa, Artificial Sequence
  GFR-binding peptide
  MOD_RES (6), (7), (38), (40): Xaa is C or S
ASASPXXVSQDLSAISILYLIGKTPKILKNYQMIVKSXKXS

SEQ ID NO: 7483 - protein, 41 aa, Artificial Sequence
  GFR-binding peptide
  MOD_RES (6), (7), (41): Xaa is C or S
  MOD_RES (21), (22), (23), (24), (25): Xaa is A or G
  MOD_RES (26), (27), (28), (29): Xaa is A or G or is absent
YVPKPXXAPTKLSPISVLYKXXXXXXXXXLKYHYNMVVRSX

SEQ ID NO: 7484 - protein, 40 aa, Artificial Sequence
  GFR-binding peptide
  MOD_RES (6), (7), (38), (40): Xaa is C or S
ASAAPXXVPQALSAISILYLVGRKPKVLKNYQMIVRSXKX

SEQ ID NO: 7485 - protein, 34 aa, Artificial Sequence
  GFR-binding peptide
  MOD_RES (1), (33): Xaa is C or S
XVPTELNAISMLYFDEYDKVVLKKYREMVVEGXG

SEQ ID NO: 7486 - protein, 38 aa, Artificial Sequence
  GFR-binding peptide
  MOD_RES (1), (2), (36), (38): Xaa is C or S
  MOD_RES (16), (17), (18), (19), (20): Xaa is A or G
  MOD_RES (21), (22), (23), (24): Xaa is A or G or is absent
XXVPTELSATSMLYYXXXXXXXXXLRKHREMVVEGXGX

SEQ ID NO: 7487 - protein, 33 aa, Artificial Sequence
  GFR-binding peptide
  MOD_RES (14), (15), (16), (17), (18): Xaa is A or G
  MOD_RES (19), (20), (21), (22): Xaa is A or G or is absent
APTQLSATSVLYYXXXXXXXXXLRKHRNMVVRA

SEQ ID NO: 7488 - protein, 41 aa, Artificial Sequence
  GFR-binding peptide
  MOD_RES (6), (7), (40): Xaa is C or S
  MOD_RES (21), (22), (23), (24), (25): Xaa is A or G
  MOD_RES (26), (27), (28), (29): Xaa is A or G or is absent
ASASPXXVPQDLSAISILYLXXXXXXXXXLKNYQMVVKSXK

SEQ ID NO: 7489 - protein, 37 aa, Artificial Sequence
  GFR-binding peptide
  MOD_RES (6), (7): Xaa is C or S
ASAAPXXVPQALNAISILYFVGRKPKVLKKYRMIVRS

SEQ ID NO: 7490 - protein, 36 aa, Artificial Sequence
  GFR-binding peptide
  MOD_RES (1), (36): Xaa is C or S
  MOD_RES (15), (16), (17), (18), (19): Xaa is A or G
  MOD_RES (20), (21), (22), (23): Xaa is A or G or is absent
XVPTKLNAISVLYFXXXXXXXXXLKKYREGMSVAEX

SEQ ID NO: 7491 - protein, 41 aa, Artificial Sequence
  GFR-binding peptide
  MOD_RES (4), (5), (38), (40): Xaa is C or S
GKAXXVPTKLNAISVLYFDDMGVPTLKKYREGMSVAEXGXR

SEQ ID NO: 7492 - protein, 42 aa, Artificial Sequence
  GFR-binding peptide
  MOD_RES (6), (7), (41): Xaa is C or S
  MOD_RES (21), (22), (23), (24), (25): Xaa is A or G
  MOD_RES (26), (27), (28), (29): Xaa is A or G or is absent
TVPKPXXAPTQLSAISVLYLXXXXXXXXXLKNYQNMVVRAXG

SEQ ID NO: 7493 - protein, 40 aa, Artificial Sequence
  GFR-binding peptide
  MOD_RES (3), (40): Xaa is C or S
  MOD_RES (19), (20), (21), (22), (23): Xaa is A or G
  MOD_RES (24), (25), (26), (27): Xaa is A or G or is absent
VQXRPTQVQLSAISVLYLXXXXXXXXXLKNYQTLEDHLAX

SEQ ID NO: 7494 - protein, 36 aa, Artificial Sequence
  GFR-binding peptide
  MOD_RES (1), (2), (33), (35): Xaa is C or S
XXVSQDLSAISILYLIGKTPKILKNYQMIVKSXKXS

SEQ ID NO: 7495 - protein, 31 aa, Artificial Sequence
  GFR-binding peptide
APTQLSPISVLYKDDSSNVILKYHYNMVVRA

SEQ ID NO: 7496 - protein, 36 aa, Artificial Sequence
  GFR-binding peptide
  MOD_RES (5), (6): Xaa is C or S
VPKPXXAPTKLSAISVLYLDDSSNVILKNYQNMVVR

SEQ ID NO: 7497 - protein, 33 aa, Artificial Sequence
  GFR-binding peptide
  MOD_RES (1), (2): Xaa is C or S
XXVPTELNAISMLYFDEYDKVVLKKYREMVVEG

SEQ ID NO: 7498 - protein, 36 aa, Artificial Sequence
  GFR-binding peptide
  MOD_RES (3), (4): Xaa is C or S
  MOD_RES (18), (19), (20), (21), (22): Xaa is A or G
  MOD_RES (23), (24), (25), (26): Xaa is A or G or is absent
KPXXAPTQLSAISVLYLXXXXXXXXXLKNYQNMVVR

SEQ ID NO: 7499 - protein, 33 aa, Artificial Sequence
  GFR-binding peptide
  MOD_RES (1), (1): Xaa is C or S
  MOD_RES (15), (16), (17), (18), (19): Xaa is A or G
  MOD_RES (20), (21), (22), (23): Xaa is A or G or is absent
XVPTELSATSMLYYXXXXXXXXXLRKHRDMVVE

SEQ ID NO: 7500 - protein, 42 aa, Artificial Sequence
  GFR-binding peptide
  MOD_RES (3), (4), (39), (41): Xaa is C or S
  MOD_RES (18), (19), (20), (21), (22): Xaa is A or G
  MOD_RES (23), (24), (25), (26): Xaa is A or G or is absent
KAXXVPTKLSPISVLYKXXXXXXXXXLKYHYEGMSVAEXGXR

SEQ ID NO: 7501 - protein, 37 aa, Artificial Sequence
  GFR-binding peptide
  MOD_RES (1), (2), (34), (36): Xaa is C or S
XXVPTELNAISMLYFDENEKVVLKKYRDMVVEGXGXR

SEQ ID NO: 7502 - protein, 38 aa, Artificial Sequence
  GFR-binding peptide
  MOD_RES (2), (3), (36), (38): Xaa is C or S
  MOD_RES (17), (18), (19), (20), (21): Xaa is A or G
  MOD_RES (22), (23), (24), (25): Xaa is A or G or is absent
PXXVSQDLSAISILYLXXXXXXXXXLKNYQMIVKSXKX

SEQ ID NO: 7503 - protein, 38 aa, Artificial Sequence
  GFR-binding peptide
  MOD_RES (2), (3), (35), (37): Xaa is C or S
PXXAPTKLSATSVLYYDDSSNVILRKHRNMVVRSXGXH

SEQ ID NO: 7504 - protein, 45 aa, Artificial Sequence
  GFR-binding peptide
  MOD_RES (6), (7), (42), (44): Xaa is C or S
  MOD_RES (21), (22), (23), (24), (25): Xaa is A or G
  MOD_RES (26), (27), (28), (29): Xaa is A or G or is absent
KVGKAXXVPTKLSPISVLYKXXXXXXXXXLKYHYEGMSVAEXGXR

SEQ ID NO: 7505 - protein, 35 aa, Artificial Sequence
  GFR-binding peptide
  MOD_RES (1), (2): Xaa is C or S
  MOD_RES (16), (17), (18), (19), (20): Xaa is A or G
  MOD_RES (21), (22), (23), (24): Xaa is A or G or is absent
XXAPTKLSATSVLYYXXXXXXXXXLRKHRNMVVKA

SEQ ID NO: 7506 - protein, 37 aa, Artificial Sequence
  GFR-binding peptide
  MOD_RES (35), (37): Xaa is C or S
TQVQLSATSVLYYEIVRKKPIFLRKHRTLEDHLAXKX

SEQ ID NO: 7507 - protein, 36 aa, Artificial Sequence
  GFR-binding peptide
  MOD_RES (5), (6): Xaa is C or S
SASPXXVPQDLNAISILYFVGRTPKVLKKYRMVVKS

SEQ ID NO: 7508 - protein, 35 aa, Artificial Sequence
  GFR-binding peptide
  MOD_RES (1), (32), (34): Xaa is C or S
XVPQALSATSILYYVGRKPKVLRKHRMIVRSXKXS

SEQ ID NO: 7509 - protein, 35 aa, Artificial Sequence
  GFR-binding peptide
  MOD_RES (1), (33), (35): Xaa is C or S
XVPTELSATSMLYYDEYDKVVLRKHREMVVEGXGX

SEQ ID NO: 7510 - protein, 35 aa, Artificial Sequence
  GFR-binding peptide
  MOD_RES (1), (32), (34): Xaa is C or S
XVPQALSPISILYKVGRKPKVLKYHYMIVRSXKXS

SEQ ID NO: 7511 - protein, 39 aa, Artificial Sequence
  GFR-binding peptide
  MOD_RES (1), (2), (36), (38): Xaa is C or S
  MOD_RES (16), (17), (18), (19), (20): Xaa is A or G
  MOD_RES (21), (22), (23), (24): Xaa is A or G or is absent
XXAPTQLSPISVLYKXXXXXXXXXLKYHYNMVVRAXGXH

SEQ ID NO: 7512 - protein, 39 aa, Artificial Sequence
  GFR-binding peptide
  MOD_RES (5), (6), (37), (39): Xaa is C or S
SASPXXVSQDLSPISILYKIGKTPKILKYHYMIVKSXKX

SEQ ID NO: 7513 - protein, 39 aa, Artificial Sequence
  GFR-binding peptide
  MOD_RES (5), (6), (38): Xaa is C or S
IPKAXXVPTELSPISMLYKDENEKVVLKYHYDMVVEGXG

SEQ ID NO: 7514 - protein, 38 aa, Artificial Sequence
  GFR-binding peptide
  MOD_RES (3), (4), (37): Xaa is C or S
  MOD_RES (18), (19), (20), (21), (22): Xaa is A or G
  MOD_RES (23), (24), (25), (26): Xaa is A or G or is absent
SPXXVSQDLSAISILYLXXXXXXXXXLKNYQMIVKSXK

SEQ ID NO: 7515 - protein, 39 aa, Artificial Sequence
  GFR-binding peptide
  MOD_RES (6), (7), (38): Xaa is C or S
ASAAPXXVPQALSPISILYKVGRKPKVLKYHYMIVRSXK

SEQ ID NO: 7516 - protein, 39 aa, Artificial Sequence
  GFR-binding peptide
  MOD_RES (4), (5), (38): Xaa is C or S
  MOD_RES (19), (20), (21), (22), (23): Xaa is A or G
  MOD_RES (24), (25), (26), (27): Xaa is A or G or is absent
AAPXXVPQALSATSILYYXXXXXXXXXLRKHRMIVRSXK

SEQ ID NO: 7517 - protein, 34 aa, Artificial Sequence
  GFR-binding peptide
  MOD_RES (33), (33): Xaa is C or S
  MOD_RES (14), (15), (16), (17), (18): Xaa is A or G
  MOD_RES (19), (20), (21), (22): Xaa is A or G or is absent
VSQDLSATSILYYXXXXXXXXXLRKHRMIVKSXK

SEQ ID NO: 7518 - protein, 40 aa, Artificial Sequence
  GFR-binding peptide
  MOD_RES (6), (38), (40): Xaa is C or S
VTKPTXAPTKLSPISVLYKDDSSNVILKYHYNMVVRSXGX

SEQ ID NO: 7519 - protein, 42 aa, Artificial Sequence
  GFR-binding peptide
  MOD_RES (5), (6), (41): Xaa is C or S
  MOD_RES (20), (21), (22), (23), (24): Xaa is A or G
  MOD_RES (25), (26), (27), (28): Xaa is A or G or is absent
VGKAXXVPTKLSPISVLYKXXXXXXXXXLKYHYEGMSVAEXG

SEQ ID NO: 7520 - protein, 40 aa, Artificial Sequence
  GFR-binding peptide
  MOD_RES (4), (5), (37), (39): Xaa is C or S
PKAXXVPTELSATSMLYYDEYDKVVLRKHREMVVEGXGXR

SEQ ID NO: 7521 - protein, 38 aa, Artificial Sequence
  GFR-binding peptide
  MOD_RES (3), (4), (38): Xaa is C or S
  MOD_RES (18), (19), (20), (21), (22): Xaa is A or G
  MOD_RES (23), (24), (25), (26): Xaa is A or G or is absent
KPXXAPTQLNAISVLYFXXXXXXXXXLKKYRNMVVRAX

SEQ ID NO: 7522 - protein, 39 aa, Artificial Sequence
  GFR-binding peptide
  MOD_RES (6), (7): Xaa is C or S
  MOD_RES (21), (22), (23), (24), (25): Xaa is A or G
  MOD_RES (26), (27), (28), (29): Xaa is A or G or is absent
SIPKAXXVPTELNAISMLYFXXXXXXXXXLKKYREMVVE

SEQ ID NO: 7523 - protein, 37 aa, Artificial Sequence
  GFR-binding peptide
  MOD_RES (1), (2), (36): Xaa is C or S
  MOD_RES (16), (17), (18), (19), (20): Xaa is A or G
  MOD_RES (21), (22), (23), (24): Xaa is A or G or is absent
XXAPTKLSPISVLYKXXXXXXXXXLKYHYNMVVKAXG

SEQ ID NO: 7524 - protein, 40 aa, Artificial Sequence
  GFR-binding peptide
  MOD_RES (4), (5), (39): Xaa is C or S
  MOD_RES (19), (20), (21), (22), (23): Xaa is A or G
  MOD_RES (24), (25), (26), (27): Xaa is A or G or is absent
PKAXXAPTKLNAISVLYFXXXXXXXXXLKKYRNMVVKAXG

SEQ ID NO: 7525 - protein, 37 aa, Artificial Sequence
  GFR-binding peptide
  MOD_RES (7), (7): Xaa is C or S
HVTKPTXAPTKLSPISVLYKDDSSNVILKYHYNMVVR

SEQ ID NO: 7526 - protein, 33 aa, Artificial Sequence
  GFR-binding peptide
  MOD_RES (33), (33): Xaa is C or S
VPTKLNAISVLYFDDMGVPTLKKYREGMSVAEX

SEQ ID NO: 7527 - protein, 39 aa, Artificial Sequence
  GFR-binding peptide
  MOD_RES (5), (6): Xaa is C or S
  MOD_RES (20), (21), (22), (23), (24): Xaa is A or G
  MOD_RES (25), (26), (27), (28): Xaa is A or G or is absent
IPKAXXVPTELNAISMLYFXXXXXXXXXLKKYRDMVVEG

SEQ ID NO: 7528 - protein, 37 aa, Artificial Sequence
  GFR-binding peptide
  MOD_RES (2), (3): Xaa is C or S
  MOD_RES (17), (18), (19), (20), (21): Xaa is A or G
  MOD_RES (22), (23), (24), (25): Xaa is A or G or is absent
AXXVPTKLSPISVLYKXXXXXXXXXLKYHYEGMSVAE

SEQ ID NO: 7529 - protein, 40 aa, Artificial Sequence
  GFR-binding peptide
  MOD_RES (6), (7), (40): Xaa is C or S
KVGKAXXVPTKLSAISVLYLDDMGVPTLKNYQEGMSVAEX

SEQ ID NO: 7530 - protein, 37 aa, Artificial Sequence
  GFR-binding peptide
  MOD_RES (3), (4): Xaa is C or S
  MOD_RES (18), (19), (20), (21), (22): Xaa is A or G
  MOD_RES (23), (24), (25), (26): Xaa is A or G or is absent
KAXXAPTKLSAISVLYLXXXXXXXXXLKNYQNMVVKA

SEQ ID NO: 7531 - protein, 45 aa, Artificial Sequence
  GFR-binding peptide
  MOD_RES (5), (42), (44): Xaa is C or S
RNVQXRPTQVQLSAISVLYLEIVRKKPIFLKNYQTLEDHLAXKXE

SEQ ID NO: 7532 - protein, 37 aa, Artificial Sequence
  GFR-binding peptide
  MOD_RES (6), (7): Xaa is C or S
YVPKPXXAPTKLSPISVLYKDDSSNVILKYHYNMVVR

SEQ ID NO: 7533 - protein, 32 aa, Artificial Sequence
  GFR-binding peptide
  MOD_RES (31), (31): Xaa is C or S
VPQDLSATSILYYVGRTPKVLRKHRMVVKSXK

SEQ ID NO: 7534 - protein, 38 aa, Artificial Sequence
  GFR-binding peptide
  MOD_RES (6), (7): Xaa is C or S
SIPKAXXVPTELSPISMLYKDEYDKVVLKYHYEMVVEG

SEQ ID NO: 7535 - protein, 36 aa, Artificial Sequence
  GFR-binding peptide
  MOD_RES (34), (36): Xaa is C or S
  MOD_RES (14), (15), (16), (17), (18): Xaa is A or G
  MOD_RES (19), (20), (21), (22): Xaa is A or G or is absent
APTQLSAISVLYLXXXXXXXXXLKNYQNMVVRAXGX

SEQ ID NO: 7536 - protein, 38 aa, Artificial Sequence
  GFR-binding peptide
  MOD_RES (3), (4): Xaa is C or S
  MOD_RES (18), (19), (20), (21), (22): Xaa is A or G
  MOD_RES (23), (24), (25), (26): Xaa is A or G or is absent
KAXXVPTKLNAISVLYFXXXXXXXXXLKKYREGMSVAE

SEQ ID NO: 7537 - protein, 37 aa, Artificial Sequence
  GFR-binding peptide
  MOD_RES (1), (34), (36): Xaa is C or S
  MOD_RES (15), (16), (17), (18), (19): Xaa is A or G
  MOD_RES (20), (21), (22), (23): Xaa is A or G or is absent
XVPQALNAISILYFXXXXXXXXXLKKYRMIVRSXKXS

SEQ ID NO: 7538 - protein, 39 aa, Artificial Sequence
  GFR-binding peptide
  MOD_RES (5), (6), (37), (39): Xaa is C or S
SASPXXVSQDLNAISILYFIGKTPKILKKYRMIVKSXKX

SEQ ID NO: 7539 - protein, 36 aa, Artificial Sequence
  GFR-binding peptide
RPTQVQLSAISVLYLEIVRKKPIFLKNYQTLEDHLA

SEQ ID NO: 7540 - protein, 37 aa, Artificial Sequence
  GFR-binding peptide
  MOD_RES (2), (3), (37): Xaa is C or S
  MOD_RES (17), (18), (19), (20), (21): Xaa is A or G
  MOD_RES (22), (23), (24), (25): Xaa is A or G or is absent
PXXAPTQLSAISVLYLXXXXXXXXXLKNYQNMVVRAX

SEQ ID NO: 7541 - protein, 34 aa, Artificial Sequence
  GFR-binding peptide
  MOD_RES (32), (34): Xaa is C or S
APTQLSPISVLYKDDSSNVILKYHYNMVVRAXGX

SEQ ID NO: 7542 - protein, 33 aa, Artificial Sequence
  GFR-binding peptide
  MOD_RES (15), (16), (17), (18), (19): Xaa is A or G
  MOD_RES (20), (21), (22), (23): Xaa is A or G or is absent
PTQVQLSPISVLYKXXXXXXXXXLKYHYTLEDH

SEQ ID NO: 7543 - protein, 38 aa, Artificial Sequence
  GFR-binding peptide
  MOD_RES (2), (3), (37): Xaa is C or S
  MOD_RES (17), (18), (19), (20), (21): Xaa is A or G
  MOD_RES (22), (23), (24), (25): Xaa is A or G or is absent
PXXAPTQLNAISVLYFXXXXXXXXXLKKYRNMVVRAXG

SEQ ID NO: 7544 - protein, 37 aa, Artificial Sequence
  GFR-binding peptide
  MOD_RES (3), (4): Xaa is C or S
  MOD_RES (18), (19), (20), (21), (22): Xaa is A or G
  MOD_RES (23), (24), (25), (26): Xaa is A or G or is absent
KPXXAPTKLSAISVLYLXXXXXXXXXLKNYQNMVVRS

SEQ ID NO: 7545 - protein, 40 aa, Artificial Sequence
  GFR-binding peptide
  MOD_RES (3), (4), (38), (40): Xaa is C or S
  MOD_RES (18), (19), (20), (21), (22): Xaa is A or G
  MOD_RES (23), (24), (25), (26): Xaa is A or G or is absent
KAXXAPTKLNAISVLYFXXXXXXXXXLKKYRNMVVKAXGX

SEQ ID NO: 7546 - protein, 38 aa, Artificial Sequence
  GFR-binding peptide
  MOD_RES (1), (35), (37): Xaa is C or S
  MOD_RES (15), (16), (17), (18), (19): Xaa is A or G
  MOD_RES (20), (21), (22), (23): Xaa is A or G or is absent
XVPTELNAISMLYFXXXXXXXXXLKKYREMVVEGXGXR

SEQ ID NO: 7547 - protein, 41 aa, Artificial Sequence
  GFR-binding peptide
  MOD_RES (1), (38), (40): Xaa is C or S
  MOD_RES (17), (18), (19), (20), (21): Xaa is A or G
  MOD_RES (22), (23), (24), (25): Xaa is A or G or is absent
XRPTQVQLSAISVLYLXXXXXXXXXLKNYQTLEDHLAXKXE

SEQ ID NO: 7548 - protein, 36 aa, Artificial Sequence
  GFR-binding peptide
  MOD_RES (1), (2), (35): Xaa is C or S
  MOD_RES (16), (17), (18), (19), (20): Xaa is A or G
  MOD_RES (21), (22), (23), (24): Xaa is A or G or is absent
XXVPQDLSAISILYLXXXXXXXXXLKNYQMVVKSXK

SEQ ID NO: 7549 - protein, 37 aa, Artificial Sequence
  GFR-binding peptide
  MOD_RES (6), (7): Xaa is C or S
SIPKAXXVPTELNAISMLYFDEYDKVVLKKYREMVVE

SEQ ID NO: 7550 - protein, 37 aa, Artificial Sequence
  GFR-binding peptide
  MOD_RES (3), (4): Xaa is C or S
  MOD_RES (18), (19), (20), (21), (22): Xaa is A or G
  MOD_RES (23), (24), (25), (26): Xaa is A or G or is absent
KPXXAPTKLNAISVLYFXXXXXXXXXLKKYRNMVVRS

SEQ ID NO: 7551 - protein, 35 aa, Artificial Sequence
  GFR-binding peptide
  MOD_RES (32), (34): Xaa is C or S
APTKLNAISVLYFDSSNNVILKKYRNMVVKAXGXH

SEQ ID NO: 7552 - protein, 38 aa, Artificial Sequence
  GFR-binding peptide
  MOD_RES (4), (4): Xaa is C or S
  MOD_RES (20), (21), (22), (23), (24): Xaa is A or G
  MOD_RES (25), (26), (27), (28): Xaa is A or G or is absent
NVQXRPTQVQLNAISVLYFXXXXXXXXXLKKYRTLEDH

SEQ ID NO: 7553 - protein, 41 aa, Artificial Sequence
  GFR-binding peptide
  MOD_RES (5), (6), (40): Xaa is C or S
  MOD_RES (20), (21), (22), (23), (24): Xaa is A or G
  MOD_RES (25), (26), (27), (28): Xaa is A or G or is absent
VPKPXXAPTQLNAISVLYFXXXXXXXXXLKKYRNMVVRAXG

SEQ ID NO: 7554 - protein, 38 aa, Artificial Sequence
  GFR-binding peptide
  MOD_RES (35), (37): Xaa is C or S
  MOD_RES (14), (15), (16), (17), (18): Xaa is A or G
  MOD_RES (19), (20), (21), (22): Xaa is A or G or is absent
VPTKLSATSVLYYXXXXXXXXXLRKHREGMSVAEXGXR

SEQ ID NO: 7555 - protein, 35 aa, Artificial Sequence
  GFR-binding peptide
  MOD_RES (1), (34): Xaa is C or S
  MOD_RES (15), (16), (17), (18), (19): Xaa is A or G
  MOD_RES (20), (21), (22), (23): Xaa is A or G or is absent
XVSQDLSPISILYKXXXXXXXXXLKYHYMIVKSXK

SEQ ID NO: 7556 - protein, 37 aa, Artificial Sequence
  GFR-binding peptide
  MOD_RES (4), (5): Xaa is C or S
  MOD_RES (19), (20), (21), (22), (23): Xaa is A or G
  MOD_RES (24), (25), (26), (27): Xaa is A or G or is absent
ASPXXVPQDLNAISILYFXXXXXXXXXLKKYRMVVKS

SEQ ID NO: 7557 - protein, 40 aa, Artificial Sequence
  GFR-binding peptide
  MOD_RES (5), (6): Xaa is C or S
  MOD_RES (20), (21), (22), (23), (24): Xaa is A or G
  MOD_RES (25), (26), (27), (28): Xaa is A or G or is absent
VGKAXXVPTKLSPISVLYKXXXXXXXXXLKYHYEGMSVAE

SEQ ID NO: 7558 - protein, 38 aa, Artificial Sequence
  GFR-binding peptide
  MOD_RES (4), (5), (37): Xaa is C or S
PKPXXAPTKLSAISVLYLDDSSNVILKNYQNMVVRSXG

SEQ ID NO: 7559 - protein, 34 aa, Artificial Sequence
  GFR-binding peptide
  MOD_RES (1), (2): Xaa is C or S
  MOD_RES (16), (17), (18), (19), (20): Xaa is A or G
  MOD_RES (21), (22), (23), (24): Xaa is A or G or is absent
XXAPTQLSAISVLYLXXXXXXXXXLKNYQNMVVR

SEQ ID NO: 7560 - protein, 38 aa, Artificial Sequence
  GFR-binding peptide
  MOD_RES (3), (4), (37): Xaa is C or S
  MOD_RES (18), (19), (20), (21), (22): Xaa is A or G
  MOD_RES (23), (24), (25), (26): Xaa is A or G or is absent
APXXVPQALSATSILYYXXXXXXXXXLRKHRMIVRSXK

SEQ ID NO: 7561 - protein, 38 aa, Artificial Sequence
  GFR-binding peptide
  MOD_RES (4), (5), (37): Xaa is C or S
PKPXXAPTKLSPISVLYKDDSSNVILKYHYNMVVRSXG

SEQ ID NO: 7562 - protein, 36 aa, Artificial Sequence
  GFR-binding peptide
RPTQVQLSATSVLYYEIVRKKPIFLRKHRTLEDHLA

SEQ ID NO: 7563 - protein, 40 aa, Artificial Sequence
  GFR-binding peptide
  MOD_RES (5), (6), (38), (40): Xaa is C or S
IPKAXXVPTELSATSMLYYDENEKVVLRKHRDMVVEGXGX

SEQ ID NO: 7564 - protein, 36 aa, Artificial Sequence
  GFR-binding peptide
  MOD_RES (1), (2), (36): Xaa is C or S
  MOD_RES (16), (17), (18), (19), (20): Xaa is A or G
  MOD_RES (21), (22), (23), (24): Xaa is A or G or is absent
XXVPTELSAISMLYLXXXXXXXXXLKNYQEMVVEGX

SEQ ID NO: 7565 - protein, 31 aa, Artificial Sequence
  GFR-binding peptide
  MOD_RES (31), (31): Xaa is C or S
VPQALSAISILYLVGRKPKVLKNYQMIVRSX

SEQ ID NO: 7566 - protein, 44 aa, Artificial Sequence
  GFR-binding peptide
  MOD_RES (4), (41), (43): Xaa is C or S
NVQXRPTQVQLNAISVLYFEIVRKKPIFLKKYRTLEDHLAXKXE

SEQ ID NO: 7567 - protein, 39 aa, Artificial Sequence
  GFR-binding peptide
  MOD_RES (3), (4), (37), (39): Xaa is C or S
  MOD_RES (18), (19), (20), (21), (22): Xaa is A or G
  MOD_RES (23), (24), (25), (26): Xaa is A or G or is absent
SPXXVPQDLSAISILYLXXXXXXXXXLKNYQMVVKSXKX

SEQ ID NO: 7568 - protein, 42 aa, Artificial Sequence
  GFR-binding peptide
  MOD_RES (6), (7), (41): Xaa is C or S
  MOD_RES (21), (22), (23), (24), (25): Xaa is A or G
  MOD_RES (26), (27), (28), (29): Xaa is A or G or is absent
AVPKAXXAPTKLSPISVLYKXXXXXXXXXLKYHYNMVVKAXG

SEQ ID NO: 7569 - protein, 34 aa, Artificial Sequence
  GFR-binding peptide
  MOD_RES (1), (34): Xaa is C or S
XVPTKLNAISVLYFDDMGVPTLKKYREGMSVAEX

SEQ ID NO: 7570 - protein, 41 aa, Artificial Sequence
  GFR-binding peptide
  MOD_RES (5), (6), (38), (40): Xaa is C or S
IPKAXXVPTELSPISMLYKDENEKVVLKYHYDMVVEGXGXR

SEQ ID NO: 7571 - protein, 35 aa, Artificial Sequence
  GFR-binding peptide
  MOD_RES (1), (33), (35): Xaa is C or S
XAPTQLSATSVLYYDDSSNVILRKHRNMVVRAXGX

SEQ ID NO: 7572 - protein, 36 aa, Artificial Sequence
  GFR-binding peptide
  MOD_RES (34), (36): Xaa is C or S
  MOD_RES (14), (15), (16), (17), (18): Xaa is A or G
  MOD_RES (19), (20), (21), (22): Xaa is A or G or is absent
VPTELNAISMLYFXXXXXXXXXLKKYREMVVEGXGX

SEQ ID NO: 7573 - protein, 35 aa, Artificial Sequence
  GFR-binding peptide
  MOD_RES (1), (33), (35): Xaa is C or S
XAPTKLSATSVLYYDDSSNVILRKHRNMVVRSXGX

SEQ ID NO: 7574 - protein, 35 aa, Artificial Sequence
  GFR-binding peptide
  MOD_RES (34), (34): Xaa is C or S
  MOD_RES (14), (15), (16), (17), (18): Xaa is A or G
  MOD_RES (19), (20), (21), (22): Xaa is A or G or is absent
VPTELSAISMLYLXXXXXXXXXLKNYQDMVVEGXG

SEQ ID NO: 7575 - protein, 38 aa, Artificial Sequence
  GFR-binding peptide
  MOD_RES (3), (37): Xaa is C or S
  MOD_RES (17), (18), (19), (20), (21): Xaa is A or G
  MOD_RES (22), (23), (24), (25): Xaa is A or G or is absent
PTXAPTKLNAISVLYFXXXXXXXXXLKKYRNMVVRSXG

SEQ ID NO: 7576 - protein, 37 aa, Artificial Sequence
  GFR-binding peptide
  MOD_RES (2), (3), (35), (37): Xaa is C or S
AXXAPTKLSPISVLYKDSSNNVILKYHYNMVVKAXGX

SEQ ID NO: 7577 - protein, 33 aa, Artificial Sequence
  GFR-binding peptide
  MOD_RES (1), (33): Xaa is C or S
XAPTKLSAISVLYLDSSNNVILKNYQNMVVKAX

SEQ ID NO: 7578 - protein, 38 aa, Artificial Sequence
  GFR-binding peptide
  MOD_RES (5), (6): Xaa is C or S
  MOD_RES (20), (21), (22), (23), (24): Xaa is A or G
  MOD_RES (25), (26), (27), (28): Xaa is A or G or is absent
VPKAXXAPTKLNAISVLYFXXXXXXXXXLKKYRNMVVK

SEQ ID NO: 7579 - protein, 31 aa, Artificial Sequence
  GFR-binding peptide
APTKLSAISVLYLDSSNNVILKNYQNMVVKA

SEQ ID NO: 7580 - protein, 40 aa, Artificial Sequence
  GFR-binding peptide
  MOD_RES (4), (5), (39): Xaa is C or S
  MOD_RES (19), (20), (21), (22), (23): Xaa is A or G
  MOD_RES (24), (25), (26), (27): Xaa is A or G or is absent
PKAXXVPTELNAISMLYFXXXXXXXXXLKKYREMVVEGXG

SEQ ID NO: 7581 - protein, 43 aa, Artificial Sequence
  GFR-binding peptide
  MOD_RES (6), (7), (41), (43): Xaa is C or S
  MOD_RES (21), (22), (23), (24), (25): Xaa is A or G
  MOD_RES (26), (27), (28), (29): Xaa is A or G or is absent
KIPKAXXVPTELSPISMLYKXXXXXXXXXLKYHYDMVVEGXGX

SEQ ID NO: 7582 - protein, 40 aa, Artificial Sequence
  GFR-binding peptide
  MOD_RES (5), (6), (37), (39): Xaa is C or S
SAAPXXVPQALSPISILYKVGRKPKVLKYHYMIVRSXKXS

SEQ ID NO: 7583 - protein, 33 aa, Artificial Sequence
  GFR-binding peptide
  MOD_RES (1), (1): Xaa is C or S
  MOD_RES (15), (16), (17), (18), (19): Xaa is A or G
  MOD_RES (20), (21), (22), (23): Xaa is A or G or is absent
XVPTELSPISMLYKXXXXXXXXXLKYHYDMVVE

SEQ ID NO: 7584 - protein, 34 aa, Artificial Sequence
  GFR-binding peptide
  MOD_RES (2), (2): Xaa is C or S
  MOD_RES (16), (17), (18), (19), (20): Xaa is A or G
  MOD_RES (21), (22), (23), (24): Xaa is A or G or is absent
TXAPTKLSPISVLYKXXXXXXXXXLKYHYNMVVR

SEQ ID NO: 7585 - protein, 39 aa, Artificial Sequence
  GFR-binding peptide
  MOD_RES (6), (7): Xaa is C or S
  MOD_RES (21), (22), (23), (24), (25): Xaa is A or G
  MOD_RES (26), (27), (28), (29): Xaa is A or G or is absent
TVPKPXXAPTQLNAISVLYFXXXXXXXXXLKKYRNMVVR

SEQ ID NO: 7586 - protein, 35 aa, Artificial Sequence
  GFR-binding peptide
  MOD_RES (32), (34): Xaa is C or S
APTQLSATSVLYYDDSSNVILRKHRNMVVRAXGXH

SEQ ID NO: 7587 - protein, 42 aa, Artificial Sequence
  GFR-binding peptide
  MOD_RES (2), (39), (41): Xaa is C or S
QXRPTQVQLSPISVLYKEIVRKKPIFLKYHYTLEDHLAXKXE

SEQ ID NO: 7588 - protein, 39 aa, Artificial Sequence
  GFR-binding peptide
  MOD_RES (2), (3), (36), (38): Xaa is C or S
  MOD_RES (17), (18), (19), (20), (21): Xaa is A or G
  MOD_RES (22), (23), (24), (25): Xaa is A or G or is absent
PXXVSQDLSAISILYLXXXXXXXXXLKNYQMIVKSXKXS

SEQ ID NO: 7589 - protein, 38 aa, Artificial Sequence
  GFR-binding peptide
  MOD_RES (36), (38): Xaa is C or S
  MOD_RES (15), (16), (17), (18), (19): Xaa is A or G
  MOD_RES (20), (21), (22), (23): Xaa is A or G or is absent
PTQVQLSATSVLYYXXXXXXXXXLRKHRTLEDHLAXKX

SEQ ID NO: 7590 - protein, 35 aa, Artificial Sequence
  GFR-binding peptide
  MOD_RES (3), (4), (35): Xaa is C or S
SPXXVPQDLSATSILYYVGRTPKVLRKHRMVVKSX

SEQ ID NO: 7591 - protein, 36 aa, Artificial Sequence
  GFR-binding peptide
  MOD_RES (2), (3), (34), (36): Xaa is C or S
PXXVPQALSPISILYKVGRKPKVLKYHYMIVRSXKX

SEQ ID NO: 7592 - protein, 35 aa, Artificial Sequence
  GFR-binding peptide
  MOD_RES (1), (2), (35): Xaa is C or S
  MOD_RES (16), (17), (18), (19), (20): Xaa is A or G
  MOD_RES (21), (22), (23), (24): Xaa is A or G or is absent
XXVSQDLNAISILYFXXXXXXXXXLKKYRMIVKSX

SEQ ID NO: 7593 - protein, 33 aa, Artificial Sequence
  GFR-binding peptide
  MOD_RES (32), (32): Xaa is C or S
VPTELSATSMLYYDENEKVVLRKHRDMVVEGXG

SEQ ID NO: 7594 - protein, 42 aa, Artificial Sequence
  GFR-binding peptide
  MOD_RES (3), (40), (42): Xaa is C or S
  MOD_RES (19), (20), (21), (22), (23): Xaa is A or G
  MOD_RES (24), (25), (26), (27): Xaa is A or G or is absent
VQXRPTQVQLNAISVLYFXXXXXXXXXLKKYRTLEDHLAXKX

SEQ ID NO: 7595 - protein, 39 aa, Artificial Sequence
  GFR-binding peptide
  MOD_RES (5), (39): Xaa is C or S
  MOD_RES (19), (20), (21), (22), (23): Xaa is A or G
  MOD_RES (24), (25), (26), (27): Xaa is A or G or is absent
TKPTXAPTKLSATSVLYYXXXXXXXXXLRKHRNMVVRSX

SEQ ID NO: 7596 - protein, 38 aa, Artificial Sequence
  GFR-binding peptide
  MOD_RES (5), (6), (37): Xaa is C or S
SASPXXVPQDLSATSILYYVGRTPKVLRKHRMVVKSXK

SEQ ID NO: 7597 - protein, 40 aa, Artificial Sequence
  GFR-binding peptide
  MOD_RES (5), (6), (38), (40): Xaa is C or S
VPKAXXAPTKLSPISVLYKDSSNNVILKYHYNMVVKAXGX

SEQ ID NO: 7598 - protein, 37 aa, Artificial Sequence
  GFR-binding peptide
  MOD_RES (3), (4): Xaa is C or S
  MOD_RES (18), (19), (20), (21), (22): Xaa is A or G
  MOD_RES (23), (24), (25), (26): Xaa is A or G or is absent
KAXXVPTELSPISMLYKXXXXXXXXXLKYHYDMVVEG

SEQ ID NO: 7599 - protein, 38 aa, Artificial Sequence
  GFR-binding peptide
  MOD_RES (2), (3), (35), (37): Xaa is C or S
AXXAPTKLSAISVLYLDSSNNVILKNYQNMVVKAXGXH

SEQ ID NO: 7600 - protein, 38 aa, Artificial Sequence
  GFR-binding peptide
  MOD_RES (2), (3), (36), (38): Xaa is C or S
  MOD_RES (17), (18), (19), (20), (21): Xaa is A or G
  MOD_RES (22), (23), (24), (25): Xaa is A or G or is absent
PXXVPQALSAISILYLXXXXXXXXXLKNYQMIVRSXKX

SEQ ID NO: 7601 - protein, 39 aa, Artificial Sequence
  GFR-binding peptide
  MOD_RES (6), (7), (39): Xaa is C or S
YVPKPXXAPTKLSAISVLYLDDSSNVILKNYQNMVVRSX

SEQ ID NO: 7602 - protein, 40 aa, Artificial Sequence
  GFR-binding peptide
  MOD_RES (5), (5): Xaa is C or S
  MOD_RES (21), (22), (23), (24), (25): Xaa is A or G
  MOD_RES (26), (27), (28), (29): Xaa is A or G or is absent
RNVQXRPTQVQLSAISVLYLXXXXXXXXXLKNYQTLEDHL

SEQ ID NO: 7603 - protein, 35 aa, Artificial Sequence
  GFR-binding peptide
  MOD_RES (2), (3), (34): Xaa is C or S
PXXVPQALNAISILYFVGRKPKVLKKYRMIVRSXK

SEQ ID NO: 7604 - protein, 31 aa, Artificial Sequence
  GFR-binding peptide
APTKLNAISVLYFDSSNNVILKKYRNMVVKA

SEQ ID NO: 7605 - protein, 38 aa, Artificial Sequence
  GFR-binding peptide
  MOD_RES (6), (7), (38): Xaa is C or S
ASAAPXXVPQALSPISILYKVGRKPKVLKYHYMIVRSX

SEQ ID NO: 7606 - protein, 34 aa, Artificial Sequence
  GFR-binding peptide
  MOD_RES (32), (34): Xaa is C or S
APTKLSPISVLYKDDSSNVILKYHYNMVVRSXGX

SEQ ID NO: 7607 - protein, 35 aa, Artificial Sequence
  GFR-binding peptide
  MOD_RES (4), (5): Xaa is C or S
PKAXXVPTELNAISMLYFDEYDKVVLKKYREMVVE

SEQ ID NO: 7608 - protein, 35 aa, Artificial Sequence
  GFR-binding peptide
  MOD_RES (2), (3), (34): Xaa is C or S
PXXVPQALSPISILYKVGRKPKVLKYHYMIVRSXK

SEQ ID NO: 7609 - protein, 40 aa, Artificial Sequence
  GFR-binding peptide
  MOD_RES (3), (40): Xaa is C or S
  MOD_RES (19), (20), (21), (22), (23): Xaa is A or G
  MOD_RES (24), (25), (26), (27): Xaa is A or G or is absent
VQXRPTQVQLSPISVLYKXXXXXXXXXLKYHYTLEDHLAX

SEQ ID NO: 7610 - protein, 37 aa, Artificial Sequence
  GFR-binding peptide
  MOD_RES (4), (5): Xaa is C or S
  MOD_RES (19), (20), (21), (22), (23): Xaa is A or G
  MOD_RES (24), (25), (26), (27): Xaa is A or G or is absent
PKAXXVPTELSPISMLYKXXXXXXXXXLKYHYEMVVE

SEQ ID NO: 7611 - protein, 32 aa, Artificial Sequence
  GFR-binding peptide
  MOD_RES (32), (32): Xaa is C or S
VPTELNAISMLYFDENEKVVLKKYRDMVVEGX

SEQ ID NO: 7612 - protein, 35 aa, Artificial Sequence
  GFR-binding peptide
  MOD_RES (1), (2): Xaa is C or S
  MOD_RES (16), (17), (18), (19), (20): Xaa is A or G
  MOD_RES (21), (22), (23), (24): Xaa is A or G or is absent
XXAPTKLSATSVLYYXXXXXXXXXLRKHRNMVVRS

SEQ ID NO: 7613 - protein, 35 aa, Artificial Sequence
  GFR-binding peptide
  MOD_RES (1), (2), (34): Xaa is C or S
XXAPTKLSPISVLYKDSSNNVILKYHYNMVVKAXG

SEQ ID NO: 7614 - protein, 43 aa, Artificial Sequence
  GFR-binding peptide
  MOD_RES (6), (7), (41), (43): Xaa is C or S
  MOD_RES (21), (22), (23), (24), (25): Xaa is A or G
  MOD_RES (26), (27), (28), (29): Xaa is A or G or is absent
SIPKAXXVPTELSAISMLYLXXXXXXXXXLKNYQEMVVEGXGX

SEQ ID NO: 7615 - protein, 36 aa, Artificial Sequence
  GFR-binding peptide
  MOD_RES (1), (2), (36): Xaa is C or S
  MOD_RES (16), (17), (18), (19), (20): Xaa is A or G
  MOD_RES (21), (22), (23), (24): Xaa is A or G or is absent
XXAPTQLSPISVLYKXXXXXXXXXLKYHYNMVVRAX

SEQ ID NO: 7616 - protein, 39 aa, Artificial Sequence
  GFR-binding peptide
  MOD_RES (6), (7): Xaa is C or S
  MOD_RES (21), (22), (23), (24), (25): Xaa is A or G
  MOD_RES (26), (27), (28), (29): Xaa is A or G or is absent
KIPKAXXVPTELSATSMLYYXXXXXXXXXLRKHRDMVVE

SEQ ID NO: 7617 - protein, 41 aa, Artificial Sequence
  GFR-binding peptide
  MOD_RES (3), (40): Xaa is C or S
  MOD_RES (19), (20), (21), (22), (23): Xaa is A or G
  MOD_RES (24), (25), (26), (27): Xaa is A or G or is absent
VQXRPTQVQLNAISVLYFXXXXXXXXXLKKYRTLEDHLAXK

SEQ ID NO: 7618 - protein, 36 aa, Artificial Sequence
  GFR-binding peptide
  MOD_RES (4), (5): Xaa is C or S
PKAXXVPTELSATSMLYYDENEKVVLRKHRDMVVEG

SEQ ID NO: 7619 - protein, 38 aa, Artificial Sequence
  GFR-binding peptide
  MOD_RES (5), (6), (38): Xaa is C or S
IPKAXXVPTELSPISMLYKDEYDKVVLKYHYEMVVEGX

SEQ ID NO: 7620 - protein, 39 aa, Artificial Sequence
  GFR-binding peptide
  MOD_RES (6), (38): Xaa is C or S
VTKPTXAPTKLSAISVLYLDDSSNVILKNYQNMVVRSXG

SEQ ID NO: 7621 - protein, 39 aa, Artificial Sequence
  GFR-binding peptide
  MOD_RES (5), (5): Xaa is C or S
RNVQXRPTQVQLSATSVLYYEIVRKKPIFLRKHRTLEDH

SEQ ID NO: 7622 - protein, 39 aa, Artificial Sequence
  GFR-binding peptide
  MOD_RES (3), (3): Xaa is C or S
VQXRPTQVQLSPISVLYKEIVRKKPIFLKYHYTLEDHLA

SEQ ID NO: 7623 - protein, 42 aa, Artificial Sequence
  GFR-binding peptide
  MOD_RES (6), (7), (40), (42): Xaa is C or S
  MOD_RES (21), (22), (23), (24), (25): Xaa is A or G
  MOD_RES (26), (27), (28), (29): Xaa is A or G or is absent
ASASPXXVSQDLSPISILYKXXXXXXXXXLKYHYMIVKSXKX

SEQ ID NO: 7624 - protein, 35 aa, Artificial Sequence
  GFR-binding peptide
  MOD_RES (3), (35): Xaa is C or S
PTXAPTKLSPISVLYKDDSSNVILKYHYNMVVRSX

SEQ ID NO: 7625 - protein, 40 aa, Artificial Sequence
  GFR-binding peptide
  MOD_RES (6), (7), (39): Xaa is C or S
TVPKPXXAPTQLSAISVLYLDDSSNVILKNYQNMVVRAXG

SEQ ID NO: 7626 - protein, 34 aa, Artificial Sequence
  GFR-binding peptide
  MOD_RES (1), (2), (33): Xaa is C or S
XXVPQALNAISILYFVGRKPKVLKKYRMIVRSXK

SEQ ID NO: 7627 - protein, 39 aa, Artificial Sequence
  GFR-binding peptide
  MOD_RES (3), (4), (37), (39): Xaa is C or S
  MOD_RES (18), (19), (20), (21), (22): Xaa is A or G
  MOD_RES (23), (24), (25), (26): Xaa is A or G or is absent
SPXXVSQDLSPISILYKXXXXXXXXXLKYHYMIVKSXKX

SEQ ID NO: 7628 - protein, 42 aa, Artificial Sequence
  GFR-binding peptide
  MOD_RES (5), (6), (40), (42): Xaa is C or S
  MOD_RES (20), (21), (22), (23), (24): Xaa is A or G
  MOD_RES (25), (26), (27), (28): Xaa is A or G or is absent
VPKPXXAPTQLSPISVLYKXXXXXXXXXLKYHYNMVVRAXGX

SEQ ID NO: 7629 - protein, 36 aa, Artificial Sequence
  GFR-binding peptide
  MOD_RES (3), (4): Xaa is C or S
  MOD_RES (18), (19), (20), (21), (22): Xaa is A or G
  MOD_RES (23), (24), (25), (26): Xaa is A or G or is absent
KAXXVPTELNAISMLYFXXXXXXXXXLKKYREMVVE

SEQ ID NO: 7630 - protein, 41 aa, Artificial Sequence
  GFR-binding peptide
  MOD_RES (5), (6), (40): Xaa is C or S
  MOD_RES (20), (21), (22), (23), (24): Xaa is A or G
  MOD_RES (25), (26), (27), (28): Xaa is A or G or is absent
VPKPXXAPTKLSATSVLYYXXXXXXXXXLRKHRNMVVRSXG

SEQ ID NO: 7631 - protein, 40 aa, Artificial Sequence
  GFR-binding peptide
  MOD_RES (5), (5): Xaa is C or S
RNVQXRPTQVQLSATSVLYYEIVRKKPIFLRKHRTLEDHL

SEQ ID NO: 7632 - protein, 37 aa, Artificial Sequence
  GFR-binding peptide
  MOD_RES (1), (1): Xaa is C or S
XRPTQVQLSPISVLYKEIVRKKPIFLKYHYTLEDHLA

SEQ ID NO: 7633 - protein, 31 aa, Artificial Sequence
  GFR-binding peptide
  MOD_RES (1), (1): Xaa is C or S
XVPTELSATSMLYYDEYDKVVLRKHREMVVE

SEQ ID NO: 7634 - protein, 37 aa, Artificial Sequence
  GFR-binding peptide
  MOD_RES (2), (3), (37): Xaa is C or S
  MOD_RES (17), (18), (19), (20), (21): Xaa is A or G
  MOD_RES (22), (23), (24), (25): Xaa is A or G or is absent
AXXAPTKLNAISVLYFXXXXXXXXXLKKYRNMVVKAX

SEQ ID NO: 7635 - protein, 36 aa, Artificial Sequence
  GFR-binding peptide
  MOD_RES (2), (3), (34), (36): Xaa is C or S
PXXVPQDLNAISILYFVGRTPKVLKKYRMVVKSXKX

SEQ ID NO: 7636 - protein, 37 aa, Artificial Sequence
  GFR-binding peptide
  MOD_RES (3), (4), (36): Xaa is C or S
KPXXAPTQLSPISVLYKDDSSNVILKYHYNMVVRAXG

SEQ ID NO: 7637 - protein, 38 aa, Artificial Sequence
  GFR-binding peptide
  MOD_RES (2), (3), (37): Xaa is C or S
  MOD_RES (17), (18), (19), (20), (21): Xaa is A or G
  MOD_RES (22), (23), (24), (25): Xaa is A or G or is absent
PXXAPTQLSPISVLYKXXXXXXXXXLKYHYNMVVRAXG

SEQ ID NO: 7638 - protein, 39 aa, Artificial Sequence
  GFR-binding peptide
  MOD_RES (1), (38): Xaa is C or S
XRPTQVQLNAISVLYFEIVRKKPIFLKKYRTLEDHLAXK

SEQ ID NO: 7639 - protein, 38 aa, Artificial Sequence
  GFR-binding peptide
  MOD_RES (4), (5): Xaa is C or S
  MOD_RES (19), (20), (21), (22), (23): Xaa is A or G
  MOD_RES (24), (25), (26), (27): Xaa is A or G or is absent
PKAXXVPTELNAISMLYFXXXXXXXXXLKKYREMVVEG

SEQ ID NO: 7640 - protein, 41 aa, Artificial Sequence
  GFR-binding peptide
  MOD_RES (3), (4), (38), (40): Xaa is C or S
  MOD_RES (18), (19), (20), (21), (22): Xaa is A or G
  MOD_RES (23), (24), (25), (26): Xaa is A or G or is absent
KAXXAPTKLNAISVLYFXXXXXXXXXLKKYRNMVVKAXGXH

SEQ ID NO: 7641 - protein, 40 aa, Artificial Sequence
  GFR-binding peptide
  MOD_RES (6), (7): Xaa is C or S
  MOD_RES (21), (22), (23), (24), (25): Xaa is A or G
  MOD_RES (26), (27), (28), (29): Xaa is A or G or is absent
KIPKAXXVPTELNAISMLYFXXXXXXXXXLKKYRDMVVEG

SEQ ID NO: 7642 - protein, 34 aa, Artificial Sequence
  GFR-binding peptide
  MOD_RES (3), (4): Xaa is C or S
KAXXVPTELSATSMLYYDEYDKVVLRKHREMVVE

SEQ ID NO: 7643 - protein, 42 aa, Artificial Sequence
  GFR-binding peptide
  MOD_RES (6), (7), (41): Xaa is C or S
  MOD_RES (21), (22), (23), (24), (25): Xaa is A or G
  MOD_RES (26), (27), (28), (29): Xaa is A or G or is absent
AVPKAXXAPTKLNAISVLYFXXXXXXXXXLKKYRNMVVKAXG

SEQ ID NO: 7644 - protein, 38 aa, Artificial Sequence
  GFR-binding peptide
  MOD_RES (5), (6): Xaa is C or S
  MOD_RES (20), (21), (22), (23), (24): Xaa is A or G
  MOD_RES (25), (26), (27), (28): Xaa is A or G or is absent
SASPXXVPQDLSATSILYYXXXXXXXXXLRKHRMVVKS

SEQ ID NO: 7645 - protein, 42 aa, Artificial Sequence
  GFR-binding peptide
  MOD_RES (5), (6), (39), (41): Xaa is C or S
  MOD_RES (20), (21), (22), (23), (24): Xaa is A or G
  MOD_RES (25), (26), (27), (28): Xaa is A or G or is absent
SAAPXXVPQALSPISILYKXXXXXXXXXLKYHYMIVRSXKXS

SEQ ID NO: 7646 - protein, 37 aa, Artificial Sequence
  GFR-binding peptide
  MOD_RES (37), (37): Xaa is C or S
  MOD_RES (16), (17), (18), (19), (20): Xaa is A or G
  MOD_RES (21), (22), (23), (24): Xaa is A or G or is absent
RPTQVQLSAISVLYLXXXXXXXXXLKNYQTLEDHLAX

SEQ ID NO: 7647 - protein, 38 aa, Artificial Sequence
  GFR-binding peptide
  MOD_RES (3), (4), (36), (38): Xaa is C or S
KPXXAPTQLSAISVLYLDDSSNVILKNYQNMVVRAXGX

SEQ ID NO: 7648 - protein, 33 aa, Artificial Sequence
  GFR-binding peptide
  MOD_RES (1), (32): Xaa is C or S
XVPQDLSATSILYYVGRTPKVLRKHRMVVKSXK

SEQ ID NO: 7649 - protein, 39 aa, Artificial Sequence
  GFR-binding peptide
  MOD_RES (4), (5), (37), (39): Xaa is C or S
PKAXXVPTELSATSMLYYDENEKVVLRKHRDMVVEGXGX

SEQ ID NO: 7650 - protein, 37 aa, Artificial Sequence
  GFR-binding peptide
  MOD_RES (37), (37): Xaa is C or S
RPTQVQLSATSVLYYEIVRKKPIFLRKHRTLEDHLAX

SEQ ID NO: 7651 - protein, 41 aa, Artificial Sequence
  GFR-binding peptide
  MOD_RES (5), (6), (40): Xaa is C or S
  MOD_RES (20), (21), (22), (23), (24): Xaa is A or G
  MOD_RES (25), (26), (27), (28): Xaa is A or G or is absent
VPKAXXAPTKLNAISVLYFXXXXXXXXXLKKYRNMVVKAXG

SEQ ID NO: 7652 - protein, 35 aa, Artificial Sequence
  GFR-binding peptide
  MOD_RES (35), (35): Xaa is C or S
TQVQLSPISVLYKEIVRKKPIFLKYHYTLEDHLAX

SEQ ID NO: 7653 - protein, 37 aa, Artificial Sequence
  GFR-binding peptide
  MOD_RES (1), (2), (35), (37): Xaa is C or S
  MOD_RES (16), (17), (18), (19), (20): Xaa is A or G
  MOD_RES (21), (22), (23), (24): Xaa is A or G or is absent
XXVPQDLSPISILYKXXXXXXXXXLKYHYMVVKSXKX

SEQ ID NO: 7654 - protein, 42 aa, Artificial Sequence
  GFR-binding peptide
  MOD_RES (5), (6), (39), (41): Xaa is C or S
  MOD_RES (20), (21), (22), (23), (24): Xaa is A or G
  MOD_RES (25), (26), (27), (28): Xaa is A or G or is absent
SASPXXVPQDLSAISILYLXXXXXXXXXLKNYQMVVKSXKXS

SEQ ID NO: 7655 - protein, 39 aa, Artificial Sequence
  GFR-binding peptide
  MOD_RES (4), (4): Xaa is C or S
NVQXRPTQVQLNAISVLYFEIVRKKPIFLKKYRTLEDHL

SEQ ID NO: 7656 - protein, 37 aa, Artificial Sequence
  GFR-binding peptide
  MOD_RES (3), (4), (37): Xaa is C or S
KAXXVPTKLSAISVLYLDDMGVPTLKNYQEGMSVAEX

SEQ ID NO: 7657 - protein, 36 aa, Artificial Sequence
  GFR-binding peptide
  MOD_RES (2), (2): Xaa is C or S
QXRPTQVQLNAISVLYFEIVRKKPIFLKKYRTLEDH

SEQ ID NO: 7658 - protein, 36 aa, Artificial Sequence
  GFR-binding peptide
  MOD_RES (5), (6): Xaa is C or S
VPKAXXAPTKLNAISVLYFDSSNNVILKKYRNMVVK

SEQ ID NO: 7659 - protein, 39 aa, Artificial Sequence
  GFR-binding peptide
  MOD_RES (4), (5), (37), (39): Xaa is C or S
PKPXXAPTQLSAISVLYLDDSSNVILKNYQNMVVRAXGX

SEQ ID NO: 7660 - protein, 40 aa, Artificial Sequence
  GFR-binding peptide
  MOD_RES (3), (4), (38), (40): Xaa is C or S
  MOD_RES (18), (19), (20), (21), (22): Xaa is A or G
  MOD_RES (23), (24), (25), (26): Xaa is A or G or is absent
KAXXVPTELSPISMLYKXXXXXXXXXLKYHYDMVVEGXGX

SEQ ID NO: 7661 - protein, 38 aa, Artificial Sequence
  GFR-binding peptide
  MOD_RES (3), (4), (36), (38): Xaa is C or S
KAXXVPTELSATSMLYYDENEKVVLRKHRDMVVEGXGX

SEQ ID NO: 7662 - protein, 40 aa, Artificial Sequence
  GFR-binding peptide
  MOD_RES (5), (6): Xaa is C or S
  MOD_RES (20), (21), (22), (23), (24): Xaa is A or G
  MOD_RES (25), (26), (27), (28): Xaa is A or G or is absent
VGKAXXVPTKLNAISVLYFXXXXXXXXXLKKYREGMSVAE

SEQ ID NO: 7663 - protein, 38 aa, Artificial Sequence
  GFR-binding peptide
  MOD_RES (4), (5), (36), (38): Xaa is C or S
AAPXXVPQALNAISILYFVGRKPKVLKKYRMIVRSXKX

SEQ ID NO: 7664 - protein, 34 aa, Artificial Sequence
  GFR-binding peptide
  MOD_RES (34), (34): Xaa is C or S
  MOD_RES (14), (15), (16), (17), (18): Xaa is A or G
  MOD_RES (19), (20), (21), (22): Xaa is A or G or is absent
APTKLSATSVLYYXXXXXXXXXLRKHRNMVVRSX

SEQ ID NO: 7665 - protein, 38 aa, Artificial Sequence
  GFR-binding peptide
  MOD_RES (4), (38): Xaa is C or S
  MOD_RES (18), (19), (20), (21), (22): Xaa is A or G
  MOD_RES (23), (24), (25), (26): Xaa is A or G or is absent
KPTXAPTKLSATSVLYYXXXXXXXXXLRKHRNMVVRSX

SEQ ID NO: 7666 - protein, 37 aa, Artificial Sequence
  GFR-binding peptide
  MOD_RES (2), (3), (34), (36): Xaa is C or S
PXXVPQDLSPISILYKVGRTPKVLKYHYMVVKSXKXS

SEQ ID NO: 7667 - protein, 41 aa, Artificial Sequence
  GFR-binding peptide
  MOD_RES (5), (5): Xaa is C or S
  MOD_RES (21), (22), (23), (24), (25): Xaa is A or G
  MOD_RES (26), (27), (28), (29): Xaa is A or G or is absent
RNVQXRPTQVQLNAISVLYFXXXXXXXXXLKKYRTLEDHLA

SEQ ID NO: 7668 - protein, 42 aa, Artificial Sequence
  GFR-binding peptide
  MOD_RES (3), (4), (39), (41): Xaa is C or S
  MOD_RES (18), (19), (20), (21), (22): Xaa is A or G
  MOD_RES (23), (24), (25), (26): Xaa is A or G or is absent
KAXXVPTKLSATSVLYYXXXXXXXXXLRKHREGMSVAEXGXR

SEQ ID NO: 7669 - protein, 34 aa, Artificial Sequence
  GFR-binding peptide
  MOD_RES (1), (2): Xaa is C or S
  MOD_RES (16), (17), (18), (19), (20): Xaa is A or G
  MOD_RES (21), (22), (23), (24): Xaa is A or G or is absent
XXAPTQLSPISVLYKXXXXXXXXXLKYHYNMVVR

SEQ ID NO: 7670 - protein, 40 aa, Artificial Sequence
  GFR-binding peptide
  MOD_RES (5), (6), (38), (40): Xaa is C or S
VPKPXXAPTKLSAISVLYLDDSSNVILKNYQNMVVRSXGX

SEQ ID NO: 7671 - protein, 34 aa, Artificial Sequence
  GFR-binding peptide
  MOD_RES (32), (34): Xaa is C or S
VPTELNAISMLYFDENEKVVLKKYRDMVVEGXGX

SEQ ID NO: 7672 - protein, 37 aa, Artificial Sequence
  GFR-binding peptide
  MOD_RES (5), (6): Xaa is C or S
IPKAXXVPTELSATSMLYYDEYDKVVLRKHREMVVEG

SEQ ID NO: 7673 - protein, 36 aa, Artificial Sequence
  GFR-binding peptide
  MOD_RES (2), (3), (35): Xaa is C or S
AXXVPTELNAISMLYFDEYDKVVLKKYREMVVEGXG

SEQ ID NO: 7674 - protein, 35 aa, Artificial Sequence
  GFR-binding peptide
  MOD_RES (1), (1): Xaa is C or S
  MOD_RES (17), (18), (19), (20), (21): Xaa is A or G
  MOD_RES (22), (23), (24), (25): Xaa is A or G or is absent
XRPTQVQLSAISVLYLXXXXXXXXXLKNYQTLEDH

SEQ ID NO: 7675 - protein, 37 aa, Artificial Sequence
  GFR-binding peptide
  MOD_RES (2), (3), (34), (36): Xaa is C or S
PXXVPQALSAISILYLVGRKPKVLKNYQMIVRSXKXS

SEQ ID NO: 7676 - protein, 36 aa, Artificial Sequence
  GFR-binding peptide
  MOD_RES (5), (6): Xaa is C or S
VPKPXXAPTQLSPISVLYKDDSSNVILKYHYNMVVR

SEQ ID NO: 7677 - protein, 34 aa, Artificial Sequence
  GFR-binding peptide
  MOD_RES (1), (2), (34): Xaa is C or S
XXAPTKLSPISVLYKDDSSNVILKYHYNMVVRSX

SEQ ID NO: 7678 - protein, 32 aa, Artificial Sequence
  GFR-binding peptide
  MOD_RES (32), (32): Xaa is C or S
VPTELSPISMLYKDENEKVVLKYHYDMVVEGX

SEQ ID NO: 7679 - protein, 39 aa, Artificial Sequence
  GFR-binding peptide
  MOD_RES (3), (4), (37), (39): Xaa is C or S
  MOD_RES (18), (19), (20), (21), (22): Xaa is A or G
  MOD_RES (23), (24), (25), (26): Xaa is A or G or is absent
APXXVPQALSPISILYKXXXXXXXXXLKYHYMIVRSXKX

SEQ ID NO: 7680 - protein, 37 aa, Artificial Sequence
  GFR-binding peptide
  MOD_RES (1), (35), (37): Xaa is C or S
  MOD_RES (15), (16), (17), (18), (19): Xaa is A or G
  MOD_RES (20), (21), (22), (23): Xaa is A or G or is absent
XVPTELNAISMLYFXXXXXXXXXLKKYRDMVVEGXGX

SEQ ID NO: 7681 - protein, 37 aa, Artificial Sequence
  GFR-binding peptide
  MOD_RES (2), (3), (36): Xaa is C or S
  MOD_RES (17), (18), (19), (20), (21): Xaa is A or G
  MOD_RES (22), (23), (24), (25): Xaa is A or G or is absent
PXXVPQALSATSILYYXXXXXXXXXLRKHRMIVRSXK

SEQ ID NO: 7682 - protein, 35 aa, Artificial Sequence
  GFR-binding peptide
  MOD_RES (4), (5): Xaa is C or S
AAPXXVPQALNAISILYFVGRKPKVLKKYRMIVRS

SEQ ID NO: 7683 - protein, 41 aa, Artificial Sequence
  GFR-binding peptide
  MOD_RES (6), (7), (40): Xaa is C or S
  MOD_RES (21), (22), (23), (24), (25): Xaa is A or G
  MOD_RES (26), (27), (28), (29): Xaa is A or G or is absent
ASASPXXVPQDLNAISILYFXXXXXXXXXLKKYRMVVKSXK

SEQ ID NO: 7684 - protein, 41 aa, Artificial Sequence
  GFR-binding peptide
  MOD_RES (6), (7), (40): Xaa is C or S
  MOD_RES (21), (22), (23), (24), (25): Xaa is A or G
  MOD_RES (26), (27), (28), (29): Xaa is A or G or is absent
ASASPXXVPQDLSPISILYKXXXXXXXXXLKYHYMVVKSXK

SEQ ID NO: 7685 - protein, 33 aa, Artificial Sequence
  GFR-binding peptide
  MOD_RES (2), (3): Xaa is C or S
AXXAPTKLSPISVLYKDSSNNVILKYHYNMVVK

SEQ ID NO: 7686 - protein, 40 aa, Artificial Sequence
  GFR-binding peptide
  MOD_RES (5), (6), (39): Xaa is C or S
VGKAXXVPTKLNAISVLYFDDMGVPTLKKYREGMSVAEXG

SEQ ID NO: 7687 - protein, 40 aa, Artificial Sequence
  GFR-binding peptide
  MOD_RES (5), (5): Xaa is C or S
  MOD_RES (21), (22), (23), (24), (25): Xaa is A or G
  MOD_RES (26), (27), (28), (29): Xaa is A or G or is absent
RNVQXRPTQVQLNAISVLYFXXXXXXXXXLKKYRTLEDHL

SEQ ID NO: 7688 - protein, 35 aa, Artificial Sequence
  GFR-binding peptide
  MOD_RES (1), (2), (35): Xaa is C or S
XXVPTKLSATSVLYYDDMGVPTLRKHREGMSVAEX

SEQ ID NO: 7689 - protein, 37 aa, Artificial Sequence
  GFR-binding peptide
  MOD_RES (4), (5): Xaa is C or S
  MOD_RES (19), (20), (21), (22), (23): Xaa is A or G
  MOD_RES (24), (25), (26), (27): Xaa is A or G or is absent
AAPXXVPQALSATSILYYXXXXXXXXXLRKHRMIVRS

SEQ ID NO: 7690 - protein, 39 aa, Artificial Sequence
  GFR-binding peptide
  MOD_RES (6), (7): Xaa is C or S
  MOD_RES (21), (22), (23), (24), (25): Xaa is A or G
  MOD_RES (26), (27), (28), (29): Xaa is A or G or is absent
ASASPXXVSQDLNAISILYFXXXXXXXXXLKKYRMIVKS

SEQ ID NO: 7691 - protein, 34 aa, Artificial Sequence
  GFR-binding peptide
  MOD_RES (1), (2), (33): Xaa is C or S
XXVPQALSPISILYKVGRKPKVLKYHYMIVRSXK

SEQ ID NO: 7692 - protein, 41 aa, Artificial Sequence
  GFR-binding peptide
  MOD_RES (5), (6), (41): Xaa is C or S
  MOD_RES (20), (21), (22), (23), (24): Xaa is A or G
  MOD_RES (25), (26), (27), (28): Xaa is A or G or is absent
VGKAXXVPTKLSATSVLYYXXXXXXXXXLRKHREGMSVAEX

SEQ ID NO: 7693 - protein, 43 aa, Artificial Sequence
  GFR-binding peptide
  MOD_RES (6), (40), (42): Xaa is C or S
  MOD_RES (20), (21), (22), (23), (24): Xaa is A or G
  MOD_RES (25), (26), (27), (28): Xaa is A or G or is absent
VTKPTXAPTKLNAISVLYFXXXXXXXXXLKKYRNMVVRSXGXH

SEQ ID NO: 7694 - protein, 37 aa, Artificial Sequence
  GFR-binding peptide
  MOD_RES (2), (34), (36): Xaa is C or S
TXAPTKLSAISVLYLDDSSNVILKNYQNMVVRSXGXH

SEQ ID NO: 7695 - protein, 36 aa, Artificial Sequence
  GFR-binding peptide
  MOD_RES (1), (2), (36): Xaa is C or S
  MOD_RES (16), (17), (18), (19), (20): Xaa is A or G
  MOD_RES (21), (22), (23), (24): Xaa is A or G or is absent
XXAPTKLSATSVLYYXXXXXXXXXLRKHRNMVVKAX

SEQ ID NO: 7696 - protein, 36 aa, Artificial Sequence
  GFR-binding peptide
  MOD_RES (5), (6): Xaa is C or S
VPKPXXAPTKLSATSVLYYDDSSNVILRKHRNMVVR

SEQ ID NO: 7697 - protein, 40 aa, Artificial Sequence
  GFR-binding peptide
  MOD_RES (2), (3), (37), (39): Xaa is C or S
  MOD_RES (17), (18), (19), (20), (21): Xaa is A or G
  MOD_RES (22), (23), (24), (25): Xaa is A or G or is absent
AXXAPTKLSPISVLYKXXXXXXXXXLKYHYNMVVKAXGXH

SEQ ID NO: 7698 - protein, 38 aa, Artificial Sequence
  GFR-binding peptide
  MOD_RES (5), (6): Xaa is C or S
  MOD_RES (20), (21), (22), (23), (24): Xaa is A or G
  MOD_RES (25), (26), (27), (28): Xaa is A or G or is absent
VPKPXXAPTQLNAISVLYFXXXXXXXXXLKKYRNMVVR

SEQ ID NO: 7699 - protein, 41 aa, Artificial Sequence
  GFR-binding peptide
  MOD_RES (6), (40): Xaa is C or S
  MOD_RES (20), (21), (22), (23), (24): Xaa is A or G
  MOD_RES (25), (26), (27), (28): Xaa is A or G or is absent
VTKPTXAPTKLNAISVLYFXXXXXXXXXLKKYRNMVVRSXG

SEQ ID NO: 7700 - protein, 42 aa, Artificial Sequence
  GFR-binding peptide
  MOD_RES (5), (39), (41): Xaa is C or S
  MOD_RES (19), (20), (21), (22), (23): Xaa is A or G
  MOD_RES (24), (25), (26), (27): Xaa is A or G or is absent
TKPTXAPTKLSPISVLYKXXXXXXXXXLKYHYNMVVRSXGXH

SEQ ID NO: 7701 - protein, 35 aa, Artificial Sequence
  GFR-binding peptide
  MOD_RES (2), (3), (35): Xaa is C or S
AXXVPTELNAISMLYFDENEKVVLKKYRDMVVEGX

SEQ ID NO: 7702 - protein, 35 aa, Artificial Sequence
  GFR-binding peptide
  MOD_RES (2), (3): Xaa is C or S
  MOD_RES (17), (18), (19), (20), (21): Xaa is A or G
  MOD_RES (22), (23), (24), (25): Xaa is A or G or is absent
AXXVPTELNAISMLYFXXXXXXXXXLKKYRDMVVE

SEQ ID NO: 7703 - protein, 35 aa, Artificial Sequence
  GFR-binding peptide
  MOD_RES (2), (3), (35): Xaa is C or S
AXXVPTELSPISMLYKDENEKVVLKYHYDMVVEGX

SEQ ID NO: 7704 - protein, 35 aa, Artificial Sequence
  GFR-binding peptide
  MOD_RES (1), (2), (33), (35): Xaa is C or S
XXVSQDLNAISILYFIGKTPKILKKYRMIVKSXKX

SEQ ID NO: 7705 - protein, 34 aa, Artificial Sequence
  GFR-binding peptide
  MOD_RES (34), (34): Xaa is C or S
  MOD_RES (14), (15), (16), (17), (18): Xaa is A or G
  MOD_RES (19), (20), (21), (22): Xaa is A or G or is absent
APTKLSPISVLYKXXXXXXXXXLKYHYNMVVRSX

SEQ ID NO: 7706 - protein, 44 aa, Artificial Sequence
  GFR-binding peptide
  MOD_RES (7), (41), (43): Xaa is C or S
  MOD_RES (21), (22), (23), (24), (25): Xaa is A or G
  MOD_RES (26), (27), (28), (29): Xaa is A or G or is absent
HVTKPTXAPTKLSATSVLYYXXXXXXXXXLRKHRNMVVRSXGXH

SEQ ID NO: 7707 - protein, 32 aa, Artificial Sequence
  GFR-binding peptide
  MOD_RES (1), (2): Xaa is C or S
XXVPTELSATSMLYYDEYDKVVLRKHREMVVE

SEQ ID NO: 7708 - protein, 39 aa, Artificial Sequence
  GFR-binding peptide
  MOD_RES (1), (38): Xaa is C or S
  MOD_RES (17), (18), (19), (20), (21): Xaa is A or G
  MOD_RES (22), (23), (24), (25): Xaa is A or G or is absent
XRPTQVQLNAISVLYFXXXXXXXXXLKKYRTLEDHLAXK

SEQ ID NO: 7709 - protein, 34 aa, Artificial Sequence
  GFR-binding peptide
  MOD_RES (1), (2): Xaa is C or S
  MOD_RES (16), (17), (18), (19), (20): Xaa is A or G
  MOD_RES (21), (22), (23), (24): Xaa is A or G or is absent
XXVPTELSATSMLYYXXXXXXXXXLRKHRDMVVE

SEQ ID NO: 7710 - protein, 43 aa, Artificial Sequence
  GFR-binding peptide
  MOD_RES (4), (41), (43): Xaa is C or S
NVQXRPTQVQLNAISVLYFEIVRKKPIFLKKYRTLEDHLAXKX

SEQ ID NO: 7711 - protein, 33 aa, Artificial Sequence
  GFR-binding peptide
  MOD_RES (1), (2), (33): Xaa is C or S
XXVPQALSPISILYKVGRKPKVLKYHYMIVRSX

SEQ ID NO: 7712 - protein, 38 aa, Artificial Sequence
  GFR-binding peptide
  MOD_RES (6), (38): Xaa is C or S
VTKPTXAPTKLSAISVLYLDDSSNVILKNYQNMVVRSX

SEQ ID NO: 7713 - protein, 38 aa, Artificial Sequence
  GFR-binding peptide
  MOD_RES (1), (2), (35), (37): Xaa is C or S
  MOD_RES (16), (17), (18), (19), (20): Xaa is A or G
  MOD_RES (21), (22), (23), (24): Xaa is A or G or is absent
XXVSQDLSAISILYLXXXXXXXXXLKNYQMIVKSXKXS

SEQ ID NO: 7714 - protein, 35 aa, Artificial Sequence
  GFR-binding peptide
  MOD_RES (1), (2), (33), (35): Xaa is C or S
XXVPQALNAISILYFVGRKPKVLKKYRMIVRSXKX

SEQ ID NO: 7715 - protein, 40 aa, Artificial Sequence
  GFR-binding peptide
  MOD_RES (5), (6), (40): Xaa is C or S
  MOD_RES (20), (21), (22), (23), (24): Xaa is A or G
  MOD_RES (25), (26), (27), (28): Xaa is A or G or is absent
VPKPXXAPTKLSATSVLYYXXXXXXXXXLRKHRNMVVRSX

SEQ ID NO: 7716 - protein, 44 aa, Artificial Sequence
  GFR-binding peptide
  MOD_RES (5), (42), (44): Xaa is C or S
RNVQXRPTQVQLSAISVLYLEIVRKKPIFLKNYQTLEDHLAXKX

SEQ ID NO: 7717 - protein, 40 aa, Artificial Sequence
  GFR-binding peptide
  MOD_RES (4), (5), (38), (40): Xaa is C or S
  MOD_RES (19), (20), (21), (22), (23): Xaa is A or G
  MOD_RES (24), (25), (26), (27): Xaa is A or G or is absent
ASPXXVPQDLSATSILYYXXXXXXXXXLRKHRMVVKSXKX

SEQ ID NO: 7718 - protein, 41 aa, Artificial Sequence
  GFR-binding peptide
  MOD_RES (7), (39), (41): Xaa is C or S
HVTKPTXAPTKLSAISVLYLDDSSNVILKNYQNMVVRSXGX

SEQ ID NO: 7719 - protein, 39 aa, Artificial Sequence
  GFR-binding peptide
  MOD_RES (2), (3), (37), (39): Xaa is C or S
  MOD_RES (17), (18), (19), (20), (21): Xaa is A or G
  MOD_RES (22), (23), (24), (25): Xaa is A or G or is absent
AXXVPTELSAISMLYLXXXXXXXXXLKNYQDMVVEGXGX

SEQ ID NO: 7720 - protein, 39 aa, Artificial Sequence
  GFR-binding peptide
  MOD_RES (3), (4), (38): Xaa is C or S
  MOD_RES (18), (19), (20), (21), (22): Xaa is A or G
  MOD_RES (23), (24), (25), (26): Xaa is A or G or is absent
KAXXVPTELNAISMLYFXXXXXXXXXLKKYREMVVEGXG

SEQ ID NO: 7721 - protein, 34 aa, Artificial Sequence
  GFR-binding peptide
  MOD_RES (32), (34): Xaa is C or S
VPTELNAISMLYFDEYDKVVLKKYREMVVEGXGX

SEQ ID NO: 7722 - protein, 36 aa, Artificial Sequence
  GFR-binding peptide
  MOD_RES (2), (3): Xaa is C or S
  MOD_RES (17), (18), (19), (20), (21): Xaa is A or G
  MOD_RES (22), (23), (24), (25): Xaa is A or G or is absent
PXXAPTQLSATSVLYYXXXXXXXXXLRKHRNMVVRA

SEQ ID NO: 7723 - protein, 40 aa, Artificial Sequence
  GFR-binding peptide
  MOD_RES (6), (7): Xaa is C or S
  MOD_RES (21), (22), (23), (24), (25): Xaa is A or G
  MOD_RES (26), (27), (28), (29): Xaa is A or G or is absent
KIPKAXXVPTELSAISMLYLXXXXXXXXXLKNYQDMVVEG

SEQ ID NO: 7724 - protein, 34 aa, Artificial Sequence
  GFR-binding peptide
  MOD_RES (3), (4): Xaa is C or S
SPXXVSQDLSATSILYYIGKTPKILRKHRMIVKS

SEQ ID NO: 7725 - protein, 38 aa, Artificial Sequence
  GFR-binding peptide
  MOD_RES (37), (37): Xaa is C or S
RPTQVQLSAISVLYLEIVRKKPIFLKNYQTLEDHLAXK

SEQ ID NO: 7726 - protein, 39 aa, Artificial Sequence
  GFR-binding peptide
  MOD_RES (3), (4), (36), (38): Xaa is C or S
KAXXVPTELNAISMLYFDENEKVVLKKYRDMVVEGXGXR

SEQ ID NO: 7727 - protein, 43 aa, Artificial Sequence
  GFR-binding peptide
  MOD_RES (6), (7), (40), (42): Xaa is C or S
  MOD_RES (21), (22), (23), (24), (25): Xaa is A or G
  MOD_RES (26), (27), (28), (29): Xaa is A or G or is absent
ASAAPXXVPQALSAISILYLXXXXXXXXXLKNYQMIVRSXKXS

SEQ ID NO: 7728 - protein, 37 aa, Artificial Sequence
  GFR-binding peptide
  MOD_RES (34), (36): Xaa is C or S
  MOD_RES (14), (15), (16), (17), (18): Xaa is A or G
  MOD_RES (19), (20), (21), (22): Xaa is A or G or is absent
APTKLSPISVLYKXXXXXXXXXLKYHYNMVVKAXGXH

SEQ ID NO: 7729 - protein, 41 aa, Artificial Sequence
  GFR-binding peptide
  MOD_RES (6), (7), (39), (41): Xaa is C or S
SIPKAXXVPTELSPISMLYKDEYDKVVLKYHYEMVVEGXGX

SEQ ID NO: 7730 - protein, 38 aa, Artificial Sequence
  GFR-binding peptide
  MOD_RES (5), (6): Xaa is C or S
  MOD_RES (20), (21), (22), (23), (24): Xaa is A or G
  MOD_RES (25), (26), (27), (28): Xaa is A or G or is absent
SASPXXVPQDLSAISILYLXXXXXXXXXLKNYQMVVKS

SEQ ID NO: 7731 - protein, 37 aa, Artificial Sequence
  GFR-binding peptide
  MOD_RES (1), (1): Xaa is C or S
XRPTQVQLNAISVLYFEIVRKKPIFLKKYRTLEDHLA

SEQ ID NO: 7732 - protein, 36 aa, Artificial Sequence
  GFR-binding peptide
  MOD_RES (34), (36): Xaa is C or S
  MOD_RES (14), (15), (16), (17), (18): Xaa is A or G
  MOD_RES (19), (20), (21), (22): Xaa is A or G or is absent
VPTELSATSMLYYXXXXXXXXXLRKHRDMVVEGXGX

SEQ ID NO: 7733 - protein, 37 aa, Artificial Sequence
  GFR-binding peptide
  MOD_RES (3), (4), (36): Xaa is C or S
KPXXAPTKLSPISVLYKDDSSNVILKYHYNMVVRSXG

SEQ ID NO: 7734 - protein, 39 aa, Artificial Sequence
  GFR-binding peptide
  MOD_RES (4), (4): Xaa is C or S
NVQXRPTQVQLSAISVLYLEIVRKKPIFLKNYQTLEDHL

SEQ ID NO: 7735 - protein, 34 aa, Artificial Sequence
  GFR-binding peptide
  MOD_RES (1), (34): Xaa is C or S
  MOD_RES (15), (16), (17), (18), (19): Xaa is A or G
  MOD_RES (20), (21), (22), (23): Xaa is A or G or is absent
XVSQDLSATSILYYXXXXXXXXXLRKHRMIVKSX

SEQ ID NO: 7736 - protein, 35 aa, Artificial Sequence
  GFR-binding peptide
  MOD_RES (1), (35): Xaa is C or S
  MOD_RES (15), (16), (17), (18), (19): Xaa is A or G
  MOD_RES (20), (21), (22), (23): Xaa is A or G or is absent
XAPTKLSPISVLYKXXXXXXXXXLKYHYNMVVRSX

SEQ ID NO: 7737 - protein, 34 aa, Artificial Sequence
  GFR-binding peptide
  MOD_RES (1), (34): Xaa is C or S
  MOD_RES (15), (16), (17), (18), (19): Xaa is A or G
  MOD_RES (20), (21), (22), (23): Xaa is A or G or is absent
XVSQDLSAISILYLXXXXXXXXXLKNYQMIVKSX

SEQ ID NO: 7738 - protein, 39 aa, Artificial Sequence
  GFR-binding peptide
  MOD_RES (2), (3), (37), (39): Xaa is C or S
  MOD_RES (17), (18), (19), (20), (21): Xaa is A or G
  MOD_RES (22), (23), (24), (25): Xaa is A or G or is absent
AXXAPTKLSPISVLYKXXXXXXXXXLKYHYNMVVKAXGX

SEQ ID NO: 7739 - protein, 41 aa, Artificial Sequence
  GFR-binding peptide
  MOD_RES (4), (5), (38), (40): Xaa is C or S
  MOD_RES (19), (20), (21), (22), (23): Xaa is A or G
  MOD_RES (24), (25), (26), (27): Xaa is A or G or is absent
AAPXXVPQALSATSILYYXXXXXXXXXLRKHRMIVRSXKXS

SEQ ID NO: 7740 - protein, 39 aa, Artificial Sequence
  GFR-binding peptide
  MOD_RES (6), (7): Xaa is C or S
  MOD_RES (21), (22), (23), (24), (25): Xaa is A or G
  MOD_RES (26), (27), (28), (29): Xaa is A or G or is absent
ASASPXXVPQDLSAISILYLXXXXXXXXXLKNYQMVVKS

SEQ ID NO: 7741 - protein, 36 aa, Artificial Sequence
  GFR-binding peptide
  MOD_RES (16), (17), (18), (19), (20): Xaa is A or G
  MOD_RES (21), (22), (23), (24): Xaa is A or G or is absent
RPTQVQLSATSVLYYXXXXXXXXXLRKHRTLEDHLA

SEQ ID NO: 7742 - protein, 37 aa, Artificial Sequence
  GFR-binding peptide
  MOD_RES (1), (34), (36): Xaa is C or S
  MOD_RES (15), (16), (17), (18), (19): Xaa is A or G
  MOD_RES (20), (21), (22), (23): Xaa is A or G or is absent
XVSQDLSATSILYYXXXXXXXXXLRKHRMIVKSXKXS

SEQ ID NO: 7743 - protein, 34 aa, Artificial Sequence
  GFR-binding peptide
  MOD_RES (3), (4): Xaa is C or S
SPXXVSQDLNAISILYFIGKTPKILKKYRMIVKS

SEQ ID NO: 7744 - protein, 42 aa, Artificial Sequence
  GFR-binding peptide
  MOD_RES (3), (40), (42): Xaa is C or S
VQXRPTQVQLSPISVLYKEIVRKKPIFLKYHYTLEDHLAXKX

SEQ ID NO: 7745 - protein, 36 aa, Artificial Sequence
  GFR-binding peptide
  MOD_RES (2), (3), (34), (36): Xaa is C or S
PXXVPQALNAISILYFVGRKPKVLKKYRMIVRSXKX

SEQ ID NO: 7746 - protein, 34 aa, Artificial Sequence
  GFR-binding peptide
  MOD_RES (32), (34): Xaa is C or S
APTKLSAISVLYLDSSNNVILKNYQNMVVKAXGX

SEQ ID NO: 7747 - protein, 36 aa, Artificial Sequence
  GFR-binding peptide
  MOD_RES (16), (17), (18), (19), (20): Xaa is A or G
  MOD_RES (21), (22), (23), (24): Xaa is A or G or is absent
RPTQVQLSAISVLYLXXXXXXXXXLKNYQTLEDHLA

SEQ ID NO: 7748 - protein, 41 aa, Artificial Sequence
  GFR-binding peptide
  MOD_RES (4), (5), (39), (41): Xaa is C or S
  MOD_RES (19), (20), (21), (22), (23): Xaa is A or G
  MOD_RES (24), (25), (26), (27): Xaa is A or G or is absent
PKAXXVPTELNAISMLYFXXXXXXXXXLKKYRDMVVEGXGX

SEQ ID NO: 7749 - protein, 39 aa, Artificial Sequence
  GFR-binding peptide
  MOD_RES (4), (5), (38): Xaa is C or S
  MOD_RES (19), (20), (21), (22), (23): Xaa is A or G
  MOD_RES (24), (25), (26), (27): Xaa is A or G or is absent
ASPXXVPQDLNAISILYFXXXXXXXXXLKKYRMVVKSXK

SEQ ID NO: 7750 - protein, 38 aa, Artificial Sequence
  GFR-binding peptide
  MOD_RES (4), (38): Xaa is C or S
  MOD_RES (18), (19), (20), (21), (22): Xaa is A or G
  MOD_RES (23), (24), (25), (26): Xaa is A or G or is absent
KPTXAPTKLSAISVLYLXXXXXXXXXLKNYQNMVVRSX

SEQ ID NO: 7751 - protein, 38 aa, Artificial Sequence
  GFR-binding peptide
  MOD_RES (5), (6): Xaa is C or S
  MOD_RES (20), (21), (22), (23), (24): Xaa is A or G
  MOD_RES (25), (26), (27), (28): Xaa is A or G or is absent
SASPXXVPQDLSPISILYKXXXXXXXXXLKYHYMVVKS

SEQ ID NO: 7752 - protein, 36 aa, Artificial Sequence
  GFR-binding peptide
  MOD_RES (2), (3), (36): Xaa is C or S
  MOD_RES (17), (18), (19), (20), (21): Xaa is A or G
  MOD_RES (22), (23), (24), (25): Xaa is A or G or is absent
PXXVPQALNAISILYFXXXXXXXXXLKKYRMIVRSX

SEQ ID NO: 7753 - protein, 32 aa, Artificial Sequence
  GFR-binding peptide
  MOD_RES (1), (1): Xaa is C or S
XVPTELSPISMLYKDENEKVVLKYHYDMVVEG

SEQ ID NO: 7754 - protein, 40 aa, Artificial Sequence
  GFR-binding peptide
  MOD_RES (3), (4), (38), (40): Xaa is C or S
  MOD_RES (18), (19), (20), (21), (22): Xaa is A or G
  MOD_RES (23), (24), (25), (26): Xaa is A or G or is absent
KPXXAPTKLSATSVLYYXXXXXXXXXLRKHRNMVVRSXGX

SEQ ID NO: 7755 - protein, 33 aa, Artificial Sequence
  GFR-binding peptide
  MOD_RES (2), (3): Xaa is C or S
AXXAPTKLSAISVLYLDSSNNVILKNYQNMVVK

SEQ ID NO: 7756 - protein, 39 aa, Artificial Sequence
  GFR-binding peptide
  MOD_RES (5), (39): Xaa is C or S
  MOD_RES (19), (20), (21), (22), (23): Xaa is A or G
  MOD_RES (24), (25), (26), (27): Xaa is A or G or is absent
TKPTXAPTKLSAISVLYLXXXXXXXXXLKNYQNMVVRSX

SEQ ID NO: 7757 - protein, 38 aa, Artificial Sequence
  GFR-binding peptide
  MOD_RES (3), (4), (35), (37): Xaa is C or S
SPXXVPQDLSPISILYKVGRTPKVLKYHYMVVKSXKXS

SEQ ID NO: 7758 - protein, 37 aa, Artificial Sequence
  GFR-binding peptide
  MOD_RES (4), (5): Xaa is C or S
  MOD_RES (19), (20), (21), (22), (23): Xaa is A or G
  MOD_RES (24), (25), (26), (27): Xaa is A or G or is absent
PKAXXAPTKLSATSVLYYXXXXXXXXXLRKHRNMVVK

SEQ ID NO: 7759 - protein, 36 aa, Artificial Sequence
  GFR-binding peptide
  MOD_RES (36), (36): Xaa is C or S
PTQVQLNAISVLYFEIVRKKPIFLKKYRTLEDHLAX

SEQ ID NO: 7760 - protein, 39 aa, Artificial Sequence
  GFR-binding peptide
  MOD_RES (2), (3), (36), (38): Xaa is C or S
AXXVPTKLSATSVLYYDDMGVPTLRKHREGMSVAEXGXR

SEQ ID NO: 7761 - protein, 32 aa, Artificial Sequence
  GFR-binding peptide
  MOD_RES (1), (1): Xaa is C or S
XAPTKLSPISVLYKDDSSNVILKYHYNMVVRS

SEQ ID NO: 7762 - protein, 35 aa, Artificial Sequence
  GFR-binding peptide
  MOD_RES (2), (2): Xaa is C or S
  MOD_RES (16), (17), (18), (19), (20): Xaa is A or G
  MOD_RES (21), (22), (23), (24): Xaa is A or G or is absent
TXAPTKLSATSVLYYXXXXXXXXXLRKHRNMVVRS

SEQ ID NO: 7763 - protein, 36 aa, Artificial Sequence
  GFR-binding peptide
  MOD_RES (2), (3): Xaa is C or S
  MOD_RES (17), (18), (19), (20), (21): Xaa is A or G
  MOD_RES (22), (23), (24), (25): Xaa is A or G or is absent
AXXVPTELSATSMLYYXXXXXXXXXLRKHRDMVVEG

SEQ ID NO: 7764 - protein, 38 aa, Artificial Sequence
  GFR-binding peptide
  MOD_RES (4), (5), (36), (38): Xaa is C or S
ASPXXVSQDLSPISILYKIGKTPKILKYHYMIVKSXKX

SEQ ID NO: 7765 - protein, 41 aa, Artificial Sequence
  GFR-binding peptide
  MOD_RES (6), (7), (38), (40): Xaa is C or S
ASAAPXXVPQALSATSILYYVGRKPKVLRKHRMIVRSXKXS

SEQ ID NO: 7766 - protein, 37 aa, Artificial Sequence
  GFR-binding peptide
  MOD_RES (34), (36): Xaa is C or S
  MOD_RES (14), (15), (16), (17), (18): Xaa is A or G
  MOD_RES (19), (20), (21), (22): Xaa is A or G or is absent
VPTELSATSMLYYXXXXXXXXXLRKHRDMVVEGXGXR

SEQ ID NO: 7767 - protein, 39 aa, Artificial Sequence
  GFR-binding peptide
  MOD_RES (4), (5), (37), (39): Xaa is C or S
PKPXXAPTKLSAISVLYLDDSSNVILKNYQNMVVRSXGX

SEQ ID NO: 7768 - protein, 40 aa, Artificial Sequence
  GFR-binding peptide
  MOD_RES (3), (4), (38), (40): Xaa is C or S
  MOD_RES (18), (19), (20), (21), (22): Xaa is A or G
  MOD_RES (23), (24), (25), (26): Xaa is A or G or is absent
KAXXVPTELSAISMLYLXXXXXXXXXLKNYQEMVVEGXGX

SEQ ID NO: 7769 - protein, 37 aa, Artificial Sequence
  GFR-binding peptide
  MOD_RES (4), (5): Xaa is C or S
  MOD_RES (19), (20), (21), (22), (23): Xaa is A or G
  MOD_RES (24), (25), (26), (27): Xaa is A or G or is absent
PKAXXVPTELSATSMLYYXXXXXXXXXLRKHREMVVE

SEQ ID NO: 7770 - protein, 37 aa, Artificial Sequence
  GFR-binding peptide
  MOD_RES (3), (4), (35), (37): Xaa is C or S
SPXXVSQDLSPISILYKIGKTPKILKYHYMIVKSXKX

SEQ ID NO: 7771 - protein, 36 aa, Artificial Sequence
  GFR-binding peptide
  MOD_RES (4), (5), (36): Xaa is C or S
AAPXXVPQALNAISILYFVGRKPKVLKKYRMIVRSX

SEQ ID NO: 7772 - protein, 42 aa, Artificial Sequence
  GFR-binding peptide
  MOD_RES (6), (7), (40), (42): Xaa is C or S
KVGKAXXVPTKLSATSVLYYDDMGVPTLRKHREGMSVAEXGX

SEQ ID NO: 7773 - protein, 36 aa, Artificial Sequence
  GFR-binding peptide
  MOD_RES (1), (2), (36): Xaa is C or S
  MOD_RES (16), (17), (18), (19), (20): Xaa is A or G
  MOD_RES (21), (22), (23), (24): Xaa is A or G or is absent
XXAPTQLSATSVLYYXXXXXXXXXLRKHRNMVVRAX

SEQ ID NO: 7774 - protein, 41 aa, Artificial Sequence
  GFR-binding peptide
  MOD_RES (2), (3), (38), (40): Xaa is C or S
  MOD_RES (17), (18), (19), (20), (21): Xaa is A or G
  MOD_RES (22), (23), (24), (25): Xaa is A or G or is absent
AXXVPTKLNAISVLYFXXXXXXXXXLKKYREGMSVAEXGXR

SEQ ID NO: 7775 - protein, 36 aa, Artificial Sequence
  GFR-binding peptide
  MOD_RES (2), (3), (35): Xaa is C or S
AXXAPTKLNAISVLYFDSSNNVILKKYRNMVVKAXG

SEQ ID NO: 7776 - protein, 38 aa, Artificial Sequence
  GFR-binding peptide
  MOD_RES (5), (6), (37): Xaa is C or S
SAAPXXVPQALSPISILYKVGRKPKVLKYHYMIVRSXK

SEQ ID NO: 7777 - protein, 34 aa, Artificial Sequence
  GFR-binding peptide
  MOD_RES (33), (33): Xaa is C or S
  MOD_RES (14), (15), (16), (17), (18): Xaa is A or G
  MOD_RES (19), (20), (21), (22): Xaa is A or G or is absent
VSQDLSAISILYLXXXXXXXXXLKNYQMIVKSXK

SEQ ID NO: 7778 - protein, 38 aa, Artificial Sequence
  GFR-binding peptide
  MOD_RES (3), (4), (36), (38): Xaa is C or S
KPXXAPTKLSAISVLYLDDSSNVILKNYQNMVVRSXGX

SEQ ID NO: 7779 - protein, 39 aa, Artificial Sequence
  GFR-binding peptide
  MOD_RES (6), (7): Xaa is C or S
  MOD_RES (21), (22), (23), (24), (25): Xaa is A or G
  MOD_RES (26), (27), (28), (29): Xaa is A or G or is absent
ASASPXXVPQDLSATSILYYXXXXXXXXXLRKHRMVVKS

SEQ ID NO: 7780 - protein, 37 aa, Artificial Sequence
  GFR-binding peptide
  MOD_RES (5), (6), (37): Xaa is C or S
SASPXXVPQDLSAISILYLVGRTPKVLKNYQMVVKSX

SEQ ID NO: 7781 - protein, 39 aa, Artificial Sequence
  GFR-binding peptide
  MOD_RES (4), (5), (39): Xaa is C or S
  MOD_RES (19), (20), (21), (22), (23): Xaa is A or G
  MOD_RES (24), (25), (26), (27): Xaa is A or G or is absent
PKPXXAPTKLNAISVLYFXXXXXXXXXLKKYRNMVVRSX

SEQ ID NO: 7782 - protein, 42 aa, Artificial Sequence
  GFR-binding peptide
  MOD_RES (5), (6), (39), (41): Xaa is C or S
  MOD_RES (20), (21), (22), (23), (24): Xaa is A or G
  MOD_RES (25), (26), (27), (28): Xaa is A or G or is absent
SASPXXVSQDLSATSILYYXXXXXXXXXLRKHRMIVKSXKXS

SEQ ID NO: 7783 - protein, 38 aa, Artificial Sequence
  GFR-binding peptide
  MOD_RES (1), (38): Xaa is C or S
XRPTQVQLSPISVLYKEIVRKKPIFLKYHYTLEDHLAX

SEQ ID NO: 7784 - protein, 34 aa, Artificial Sequence
  GFR-binding peptide
  MOD_RES (2), (2): Xaa is C or S
  MOD_RES (16), (17), (18), (19), (20): Xaa is A or G
  MOD_RES (21), (22), (23), (24): Xaa is A or G or is absent
TXAPTKLSAISVLYLXXXXXXXXXLKNYQNMVVR

SEQ ID NO: 7785 - protein, 37 aa, Artificial Sequence
  GFR-binding peptide
  MOD_RES (3), (4), (35), (37): Xaa is C or S
SPXXVSQDLSATSILYYIGKTPKILRKHRMIVKSXKX

SEQ ID NO: 7786 - protein, 36 aa, Artificial Sequence
  GFR-binding peptide
  MOD_RES (1), (2), (36): Xaa is C or S
  MOD_RES (16), (17), (18), (19), (20): Xaa is A or G
  MOD_RES (21), (22), (23), (24): Xaa is A or G or is absent
XXVPTELSATSMLYYXXXXXXXXXLRKHREMVVEGX

SEQ ID NO: 7787 - protein, 37 aa, Artificial Sequence
  GFR-binding peptide
  MOD_RES (1), (2), (36): Xaa is C or S
  MOD_RES (16), (17), (18), (19), (20): Xaa is A or G
  MOD_RES (21), (22), (23), (24): Xaa is A or G or is absent
XXAPTQLNAISVLYFXXXXXXXXXLKKYRNMVVRAXG

SEQ ID NO: 7788 - protein, 40 aa, Artificial Sequence
  GFR-binding peptide
  MOD_RES (4), (4): Xaa is C or S
NVQXRPTQVQLSATSVLYYEIVRKKPIFLRKHRTLEDHLA

SEQ ID NO: 7789 - protein, 33 aa, Artificial Sequence
  GFR-binding peptide
  MOD_RES (15), (16), (17), (18), (19): Xaa is A or G
  MOD_RES (20), (21), (22), (23): Xaa is A or G or is absent
PTQVQLSAISVLYLXXXXXXXXXLKNYQTLEDH

SEQ ID NO: 7790 - protein, 36 aa, Artificial Sequence
  GFR-binding peptide
  MOD_RES (1), (36): Xaa is C or S
  MOD_RES (15), (16), (17), (18), (19): Xaa is A or G
  MOD_RES (20), (21), (22), (23): Xaa is A or G or is absent
XVPTKLSPISVLYKXXXXXXXXXLKYHYEGMSVAEX

SEQ ID NO: 7791 - protein, 32 aa, Artificial Sequence
  GFR-binding peptide
  MOD_RES (32), (32): Xaa is C or S
APTKLSAISVLYLDSSNNVILKNYQNMVVKAX

SEQ ID NO: 7792 - protein, 34 aa, Artificial Sequence
  GFR-binding peptide
  MOD_RES (1), (33): Xaa is C or S
XVPTELSATSMLYYDEYDKVVLRKHREMVVEGXG

SEQ ID NO: 7793 - protein, 41 aa, Artificial Sequence
  GFR-binding peptide
  MOD_RES (4), (5), (39), (41): Xaa is C or S
  MOD_RES (19), (20), (21), (22), (23): Xaa is A or G
  MOD_RES (24), (25), (26), (27): Xaa is A or G or is absent
PKPXXAPTQLNAISVLYFXXXXXXXXXLKKYRNMVVRAXGX

SEQ ID NO: 7794 - protein, 33 aa, Artificial Sequence
  GFR-binding peptide
  MOD_RES (33), (33): Xaa is C or S
  MOD_RES (14), (15), (16), (17), (18): Xaa is A or G
  MOD_RES (19), (20), (21), (22): Xaa is A or G or is absent
VPQALSPISILYKXXXXXXXXXLKYHYMIVRSX

SEQ ID NO: 7795 - protein, 35 aa, Artificial Sequence
  GFR-binding peptide
  MOD_RES (2), (3): Xaa is C or S
  MOD_RES (17), (18), (19), (20), (21): Xaa is A or G
  MOD_RES (22), (23), (24), (25): Xaa is A or G or is absent
PXXAPTQLSPISVLYKXXXXXXXXXLKYHYNMVVR

SEQ ID NO: 7796 - protein, 37 aa, Artificial Sequence
  GFR-binding peptide
  MOD_RES (2), (3), (36): Xaa is C or S
  MOD_RES (17), (18), (19), (20), (21): Xaa is A or G
  MOD_RES (22), (23), (24), (25): Xaa is A or G or is absent
PXXVPQDLSPISILYKXXXXXXXXXLKYHYMVVKSXK

SEQ ID NO: 7797 - protein, 44 aa, Artificial Sequence
  GFR-binding peptide
  MOD_RES (6), (7), (41), (43): Xaa is C or S
  MOD_RES (21), (22), (23), (24), (25): Xaa is A or G
  MOD_RES (26), (27), (28), (29): Xaa is A or G or is absent
KIPKAXXVPTELSATSMLYYXXXXXXXXXLRKHRDMVVEGXGXR

SEQ ID NO: 7798 - protein, 39 aa, Artificial Sequence
  GFR-binding peptide
  MOD_RES (5), (6), (39): Xaa is C or S
VGKAXXVPTKLSAISVLYLDDMGVPTLKNYQEGMSVAEX

SEQ ID NO: 7799 - protein, 43 aa, Artificial Sequence
  GFR-binding peptide
  MOD_RES (6), (7), (41), (43): Xaa is C or S
  MOD_RES (21), (22), (23), (24), (25): Xaa is A or G
  MOD_RES (26), (27), (28), (29): Xaa is A or G or is absent
YVPKPXXAPTKLSATSVLYYXXXXXXXXXLRKHRNMVVRSXGX

SEQ ID NO: 7800 - protein, 38 aa, Artificial Sequence
  GFR-binding peptide
  MOD_RES (4), (5), (38): Xaa is C or S
  MOD_RES (19), (20), (21), (22), (23): Xaa is A or G
  MOD_RES (24), (25), (26), (27): Xaa is A or G or is absent
AAPXXVPQALSPISILYKXXXXXXXXXLKYHYMIVRSX

SEQ ID NO: 7801 - protein, 42 aa, Artificial Sequence
  GFR-binding peptide
  MOD_RES (4), (5), (39), (41): Xaa is C or S
  MOD_RES (19), (20), (21), (22), (23): Xaa is A or G
  MOD_RES (24), (25), (26), (27): Xaa is A or G or is absent
PKAXXVPTELSAISMLYLXXXXXXXXXLKNYQDMVVEGXGXR

SEQ ID NO: 7802 - protein, 36 aa, Artificial Sequence
  GFR-binding peptide
  MOD_RES (1), (1): Xaa is C or S
XRPTQVQLSAISVLYLEIVRKKPIFLKNYQTLEDHL

SEQ ID NO: 7803 - protein, 33 aa, Artificial Sequence
  GFR-binding peptide
  MOD_RES (1), (2), (33): Xaa is C or S
XXVPQALSATSILYYVGRKPKVLRKHRMIVRSX

SEQ ID NO: 7804 - protein, 36 aa, Artificial Sequence
  GFR-binding peptide
  MOD_RES (35), (35): Xaa is C or S
  MOD_RES (14), (15), (16), (17), (18): Xaa is A or G
  MOD_RES (19), (20), (21), (22): Xaa is A or G or is absent
VPTKLSPISVLYKXXXXXXXXXLKYHYEGMSVAEXG

SEQ ID NO: 7805 - protein, 37 aa, Artificial Sequence
  GFR-binding peptide
  MOD_RES (1), (2), (35), (37): Xaa is C or S
XXVPTKLSATSVLYYDDMGVPTLRKHREGMSVAEXGX

SEQ ID NO: 7806 - protein, 40 aa, Artificial Sequence
  GFR-binding peptide
  MOD_RES (2), (3), (37), (39): Xaa is C or S
  MOD_RES (17), (18), (19), (20), (21): Xaa is A or G
  MOD_RES (22), (23), (24), (25): Xaa is A or G or is absent
AXXVPTELSAISMLYLXXXXXXXXXLKNYQDMVVEGXGXR

SEQ ID NO: 7807 - protein, 37 aa, Artificial Sequence
  GFR-binding peptide
  MOD_RES (1), (1): Xaa is C or S
  MOD_RES (17), (18), (19), (20), (21): Xaa is A or G
  MOD_RES (22), (23), (24), (25): Xaa is A or G or is absent
XRPTQVQLSPISVLYKXXXXXXXXXLKYHYTLEDHLA

SEQ ID NO: 7808 - protein, 40 aa, Artificial Sequence
  GFR-binding peptide
  MOD_RES (5), (6), (40): Xaa is C or S
  MOD_RES (20), (21), (22), (23), (24): Xaa is A or G
  MOD_RES (25), (26), (27), (28): Xaa is A or G or is absent
VPKPXXAPTKLSAISVLYLXXXXXXXXXLKNYQNMVVRSX

SEQ ID NO: 7809 - protein, 40 aa, Artificial Sequence
  GFR-binding peptide
  MOD_RES (5), (6), (39): Xaa is C or S
  MOD_RES (20), (21), (22), (23), (24): Xaa is A or G
  MOD_RES (25), (26), (27), (28): Xaa is A or G or is absent
SASPXXVPQDLNAISILYFXXXXXXXXXLKKYRMVVKSXK

SEQ ID NO: 7810 - protein, 41 aa, Artificial Sequence
  GFR-binding peptide
  MOD_RES (3), (40): Xaa is C or S
VQXRPTQVQLNAISVLYFEIVRKKPIFLKKYRTLEDHLAXK

SEQ ID NO: 7811 - protein, 35 aa, Artificial Sequence
  GFR-binding peptide
  MOD_RES (1), (2): Xaa is C or S
  MOD_RES (16), (17), (18), (19), (20): Xaa is A or G
  MOD_RES (21), (22), (23), (24): Xaa is A or G or is absent
XXVPTELSATSMLYYXXXXXXXXXLRKHREMVVEG

SEQ ID NO: 7812 - protein, 36 aa, Artificial Sequence
  GFR-binding peptide
  MOD_RES (1), (35): Xaa is C or S
  MOD_RES (15), (16), (17), (18), (19): Xaa is A or G
  MOD_RES (20), (21), (22), (23): Xaa is A or G or is absent
XVPTELSATSMLYYXXXXXXXXXLRKHREMVVEGXG

SEQ ID NO: 7813 - protein, 39 aa, Artificial Sequence
  GFR-binding peptide
  MOD_RES (6), (7): Xaa is C or S
  MOD_RES (21), (22), (23), (24), (25): Xaa is A or G
  MOD_RES (26), (27), (28), (29): Xaa is A or G or is absent
AVPKAXXAPTKLNAISVLYFXXXXXXXXXLKKYRNMVVK

SEQ ID NO: 7814 - protein, 42 aa, Artificial Sequence
  GFR-binding peptide
  MOD_RES (6), (7), (42): Xaa is C or S
  MOD_RES (21), (22), (23), (24), (25): Xaa is A or G
  MOD_RES (26), (27), (28), (29): Xaa is A or G or is absent
KVGKAXXVPTKLNAISVLYFXXXXXXXXXLKKYREGMSVAEX

SEQ ID NO: 7815 - protein, 40 aa, Artificial Sequence
  GFR-binding peptide
  MOD_RES (6), (7), (40): Xaa is C or S
  MOD_RES (21), (22), (23), (24), (25): Xaa is A or G
  MOD_RES (26), (27), (28), (29): Xaa is A or G or is absent
ASAAPXXVPQALSATSILYYXXXXXXXXXLRKHRMIVRSX

SEQ ID NO: 7816 - protein, 35 aa, Artificial Sequence
  GFR-binding peptide
  MOD_RES (33), (35): Xaa is C or S
  MOD_RES (14), (15), (16), (17), (18): Xaa is A or G
  MOD_RES (19), (20), (21), (22): Xaa is A or G or is absent
VPQALSAISILYLXXXXXXXXXLKNYQMIVRSXKX

SEQ ID NO: 7817 - protein, 38 aa, Artificial Sequence
  GFR-binding peptide
  MOD_RES (2), (3), (35), (37): Xaa is C or S
AXXVPTELNAISMLYFDENEKVVLKKYRDMVVEGXGXR

SEQ ID NO: 7818 - protein, 36 aa, Artificial Sequence
  GFR-binding peptide
  MOD_RES (33), (35): Xaa is C or S
  MOD_RES (14), (15), (16), (17), (18): Xaa is A or G
  MOD_RES (19), (20), (21), (22): Xaa is A or G or is absent
VSQDLSAISILYLXXXXXXXXXLKNYQMIVKSXKXS

SEQ ID NO: 7819 - protein, 35 aa, Artificial Sequence
  GFR-binding peptide
  MOD_RES (2), (34): Xaa is C or S
TXAPTKLSAISVLYLDDSSNVILKNYQNMVVRSXG

SEQ ID NO: 7820 - protein, 34 aa, Artificial Sequence
  GFR-binding peptide
  MOD_RES (4), (4): Xaa is C or S
KPTXAPTKLSATSVLYYDDSSNVILRKHRNMVVR

SEQ ID NO: 7821 - protein, 40 aa, Artificial Sequence
  GFR-binding peptide
  MOD_RES (3), (4), (38), (40): Xaa is C or S
  MOD_RES (18), (19), (20), (21), (22): Xaa is A or G
  MOD_RES (23), (24), (25), (26): Xaa is A or G or is absent
KPXXAPTQLSPISVLYKXXXXXXXXXLKYHYNMVVRAXGX

SEQ ID NO: 7822 - protein, 37 aa, Artificial Sequence
  GFR-binding peptide
  MOD_RES (3), (4), (37): Xaa is C or S
  MOD_RES (18), (19), (20), (21), (22): Xaa is A or G
  MOD_RES (23), (24), (25), (26): Xaa is A or G or is absent
APXXVPQALSPISILYKXXXXXXXXXLKYHYMIVRSX

SEQ ID NO: 7823 - protein, 32 aa, Artificial Sequence
  GFR-binding peptide
  MOD_RES (31), (31): Xaa is C or S
VPQALNAISILYFVGRKPKVLKKYRMIVRSXK

SEQ ID NO: 7824 - protein, 33 aa, Artificial Sequence
  GFR-binding peptide
  MOD_RES (1), (1): Xaa is C or S
  MOD_RES (15), (16), (17), (18), (19): Xaa is A or G
  MOD_RES (20), (21), (22), (23): Xaa is A or G or is absent
XVPTELSAISMLYLXXXXXXXXXLKNYQDMVVE

SEQ ID NO: 7825 - protein, 35 aa, Artificial Sequence
  GFR-binding peptide
  MOD_RES (3), (4), (35): Xaa is C or S
SPXXVSQDLSPISILYKIGKTPKILKYHYMIVKSX

SEQ ID NO: 7826 - protein, 35 aa, Artificial Sequence
  GFR-binding peptide
  MOD_RES (3), (4): Xaa is C or S
KAXXAPTKLSAISVLYLDSSNNVILKNYQNMVVKA

SEQ ID NO: 7827 - protein, 34 aa, Artificial Sequence
  GFR-binding peptide
  MOD_RES (1), (1): Xaa is C or S
  MOD_RES (15), (16), (17), (18), (19): Xaa is A or G
  MOD_RES (20), (21), (22), (23): Xaa is A or G or is absent
XVPTELSATSMLYYXXXXXXXXXLRKHREMVVEG

SEQ ID NO: 7828 - protein, 35 aa, Artificial Sequence
  GFR-binding peptide
  MOD_RES (2), (3): Xaa is C or S
  MOD_RES (17), (18), (19), (20), (21): Xaa is A or G
  MOD_RES (22), (23), (24), (25): Xaa is A or G or is absent
AXXAPTKLSPISVLYKXXXXXXXXXLKYHYNMVVK

SEQ ID NO: 7829 - protein, 40 aa, Artificial Sequence
  GFR-binding peptide
  MOD_RES (2), (3), (37), (39): Xaa is C or S
  MOD_RES (17), (18), (19), (20), (21): Xaa is A or G
  MOD_RES (22), (23), (24), (25): Xaa is A or G or is absent
PXXAPTKLSAISVLYLXXXXXXXXXLKNYQNMVVRSXGXH

SEQ ID NO: 7830 - protein, 35 aa, Artificial Sequence
  GFR-binding peptide
  MOD_RES (3), (4): Xaa is C or S
KPXXAPTKLSATSVLYYDDSSNVILRKHRNMVVRS

SEQ ID NO: 7831 - protein, 33 aa, Artificial Sequence
  GFR-binding peptide
TQVQLNAISVLYFEIVRKKPIFLKKYRTLEDHL

SEQ ID NO: 7832 - protein, 39 aa, Artificial Sequence
  GFR-binding peptide
  MOD_RES (4), (5), (39): Xaa is C or S
  MOD_RES (19), (20), (21), (22), (23): Xaa is A or G
  MOD_RES (24), (25), (26), (27): Xaa is A or G or is absent
PKAXXVPTELNAISMLYFXXXXXXXXXLKKYRDMVVEGX

SEQ ID NO: 7833 - protein, 38 aa, Artificial Sequence
  GFR-binding peptide
  MOD_RES (35), (37): Xaa is C or S
  MOD_RES (14), (15), (16), (17), (18): Xaa is A or G
  MOD_RES (19), (20), (21), (22): Xaa is A or G or is absent
VPTKLSAISVLYLXXXXXXXXXLKNYQEGMSVAEXGXR

SEQ ID NO: 7834 - protein, 43 aa, Artificial Sequence
  GFR-binding peptide
  MOD_RES (3), (40), (42): Xaa is C or S
VQXRPTQVQLSPISVLYKEIVRKKPIFLKYHYTLEDHLAXKXE

SEQ ID NO: 7835 - protein, 37 aa, Artificial Sequence
  GFR-binding peptide
  MOD_RES (5), (6), (37): Xaa is C or S
SAAPXXVPQALSPISILYKVGRKPKVLKYHYMIVRSX

SEQ ID NO: 7836 - protein, 39 aa, Artificial Sequence
  GFR-binding peptide
  MOD_RES (3), (4), (37), (39): Xaa is C or S
  MOD_RES (18), (19), (20), (21), (22): Xaa is A or G
  MOD_RES (23), (24), (25), (26): Xaa is A or G or is absent
SPXXVPQDLSATSILYYXXXXXXXXXLRKHRMVVKSXKX

SEQ ID NO: 7837 - protein, 39 aa, Artificial Sequence
  GFR-binding peptide
  MOD_RES (1), (2), (36), (38): Xaa is C or S
  MOD_RES (16), (17), (18), (19), (20): Xaa is A or G
  MOD_RES (21), (22), (23), (24): Xaa is A or G or is absent
XXAPTKLSPISVLYKXXXXXXXXXLKYHYNMVVKAXGXH

SEQ ID NO: 7838 - protein, 41 aa, Artificial Sequence
  GFR-binding peptide
  MOD_RES (6), (7): Xaa is C or S
  MOD_RES (21), (22), (23), (24), (25): Xaa is A or G
  MOD_RES (26), (27), (28), (29): Xaa is A or G or is absent
KVGKAXXVPTKLNAISVLYFXXXXXXXXXLKKYREGMSVAE

SEQ ID NO: 7839 - protein, 35 aa, Artificial Sequence
  GFR-binding peptide
  MOD_RES (2), (3): Xaa is C or S
  MOD_RES (17), (18), (19), (20), (21): Xaa is A or G
  MOD_RES (22), (23), (24), (25): Xaa is A or G or is absent
PXXVPQDLSAISILYLXXXXXXXXXLKNYQMVVKS

SEQ ID NO: 7840 - protein, 38 aa, Artificial Sequence
  GFR-binding peptide
  MOD_RES (4), (5), (36), (38): Xaa is C or S
ASPXXVSQDLSATSILYYIGKTPKILRKHRMIVKSXKX

SEQ ID NO: 7841 - protein, 37 aa, Artificial Sequence
  GFR-binding peptide
  MOD_RES (34), (36): Xaa is C or S
  MOD_RES (14), (15), (16), (17), (18): Xaa is A or G
  MOD_RES (19), (20), (21), (22): Xaa is A or G or is absent
APTQLSPISVLYKXXXXXXXXXLKYHYNMVVRAXGXH

SEQ ID NO: 7842 - protein, 33 aa, Artificial Sequence
  GFR-binding peptide
  MOD_RES (14), (15), (16), (17), (18): Xaa is A or G
  MOD_RES (19), (20), (21), (22): Xaa is A or G or is absent
VPTELSATSMLYYXXXXXXXXXLRKHREMVVEG

SEQ ID NO: 7843 - protein, 36 aa, Artificial Sequence
  GFR-binding peptide
  MOD_RES (34), (36): Xaa is C or S
  MOD_RES (14), (15), (16), (17), (18): Xaa is A or G
  MOD_RES (19), (20), (21), (22): Xaa is A or G or is absent
APTKLNAISVLYFXXXXXXXXXLKKYRNMVVRSXGX

SEQ ID NO: 7844 - protein, 38 aa, Artificial Sequence
  GFR-binding peptide
  MOD_RES (4), (5): Xaa is C or S
  MOD_RES (19), (20), (21), (22), (23): Xaa is A or G
  MOD_RES (24), (25), (26), (27): Xaa is A or G or is absent
PKAXXVPTELSAISMLYLXXXXXXXXXLKNYQEMVVEG

SEQ ID NO: 7845 - protein, 30 aa, Artificial Sequence
  GFR-binding peptide
VSQDLSAISILYLIGKTPKILKNYQMIVKS

SEQ ID NO: 7846 - protein, 38 aa, Artificial Sequence
  GFR-binding peptide
  MOD_RES (1), (2), (36), (38): Xaa is C or S
  MOD_RES (16), (17), (18), (19), (20): Xaa is A or G
  MOD_RES (21), (22), (23), (24): Xaa is A or G or is absent
XXAPTQLSAISVLYLXXXXXXXXXLKNYQNMVVRAXGX

SEQ ID NO: 7847 - protein, 36 aa, Artificial Sequence
  GFR-binding peptide
  MOD_RES (3), (4): Xaa is C or S
  MOD_RES (18), (19), (20), (21), (22): Xaa is A or G
  MOD_RES (23), (24), (25), (26): Xaa is A or G or is absent
APXXVPQALNAISILYFXXXXXXXXXLKKYRMIVRS

SEQ ID NO: 7848 - protein, 39 aa, Artificial Sequence
  GFR-binding peptide
  MOD_RES (6), (38): Xaa is C or S
VTKPTXAPTKLSPISVLYKDDSSNVILKYHYNMVVRSXG

SEQ ID NO: 7849 - protein, 35 aa, Artificial Sequence
  GFR-binding peptide
  MOD_RES (4), (4): Xaa is C or S
KPTXAPTKLSATSVLYYDDSSNVILRKHRNMVVRS

SEQ ID NO: 7850 - protein, 38 aa, Artificial Sequence
  GFR-binding peptide
  MOD_RES (2), (3), (35), (37): Xaa is C or S
PXXAPTQLSATSVLYYDDSSNVILRKHRNMVVRAXGXH

SEQ ID NO: 7851 - protein, 41 aa, Artificial Sequence
  GFR-binding peptide
  MOD_RES (4), (41): Xaa is C or S
NVQXRPTQVQLSAISVLYLEIVRKKPIFLKNYQTLEDHLAX

SEQ ID NO: 7852 - protein, 40 aa, Artificial Sequence
  GFR-binding peptide
  MOD_RES (4), (5), (40): Xaa is C or S
  MOD_RES (19), (20), (21), (22), (23): Xaa is A or G
  MOD_RES (24), (25), (26), (27): Xaa is A or G or is absent
GKAXXVPTKLSATSVLYYXXXXXXXXXLRKHREGMSVAEX

SEQ ID NO: 7853 - protein, 42 aa, Artificial Sequence
  GFR-binding peptide
  MOD_RES (2), (39), (41): Xaa is C or S
  MOD_RES (18), (19), (20), (21), (22): Xaa is A or G
  MOD_RES (23), (24), (25), (26): Xaa is A or G or is absent
QXRPTQVQLSPISVLYKXXXXXXXXXLKYHYTLEDHLAXKXE

SEQ ID NO: 7854 - protein, 40 aa, Artificial Sequence
  GFR-binding peptide
  MOD_RES (6), (7), (38), (40): Xaa is C or S
ASASPXXVSQDLNAISILYFIGKTPKILKKYRMIVKSXKX

SEQ ID NO: 7855 - protein, 38 aa, Artificial Sequence
  GFR-binding peptide
  MOD_RES (5), (6), (38): Xaa is C or S
VPKAXXAPTKLSAISVLYLDSSNNVILKNYQNMVVKAX

SEQ ID NO: 7856 - protein, 34 aa, Artificial Sequence
  GFR-binding peptide
  MOD_RES (1), (34): Xaa is C or S
  MOD_RES (15), (16), (17), (18), (19): Xaa is A or G
  MOD_RES (20), (21), (22), (23): Xaa is A or G or is absent
XVPQALNAISILYFXXXXXXXXXLKKYRMIVRSX

SEQ ID NO: 7857 - protein, 38 aa, Artificial Sequence
  GFR-binding peptide
  MOD_RES (6), (7), (38): Xaa is C or S
ASASPXXVSQDLNAISILYFIGKTPKILKKYRMIVKSX

SEQ ID NO: 7858 - protein, 37 aa, Artificial Sequence
  GFR-binding peptide
  MOD_RES (1), (36): Xaa is C or S
  MOD_RES (15), (16), (17), (18), (19): Xaa is A or G
  MOD_RES (20), (21), (22), (23): Xaa is A or G or is absent
XVPTKLNAISVLYFXXXXXXXXXLKKYREGMSVAEXG

SEQ ID NO: 7859 - protein, 36 aa, Artificial Sequence
  GFR-binding peptide
  MOD_RES (1), (2), (36): Xaa is C or S
  MOD_RES (16), (17), (18), (19), (20): Xaa is A or G
  MOD_RES (21), (22), (23), (24): Xaa is A or G or is absent
XXAPTKLSAISVLYLXXXXXXXXXLKNYQNMVVKAX

SEQ ID NO: 7860 - protein, 39 aa, Artificial Sequence
  GFR-binding peptide
  MOD_RES (5), (6), (37), (39): Xaa is C or S
SASPXXVPQDLNAISILYFVGRTPKVLKKYRMVVKSXKX

SEQ ID NO: 7861 - protein, 38 aa, Artificial Sequence
  GFR-binding peptide
  MOD_RES (3), (4), (37): Xaa is C or S
KAXXVPTKLNAISVLYFDDMGVPTLKKYREGMSVAEXG

SEQ ID NO: 7862 - protein, 37 aa, Artificial Sequence
  GFR-binding peptide
  MOD_RES (2), (2): Xaa is C or S
  MOD_RES (18), (19), (20), (21), (22): Xaa is A or G
  MOD_RES (23), (24), (25), (26): Xaa is A or G or is absent
QXRPTQVQLSPISVLYKXXXXXXXXXLKYHYTLEDHL

SEQ ID NO: 7863 - protein, 34 aa, Artificial Sequence
  GFR-binding peptide
  MOD_RES (3), (4): Xaa is C or S
SPXXVPQDLSAISILYLVGRTPKVLKNYQMVVKS

SEQ ID NO: 7864 - protein, 38 aa, Artificial Sequence
  GFR-binding peptide
  MOD_RES (2), (2): Xaa is C or S
  MOD_RES (18), (19), (20), (21), (22): Xaa is A or G
  MOD_RES (23), (24), (25), (26): Xaa is A or G or is absent
QXRPTQVQLSAISVLYLXXXXXXXXXLKNYQTLEDHLA

SEQ ID NO: 7865 - protein, 42 aa, Artificial Sequence
  GFR-binding peptide
  MOD_RES (5), (6), (40), (42): Xaa is C or S
  MOD_RES (20), (21), (22), (23), (24): Xaa is A or G
  MOD_RES (25), (26), (27), (28): Xaa is A or G or is absent
IPKAXXVPTELSAISMLYLXXXXXXXXXLKNYQEMVVEGXGX

SEQ ID NO: 7866 - protein, 41 aa, Artificial Sequence
  GFR-binding peptide
  MOD_RES (5), (6), (40): Xaa is C or S
  MOD_RES (20), (21), (22), (23), (24): Xaa is A or G
  MOD_RES (25), (26), (27), (28): Xaa is A or G or is absent
IPKAXXVPTELNAISMLYFXXXXXXXXXLKKYREMVVEGXG

SEQ ID NO: 7867 - protein, 38 aa, Artificial Sequence
  GFR-binding peptide
  MOD_RES (4), (5), (36), (38): Xaa is C or S
ASPXXVPQDLSPISILYKVGRTPKVLKYHYMVVKSXKX

SEQ ID NO: 7868 - protein, 35 aa, Artificial Sequence
  GFR-binding peptide
  MOD_RES (2), (3): Xaa is C or S
  MOD_RES (17), (18), (19), (20), (21): Xaa is A or G
  MOD_RES (22), (23), (24), (25): Xaa is A or G or is absent
AXXAPTKLSAISVLYLXXXXXXXXXLKNYQNMVVK

SEQ ID NO: 7869 - protein, 44 aa, Artificial Sequence
  GFR-binding peptide
  MOD_RES (5), (42), (44): Xaa is C or S
  MOD_RES (21), (22), (23), (24), (25): Xaa is A or G
  MOD_RES (26), (27), (28), (29): Xaa is A or G or is absent
RNVQXRPTQVQLSATSVLYYXXXXXXXXXLRKHRTLEDHLAXKX

SEQ ID NO: 7870 - protein, 37 aa, Artificial Sequence
  GFR-binding peptide
  MOD_RES (4), (5), (37): Xaa is C or S
PKAXXVPTELSPISMLYKDEYDKVVLKYHYEMVVEGX

SEQ ID NO: 7871 - protein, 38 aa, Artificial Sequence
  GFR-binding peptide
  MOD_RES (2), (2): Xaa is C or S
  MOD_RES (18), (19), (20), (21), (22): Xaa is A or G
  MOD_RES (23), (24), (25), (26): Xaa is A or G or is absent
QXRPTQVQLSATSVLYYXXXXXXXXXLRKHRTLEDHLA

SEQ ID NO: 7872 - protein, 37 aa, Artificial Sequence
  GFR-binding peptide
  MOD_RES (5), (5): Xaa is C or S
  MOD_RES (19), (20), (21), (22), (23): Xaa is A or G
  MOD_RES (24), (25), (26), (27): Xaa is A or G or is absent
TKPTXAPTKLSATSVLYYXXXXXXXXXLRKHRNMVVR

SEQ ID NO: 7873 - protein, 37 aa, Artificial Sequence
  GFR-binding peptide
  MOD_RES (5), (37): Xaa is C or S
TKPTXAPTKLSATSVLYYDDSSNVILRKHRNMVVRSX

SEQ ID NO: 7874 - protein, 36 aa, Artificial Sequence
  GFR-binding peptide
  MOD_RES (1), (2), (33), (35): Xaa is C or S
XXVPQALSAISILYLVGRKPKVLKNYQMIVRSXKXS

SEQ ID NO: 7875 - protein, 36 aa, Artificial Sequence
  GFR-binding peptide
  MOD_RES (3), (4), (36): Xaa is C or S
KAXXVPTELNAISMLYFDEYDKVVLKKYREMVVEGX

SEQ ID NO: 7876 - protein, 37 aa, Artificial Sequence
  GFR-binding peptide
  MOD_RES (35), (37): Xaa is C or S
TQVQLSAISVLYLEIVRKKPIFLKNYQTLEDHLAXKX

SEQ ID NO: 7877 - protein, 36 aa, Artificial Sequence
  GFR-binding peptide
  MOD_RES (5), (6): Xaa is C or S
VPKPXXAPTQLSAISVLYLDDSSNVILKNYQNMVVR

SEQ ID NO: 7878 - protein, 40 aa, Artificial Sequence
  GFR-binding peptide
  MOD_RES (1), (2), (37), (39): Xaa is C or S
  MOD_RES (16), (17), (18), (19), (20): Xaa is A or G
  MOD_RES (21), (22), (23), (24): Xaa is A or G or is absent
XXVPTKLSAISVLYLXXXXXXXXXLKNYQEGMSVAEXGXR

SEQ ID NO: 7879 - protein, 37 aa, Artificial Sequence
  GFR-binding peptide
  MOD_RES (1), (2), (34), (36): Xaa is C or S
XXVPTELSPISMLYKDENEKVVLKYHYDMVVEGXGXR

SEQ ID NO: 7880 - protein, 35 aa, Artificial Sequence
  GFR-binding peptide
  MOD_RES (3), (4), (35): Xaa is C or S
SPXXVPQDLSPISILYKVGRTPKVLKYHYMVVKSX

SEQ ID NO: 7881 - protein, 35 aa, Artificial Sequence
  GFR-binding peptide
  MOD_RES (4), (5): Xaa is C or S
AAPXXVPQALSAISILYLVGRKPKVLKNYQMIVRS

SEQ ID NO: 7882 - protein, 35 aa, Artificial Sequence
  GFR-binding peptide
RPTQVQLNAISVLYFEIVRKKPIFLKKYRTLEDHL

SEQ ID NO: 7883 - protein, 38 aa, Artificial Sequence
  GFR-binding peptide
  MOD_RES (4), (5): Xaa is C or S
  MOD_RES (19), (20), (21), (22), (23): Xaa is A or G
  MOD_RES (24), (25), (26), (27): Xaa is A or G or is absent
PKPXXAPTQLSPISVLYKXXXXXXXXXLKYHYNMVVRA

SEQ ID NO: 7884 - protein, 37 aa, Artificial Sequence
  GFR-binding peptide
  MOD_RES (5), (6), (37): Xaa is C or S
SASPXXVPQDLNAISILYFVGRTPKVLKKYRMVVKSX

SEQ ID NO: 7885 - protein, 34 aa, Artificial Sequence
  GFR-binding peptide
  MOD_RES (14), (15), (16), (17), (18): Xaa is A or G
  MOD_RES (19), (20), (21), (22): Xaa is A or G or is absent
TQVQLNAISVLYFXXXXXXXXXLKKYRTLEDHLA

SEQ ID NO: 7886 - protein, 39 aa, Artificial Sequence
  GFR-binding peptide
  MOD_RES (2), (3), (36), (38): Xaa is C or S
AXXVPTKLSAISVLYLDDMGVPTLKNYQEGMSVAEXGXR

SEQ ID NO: 7887 - protein, 40 aa, Artificial Sequence
  GFR-binding peptide
  MOD_RES (3), (4), (37), (39): Xaa is C or S
  MOD_RES (18), (19), (20), (21), (22): Xaa is A or G
  MOD_RES (23), (24), (25), (26): Xaa is A or G or is absent
SPXXVPQDLSATSILYYXXXXXXXXXLRKHRMVVKSXKXS

SEQ ID NO: 7888 - protein, 37 aa, Artificial Sequence
  GFR-binding peptide
  MOD_RES (4), (5), (37): Xaa is C or S
PKAXXVPTELNAISMLYFDEYDKVVLKKYREMVVEGX

SEQ ID NO: 7889 - protein, 41 aa, Artificial Sequence
  GFR-binding peptide
  MOD_RES (4), (5), (38), (40): Xaa is C or S
  MOD_RES (19), (20), (21), (22), (23): Xaa is A or G
  MOD_RES (24), (25), (26), (27): Xaa is A or G or is absent
ASPXXVSQDLSAISILYLXXXXXXXXXLKNYQMIVKSXKXS

SEQ ID NO: 7890 - protein, 37 aa, Artificial Sequence
  GFR-binding peptide
  MOD_RES (1), (2), (36): Xaa is C or S
  MOD_RES (16), (17), (18), (19), (20): Xaa is A or G
  MOD_RES (21), (22), (23), (24): Xaa is A or G or is absent
XXAPTKLNAISVLYFXXXXXXXXXLKKYRNMVVKAXG

SEQ ID NO: 7891 - protein, 38 aa, Artificial Sequence
  GFR-binding peptide
  MOD_RES (4), (5), (37): Xaa is C or S
PKPXXAPTQLSPISVLYKDDSSNVILKYHYNMVVRAXG

SEQ ID NO: 7892 - protein, 36 aa, Artificial Sequence
  GFR-binding peptide
  MOD_RES (4), (4): Xaa is C or S
  MOD_RES (18), (19), (20), (21), (22): Xaa is A or G
  MOD_RES (23), (24), (25), (26): Xaa is A or G or is absent
KPTXAPTKLNAISVLYFXXXXXXXXXLKKYRNMVVR

SEQ ID NO: 7893 - protein, 39 aa, Artificial Sequence
  GFR-binding peptide
  MOD_RES (5), (6), (38): Xaa is C or S
VPKPXXAPTQLSATSVLYYDDSSNVILRKHRNMVVRAXG

SEQ ID NO: 7894 - protein, 40 aa, Artificial Sequence
  GFR-binding peptide
  MOD_RES (3), (4), (39): Xaa is C or S
  MOD_RES (18), (19), (20), (21), (22): Xaa is A or G
  MOD_RES (23), (24), (25), (26): Xaa is A or G or is absent
KAXXVPTKLNAISVLYFXXXXXXXXXLKKYREGMSVAEXG

SEQ ID NO: 7895 - protein, 43 aa, Artificial Sequence
  GFR-binding peptide
  MOD_RES (5), (6), (40), (42): Xaa is C or S
  MOD_RES (20), (21), (22), (23), (24): Xaa is A or G
  MOD_RES (25), (26), (27), (28): Xaa is A or G or is absent
VPKAXXAPTKLSATSVLYYXXXXXXXXXLRKHRNMVVKAXGXH

SEQ ID NO: 7896 - protein, 38 aa, Artificial Sequence
  GFR-binding peptide
  MOD_RES (4), (5), (36), (38): Xaa is C or S
ASPXXVPQDLSATSILYYVGRTPKVLRKHRMVVKSXKX

SEQ ID NO: 7897 - protein, 36 aa, Artificial Sequence
  GFR-binding peptide
  MOD_RES (1), (2), (35): Xaa is C or S
  MOD_RES (16), (17), (18), (19), (20): Xaa is A or G
  MOD_RES (21), (22), (23), (24): Xaa is A or G or is absent
XXVPQALSATSILYYXXXXXXXXXLRKHRMIVRSXK

SEQ ID NO: 7898 - protein, 40 aa, Artificial Sequence
  GFR-binding peptide
  MOD_RES (6), (7), (40): Xaa is C or S
  MOD_RES (21), (22), (23), (24), (25): Xaa is A or G
  MOD_RES (26), (27), (28), (29): Xaa is A or G or is absent
ASAAPXXVPQALSAISILYLXXXXXXXXXLKNYQMIVRSX

SEQ ID NO: 7899 - protein, 35 aa, Artificial Sequence
  GFR-binding peptide
  MOD_RES (3), (4), (35): Xaa is C or S
SPXXVSQDLSATSILYYIGKTPKILRKHRMIVKSX

SEQ ID NO: 7900 - protein, 38 aa, Artificial Sequence
  GFR-binding peptide
  MOD_RES (4), (5): Xaa is C or S
  MOD_RES (19), (20), (21), (22), (23): Xaa is A or G
  MOD_RES (24), (25), (26), (27): Xaa is A or G or is absent
PKAXXVPTELSPISMLYKXXXXXXXXXLKYHYDMVVEG

SEQ ID NO: 7901 - protein, 34 aa, Artificial Sequence
  GFR-binding peptide
  MOD_RES (34), (34): Xaa is C or S
  MOD_RES (14), (15), (16), (17), (18): Xaa is A or G
  MOD_RES (19), (20), (21), (22): Xaa is A or G or is absent
APTKLSAISVLYLXXXXXXXXXLKNYQNMVVRSX

SEQ ID NO: 7902 - protein, 43 aa, Artificial Sequence
  GFR-binding peptide
  MOD_RES (4), (41), (43): Xaa is C or S
  MOD_RES (20), (21), (22), (23), (24): Xaa is A or G
  MOD_RES (25), (26), (27), (28): Xaa is A or G or is absent
NVQXRPTQVQLSAISVLYLXXXXXXXXXLKNYQTLEDHLAXKX

SEQ ID NO: 7903 - protein, 37 aa, Artificial Sequence
  GFR-binding peptide
  MOD_RES (1), (2), (34), (36): Xaa is C or S
XXAPTKLSAISVLYLDSSNNVILKNYQNMVVKAXGXH

SEQ ID NO: 7904 - protein, 40 aa, Artificial Sequence
  GFR-binding peptide
  MOD_RES (6), (7), (40): Xaa is C or S
  MOD_RES (21), (22), (23), (24), (25): Xaa is A or G
  MOD_RES (26), (27), (28), (29): Xaa is A or G or is absent
ASASPXXVSQDLNAISILYFXXXXXXXXXLKKYRMIVKSX

SEQ ID NO: 7905 - protein, 35 aa, Artificial Sequence
  GFR-binding peptide
  MOD_RES (1), (33), (35): Xaa is C or S
XAPTKLNAISVLYFDSSNNVILKKYRNMVVKAXGX

SEQ ID NO: 7906 - protein, 34 aa, Artificial Sequence
  GFR-binding peptide
  MOD_RES (33), (33): Xaa is C or S
  MOD_RES (14), (15), (16), (17), (18): Xaa is A or G
  MOD_RES (19), (20), (21), (22): Xaa is A or G or is absent
VSQDLSPISILYKXXXXXXXXXLKYHYMIVKSXK

SEQ ID NO: 7907 - protein, 32 aa, Artificial Sequence
  GFR-binding peptide
  MOD_RES (31), (31): Xaa is C or S
VPQALSPISILYKVGRKPKVLKYHYMIVRSXK

SEQ ID NO: 7908 - protein, 36 aa, Artificial Sequence
  GFR-binding peptide
  MOD_RES (36), (36): Xaa is C or S
  MOD_RES (15), (16), (17), (18), (19): Xaa is A or G
  MOD_RES (20), (21), (22), (23): Xaa is A or G or is absent
PTQVQLSATSVLYYXXXXXXXXXLRKHRTLEDHLAX

SEQ ID NO: 7909 - protein, 36 aa, Artificial Sequence
  GFR-binding peptide
  MOD_RES (5), (6): Xaa is C or S
VPKAXXAPTKLSAISVLYLDSSNNVILKNYQNMVVK

SEQ ID NO: 7910 - protein, 35 aa, Artificial Sequence
  GFR-binding peptide
  MOD_RES (2), (3), (35): Xaa is C or S
PXXAPTKLSATSVLYYDDSSNVILRKHRNMVVRSX

SEQ ID NO: 7911 - protein, 39 aa, Artificial Sequence
  GFR-binding peptide
  MOD_RES (4), (36), (38): Xaa is C or S
KPTXAPTKLSAISVLYLDDSSNVILKNYQNMVVRSXGXH

SEQ ID NO: 7912 - protein, 38 aa, Artificial Sequence
  GFR-binding peptide
  MOD_RES (2), (3), (37): Xaa is C or S
  MOD_RES (17), (18), (19), (20), (21): Xaa is A or G
  MOD_RES (22), (23), (24), (25): Xaa is A or G or is absent
AXXAPTKLNAISVLYFXXXXXXXXXLKKYRNMVVKAXG

SEQ ID NO: 7913 - protein, 40 aa, Artificial Sequence
  GFR-binding peptide
  MOD_RES (6), (7), (39): Xaa is C or S
KIPKAXXVPTELSPISMLYKDENEKVVLKYHYDMVVEGXG

SEQ ID NO: 7914 - protein, 37 aa, Artificial Sequence
  GFR-binding peptide
  MOD_RES (1), (2), (34), (36): Xaa is C or S
XXAPTKLSPISVLYKDDSSNVILKYHYNMVVRSXGXH

SEQ ID NO: 7915 - protein, 35 aa, Artificial Sequence
  GFR-binding peptide
  MOD_RES (4), (5): Xaa is C or S
AAPXXVPQALSPISILYKVGRKPKVLKYHYMIVRS

SEQ ID NO: 7916 - protein, 40 aa, Artificial Sequence
  GFR-binding peptide
  MOD_RES (5), (39): Xaa is C or S
  MOD_RES (19), (20), (21), (22), (23): Xaa is A or G
  MOD_RES (24), (25), (26), (27): Xaa is A or G or is absent
TKPTXAPTKLSPISVLYKXXXXXXXXXLKYHYNMVVRSXG

SEQ ID NO: 7917 - protein, 42 aa, Artificial Sequence
  GFR-binding peptide
  MOD_RES (4), (41): Xaa is C or S
NVQXRPTQVQLNAISVLYFEIVRKKPIFLKKYRTLEDHLAXK

SEQ ID NO: 7918 - protein, 37 aa, Artificial Sequence
  GFR-binding peptide
  MOD_RES (5), (6), (37): Xaa is C or S
SAAPXXVPQALSATSILYYVGRKPKVLRKHRMIVRSX

SEQ ID NO: 7919 - protein, 40 aa, Artificial Sequence
  GFR-binding peptide
  MOD_RES (4), (4): Xaa is C or S
NVQXRPTQVQLSAISVLYLEIVRKKPIFLKNYQTLEDHLA

SEQ ID NO: 7920 - protein, 39 aa, Artificial Sequence
  GFR-binding peptide
  MOD_RES (1), (2), (36), (38): Xaa is C or S
  MOD_RES (16), (17), (18), (19), (20): Xaa is A or G
  MOD_RES (21), (22), (23), (24): Xaa is A or G or is absent
XXVPTELSAISMLYLXXXXXXXXXLKNYQDMVVEGXGXR

SEQ ID NO: 7921 - protein, 35 aa, Artificial Sequence
  GFR-binding peptide
  MOD_RES (34), (34): Xaa is C or S
  MOD_RES (14), (15), (16), (17), (18): Xaa is A or G
  MOD_RES (19), (20), (21), (22): Xaa is A or G or is absent
APTQLSAISVLYLXXXXXXXXXLKNYQNMVVRAXG

SEQ ID NO: 7922 - protein, 34 aa, Artificial Sequence
  GFR-binding peptide
  MOD_RES (1), (2): Xaa is C or S
XXVPTKLNAISVLYFDDMGVPTLKKYREGMSVAE

SEQ ID NO: 7923 - protein, 35 aa, Artificial Sequence
  GFR-binding peptide
  MOD_RES (3), (4): Xaa is C or S
KAXXAPTKLNAISVLYFDSSNNVILKKYRNMVVKA

SEQ ID NO: 7924 - protein, 40 aa, Artificial Sequence
  GFR-binding peptide
  MOD_RES (7), (7): Xaa is C or S
  MOD_RES (21), (22), (23), (24), (25): Xaa is A or G
  MOD_RES (26), (27), (28), (29): Xaa is A or G or is absent
HVTKPTXAPTKLNAISVLYFXXXXXXXXXLKKYRNMVVRS

SEQ ID NO: 7925 - protein, 38 aa, Artificial Sequence
  GFR-binding peptide
  MOD_RES (1), (35), (37): Xaa is C or S
  MOD_RES (15), (16), (17), (18), (19): Xaa is A or G
  MOD_RES (20), (21), (22), (23): Xaa is A or G or is absent
XAPTQLNAISVLYFXXXXXXXXXLKKYRNMVVRAXGXH

SEQ ID NO: 7926 - protein, 35 aa, Artificial Sequence
  GFR-binding peptide
  MOD_RES (1), (35): Xaa is C or S
  MOD_RES (15), (16), (17), (18), (19): Xaa is A or G
  MOD_RES (20), (21), (22), (23): Xaa is A or G or is absent
XAPTKLSAISVLYLXXXXXXXXXLKNYQNMVVRSX

SEQ ID NO: 7927 - protein, 37 aa, Artificial Sequence
  GFR-binding peptide
  MOD_RES (2), (3), (37): Xaa is C or S
  MOD_RES (17), (18), (19), (20), (21): Xaa is A or G
  MOD_RES (22), (23), (24), (25): Xaa is A or G or is absent
PXXAPTQLSATSVLYYXXXXXXXXXLRKHRNMVVRAX

SEQ ID NO: 7928 - protein, 38 aa, Artificial Sequence
  GFR-binding peptide
  MOD_RES (2), (36), (38): Xaa is C or S
  MOD_RES (16), (17), (18), (19), (20): Xaa is A or G
  MOD_RES (21), (22), (23), (24): Xaa is A or G or is absent
TXAPTKLSAISVLYLXXXXXXXXXLKNYQNMVVRSXGX

SEQ ID NO: 7929 - protein, 43 aa, Artificial Sequence
  GFR-binding peptide
  MOD_RES (5), (6), (40), (42): Xaa is C or S
  MOD_RES (20), (21), (22), (23), (24): Xaa is A or G
  MOD_RES (25), (26), (27), (28): Xaa is A or G or is absent
IPKAXXVPTELSPISMLYKXXXXXXXXXLKYHYEMVVEGXGXR

SEQ ID NO: 7930 - protein, 41 aa, Artificial Sequence
  GFR-binding peptide
  MOD_RES (6), (7), (41): Xaa is C or S
  MOD_RES (21), (22), (23), (24), (25): Xaa is A or G
  MOD_RES (26), (27), (28), (29): Xaa is A or G or is absent
YVPKPXXAPTKLNAISVLYFXXXXXXXXXLKKYRNMVVRSX

SEQ ID NO: 7931 - protein, 39 aa, Artificial Sequence
  GFR-binding peptide
  MOD_RES (5), (6), (39): Xaa is C or S
  MOD_RES (20), (21), (22), (23), (24): Xaa is A or G
  MOD_RES (25), (26), (27), (28): Xaa is A or G or is absent
SAAPXXVPQALSPISILYKXXXXXXXXXLKYHYMIVRSX

SEQ ID NO: 7932 - protein, 38 aa, Artificial Sequence
  GFR-binding peptide
  MOD_RES (3), (4), (35), (37): Xaa is C or S
APXXVPQALSAISILYLVGRKPKVLKNYQMIVRSXKXS

SEQ ID NO: 7933 - protein, 38 aa, Artificial Sequence
  GFR-binding peptide
  MOD_RES (3), (4), (38): Xaa is C or S
  MOD_RES (18), (19), (20), (21), (22): Xaa is A or G
  MOD_RES (23), (24), (25), (26): Xaa is A or G or is absent
KPXXAPTKLSATSVLYYXXXXXXXXXLRKHRNMVVRSX

SEQ ID NO: 7934 - protein, 38 aa, Artificial Sequence
  GFR-binding peptide
  MOD_RES (6), (7), (38): Xaa is C or S
ASASPXXVPQDLNAISILYFVGRTPKVLKKYRMVVKSX

SEQ ID NO: 7935 - protein, 39 aa, Artificial Sequence
  GFR-binding peptide
  MOD_RES (37), (39): Xaa is C or S
  MOD_RES (16), (17), (18), (19), (20): Xaa is A or G
  MOD_RES (21), (22), (23), (24): Xaa is A or G or is absent
RPTQVQLSPISVLYKXXXXXXXXXLKYHYTLEDHLAXKX

SEQ ID NO: 7936 - protein, 44 aa, Artificial Sequence
  GFR-binding peptide
  MOD_RES (5), (6), (41), (43): Xaa is C or S
  MOD_RES (20), (21), (22), (23), (24): Xaa is A or G
  MOD_RES (25), (26), (27), (28): Xaa is A or G or is absent
VGKAXXVPTKLSPISVLYKXXXXXXXXXLKYHYEGMSVAEXGXR

SEQ ID NO: 7937 - protein, 34 aa, Artificial Sequence
  GFR-binding peptide
  MOD_RES (2), (3): Xaa is C or S
AXXVPTELNAISMLYFDENEKVVLKKYRDMVVEG

SEQ ID NO: 7938 - protein, 42 aa, Artificial Sequence
  GFR-binding peptide
  MOD_RES (4), (41): Xaa is C or S
  MOD_RES (20), (21), (22), (23), (24): Xaa is A or G
  MOD_RES (25), (26), (27), (28): Xaa is A or G or is absent
NVQXRPTQVQLNAISVLYFXXXXXXXXXLKKYRTLEDHLAXK

SEQ ID NO: 7939 - protein, 36 aa, Artificial Sequence
  GFR-binding peptide
  MOD_RES (5), (6): Xaa is C or S
VPKAXXAPTKLSPISVLYKDSSNNVILKYHYNMVVK

SEQ ID NO: 7940 - protein, 40 aa, Artificial Sequence
  GFR-binding peptide
  MOD_RES (6), (7): Xaa is C or S
  MOD_RES (21), (22), (23), (24), (25): Xaa is A or G
  MOD_RES (26), (27), (28), (29): Xaa is A or G or is absent
TVPKPXXAPTQLSATSVLYYXXXXXXXXXLRKHRNMVVRA

SEQ ID NO: 7941 - protein, 41 aa, Artificial Sequence
  GFR-binding peptide
  MOD_RES (4), (5), (39), (41): Xaa is C or S
  MOD_RES (19), (20), (21), (22), (23): Xaa is A or G
  MOD_RES (24), (25), (26), (27): Xaa is A or G or is absent
PKAXXVPTELSPISMLYKXXXXXXXXXLKYHYEMVVEGXGX

SEQ ID NO: 7942 - protein, 37 aa, Artificial Sequence
  GFR-binding peptide
  MOD_RES (3), (4), (36): Xaa is C or S
KAXXVPTELSPISMLYKDENEKVVLKYHYDMVVEGXG

SEQ ID NO: 7943 - protein, 42 aa, Artificial Sequence
  GFR-binding peptide
  MOD_RES (6), (7), (40), (42): Xaa is C or S
  MOD_RES (21), (22), (23), (24), (25): Xaa is A or G
  MOD_RES (26), (27), (28), (29): Xaa is A or G or is absent
ASAAPXXVPQALSPISILYKXXXXXXXXXLKYHYMIVRSXKX

SEQ ID NO: 7944 - protein, 38 aa, Artificial Sequence
  GFR-binding peptide
  MOD_RES (4), (36), (38): Xaa is C or S
KPTXAPTKLSATSVLYYDDSSNVILRKHRNMVVRSXGX

SEQ ID NO: 7945 - protein, 36 aa, Artificial Sequence
  GFR-binding peptide
  MOD_RES (1), (2): Xaa is C or S
  MOD_RES (16), (17), (18), (19), (20): Xaa is A or G
  MOD_RES (21), (22), (23), (24): Xaa is A or G or is absent
XXVPTKLSAISVLYLXXXXXXXXXLKNYQEGMSVAE

SEQ ID NO: 7946 - protein, 35 aa, Artificial Sequence
  GFR-binding peptide
  MOD_RES (2), (3), (35): Xaa is C or S
PXXAPTQLSPISVLYKDDSSNVILKYHYNMVVRAX

SEQ ID NO: 7947 - protein, 33 aa, Artificial Sequence
  GFR-binding peptide
  MOD_RES (2), (3): Xaa is C or S
PXXAPTQLSATSVLYYDDSSNVILRKHRNMVVR

SEQ ID NO: 7948 - protein, 41 aa, Artificial Sequence
  GFR-binding peptide
  MOD_RES (6), (7), (38), (40): Xaa is C or S
ASASPXXVPQDLNAISILYFVGRTPKVLKKYRMVVKSXKXS

SEQ ID NO: 7949 - protein, 32 aa, Artificial Sequence
  GFR-binding peptide
  MOD_RES (14), (15), (16), (17), (18): Xaa is A or G
  MOD_RES (19), (20), (21), (22): Xaa is A or G or is absent
VPQDLNAISILYFXXXXXXXXXLKKYRMVVKS

SEQ ID NO: 7950 - protein, 38 aa, Artificial Sequence
  GFR-binding peptide
  MOD_RES (5), (6): Xaa is C or S
VGKAXXVPTKLSATSVLYYDDMGVPTLRKHREGMSVAE

SEQ ID NO: 7951 - protein, 34 aa, Artificial Sequence
  GFR-binding peptide
  MOD_RES (3), (4): Xaa is C or S
SPXXVPQDLSPISILYKVGRTPKVLKYHYMVVKS

SEQ ID NO: 7952 - protein, 37 aa, Artificial Sequence
  GFR-binding peptide
  MOD_RES (1), (35), (37): Xaa is C or S
  MOD_RES (15), (16), (17), (18), (19): Xaa is A or G
  MOD_RES (20), (21), (22), (23): Xaa is A or G or is absent
XAPTKLNAISVLYFXXXXXXXXXLKKYRNMVVKAXGX

SEQ ID NO: 7953 - protein, 35 aa, Artificial Sequence
  GFR-binding peptide
  MOD_RES (33), (35): Xaa is C or S
  MOD_RES (14), (15), (16), (17), (18): Xaa is A or G
  MOD_RES (19), (20), (21), (22): Xaa is A or G or is absent
VPQDLSATSILYYXXXXXXXXXLRKHRMVVKSXKX

SEQ ID NO: 7954 - protein, 38 aa, Artificial Sequence
  GFR-binding peptide
  MOD_RES (2), (3), (37): Xaa is C or S
  MOD_RES (17), (18), (19), (20), (21): Xaa is A or G
  MOD_RES (22), (23), (24), (25): Xaa is A or G or is absent
AXXVPTELNAISMLYFXXXXXXXXXLKKYRDMVVEGXG

SEQ ID NO: 7955 - protein, 36 aa, Artificial Sequence
  GFR-binding peptide
  MOD_RES (1), (2): Xaa is C or S
  MOD_RES (16), (17), (18), (19), (20): Xaa is A or G
  MOD_RES (21), (22), (23), (24): Xaa is A or G or is absent
XXVPTKLSATSVLYYXXXXXXXXXLRKHREGMSVAE

SEQ ID NO: 7956 - protein, 41 aa, Artificial Sequence
  GFR-binding peptide
  MOD_RES (1), (38), (40): Xaa is C or S
XRPTQVQLSATSVLYYEIVRKKPIFLRKHRTLEDHLAXKXE

SEQ ID NO: 7957 - protein, 38 aa, Artificial Sequence
  GFR-binding peptide
  MOD_RES (3), (4), (38): Xaa is C or S
  MOD_RES (18), (19), (20), (21), (22): Xaa is A or G
  MOD_RES (23), (24), (25), (26): Xaa is A or G or is absent
KAXXVPTELSATSMLYYXXXXXXXXXLRKHRDMVVEGX

SEQ ID NO: 7958 - protein, 33 aa, Artificial Sequence
  GFR-binding peptide
  MOD_RES (1), (1): Xaa is C or S
  MOD_RES (15), (16), (17), (18), (19): Xaa is A or G
  MOD_RES (20), (21), (22), (23): Xaa is A or G or is absent
XVPQDLNAISILYFXXXXXXXXXLKKYRMVVKS

SEQ ID NO: 7959 - protein, 38 aa, Artificial Sequence
  GFR-binding peptide
  MOD_RES (2), (3), (37): Xaa is C or S
  MOD_RES (17), (18), (19), (20), (21): Xaa is A or G
  MOD_RES (22), (23), (24), (25): Xaa is A or G or is absent
PXXAPTKLSATSVLYYXXXXXXXXXLRKHRNMVVRSXG

SEQ ID NO: 7960 - protein, 36 aa, Artificial Sequence
  GFR-binding peptide
  MOD_RES (1), (2), (35): Xaa is C or S
  MOD_RES (16), (17), (18), (19), (20): Xaa is A or G
  MOD_RES (21), (22), (23), (24): Xaa is A or G or is absent
XXVPQDLSPISILYKXXXXXXXXXLKYHYMVVKSXK

SEQ ID NO: 7961 - protein, 35 aa, Artificial Sequence
  GFR-binding peptide
  MOD_RES (34), (34): Xaa is C or S
  MOD_RES (14), (15), (16), (17), (18): Xaa is A or G
  MOD_RES (19), (20), (21), (22): Xaa is A or G or is absent
APTKLSAISVLYLXXXXXXXXXLKNYQNMVVKAXG

SEQ ID NO: 7962 - protein, 37 aa, Artificial Sequence
  GFR-binding peptide
  MOD_RES (2), (3), (37): Xaa is C or S
  MOD_RES (17), (18), (19), (20), (21): Xaa is A or G
  MOD_RES (22), (23), (24), (25): Xaa is A or G or is absent
AXXVPTELNAISMLYFXXXXXXXXXLKKYREMVVEGX

SEQ ID NO: 7963 - protein, 38 aa, Artificial Sequence
  GFR-binding peptide
  MOD_RES (6), (7), (38): Xaa is C or S
ASAAPXXVPQALSATSILYYVGRKPKVLRKHRMIVRSX

SEQ ID NO: 7964 - protein, 30 aa, Artificial Sequence
  GFR-binding peptide
VSQDLSPISILYKIGKTPKILKYHYMIVKS

SEQ ID NO: 7965 - protein, 36 aa, Artificial Sequence
  GFR-binding peptide
  MOD_RES (1), (1): Xaa is C or S
XRPTQVQLNAISVLYFEIVRKKPIFLKKYRTLEDHL

SEQ ID NO: 7966 - protein, 32 aa, Artificial Sequence
  GFR-binding peptide
  MOD_RES (1), (32): Xaa is C or S
XVPQALNAISILYFVGRKPKVLKKYRMIVRSX

SEQ ID NO: 7967 - protein, 31 aa, Artificial Sequence
  GFR-binding peptide
  MOD_RES (31), (31): Xaa is C or S
VPQALNAISILYFVGRKPKVLKKYRMIVRSX

SEQ ID NO: 7968 - protein, 41 aa, Artificial Sequence
  GFR-binding peptide
  MOD_RES (4), (41): Xaa is C or S
  MOD_RES (20), (21), (22), (23), (24): Xaa is A or G
  MOD_RES (25), (26), (27), (28): Xaa is A or G or is absent
NVQXRPTQVQLNAISVLYFXXXXXXXXXLKKYRTLEDHLAX

SEQ ID NO: 7969 - protein, 37 aa, Artificial Sequence
  GFR-binding peptide
  MOD_RES (1), (2), (36): Xaa is C or S
  MOD_RES (16), (17), (18), (19), (20): Xaa is A or G
  MOD_RES (21), (22), (23), (24): Xaa is A or G or is absent
XXVPTELNAISMLYFXXXXXXXXXLKKYRDMVVEGXG

SEQ ID NO: 7970 - protein, 36 aa, Artificial Sequence
  GFR-binding peptide
  MOD_RES (1), (2), (33), (35): Xaa is C or S
XXVPQDLSPISILYKVGRTPKVLKYHYMVVKSXKXS

SEQ ID NO: 7971 - protein, 35 aa, Artificial Sequence
  GFR-binding peptide
  MOD_RES (1), (32), (34): Xaa is C or S
XVSQDLSATSILYYIGKTPKILRKHRMIVKSXKXS

SEQ ID NO: 7972 - protein, 40 aa, Artificial Sequence
  GFR-binding peptide
  MOD_RES (6), (7), (38), (40): Xaa is C or S
ASASPXXVPQDLNAISILYFVGRTPKVLKKYRMVVKSXKX

SEQ ID NO: 7973 - protein, 38 aa, Artificial Sequence
  GFR-binding peptide
  MOD_RES (4), (5), (38): Xaa is C or S
  MOD_RES (19), (20), (21), (22), (23): Xaa is A or G
  MOD_RES (24), (25), (26), (27): Xaa is A or G or is absent
ASPXXVSQDLNAISILYFXXXXXXXXXLKKYRMIVKSX

SEQ ID NO: 7974 - protein, 37 aa, Artificial Sequence
  GFR-binding peptide
  MOD_RES (2), (3), (34), (36): Xaa is C or S
PXXVPQALNAISILYFVGRKPKVLKKYRMIVRSXKXS

SEQ ID NO: 7975 - protein, 42 aa, Artificial Sequence
  GFR-binding peptide
  MOD_RES (5), (42): Xaa is C or S
  MOD_RES (21), (22), (23), (24), (25): Xaa is A or G
  MOD_RES (26), (27), (28), (29): Xaa is A or G or is absent
RNVQXRPTQVQLNAISVLYFXXXXXXXXXLKKYRTLEDHLAX

SEQ ID NO: 7976 - protein, 35 aa, Artificial Sequence
  GFR-binding peptide
  MOD_RES (1), (2), (33), (35): Xaa is C or S
XXVSQDLSPISILYKIGKTPKILKYHYMIVKSXKX

SEQ ID NO: 7977 - protein, 42 aa, Artificial Sequence
  GFR-binding peptide
  MOD_RES (5), (6), (39), (41): Xaa is C or S
  MOD_RES (20), (21), (22), (23), (24): Xaa is A or G
  MOD_RES (25), (26), (27), (28): Xaa is A or G or is absent
SAAPXXVPQALNAISILYFXXXXXXXXXLKKYRMIVRSXKXS

SEQ ID NO: 7978 - protein, 36 aa, Artificial Sequence
  GFR-binding peptide
  MOD_RES (1), (33), (35): Xaa is C or S
XVPTELSATSMLYYDENEKVVLRKHRDMVVEGXGXR

SEQ ID NO: 7979 - protein, 38 aa, Artificial Sequence
  GFR-binding peptide
  MOD_RES (5), (6), (38): Xaa is C or S
VPKAXXAPTKLNAISVLYFDSSNNVILKKYRNMVVKAX

SEQ ID NO: 7980 - protein, 39 aa, Artificial Sequence
  GFR-binding peptide
  MOD_RES (3), (37), (39): Xaa is C or S
  MOD_RES (17), (18), (19), (20), (21): Xaa is A or G
  MOD_RES (22), (23), (24), (25): Xaa is A or G or is absent
PTXAPTKLSATSVLYYXXXXXXXXXLRKHRNMVVRSXGX

SEQ ID NO: 7981 - protein, 43 aa, Artificial Sequence
  GFR-binding peptide
  MOD_RES (7), (41), (43): Xaa is C or S
  MOD_RES (21), (22), (23), (24), (25): Xaa is A or G
  MOD_RES (26), (27), (28), (29): Xaa is A or G or is absent
HVTKPTXAPTKLSAISVLYLXXXXXXXXXLKNYQNMVVRSXGX

SEQ ID NO: 7982 - protein, 33 aa, Artificial Sequence
  GFR-binding peptide
  MOD_RES (15), (16), (17), (18), (19): Xaa is A or G
  MOD_RES (20), (21), (22), (23): Xaa is A or G or is absent
PTQVQLNAISVLYFXXXXXXXXXLKKYRTLEDH

SEQ ID NO: 7983 - protein, 37 aa, Artificial Sequence
  GFR-binding peptide
  MOD_RES (2), (3), (35), (37): Xaa is C or S
AXXVPTELSATSMLYYDENEKVVLRKHRDMVVEGXGX

SEQ ID NO: 7984 - protein, 37 aa, Artificial Sequence
  GFR-binding peptide
  MOD_RES (36), (36): Xaa is C or S
  MOD_RES (15), (16), (17), (18), (19): Xaa is A or G
  MOD_RES (20), (21), (22), (23): Xaa is A or G or is absent
PTQVQLSATSVLYYXXXXXXXXXLRKHRTLEDHLAXK

SEQ ID NO: 7985 - protein, 36 aa, Artificial Sequence
  GFR-binding peptide
  MOD_RES (1), (1): Xaa is C or S
  MOD_RES (17), (18), (19), (20), (21): Xaa is A or G
  MOD_RES (22), (23), (24), (25): Xaa is A or G or is absent
XRPTQVQLSATSVLYYXXXXXXXXXLRKHRTLEDHL

SEQ ID NO: 7986 - protein, 44 aa, Artificial Sequence
  GFR-binding peptide
  MOD_RES (6), (7), (41), (43): Xaa is C or S
  MOD_RES (21), (22), (23), (24), (25): Xaa is A or G
  MOD_RES (26), (27), (28), (29): Xaa is A or G or is absent
TVPKPXXAPTQLSAISVLYLXXXXXXXXXLKNYQNMVVRAXGXH

SEQ ID NO: 7987 - protein, 41 aa, Artificial Sequence
  GFR-binding peptide
  MOD_RES (3), (4), (39), (41): Xaa is C or S
  MOD_RES (18), (19), (20), (21), (22): Xaa is A or G
  MOD_RES (23), (24), (25), (26): Xaa is A or G or is absent
KAXXVPTKLSATSVLYYXXXXXXXXXLRKHREGMSVAEXGX

SEQ ID NO: 7988 - protein, 38 aa, Artificial Sequence
  GFR-binding peptide
  MOD_RES (3), (4), (37): Xaa is C or S
KAXXVPTKLSATSVLYYDDMGVPTLRKHREGMSVAEXG

SEQ ID NO: 7989 - protein, 37 aa, Artificial Sequence
  GFR-binding peptide
  MOD_RES (2), (3), (36): Xaa is C or S
  MOD_RES (17), (18), (19), (20), (21): Xaa is A or G
  MOD_RES (22), (23), (24), (25): Xaa is A or G or is absent
PXXVPQALSPISILYKXXXXXXXXXLKYHYMIVRSXK

SEQ ID NO: 7990 - protein, 39 aa, Artificial Sequence
  GFR-binding peptide
  MOD_RES (3), (4), (38): Xaa is C or S
  MOD_RES (18), (19), (20), (21), (22): Xaa is A or G
  MOD_RES (23), (24), (25), (26): Xaa is A or G or is absent
KAXXVPTELSATSMLYYXXXXXXXXXLRKHRDMVVEGXG

SEQ ID NO: 7991 - protein, 31 aa, Artificial Sequence
  GFR-binding peptide
  MOD_RES (1), (1): Xaa is C or S
XVSQDLSATSILYYIGKTPKILRKHRMIVKS

SEQ ID NO: 7992 - protein, 38 aa, Artificial Sequence
  GFR-binding peptide
  MOD_RES (6), (38): Xaa is C or S
VTKPTXAPTKLSPISVLYKDDSSNVILKYHYNMVVRSX

SEQ ID NO: 7993 - protein, 37 aa, Artificial Sequence
  GFR-binding peptide
  MOD_RES (2), (36): Xaa is C or S
  MOD_RES (16), (17), (18), (19), (20): Xaa is A or G
  MOD_RES (21), (22), (23), (24): Xaa is A or G or is absent
TXAPTKLNAISVLYFXXXXXXXXXLKKYRNMVVRSXG

SEQ ID NO: 7994 - protein, 35 aa, Artificial Sequence
  GFR-binding peptide
  MOD_RES (1), (32), (34): Xaa is C or S
XVPQDLNAISILYFVGRTPKVLKKYRMVVKSXKXS

SEQ ID NO: 7995 - protein, 35 aa, Artificial Sequence
  GFR-binding peptide
  MOD_RES (1), (33), (35): Xaa is C or S
XVPTELSPISMLYKDEYDKVVLKYHYEMVVEGXGX

SEQ ID NO: 7996 - protein, 35 aa, Artificial Sequence
  GFR-binding peptide
  MOD_RES (1), (34): Xaa is C or S
XVPTKLSAISVLYLDDMGVPTLKNYQEGMSVAEXG

SEQ ID NO: 7997 - protein, 37 aa, Artificial Sequence
  GFR-binding peptide
  MOD_RES (6), (7): Xaa is C or S
KIPKAXXVPTELSATSMLYYDENEKVVLRKHRDMVVE

SEQ ID NO: 7998 - protein, 41 aa, Artificial Sequence
  GFR-binding peptide
  MOD_RES (4), (41): Xaa is C or S
NVQXRPTQVQLSPISVLYKEIVRKKPIFLKYHYTLEDHLAX

SEQ ID NO: 7999 - protein, 41 aa, Artificial Sequence
  GFR-binding peptide
  MOD_RES (5), (6), (38), (40): Xaa is C or S
IPKAXXVPTELNAISMLYFDEYDKVVLKKYREMVVEGXGXR

SEQ ID NO: 8000 - protein, 39 aa, Artificial Sequence
  GFR-binding peptide
  MOD_RES (5), (6): Xaa is C or S
  MOD_RES (20), (21), (22), (23), (24): Xaa is A or G
  MOD_RES (25), (26), (27), (28): Xaa is A or G or is absent
VPKPXXAPTKLSPISVLYKXXXXXXXXXLKYHYNMVVRS

SEQ ID NO: 8001 - protein, 37 aa, Artificial Sequence
  GFR-binding peptide
  MOD_RES (2), (3), (34), (36): Xaa is C or S
PXXVPQDLSATSILYYVGRTPKVLRKHRMVVKSXKXS

SEQ ID NO: 8002 - protein, 44 aa, Artificial Sequence
  GFR-binding peptide
  MOD_RES (4), (41), (43): Xaa is C or S
NVQXRPTQVQLSATSVLYYEIVRKKPIFLRKHRTLEDHLAXKXE

SEQ ID NO: 8003 - protein, 41 aa, Artificial Sequence
  GFR-binding peptide
  MOD_RES (4), (41): Xaa is C or S
  MOD_RES (20), (21), (22), (23), (24): Xaa is A or G
  MOD_RES (25), (26), (27), (28): Xaa is A or G or is absent
NVQXRPTQVQLSPISVLYKXXXXXXXXXLKYHYTLEDHLAX

SEQ ID NO: 8004 - protein, 39 aa, Artificial Sequence
  GFR-binding peptide
  MOD_RES (7), (7): Xaa is C or S
  MOD_RES (21), (22), (23), (24), (25): Xaa is A or G
  MOD_RES (26), (27), (28), (29): Xaa is A or G or is absent
HVTKPTXAPTKLSPISVLYKXXXXXXXXXLKYHYNMVVR

SEQ ID NO: 8005 - protein, 37 aa, Artificial Sequence
  GFR-binding peptide
  MOD_RES (4), (4): Xaa is C or S
  MOD_RES (18), (19), (20), (21), (22): Xaa is A or G
  MOD_RES (23), (24), (25), (26): Xaa is A or G or is absent
KPTXAPTKLSAISVLYLXXXXXXXXXLKNYQNMVVRS

SEQ ID NO: 8006 - protein, 34 aa, Artificial Sequence
  GFR-binding peptide
  MOD_RES (1), (32), (34): Xaa is C or S
XVSQDLSPISILYKIGKTPKILKYHYMIVKSXKX

SEQ ID NO: 8007 - protein, 36 aa, Artificial Sequence
  GFR-binding peptide
  MOD_RES (3), (4), (35): Xaa is C or S
APXXVPQALSAISILYLVGRKPKVLKNYQMIVRSXK

SEQ ID NO: 8008 - protein, 36 aa, Artificial Sequence
  GFR-binding peptide
  MOD_RES (1), (2), (35): Xaa is C or S
XXVPTKLSAISVLYLDDMGVPTLKNYQEGMSVAEXG

SEQ ID NO: 8009 - protein, 38 aa, Artificial Sequence
  GFR-binding peptide
  MOD_RES (4), (4): Xaa is C or S
  MOD_RES (20), (21), (22), (23), (24): Xaa is A or G
  MOD_RES (25), (26), (27), (28): Xaa is A or G or is absent
NVQXRPTQVQLSPISVLYKXXXXXXXXXLKYHYTLEDH

SEQ ID NO: 8010 - protein, 39 aa, Artificial Sequence
  GFR-binding peptide
  MOD_RES (5), (5): Xaa is C or S
  MOD_RES (21), (22), (23), (24), (25): Xaa is A or G
  MOD_RES (26), (27), (28), (29): Xaa is A or G or is absent
RNVQXRPTQVQLSPISVLYKXXXXXXXXXLKYHYTLEDH

SEQ ID NO: 8011 - protein, 35 aa, Artificial Sequence
  GFR-binding peptide
PTQVQLNAISVLYFEIVRKKPIFLKKYRTLEDHLA

SEQ ID NO: 8012 - protein, 42 aa, Artificial Sequence
  GFR-binding peptide
  MOD_RES (5), (42): Xaa is C or S
RNVQXRPTQVQLNAISVLYFEIVRKKPIFLKKYRTLEDHLAX

SEQ ID NO: 8013 - protein, 42 aa, Artificial Sequence
  GFR-binding peptide
  MOD_RES (5), (6), (40), (42): Xaa is C or S
  MOD_RES (20), (21), (22), (23), (24): Xaa is A or G
  MOD_RES (25), (26), (27), (28): Xaa is A or G or is absent
VPKPXXAPTQLSAISVLYLXXXXXXXXXLKNYQNMVVRAXGX

SEQ ID NO: 8014 - protein, 34 aa, Artificial Sequence
  GFR-binding peptide
  MOD_RES (2), (3), (34): Xaa is C or S
PXXVPQDLSAISILYLVGRTPKVLKNYQMVVKSX

SEQ ID NO: 8015 - protein, 40 aa, Artificial Sequence
  GFR-binding peptide
  MOD_RES (5), (5): Xaa is C or S
  MOD_RES (21), (22), (23), (24), (25): Xaa is A or G
  MOD_RES (26), (27), (28), (29): Xaa is A or G or is absent
RNVQXRPTQVQLSATSVLYYXXXXXXXXXLRKHRTLEDHL

SEQ ID NO: 8016 - protein, 42 aa, Artificial Sequence
  GFR-binding peptide
  MOD_RES (5), (6), (39), (41): Xaa is C or S
VGKAXXVPTKLNAISVLYFDDMGVPTLKKYREGMSVAEXGXR

SEQ ID NO: 8017 - protein, 39 aa, Artificial Sequence
  GFR-binding peptide
  MOD_RES (3), (4), (38): Xaa is C or S
  MOD_RES (18), (19), (20), (21), (22): Xaa is A or G
  MOD_RES (23), (24), (25), (26): Xaa is A or G or is absent
KPXXAPTQLSAISVLYLXXXXXXXXXLKNYQNMVVRAXG

SEQ ID NO: 8018 - protein, 36 aa, Artificial Sequence
  GFR-binding peptide
  MOD_RES (2), (36): Xaa is C or S
  MOD_RES (16), (17), (18), (19), (20): Xaa is A or G
  MOD_RES (21), (22), (23), (24): Xaa is A or G or is absent
TXAPTKLSPISVLYKXXXXXXXXXLKYHYNMVVRSX

SEQ ID NO: 8019 - protein, 34 aa, Artificial Sequence
  GFR-binding peptide
  MOD_RES (34), (34): Xaa is C or S
  MOD_RES (14), (15), (16), (17), (18): Xaa is A or G
  MOD_RES (19), (20), (21), (22): Xaa is A or G or is absent
VPTELNAISMLYFXXXXXXXXXLKKYREMVVEGX

SEQ ID NO: 8020 - protein, 39 aa, Artificial Sequence
  GFR-binding peptide
  MOD_RES (7), (39): Xaa is C or S
HVTKPTXAPTKLSAISVLYLDDSSNVILKNYQNMVVRSX

SEQ ID NO: 8021 - protein, 37 aa, Artificial Sequence
  GFR-binding peptide
  MOD_RES (2), (34), (36): Xaa is C or S
TXAPTKLSATSVLYYDDSSNVILRKHRNMVVRSXGXH

SEQ ID NO: 8022 - protein, 40 aa, Artificial Sequence
  GFR-binding peptide
  MOD_RES (7), (7): Xaa is C or S
  MOD_RES (21), (22), (23), (24), (25): Xaa is A or G
  MOD_RES (26), (27), (28), (29): Xaa is A or G or is absent
HVTKPTXAPTKLSAISVLYLXXXXXXXXXLKNYQNMVVRS

SEQ ID NO: 8023 - protein, 33 aa, Artificial Sequence
  GFR-binding peptide
  MOD_RES (3), (3): Xaa is C or S
PTXAPTKLSPISVLYKDDSSNVILKYHYNMVVR

SEQ ID NO: 8024 - protein, 44 aa, Artificial Sequence
  GFR-binding peptide
  MOD_RES (6), (7), (41), (43): Xaa is C or S
  MOD_RES (21), (22), (23), (24), (25): Xaa is A or G
  MOD_RES (26), (27), (28), (29): Xaa is A or G or is absent
YVPKPXXAPTKLSPISVLYKXXXXXXXXXLKYHYNMVVRSXGXH

SEQ ID NO: 8025 - protein, 39 aa, Artificial Sequence
  GFR-binding peptide
  MOD_RES (6), (7), (38): Xaa is C or S
ASAAPXXVPQALSAISILYLVGRKPKVLKNYQMIVRSXK

SEQ ID NO: 8026 - protein, 35 aa, Artificial Sequence
  GFR-binding peptide
  MOD_RES (1), (2), (33), (35): Xaa is C or S
XXVPQALSATSILYYVGRKPKVLRKHRMIVRSXKX

SEQ ID NO: 8027 - protein, 44 aa, Artificial Sequence
  GFR-binding peptide
  MOD_RES (6), (7), (41), (43): Xaa is C or S
  MOD_RES (21), (22), (23), (24), (25): Xaa is A or G
  MOD_RES (26), (27), (28), (29): Xaa is A or G or is absent
YVPKPXXAPTKLSATSVLYYXXXXXXXXXLRKHRNMVVRSXGXH

SEQ ID NO: 8028 - protein, 37 aa, Artificial Sequence
  GFR-binding peptide
  MOD_RES (1), (35), (37): Xaa is C or S
  MOD_RES (15), (16), (17), (18), (19): Xaa is A or G
  MOD_RES (20), (21), (22), (23): Xaa is A or G or is absent
XAPTQLSAISVLYLXXXXXXXXXLKNYQNMVVRAXGX

SEQ ID NO: 8029 - protein, 38 aa, Artificial Sequence
  GFR-binding peptide
  MOD_RES (3), (3): Xaa is C or S
  MOD_RES (19), (20), (21), (22), (23): Xaa is A or G
  MOD_RES (24), (25), (26), (27): Xaa is A or G or is absent
VQXRPTQVQLNAISVLYFXXXXXXXXXLKKYRTLEDHL

SEQ ID NO: 8030 - protein, 43 aa, Artificial Sequence
  GFR-binding peptide
  MOD_RES (6), (7), (41), (43): Xaa is C or S
  MOD_RES (21), (22), (23), (24), (25): Xaa is A or G
  MOD_RES (26), (27), (28), (29): Xaa is A or G or is absent
SIPKAXXVPTELSPISMLYKXXXXXXXXXLKYHYEMVVEGXGX

SEQ ID NO: 8031 - protein, 40 aa, Artificial Sequence
  GFR-binding peptide
  MOD_RES (2), (39): Xaa is C or S
  MOD_RES (18), (19), (20), (21), (22): Xaa is A or G
  MOD_RES (23), (24), (25), (26): Xaa is A or G or is absent
QXRPTQVQLSPISVLYKXXXXXXXXXLKYHYTLEDHLAXK

SEQ ID NO: 8032 - protein, 40 aa, Artificial Sequence
  GFR-binding peptide
  MOD_RES (5), (6), (39): Xaa is C or S
  MOD_RES (20), (21), (22), (23), (24): Xaa is A or G
  MOD_RES (25), (26), (27), (28): Xaa is A or G or is absent
SASPXXVPQDLSPISILYKXXXXXXXXXLKYHYMVVKSXK

SEQ ID NO: 8033 - protein, 40 aa, Artificial Sequence
  GFR-binding peptide
  MOD_RES (4), (5), (37), (39): Xaa is C or S
PKAXXAPTKLSAISVLYLDSSNNVILKNYQNMVVKAXGXH

SEQ ID NO: 8034 - protein, 37 aa, Artificial Sequence
  GFR-binding peptide
  MOD_RES (3), (4): Xaa is C or S
  MOD_RES (18), (19), (20), (21), (22): Xaa is A or G
  MOD_RES (23), (24), (25), (26): Xaa is A or G or is absent
KPXXAPTQLSPISVLYKXXXXXXXXXLKYHYNMVVRA

SEQ ID NO: 8035 - protein, 41 aa, Artificial Sequence
  GFR-binding peptide
  MOD_RES (4), (5), (40): Xaa is C or S
  MOD_RES (19), (20), (21), (22), (23): Xaa is A or G
  MOD_RES (24), (25), (26), (27): Xaa is A or G or is absent
GKAXXVPTKLSPISVLYKXXXXXXXXXLKYHYEGMSVAEXG

SEQ ID NO: 8036 - protein, 38 aa, Artificial Sequence
  GFR-binding peptide
  MOD_RES (5), (6): Xaa is C or S
  MOD_RES (20), (21), (22), (23), (24): Xaa is A or G
  MOD_RES (25), (26), (27), (28): Xaa is A or G or is absent
IPKAXXVPTELNAISMLYFXXXXXXXXXLKKYREMVVE

SEQ ID NO: 8037 - protein, 33 aa, Artificial Sequence
  GFR-binding peptide
  MOD_RES (1), (32): Xaa is C or S
XVPQDLNAISILYFVGRTPKVLKKYRMVVKSXK

SEQ ID NO: 8038 - protein, 39 aa, Artificial Sequence
  GFR-binding peptide
  MOD_RES (1), (2), (36), (38): Xaa is C or S
  MOD_RES (16), (17), (18), (19), (20): Xaa is A or G
  MOD_RES (21), (22), (23), (24): Xaa is A or G or is absent
XXVPTELNAISMLYFXXXXXXXXXLKKYREMVVEGXGXR

SEQ ID NO: 8039 - protein, 33 aa, Artificial Sequence
  GFR-binding peptide
  MOD_RES (1), (32): Xaa is C or S
XVSQDLNAISILYFIGKTPKILKKYRMIVKSXK

SEQ ID NO: 8040 - protein, 37 aa, Artificial Sequence
  GFR-binding peptide
  MOD_RES (1), (2), (36): Xaa is C or S
  MOD_RES (16), (17), (18), (19), (20): Xaa is A or G
  MOD_RES (21), (22), (23), (24): Xaa is A or G or is absent
XXVPTELNAISMLYFXXXXXXXXXLKKYREMVVEGXG

SEQ ID NO: 8041 - protein, 36 aa, Artificial Sequence
  GFR-binding peptide
  MOD_RES (3), (4), (35): Xaa is C or S
SPXXVPQDLSATSILYYVGRTPKVLRKHRMVVKSXK

SEQ ID NO: 8042 - protein, 40 aa, Artificial Sequence
  GFR-binding peptide
  MOD_RES (7), (39): Xaa is C or S
HVTKPTXAPTKLSPISVLYKDDSSNVILKYHYNMVVRSXG

SEQ ID NO: 8043 - protein, 36 aa, Artificial Sequence
  GFR-binding peptide
  MOD_RES (2), (3): Xaa is C or S
  MOD_RES (17), (18), (19), (20), (21): Xaa is A or G
  MOD_RES (22), (23), (24), (25): Xaa is A or G or is absent
AXXVPTELSPISMLYKXXXXXXXXXLKYHYDMVVEG

SEQ ID NO: 8044 - protein, 38 aa, Artificial Sequence
  GFR-binding peptide
  MOD_RES (3), (4), (38): Xaa is C or S
  MOD_RES (18), (19), (20), (21), (22): Xaa is A or G
  MOD_RES (23), (24), (25), (26): Xaa is A or G or is absent
KPXXAPTKLSAISVLYLXXXXXXXXXLKNYQNMVVRSX

SEQ ID NO: 8045 - protein, 40 aa, Artificial Sequence
  GFR-binding peptide
  MOD_RES (4), (5), (37), (39): Xaa is C or S
PKAXXVPTELNAISMLYFDEYDKVVLKKYREMVVEGXGXR

SEQ ID NO: 8046 - protein, 36 aa, Artificial Sequence
  GFR-binding peptide
  MOD_RES (1), (2), (33), (35): Xaa is C or S
XXVPQDLSAISILYLVGRTPKVLKNYQMVVKSXKXS

SEQ ID NO: 8047 - protein, 40 aa, Artificial Sequence
  GFR-binding peptide
  MOD_RES (5), (6), (39): Xaa is C or S
VGKAXXVPTKLSATSVLYYDDMGVPTLRKHREGMSVAEXG

SEQ ID NO: 8048 - protein, 32 aa, Artificial Sequence
  GFR-binding peptide
  MOD_RES (1), (2): Xaa is C or S
XXVPTELNAISMLYFDEYDKVVLKKYREMVVE

SEQ ID NO: 8049 - protein, 36 aa, Artificial Sequence
  GFR-binding peptide
  MOD_RES (2), (2): Xaa is C or S
  MOD_RES (18), (19), (20), (21), (22): Xaa is A or G
  MOD_RES (23), (24), (25), (26): Xaa is A or G or is absent
QXRPTQVQLNAISVLYFXXXXXXXXXLKKYRTLEDH

SEQ ID NO: 8050 - protein, 33 aa, Artificial Sequence
  GFR-binding peptide
  MOD_RES (1), (1): Xaa is C or S
  MOD_RES (15), (16), (17), (18), (19): Xaa is A or G
  MOD_RES (20), (21), (22), (23): Xaa is A or G or is absent
XVSQDLSAISILYLXXXXXXXXXLKNYQMIVKS

SEQ ID NO: 8051 - protein, 41 aa, Artificial Sequence
  GFR-binding peptide
  MOD_RES (6), (7), (41): Xaa is C or S
  MOD_RES (21), (22), (23), (24), (25): Xaa is A or G
  MOD_RES (26), (27), (28), (29): Xaa is A or G or is absent
TVPKPXXAPTQLSPISVLYKXXXXXXXXXLKYHYNMVVRAX

SEQ ID NO: 8052 - protein, 36 aa, Artificial Sequence
  GFR-binding peptide
  MOD_RES (2), (3), (36): Xaa is C or S
AXXVPTKLSATSVLYYDDMGVPTLRKHREGMSVAEX

SEQ ID NO: 8053 - protein, 32 aa, Artificial Sequence
  GFR-binding peptide
  MOD_RES (32), (32): Xaa is C or S
VPTELNAISMLYFDEYDKVVLKKYREMVVEGX

SEQ ID NO: 8054 - protein, 39 aa, Artificial Sequence
  GFR-binding peptide
  MOD_RES (6), (7), (38): Xaa is C or S
ASASPXXVPQDLSATSILYYVGRTPKVLRKHRMVVKSXK

SEQ ID NO: 8055 - protein, 38 aa, Artificial Sequence
  GFR-binding peptide
  MOD_RES (3), (4), (36), (38): Xaa is C or S
KAXXVPTELSPISMLYKDENEKVVLKYHYDMVVEGXGX

SEQ ID NO: 8056 - protein, 39 aa, Artificial Sequence
  GFR-binding peptide
  MOD_RES (4), (5): Xaa is C or S
  MOD_RES (19), (20), (21), (22), (23): Xaa is A or G
  MOD_RES (24), (25), (26), (27): Xaa is A or G or is absent
GKAXXVPTKLSPISVLYKXXXXXXXXXLKYHYEGMSVAE

SEQ ID NO: 8057 - protein, 41 aa, Artificial Sequence
  GFR-binding peptide
  MOD_RES (7), (41): Xaa is C or S
  MOD_RES (21), (22), (23), (24), (25): Xaa is A or G
  MOD_RES (26), (27), (28), (29): Xaa is A or G or is absent
HVTKPTXAPTKLSPISVLYKXXXXXXXXXLKYHYNMVVRSX

SEQ ID NO: 8058 - protein, 36 aa, Artificial Sequence
  GFR-binding peptide
  MOD_RES (1), (2), (34), (36): Xaa is C or S
XXAPTKLSATSVLYYDDSSNVILRKHRNMVVRSXGX

SEQ ID NO: 8059 - protein, 36 aa, Artificial Sequence
  GFR-binding peptide
  MOD_RES (1), (35): Xaa is C or S
  MOD_RES (15), (16), (17), (18), (19): Xaa is A or G
  MOD_RES (20), (21), (22), (23): Xaa is A or G or is absent
XAPTKLNAISVLYFXXXXXXXXXLKKYRNMVVKAXG

SEQ ID NO: 8060 - protein, 38 aa, Artificial Sequence
  GFR-binding peptide
  MOD_RES (4), (38): Xaa is C or S
  MOD_RES (18), (19), (20), (21), (22): Xaa is A or G
  MOD_RES (23), (24), (25), (26): Xaa is A or G or is absent
KPTXAPTKLSPISVLYKXXXXXXXXXLKYHYNMVVRSX

SEQ ID NO: 8061 - protein, 38 aa, Artificial Sequence
  GFR-binding peptide
  MOD_RES (5), (6): Xaa is C or S
  MOD_RES (20), (21), (22), (23), (24): Xaa is A or G
  MOD_RES (25), (26), (27), (28): Xaa is A or G or is absent
VPKPXXAPTKLSAISVLYLXXXXXXXXXLKNYQNMVVR

SEQ ID NO: 8062 - protein, 34 aa, Artificial Sequence
  GFR-binding peptide
  MOD_RES (1), (33): Xaa is C or S
XAPTQLSATSVLYYDDSSNVILRKHRNMVVRAXG

SEQ ID NO: 8063 - protein, 38 aa, Artificial Sequence
  GFR-binding peptide
  MOD_RES (4), (5), (37): Xaa is C or S
PKAXXAPTKLNAISVLYFDSSNNVILKKYRNMVVKAXG

SEQ ID NO: 8064 - protein, 37 aa, Artificial Sequence
  GFR-binding peptide
  MOD_RES (6), (7): Xaa is C or S
AVPKAXXAPTKLSPISVLYKDSSNNVILKYHYNMVVK

SEQ ID NO: 8065 - protein, 33 aa, Artificial Sequence
  GFR-binding peptide
  MOD_RES (2), (3): Xaa is C or S
PXXVPQALSPISILYKVGRKPKVLKYHYMIVRS

SEQ ID NO: 8066 - protein, 35 aa, Artificial Sequence
  GFR-binding peptide
  MOD_RES (4), (5): Xaa is C or S
AAPXXVPQALSATSILYYVGRKPKVLRKHRMIVRS

SEQ ID NO: 8067 - protein, 38 aa, Artificial Sequence
  GFR-binding peptide
  MOD_RES (2), (3), (36), (38): Xaa is C or S
  MOD_RES (17), (18), (19), (20), (21): Xaa is A or G
  MOD_RES (22), (23), (24), (25): Xaa is A or G or is absent
PXXVPQDLSPISILYKXXXXXXXXXLKYHYMVVKSXKX

SEQ ID NO: 8068 - protein, 37 aa, Artificial Sequence
  GFR-binding peptide
  MOD_RES (2), (3), (34), (36): Xaa is C or S
PXXVSQDLSPISILYKIGKTPKILKYHYMIVKSXKXS

SEQ ID NO: 8069 - protein, 35 aa, Artificial Sequence
  GFR-binding peptide
  MOD_RES (1), (2): Xaa is C or S
  MOD_RES (16), (17), (18), (19), (20): Xaa is A or G
  MOD_RES (21), (22), (23), (24): Xaa is A or G or is absent
XXAPTQLNAISVLYFXXXXXXXXXLKKYRNMVVRA

SEQ ID NO: 8070 - protein, 36 aa, Artificial Sequence
  GFR-binding peptide
  MOD_RES (1), (35): Xaa is C or S
  MOD_RES (15), (16), (17), (18), (19): Xaa is A or G
  MOD_RES (20), (21), (22), (23): Xaa is A or G or is absent
XAPTKLSAISVLYLXXXXXXXXXLKNYQNMVVRSXG

SEQ ID NO: 8071 - protein, 35 aa, Artificial Sequence
  GFR-binding peptide
  MOD_RES (16), (17), (18), (19), (20): Xaa is A or G
  MOD_RES (21), (22), (23), (24): Xaa is A or G or is absent
RPTQVQLSPISVLYKXXXXXXXXXLKYHYTLEDHL

SEQ ID NO: 8072 - protein, 39 aa, Artificial Sequence
  GFR-binding peptide
  MOD_RES (2), (39): Xaa is C or S
  MOD_RES (18), (19), (20), (21), (22): Xaa is A or G
  MOD_RES (23), (24), (25), (26): Xaa is A or G or is absent
QXRPTQVQLSPISVLYKXXXXXXXXXLKYHYTLEDHLAX

SEQ ID NO: 8073 - protein, 33 aa, Artificial Sequence
  GFR-binding peptide
  MOD_RES (33), (33): Xaa is C or S
  MOD_RES (14), (15), (16), (17), (18): Xaa is A or G
  MOD_RES (19), (20), (21), (22): Xaa is A or G or is absent
VPQDLNAISILYFXXXXXXXXXLKKYRMVVKSX

SEQ ID NO: 8074 - protein, 39 aa, Artificial Sequence
  GFR-binding peptide
  MOD_RES (1), (38): Xaa is C or S
XRPTQVQLSATSVLYYEIVRKKPIFLRKHRTLEDHLAXK

SEQ ID NO: 8075 - protein, 35 aa, Artificial Sequence
  GFR-binding peptide
  MOD_RES (34), (34): Xaa is C or S
  MOD_RES (14), (15), (16), (17), (18): Xaa is A or G
  MOD_RES (19), (20), (21), (22): Xaa is A or G or is absent
VPTELSAISMLYLXXXXXXXXXLKNYQEMVVEGXG

SEQ ID NO: 8076 - protein, 34 aa, Artificial Sequence
  GFR-binding peptide
  MOD_RES (1), (34): Xaa is C or S
  MOD_RES (15), (16), (17), (18), (19): Xaa is A or G
  MOD_RES (20), (21), (22), (23): Xaa is A or G or is absent
XVSQDLNAISILYFXXXXXXXXXLKKYRMIVKSX

SEQ ID NO: 8077 - protein, 36 aa, Artificial Sequence
  GFR-binding peptide
  MOD_RES (4), (5): Xaa is C or S
PKAXXVPTELSPISMLYKDEYDKVVLKYHYEMVVEG

SEQ ID NO: 8078 - protein, 39 aa, Artificial Sequence
  GFR-binding peptide
  MOD_RES (6), (7), (38): Xaa is C or S
ASASPXXVSQDLSATSILYYIGKTPKILRKHRMIVKSXK

SEQ ID NO: 8079 - protein, 37 aa, Artificial Sequence
  GFR-binding peptide
  MOD_RES (1), (1): Xaa is C or S
XRPTQVQLSATSVLYYEIVRKKPIFLRKHRTLEDHLA

SEQ ID NO: 8080 - protein, 36 aa, Artificial Sequence
  GFR-binding peptide
  MOD_RES (2), (3), (35): Xaa is C or S
AXXVPTELSPISMLYKDEYDKVVLKYHYEMVVEGXG

SEQ ID NO: 8081 - protein, 42 aa, Artificial Sequence
  GFR-binding peptide
  MOD_RES (2), (39), (41): Xaa is C or S
  MOD_RES (18), (19), (20), (21), (22): Xaa is A or G
  MOD_RES (23), (24), (25), (26): Xaa is A or G or is absent
QXRPTQVQLNAISVLYFXXXXXXXXXLKKYRTLEDHLAXKXE

SEQ ID NO: 8082 - protein, 36 aa, Artificial Sequence
  GFR-binding peptide
  MOD_RES (4), (5), (36): Xaa is C or S
ASPXXVSQDLSPISILYKIGKTPKILKYHYMIVKSX

SEQ ID NO: 8083 - protein, 37 aa, Artificial Sequence
  GFR-binding peptide
  MOD_RES (1), (35), (37): Xaa is C or S
  MOD_RES (15), (16), (17), (18), (19): Xaa is A or G
  MOD_RES (20), (21), (22), (23): Xaa is A or G or is absent
XVPTELSATSMLYYXXXXXXXXXLRKHREMVVEGXGX

SEQ ID NO: 8084 - protein, 32 aa, Artificial Sequence
  GFR-binding peptide
  MOD_RES (14), (15), (16), (17), (18): Xaa is A or G
  MOD_RES (19), (20), (21), (22): Xaa is A or G or is absent
VPQDLSAISILYLXXXXXXXXXLKNYQMVVKS

SEQ ID NO: 8085 - protein, 40 aa, Artificial Sequence
  GFR-binding peptide
  MOD_RES (3), (4), (37), (39): Xaa is C or S
  MOD_RES (18), (19), (20), (21), (22): Xaa is A or G
  MOD_RES (23), (24), (25), (26): Xaa is A or G or is absent
SPXXVPQDLSPISILYKXXXXXXXXXLKYHYMVVKSXKXS

SEQ ID NO: 8086 - protein, 35 aa, Artificial Sequence
  GFR-binding peptide
  MOD_RES (1), (1): Xaa is C or S
XRPTQVQLNAISVLYFEIVRKKPIFLKKYRTLEDH

SEQ ID NO: 8087 - protein, 39 aa, Artificial Sequence
  GFR-binding peptide
  MOD_RES (2), (3), (37), (39): Xaa is C or S
  MOD_RES (17), (18), (19), (20), (21): Xaa is A or G
  MOD_RES (22), (23), (24), (25): Xaa is A or G or is absent
PXXAPTQLSAISVLYLXXXXXXXXXLKNYQNMVVRAXGX

SEQ ID NO: 8088 - protein, 33 aa, Artificial Sequence
  GFR-binding peptide
  MOD_RES (1), (1): Xaa is C or S
  MOD_RES (15), (16), (17), (18), (19): Xaa is A or G
  MOD_RES (20), (21), (22), (23): Xaa is A or G or is absent
XAPTQLNAISVLYFXXXXXXXXXLKKYRNMVVR

SEQ ID NO: 8089 - protein, 34 aa, Artificial Sequence
  GFR-binding peptide
  MOD_RES (2), (3), (34): Xaa is C or S
PXXVPQDLNAISILYFVGRTPKVLKKYRMVVKSX

SEQ ID NO: 8090 - protein, 38 aa, Artificial Sequence
  GFR-binding peptide
  MOD_RES (2), (2): Xaa is C or S
QXRPTQVQLSAISVLYLEIVRKKPIFLKNYQTLEDHLA

SEQ ID NO: 8091 - protein, 37 aa, Artificial Sequence
  GFR-binding peptide
  MOD_RES (1), (2), (34), (36): Xaa is C or S
XXAPTKLSPISVLYKDSSNNVILKYHYNMVVKAXGXH

SEQ ID NO: 8092 - protein, 33 aa, Artificial Sequence
  GFR-binding peptide
  MOD_RES (33), (33): Xaa is C or S
VPTKLSAISVLYLDDMGVPTLKNYQEGMSVAEX

SEQ ID NO: 8093 - protein, 37 aa, Artificial Sequence
  GFR-binding peptide
  MOD_RES (1), (2), (34), (36): Xaa is C or S
XXVPTELSATSMLYYDENEKVVLRKHRDMVVEGXGXR

SEQ ID NO: 8094 - protein, 37 aa, Artificial Sequence
  GFR-binding peptide
  MOD_RES (34), (36): Xaa is C or S
  MOD_RES (14), (15), (16), (17), (18): Xaa is A or G
  MOD_RES (19), (20), (21), (22): Xaa is A or G or is absent
VPTELNAISMLYFXXXXXXXXXLKKYRDMVVEGXGXR

SEQ ID NO: 8095 - protein, 36 aa, Artificial Sequence
  GFR-binding peptide
  MOD_RES (1), (35): Xaa is C or S
  MOD_RES (15), (16), (17), (18), (19): Xaa is A or G
  MOD_RES (20), (21), (22), (23): Xaa is A or G or is absent
XVPTELSAISMLYLXXXXXXXXXLKNYQDMVVEGXG

SEQ ID NO: 8096 - protein, 42 aa, Artificial Sequence
  GFR-binding peptide
  MOD_RES (4), (5), (39), (41): Xaa is C or S
  MOD_RES (19), (20), (21), (22), (23): Xaa is A or G
  MOD_RES (24), (25), (26), (27): Xaa is A or G or is absent
PKAXXVPTELNAISMLYFXXXXXXXXXLKKYRDMVVEGXGXR

SEQ ID NO: 8097 - protein, 42 aa, Artificial Sequence
  GFR-binding peptide
  MOD_RES (6), (7), (41): Xaa is C or S
  MOD_RES (21), (22), (23), (24), (25): Xaa is A or G
  MOD_RES (26), (27), (28), (29): Xaa is A or G or is absent
KIPKAXXVPTELNAISMLYFXXXXXXXXXLKKYRDMVVEGXG

SEQ ID NO: 8098 - protein, 35 aa, Artificial Sequence
  GFR-binding peptide
  MOD_RES (4), (5): Xaa is C or S
ASPXXVPQDLSPISILYKVGRTPKVLKYHYMVVKS

SEQ ID NO: 8099 - protein, 32 aa, Artificial Sequence
  GFR-binding peptide
  MOD_RES (1), (1): Xaa is C or S
XAPTQLSPISVLYKDDSSNVILKYHYNMVVRA

SEQ ID NO: 8100 - protein, 40 aa, Artificial Sequence
  GFR-binding peptide
  MOD_RES (5), (6), (38), (40): Xaa is C or S
VPKPXXAPTKLSPISVLYKDDSSNVILKYHYNMVVRSXGX

SEQ ID NO: 8101 - protein, 34 aa, Artificial Sequence
  GFR-binding peptide
  MOD_RES (34), (34): Xaa is C or S
  MOD_RES (14), (15), (16), (17), (18): Xaa is A or G
  MOD_RES (19), (20), (21), (22): Xaa is A or G or is absent
APTKLNAISVLYFXXXXXXXXXLKKYRNMVVRSX

SEQ ID NO: 8102 - protein, 39 aa, Artificial Sequence
  GFR-binding peptide
  MOD_RES (4), (5), (39): Xaa is C or S
  MOD_RES (19), (20), (21), (22), (23): Xaa is A or G
  MOD_RES (24), (25), (26), (27): Xaa is A or G or is absent
PKAXXVPTELSAISMLYLXXXXXXXXXLKNYQDMVVEGX

SEQ ID NO: 8103 - protein, 38 aa, Artificial Sequence
  GFR-binding peptide
  MOD_RES (2), (2): Xaa is C or S
QXRPTQVQLSATSVLYYEIVRKKPIFLRKHRTLEDHLA

SEQ ID NO: 8104 - protein, 36 aa, Artificial Sequence
  GFR-binding peptide
  MOD_RES (16), (17), (18), (19), (20): Xaa is A or G
  MOD_RES (21), (22), (23), (24): Xaa is A or G or is absent
RPTQVQLSPISVLYKXXXXXXXXXLKYHYTLEDHLA

SEQ ID NO: 8105 - protein, 39 aa, Artificial Sequence
  GFR-binding peptide
  MOD_RES (4), (5), (38): Xaa is C or S
GKAXXVPTKLSAISVLYLDDMGVPTLKNYQEGMSVAEXG

SEQ ID NO: 8106 - protein, 35 aa, Artificial Sequence
  GFR-binding peptide
  MOD_RES (2), (3): Xaa is C or S
  MOD_RES (17), (18), (19), (20), (21): Xaa is A or G
  MOD_RES (22), (23), (24), (25): Xaa is A or G or is absent
PXXAPTKLNAISVLYFXXXXXXXXXLKKYRNMVVR

SEQ ID NO: 8107 - protein, 39 aa, Artificial Sequence
  GFR-binding peptide
  MOD_RES (4), (38): Xaa is C or S
  MOD_RES (18), (19), (20), (21), (22): Xaa is A or G
  MOD_RES (23), (24), (25), (26): Xaa is A or G or is absent
KPTXAPTKLSAISVLYLXXXXXXXXXLKNYQNMVVRSXG

SEQ ID NO: 8108 - protein, 39 aa, Artificial Sequence
  GFR-binding peptide
  MOD_RES (5), (6): Xaa is C or S
  MOD_RES (20), (21), (22), (23), (24): Xaa is A or G
  MOD_RES (25), (26), (27), (28): Xaa is A or G or is absent
IPKAXXVPTELSAISMLYLXXXXXXXXXLKNYQEMVVEG

SEQ ID NO: 8109 - protein, 35 aa, Artificial Sequence
  GFR-binding peptide
  MOD_RES (1), (1): Xaa is C or S
  MOD_RES (15), (16), (17), (18), (19): Xaa is A or G
  MOD_RES (20), (21), (22), (23): Xaa is A or G or is absent
XVPTKLNAISVLYFXXXXXXXXXLKKYREGMSVAE

SEQ ID NO: 8110 - protein, 36 aa, Artificial Sequence
  GFR-binding peptide
  MOD_RES (3), (35): Xaa is C or S
PTXAPTKLSAISVLYLDDSSNVILKNYQNMVVRSXG

SEQ ID NO: 8111 - protein, 37 aa, Artificial Sequence
  GFR-binding peptide
  MOD_RES (1), (1): Xaa is C or S
XRPTQVQLSAISVLYLEIVRKKPIFLKNYQTLEDHLA

SEQ ID NO: 8112 - protein, 39 aa, Artificial Sequence
  GFR-binding peptide
  MOD_RES (6), (7), (39): Xaa is C or S
AVPKAXXAPTKLSAISVLYLDSSNNVILKNYQNMVVKAX

SEQ ID NO: 8113 - protein, 39 aa, Artificial Sequence
  GFR-binding peptide
  MOD_RES (3), (4), (37), (39): Xaa is C or S
KAXXVPTKLSATSVLYYDDMGVPTLRKHREGMSVAEXGX

SEQ ID NO: 8114 - protein, 41 aa, Artificial Sequence
  GFR-binding peptide
  MOD_RES (4), (38), (40): Xaa is C or S
  MOD_RES (18), (19), (20), (21), (22): Xaa is A or G
  MOD_RES (23), (24), (25), (26): Xaa is A or G or is absent
KPTXAPTKLNAISVLYFXXXXXXXXXLKKYRNMVVRSXGXH

SEQ ID NO: 8115 - protein, 39 aa, Artificial Sequence
  GFR-binding peptide
  MOD_RES (4), (5), (36), (38): Xaa is C or S
ASPXXVSQDLSATSILYYIGKTPKILRKHRMIVKSXKXS

SEQ ID NO: 8116 - protein, 35 aa, Artificial Sequence
  GFR-binding peptide
  MOD_RES (33), (35): Xaa is C or S
  MOD_RES (14), (15), (16), (17), (18): Xaa is A or G
  MOD_RES (19), (20), (21), (22): Xaa is A or G or is absent
VPQDLSAISILYLXXXXXXXXXLKNYQMVVKSXKX

SEQ ID NO: 8117 - protein, 37 aa, Artificial Sequence
  GFR-binding peptide
  MOD_RES (1), (35), (37): Xaa is C or S
  MOD_RES (15), (16), (17), (18), (19): Xaa is A or G
  MOD_RES (20), (21), (22), (23): Xaa is A or G or is absent
XVPTELSATSMLYYXXXXXXXXXLRKHRDMVVEGXGX

SEQ ID NO: 8118 - protein, 40 aa, Artificial Sequence
  GFR-binding peptide
  MOD_RES (3), (4), (37), (39): Xaa is C or S
  MOD_RES (18), (19), (20), (21), (22): Xaa is A or G
  MOD_RES (23), (24), (25), (26): Xaa is A or G or is absent
SPXXVSQDLSATSILYYXXXXXXXXXLRKHRMIVKSXKXS

SEQ ID NO: 8119 - protein, 40 aa, Artificial Sequence
  GFR-binding peptide
  MOD_RES (2), (3), (37), (39): Xaa is C or S
  MOD_RES (17), (18), (19), (20), (21): Xaa is A or G
  MOD_RES (22), (23), (24), (25): Xaa is A or G or is absent
AXXAPTKLSAISVLYLXXXXXXXXXLKNYQNMVVKAXGXH

SEQ ID NO: 8120 - protein, 36 aa, Artificial Sequence
  GFR-binding peptide
  MOD_RES (1), (35): Xaa is C or S
  MOD_RES (15), (16), (17), (18), (19): Xaa is A or G
  MOD_RES (20), (21), (22), (23): Xaa is A or G or is absent
XAPTKLSATSVLYYXXXXXXXXXLRKHRNMVVKAXG

SEQ ID NO: 8121 - protein, 36 aa, Artificial Sequence
  GFR-binding peptide
  MOD_RES (33), (35): Xaa is C or S
  MOD_RES (14), (15), (16), (17), (18): Xaa is A or G
  MOD_RES (19), (20), (21), (22): Xaa is A or G or is absent
VPQALNAISILYFXXXXXXXXXLKKYRMIVRSXKXS

SEQ ID NO: 8122 - protein, 42 aa, Artificial Sequence
  GFR-binding peptide
  MOD_RES (5), (39), (41): Xaa is C or S
  MOD_RES (19), (20), (21), (22), (23): Xaa is A or G
  MOD_RES (24), (25), (26), (27): Xaa is A or G or is absent
TKPTXAPTKLSAISVLYLXXXXXXXXXLKNYQNMVVRSXGXH

SEQ ID NO: 8123 - protein, 42 aa, Artificial Sequence
  GFR-binding peptide
  MOD_RES (4), (5), (39), (41): Xaa is C or S
  MOD_RES (19), (20), (21), (22), (23): Xaa is A or G
  MOD_RES (24), (25), (26), (27): Xaa is A or G or is absent
PKAXXVPTELNAISMLYFXXXXXXXXXLKKYREMVVEGXGXR

SEQ ID NO: 8124 - protein, 33 aa, Artificial Sequence
  GFR-binding peptide
  MOD_RES (1), (2): Xaa is C or S
XXAPTKLSAISVLYLDSSNNVILKNYQNMVVKA

SEQ ID NO: 8125 - protein, 33 aa, Artificial Sequence
  GFR-binding peptide
  MOD_RES (31), (33): Xaa is C or S
VPQDLSAISILYLVGRTPKVLKNYQMVVKSXKX

SEQ ID NO: 8126 - protein, 34 aa, Artificial Sequence
  GFR-binding peptide
PTQVQLSAISVLYLEIVRKKPIFLKNYQTLEDHL

SEQ ID NO: 8127 - protein, 37 aa, Artificial Sequence
  GFR-binding peptide
  MOD_RES (3), (3): Xaa is C or S
VQXRPTQVQLNAISVLYFEIVRKKPIFLKKYRTLEDH

SEQ ID NO: 8128 - protein, 33 aa, Artificial Sequence
  GFR-binding peptide
  MOD_RES (1), (2): Xaa is C or S
XXAPTKLSPISVLYKDDSSNVILKYHYNMVVRS

SEQ ID NO: 8129 - protein, 38 aa, Artificial Sequence
  GFR-binding peptide
  MOD_RES (5), (6): Xaa is C or S
  MOD_RES (20), (21), (22), (23), (24): Xaa is A or G
  MOD_RES (25), (26), (27), (28): Xaa is A or G or is absent
SAAPXXVPQALSAISILYLXXXXXXXXXLKNYQMIVRS

SEQ ID NO: 8130 - protein, 35 aa, Artificial Sequence
  GFR-binding peptide
  MOD_RES (2), (3), (34): Xaa is C or S
PXXVPQDLSATSILYYVGRTPKVLRKHRMVVKSXK

SEQ ID NO: 8131 - protein, 40 aa, Artificial Sequence
  GFR-binding peptide
  MOD_RES (6), (7): Xaa is C or S
  MOD_RES (21), (22), (23), (24), (25): Xaa is A or G
  MOD_RES (26), (27), (28), (29): Xaa is A or G or is absent
AVPKAXXAPTKLSPISVLYKXXXXXXXXXLKYHYNMVVKA

SEQ ID NO: 8132 - protein, 39 aa, Artificial Sequence
  GFR-binding peptide
  MOD_RES (6), (7): Xaa is C or S
  MOD_RES (21), (22), (23), (24), (25): Xaa is A or G
  MOD_RES (26), (27), (28), (29): Xaa is A or G or is absent
SIPKAXXVPTELSAISMLYLXXXXXXXXXLKNYQEMVVE

SEQ ID NO: 8133 - protein, 41 aa, Artificial Sequence
  GFR-binding peptide
  MOD_RES (5), (6), (38), (40): Xaa is C or S
VPKPXXAPTQLSATSVLYYDDSSNVILRKHRNMVVRAXGXH

SEQ ID NO: 8134 - protein, 33 aa, Artificial Sequence
  GFR-binding peptide
  MOD_RES (1), (33): Xaa is C or S
XAPTKLSPISVLYKDDSSNVILKYHYNMVVRSX

SEQ ID NO: 8135 - protein, 38 aa, Artificial Sequence
  GFR-binding peptide
  MOD_RES (1), (38): Xaa is C or S
  MOD_RES (17), (18), (19), (20), (21): Xaa is A or G
  MOD_RES (22), (23), (24), (25): Xaa is A or G or is absent
XRPTQVQLSAISVLYLXXXXXXXXXLKNYQTLEDHLAX

SEQ ID NO: 8136 - protein, 38 aa, Artificial Sequence
  GFR-binding peptide
  MOD_RES (4), (5), (36), (38): Xaa is C or S
AAPXXVPQALSATSILYYVGRKPKVLRKHRMIVRSXKX

SEQ ID NO: 8137 - protein, 34 aa, Artificial Sequence
  GFR-binding peptide
  MOD_RES (32), (34): Xaa is C or S
APTKLNAISVLYFDSSNNVILKKYRNMVVKAXGX

SEQ ID NO: 8138 - protein, 35 aa, Artificial Sequence
  GFR-binding peptide
  MOD_RES (35), (35): Xaa is C or S
  MOD_RES (14), (15), (16), (17), (18): Xaa is A or G
  MOD_RES (19), (20), (21), (22): Xaa is A or G or is absent
VPTKLSPISVLYKXXXXXXXXXLKYHYEGMSVAEX

SEQ ID NO: 8139 - protein, 34 aa, Artificial Sequence
  GFR-binding peptide
  MOD_RES (3), (4): Xaa is C or S
KPXXAPTQLSATSVLYYDDSSNVILRKHRNMVVR

SEQ ID NO: 8140 - protein, 43 aa, Artificial Sequence
  GFR-binding peptide
  MOD_RES (6), (7), (42): Xaa is C or S
  MOD_RES (21), (22), (23), (24), (25): Xaa is A or G
  MOD_RES (26), (27), (28), (29): Xaa is A or G or is absent
KVGKAXXVPTKLNAISVLYFXXXXXXXXXLKKYREGMSVAEXG

SEQ ID NO: 8141 - protein, 43 aa, Artificial Sequence
  GFR-binding peptide
  MOD_RES (5), (42): Xaa is C or S
RNVQXRPTQVQLSPISVLYKEIVRKKPIFLKYHYTLEDHLAXK

SEQ ID NO: 8142 - protein, 34 aa, Artificial Sequence
  GFR-binding peptide
  MOD_RES (1), (33): Xaa is C or S
XVPTELNAISMLYFDENEKVVLKKYRDMVVEGXG

SEQ ID NO: 8143 - protein, 38 aa, Artificial Sequence
  GFR-binding peptide
  MOD_RES (5), (6): Xaa is C or S
  MOD_RES (20), (21), (22), (23), (24): Xaa is A or G
  MOD_RES (25), (26), (27), (28): Xaa is A or G or is absent
VPKAXXAPTKLSAISVLYLXXXXXXXXXLKNYQNMVVK

SEQ ID NO: 8144 - protein, 42 aa, Artificial Sequence
  GFR-binding peptide
  MOD_RES (5), (42): Xaa is C or S
  MOD_RES (21), (22), (23), (24), (25): Xaa is A or G
  MOD_RES (26), (27), (28), (29): Xaa is A or G or is absent
RNVQXRPTQVQLSATSVLYYXXXXXXXXXLRKHRTLEDHLAX

SEQ ID NO: 8145 - protein, 35 aa, Artificial Sequence
  GFR-binding peptide
  MOD_RES (2), (3), (34): Xaa is C or S
PXXVPQALSAISILYLVGRKPKVLKNYQMIVRSXK

SEQ ID NO: 8146 - protein, 33 aa, Artificial Sequence
  GFR-binding peptide
  MOD_RES (1), (2), (33): Xaa is C or S
XXVPQDLSPISILYKVGRTPKVLKYHYMVVKSX

SEQ ID NO: 8147 - protein, 35 aa, Artificial Sequence
  GFR-binding peptide
  MOD_RES (1), (2), (33), (35): Xaa is C or S
XXVPQDLNAISILYFVGRTPKVLKKYRMVVKSXKX

SEQ ID NO: 8148 - protein, 35 aa, Artificial Sequence
  GFR-binding peptide
  MOD_RES (4), (5): Xaa is C or S
PKAXXAPTKLNAISVLYFDSSNNVILKKYRNMVVK

SEQ ID NO: 8149 - protein, 40 aa, Artificial Sequence
  GFR-binding peptide
  MOD_RES (5), (6): Xaa is C or S
  MOD_RES (20), (21), (22), (23), (24): Xaa is A or G
  MOD_RES (25), (26), (27), (28): Xaa is A or G or is absent
VGKAXXVPTKLSATSVLYYXXXXXXXXXLRKHREGMSVAE

SEQ ID NO: 8150 - protein, 33 aa, Artificial Sequence
  GFR-binding peptide
  MOD_RES (2), (3): Xaa is C or S
PXXVPQDLNAISILYFVGRTPKVLKKYRMVVKS

SEQ ID NO: 8151 - protein, 36 aa, Artificial Sequence
  GFR-binding peptide
  MOD_RES (1), (2), (35): Xaa is C or S
  MOD_RES (16), (17), (18), (19), (20): Xaa is A or G
  MOD_RES (21), (22), (23), (24): Xaa is A or G or is absent
XXVSQDLNAISILYFXXXXXXXXXLKKYRMIVKSXK

SEQ ID NO: 8152 - protein, 33 aa, Artificial Sequence
  GFR-binding peptide
  MOD_RES (2), (3): Xaa is C or S
PXXVPQALSAISILYLVGRKPKVLKNYQMIVRS

SEQ ID NO: 8153 - protein, 40 aa, Artificial Sequence
  GFR-binding peptide
  MOD_RES (5), (6): Xaa is C or S
  MOD_RES (20), (21), (22), (23), (24): Xaa is A or G
  MOD_RES (25), (26), (27), (28): Xaa is A or G or is absent
VGKAXXVPTKLSAISVLYLXXXXXXXXXLKNYQEGMSVAE

SEQ ID NO: 8154 - protein, 34 aa, Artificial Sequence
  GFR-binding peptide
  MOD_RES (31), (33): Xaa is C or S
VPQALSATSILYYVGRKPKVLRKHRMIVRSXKXS

SEQ ID NO: 8155 - protein, 40 aa, Artificial Sequence
  GFR-binding peptide
  MOD_RES (5), (39): Xaa is C or S
  MOD_RES (19), (20), (21), (22), (23): Xaa is A or G
  MOD_RES (24), (25), (26), (27): Xaa is A or G or is absent
TKPTXAPTKLSAISVLYLXXXXXXXXXLKNYQNMVVRSXG

SEQ ID NO: 8156 - protein, 34 aa, Artificial Sequence
  GFR-binding peptide
  MOD_RES (1), (34): Xaa is C or S
  MOD_RES (15), (16), (17), (18), (19): Xaa is A or G
  MOD_RES (20), (21), (22), (23): Xaa is A or G or is absent
XVPQDLSPISILYKXXXXXXXXXLKYHYMVVKSX

SEQ ID NO: 8157 - protein, 41 aa, Artificial Sequence
  GFR-binding peptide
  MOD_RES (4), (5), (39), (41): Xaa is C or S
  MOD_RES (19), (20), (21), (22), (23): Xaa is A or G
  MOD_RES (24), (25), (26), (27): Xaa is A or G or is absent
PKPXXAPTKLSPISVLYKXXXXXXXXXLKYHYNMVVRSXGX

SEQ ID NO: 8158 - protein, 36 aa, Artificial Sequence
  GFR-binding peptide
  MOD_RES (33), (35): Xaa is C or S
VPTKLNAISVLYFDDMGVPTLKKYREGMSVAEXGXR

SEQ ID NO: 8159 - protein, 33 aa, Artificial Sequence
  GFR-binding peptide
  MOD_RES (2), (3): Xaa is C or S
PXXAPTKLSAISVLYLDDSSNVILKNYQNMVVR

SEQ ID NO: 8160 - protein, 41 aa, Artificial Sequence
  GFR-binding peptide
  MOD_RES (5), (6), (40): Xaa is C or S
  MOD_RES (20), (21), (22), (23), (24): Xaa is A or G
  MOD_RES (25), (26), (27), (28): Xaa is A or G or is absent
IPKAXXVPTELSAISMLYLXXXXXXXXXLKNYQDMVVEGXG

SEQ ID NO: 8161 - protein, 38 aa, Artificial Sequence
  GFR-binding peptide
  MOD_RES (5), (6), (37): Xaa is C or S
SAAPXXVPQALNAISILYFVGRKPKVLKKYRMIVRSXK

SEQ ID NO: 8162 - protein, 36 aa, Artificial Sequence
  GFR-binding peptide
  MOD_RES (2), (3), (36): Xaa is C or S
  MOD_RES (17), (18), (19), (20), (21): Xaa is A or G
  MOD_RES (22), (23), (24), (25): Xaa is A or G or is absent
PXXVPQDLNAISILYFXXXXXXXXXLKKYRMVVKSX

SEQ ID NO: 8163 - protein, 36 aa, Artificial Sequence
  GFR-binding peptide
  MOD_RES (3), (4): Xaa is C or S
  MOD_RES (18), (19), (20), (21), (22): Xaa is A or G
  MOD_RES (23), (24), (25), (26): Xaa is A or G or is absent
KPXXAPTQLNAISVLYFXXXXXXXXXLKKYRNMVVR

SEQ ID NO: 8164 - protein, 35 aa, Artificial Sequence
  GFR-binding peptide
  MOD_RES (32), (34): Xaa is C or S
VPTELSATSMLYYDENEKVVLRKHRDMVVEGXGXR

SEQ ID NO: 8165 - protein, 34 aa, Artificial Sequence
  GFR-binding peptide
  MOD_RES (33), (33): Xaa is C or S
  MOD_RES (14), (15), (16), (17), (18): Xaa is A or G
  MOD_RES (19), (20), (21), (22): Xaa is A or G or is absent
VPQDLNAISILYFXXXXXXXXXLKKYRMVVKSXK

SEQ ID NO: 8166 - protein, 34 aa, Artificial Sequence
  GFR-binding peptide
  MOD_RES (1), (2), (34): Xaa is C or S
XXVPTELSATSMLYYDEYDKVVLRKHREMVVEGX

SEQ ID NO: 8167 - protein, 35 aa, Artificial Sequence
  GFR-binding peptide
  MOD_RES (1), (2), (34): Xaa is C or S
XXVPTELSPISMLYKDEYDKVVLKYHYEMVVEGXG

SEQ ID NO: 8168 - protein, 33 aa, Artificial Sequence
  GFR-binding peptide
  MOD_RES (1), (2), (33): Xaa is C or S
XXVPQALNAISILYFVGRKPKVLKKYRMIVRSX

SEQ ID NO: 8169 - protein, 36 aa, Artificial Sequence
  GFR-binding peptide
  MOD_RES (36), (36): Xaa is C or S
  MOD_RES (15), (16), (17), (18), (19): Xaa is A or G
  MOD_RES (20), (21), (22), (23): Xaa is A or G or is absent
PTQVQLNAISVLYFXXXXXXXXXLKKYRTLEDHLAX

SEQ ID NO: 8170 - protein, 38 aa, Artificial Sequence
  GFR-binding peptide
  MOD_RES (2), (3), (36), (38): Xaa is C or S
AXXVPTKLNAISVLYFDDMGVPTLKKYREGMSVAEXGX

SEQ ID NO: 8171 - protein, 41 aa, Artificial Sequence
  GFR-binding peptide
  MOD_RES (5), (6), (40): Xaa is C or S
  MOD_RES (20), (21), (22), (23), (24): Xaa is A or G
  MOD_RES (25), (26), (27), (28): Xaa is A or G or is absent
VPKAXXAPTKLSAISVLYLXXXXXXXXXLKNYQNMVVKAXG

SEQ ID NO: 8172 - protein, 36 aa, Artificial Sequence
  GFR-binding peptide
  MOD_RES (4), (5): Xaa is C or S
PKAXXVPTELSPISMLYKDENEKVVLKYHYDMVVEG

SEQ ID NO: 8173 - protein, 39 aa, Artificial Sequence
  GFR-binding peptide
  MOD_RES (5), (6), (38): Xaa is C or S
IPKAXXVPTELSATSMLYYDENEKVVLRKHRDMVVEGXG

SEQ ID NO: 8174 - protein, 35 aa, Artificial Sequence
  GFR-binding peptide
  MOD_RES (2), (3): Xaa is C or S
  MOD_RES (17), (18), (19), (20), (21): Xaa is A or G
  MOD_RES (22), (23), (24), (25): Xaa is A or G or is absent
PXXAPTQLSATSVLYYXXXXXXXXXLRKHRNMVVR

SEQ ID NO: 8175 - protein, 32 aa, Artificial Sequence
  GFR-binding peptide
  MOD_RES (31), (31): Xaa is C or S
VSQDLSAISILYLIGKTPKILKNYQMIVKSXK

SEQ ID NO: 8176 - protein, 34 aa, Artificial Sequence
  GFR-binding peptide
  MOD_RES (1), (2): Xaa is C or S
XXVPTKLSAISVLYLDDMGVPTLKNYQEGMSVAE

SEQ ID NO: 8177 - protein, 39 aa, Artificial Sequence
  GFR-binding peptide
  MOD_RES (7), (7): Xaa is C or S
  MOD_RES (21), (22), (23), (24), (25): Xaa is A or G
  MOD_RES (26), (27), (28), (29): Xaa is A or G or is absent
HVTKPTXAPTKLSATSVLYYXXXXXXXXXLRKHRNMVVR

SEQ ID NO: 8178 - protein, 38 aa, Artificial Sequence
  GFR-binding peptide
  MOD_RES (4), (5): Xaa is C or S
  MOD_RES (19), (20), (21), (22), (23): Xaa is A or G
  MOD_RES (24), (25), (26), (27): Xaa is A or G or is absent
PKPXXAPTKLNAISVLYFXXXXXXXXXLKKYRNMVVRS

SEQ ID NO: 8179 - protein, 36 aa, Artificial Sequence
  GFR-binding peptide
  MOD_RES (5), (6): Xaa is C or S
VPKPXXAPTQLSATSVLYYDDSSNVILRKHRNMVVR

SEQ ID NO: 8180 - protein, 38 aa, Artificial Sequence
  GFR-binding peptide
  MOD_RES (4), (5), (37): Xaa is C or S
PKPXXAPTQLSAISVLYLDDSSNVILKNYQNMVVRAXG

SEQ ID NO: 8181 - protein, 41 aa, Artificial Sequence
  GFR-binding peptide
  MOD_RES (3), (4), (39), (41): Xaa is C or S
  MOD_RES (18), (19), (20), (21), (22): Xaa is A or G
  MOD_RES (23), (24), (25), (26): Xaa is A or G or is absent
KAXXVPTKLSPISVLYKXXXXXXXXXLKYHYEGMSVAEXGX

SEQ ID NO: 8182 - protein, 39 aa, Artificial Sequence
  GFR-binding peptide
  MOD_RES (4), (5), (36), (38): Xaa is C or S
ASPXXVSQDLSAISILYLIGKTPKILKNYQMIVKSXKXS

SEQ ID NO: 8183 - protein, 35 aa, Artificial Sequence
  GFR-binding peptide
  MOD_RES (2), (3): Xaa is C or S
  MOD_RES (17), (18), (19), (20), (21): Xaa is A or G
  MOD_RES (22), (23), (24), (25): Xaa is A or G or is absent
AXXAPTKLNAISVLYFXXXXXXXXXLKKYRNMVVK

SEQ ID NO: 8184 - protein, 33 aa, Artificial Sequence
  GFR-binding peptide
  MOD_RES (2), (3): Xaa is C or S
AXXVPTELSATSMLYYDENEKVVLRKHRDMVVE

SEQ ID NO: 8185 - protein, 32 aa, Artificial Sequence
  GFR-binding peptide
  MOD_RES (14), (15), (16), (17), (18): Xaa is A or G
  MOD_RES (19), (20), (21), (22): Xaa is A or G or is absent
VPTELNAISMLYFXXXXXXXXXLKKYREMVVE

SEQ ID NO: 8186 - protein, 43 aa, Artificial Sequence
  GFR-binding peptide
  MOD_RES (6), (7), (40), (42): Xaa is C or S
  MOD_RES (21), (22), (23), (24), (25): Xaa is A or G
  MOD_RES (26), (27), (28), (29): Xaa is A or G or is absent
ASASPXXVSQDLNAISILYFXXXXXXXXXLKKYRMIVKSXKXS

SEQ ID NO: 8187 - protein, 39 aa, Artificial Sequence
  GFR-binding peptide
  MOD_RES (37), (39): Xaa is C or S
RPTQVQLSPISVLYKEIVRKKPIFLKYHYTLEDHLAXKX

SEQ ID NO: 8188 - protein, 38 aa, Artificial Sequence
  GFR-binding peptide
  MOD_RES (4), (5), (38): Xaa is C or S
GKAXXVPTKLSAISVLYLDDMGVPTLKNYQEGMSVAEX

SEQ ID NO: 8189 - protein, 39 aa, Artificial Sequence
  GFR-binding peptide
  MOD_RES (5), (6), (38): Xaa is C or S
VPKPXXAPTQLSAISVLYLDDSSNVILKNYQNMVVRAXG

SEQ ID NO: 8190 - protein, 41 aa, Artificial Sequence
  GFR-binding peptide
  MOD_RES (5), (6), (40): Xaa is C or S
  MOD_RES (20), (21), (22), (23), (24): Xaa is A or G
  MOD_RES (25), (26), (27), (28): Xaa is A or G or is absent
VPKPXXAPTQLSAISVLYLXXXXXXXXXLKNYQNMVVRAXG

SEQ ID NO: 8191 - protein, 36 aa, Artificial Sequence
  GFR-binding peptide
  MOD_RES (33), (35): Xaa is C or S
  MOD_RES (14), (15), (16), (17), (18): Xaa is A or G
  MOD_RES (19), (20), (21), (22): Xaa is A or G or is absent
VPQDLNAISILYFXXXXXXXXXLKKYRMVVKSXKXS

SEQ ID NO: 8192 - protein, 36 aa, Artificial Sequence
  GFR-binding peptide
  MOD_RES (2), (3), (36): Xaa is C or S
  MOD_RES (17), (18), (19), (20), (21): Xaa is A or G
  MOD_RES (22), (23), (24), (25): Xaa is A or G or is absent
PXXVSQDLSATSILYYXXXXXXXXXLRKHRMIVKSX

SEQ ID NO: 8193 - protein, 34 aa, Artificial Sequence
  GFR-binding peptide
  MOD_RES (1), (32), (34): Xaa is C or S
XVSQDLNAISILYFIGKTPKILKKYRMIVKSXKX

SEQ ID NO: 8194 - protein, 34 aa, Artificial Sequence
  GFR-binding peptide
  MOD_RES (14), (15), (16), (17), (18): Xaa is A or G
  MOD_RES (19), (20), (21), (22): Xaa is A or G or is absent
VPTKLSAISVLYLXXXXXXXXXLKNYQEGMSVAE

SEQ ID NO: 8195 - protein, 40 aa, Artificial Sequence
  GFR-binding peptide
  MOD_RES (3), (4), (37), (39): Xaa is C or S
  MOD_RES (18), (19), (20), (21), (22): Xaa is A or G
  MOD_RES (23), (24), (25), (26): Xaa is A or G or is absent
SPXXVPQDLSAISILYLXXXXXXXXXLKNYQMVVKSXKXS

SEQ ID NO: 8196 - protein, 35 aa, Artificial Sequence
  GFR-binding peptide
  MOD_RES (2), (3), (35): Xaa is C or S
AXXVPTELSPISMLYKDEYDKVVLKYHYEMVVEGX

SEQ ID NO: 8197 - protein, 44 aa, Artificial Sequence
  GFR-binding peptide
  MOD_RES (6), (7), (41), (43): Xaa is C or S
  MOD_RES (21), (22), (23), (24), (25): Xaa is A or G
  MOD_RES (26), (27), (28), (29): Xaa is A or G or is absent
YVPKPXXAPTKLSAISVLYLXXXXXXXXXLKNYQNMVVRSXGXH

SEQ ID NO: 8198 - protein, 34 aa, Artificial Sequence
  GFR-binding peptide
  MOD_RES (14), (15), (16), (17), (18): Xaa is A or G
  MOD_RES (19), (20), (21), (22): Xaa is A or G or is absent
VPTKLSATSVLYYXXXXXXXXXLRKHREGMSVAE

SEQ ID NO: 8199 - protein, 38 aa, Artificial Sequence
  GFR-binding peptide
  MOD_RES (3), (4), (37): Xaa is C or S
  MOD_RES (18), (19), (20), (21), (22): Xaa is A or G
  MOD_RES (23), (24), (25), (26): Xaa is A or G or is absent
SPXXVPQDLNAISILYFXXXXXXXXXLKKYRMVVKSXK

SEQ ID NO: 8200 - protein, 39 aa, Artificial Sequence
  GFR-binding peptide
  MOD_RES (5), (6): Xaa is C or S
  MOD_RES (20), (21), (22), (23), (24): Xaa is A or G
  MOD_RES (25), (26), (27), (28): Xaa is A or G or is absent
VPKPXXAPTKLSATSVLYYXXXXXXXXXLRKHRNMVVRS

SEQ ID NO: 8201 - protein, 37 aa, Artificial Sequence
  GFR-binding peptide
  MOD_RES (3), (4), (36): Xaa is C or S
KPXXAPTKLSAISVLYLDDSSNVILKNYQNMVVRSXG

SEQ ID NO: 8202 - protein, 33 aa, Artificial Sequence
  GFR-binding peptide
  MOD_RES (32), (32): Xaa is C or S
VPTELSATSMLYYDEYDKVVLRKHREMVVEGXG

SEQ ID NO: 8203 - protein, 40 aa, Artificial Sequence
  GFR-binding peptide
  MOD_RES (1), (2), (37), (39): Xaa is C or S
  MOD_RES (16), (17), (18), (19), (20): Xaa is A or G
  MOD_RES (21), (22), (23), (24): Xaa is A or G or is absent
XXVPTKLNAISVLYFXXXXXXXXXLKKYREGMSVAEXGXR

SEQ ID NO: 8204 - protein, 39 aa, Artificial Sequence
  GFR-binding peptide
  MOD_RES (5), (6), (39): Xaa is C or S
  MOD_RES (20), (21), (22), (23), (24): Xaa is A or G
  MOD_RES (25), (26), (27), (28): Xaa is A or G or is absent
SASPXXVSQDLSPISILYKXXXXXXXXXLKYHYMIVKSX

SEQ ID NO: 8205 - protein, 36 aa, Artificial Sequence
  GFR-binding peptide
  MOD_RES (3), (4): Xaa is C or S
  MOD_RES (18), (19), (20), (21), (22): Xaa is A or G
  MOD_RES (23), (24), (25), (26): Xaa is A or G or is absent
KPXXAPTQLSPISVLYKXXXXXXXXXLKYHYNMVVR

SEQ ID NO: 8206 - protein, 38 aa, Artificial Sequence
  GFR-binding peptide
  MOD_RES (1), (35), (37): Xaa is C or S
  MOD_RES (15), (16), (17), (18), (19): Xaa is A or G
  MOD_RES (20), (21), (22), (23): Xaa is A or G or is absent
XVPTELSPISMLYKXXXXXXXXXLKYHYEMVVEGXGXR

SEQ ID NO: 8207 - protein, 38 aa, Artificial Sequence
  GFR-binding peptide
  MOD_RES (37), (37): Xaa is C or S
RPTQVQLSATSVLYYEIVRKKPIFLRKHRTLEDHLAXK

SEQ ID NO: 8208 - protein, 34 aa, Artificial Sequence
  GFR-binding peptide
  MOD_RES (1), (2): Xaa is C or S
  MOD_RES (16), (17), (18), (19), (20): Xaa is A or G
  MOD_RES (21), (22), (23), (24): Xaa is A or G or is absent
XXVPQDLSAISILYLXXXXXXXXXLKNYQMVVKS

SEQ ID NO: 8209 - protein, 35 aa, Artificial Sequence
  GFR-binding peptide
  MOD_RES (4), (5): Xaa is C or S
ASPXXVPQDLSATSILYYVGRTPKVLRKHRMVVKS

SEQ ID NO: 8210 - protein, 38 aa, Artificial Sequence
  GFR-binding peptide
  MOD_RES (1), (2), (36), (38): Xaa is C or S
  MOD_RES (16), (17), (18), (19), (20): Xaa is A or G
  MOD_RES (21), (22), (23), (24): Xaa is A or G or is absent
XXAPTKLSATSVLYYXXXXXXXXXLRKHRNMVVKAXGX

SEQ ID NO: 8211 - protein, 40 aa, Artificial Sequence
  GFR-binding peptide
  MOD_RES (5), (6), (39): Xaa is C or S
  MOD_RES (20), (21), (22), (23), (24): Xaa is A or G
  MOD_RES (25), (26), (27), (28): Xaa is A or G or is absent
SASPXXVSQDLSPISILYKXXXXXXXXXLKYHYMIVKSXK

SEQ ID NO: 8212 - protein, 39 aa, Artificial Sequence
  GFR-binding peptide
  MOD_RES (5), (6), (39): Xaa is C or S
  MOD_RES (20), (21), (22), (23), (24): Xaa is A or G
  MOD_RES (25), (26), (27), (28): Xaa is A or G or is absent
SAAPXXVPQALNAISILYFXXXXXXXXXLKKYRMIVRSX

SEQ ID NO: 8213 - protein, 39 aa, Artificial Sequence
  GFR-binding peptide
  MOD_RES (6), (7): Xaa is C or S
  MOD_RES (21), (22), (23), (24), (25): Xaa is A or G
  MOD_RES (26), (27), (28), (29): Xaa is A or G or is absent
ASASPXXVSQDLSPISILYKXXXXXXXXXLKYHYMIVKS

SEQ ID NO: 8214 - protein, 37 aa, Artificial Sequence
  GFR-binding peptide
  MOD_RES (4), (5), (36): Xaa is C or S
ASPXXVSQDLSPISILYKIGKTPKILKYHYMIVKSXK

SEQ ID NO: 8215 - protein, 34 aa, Artificial Sequence
  GFR-binding peptide
  MOD_RES (1), (2), (33): Xaa is C or S
XXVSQDLSAISILYLIGKTPKILKNYQMIVKSXK

SEQ ID NO: 8216 - protein, 36 aa, Artificial Sequence
  GFR-binding peptide
  MOD_RES (3), (4): Xaa is C or S
  MOD_RES (18), (19), (20), (21), (22): Xaa is A or G
  MOD_RES (23), (24), (25), (26): Xaa is A or G or is absent
APXXVPQALSATSILYYXXXXXXXXXLRKHRMIVRS

SEQ ID NO: 8217 - protein, 41 aa, Artificial Sequence
  GFR-binding peptide
  MOD_RES (6), (7), (39), (41): Xaa is C or S
YVPKPXXAPTKLSAISVLYLDDSSNVILKNYQNMVVRSXGX

SEQ ID NO: 8218 - protein, 38 aa, Artificial Sequence
  GFR-binding peptide
  MOD_RES (6), (7), (38): Xaa is C or S
ASASPXXVSQDLSAISILYLIGKTPKILKNYQMIVKSX

SEQ ID NO: 8219 - protein, 35 aa, Artificial Sequence
  GFR-binding peptide
  MOD_RES (2), (3), (35): Xaa is C or S
AXXAPTKLSPISVLYKDSSNNVILKYHYNMVVKAX

SEQ ID NO: 8220 - protein, 38 aa, Artificial Sequence
  GFR-binding peptide
  MOD_RES (4), (5), (36), (38): Xaa is C or S
ASPXXVPQDLSAISILYLVGRTPKVLKNYQMVVKSXKX

SEQ ID NO: 8221 - protein, 41 aa, Artificial Sequence
  GFR-binding peptide
  MOD_RES (6), (7), (39), (41): Xaa is C or S
YVPKPXXAPTKLSPISVLYKDDSSNVILKYHYNMVVRSXGX

SEQ ID NO: 8222 - protein, 38 aa, Artificial Sequence
  GFR-binding peptide
  MOD_RES (36), (38): Xaa is C or S
  MOD_RES (15), (16), (17), (18), (19): Xaa is A or G
  MOD_RES (20), (21), (22), (23): Xaa is A or G or is absent
PTQVQLSAISVLYLXXXXXXXXXLKNYQTLEDHLAXKX

SEQ ID NO: 8223 - protein, 36 aa, Artificial Sequence
  GFR-binding peptide
  MOD_RES (2), (3), (36): Xaa is C or S
  MOD_RES (17), (18), (19), (20), (21): Xaa is A or G
  MOD_RES (22), (23), (24), (25): Xaa is A or G or is absent
PXXVSQDLSAISILYLXXXXXXXXXLKNYQMIVKSX

SEQ ID NO: 8224 - protein, 42 aa, Artificial Sequence
  GFR-binding peptide
  MOD_RES (6), (7), (40), (42): Xaa is C or S
  MOD_RES (21), (22), (23), (24), (25): Xaa is A or G
  MOD_RES (26), (27), (28), (29): Xaa is A or G or is absent
ASASPXXVPQDLSPISILYKXXXXXXXXXLKYHYMVVKSXKX

SEQ ID NO: 8225 - protein, 40 aa, Artificial Sequence
  GFR-binding peptide
  MOD_RES (4), (5), (39): Xaa is C or S
  MOD_RES (19), (20), (21), (22), (23): Xaa is A or G
  MOD_RES (24), (25), (26), (27): Xaa is A or G or is absent
PKPXXAPTKLSATSVLYYXXXXXXXXXLRKHRNMVVRSXG

SEQ ID NO: 8226 - protein, 40 aa, Artificial Sequence
  GFR-binding peptide
  MOD_RES (5), (6), (39): Xaa is C or S
  MOD_RES (20), (21), (22), (23), (24): Xaa is A or G
  MOD_RES (25), (26), (27), (28): Xaa is A or G or is absent
SASPXXVPQDLSAISILYLXXXXXXXXXLKNYQMVVKSXK

SEQ ID NO: 8227 - protein, 37 aa, Artificial Sequence
  GFR-binding peptide
  MOD_RES (3), (4), (36): Xaa is C or S
KAXXVPTELNAISMLYFDEYDKVVLKKYREMVVEGXG

SEQ ID NO: 8228 - protein, 39 aa, Artificial Sequence
  GFR-binding peptide
  MOD_RES (5), (6): Xaa is C or S
  MOD_RES (20), (21), (22), (23), (24): Xaa is A or G
  MOD_RES (25), (26), (27), (28): Xaa is A or G or is absent
IPKAXXVPTELSPISMLYKXXXXXXXXXLKYHYDMVVEG

SEQ ID NO: 8229 - protein, 34 aa, Artificial Sequence
  GFR-binding peptide
  MOD_RES (33), (33): Xaa is C or S
  MOD_RES (14), (15), (16), (17), (18): Xaa is A or G
  MOD_RES (19), (20), (21), (22): Xaa is A or G or is absent
VSQDLNAISILYFXXXXXXXXXLKKYRMIVKSXK

SEQ ID NO: 8230 - protein, 40 aa, Artificial Sequence
  GFR-binding peptide
  MOD_RES (4), (5), (39): Xaa is C or S
  MOD_RES (19), (20), (21), (22), (23): Xaa is A or G
  MOD_RES (24), (25), (26), (27): Xaa is A or G or is absent
PKAXXVPTELSAISMLYLXXXXXXXXXLKNYQEMVVEGXG

SEQ ID NO: 8231 - protein, 39 aa, Artificial Sequence
  GFR-binding peptide
  MOD_RES (6), (7), (39): Xaa is C or S
TVPKPXXAPTQLSATSVLYYDDSSNVILRKHRNMVVRAX

SEQ ID NO: 8232 - protein, 37 aa, Artificial Sequence
  GFR-binding peptide
  MOD_RES (2), (3), (34), (36): Xaa is C or S
PXXVPQDLSAISILYLVGRTPKVLKNYQMVVKSXKXS

SEQ ID NO: 8233 - protein, 43 aa, Artificial Sequence
  GFR-binding peptide
  MOD_RES (4), (5), (40), (42): Xaa is C or S
  MOD_RES (19), (20), (21), (22), (23): Xaa is A or G
  MOD_RES (24), (25), (26), (27): Xaa is A or G or is absent
GKAXXVPTKLSAISVLYLXXXXXXXXXLKNYQEGMSVAEXGXR

SEQ ID NO: 8234 - protein, 41 aa, Artificial Sequence
  GFR-binding peptide
  MOD_RES (6), (7), (39), (41): Xaa is C or S
KIPKAXXVPTELSATSMLYYDENEKVVLRKHRDMVVEGXGX

SEQ ID NO: 8235 - protein, 42 aa, Artificial Sequence
  GFR-binding peptide
  MOD_RES (5), (6), (40), (42): Xaa is C or S
  MOD_RES (20), (21), (22), (23), (24): Xaa is A or G
  MOD_RES (25), (26), (27), (28): Xaa is A or G or is absent
VPKPXXAPTKLSATSVLYYXXXXXXXXXLRKHRNMVVRSXGX

SEQ ID NO: 8236 - protein, 36 aa, Artificial Sequence
  GFR-binding peptide
  MOD_RES (2), (36): Xaa is C or S
  MOD_RES (16), (17), (18), (19), (20): Xaa is A or G
  MOD_RES (21), (22), (23), (24): Xaa is A or G or is absent
TXAPTKLSAISVLYLXXXXXXXXXLKNYQNMVVRSX

SEQ ID NO: 8237 - protein, 41 aa, Artificial Sequence
  GFR-binding peptide
  MOD_RES (4), (41): Xaa is C or S
  MOD_RES (20), (21), (22), (23), (24): Xaa is A or G
  MOD_RES (25), (26), (27), (28): Xaa is A or G or is absent
NVQXRPTQVQLSAISVLYLXXXXXXXXXLKNYQTLEDHLAX

SEQ ID NO: 8238 - protein, 37 aa, Artificial Sequence
  GFR-binding peptide
  MOD_RES (2), (3), (36): Xaa is C or S
  MOD_RES (17), (18), (19), (20), (21): Xaa is A or G
  MOD_RES (22), (23), (24), (25): Xaa is A or G or is absent
PXXVSQDLSATSILYYXXXXXXXXXLRKHRMIVKSXK

SEQ ID NO: 8239 - protein, 34 aa, Artificial Sequence
  GFR-binding peptide
  MOD_RES (34), (34): Xaa is C or S
  MOD_RES (14), (15), (16), (17), (18): Xaa is A or G
  MOD_RES (19), (20), (21), (22): Xaa is A or G or is absent
APTKLSAISVLYLXXXXXXXXXLKNYQNMVVKAX

SEQ ID NO: 8240 - protein, 35 aa, Artificial Sequence
  GFR-binding peptide
  MOD_RES (1), (2): Xaa is C or S
  MOD_RES (16), (17), (18), (19), (20): Xaa is A or G
  MOD_RES (21), (22), (23), (24): Xaa is A or G or is absent
XXVPTELNAISMLYFXXXXXXXXXLKKYREMVVEG

SEQ ID NO: 8241 - protein, 39 aa, Artificial Sequence
  GFR-binding peptide
  MOD_RES (3), (4), (38): Xaa is C or S
  MOD_RES (18), (19), (20), (21), (22): Xaa is A or G
  MOD_RES (23), (24), (25), (26): Xaa is A or G or is absent
KAXXVPTELNAISMLYFXXXXXXXXXLKKYRDMVVEGXG

SEQ ID NO: 8242 - protein, 37 aa, Artificial Sequence
  GFR-binding peptide
  MOD_RES (4), (36): Xaa is C or S
KPTXAPTKLSATSVLYYDDSSNVILRKHRNMVVRSXG

SEQ ID NO: 8243 - protein, 37 aa, Artificial Sequence
  GFR-binding peptide
  MOD_RES (4), (5): Xaa is C or S
  MOD_RES (19), (20), (21), (22), (23): Xaa is A or G
  MOD_RES (24), (25), (26), (27): Xaa is A or G or is absent
ASPXXVPQDLSATSILYYXXXXXXXXXLRKHRMVVKS

SEQ ID NO: 8244 - protein, 43 aa, Artificial Sequence
  GFR-binding peptide
  MOD_RES (6), (40), (42): Xaa is C or S
  MOD_RES (20), (21), (22), (23), (24): Xaa is A or G
  MOD_RES (25), (26), (27), (28): Xaa is A or G or is absent
VTKPTXAPTKLSATSVLYYXXXXXXXXXLRKHRNMVVRSXGXH

SEQ ID NO: 8245 - protein, 37 aa, Artificial Sequence
  GFR-binding peptide
  MOD_RES (2), (3), (35), (37): Xaa is C or S
PXXAPTKLSATSVLYYDDSSNVILRKHRNMVVRSXGX

SEQ ID NO: 8246 - protein, 33 aa, Artificial Sequence
  GFR-binding peptide
  MOD_RES (2), (3): Xaa is C or S
PXXAPTKLSATSVLYYDDSSNVILRKHRNMVVR

SEQ ID NO: 8247 - protein, 37 aa, Artificial Sequence
  GFR-binding peptide
  MOD_RES (3), (4): Xaa is C or S
  MOD_RES (18), (19), (20), (21), (22): Xaa is A or G
  MOD_RES (23), (24), (25), (26): Xaa is A or G or is absent
KPXXAPTQLSATSVLYYXXXXXXXXXLRKHRNMVVRA

SEQ ID NO: 8248 - protein, 36 aa, Artificial Sequence
  GFR-binding peptide
  MOD_RES (4), (36): Xaa is C or S
KPTXAPTKLSAISVLYLDDSSNVILKNYQNMVVRSX

SEQ ID NO: 8249 - protein, 35 aa, Artificial Sequence
  GFR-binding peptide
  MOD_RES (2), (3): Xaa is C or S
  MOD_RES (17), (18), (19), (20), (21): Xaa is A or G
  MOD_RES (22), (23), (24), (25): Xaa is A or G or is absent
PXXVSQDLNAISILYFXXXXXXXXXLKKYRMIVKS

SEQ ID NO: 8250 - protein, 36 aa, Artificial Sequence
  GFR-binding peptide
  MOD_RES (34), (36): Xaa is C or S
  MOD_RES (14), (15), (16), (17), (18): Xaa is A or G
  MOD_RES (19), (20), (21), (22): Xaa is A or G or is absent
APTQLSATSVLYYXXXXXXXXXLRKHRNMVVRAXGX

SEQ ID NO: 8251 - protein, 34 aa, Artificial Sequence
  GFR-binding peptide
  MOD_RES (16), (17), (18), (19), (20): Xaa is A or G
  MOD_RES (21), (22), (23), (24): Xaa is A or G or is absent
RPTQVQLNAISVLYFXXXXXXXXXLKKYRTLEDH

SEQ ID NO: 8252 - protein, 35 aa, Artificial Sequence
  GFR-binding peptide
  MOD_RES (3), (4): Xaa is C or S
KAXXVPTELSATSMLYYDEYDKVVLRKHREMVVEG

SEQ ID NO: 8253 - protein, 37 aa, Artificial Sequence
  GFR-binding peptide
  MOD_RES (1), (35), (37): Xaa is C or S
  MOD_RES (15), (16), (17), (18), (19): Xaa is A or G
  MOD_RES (20), (21), (22), (23): Xaa is A or G or is absent
XAPTQLSPISVLYKXXXXXXXXXLKYHYNMVVRAXGX

SEQ ID NO: 8254 - protein, 38 aa, Artificial Sequence
  GFR-binding peptide
  MOD_RES (2), (3), (35), (37): Xaa is C or S
AXXAPTKLSPISVLYKDSSNNVILKYHYNMVVKAXGXH

SEQ ID NO: 8255 - protein, 34 aa, Artificial Sequence
  GFR-binding peptide
  MOD_RES (31), (33): Xaa is C or S
VPQALSAISILYLVGRKPKVLKNYQMIVRSXKXS

SEQ ID NO: 8256 - protein, 37 aa, Artificial Sequence
  GFR-binding peptide
  MOD_RES (5), (5): Xaa is C or S
  MOD_RES (19), (20), (21), (22), (23): Xaa is A or G
  MOD_RES (24), (25), (26), (27): Xaa is A or G or is absent
TKPTXAPTKLSAISVLYLXXXXXXXXXLKNYQNMVVR

SEQ ID NO: 8257 - protein, 41 aa, Artificial Sequence
  GFR-binding peptide
  MOD_RES (2), (3), (38), (40): Xaa is C or S
  MOD_RES (17), (18), (19), (20), (21): Xaa is A or G
  MOD_RES (22), (23), (24), (25): Xaa is A or G or is absent
AXXVPTKLSATSVLYYXXXXXXXXXLRKHREGMSVAEXGXR

SEQ ID NO: 8258 - protein, 39 aa, Artificial Sequence
  GFR-binding peptide
  MOD_RES (4), (5), (39): Xaa is C or S
  MOD_RES (19), (20), (21), (22), (23): Xaa is A or G
  MOD_RES (24), (25), (26), (27): Xaa is A or G or is absent
PKAXXVPTELSPISMLYKXXXXXXXXXLKYHYDMVVEGX

SEQ ID NO: 8259 - protein, 38 aa, Artificial Sequence
  GFR-binding peptide
  MOD_RES (3), (35), (37): Xaa is C or S
PTXAPTKLSATSVLYYDDSSNVILRKHRNMVVRSXGXH

SEQ ID NO: 8260 - protein, 43 aa, Artificial Sequence
  GFR-binding peptide
  MOD_RES (3), (40), (42): Xaa is C or S
  MOD_RES (19), (20), (21), (22), (23): Xaa is A or G
  MOD_RES (24), (25), (26), (27): Xaa is A or G or is absent
VQXRPTQVQLSATSVLYYXXXXXXXXXLRKHRTLEDHLAXKXE

SEQ ID NO: 8261 - protein, 35 aa, Artificial Sequence
  GFR-binding peptide
  MOD_RES (32), (34): Xaa is C or S
APTKLSPISVLYKDSSNNVILKYHYNMVVKAXGXH

SEQ ID NO: 8262 - protein, 34 aa, Artificial Sequence
  GFR-binding peptide
  MOD_RES (1), (2), (33): Xaa is C or S
XXVSQDLNAISILYFIGKTPKILKKYRMIVKSXK

SEQ ID NO: 8263 - protein, 34 aa, Artificial Sequence
  GFR-binding peptide
  MOD_RES (2), (3): Xaa is C or S
AXXAPTKLSPISVLYKDSSNNVILKYHYNMVVKA

SEQ ID NO: 8264 - protein, 34 aa, Artificial Sequence
  GFR-binding peptide
  MOD_RES (1), (33): Xaa is C or S
XAPTKLNAISVLYFDSSNNVILKKYRNMVVKAXG

SEQ ID NO: 8265 - protein, 37 aa, Artificial Sequence
  GFR-binding peptide
  MOD_RES (4), (4): Xaa is C or S
  MOD_RES (18), (19), (20), (21), (22): Xaa is A or G
  MOD_RES (23), (24), (25), (26): Xaa is A or G or is absent
KPTXAPTKLSATSVLYYXXXXXXXXXLRKHRNMVVRS

SEQ ID NO: 8266 - protein, 38 aa, Artificial Sequence
  GFR-binding peptide
  MOD_RES (5), (37): Xaa is C or S
TKPTXAPTKLSAISVLYLDDSSNVILKNYQNMVVRSXG

SEQ ID NO: 8267 - protein, 40 aa, Artificial Sequence
  GFR-binding peptide
  MOD_RES (6), (7), (38), (40): Xaa is C or S
ASASPXXVSQDLSATSILYYIGKTPKILRKHRMIVKSXKX

SEQ ID NO: 8268 - protein, 39 aa, Artificial Sequence
  GFR-binding peptide
  MOD_RES (3), (4), (36), (38): Xaa is C or S
KPXXAPTQLSAISVLYLDDSSNVILKNYQNMVVRAXGXH

SEQ ID NO: 8269 - protein, 41 aa, Artificial Sequence
  GFR-binding peptide
  MOD_RES (3), (4), (38), (40): Xaa is C or S
  MOD_RES (18), (19), (20), (21), (22): Xaa is A or G
  MOD_RES (23), (24), (25), (26): Xaa is A or G or is absent
KPXXAPTKLSATSVLYYXXXXXXXXXLRKHRNMVVRSXGXH

SEQ ID NO: 8270 - protein, 39 aa, Artificial Sequence
  GFR-binding peptide
  MOD_RES (3), (3): Xaa is C or S
  MOD_RES (19), (20), (21), (22), (23): Xaa is A or G
  MOD_RES (24), (25), (26), (27): Xaa is A or G or is absent
VQXRPTQVQLSPISVLYKXXXXXXXXXLKYHYTLEDHLA

SEQ ID NO: 8271 - protein, 41 aa, Artificial Sequence
  GFR-binding peptide
  MOD_RES (7), (41): Xaa is C or S
  MOD_RES (21), (22), (23), (24), (25): Xaa is A or G
  MOD_RES (26), (27), (28), (29): Xaa is A or G or is absent
HVTKPTXAPTKLSAISVLYLXXXXXXXXXLKNYQNMVVRSX

SEQ ID NO: 8272 - protein, 38 aa, Artificial Sequence
  GFR-binding peptide
  MOD_RES (3), (4), (38): Xaa is C or S
  MOD_RES (18), (19), (20), (21), (22): Xaa is A or G
  MOD_RES (23), (24), (25), (26): Xaa is A or G or is absent
KAXXVPTELSATSMLYYXXXXXXXXXLRKHREMVVEGX

SEQ ID NO: 8273 - protein, 40 aa, Artificial Sequence
  GFR-binding peptide
  MOD_RES (5), (6), (40): Xaa is C or S
  MOD_RES (20), (21), (22), (23), (24): Xaa is A or G
  MOD_RES (25), (26), (27), (28): Xaa is A or G or is absent
IPKAXXVPTELSATSMLYYXXXXXXXXXLRKHREMVVEGX

SEQ ID NO: 8274 - protein, 34 aa, Artificial Sequence
  GFR-binding peptide
  MOD_RES (3), (4): Xaa is C or S
KAXXVPTELSPISMLYKDEYDKVVLKYHYEMVVE

SEQ ID NO: 8275 - protein, 40 aa, Artificial Sequence
  GFR-binding peptide
  MOD_RES (6), (7): Xaa is C or S
  MOD_RES (21), (22), (23), (24), (25): Xaa is A or G
  MOD_RES (26), (27), (28), (29): Xaa is A or G or is absent
SIPKAXXVPTELNAISMLYFXXXXXXXXXLKKYREMVVEG

SEQ ID NO: 8276 - protein, 33 aa, Artificial Sequence
  GFR-binding peptide
  MOD_RES (1), (1): Xaa is C or S
  MOD_RES (15), (16), (17), (18), (19): Xaa is A or G
  MOD_RES (20), (21), (22), (23): Xaa is A or G or is absent
XAPTKLSAISVLYLXXXXXXXXXLKNYQNMVVR

SEQ ID NO: 8277 - protein, 33 aa, Artificial Sequence
  GFR-binding peptide
  MOD_RES (1), (1): Xaa is C or S
  MOD_RES (15), (16), (17), (18), (19): Xaa is A or G
  MOD_RES (20), (21), (22), (23): Xaa is A or G or is absent
XAPTKLSAISVLYLXXXXXXXXXLKNYQNMVVK

SEQ ID NO: 8278 - protein, 35 aa, Artificial Sequence
  GFR-binding peptide
  MOD_RES (34), (34): Xaa is C or S
  MOD_RES (14), (15), (16), (17), (18): Xaa is A or G
  MOD_RES (19), (20), (21), (22): Xaa is A or G or is absent
APTQLNAISVLYFXXXXXXXXXLKKYRNMVVRAXG

SEQ ID NO: 8279 - protein, 38 aa, Artificial Sequence
  GFR-binding peptide
  MOD_RES (2), (3), (36), (38): Xaa is C or S
  MOD_RES (17), (18), (19), (20), (21): Xaa is A or G
  MOD_RES (22), (23), (24), (25): Xaa is A or G or is absent
PXXVPQALSATSILYYXXXXXXXXXLRKHRMIVRSXKX

SEQ ID NO: 8280 - protein, 39 aa, Artificial Sequence
  GFR-binding peptide
  MOD_RES (2), (3), (36), (38): Xaa is C or S
  MOD_RES (17), (18), (19), (20), (21): Xaa is A or G
  MOD_RES (22), (23), (24), (25): Xaa is A or G or is absent
PXXVPQDLSATSILYYXXXXXXXXXLRKHRMVVKSXKXS

SEQ ID NO: 8281 - protein, 38 aa, Artificial Sequence
  GFR-binding peptide
  MOD_RES (5), (6), (38): Xaa is C or S
VPKPXXAPTKLSATSVLYYDDSSNVILRKHRNMVVRSX

SEQ ID NO: 8282 - protein, 37 aa, Artificial Sequence
  GFR-binding peptide
  MOD_RES (2), (3), (37): Xaa is C or S
  MOD_RES (17), (18), (19), (20), (21): Xaa is A or G
  MOD_RES (22), (23), (24), (25): Xaa is A or G or is absent
AXXAPTKLSPISVLYKXXXXXXXXXLKYHYNMVVKAX

SEQ ID NO: 8283 - protein, 33 aa, Artificial Sequence
  GFR-binding peptide
  MOD_RES (15), (16), (17), (18), (19): Xaa is A or G
  MOD_RES (20), (21), (22), (23): Xaa is A or G or is absent
PTQVQLSATSVLYYXXXXXXXXXLRKHRTLEDH

SEQ ID NO: 8284 - protein, 39 aa, Artificial Sequence
  GFR-binding peptide
  MOD_RES (37), (39): Xaa is C or S
RPTQVQLSATSVLYYEIVRKKPIFLRKHRTLEDHLAXKX

SEQ ID NO: 8285 - protein, 36 aa, Artificial Sequence
  GFR-binding peptide
  MOD_RES (3), (3): Xaa is C or S
  MOD_RES (17), (18), (19), (20), (21): Xaa is A or G
  MOD_RES (22), (23), (24), (25): Xaa is A or G or is absent
PTXAPTKLSATSVLYYXXXXXXXXXLRKHRNMVVRS

SEQ ID NO: 8286 - protein, 38 aa, Artificial Sequence
  GFR-binding peptide
  MOD_RES (2), (3), (36), (38): Xaa is C or S
  MOD_RES (17), (18), (19), (20), (21): Xaa is A or G
  MOD_RES (22), (23), (24), (25): Xaa is A or G or is absent
PXXVSQDLNAISILYFXXXXXXXXXLKKYRMIVKSXKX

SEQ ID NO: 8287 - protein, 37 aa, Artificial Sequence
  GFR-binding peptide
  MOD_RES (1), (35), (37): Xaa is C or S
  MOD_RES (15), (16), (17), (18), (19): Xaa is A or G
  MOD_RES (20), (21), (22), (23): Xaa is A or G or is absent
XAPTKLSATSVLYYXXXXXXXXXLRKHRNMVVRSXGX

SEQ ID NO: 8288 - protein, 36 aa, Artificial Sequence
  GFR-binding peptide
  MOD_RES (3), (4), (35): Xaa is C or S
SPXXVSQDLSATSILYYIGKTPKILRKHRMIVKSXK

SEQ ID NO: 8289 - protein, 37 aa, Artificial Sequence
  GFR-binding peptide
  MOD_RES (36), (36): Xaa is C or S
  MOD_RES (15), (16), (17), (18), (19): Xaa is A or G
  MOD_RES (20), (21), (22), (23): Xaa is A or G or is absent
PTQVQLSAISVLYLXXXXXXXXXLKNYQTLEDHLAXK

SEQ ID NO: 8290 - protein, 39 aa, Artificial Sequence
  GFR-binding peptide
  MOD_RES (4), (5), (37), (39): Xaa is C or S
PKAXXVPTELNAISMLYFDEYDKVVLKKYREMVVEGXGX

SEQ ID NO: 8291 - protein, 43 aa, Artificial Sequence
  GFR-binding peptide
  MOD_RES (5), (6), (40), (42): Xaa is C or S
  MOD_RES (20), (21), (22), (23), (24): Xaa is A or G
  MOD_RES (25), (26), (27), (28): Xaa is A or G or is absent
VPKAXXAPTKLSAISVLYLXXXXXXXXXLKNYQNMVVKAXGXH

SEQ ID NO: 8292 - protein, 37 aa, Artificial Sequence
  GFR-binding peptide
  MOD_RES (34), (36): Xaa is C or S
  MOD_RES (14), (15), (16), (17), (18): Xaa is A or G
  MOD_RES (19), (20), (21), (22): Xaa is A or G or is absent
VPTELSPISMLYKXXXXXXXXXLKYHYEMVVEGXGXR

SEQ ID NO: 8293 - protein, 37 aa, Artificial Sequence
  GFR-binding peptide
  MOD_RES (3), (4): Xaa is C or S
  MOD_RES (18), (19), (20), (21), (22): Xaa is A or G
  MOD_RES (23), (24), (25), (26): Xaa is A or G or is absent
KPXXAPTKLSATSVLYYXXXXXXXXXLRKHRNMVVRS

SEQ ID NO: 8294 - protein, 41 aa, Artificial Sequence
  GFR-binding peptide
  MOD_RES (2), (39), (41): Xaa is C or S
  MOD_RES (18), (19), (20), (21), (22): Xaa is A or G
  MOD_RES (23), (24), (25), (26): Xaa is A or G or is absent
QXRPTQVQLNAISVLYFXXXXXXXXXLKKYRTLEDHLAXKX

SEQ ID NO: 8295 - protein, 41 aa, Artificial Sequence
  GFR-binding peptide
  MOD_RES (6), (7), (39), (41): Xaa is C or S
KIPKAXXVPTELSPISMLYKDENEKVVLKYHYDMVVEGXGX

SEQ ID NO: 8296 - protein, 40 aa, Artificial Sequence
  GFR-binding peptide
  MOD_RES (3), (37), (39): Xaa is C or S
  MOD_RES (17), (18), (19), (20), (21): Xaa is A or G
  MOD_RES (22), (23), (24), (25): Xaa is A or G or is absent
PTXAPTKLNAISVLYFXXXXXXXXXLKKYRNMVVRSXGXH

SEQ ID NO: 8297 - protein, 39 aa, Artificial Sequence
  GFR-binding peptide
  MOD_RES (5), (5): Xaa is C or S
  MOD_RES (21), (22), (23), (24), (25): Xaa is A or G
  MOD_RES (26), (27), (28), (29): Xaa is A or G or is absent
RNVQXRPTQVQLSATSVLYYXXXXXXXXXLRKHRTLEDH

SEQ ID NO: 8298 - protein, 40 aa, Artificial Sequence
  GFR-binding peptide
  MOD_RES (4), (5), (38), (40): Xaa is C or S
  MOD_RES (19), (20), (21), (22), (23): Xaa is A or G
  MOD_RES (24), (25), (26), (27): Xaa is A or G or is absent
ASPXXVPQDLSAISILYLXXXXXXXXXLKNYQMVVKSXKX

SEQ ID NO: 8299 - protein, 38 aa, Artificial Sequence
  GFR-binding peptide
  MOD_RES (6), (7): Xaa is C or S
KIPKAXXVPTELSPISMLYKDENEKVVLKYHYDMVVEG

SEQ ID NO: 8300 - protein, 32 aa, Artificial Sequence
  GFR-binding peptide
  MOD_RES (14), (15), (16), (17), (18): Xaa is A or G
  MOD_RES (19), (20), (21), (22): Xaa is A or G or is absent
VPQALSATSILYYXXXXXXXXXLRKHRMIVRS

SEQ ID NO: 8301 - protein, 37 aa, Artificial Sequence
  GFR-binding peptide
  MOD_RES (2), (2): Xaa is C or S
  MOD_RES (18), (19), (20), (21), (22): Xaa is A or G
  MOD_RES (23), (24), (25), (26): Xaa is A or G or is absent
QXRPTQVQLSATSVLYYXXXXXXXXXLRKHRTLEDHL

SEQ ID NO: 8302 - protein, 35 aa, Artificial Sequence
  GFR-binding peptide
  MOD_RES (2), (2): Xaa is C or S
  MOD_RES (16), (17), (18), (19), (20): Xaa is A or G
  MOD_RES (21), (22), (23), (24): Xaa is A or G or is absent
TXAPTKLNAISVLYFXXXXXXXXXLKKYRNMVVRS

SEQ ID NO: 8303 - protein, 37 aa, Artificial Sequence
  GFR-binding peptide
  MOD_RES (2), (3), (36): Xaa is C or S
  MOD_RES (17), (18), (19), (20), (21): Xaa is A or G
  MOD_RES (22), (23), (24), (25): Xaa is A or G or is absent
PXXVPQALSAISILYLXXXXXXXXXLKNYQMIVRSXK

SEQ ID NO: 8304 - protein, 35 aa, Artificial Sequence
  GFR-binding peptide
  MOD_RES (34), (34): Xaa is C or S
  MOD_RES (14), (15), (16), (17), (18): Xaa is A or G
  MOD_RES (19), (20), (21), (22): Xaa is A or G or is absent
APTQLSATSVLYYXXXXXXXXXLRKHRNMVVRAXG

SEQ ID NO: 8305 - protein, 31 aa, Artificial Sequence
  GFR-binding peptide
APTKLSAISVLYLDDSSNVILKNYQNMVVRS

SEQ ID NO: 8306 - protein, 41 aa, Artificial Sequence
  GFR-binding peptide
  MOD_RES (5), (5): Xaa is C or S
RNVQXRPTQVQLNAISVLYFEIVRKKPIFLKKYRTLEDHLA

SEQ ID NO: 8307 - protein, 38 aa, Artificial Sequence
  GFR-binding peptide
  MOD_RES (1), (35), (37): Xaa is C or S
  MOD_RES (15), (16), (17), (18), (19): Xaa is A or G
  MOD_RES (20), (21), (22), (23): Xaa is A or G or is absent
XVPTELSATSMLYYXXXXXXXXXLRKHREMVVEGXGXR

SEQ ID NO: 8308 - protein, 35 aa, Artificial Sequence
  GFR-binding peptide
  MOD_RES (1), (34): Xaa is C or S
  MOD_RES (15), (16), (17), (18), (19): Xaa is A or G
  MOD_RES (20), (21), (22), (23): Xaa is A or G or is absent
XVSQDLNAISILYFXXXXXXXXXLKKYRMIVKSXK

SEQ ID NO: 8309 - protein, 37 aa, Artificial Sequence
  GFR-binding peptide
  MOD_RES (2), (3), (37): Xaa is C or S
  MOD_RES (17), (18), (19), (20), (21): Xaa is A or G
  MOD_RES (22), (23), (24), (25): Xaa is A or G or is absent
AXXVPTELNAISMLYFXXXXXXXXXLKKYRDMVVEGX

SEQ ID NO: 8310 - protein, 36 aa, Artificial Sequence
  GFR-binding peptide
RPTQVQLSPISVLYKEIVRKKPIFLKYHYTLEDHLA

SEQ ID NO: 8311 - protein, 33 aa, Artificial Sequence
  GFR-binding peptide
  MOD_RES (3), (3): Xaa is C or S
PTXAPTKLSAISVLYLDDSSNVILKNYQNMVVR

SEQ ID NO: 8312 - protein, 33 aa, Artificial Sequence
  GFR-binding peptide
  MOD_RES (1), (2), (33): Xaa is C or S
XXVPQALSAISILYLVGRKPKVLKNYQMIVRSX

SEQ ID NO: 8313 - protein, 37 aa, Artificial Sequence
  GFR-binding peptide
  MOD_RES (1), (2), (36): Xaa is C or S
  MOD_RES (16), (17), (18), (19), (20): Xaa is A or G
  MOD_RES (21), (22), (23), (24): Xaa is A or G or is absent
XXVPTELSATSMLYYXXXXXXXXXLRKHREMVVEGXG

SEQ ID NO: 8314 - protein, 37 aa, Artificial Sequence
  GFR-binding peptide
  MOD_RES (2), (3), (37): Xaa is C or S
  MOD_RES (17), (18), (19), (20), (21): Xaa is A or G
  MOD_RES (22), (23), (24), (25): Xaa is A or G or is absent
PXXAPTQLSPISVLYKXXXXXXXXXLKYHYNMVVRAX

SEQ ID NO: 8315 - protein, 41 aa, Artificial Sequence
  GFR-binding peptide
  MOD_RES (6), (7), (41): Xaa is C or S
  MOD_RES (21), (22), (23), (24), (25): Xaa is A or G
  MOD_RES (26), (27), (28), (29): Xaa is A or G or is absent
TVPKPXXAPTQLSAISVLYLXXXXXXXXXLKNYQNMVVRAX

SEQ ID NO: 8316 - protein, 36 aa, Artificial Sequence
  GFR-binding peptide
  MOD_RES (3), (4), (36): Xaa is C or S
KPXXAPTQLSAISVLYLDDSSNVILKNYQNMVVRAX

SEQ ID NO: 8317 - protein, 36 aa, Artificial Sequence
  GFR-binding peptide
  MOD_RES (3), (4): Xaa is C or S
  MOD_RES (18), (19), (20), (21), (22): Xaa is A or G
  MOD_RES (23), (24), (25), (26): Xaa is A or G or is absent
KAXXAPTKLNAISVLYFXXXXXXXXXLKKYRNMVVK

SEQ ID NO: 8318 - protein, 40 aa, Artificial Sequence
  GFR-binding peptide
  MOD_RES (5), (6), (38), (40): Xaa is C or S
VPKPXXAPTQLSATSVLYYDDSSNVILRKHRNMVVRAXGX

SEQ ID NO: 8319 - protein, 34 aa, Artificial Sequence
  GFR-binding peptide
  MOD_RES (1), (32), (34): Xaa is C or S
XVPQALSATSILYYVGRKPKVLRKHRMIVRSXKX

SEQ ID NO: 8320 - protein, 34 aa, Artificial Sequence
  GFR-binding peptide
  MOD_RES (1), (32), (34): Xaa is C or S
XVPQDLNAISILYFVGRTPKVLKKYRMVVKSXKX

SEQ ID NO: 8321 - protein, 38 aa, Artificial Sequence
  GFR-binding peptide
  MOD_RES (3), (4), (38): Xaa is C or S
  MOD_RES (18), (19), (20), (21), (22): Xaa is A or G
  MOD_RES (23), (24), (25), (26): Xaa is A or G or is absent
KPXXAPTKLSPISVLYKXXXXXXXXXLKYHYNMVVRSX

SEQ ID NO: 8322 - protein, 36 aa, Artificial Sequence
  GFR-binding peptide
  MOD_RES (1), (1): Xaa is C or S
  MOD_RES (17), (18), (19), (20), (21): Xaa is A or G
  MOD_RES (22), (23), (24), (25): Xaa is A or G or is absent
XRPTQVQLSAISVLYLXXXXXXXXXLKNYQTLEDHL

SEQ ID NO: 8323 - protein, 37 aa, Artificial Sequence
  GFR-binding peptide
  MOD_RES (1), (1): Xaa is C or S
  MOD_RES (17), (18), (19), (20), (21): Xaa is A or G
  MOD_RES (22), (23), (24), (25): Xaa is A or G or is absent
XRPTQVQLSAISVLYLXXXXXXXXXLKNYQTLEDHLA

SEQ ID NO: 8324 - protein, 42 aa, Artificial Sequence
  GFR-binding peptide
  MOD_RES (5), (39), (41): Xaa is C or S
  MOD_RES (19), (20), (21), (22), (23): Xaa is A or G
  MOD_RES (24), (25), (26), (27): Xaa is A or G or is absent
TKPTXAPTKLSATSVLYYXXXXXXXXXLRKHRNMVVRSXGXH

SEQ ID NO: 8325 - protein, 36 aa, Artificial Sequence
  GFR-binding peptide
  MOD_RES (1), (2), (33), (35): Xaa is C or S
XXVSQDLSPISILYKIGKTPKILKYHYMIVKSXKXS

SEQ ID NO: 8326 - protein, 38 aa, Artificial Sequence
  GFR-binding peptide
  MOD_RES (2), (3), (38): Xaa is C or S
  MOD_RES (17), (18), (19), (20), (21): Xaa is A or G
  MOD_RES (22), (23), (24), (25): Xaa is A or G or is absent
AXXVPTKLSAISVLYLXXXXXXXXXLKNYQEGMSVAEX

SEQ ID NO: 8327 - protein, 34 aa, Artificial Sequence
  GFR-binding peptide
  MOD_RES (3), (4): Xaa is C or S
KAXXAPTKLSPISVLYKDSSNNVILKYHYNMVVK

SEQ ID NO: 8328 - protein, 38 aa, Artificial Sequence
  GFR-binding peptide
  MOD_RES (3), (3): Xaa is C or S
VQXRPTQVQLSATSVLYYEIVRKKPIFLRKHRTLEDHL

SEQ ID NO: 8329 - protein, 38 aa, Artificial Sequence
  GFR-binding peptide
  MOD_RES (36), (38): Xaa is C or S
PTQVQLNAISVLYFEIVRKKPIFLKKYRTLEDHLAXKX

SEQ ID NO: 8330 - protein, 40 aa, Artificial Sequence
  GFR-binding peptide
  MOD_RES (6), (38), (40): Xaa is C or S
VTKPTXAPTKLSATSVLYYDDSSNVILRKHRNMVVRSXGX

SEQ ID NO: 8331 - protein, 36 aa, Artificial Sequence
  GFR-binding peptide
  MOD_RES (1), (2), (34), (36): Xaa is C or S
XXAPTKLSAISVLYLDDSSNVILKNYQNMVVRSXGX

SEQ ID NO: 8332 - protein, 43 aa, Artificial Sequence
  GFR-binding peptide
  MOD_RES (7), (41), (43): Xaa is C or S
  MOD_RES (21), (22), (23), (24), (25): Xaa is A or G
  MOD_RES (26), (27), (28), (29): Xaa is A or G or is absent
HVTKPTXAPTKLSPISVLYKXXXXXXXXXLKYHYNMVVRSXGX

SEQ ID NO: 8333 - protein, 37 aa, Artificial Sequence
  GFR-binding peptide
  MOD_RES (3), (4), (36): Xaa is C or S
KAXXAPTKLSAISVLYLDSSNNVILKNYQNMVVKAXG

SEQ ID NO: 8334 - protein, 41 aa, Artificial Sequence
  GFR-binding peptide
  MOD_RES (4), (5), (39), (41): Xaa is C or S
  MOD_RES (19), (20), (21), (22), (23): Xaa is A or G
  MOD_RES (24), (25), (26), (27): Xaa is A or G or is absent
PKAXXAPTKLSATSVLYYXXXXXXXXXLRKHRNMVVKAXGX

SEQ ID NO: 8335 - protein, 40 aa, Artificial Sequence
  GFR-binding peptide
  MOD_RES (5), (6), (40): Xaa is C or S
  MOD_RES (20), (21), (22), (23), (24): Xaa is A or G
  MOD_RES (25), (26), (27), (28): Xaa is A or G or is absent
VPKAXXAPTKLSPISVLYKXXXXXXXXXLKYHYNMVVKAX

SEQ ID NO: 8336 - protein, 33 aa, Artificial Sequence
  GFR-binding peptide
  MOD_RES (1), (33): Xaa is C or S
XAPTQLSPISVLYKDDSSNVILKYHYNMVVRAX

SEQ ID NO: 8337 - protein, 38 aa, Artificial Sequence
  GFR-binding peptide
  MOD_RES (2), (3), (36), (38): Xaa is C or S
AXXVPTKLSAISVLYLDDMGVPTLKNYQEGMSVAEXGX

SEQ ID NO: 8338 - protein, 31 aa, Artificial Sequence
  GFR-binding peptide
  MOD_RES (31), (31): Xaa is C or S
VSQDLSATSILYYIGKTPKILRKHRMIVKSX

SEQ ID NO: 8339 - protein, 43 aa, Artificial Sequence
  GFR-binding peptide
  MOD_RES (5), (42): Xaa is C or S
  MOD_RES (21), (22), (23), (24), (25): Xaa is A or G
  MOD_RES (26), (27), (28), (29): Xaa is A or G or is absent
RNVQXRPTQVQLNAISVLYFXXXXXXXXXLKKYRTLEDHLAXK

SEQ ID NO: 8340 - protein, 41 aa, Artificial Sequence
  GFR-binding peptide
  MOD_RES (3), (4), (38), (40): Xaa is C or S
  MOD_RES (18), (19), (20), (21), (22): Xaa is A or G
  MOD_RES (23), (24), (25), (26): Xaa is A or G or is absent
KPXXAPTKLSPISVLYKXXXXXXXXXLKYHYNMVVRSXGXH

SEQ ID NO: 8341 - protein, 37 aa, Artificial Sequence
  GFR-binding peptide
  MOD_RES (3), (35), (37): Xaa is C or S
PTXAPTKLSAISVLYLDDSSNVILKNYQNMVVRSXGX

SEQ ID NO: 8342 - protein, 36 aa, Artificial Sequence
  GFR-binding peptide
  MOD_RES (4), (5), (36): Xaa is C or S
AAPXXVPQALSAISILYLVGRKPKVLKNYQMIVRSX

SEQ ID NO: 8343 - protein, 34 aa, Artificial Sequence
  GFR-binding peptide
  MOD_RES (3), (4): Xaa is C or S
KAXXAPTKLSAISVLYLDSSNNVILKNYQNMVVK

SEQ ID NO: 8344 - protein, 33 aa, Artificial Sequence
  GFR-binding peptide
  MOD_RES (31), (33): Xaa is C or S
VSQDLNAISILYFIGKTPKILKKYRMIVKSXKX

SEQ ID NO: 8345 - protein, 41 aa, Artificial Sequence
  GFR-binding peptide
  MOD_RES (1), (38), (40): Xaa is C or S
  MOD_RES (17), (18), (19), (20), (21): Xaa is A or G
  MOD_RES (22), (23), (24), (25): Xaa is A or G or is absent
XRPTQVQLSATSVLYYXXXXXXXXXLRKHRTLEDHLAXKXE

SEQ ID NO: 8346 - protein, 37 aa, Artificial Sequence
  GFR-binding peptide
  MOD_RES (3), (4), (36): Xaa is C or S
KPXXAPTQLSAISVLYLDDSSNVILKNYQNMVVRAXG

SEQ ID NO: 8347 - protein, 39 aa, Artificial Sequence
  GFR-binding peptide
  MOD_RES (5), (6), (39): Xaa is C or S
  MOD_RES (20), (21), (22), (23), (24): Xaa is A or G
  MOD_RES (25), (26), (27), (28): Xaa is A or G or is absent
SASPXXVPQDLNAISILYFXXXXXXXXXLKKYRMVVKSX

SEQ ID NO: 8348 - protein, 37 aa, Artificial Sequence
  GFR-binding peptide
  MOD_RES (1), (35), (37): Xaa is C or S
  MOD_RES (15), (16), (17), (18), (19): Xaa is A or G
  MOD_RES (20), (21), (22), (23): Xaa is A or G or is absent
XAPTKLSAISVLYLXXXXXXXXXLKNYQNMVVKAXGX

SEQ ID NO: 8349 - protein, 42 aa, Artificial Sequence
  GFR-binding peptide
  MOD_RES (5), (6), (40), (42): Xaa is C or S
  MOD_RES (20), (21), (22), (23), (24): Xaa is A or G
  MOD_RES (25), (26), (27), (28): Xaa is A or G or is absent
IPKAXXVPTELNAISMLYFXXXXXXXXXLKKYRDMVVEGXGX

SEQ ID NO: 8350 - protein, 38 aa, Artificial Sequence
  GFR-binding peptide
  MOD_RES (2), (3), (35), (37): Xaa is C or S
PXXAPTKLSAISVLYLDDSSNVILKNYQNMVVRSXGXH

SEQ ID NO: 8351 - protein, 36 aa, Artificial Sequence
  GFR-binding peptide
  MOD_RES (34), (36): Xaa is C or S
  MOD_RES (14), (15), (16), (17), (18): Xaa is A or G
  MOD_RES (19), (20), (21), (22): Xaa is A or G or is absent
APTKLSATSVLYYXXXXXXXXXLRKHRNMVVKAXGX

SEQ ID NO: 8352 - protein, 35 aa, Artificial Sequence
  GFR-binding peptide
  MOD_RES (3), (4): Xaa is C or S
KPXXAPTKLSPISVLYKDDSSNVILKYHYNMVVRS

SEQ ID NO: 8353 - protein, 38 aa, Artificial Sequence
  GFR-binding peptide
  MOD_RES (6), (6): Xaa is C or S
  MOD_RES (20), (21), (22), (23), (24): Xaa is A or G
  MOD_RES (25), (26), (27), (28): Xaa is A or G or is absent
VTKPTXAPTKLSPISVLYKXXXXXXXXXLKYHYNMVVR

SEQ ID NO: 8354 - protein, 34 aa, Artificial Sequence
  GFR-binding peptide
  MOD_RES (33), (33): Xaa is C or S
VPTKLSAISVLYLDDMGVPTLKNYQEGMSVAEXG

SEQ ID NO: 8355 - protein, 41 aa, Artificial Sequence
  GFR-binding peptide
  MOD_RES (5), (6), (38), (40): Xaa is C or S
VPKAXXAPTKLNAISVLYFDSSNNVILKKYRNMVVKAXGXH

SEQ ID NO: 8356 - protein, 33 aa, Artificial Sequence
  GFR-binding peptide
  MOD_RES (32), (32): Xaa is C or S
VPTELSPISMLYKDENEKVVLKYHYDMVVEGXG

SEQ ID NO: 8357 - protein, 38 aa, Artificial Sequence
  GFR-binding peptide
  MOD_RES (4), (5), (36), (38): Xaa is C or S
ASPXXVPQDLNAISILYFVGRTPKVLKKYRMVVKSXKX

SEQ ID NO: 8358 - protein, 39 aa, Artificial Sequence
  GFR-binding peptide
  MOD_RES (5), (6): Xaa is C or S
  MOD_RES (20), (21), (22), (23), (24): Xaa is A or G
  MOD_RES (25), (26), (27), (28): Xaa is A or G or is absent
VPKPXXAPTQLSATSVLYYXXXXXXXXXLRKHRNMVVRA

SEQ ID NO: 8359 - protein, 39 aa, Artificial Sequence
  GFR-binding peptide
  MOD_RES (4), (5), (38): Xaa is C or S
  MOD_RES (19), (20), (21), (22), (23): Xaa is A or G
  MOD_RES (24), (25), (26), (27): Xaa is A or G or is absent
ASPXXVSQDLNAISILYFXXXXXXXXXLKKYRMIVKSXK

SEQ ID NO: 8360 - protein, 40 aa, Artificial Sequence
  GFR-binding peptide
  MOD_RES (5), (6), (38), (40): Xaa is C or S
IPKAXXVPTELSPISMLYKDEYDKVVLKYHYEMVVEGXGX

SEQ ID NO: 8361 - protein, 38 aa, Artificial Sequence
  GFR-binding peptide
  MOD_RES (4), (5), (38): Xaa is C or S
  MOD_RES (19), (20), (21), (22), (23): Xaa is A or G
  MOD_RES (24), (25), (26), (27): Xaa is A or G or is absent
ASPXXVPQDLSAISILYLXXXXXXXXXLKNYQMVVKSX

SEQ ID NO: 8362 - protein, 36 aa, Artificial Sequence
  GFR-binding peptide
  MOD_RES (3), (4), (36): Xaa is C or S
KPXXAPTKLSATSVLYYDDSSNVILRKHRNMVVRSX

SEQ ID NO: 8363 - protein, 43 aa, Artificial Sequence
  GFR-binding peptide
  MOD_RES (4), (41), (43): Xaa is C or S
NVQXRPTQVQLSAISVLYLEIVRKKPIFLKNYQTLEDHLAXKX

SEQ ID NO: 8364 - protein, 41 aa, Artificial Sequence
  GFR-binding peptide
  MOD_RES (4), (5), (38), (40): Xaa is C or S
  MOD_RES (19), (20), (21), (22), (23): Xaa is A or G
  MOD_RES (24), (25), (26), (27): Xaa is A or G or is absent
ASPXXVSQDLSATSILYYXXXXXXXXXLRKHRMIVKSXKXS

SEQ ID NO: 8365 - protein, 38 aa, Artificial Sequence
  GFR-binding peptide
  MOD_RES (4), (5), (36), (38): Xaa is C or S
ASPXXVSQDLNAISILYFIGKTPKILKKYRMIVKSXKX

SEQ ID NO: 8366 - protein, 37 aa, Artificial Sequence
  GFR-binding peptide
  MOD_RES (4), (5), (36): Xaa is C or S
AAPXXVPQALSATSILYYVGRKPKVLRKHRMIVRSXK

SEQ ID NO: 8367 - protein, 37 aa, Artificial Sequence
  GFR-binding peptide
  MOD_RES (6), (6): Xaa is C or S
VTKPTXAPTKLSPISVLYKDDSSNVILKYHYNMVVRS

SEQ ID NO: 8368 - protein, 35 aa, Artificial Sequence
  GFR-binding peptide
  MOD_RES (2), (3): Xaa is C or S
  MOD_RES (17), (18), (19), (20), (21): Xaa is A or G
  MOD_RES (22), (23), (24), (25): Xaa is A or G or is absent
PXXAPTQLNAISVLYFXXXXXXXXXLKKYRNMVVR

SEQ ID NO: 8369 - protein, 39 aa, Artificial Sequence
  GFR-binding peptide
  MOD_RES (5), (6), (37), (39): Xaa is C or S
SASPXXVPQDLSATSILYYVGRTPKVLRKHRMVVKSXKX

SEQ ID NO: 8370 - protein, 37 aa, Artificial Sequence
  GFR-binding peptide
  MOD_RES (3), (35), (37): Xaa is C or S
PTXAPTKLSPISVLYKDDSSNVILKYHYNMVVRSXGX

SEQ ID NO: 8371 - protein, 31 aa, Artificial Sequence
  GFR-binding peptide
  MOD_RES (31), (31): Xaa is C or S
VPQDLSPISILYKVGRTPKVLKYHYMVVKSX

SEQ ID NO: 8372 - protein, 38 aa, Artificial Sequence
  GFR-binding peptide
  MOD_RES (4), (5), (38): Xaa is C or S
  MOD_RES (19), (20), (21), (22), (23): Xaa is A or G
  MOD_RES (24), (25), (26), (27): Xaa is A or G or is absent
ASPXXVPQDLSATSILYYXXXXXXXXXLRKHRMVVKSX

SEQ ID NO: 8373 - protein, 32 aa, Artificial Sequence
  GFR-binding peptide
  MOD_RES (1), (1): Xaa is C or S
XVPTELSATSMLYYDENEKVVLRKHRDMVVEG

SEQ ID NO: 8374 - protein, 34 aa, Artificial Sequence
  GFR-binding peptide
  MOD_RES (1), (1): Xaa is C or S
  MOD_RES (15), (16), (17), (18), (19): Xaa is A or G
  MOD_RES (20), (21), (22), (23): Xaa is A or G or is absent
XVPTELNAISMLYFXXXXXXXXXLKKYREMVVEG

SEQ ID NO: 8375 - protein, 39 aa, Artificial Sequence
  GFR-binding peptide
  MOD_RES (2), (3), (38): Xaa is C or S
  MOD_RES (17), (18), (19), (20), (21): Xaa is A or G
  MOD_RES (22), (23), (24), (25): Xaa is A or G or is absent
AXXVPTKLNAISVLYFXXXXXXXXXLKKYREGMSVAEXG

SEQ ID NO: 8376 - protein, 38 aa, Artificial Sequence
  GFR-binding peptide
  MOD_RES (1), (38): Xaa is C or S
  MOD_RES (17), (18), (19), (20), (21): Xaa is A or G
  MOD_RES (22), (23), (24), (25): Xaa is A or G or is absent
XRPTQVQLSPISVLYKXXXXXXXXXLKYHYTLEDHLAX

SEQ ID NO: 8377 - protein, 43 aa, Artificial Sequence
  GFR-binding peptide
  MOD_RES (6), (40), (42): Xaa is C or S
  MOD_RES (20), (21), (22), (23), (24): Xaa is A or G
  MOD_RES (25), (26), (27), (28): Xaa is A or G or is absent
VTKPTXAPTKLSPISVLYKXXXXXXXXXLKYHYNMVVRSXGXH

SEQ ID NO: 8378 - protein, 31 aa, Artificial Sequence
  GFR-binding peptide
VPTELNAISMLYFDENEKVVLKKYRDMVVEG

SEQ ID NO: 8379 - protein, 35 aa, Artificial Sequence
  GFR-binding peptide
  MOD_RES (2), (3): Xaa is C or S
  MOD_RES (17), (18), (19), (20), (21): Xaa is A or G
  MOD_RES (22), (23), (24), (25): Xaa is A or G or is absent
AXXVPTELSAISMLYLXXXXXXXXXLKNYQDMVVE

SEQ ID NO: 8380 - protein, 38 aa, Artificial Sequence
  GFR-binding peptide
  MOD_RES (2), (3), (37): Xaa is C or S
  MOD_RES (17), (18), (19), (20), (21): Xaa is A or G
  MOD_RES (22), (23), (24), (25): Xaa is A or G or is absent
AXXAPTKLSPISVLYKXXXXXXXXXLKYHYNMVVKAXG

SEQ ID NO: 8381 - protein, 40 aa, Artificial Sequence
  GFR-binding peptide
  MOD_RES (6), (7): Xaa is C or S
  MOD_RES (21), (22), (23), (24), (25): Xaa is A or G
  MOD_RES (26), (27), (28), (29): Xaa is A or G or is absent
TVPKPXXAPTQLSPISVLYKXXXXXXXXXLKYHYNMVVRA

SEQ ID NO: 8382 - protein, 40 aa, Artificial Sequence
  GFR-binding peptide
  MOD_RES (5), (6), (38), (40): Xaa is C or S
VPKPXXAPTQLSAISVLYLDDSSNVILKNYQNMVVRAXGX

SEQ ID NO: 8383 - protein, 38 aa, Artificial Sequence
  GFR-binding peptide
  MOD_RES (5), (6): Xaa is C or S
  MOD_RES (20), (21), (22), (23), (24): Xaa is A or G
  MOD_RES (25), (26), (27), (28): Xaa is A or G or is absent
SASPXXVPQDLNAISILYFXXXXXXXXXLKKYRMVVKS

SEQ ID NO: 8384 - protein, 39 aa, Artificial Sequence
  GFR-binding peptide
  MOD_RES (5), (6), (37), (39): Xaa is C or S
SASPXXVSQDLSATSILYYIGKTPKILRKHRMIVKSXKX

SEQ ID NO: 8385 - protein, 37 aa, Artificial Sequence
  GFR-binding peptide
  MOD_RES (5), (6): Xaa is C or S
VPKPXXAPTQLSATSVLYYDDSSNVILRKHRNMVVRA

SEQ ID NO: 8386 - protein, 37 aa, Artificial Sequence
  GFR-binding peptide
  MOD_RES (1), (2), (36): Xaa is C or S
  MOD_RES (16), (17), (18), (19), (20): Xaa is A or G
  MOD_RES (21), (22), (23), (24): Xaa is A or G or is absent
XXAPTQLSPISVLYKXXXXXXXXXLKYHYNMVVRAXG

SEQ ID NO: 8387 - protein, 35 aa, Artificial Sequence
  GFR-binding peptide
  MOD_RES (2), (3): Xaa is C or S
  MOD_RES (17), (18), (19), (20), (21): Xaa is A or G
  MOD_RES (22), (23), (24), (25): Xaa is A or G or is absent
AXXAPTKLSATSVLYYXXXXXXXXXLRKHRNMVVK

SEQ ID NO: 8388 - protein, 42 aa, Artificial Sequence
  GFR-binding peptide
  MOD_RES (6), (40), (42): Xaa is C or S
  MOD_RES (20), (21), (22), (23), (24): Xaa is A or G
  MOD_RES (25), (26), (27), (28): Xaa is A or G or is absent
VTKPTXAPTKLNAISVLYFXXXXXXXXXLKKYRNMVVRSXGX

SEQ ID NO: 8389 - protein, 32 aa, Artificial Sequence
  GFR-binding peptide
  MOD_RES (14), (15), (16), (17), (18): Xaa is A or G
  MOD_RES (19), (20), (21), (22): Xaa is A or G or is absent
VPTELSATSMLYYXXXXXXXXXLRKHREMVVE

SEQ ID NO: 8390 - protein, 33 aa, Artificial Sequence
  GFR-binding peptide
  MOD_RES (33), (33): Xaa is C or S
  MOD_RES (14), (15), (16), (17), (18): Xaa is A or G
  MOD_RES (19), (20), (21), (22): Xaa is A or G or is absent
VSQDLSAISILYLXXXXXXXXXLKNYQMIVKSX

SEQ ID NO: 8391 - protein, 38 aa, Artificial Sequence
  GFR-binding peptide
  MOD_RES (4), (4): Xaa is C or S
  MOD_RES (20), (21), (22), (23), (24): Xaa is A or G
  MOD_RES (25), (26), (27), (28): Xaa is A or G or is absent
NVQXRPTQVQLSATSVLYYXXXXXXXXXLRKHRTLEDH

SEQ ID NO: 8392 - protein, 38 aa, Artificial Sequence
  GFR-binding peptide
  MOD_RES (5), (5): Xaa is C or S
  MOD_RES (19), (20), (21), (22), (23): Xaa is A or G
  MOD_RES (24), (25), (26), (27): Xaa is A or G or is absent
TKPTXAPTKLNAISVLYFXXXXXXXXXLKKYRNMVVRS

SEQ ID NO: 8393 - protein, 37 aa, Artificial Sequence
  GFR-binding peptide
  MOD_RES (1), (1): Xaa is C or S
  MOD_RES (17), (18), (19), (20), (21): Xaa is A or G
  MOD_RES (22), (23), (24), (25): Xaa is A or G or is absent
XRPTQVQLSATSVLYYXXXXXXXXXLRKHRTLEDHLA

SEQ ID NO: 8394 - protein, 40 aa, Artificial Sequence
  GFR-binding peptide
  MOD_RES (6), (7), (39): Xaa is C or S
YVPKPXXAPTKLSATSVLYYDDSSNVILRKHRNMVVRSXG

SEQ ID NO: 8395 - protein, 40 aa, Artificial Sequence
  GFR-binding peptide
  MOD_RES (1), (38), (40): Xaa is C or S
XRPTQVQLNAISVLYFEIVRKKPIFLKKYRTLEDHLAXKX

SEQ ID NO: 8396 - protein, 37 aa, Artificial Sequence
  GFR-binding peptide
  MOD_RES (3), (4), (35), (37): Xaa is C or S
APXXVPQALSATSILYYVGRKPKVLRKHRMIVRSXKX

SEQ ID NO: 8397 - protein, 36 aa, Artificial Sequence
  GFR-binding peptide
  MOD_RES (3), (4), (35): Xaa is C or S
SPXXVSQDLNAISILYFIGKTPKILKKYRMIVKSXK

SEQ ID NO: 8398 - protein, 42 aa, Artificial Sequence
  GFR-binding peptide
  MOD_RES (5), (42): Xaa is C or S
RNVQXRPTQVQLSATSVLYYEIVRKKPIFLRKHRTLEDHLAX

SEQ ID NO: 8399 - protein, 36 aa, Artificial Sequence
  GFR-binding peptide
  MOD_RES (35), (35): Xaa is C or S
TQVQLSPISVLYKEIVRKKPIFLKYHYTLEDHLAXK

SEQ ID NO: 8400 - protein, 32 aa, Artificial Sequence
  GFR-binding peptide
  MOD_RES (1), (32): Xaa is C or S
XVPQDLNAISILYFVGRTPKVLKKYRMVVKSX

SEQ ID NO: 8401 - protein, 36 aa, Artificial Sequence
  GFR-binding peptide
  MOD_RES (1), (2), (35): Xaa is C or S
  MOD_RES (16), (17), (18), (19), (20): Xaa is A or G
  MOD_RES (21), (22), (23), (24): Xaa is A or G or is absent
XXVPQDLNAISILYFXXXXXXXXXLKKYRMVVKSXK

SEQ ID NO: 8402 - protein, 38 aa, Artificial Sequence
  GFR-binding peptide
  MOD_RES (1), (2), (36), (38): Xaa is C or S
  MOD_RES (16), (17), (18), (19), (20): Xaa is A or G
  MOD_RES (21), (22), (23), (24): Xaa is A or G or is absent
XXAPTQLSATSVLYYXXXXXXXXXLRKHRNMVVRAXGX

SEQ ID NO: 8403 - protein, 36 aa, Artificial Sequence
  GFR-binding peptide
  MOD_RES (1), (35): Xaa is C or S
  MOD_RES (15), (16), (17), (18), (19): Xaa is A or G
  MOD_RES (20), (21), (22), (23): Xaa is A or G or is absent
XAPTKLSPISVLYKXXXXXXXXXLKYHYNMVVRSXG

SEQ ID NO: 8404 - protein, 36 aa, Artificial Sequence
  GFR-binding peptide
  MOD_RES (1), (2), (36): Xaa is C or S
  MOD_RES (16), (17), (18), (19), (20): Xaa is A or G
  MOD_RES (21), (22), (23), (24): Xaa is A or G or is absent
XXAPTKLNAISVLYFXXXXXXXXXLKKYRNMVVRSX

SEQ ID NO: 8405 - protein, 34 aa, Artificial Sequence
  GFR-binding peptide
  MOD_RES (14), (15), (16), (17), (18): Xaa is A or G
  MOD_RES (19), (20), (21), (22): Xaa is A or G or is absent
TQVQLSPISVLYKXXXXXXXXXLKYHYTLEDHLA

SEQ ID NO: 8406 - protein, 41 aa, Artificial Sequence
  GFR-binding peptide
  MOD_RES (5), (6), (40): Xaa is C or S
  MOD_RES (20), (21), (22), (23), (24): Xaa is A or G
  MOD_RES (25), (26), (27), (28): Xaa is A or G or is absent
VPKAXXAPTKLSPISVLYKXXXXXXXXXLKYHYNMVVKAXG

SEQ ID NO: 8407 - protein, 34 aa, Artificial Sequence
  GFR-binding peptide
  MOD_RES (1), (2): Xaa is C or S
  MOD_RES (16), (17), (18), (19), (20): Xaa is A or G
  MOD_RES (21), (22), (23), (24): Xaa is A or G or is absent
XXVPQALSATSILYYXXXXXXXXXLRKHRMIVRS

SEQ ID NO: 8408 - protein, 36 aa, Artificial Sequence
  GFR-binding peptide
  MOD_RES (2), (3), (36): Xaa is C or S
  MOD_RES (17), (18), (19), (20), (21): Xaa is A or G
  MOD_RES (22), (23), (24), (25): Xaa is A or G or is absent
PXXVPQALSAISILYLXXXXXXXXXLKNYQMIVRSX

SEQ ID NO: 8409 - protein, 33 aa, Artificial Sequence
  GFR-binding peptide
  MOD_RES (1), (1): Xaa is C or S
  MOD_RES (15), (16), (17), (18), (19): Xaa is A or G
  MOD_RES (20), (21), (22), (23): Xaa is A or G or is absent
XAPTKLNAISVLYFXXXXXXXXXLKKYRNMVVR

SEQ ID NO: 8410 - protein, 39 aa, Artificial Sequence
  GFR-binding peptide
  MOD_RES (6), (7), (39): Xaa is C or S
AVPKAXXAPTKLNAISVLYFDSSNNVILKKYRNMVVKAX

SEQ ID NO: 8411 - protein, 34 aa, Artificial Sequence
  GFR-binding peptide
  MOD_RES (1), (2), (33): Xaa is C or S
XXVPQDLNAISILYFVGRTPKVLKKYRMVVKSXK

SEQ ID NO: 8412 - protein, 37 aa, Artificial Sequence
  GFR-binding peptide
  MOD_RES (1), (2), (36): Xaa is C or S
  MOD_RES (16), (17), (18), (19), (20): Xaa is A or G
  MOD_RES (21), (22), (23), (24): Xaa is A or G or is absent
XXAPTQLSAISVLYLXXXXXXXXXLKNYQNMVVRAXG

SEQ ID NO: 8413 - protein, 38 aa, Artificial Sequence
  GFR-binding peptide
  MOD_RES (5), (6), (38): Xaa is C or S
VPKPXXAPTQLSAISVLYLDDSSNVILKNYQNMVVRAX

SEQ ID NO: 8414 - protein, 43 aa, Artificial Sequence
  GFR-binding peptide
  MOD_RES (6), (7), (41), (43): Xaa is C or S
  MOD_RES (21), (22), (23), (24), (25): Xaa is A or G
  MOD_RES (26), (27), (28), (29): Xaa is A or G or is absent
YVPKPXXAPTKLNAISVLYFXXXXXXXXXLKKYRNMVVRSXGX

SEQ ID NO: 8415 - protein, 36 aa, Artificial Sequence
  GFR-binding peptide
  MOD_RES (2), (3), (36): Xaa is C or S
  MOD_RES (17), (18), (19), (20), (21): Xaa is A or G
  MOD_RES (22), (23), (24), (25): Xaa is A or G or is absent
PXXVPQALSATSILYYXXXXXXXXXLRKHRMIVRSX

SEQ ID NO: 8416 - protein, 40 aa, Artificial Sequence
  GFR-binding peptide
  MOD_RES (3), (37), (39): Xaa is C or S
  MOD_RES (17), (18), (19), (20), (21): Xaa is A or G
  MOD_RES (22), (23), (24), (25): Xaa is A or G or is absent
PTXAPTKLSATSVLYYXXXXXXXXXLRKHRNMVVRSXGXH

SEQ ID NO: 8417 - protein, 36 aa, Artificial Sequence
  GFR-binding peptide
  MOD_RES (1), (2), (36): Xaa is C or S
  MOD_RES (16), (17), (18), (19), (20): Xaa is A or G
  MOD_RES (21), (22), (23), (24): Xaa is A or G or is absent
XXVPTELNAISMLYFXXXXXXXXXLKKYREMVVEGX

SEQ ID NO: 8418 - protein, 39 aa, Artificial Sequence
  GFR-binding peptide
  MOD_RES (3), (4), (36), (38): Xaa is C or S
KAXXAPTKLSAISVLYLDSSNNVILKNYQNMVVKAXGXH

SEQ ID NO: 8419 - protein, 35 aa, Artificial Sequence
  GFR-binding peptide
  MOD_RES (1), (2), (33), (35): Xaa is C or S
XXVPQDLSAISILYLVGRTPKVLKNYQMVVKSXKX

SEQ ID NO: 8420 - protein, 38 aa, Artificial Sequence
  GFR-binding peptide
  MOD_RES (3), (4), (35), (37): Xaa is C or S
APXXVPQALNAISILYFVGRKPKVLKKYRMIVRSXKXS

SEQ ID NO: 8421 - protein, 34 aa, Artificial Sequence
  GFR-binding peptide
  MOD_RES (1), (2), (34): Xaa is C or S
XXAPTKLNAISVLYFDSSNNVILKKYRNMVVKAX

SEQ ID NO: 8422 - protein, 35 aa, Artificial Sequence
  GFR-binding peptide
  MOD_RES (34), (34): Xaa is C or S
  MOD_RES (14), (15), (16), (17), (18): Xaa is A or G
  MOD_RES (19), (20), (21), (22): Xaa is A or G or is absent
APTKLSATSVLYYXXXXXXXXXLRKHRNMVVKAXG

SEQ ID NO: 8423 - protein, 36 aa, Artificial Sequence
  GFR-binding peptide
  MOD_RES (35), (35): Xaa is C or S
  MOD_RES (14), (15), (16), (17), (18): Xaa is A or G
  MOD_RES (19), (20), (21), (22): Xaa is A or G or is absent
TQVQLNAISVLYFXXXXXXXXXLKKYRTLEDHLAXK

SEQ ID NO: 8424 - protein, 39 aa, Artificial Sequence
  GFR-binding peptide
  MOD_RES (2), (39): Xaa is C or S
  MOD_RES (18), (19), (20), (21), (22): Xaa is A or G
  MOD_RES (23), (24), (25), (26): Xaa is A or G or is absent
QXRPTQVQLSAISVLYLXXXXXXXXXLKNYQTLEDHLAX

SEQ ID NO: 8425 - protein, 38 aa, Artificial Sequence
  GFR-binding peptide
  MOD_RES (1), (2), (37): Xaa is C or S
  MOD_RES (16), (17), (18), (19), (20): Xaa is A or G
  MOD_RES (21), (22), (23), (24): Xaa is A or G or is absent
XXVPTKLNAISVLYFXXXXXXXXXLKKYREGMSVAEXG

SEQ ID NO: 8426 - protein, 44 aa, Artificial Sequence
  GFR-binding peptide
  MOD_RES (7), (41), (43): Xaa is C or S
  MOD_RES (21), (22), (23), (24), (25): Xaa is A or G
  MOD_RES (26), (27), (28), (29): Xaa is A or G or is absent
HVTKPTXAPTKLSAISVLYLXXXXXXXXXLKNYQNMVVRSXGXH

SEQ ID NO: 8427 - protein, 38 aa, Artificial Sequence
  GFR-binding peptide
  MOD_RES (2), (2): Xaa is C or S
  MOD_RES (18), (19), (20), (21), (22): Xaa is A or G
  MOD_RES (23), (24), (25), (26): Xaa is A or G or is absent
QXRPTQVQLSPISVLYKXXXXXXXXXLKYHYTLEDHLA

SEQ ID NO: 8428 - protein, 36 aa, Artificial Sequence
  GFR-binding peptide
  MOD_RES (1), (2), (34), (36): Xaa is C or S
XXVPTELNAISMLYFDENEKVVLKKYRDMVVEGXGX

SEQ ID NO: 8429 - protein, 41 aa, Artificial Sequence
  GFR-binding peptide
  MOD_RES (4), (5), (39), (41): Xaa is C or S
  MOD_RES (19), (20), (21), (22), (23): Xaa is A or G
  MOD_RES (24), (25), (26), (27): Xaa is A or G or is absent
PKAXXVPTELNAISMLYFXXXXXXXXXLKKYREMVVEGXGX

SEQ ID NO: 8430 - protein, 40 aa, Artificial Sequence
  GFR-binding peptide
  MOD_RES (4), (4): Xaa is C or S
  MOD_RES (20), (21), (22), (23), (24): Xaa is A or G
  MOD_RES (25), (26), (27), (28): Xaa is A or G or is absent
NVQXRPTQVQLSPISVLYKXXXXXXXXXLKYHYTLEDHLA

SEQ ID NO: 8431 - protein, 38 aa, Artificial Sequence
  GFR-binding peptide
  MOD_RES (1), (35), (37): Xaa is C or S
  MOD_RES (15), (16), (17), (18), (19): Xaa is A or G
  MOD_RES (20), (21), (22), (23): Xaa is A or G or is absent
XAPTKLNAISVLYFXXXXXXXXXLKKYRNMVVRSXGXH

SEQ ID NO: 8432 - protein, 37 aa, Artificial Sequence
  GFR-binding peptide
  MOD_RES (5), (6), (37): Xaa is C or S
SAAPXXVPQALNAISILYFVGRKPKVLKKYRMIVRSX

SEQ ID NO: 8433 - protein, 33 aa, Artificial Sequence
  GFR-binding peptide
  MOD_RES (1), (1): Xaa is C or S
  MOD_RES (15), (16), (17), (18), (19): Xaa is A or G
  MOD_RES (20), (21), (22), (23): Xaa is A or G or is absent
XAPTKLNAISVLYFXXXXXXXXXLKKYRNMVVK

SEQ ID NO: 8434 - protein, 34 aa, Artificial Sequence
  GFR-binding peptide
  MOD_RES (1), (2): Xaa is C or S
  MOD_RES (16), (17), (18), (19), (20): Xaa is A or G
  MOD_RES (21), (22), (23), (24): Xaa is A or G or is absent
XXVPTELSATSMLYYXXXXXXXXXLRKHREMVVE

SEQ ID NO: 8435 - protein, 37 aa, Artificial Sequence
  GFR-binding peptide
  MOD_RES (3), (3): Xaa is C or S
VQXRPTQVQLSAISVLYLEIVRKKPIFLKNYQTLEDH

SEQ ID NO: 8436 - protein, 41 aa, Artificial Sequence
  GFR-binding peptide
  MOD_RES (3), (4), (38), (40): Xaa is C or S
  MOD_RES (18), (19), (20), (21), (22): Xaa is A or G
  MOD_RES (23), (24), (25), (26): Xaa is A or G or is absent
KPXXAPTKLSAISVLYLXXXXXXXXXLKNYQNMVVRSXGXH

SEQ ID NO: 8437 - protein, 43 aa, Artificial Sequence
  GFR-binding peptide
  MOD_RES (6), (7), (40), (42): Xaa is C or S
  MOD_RES (21), (22), (23), (24), (25): Xaa is A or G
  MOD_RES (26), (27), (28), (29): Xaa is A or G or is absent
ASASPXXVPQDLSATSILYYXXXXXXXXXLRKHRMVVKSXKXS

SEQ ID NO: 8438 - protein, 37 aa, Artificial Sequence
  GFR-binding peptide
  MOD_RES (3), (3): Xaa is C or S
VQXRPTQVQLSATSVLYYEIVRKKPIFLRKHRTLEDH

SEQ ID NO: 8439 - protein, 39 aa, Artificial Sequence
  GFR-binding peptide
  MOD_RES (4), (5), (37), (39): Xaa is C or S
PKPXXAPTKLSATSVLYYDDSSNVILRKHRNMVVRSXGX

SEQ ID NO: 8440 - protein, 37 aa, Artificial Sequence
  GFR-binding peptide
  MOD_RES (5), (6): Xaa is C or S
VPKPXXAPTKLSAISVLYLDDSSNVILKNYQNMVVRS

SEQ ID NO: 8441 - protein, 33 aa, Artificial Sequence
  GFR-binding peptide
  MOD_RES (33), (33): Xaa is C or S
  MOD_RES (14), (15), (16), (17), (18): Xaa is A or G
  MOD_RES (19), (20), (21), (22): Xaa is A or G or is absent
VSQDLSATSILYYXXXXXXXXXLRKHRMIVKSX

SEQ ID NO: 8442 - protein, 38 aa, Artificial Sequence
  GFR-binding peptide
  MOD_RES (1), (2), (35), (37): Xaa is C or S
  MOD_RES (16), (17), (18), (19), (20): Xaa is A or G
  MOD_RES (21), (22), (23), (24): Xaa is A or G or is absent
XXVSQDLNAISILYFXXXXXXXXXLKKYRMIVKSXKXS

SEQ ID NO: 8443 - protein, 33 aa, Artificial Sequence
  GFR-binding peptide
  MOD_RES (2), (3): Xaa is C or S
AXXVPTELSPISMLYKDENEKVVLKYHYDMVVE

SEQ ID NO: 8444 - protein, 32 aa, Artificial Sequence
  GFR-binding peptide
  MOD_RES (1), (2): Xaa is C or S
XXVPTELNAISMLYFDENEKVVLKKYRDMVVE

SEQ ID NO: 8445 - protein, 35 aa, Artificial Sequence
  GFR-binding peptide
  MOD_RES (33), (35): Xaa is C or S
VPTKLSATSVLYYDDMGVPTLRKHREGMSVAEXGX

SEQ ID NO: 8446 - protein, 34 aa, Artificial Sequence
  GFR-binding peptide
  MOD_RES (1), (1): Xaa is C or S
  MOD_RES (15), (16), (17), (18), (19): Xaa is A or G
  MOD_RES (20), (21), (22), (23): Xaa is A or G or is absent
XAPTQLNAISVLYFXXXXXXXXXLKKYRNMVVRA

SEQ ID NO: 8447 - protein, 41 aa, Artificial Sequence
  GFR-binding peptide
  MOD_RES (5), (6), (40): Xaa is C or S
  MOD_RES (20), (21), (22), (23), (24): Xaa is A or G
  MOD_RES (25), (26), (27), (28): Xaa is A or G or is absent
IPKAXXVPTELSPISMLYKXXXXXXXXXLKYHYEMVVEGXG

SEQ ID NO: 8448 - protein, 40 aa, Artificial Sequence
  GFR-binding peptide
  MOD_RES (1), (38), (40): Xaa is C or S
  MOD_RES (17), (18), (19), (20), (21): Xaa is A or G
  MOD_RES (22), (23), (24), (25): Xaa is A or G or is absent
XRPTQVQLSATSVLYYXXXXXXXXXLRKHRTLEDHLAXKX

SEQ ID NO: 8449 - protein, 37 aa, Artificial Sequence
  GFR-binding peptide
  MOD_RES (37), (37): Xaa is C or S
RPTQVQLNAISVLYFEIVRKKPIFLKKYRTLEDHLAX

SEQ ID NO: 8450 - protein, 41 aa, Artificial Sequence
  GFR-binding peptide
  MOD_RES (5), (6), (39), (41): Xaa is C or S
  MOD_RES (20), (21), (22), (23), (24): Xaa is A or G
  MOD_RES (25), (26), (27), (28): Xaa is A or G or is absent
SASPXXVSQDLSATSILYYXXXXXXXXXLRKHRMIVKSXKX

SEQ ID NO: 8451 - protein, 40 aa, Artificial Sequence
  GFR-binding peptide
  MOD_RES (6), (7), (38), (40): Xaa is C or S
ASASPXXVPQDLSPISILYKVGRTPKVLKYHYMVVKSXKX

SEQ ID NO: 8452 - protein, 41 aa, Artificial Sequence
  GFR-binding peptide
  MOD_RES (1), (38), (40): Xaa is C or S
XRPTQVQLNAISVLYFEIVRKKPIFLKKYRTLEDHLAXKXE

SEQ ID NO: 8453 - protein, 37 aa, Artificial Sequence
  GFR-binding peptide
  MOD_RES (1), (2), (36): Xaa is C or S
  MOD_RES (16), (17), (18), (19), (20): Xaa is A or G
  MOD_RES (21), (22), (23), (24): Xaa is A or G or is absent
XXVPTELSATSMLYYXXXXXXXXXLRKHRDMVVEGXG

SEQ ID NO: 8454 - protein, 33 aa, Artificial Sequence
  GFR-binding peptide
  MOD_RES (14), (15), (16), (17), (18): Xaa is A or G
  MOD_RES (19), (20), (21), (22): Xaa is A or G or is absent
TQVQLSAISVLYLXXXXXXXXXLKNYQTLEDHL

SEQ ID NO: 8455 - protein, 39 aa, Artificial Sequence
  GFR-binding peptide
  MOD_RES (4), (5), (39): Xaa is C or S
  MOD_RES (19), (20), (21), (22), (23): Xaa is A or G
  MOD_RES (24), (25), (26), (27): Xaa is A or G or is absent
PKAXXVPTELSATSMLYYXXXXXXXXXLRKHRDMVVEGX

SEQ ID NO: 8456 - protein, 34 aa, Artificial Sequence
  GFR-binding peptide
  MOD_RES (1), (2): Xaa is C or S
  MOD_RES (16), (17), (18), (19), (20): Xaa is A or G
  MOD_RES (21), (22), (23), (24): Xaa is A or G or is absent
XXVPTELSPISMLYKXXXXXXXXXLKYHYDMVVE

SEQ ID NO: 8457 - protein, 39 aa, Artificial Sequence
  GFR-binding peptide
  MOD_RES (2), (3), (37), (39): Xaa is C or S
  MOD_RES (17), (18), (19), (20), (21): Xaa is A or G
  MOD_RES (22), (23), (24), (25): Xaa is A or G or is absent
AXXVPTELNAISMLYFXXXXXXXXXLKKYRDMVVEGXGX

SEQ ID NO: 8458 - protein, 37 aa, Artificial Sequence
  GFR-binding peptide
  MOD_RES (6), (7): Xaa is C or S
ASASPXXVPQDLNAISILYFVGRTPKVLKKYRMVVKS

SEQ ID NO: 8459 - protein, 33 aa, Artificial Sequence
  GFR-binding peptide
  MOD_RES (1), (1): Xaa is C or S
  MOD_RES (15), (16), (17), (18), (19): Xaa is A or G
  MOD_RES (20), (21), (22), (23): Xaa is A or G or is absent
XAPTQLSATSVLYYXXXXXXXXXLRKHRNMVVR

SEQ ID NO: 8460 - protein, 33 aa, Artificial Sequence
  GFR-binding peptide
  MOD_RES (2), (3): Xaa is C or S
PXXVSQDLNAISILYFIGKTPKILKKYRMIVKS

SEQ ID NO: 8461 - protein, 36 aa, Artificial Sequence
  GFR-binding peptide
  MOD_RES (33), (35): Xaa is C or S
  MOD_RES (14), (15), (16), (17), (18): Xaa is A or G
  MOD_RES (19), (20), (21), (22): Xaa is A or G or is absent
VSQDLSPISILYKXXXXXXXXXLKYHYMIVKSXKXS

SEQ ID NO: 8462 - protein, 37 aa, Artificial Sequence
  GFR-binding peptide
  MOD_RES (2), (3), (35), (37): Xaa is C or S
AXXVPTELNAISMLYFDEYDKVVLKKYREMVVEGXGX

SEQ ID NO: 8463 - protein, 38 aa, Artificial Sequence
  GFR-binding peptide
  MOD_RES (37), (37): Xaa is C or S
  MOD_RES (16), (17), (18), (19), (20): Xaa is A or G
  MOD_RES (21), (22), (23), (24): Xaa is A or G or is absent
RPTQVQLNAISVLYFXXXXXXXXXLKKYRTLEDHLAXK

SEQ ID NO: 8464 - protein, 34 aa, Artificial Sequence
  GFR-binding peptide
  MOD_RES (3), (4): Xaa is C or S
KAXXVPTELNAISMLYFDENEKVVLKKYRDMVVE

SEQ ID NO: 8465 - protein, 37 aa, Artificial Sequence
  GFR-binding peptide
  MOD_RES (1), (35), (37): Xaa is C or S
  MOD_RES (15), (16), (17), (18), (19): Xaa is A or G
  MOD_RES (20), (21), (22), (23): Xaa is A or G or is absent
XAPTKLSPISVLYKXXXXXXXXXLKYHYNMVVRSXGX

SEQ ID NO: 8466 - protein, 38 aa, Artificial Sequence
  GFR-binding peptide
  MOD_RES (3), (4), (36), (38): Xaa is C or S
KPXXAPTQLSATSVLYYDDSSNVILRKHRNMVVRAXGX

SEQ ID NO: 8467 - protein, 37 aa, Artificial Sequence
  GFR-binding peptide
  MOD_RES (3), (4): Xaa is C or S
  MOD_RES (18), (19), (20), (21), (22): Xaa is A or G
  MOD_RES (23), (24), (25), (26): Xaa is A or G or is absent
KAXXAPTKLSPISVLYKXXXXXXXXXLKYHYNMVVKA

SEQ ID NO: 8468 - protein, 39 aa, Artificial Sequence
  GFR-binding peptide
  MOD_RES (5), (5): Xaa is C or S
RNVQXRPTQVQLSAISVLYLEIVRKKPIFLKNYQTLEDH

SEQ ID NO: 8469 - protein, 35 aa, Artificial Sequence
  GFR-binding peptide
  MOD_RES (1), (1): Xaa is C or S
XRPTQVQLSATSVLYYEIVRKKPIFLRKHRTLEDH

SEQ ID NO: 8470 - protein, 38 aa, Artificial Sequence
  GFR-binding peptide
  MOD_RES (6), (7): Xaa is C or S
YVPKPXXAPTKLSPISVLYKDDSSNVILKYHYNMVVRS

SEQ ID NO: 8471 - protein, 39 aa, Artificial Sequence
  GFR-binding peptide
  MOD_RES (4), (38): Xaa is C or S
  MOD_RES (18), (19), (20), (21), (22): Xaa is A or G
  MOD_RES (23), (24), (25), (26): Xaa is A or G or is absent
KPTXAPTKLSPISVLYKXXXXXXXXXLKYHYNMVVRSXG

SEQ ID NO: 8472 - protein, 39 aa, Artificial Sequence
  GFR-binding peptide
  MOD_RES (5), (6): Xaa is C or S
  MOD_RES (20), (21), (22), (23), (24): Xaa is A or G
  MOD_RES (25), (26), (27), (28): Xaa is A or G or is absent
IPKAXXVPTELSATSMLYYXXXXXXXXXLRKHREMVVEG

SEQ ID NO: 8473 - protein, 33 aa, Artificial Sequence
  GFR-binding peptide
  MOD_RES (31), (33): Xaa is C or S
VSQDLSAISILYLIGKTPKILKNYQMIVKSXKX

SEQ ID NO: 8474 - protein, 40 aa, Artificial Sequence
  GFR-binding peptide
  MOD_RES (3), (4), (38), (40): Xaa is C or S
  MOD_RES (18), (19), (20), (21), (22): Xaa is A or G
  MOD_RES (23), (24), (25), (26): Xaa is A or G or is absent
KPXXAPTQLSAISVLYLXXXXXXXXXLKNYQNMVVRAXGX

SEQ ID NO: 8475 - protein, 37 aa, Artificial Sequence
  GFR-binding peptide
  MOD_RES (3), (4): Xaa is C or S
  MOD_RES (18), (19), (20), (21), (22): Xaa is A or G
  MOD_RES (23), (24), (25), (26): Xaa is A or G or is absent
KAXXVPTELSPISMLYKXXXXXXXXXLKYHYEMVVEG

SEQ ID NO: 8476 - protein, 39 aa, Artificial Sequence
  GFR-binding peptide
  MOD_RES (5), (6), (37), (39): Xaa is C or S
SAAPXXVPQALSAISILYLVGRKPKVLKNYQMIVRSXKX

SEQ ID NO: 8477 - protein, 37 aa, Artificial Sequence
  GFR-binding peptide
  MOD_RES (37), (37): Xaa is C or S
  MOD_RES (16), (17), (18), (19), (20): Xaa is A or G
  MOD_RES (21), (22), (23), (24): Xaa is A or G or is absent
RPTQVQLSATSVLYYXXXXXXXXXLRKHRTLEDHLAX

SEQ ID NO: 8478 - protein, 33 aa, Artificial Sequence
  GFR-binding peptide
  MOD_RES (31), (33): Xaa is C or S
VSQDLSPISILYKIGKTPKILKYHYMIVKSXKX

SEQ ID NO: 8479 - protein, 41 aa, Artificial Sequence
  GFR-binding peptide
  MOD_RES (6), (7), (39), (41): Xaa is C or S
YVPKPXXAPTKLSATSVLYYDDSSNVILRKHRNMVVRSXGX

SEQ ID NO: 8480 - protein, 40 aa, Artificial Sequence
  GFR-binding peptide
  MOD_RES (5), (6), (37), (39): Xaa is C or S
SAAPXXVPQALNAISILYFVGRKPKVLKKYRMIVRSXKXS

SEQ ID NO: 8481 - protein, 41 aa, Artificial Sequence
  GFR-binding peptide
  MOD_RES (5), (6), (39), (41): Xaa is C or S
  MOD_RES (20), (21), (22), (23), (24): Xaa is A or G
  MOD_RES (25), (26), (27), (28): Xaa is A or G or is absent
SAAPXXVPQALSATSILYYXXXXXXXXXLRKHRMIVRSXKX

SEQ ID NO: 8482 - protein, 35 aa, Artificial Sequence
  GFR-binding peptide
  MOD_RES (4), (4): Xaa is C or S
KPTXAPTKLSPISVLYKDDSSNVILKYHYNMVVRS

SEQ ID NO: 8483 - protein, 36 aa, Artificial Sequence
  GFR-binding peptide
  MOD_RES (33), (35): Xaa is C or S
VPTKLSATSVLYYDDMGVPTLRKHREGMSVAEXGXR

SEQ ID NO: 8484 - protein, 42 aa, Artificial Sequence
  GFR-binding peptide
  MOD_RES (2), (39), (41): Xaa is C or S
  MOD_RES (18), (19), (20), (21), (22): Xaa is A or G
  MOD_RES (23), (24), (25), (26): Xaa is A or G or is absent
QXRPTQVQLSATSVLYYXXXXXXXXXLRKHRTLEDHLAXKXE

SEQ ID NO: 8485 - protein, 41 aa, Artificial Sequence
  GFR-binding peptide
  MOD_RES (3), (4), (38), (40): Xaa is C or S
  MOD_RES (18), (19), (20), (21), (22): Xaa is A or G
  MOD_RES (23), (24), (25), (26): Xaa is A or G or is absent
KAXXVPTELSATSMLYYXXXXXXXXXLRKHRDMVVEGXGXR

SEQ ID NO: 8486 - protein, 38 aa, Artificial Sequence
  GFR-binding peptide
  MOD_RES (5), (6), (38): Xaa is C or S
VPKPXXAPTQLSATSVLYYDDSSNVILRKHRNMVVRAX

SEQ ID NO: 8487 - protein, 37 aa, Artificial Sequence
  GFR-binding peptide
  MOD_RES (1), (2), (37): Xaa is C or S
  MOD_RES (16), (17), (18), (19), (20): Xaa is A or G
  MOD_RES (21), (22), (23), (24): Xaa is A or G or is absent
XXVPTKLSATSVLYYXXXXXXXXXLRKHREGMSVAEX

SEQ ID NO: 8488 - protein, 30 aa, Artificial Sequence
  GFR-binding peptide
VPQDLSATSILYYVGRTPKVLRKHRMVVKS

SEQ ID NO: 8489 - protein, 36 aa, Artificial Sequence
  GFR-binding peptide
  MOD_RES (3), (3): Xaa is C or S
  MOD_RES (17), (18), (19), (20), (21): Xaa is A or G
  MOD_RES (22), (23), (24), (25): Xaa is A or G or is absent
PTXAPTKLSPISVLYKXXXXXXXXXLKYHYNMVVRS

SEQ ID NO: 8490 - protein, 35 aa, Artificial Sequence
  GFR-binding peptide
  MOD_RES (1), (35): Xaa is C or S
  MOD_RES (15), (16), (17), (18), (19): Xaa is A or G
  MOD_RES (20), (21), (22), (23): Xaa is A or G or is absent
XVPTELNAISMLYFXXXXXXXXXLKKYREMVVEGX

SEQ ID NO: 8491 - protein, 35 aa, Artificial Sequence
  GFR-binding peptide
  MOD_RES (1), (2), (35): Xaa is C or S
  MOD_RES (16), (17), (18), (19), (20): Xaa is A or G
  MOD_RES (21), (22), (23), (24): Xaa is A or G or is absent
XXVPQALSPISILYKXXXXXXXXXLKYHYMIVRSX

SEQ ID NO: 8492 - protein, 36 aa, Artificial Sequence
  GFR-binding peptide
  MOD_RES (5), (6): Xaa is C or S
SASPXXVSQDLSATSILYYIGKTPKILRKHRMIVKS

SEQ ID NO: 8493 - protein, 42 aa, Artificial Sequence
  GFR-binding peptide
  MOD_RES (6), (7), (39), (41): Xaa is C or S
KIPKAXXVPTELSPISMLYKDENEKVVLKYHYDMVVEGXGXR

SEQ ID NO: 8494 - protein, 39 aa, Artificial Sequence
  GFR-binding peptide
  MOD_RES (4), (4): Xaa is C or S
  MOD_RES (20), (21), (22), (23), (24): Xaa is A or G
  MOD_RES (25), (26), (27), (28): Xaa is A or G or is absent
NVQXRPTQVQLSPISVLYKXXXXXXXXXLKYHYTLEDHL

SEQ ID NO: 8495 - protein, 38 aa, Artificial Sequence
  GFR-binding peptide
  MOD_RES (5), (6), (37): Xaa is C or S
SAAPXXVPQALSATSILYYVGRKPKVLRKHRMIVRSXK

SEQ ID NO: 8496 - protein, 38 aa, Artificial Sequence
  GFR-binding peptide
  MOD_RES (1), (35), (37): Xaa is C or S
  MOD_RES (15), (16), (17), (18), (19): Xaa is A or G
  MOD_RES (20), (21), (22), (23): Xaa is A or G or is absent
XVPTELSAISMLYLXXXXXXXXXLKNYQEMVVEGXGXR

SEQ ID NO: 8497 - protein, 38 aa, Artificial Sequence
  GFR-binding peptide
  MOD_RES (5), (6), (37): Xaa is C or S
SAAPXXVPQALSAISILYLVGRKPKVLKNYQMIVRSXK

SEQ ID NO: 8498 - protein, 35 aa, Artificial Sequence
  GFR-binding peptide
  MOD_RES (5), (5): Xaa is C or S
TKPTXAPTKLSATSVLYYDDSSNVILRKHRNMVVR

SEQ ID NO: 8499 - protein, 39 aa, Artificial Sequence
  GFR-binding peptide
  MOD_RES (6), (6): Xaa is C or S
  MOD_RES (20), (21), (22), (23), (24): Xaa is A or G
  MOD_RES (25), (26), (27), (28): Xaa is A or G or is absent
VTKPTXAPTKLNAISVLYFXXXXXXXXXLKKYRNMVVRS

SEQ ID NO: 8500 - protein, 36 aa, Artificial Sequence
  GFR-binding peptide
  MOD_RES (5), (6): Xaa is C or S
SAAPXXVPQALSAISILYLVGRKPKVLKNYQMIVRS

SEQ ID NO: 8501 - protein, 33 aa, Artificial Sequence
  GFR-binding peptide
  MOD_RES (1), (1): Xaa is C or S
  MOD_RES (15), (16), (17), (18), (19): Xaa is A or G
  MOD_RES (20), (21), (22), (23): Xaa is A or G or is absent
XAPTQLSPISVLYKXXXXXXXXXLKYHYNMVVR

SEQ ID NO: 8502 - protein, 40 aa, Artificial Sequence
  GFR-binding peptide
  MOD_RES (37), (39): Xaa is C or S
  MOD_RES (16), (17), (18), (19), (20): Xaa is A or G
  MOD_RES (21), (22), (23), (24): Xaa is A or G or is absent
RPTQVQLSPISVLYKXXXXXXXXXLKYHYTLEDHLAXKXE

SEQ ID NO: 8503 - protein, 33 aa, Artificial Sequence
  GFR-binding peptide
  MOD_RES (31), (33): Xaa is C or S
VPQALSPISILYKVGRKPKVLKYHYMIVRSXKX

SEQ ID NO: 8504 - protein, 37 aa, Artificial Sequence
  GFR-binding peptide
  MOD_RES (1), (2), (35), (37): Xaa is C or S
  MOD_RES (16), (17), (18), (19), (20): Xaa is A or G
  MOD_RES (21), (22), (23), (24): Xaa is A or G or is absent
XXVPQDLSATSILYYXXXXXXXXXLRKHRMVVKSXKX

SEQ ID NO: 8505 - protein, 34 aa, Artificial Sequence
  GFR-binding peptide
  MOD_RES (3), (4): Xaa is C or S
KPXXAPTQLSAISVLYLDDSSNVILKNYQNMVVR

SEQ ID NO: 8506 - protein, 40 aa, Artificial Sequence
  GFR-binding peptide
  MOD_RES (1), (2), (37), (39): Xaa is C or S
  MOD_RES (16), (17), (18), (19), (20): Xaa is A or G
  MOD_RES (21), (22), (23), (24): Xaa is A or G or is absent
XXVPTKLSPISVLYKXXXXXXXXXLKYHYEGMSVAEXGXR

SEQ ID NO: 8507 - protein, 39 aa, Artificial Sequence
  GFR-binding peptide
  MOD_RES (2), (3), (37), (39): Xaa is C or S
  MOD_RES (17), (18), (19), (20), (21): Xaa is A or G
  MOD_RES (22), (23), (24), (25): Xaa is A or G or is absent
PXXAPTKLSPISVLYKXXXXXXXXXLKYHYNMVVRSXGX

SEQ ID NO: 8508 - protein, 41 aa, Artificial Sequence
  GFR-binding peptide
  MOD_RES (5), (6), (39), (41): Xaa is C or S
  MOD_RES (20), (21), (22), (23), (24): Xaa is A or G
  MOD_RES (25), (26), (27), (28): Xaa is A or G or is absent
SASPXXVPQDLSPISILYKXXXXXXXXXLKYHYMVVKSXKX

SEQ ID NO: 8509 - protein, 35 aa, Artificial Sequence
  GFR-binding peptide
  MOD_RES (1), (1): Xaa is C or S
XRPTQVQLSAISVLYLEIVRKKPIFLKNYQTLEDH

SEQ ID NO: 8510 - protein, 41 aa, Artificial Sequence
  GFR-binding peptide
  MOD_RES (5), (6), (40): Xaa is C or S
  MOD_RES (20), (21), (22), (23), (24): Xaa is A or G
  MOD_RES (25), (26), (27), (28): Xaa is A or G or is absent
VPKPXXAPTQLSPISVLYKXXXXXXXXXLKYHYNMVVRAXG

SEQ ID NO: 8511 - protein, 39 aa, Artificial Sequence
  GFR-binding peptide
  MOD_RES (4), (5), (36), (38): Xaa is C or S
ASPXXVSQDLSPISILYKIGKTPKILKYHYMIVKSXKXS

SEQ ID NO: 8512 - protein, 33 aa, Artificial Sequence
  GFR-binding peptide
  MOD_RES (31), (33): Xaa is C or S
VPQALSATSILYYVGRKPKVLRKHRMIVRSXKX

SEQ ID NO: 8513 - protein, 37 aa, Artificial Sequence
  GFR-binding peptide
  MOD_RES (2), (3), (35), (37): Xaa is C or S
AXXAPTKLNAISVLYFDSSNNVILKKYRNMVVKAXGX

SEQ ID NO: 8514 - protein, 32 aa, Artificial Sequence
  GFR-binding peptide
  MOD_RES (32), (32): Xaa is C or S
APTQLSATSVLYYDDSSNVILRKHRNMVVRAX

SEQ ID NO: 8515 - protein, 40 aa, Artificial Sequence
  GFR-binding peptide
  MOD_RES (3), (4), (39): Xaa is C or S
  MOD_RES (18), (19), (20), (21), (22): Xaa is A or G
  MOD_RES (23), (24), (25), (26): Xaa is A or G or is absent
KAXXVPTKLSATSVLYYXXXXXXXXXLRKHREGMSVAEXG

SEQ ID NO: 8516 - protein, 33 aa, Artificial Sequence
  GFR-binding peptide
  MOD_RES (14), (15), (16), (17), (18): Xaa is A or G
  MOD_RES (19), (20), (21), (22): Xaa is A or G or is absent
VPTELSPISMLYKXXXXXXXXXLKYHYEMVVEG

SEQ ID NO: 8517 - protein, 36 aa, Artificial Sequence
  GFR-binding peptide
  MOD_RES (3), (4): Xaa is C or S
  MOD_RES (18), (19), (20), (21), (22): Xaa is A or G
  MOD_RES (23), (24), (25), (26): Xaa is A or G or is absent
SPXXVSQDLSAISILYLXXXXXXXXXLKNYQMIVKS

SEQ ID NO: 8518 - protein, 37 aa, Artificial Sequence
  GFR-binding peptide
  MOD_RES (4), (5): Xaa is C or S
  MOD_RES (19), (20), (21), (22), (23): Xaa is A or G
  MOD_RES (24), (25), (26), (27): Xaa is A or G or is absent
PKPXXAPTQLSAISVLYLXXXXXXXXXLKNYQNMVVR

SEQ ID NO: 8519 - protein, 31 aa, Artificial Sequence
  GFR-binding peptide
  MOD_RES (1), (1): Xaa is C or S
XVPQDLSATSILYYVGRTPKVLRKHRMVVKS

SEQ ID NO: 8520 - protein, 40 aa, Artificial Sequence
  GFR-binding peptide
  MOD_RES (3), (37), (39): Xaa is C or S
  MOD_RES (17), (18), (19), (20), (21): Xaa is A or G
  MOD_RES (22), (23), (24), (25): Xaa is A or G or is absent
PTXAPTKLSPISVLYKXXXXXXXXXLKYHYNMVVRSXGXH

SEQ ID NO: 8521 - protein, 37 aa, Artificial Sequence
  GFR-binding peptide
  MOD_RES (4), (5), (37): Xaa is C or S
PKAXXAPTKLSPISVLYKDSSNNVILKYHYNMVVKAX

SEQ ID NO: 8522 - protein, 36 aa, Artificial Sequence
  GFR-binding peptide
  MOD_RES (3), (4): Xaa is C or S
  MOD_RES (18), (19), (20), (21), (22): Xaa is A or G
  MOD_RES (23), (24), (25), (26): Xaa is A or G or is absent
KPXXAPTKLSATSVLYYXXXXXXXXXLRKHRNMVVR

SEQ ID NO: 8523 - protein, 40 aa, Artificial Sequence
  GFR-binding peptide
  MOD_RES (4), (5), (40): Xaa is C or S
  MOD_RES (19), (20), (21), (22), (23): Xaa is A or G
  MOD_RES (24), (25), (26), (27): Xaa is A or G or is absent
GKAXXVPTKLNAISVLYFXXXXXXXXXLKKYREGMSVAEX

SEQ ID NO: 8524 - protein, 37 aa, Artificial Sequence
  GFR-binding peptide
  MOD_RES (5), (6): Xaa is C or S
IPKAXXVPTELNAISMLYFDENEKVVLKKYRDMVVEG

SEQ ID NO: 8525 - protein, 39 aa, Artificial Sequence
  GFR-binding peptide
  MOD_RES (4), (5), (38): Xaa is C or S
GKAXXVPTKLNAISVLYFDDMGVPTLKKYREGMSVAEXG

SEQ ID NO: 8526 - protein, 33 aa, Artificial Sequence
  GFR-binding peptide
  MOD_RES (1), (2), (33): Xaa is C or S
XXVSQDLNAISILYFIGKTPKILKKYRMIVKSX

SEQ ID NO: 8527 - protein, 37 aa, Artificial Sequence
  GFR-binding peptide
  MOD_RES (6), (7): Xaa is C or S
KIPKAXXVPTELSPISMLYKDENEKVVLKYHYDMVVE

SEQ ID NO: 8528 - protein, 39 aa, Artificial Sequence
  GFR-binding peptide
  MOD_RES (4), (5): Xaa is C or S
  MOD_RES (19), (20), (21), (22), (23): Xaa is A or G
  MOD_RES (24), (25), (26), (27): Xaa is A or G or is absent
GKAXXVPTKLSATSVLYYXXXXXXXXXLRKHREGMSVAE

SEQ ID NO: 8529 - protein, 33 aa, Artificial Sequence
  GFR-binding peptide
  MOD_RES (1), (32): Xaa is C or S
XVPQALSAISILYLVGRKPKVLKNYQMIVRSXK

SEQ ID NO: 8530 - protein, 40 aa, Artificial Sequence
  GFR-binding peptide
  MOD_RES (1), (38), (40): Xaa is C or S
  MOD_RES (17), (18), (19), (20), (21): Xaa is A or G
  MOD_RES (22), (23), (24), (25): Xaa is A or G or is absent
XRPTQVQLSPISVLYKXXXXXXXXXLKYHYTLEDHLAXKX

SEQ ID NO: 8531 - protein, 39 aa, Artificial Sequence
  GFR-binding peptide
  MOD_RES (2), (3), (36), (38): Xaa is C or S
  MOD_RES (17), (18), (19), (20), (21): Xaa is A or G
  MOD_RES (22), (23), (24), (25): Xaa is A or G or is absent
PXXVPQALSATSILYYXXXXXXXXXLRKHRMIVRSXKXS

SEQ ID NO: 8532 - protein, 35 aa, Artificial Sequence
  GFR-binding peptide
  MOD_RES (1), (2), (33), (35): Xaa is C or S
XXVPQDLSPISILYKVGRTPKVLKYHYMVVKSXKX

SEQ ID NO: 8533 - protein, 41 aa, Artificial Sequence
  GFR-binding peptide
  MOD_RES (5), (6), (38), (40): Xaa is C or S
VPKAXXAPTKLSAISVLYLDSSNNVILKNYQNMVVKAXGXH

SEQ ID NO: 8534 - protein, 38 aa, Artificial Sequence
  GFR-binding peptide
  MOD_RES (1), (2), (35), (37): Xaa is C or S
  MOD_RES (16), (17), (18), (19), (20): Xaa is A or G
  MOD_RES (21), (22), (23), (24): Xaa is A or G or is absent
XXVPQDLNAISILYFXXXXXXXXXLKKYRMVVKSXKXS

SEQ ID NO: 8535 - protein, 39 aa, Artificial Sequence
  GFR-binding peptide
  MOD_RES (6), (7), (39): Xaa is C or S
TVPKPXXAPTQLSAISVLYLDDSSNVILKNYQNMVVRAX

SEQ ID NO: 8536 - protein, 36 aa, Artificial Sequence
  GFR-binding peptide
  MOD_RES (5), (6): Xaa is C or S
SASPXXVPQDLSAISILYLVGRTPKVLKNYQMVVKS

SEQ ID NO: 8537 - protein, 36 aa, Artificial Sequence
  GFR-binding peptide
  MOD_RES (2), (2): Xaa is C or S
  MOD_RES (18), (19), (20), (21), (22): Xaa is A or G
  MOD_RES (23), (24), (25), (26): Xaa is A or G or is absent
QXRPTQVQLSPISVLYKXXXXXXXXXLKYHYTLEDH

SEQ ID NO: 8538 - protein, 37 aa, Artificial Sequence
  GFR-binding peptide
  MOD_RES (6), (7): Xaa is C or S
ASAAPXXVPQALSAISILYLVGRKPKVLKNYQMIVRS

SEQ ID NO: 8539 - protein, 36 aa, Artificial Sequence
  GFR-binding peptide
  MOD_RES (4), (5), (36): Xaa is C or S
AAPXXVPQALSATSILYYVGRKPKVLRKHRMIVRSX

SEQ ID NO: 8540 - protein, 41 aa, Artificial Sequence
  GFR-binding peptide
  MOD_RES (1), (38), (40): Xaa is C or S
  MOD_RES (17), (18), (19), (20), (21): Xaa is A or G
  MOD_RES (22), (23), (24), (25): Xaa is A or G or is absent
XRPTQVQLNAISVLYFXXXXXXXXXLKKYRTLEDHLAXKXE

SEQ ID NO: 8541 - protein, 37 aa, Artificial Sequence
  GFR-binding peptide
  MOD_RES (4), (5): Xaa is C or S
  MOD_RES (19), (20), (21), (22), (23): Xaa is A or G
  MOD_RES (24), (25), (26), (27): Xaa is A or G or is absent
AAPXXVPQALSAISILYLXXXXXXXXXLKNYQMIVRS

SEQ ID NO: 8542 - protein, 38 aa, Artificial Sequence
  GFR-binding peptide
  MOD_RES (2), (3), (35), (37): Xaa is C or S
AXXVPTELSPISMLYKDEYDKVVLKYHYEMVVEGXGXR

SEQ ID NO: 8543 - protein, 43 aa, Artificial Sequence
  GFR-binding peptide
  MOD_RES (3), (40), (42): Xaa is C or S
VQXRPTQVQLSATSVLYYEIVRKKPIFLRKHRTLEDHLAXKXE

SEQ ID NO: 8544 - protein, 36 aa, Artificial Sequence
  GFR-binding peptide
  MOD_RES (3), (4): Xaa is C or S
  MOD_RES (18), (19), (20), (21), (22): Xaa is A or G
  MOD_RES (23), (24), (25), (26): Xaa is A or G or is absent
KAXXAPTKLSPISVLYKXXXXXXXXXLKYHYNMVVK

SEQ ID NO: 8545 - protein, 37 aa, Artificial Sequence
  GFR-binding peptide
  MOD_RES (2), (3), (37): Xaa is C or S
  MOD_RES (17), (18), (19), (20), (21): Xaa is A or G
  MOD_RES (22), (23), (24), (25): Xaa is A or G or is absent
AXXAPTKLSAISVLYLXXXXXXXXXLKNYQNMVVKAX

SEQ ID NO: 8546 - protein, 39 aa, Artificial Sequence
  GFR-binding peptide
  MOD_RES (4), (5), (36), (38): Xaa is C or S
ASPXXVPQDLSAISILYLVGRTPKVLKNYQMVVKSXKXS

SEQ ID NO: 8547 - protein, 41 aa, Artificial Sequence
  GFR-binding peptide
  MOD_RES (1), (38), (40): Xaa is C or S
  MOD_RES (17), (18), (19), (20), (21): Xaa is A or G
  MOD_RES (22), (23), (24), (25): Xaa is A or G or is absent
XRPTQVQLSPISVLYKXXXXXXXXXLKYHYTLEDHLAXKXE

SEQ ID NO: 8548 - protein, 44 aa, Artificial Sequence
  GFR-binding peptide
  MOD_RES (4), (41), (43): Xaa is C or S
  MOD_RES (20), (21), (22), (23), (24): Xaa is A or G
  MOD_RES (25), (26), (27), (28): Xaa is A or G or is absent
NVQXRPTQVQLNAISVLYFXXXXXXXXXLKKYRTLEDHLAXKXE

SEQ ID NO: 8549 - protein, 32 aa, Artificial Sequence
  GFR-binding peptide
  MOD_RES (1), (1): Xaa is C or S
XVPTELNAISMLYFDENEKVVLKKYRDMVVEG

SEQ ID NO: 8550 - protein, 39 aa, Artificial Sequence
  GFR-binding peptide
  MOD_RES (4), (5): Xaa is C or S
  MOD_RES (19), (20), (21), (22), (23): Xaa is A or G
  MOD_RES (24), (25), (26), (27): Xaa is A or G or is absent
GKAXXVPTKLSAISVLYLXXXXXXXXXLKNYQEGMSVAE

SEQ ID NO: 8551 - protein, 37 aa, Artificial Sequence
  GFR-binding peptide
  MOD_RES (2), (3), (35), (37): Xaa is C or S
PXXAPTKLSAISVLYLDDSSNVILKNYQNMVVRSXGX

SEQ ID NO: 8552 - protein, 36 aa, Artificial Sequence
  GFR-binding peptide
  MOD_RES (4), (4): Xaa is C or S
  MOD_RES (18), (19), (20), (21), (22): Xaa is A or G
  MOD_RES (23), (24), (25), (26): Xaa is A or G or is absent
KPTXAPTKLSPISVLYKXXXXXXXXXLKYHYNMVVR

SEQ ID NO: 8553 - protein, 38 aa, Artificial Sequence
  GFR-binding peptide
  MOD_RES (4), (5), (37): Xaa is C or S
PKAXXAPTKLSAISVLYLDSSNNVILKNYQNMVVKAXG

SEQ ID NO: 8554 - protein, 37 aa, Artificial Sequence
  GFR-binding peptide
  MOD_RES (4), (5): Xaa is C or S
  MOD_RES (19), (20), (21), (22), (23): Xaa is A or G
  MOD_RES (24), (25), (26), (27): Xaa is A or G or is absent
ASPXXVSQDLSAISILYLXXXXXXXXXLKNYQMIVKS

SEQ ID NO: 8555 - protein, 36 aa, Artificial Sequence
  GFR-binding peptide
  MOD_RES (3), (4): Xaa is C or S
  MOD_RES (18), (19), (20), (21), (22): Xaa is A or G
  MOD_RES (23), (24), (25), (26): Xaa is A or G or is absent
APXXVPQALSPISILYKXXXXXXXXXLKYHYMIVRS

SEQ ID NO: 8556 - protein, 41 aa, Artificial Sequence
  GFR-binding peptide
  MOD_RES (6), (7), (41): Xaa is C or S
  MOD_RES (21), (22), (23), (24), (25): Xaa is A or G
  MOD_RES (26), (27), (28), (29): Xaa is A or G or is absent
SIPKAXXVPTELNAISMLYFXXXXXXXXXLKKYREMVVEGX

SEQ ID NO: 8557 - protein, 41 aa, Artificial Sequence
  GFR-binding peptide
  MOD_RES (3), (4), (38), (40): Xaa is C or S
  MOD_RES (18), (19), (20), (21), (22): Xaa is A or G
  MOD_RES (23), (24), (25), (26): Xaa is A or G or is absent
KAXXVPTELSAISMLYLXXXXXXXXXLKNYQEMVVEGXGXR

SEQ ID NO: 8558 - protein, 32 aa, Artificial Sequence
  GFR-binding peptide
  MOD_RES (1), (1): Xaa is C or S
XVPTELNAISMLYFDEYDKVVLKKYREMVVEG

SEQ ID NO: 8559 - protein, 38 aa, Artificial Sequence
  GFR-binding peptide
  MOD_RES (2), (3), (37): Xaa is C or S
  MOD_RES (17), (18), (19), (20), (21): Xaa is A or G
  MOD_RES (22), (23), (24), (25): Xaa is A or G or is absent
AXXVPTELSATSMLYYXXXXXXXXXLRKHRDMVVEGXG

SEQ ID NO: 8560 - protein, 40 aa, Artificial Sequence
  GFR-binding peptide
  MOD_RES (5), (6), (39): Xaa is C or S
  MOD_RES (20), (21), (22), (23), (24): Xaa is A or G
  MOD_RES (25), (26), (27), (28): Xaa is A or G or is absent
SASPXXVSQDLSAISILYLXXXXXXXXXLKNYQMIVKSXK

SEQ ID NO: 8561 - protein, 36 aa, Artificial Sequence
  GFR-binding peptide
  MOD_RES (2), (3), (34), (36): Xaa is C or S
PXXVSQDLSAISILYLIGKTPKILKNYQMIVKSXKX

SEQ ID NO: 8562 - protein, 39 aa, Artificial Sequence
  GFR-binding peptide
  MOD_RES (4), (5), (39): Xaa is C or S
  MOD_RES (19), (20), (21), (22), (23): Xaa is A or G
  MOD_RES (24), (25), (26), (27): Xaa is A or G or is absent
PKAXXVPTELSPISMLYKXXXXXXXXXLKYHYEMVVEGX

SEQ ID NO: 8563 - protein, 37 aa, Artificial Sequence
  GFR-binding peptide
  MOD_RES (34), (36): Xaa is C or S
  MOD_RES (14), (15), (16), (17), (18): Xaa is A or G
  MOD_RES (19), (20), (21), (22): Xaa is A or G or is absent
VPTELNAISMLYFXXXXXXXXXLKKYREMVVEGXGXR

SEQ ID NO: 8564 - protein, 36 aa, Artificial Sequence
  GFR-binding peptide
  MOD_RES (2), (3), (34), (36): Xaa is C or S
PXXVPQALSAISILYLVGRKPKVLKNYQMIVRSXKX

SEQ ID NO: 8565 - protein, 36 aa, Artificial Sequence
  GFR-binding peptide
  MOD_RES (1), (34), (36): Xaa is C or S
XVPTKLNAISVLYFDDMGVPTLKKYREGMSVAEXGX

SEQ ID NO: 8566 - protein, 40 aa, Artificial Sequence
  GFR-binding peptide
  MOD_RES (6), (7), (39): Xaa is C or S
SIPKAXXVPTELNAISMLYFDEYDKVVLKKYREMVVEGXG

SEQ ID NO: 8567 - protein, 37 aa, Artificial Sequence
  GFR-binding peptide
  MOD_RES (1), (2), (36): Xaa is C or S
  MOD_RES (16), (17), (18), (19), (20): Xaa is A or G
  MOD_RES (21), (22), (23), (24): Xaa is A or G or is absent
XXAPTKLSAISVLYLXXXXXXXXXLKNYQNMVVKAXG

SEQ ID NO: 8568 - protein, 34 aa, Artificial Sequence
  GFR-binding peptide
  MOD_RES (3), (4): Xaa is C or S
KPXXAPTQLSPISVLYKDDSSNVILKYHYNMVVR

SEQ ID NO: 8569 - protein, 35 aa, Artificial Sequence
  GFR-binding peptide
  MOD_RES (2), (3), (34): Xaa is C or S
PXXVSQDLSATSILYYIGKTPKILRKHRMIVKSXK

SEQ ID NO: 8570 - protein, 35 aa, Artificial Sequence
  GFR-binding peptide
  MOD_RES (33), (35): Xaa is C or S
  MOD_RES (14), (15), (16), (17), (18): Xaa is A or G
  MOD_RES (19), (20), (21), (22): Xaa is A or G or is absent
VPQALNAISILYFXXXXXXXXXLKKYRMIVRSXKX

SEQ ID NO: 8571 - protein, 41 aa, Artificial Sequence
  GFR-binding peptide
  MOD_RES (6), (7), (39), (41): Xaa is C or S
SIPKAXXVPTELNAISMLYFDEYDKVVLKKYREMVVEGXGX

SEQ ID NO: 8572 - protein, 36 aa, Artificial Sequence
  GFR-binding peptide
  MOD_RES (5), (6): Xaa is C or S
SASPXXVPQDLSPISILYKVGRTPKVLKYHYMVVKS

SEQ ID NO: 8573 - protein, 40 aa, Artificial Sequence
  GFR-binding peptide
  MOD_RES (4), (5), (37), (39): Xaa is C or S
PKAXXAPTKLNAISVLYFDSSNNVILKKYRNMVVKAXGXH

SEQ ID NO: 8574 - protein, 37 aa, Artificial Sequence
  GFR-binding peptide
  MOD_RES (5), (6), (37): Xaa is C or S
SAAPXXVPQALSAISILYLVGRKPKVLKNYQMIVRSX

SEQ ID NO: 8575 - protein, 37 aa, Artificial Sequence
  GFR-binding peptide
  MOD_RES (2), (3), (34), (36): Xaa is C or S
PXXVSQDLSAISILYLIGKTPKILKNYQMIVKSXKXS

SEQ ID NO: 8576 - protein, 31 aa, Artificial Sequence
  GFR-binding peptide
  MOD_RES (1), (1): Xaa is C or S
XVSQDLSAISILYLIGKTPKILKNYQMIVKS

SEQ ID NO: 8577 - protein, 44 aa, Artificial Sequence
  GFR-binding peptide
  MOD_RES (5), (6), (41), (43): Xaa is C or S
  MOD_RES (20), (21), (22), (23), (24): Xaa is A or G
  MOD_RES (25), (26), (27), (28): Xaa is A or G or is absent
VGKAXXVPTKLSATSVLYYXXXXXXXXXLRKHREGMSVAEXGXR

SEQ ID NO: 8578 - protein, 40 aa, Artificial Sequence
  GFR-binding peptide
  MOD_RES (1), (2), (37), (39): Xaa is C or S
  MOD_RES (16), (17), (18), (19), (20): Xaa is A or G
  MOD_RES (21), (22), (23), (24): Xaa is A or G or is absent
XXVPTKLSATSVLYYXXXXXXXXXLRKHREGMSVAEXGXR

SEQ ID NO: 8579 - protein, 44 aa, Artificial Sequence
  GFR-binding peptide
  MOD_RES (4), (41), (43): Xaa is C or S
  MOD_RES (20), (21), (22), (23), (24): Xaa is A or G
  MOD_RES (25), (26), (27), (28): Xaa is A or G or is absent
NVQXRPTQVQLSPISVLYKXXXXXXXXXLKYHYTLEDHLAXKXE

SEQ ID NO: 8580 - protein, 39 aa, Artificial Sequence
  GFR-binding peptide
  MOD_RES (3), (4), (36), (38): Xaa is C or S
KAXXVPTELNAISMLYFDEYDKVVLKKYREMVVEGXGXR

SEQ ID NO: 8581 - protein, 34 aa, Artificial Sequence
  GFR-binding peptide
  MOD_RES (1), (33): Xaa is C or S
XAPTKLSAISVLYLDDSSNVILKNYQNMVVRSXG

SEQ ID NO: 8582 - protein, 34 aa, Artificial Sequence
  GFR-binding peptide
  MOD_RES (2), (3): Xaa is C or S
AXXVPTELSPISMLYKDEYDKVVLKYHYEMVVEG

SEQ ID NO: 8583 - protein, 35 aa, Artificial Sequence
  GFR-binding peptide
  MOD_RES (1), (35): Xaa is C or S
  MOD_RES (15), (16), (17), (18), (19): Xaa is A or G
  MOD_RES (20), (21), (22), (23): Xaa is A or G or is absent
XAPTKLNAISVLYFXXXXXXXXXLKKYRNMVVRSX

SEQ ID NO: 8584 - protein, 37 aa, Artificial Sequence
  GFR-binding peptide
  MOD_RES (1), (35), (37): Xaa is C or S
  MOD_RES (15), (16), (17), (18), (19): Xaa is A or G
  MOD_RES (20), (21), (22), (23): Xaa is A or G or is absent
XAPTKLSPISVLYKXXXXXXXXXLKYHYNMVVKAXGX

SEQ ID NO: 8585 - protein, 42 aa, Artificial Sequence
  GFR-binding peptide
  MOD_RES (6), (7), (40), (42): Xaa is C or S
  MOD_RES (21), (22), (23), (24), (25): Xaa is A or G
  MOD_RES (26), (27), (28), (29): Xaa is A or G or is absent
ASASPXXVSQDLSAISILYLXXXXXXXXXLKNYQMIVKSXKX

SEQ ID NO: 8586 - protein, 41 aa, Artificial Sequence
  GFR-binding peptide
  MOD_RES (5), (6), (39), (41): Xaa is C or S
  MOD_RES (20), (21), (22), (23), (24): Xaa is A or G
  MOD_RES (25), (26), (27), (28): Xaa is A or G or is absent
SASPXXVSQDLSAISILYLXXXXXXXXXLKNYQMIVKSXKX

SEQ ID NO: 8587 - protein, 37 aa, Artificial Sequence
  GFR-binding peptide
  MOD_RES (6), (7): Xaa is C or S
ASASPXXVSQDLSATSILYYIGKTPKILRKHRMIVKS

SEQ ID NO: 8588 - protein, 41 aa, Artificial Sequence
  GFR-binding peptide
  MOD_RES (4), (5), (39), (41): Xaa is C or S
  MOD_RES (19), (20), (21), (22), (23): Xaa is A or G
  MOD_RES (24), (25), (26), (27): Xaa is A or G or is absent
PKPXXAPTQLSAISVLYLXXXXXXXXXLKNYQNMVVRAXGX

SEQ ID NO: 8589 - protein, 31 aa, Artificial Sequence
  GFR-binding peptide
  MOD_RES (1), (1): Xaa is C or S
XVSQDLSPISILYKIGKTPKILKYHYMIVKS

SEQ ID NO: 8590 - protein, 37 aa, Artificial Sequence
  GFR-binding peptide
  MOD_RES (3), (4), (35), (37): Xaa is C or S
SPXXVSQDLNAISILYFIGKTPKILKKYRMIVKSXKX

SEQ ID NO: 8591 - protein, 34 aa, Artificial Sequence
  GFR-binding peptide
  MOD_RES (1), (2), (34): Xaa is C or S
XXVPTELSATSMLYYDENEKVVLRKHRDMVVEGX

SEQ ID NO: 8592 - protein, 39 aa, Artificial Sequence
  GFR-binding peptide
  MOD_RES (2), (3), (36), (38): Xaa is C or S
  MOD_RES (17), (18), (19), (20), (21): Xaa is A or G
  MOD_RES (22), (23), (24), (25): Xaa is A or G or is absent
PXXVSQDLNAISILYFXXXXXXXXXLKKYRMIVKSXKXS

SEQ ID NO: 8593 - protein, 43 aa, Artificial Sequence
  GFR-binding peptide
  MOD_RES (5), (6), (41), (43): Xaa is C or S
  MOD_RES (20), (21), (22), (23), (24): Xaa is A or G
  MOD_RES (25), (26), (27), (28): Xaa is A or G or is absent
VGKAXXVPTKLSAISVLYLXXXXXXXXXLKNYQEGMSVAEXGX

SEQ ID NO: 8594 - protein, 35 aa, Artificial Sequence
  GFR-binding peptide
  MOD_RES (1), (34): Xaa is C or S
  MOD_RES (15), (16), (17), (18), (19): Xaa is A or G
  MOD_RES (20), (21), (22), (23): Xaa is A or G or is absent
XVPQDLNAISILYFXXXXXXXXXLKKYRMVVKSXK

SEQ ID NO: 8595 - protein, 34 aa, Artificial Sequence
  GFR-binding peptide
  MOD_RES (2), (3): Xaa is C or S
AXXVPTELSPISMLYKDENEKVVLKYHYDMVVEG

SEQ ID NO: 8596 - protein, 34 aa, Artificial Sequence
  GFR-binding peptide
  MOD_RES (32), (34): Xaa is C or S
VPTELSPISMLYKDEYDKVVLKYHYEMVVEGXGX

SEQ ID NO: 8597 - protein, 37 aa, Artificial Sequence
  GFR-binding peptide
  MOD_RES (1), (36): Xaa is C or S
  MOD_RES (15), (16), (17), (18), (19): Xaa is A or G
  MOD_RES (20), (21), (22), (23): Xaa is A or G or is absent
XVPTKLSAISVLYLXXXXXXXXXLKNYQEGMSVAEXG

SEQ ID NO: 8598 - protein, 38 aa, Artificial Sequence
  GFR-binding peptide
  MOD_RES (7), (7): Xaa is C or S
HVTKPTXAPTKLSPISVLYKDDSSNVILKYHYNMVVRS

SEQ ID NO: 8599 - protein, 42 aa, Artificial Sequence
  GFR-binding peptide
  MOD_RES (6), (7), (41): Xaa is C or S
  MOD_RES (21), (22), (23), (24), (25): Xaa is A or G
  MOD_RES (26), (27), (28), (29): Xaa is A or G or is absent
TVPKPXXAPTQLSPISVLYKXXXXXXXXXLKYHYNMVVRAXG

SEQ ID NO: 8600 - protein, 40 aa, Artificial Sequence
  GFR-binding peptide
  MOD_RES (6), (7): Xaa is C or S
  MOD_RES (21), (22), (23), (24), (25): Xaa is A or G
  MOD_RES (26), (27), (28), (29): Xaa is A or G or is absent
AVPKAXXAPTKLSATSVLYYXXXXXXXXXLRKHRNMVVKA

SEQ ID NO: 8601 - protein, 42 aa, Artificial Sequence
  GFR-binding peptide
  MOD_RES (6), (7), (40), (42): Xaa is C or S
  MOD_RES (21), (22), (23), (24), (25): Xaa is A or G
  MOD_RES (26), (27), (28), (29): Xaa is A or G or is absent
ASAAPXXVPQALSAISILYLXXXXXXXXXLKNYQMIVRSXKX

SEQ ID NO: 8602 - protein, 38 aa, Artificial Sequence
  GFR-binding peptide
  MOD_RES (1), (35), (37): Xaa is C or S
  MOD_RES (15), (16), (17), (18), (19): Xaa is A or G
  MOD_RES (20), (21), (22), (23): Xaa is A or G or is absent
XVPTELSPISMLYKXXXXXXXXXLKYHYDMVVEGXGXR

SEQ ID NO: 8603 - protein, 40 aa, Artificial Sequence
  GFR-binding peptide
  MOD_RES (4), (5), (39): Xaa is C or S
  MOD_RES (19), (20), (21), (22), (23): Xaa is A or G
  MOD_RES (24), (25), (26), (27): Xaa is A or G or is absent
PKPXXAPTQLSPISVLYKXXXXXXXXXLKYHYNMVVRAXG

SEQ ID NO: 8604 - protein, 40 aa, Artificial Sequence
  GFR-binding peptide
  MOD_RES (1), (38), (40): Xaa is C or S
  MOD_RES (17), (18), (19), (20), (21): Xaa is A or G
  MOD_RES (22), (23), (24), (25): Xaa is A or G or is absent
XRPTQVQLSAISVLYLXXXXXXXXXLKNYQTLEDHLAXKX

SEQ ID NO: 8605 - protein, 36 aa, Artificial Sequence
  GFR-binding peptide
  MOD_RES (36), (36): Xaa is C or S
PTQVQLSATSVLYYEIVRKKPIFLRKHRTLEDHLAX

SEQ ID NO: 8606 - protein, 33 aa, Artificial Sequence
  GFR-binding peptide
  MOD_RES (1), (33): Xaa is C or S
XVPTELSATSMLYYDEYDKVVLRKHREMVVEGX

SEQ ID NO: 8607 - protein, 41 aa, Artificial Sequence
  GFR-binding peptide
  MOD_RES (2), (39), (41): Xaa is C or S
  MOD_RES (18), (19), (20), (21), (22): Xaa is A or G
  MOD_RES (23), (24), (25), (26): Xaa is A or G or is absent
QXRPTQVQLSPISVLYKXXXXXXXXXLKYHYTLEDHLAXKX

SEQ ID NO: 8608 - protein, 34 aa, Artificial Sequence
  GFR-binding peptide
  MOD_RES (1), (32), (34): Xaa is C or S
XVPQDLSAISILYLVGRTPKVLKNYQMVVKSXKX

SEQ ID NO: 8609 - protein, 42 aa, Artificial Sequence
  GFR-binding peptide
  MOD_RES (6), (7), (42): Xaa is C or S
  MOD_RES (21), (22), (23), (24), (25): Xaa is A or G
  MOD_RES (26), (27), (28), (29): Xaa is A or G or is absent
KVGKAXXVPTKLSAISVLYLXXXXXXXXXLKNYQEGMSVAEX

SEQ ID NO: 8610 - protein, 39 aa, Artificial Sequence
  GFR-binding peptide
  MOD_RES (6), (7), (38): Xaa is C or S
ASASPXXVPQDLNAISILYFVGRTPKVLKKYRMVVKSXK

SEQ ID NO: 8611 - protein, 41 aa, Artificial Sequence
  GFR-binding peptide
  MOD_RES (6), (7), (38), (40): Xaa is C or S
ASAAPXXVPQALSPISILYKVGRKPKVLKYHYMIVRSXKXS

SEQ ID NO: 8612 - protein, 39 aa, Artificial Sequence
  GFR-binding peptide
  MOD_RES (37), (39): Xaa is C or S
RPTQVQLNAISVLYFEIVRKKPIFLKKYRTLEDHLAXKX

SEQ ID NO: 8613 - protein, 38 aa, Artificial Sequence
  GFR-binding peptide
  MOD_RES (3), (4), (37): Xaa is C or S
  MOD_RES (18), (19), (20), (21), (22): Xaa is A or G
  MOD_RES (23), (24), (25), (26): Xaa is A or G or is absent
SPXXVSQDLNAISILYFXXXXXXXXXLKKYRMIVKSXK

SEQ ID NO: 8614 - protein, 36 aa, Artificial Sequence
  GFR-binding peptide
  MOD_RES (1), (1): Xaa is C or S
  MOD_RES (17), (18), (19), (20), (21): Xaa is A or G
  MOD_RES (22), (23), (24), (25): Xaa is A or G or is absent
XRPTQVQLSPISVLYKXXXXXXXXXLKYHYTLEDHL

SEQ ID NO: 8615 - protein, 39 aa, Artificial Sequence
  GFR-binding peptide
  MOD_RES (1), (2), (36), (38): Xaa is C or S
  MOD_RES (16), (17), (18), (19), (20): Xaa is A or G
  MOD_RES (21), (22), (23), (24): Xaa is A or G or is absent
XXVPTELNAISMLYFXXXXXXXXXLKKYRDMVVEGXGXR

SEQ ID NO: 8616 - protein, 38 aa, Artificial Sequence
  GFR-binding peptide
  MOD_RES (2), (36), (38): Xaa is C or S
  MOD_RES (16), (17), (18), (19), (20): Xaa is A or G
  MOD_RES (21), (22), (23), (24): Xaa is A or G or is absent
TXAPTKLSPISVLYKXXXXXXXXXLKYHYNMVVRSXGX

SEQ ID NO: 8617 - protein, 36 aa, Artificial Sequence
  GFR-binding peptide
  MOD_RES (3), (4), (36): Xaa is C or S
KPXXAPTQLSATSVLYYDDSSNVILRKHRNMVVRAX

SEQ ID NO: 8618 - protein, 35 aa, Artificial Sequence
  GFR-binding peptide
  MOD_RES (1), (35): Xaa is C or S
  MOD_RES (15), (16), (17), (18), (19): Xaa is A or G
  MOD_RES (20), (21), (22), (23): Xaa is A or G or is absent
XVPTELSPISMLYKXXXXXXXXXLKYHYDMVVEGX

SEQ ID NO: 8619 - protein, 36 aa, Artificial Sequence
  GFR-binding peptide
  MOD_RES (5), (6): Xaa is C or S
SAAPXXVPQALSPISILYKVGRKPKVLKYHYMIVRS

SEQ ID NO: 8620 - protein, 36 aa, Artificial Sequence
  GFR-binding peptide
  MOD_RES (3), (4): Xaa is C or S
  MOD_RES (18), (19), (20), (21), (22): Xaa is A or G
  MOD_RES (23), (24), (25), (26): Xaa is A or G or is absent
SPXXVPQDLSATSILYYXXXXXXXXXLRKHRMVVKS

SEQ ID NO: 8621 - protein, 38 aa, Artificial Sequence
  GFR-binding peptide
  MOD_RES (5), (6): Xaa is C or S
  MOD_RES (20), (21), (22), (23), (24): Xaa is A or G
  MOD_RES (25), (26), (27), (28): Xaa is A or G or is absent
IPKAXXVPTELSPISMLYKXXXXXXXXXLKYHYEMVVE

SEQ ID NO: 8622 - protein, 40 aa, Artificial Sequence
  GFR-binding peptide
  MOD_RES (5), (6), (40): Xaa is C or S
  MOD_RES (20), (21), (22), (23), (24): Xaa is A or G
  MOD_RES (25), (26), (27), (28): Xaa is A or G or is absent
VPKPXXAPTQLSPISVLYKXXXXXXXXXLKYHYNMVVRAX

SEQ ID NO: 8623 - protein, 33 aa, Artificial Sequence
  GFR-binding peptide
  MOD_RES (1), (2): Xaa is C or S
XXVPTELSATSMLYYDENEKVVLRKHRDMVVEG

SEQ ID NO: 8624 - protein, 35 aa, Artificial Sequence
  GFR-binding peptide
  MOD_RES (16), (17), (18), (19), (20): Xaa is A or G
  MOD_RES (21), (22), (23), (24): Xaa is A or G or is absent
RPTQVQLSATSVLYYXXXXXXXXXLRKHRTLEDHL

SEQ ID NO: 8625 - protein, 45 aa, Artificial Sequence
  GFR-binding peptide
  MOD_RES (6), (7), (42), (44): Xaa is C or S
  MOD_RES (21), (22), (23), (24), (25): Xaa is A or G
  MOD_RES (26), (27), (28), (29): Xaa is A or G or is absent
KVGKAXXVPTKLSATSVLYYXXXXXXXXXLRKHREGMSVAEXGXR

SEQ ID NO: 8626 - protein, 34 aa, Artificial Sequence
  GFR-binding peptide
  MOD_RES (1), (2), (33): Xaa is C or S
XXVSQDLSATSILYYIGKTPKILRKHRMIVKSXK

SEQ ID NO: 8627 - protein, 37 aa, Artificial Sequence
  GFR-binding peptide
  MOD_RES (36), (36): Xaa is C or S
PTQVQLNAISVLYFEIVRKKPIFLKKYRTLEDHLAXK

SEQ ID NO: 8628 - protein, 38 aa, Artificial Sequence
  GFR-binding peptide
  MOD_RES (1), (36), (38): Xaa is C or S
  MOD_RES (15), (16), (17), (18), (19): Xaa is A or G
  MOD_RES (20), (21), (22), (23): Xaa is A or G or is absent
XVPTKLNAISVLYFXXXXXXXXXLKKYREGMSVAEXGX

SEQ ID NO: 8629 - protein, 36 aa, Artificial Sequence
  GFR-binding peptide
  MOD_RES (34), (36): Xaa is C or S
  MOD_RES (14), (15), (16), (17), (18): Xaa is A or G
  MOD_RES (19), (20), (21), (22): Xaa is A or G or is absent
VPTELNAISMLYFXXXXXXXXXLKKYRDMVVEGXGX

SEQ ID NO: 8630 - protein, 38 aa, Artificial Sequence
  GFR-binding peptide
  MOD_RES (1), (2), (36), (38): Xaa is C or S
  MOD_RES (16), (17), (18), (19), (20): Xaa is A or G
  MOD_RES (21), (22), (23), (24): Xaa is A or G or is absent
XXAPTQLSPISVLYKXXXXXXXXXLKYHYNMVVRAXGX

SEQ ID NO: 8631 - protein, 37 aa, Artificial Sequence
  GFR-binding peptide
  MOD_RES (1), (34), (36): Xaa is C or S
  MOD_RES (15), (16), (17), (18), (19): Xaa is A or G
  MOD_RES (20), (21), (22), (23): Xaa is A or G or is absent
XVSQDLNAISILYFXXXXXXXXXLKKYRMIVKSXKXS

SEQ ID NO: 8632 - protein, 36 aa, Artificial Sequence
  GFR-binding peptide
  MOD_RES (2), (36): Xaa is C or S
  MOD_RES (16), (17), (18), (19), (20): Xaa is A or G
  MOD_RES (21), (22), (23), (24): Xaa is A or G or is absent
TXAPTKLSATSVLYYXXXXXXXXXLRKHRNMVVRSX

SEQ ID NO: 8633 - protein, 42 aa, Artificial Sequence
  GFR-binding peptide
  MOD_RES (3), (4), (39), (41): Xaa is C or S
  MOD_RES (18), (19), (20), (21), (22): Xaa is A or G
  MOD_RES (23), (24), (25), (26): Xaa is A or G or is absent
KAXXVPTKLSAISVLYLXXXXXXXXXLKNYQEGMSVAEXGXR

SEQ ID NO: 8634 - protein, 35 aa, Artificial Sequence
  GFR-binding peptide
  MOD_RES (1), (1): Xaa is C or S
XRPTQVQLSPISVLYKEIVRKKPIFLKYHYTLEDH

SEQ ID NO: 8635 - protein, 40 aa, Artificial Sequence
  GFR-binding peptide
  MOD_RES (4), (5), (39): Xaa is C or S
  MOD_RES (19), (20), (21), (22), (23): Xaa is A or G
  MOD_RES (24), (25), (26), (27): Xaa is A or G or is absent
PKAXXVPTELSPISMLYKXXXXXXXXXLKYHYEMVVEGXG

SEQ ID NO: 8636 - protein, 36 aa, Artificial Sequence
  GFR-binding peptide
  MOD_RES (3), (4), (36): Xaa is C or S
KPXXAPTKLSAISVLYLDDSSNVILKNYQNMVVRSX

SEQ ID NO: 8637 - protein, 35 aa, Artificial Sequence
  GFR-binding peptide
  MOD_RES (2), (3), (35): Xaa is C or S
PXXAPTKLSPISVLYKDDSSNVILKYHYNMVVRSX

SEQ ID NO: 8638 - protein, 41 aa, Artificial Sequence
  GFR-binding peptide
  MOD_RES (6), (7): Xaa is C or S
  MOD_RES (21), (22), (23), (24), (25): Xaa is A or G
  MOD_RES (26), (27), (28), (29): Xaa is A or G or is absent
KVGKAXXVPTKLSPISVLYKXXXXXXXXXLKYHYEGMSVAE

SEQ ID NO: 8639 - protein, 37 aa, Artificial Sequence
  GFR-binding peptide
  MOD_RES (1), (34), (36): Xaa is C or S
  MOD_RES (15), (16), (17), (18), (19): Xaa is A or G
  MOD_RES (20), (21), (22), (23): Xaa is A or G or is absent
XVPQALSATSILYYXXXXXXXXXLRKHRMIVRSXKXS

SEQ ID NO: 8640 - protein, 43 aa, Artificial Sequence
  GFR-binding peptide
  MOD_RES (4), (41), (43): Xaa is C or S
NVQXRPTQVQLSPISVLYKEIVRKKPIFLKYHYTLEDHLAXKX

SEQ ID NO: 8641 - protein, 31 aa, Artificial Sequence
  GFR-binding peptide
APTQLSATSVLYYDDSSNVILRKHRNMVVRA

SEQ ID NO: 8642 - protein, 42 aa, Artificial Sequence
  GFR-binding peptide
  MOD_RES (5), (6), (40), (42): Xaa is C or S
  MOD_RES (20), (21), (22), (23), (24): Xaa is A or G
  MOD_RES (25), (26), (27), (28): Xaa is A or G or is absent
VPKAXXAPTKLSATSVLYYXXXXXXXXXLRKHRNMVVKAXGX

SEQ ID NO: 8643 - protein, 33 aa, Artificial Sequence
  GFR-binding peptide
  MOD_RES (1), (32): Xaa is C or S
XVSQDLSATSILYYIGKTPKILRKHRMIVKSXK

SEQ ID NO: 8644 - protein, 38 aa, Artificial Sequence
  GFR-binding peptide
  MOD_RES (4), (36), (38): Xaa is C or S
KPTXAPTKLSPISVLYKDDSSNVILKYHYNMVVRSXGX

SEQ ID NO: 8645 - protein, 33 aa, Artificial Sequence
  GFR-binding peptide
  MOD_RES (1), (2): Xaa is C or S
XXVPTELSATSMLYYDEYDKVVLRKHREMVVEG

SEQ ID NO: 8646 - protein, 35 aa, Artificial Sequence
  GFR-binding peptide
  MOD_RES (3), (35): Xaa is C or S
PTXAPTKLSAISVLYLDDSSNVILKNYQNMVVRSX

SEQ ID NO: 8647 - protein, 37 aa, Artificial Sequence
  GFR-binding peptide
  MOD_RES (3), (4), (36): Xaa is C or S
KAXXAPTKLNAISVLYFDSSNNVILKKYRNMVVKAXG

SEQ ID NO: 8648 - protein, 36 aa, Artificial Sequence
  GFR-binding peptide
  MOD_RES (2), (3), (35): Xaa is C or S
PXXAPTKLSPISVLYKDDSSNVILKYHYNMVVRSXG

SEQ ID NO: 8649 - protein, 36 aa, Artificial Sequence
  GFR-binding peptide
  MOD_RES (3), (4): Xaa is C or S
  MOD_RES (18), (19), (20), (21), (22): Xaa is A or G
  MOD_RES (23), (24), (25), (26): Xaa is A or G or is absent
KAXXVPTELSAISMLYLXXXXXXXXXLKNYQEMVVE

SEQ ID NO: 8650 - protein, 34 aa, Artificial Sequence
  GFR-binding peptide
  MOD_RES (31), (33): Xaa is C or S
VPQALSPISILYKVGRKPKVLKYHYMIVRSXKXS

SEQ ID NO: 8651 - protein, 35 aa, Artificial Sequence
  GFR-binding peptide
  MOD_RES (3), (4), (35): Xaa is C or S
SPXXVPQDLSAISILYLVGRTPKVLKNYQMVVKSX

SEQ ID NO: 8652 - protein, 39 aa, Artificial Sequence
  GFR-binding peptide
  MOD_RES (6), (7): Xaa is C or S
  MOD_RES (21), (22), (23), (24), (25): Xaa is A or G
  MOD_RES (26), (27), (28), (29): Xaa is A or G or is absent
TVPKPXXAPTQLSAISVLYLXXXXXXXXXLKNYQNMVVR

SEQ ID NO: 8653 - protein, 36 aa, Artificial Sequence
  GFR-binding peptide
  MOD_RES (3), (4): Xaa is C or S
  MOD_RES (18), (19), (20), (21), (22): Xaa is A or G
  MOD_RES (23), (24), (25), (26): Xaa is A or G or is absent
SPXXVPQDLSPISILYKXXXXXXXXXLKYHYMVVKS

SEQ ID NO: 8654 - protein, 36 aa, Artificial Sequence
  GFR-binding peptide
  MOD_RES (2), (2): Xaa is C or S
  MOD_RES (18), (19), (20), (21), (22): Xaa is A or G
  MOD_RES (23), (24), (25), (26): Xaa is A or G or is absent
QXRPTQVQLSATSVLYYXXXXXXXXXLRKHRTLEDH

SEQ ID NO: 8655 - protein, 32 aa, Artificial Sequence
  GFR-binding peptide
  MOD_RES (14), (15), (16), (17), (18): Xaa is A or G
  MOD_RES (19), (20), (21), (22): Xaa is A or G or is absent
VPTELSPISMLYKXXXXXXXXXLKYHYEMVVE

SEQ ID NO: 8656 - protein, 38 aa, Artificial Sequence
  GFR-binding peptide
  MOD_RES (4), (5): Xaa is C or S
  MOD_RES (19), (20), (21), (22), (23): Xaa is A or G
  MOD_RES (24), (25), (26), (27): Xaa is A or G or is absent
PKPXXAPTQLNAISVLYFXXXXXXXXXLKKYRNMVVRA

SEQ ID NO: 8657 - protein, 38 aa, Artificial Sequence
  GFR-binding peptide
  MOD_RES (6), (7), (38): Xaa is C or S
ASASPXXVPQDLSATSILYYVGRTPKVLRKHRMVVKSX

SEQ ID NO: 8658 - protein, 33 aa, Artificial Sequence
  GFR-binding peptide
  MOD_RES (1), (2), (33): Xaa is C or S
XXVSQDLSAISILYLIGKTPKILKNYQMIVKSX

SEQ ID NO: 8659 - protein, 40 aa, Artificial Sequence
  GFR-binding peptide
  MOD_RES (3), (4), (39): Xaa is C or S
  MOD_RES (18), (19), (20), (21), (22): Xaa is A or G
  MOD_RES (23), (24), (25), (26): Xaa is A or G or is absent
KAXXVPTKLSAISVLYLXXXXXXXXXLKNYQEGMSVAEXG

SEQ ID NO: 8660 - protein, 34 aa, Artificial Sequence
  GFR-binding peptide
  MOD_RES (1), (1): Xaa is C or S
  MOD_RES (15), (16), (17), (18), (19): Xaa is A or G
  MOD_RES (20), (21), (22), (23): Xaa is A or G or is absent
XVPTELSAISMLYLXXXXXXXXXLKNYQDMVVEG

SEQ ID NO: 8661 - protein, 38 aa, Artificial Sequence
  GFR-binding peptide
  MOD_RES (4), (5): Xaa is C or S
  MOD_RES (19), (20), (21), (22), (23): Xaa is A or G
  MOD_RES (24), (25), (26), (27): Xaa is A or G or is absent
PKAXXVPTELSAISMLYLXXXXXXXXXLKNYQDMVVEG

SEQ ID NO: 8662 - protein, 37 aa, Artificial Sequence
  GFR-binding peptide
  MOD_RES (2), (2): Xaa is C or S
  MOD_RES (18), (19), (20), (21), (22): Xaa is A or G
  MOD_RES (23), (24), (25), (26): Xaa is A or G or is absent
QXRPTQVQLSAISVLYLXXXXXXXXXLKNYQTLEDHL

SEQ ID NO: 8663 - protein, 36 aa, Artificial Sequence
  GFR-binding peptide
  MOD_RES (1), (2), (33), (35): Xaa is C or S
XXVPQDLSATSILYYVGRTPKVLRKHRMVVKSXKXS

SEQ ID NO: 8664 - protein, 36 aa, Artificial Sequence
  GFR-binding peptide
  MOD_RES (1), (33), (35): Xaa is C or S
XAPTKLSPISVLYKDDSSNVILKYHYNMVVRSXGXH

SEQ ID NO: 8665 - protein, 42 aa, Artificial Sequence
  GFR-binding peptide
  MOD_RES (2), (39), (41): Xaa is C or S
QXRPTQVQLSATSVLYYEIVRKKPIFLRKHRTLEDHLAXKXE

SEQ ID NO: 8666 - protein, 35 aa, Artificial Sequence
  GFR-binding peptide
  MOD_RES (34), (34): Xaa is C or S
  MOD_RES (14), (15), (16), (17), (18): Xaa is A or G
  MOD_RES (19), (20), (21), (22): Xaa is A or G or is absent
VPTELSPISMLYKXXXXXXXXXLKYHYEMVVEGXG

SEQ ID NO: 8667 - protein, 38 aa, Artificial Sequence
  GFR-binding peptide
  MOD_RES (2), (3), (37): Xaa is C or S
  MOD_RES (17), (18), (19), (20), (21): Xaa is A or G
  MOD_RES (22), (23), (24), (25): Xaa is A or G or is absent
PXXAPTQLSAISVLYLXXXXXXXXXLKNYQNMVVRAXG

SEQ ID NO: 8668 - protein, 32 aa, Artificial Sequence
  GFR-binding peptide
  MOD_RES (14), (15), (16), (17), (18): Xaa is A or G
  MOD_RES (19), (20), (21), (22): Xaa is A or G or is absent
VPQALSPISILYKXXXXXXXXXLKYHYMIVRS

SEQ ID NO: 8669 - protein, 40 aa, Artificial Sequence
  GFR-binding peptide
  MOD_RES (3), (4), (37), (39): Xaa is C or S
  MOD_RES (18), (19), (20), (21), (22): Xaa is A or G
  MOD_RES (23), (24), (25), (26): Xaa is A or G or is absent
APXXVPQALSATSILYYXXXXXXXXXLRKHRMIVRSXKXS

SEQ ID NO: 8670 - protein, 43 aa, Artificial Sequence
  GFR-binding peptide
  MOD_RES (6), (7), (41), (43): Xaa is C or S
  MOD_RES (21), (22), (23), (24), (25): Xaa is A or G
  MOD_RES (26), (27), (28), (29): Xaa is A or G or is absent
AVPKAXXAPTKLNAISVLYFXXXXXXXXXLKKYRNMVVKAXGX

SEQ ID NO: 8671 - protein, 40 aa, Artificial Sequence
  GFR-binding peptide
  MOD_RES (7), (7): Xaa is C or S
  MOD_RES (21), (22), (23), (24), (25): Xaa is A or G
  MOD_RES (26), (27), (28), (29): Xaa is A or G or is absent
HVTKPTXAPTKLSPISVLYKXXXXXXXXXLKYHYNMVVRS

SEQ ID NO: 8672 - protein, 40 aa, Artificial Sequence
  GFR-binding peptide
  MOD_RES (5), (5): Xaa is C or S
  MOD_RES (21), (22), (23), (24), (25): Xaa is A or G
  MOD_RES (26), (27), (28), (29): Xaa is A or G or is absent
RNVQXRPTQVQLSPISVLYKXXXXXXXXXLKYHYTLEDHL

SEQ ID NO: 8673 - protein, 38 aa, Artificial Sequence
  GFR-binding peptide
  MOD_RES (2), (3), (37): Xaa is C or S
  MOD_RES (17), (18), (19), (20), (21): Xaa is A or G
  MOD_RES (22), (23), (24), (25): Xaa is A or G or is absent
PXXAPTKLNAISVLYFXXXXXXXXXLKKYRNMVVRSXG

SEQ ID NO: 8674 - protein, 38 aa, Artificial Sequence
  GFR-binding peptide
  MOD_RES (3), (4), (35), (37): Xaa is C or S
SPXXVPQDLNAISILYFVGRTPKVLKKYRMVVKSXKXS

SEQ ID NO: 8675 - protein, 41 aa, Artificial Sequence
  GFR-binding peptide
  MOD_RES (3), (40): Xaa is C or S
  MOD_RES (19), (20), (21), (22), (23): Xaa is A or G
  MOD_RES (24), (25), (26), (27): Xaa is A or G or is absent
VQXRPTQVQLSAISVLYLXXXXXXXXXLKNYQTLEDHLAXK

SEQ ID NO: 8676 - protein, 39 aa, Artificial Sequence
  GFR-binding peptide
  MOD_RES (3), (4), (38): Xaa is C or S
  MOD_RES (18), (19), (20), (21), (22): Xaa is A or G
  MOD_RES (23), (24), (25), (26): Xaa is A or G or is absent
KAXXAPTKLSPISVLYKXXXXXXXXXLKYHYNMVVKAXG

SEQ ID NO: 8677 - protein, 36 aa, Artificial Sequence
  GFR-binding peptide
  MOD_RES (1), (2): Xaa is C or S
  MOD_RES (16), (17), (18), (19), (20): Xaa is A or G
  MOD_RES (21), (22), (23), (24): Xaa is A or G or is absent
XXVPTKLNAISVLYFXXXXXXXXXLKKYREGMSVAE

SEQ ID NO: 8678 - protein, 38 aa, Artificial Sequence
  GFR-binding peptide
  MOD_RES (5), (6): Xaa is C or S
  MOD_RES (20), (21), (22), (23), (24): Xaa is A or G
  MOD_RES (25), (26), (27), (28): Xaa is A or G or is absent
IPKAXXVPTELSATSMLYYXXXXXXXXXLRKHREMVVE

SEQ ID NO: 8679 - protein, 44 aa, Artificial Sequence
  GFR-binding peptide
  MOD_RES (6), (7), (41), (43): Xaa is C or S
  MOD_RES (21), (22), (23), (24), (25): Xaa is A or G
  MOD_RES (26), (27), (28), (29): Xaa is A or G or is absent
TVPKPXXAPTQLSATSVLYYXXXXXXXXXLRKHRNMVVRAXGXH

SEQ ID NO: 8680 - protein, 38 aa, Artificial Sequence
  GFR-binding peptide
  MOD_RES (5), (6), (37): Xaa is C or S
SASPXXVPQDLNAISILYFVGRTPKVLKKYRMVVKSXK

SEQ ID NO: 8681 - protein, 36 aa, Artificial Sequence
  GFR-binding peptide
  MOD_RES (3), (4): Xaa is C or S
  MOD_RES (18), (19), (20), (21), (22): Xaa is A or G
  MOD_RES (23), (24), (25), (26): Xaa is A or G or is absent
KAXXAPTKLSATSVLYYXXXXXXXXXLRKHRNMVVK

SEQ ID NO: 8682 - protein, 42 aa, Artificial Sequence
  GFR-binding peptide
  MOD_RES (6), (7), (40), (42): Xaa is C or S
  MOD_RES (21), (22), (23), (24), (25): Xaa is A or G
  MOD_RES (26), (27), (28), (29): Xaa is A or G or is absent
ASAAPXXVPQALSATSILYYXXXXXXXXXLRKHRMIVRSXKX

SEQ ID NO: 8683 - protein, 43 aa, Artificial Sequence
  GFR-binding peptide
  MOD_RES (6), (7), (41), (43): Xaa is C or S
  MOD_RES (21), (22), (23), (24), (25): Xaa is A or G
  MOD_RES (26), (27), (28), (29): Xaa is A or G or is absent
TVPKPXXAPTQLSPISVLYKXXXXXXXXXLKYHYNMVVRAXGX

SEQ ID NO: 8684 - protein, 36 aa, Artificial Sequence
  GFR-binding peptide
  MOD_RES (1), (2), (34), (36): Xaa is C or S
XXVPTELSATSMLYYDEYDKVVLRKHREMVVEGXGX

SEQ ID NO: 8685 - protein, 42 aa, Artificial Sequence
  GFR-binding peptide
  MOD_RES (4), (41): Xaa is C or S
NVQXRPTQVQLSAISVLYLEIVRKKPIFLKNYQTLEDHLAXK

SEQ ID NO: 8686 - protein, 34 aa, Artificial Sequence
  GFR-binding peptide
TQVQLSPISVLYKEIVRKKPIFLKYHYTLEDHLA

SEQ ID NO: 8687 - protein, 34 aa, Artificial Sequence
  GFR-binding peptide
  MOD_RES (16), (17), (18), (19), (20): Xaa is A or G
  MOD_RES (21), (22), (23), (24): Xaa is A or G or is absent
RPTQVQLSPISVLYKXXXXXXXXXLKYHYTLEDH

SEQ ID NO: 8688 - protein, 35 aa, Artificial Sequence
  GFR-binding peptide
  MOD_RES (1), (2), (34): Xaa is C or S
XXVPTELNAISMLYFDENEKVVLKKYRDMVVEGXG

SEQ ID NO: 8689 - protein, 39 aa, Artificial Sequence
  GFR-binding peptide
  MOD_RES (3), (4), (36), (38): Xaa is C or S
KPXXAPTKLSATSVLYYDDSSNVILRKHRNMVVRSXGXH

SEQ ID NO: 8690 - protein, 31 aa, Artificial Sequence
  GFR-binding peptide
  MOD_RES (1), (1): Xaa is C or S
XVPQDLSPISILYKVGRTPKVLKYHYMVVKS

SEQ ID NO: 8691 - protein, 39 aa, Artificial Sequence
  GFR-binding peptide
  MOD_RES (4), (5), (37), (39): Xaa is C or S
PKAXXAPTKLNAISVLYFDSSNNVILKKYRNMVVKAXGX

SEQ ID NO: 8692 - protein, 33 aa, Artificial Sequence
  GFR-binding peptide
  MOD_RES (2), (3): Xaa is C or S
PXXVPQALSATSILYYVGRKPKVLRKHRMIVRS

SEQ ID NO: 8693 - protein, 37 aa, Artificial Sequence
  GFR-binding peptide
  MOD_RES (3), (4), (35), (37): Xaa is C or S
SPXXVPQDLNAISILYFVGRTPKVLKKYRMVVKSXKX

SEQ ID NO: 8694 - protein, 39 aa, Artificial Sequence
  GFR-binding peptide
  MOD_RES (2), (39): Xaa is C or S
QXRPTQVQLSPISVLYKEIVRKKPIFLKYHYTLEDHLAX

SEQ ID NO: 8695 - protein, 37 aa, Artificial Sequence
  GFR-binding peptide
  MOD_RES (1), (2), (35), (37): Xaa is C or S
XXVPTKLSAISVLYLDDMGVPTLKNYQEGMSVAEXGX

SEQ ID NO: 8696 - protein, 37 aa, Artificial Sequence
  GFR-binding peptide
  MOD_RES (1), (2), (35), (37): Xaa is C or S
  MOD_RES (16), (17), (18), (19), (20): Xaa is A or G
  MOD_RES (21), (22), (23), (24): Xaa is A or G or is absent
XXVPQDLSAISILYLXXXXXXXXXLKNYQMVVKSXKX

SEQ ID NO: 8697 - protein, 34 aa, Artificial Sequence
  GFR-binding peptide
  MOD_RES (1), (34): Xaa is C or S
  MOD_RES (15), (16), (17), (18), (19): Xaa is A or G
  MOD_RES (20), (21), (22), (23): Xaa is A or G or is absent
XVPQDLSAISILYLXXXXXXXXXLKNYQMVVKSX

SEQ ID NO: 8698 - protein, 37 aa, Artificial Sequence
  GFR-binding peptide
  MOD_RES (5), (6), (37): Xaa is C or S
SASPXXVSQDLSPISILYKIGKTPKILKYHYMIVKSX

SEQ ID NO: 8699 - protein, 37 aa, Artificial Sequence
  GFR-binding peptide
  MOD_RES (1), (34), (36): Xaa is C or S
XVPTKLSAISVLYLDDMGVPTLKNYQEGMSVAEXGXR

SEQ ID NO: 8700 - protein, 37 aa, Artificial Sequence
  GFR-binding peptide
  MOD_RES (6), (7): Xaa is C or S
ASAAPXXVPQALSPISILYKVGRKPKVLKYHYMIVRS

SEQ ID NO: 8701 - protein, 39 aa, Artificial Sequence
  GFR-binding peptide
  MOD_RES (2), (3), (37), (39): Xaa is C or S
  MOD_RES (17), (18), (19), (20), (21): Xaa is A or G
  MOD_RES (22), (23), (24), (25): Xaa is A or G or is absent
PXXAPTKLSATSVLYYXXXXXXXXXLRKHRNMVVRSXGX

SEQ ID NO: 8702 - protein, 39 aa, Artificial Sequence
  GFR-binding peptide
  MOD_RES (4), (5), (39): Xaa is C or S
  MOD_RES (19), (20), (21), (22), (23): Xaa is A or G
  MOD_RES (24), (25), (26), (27): Xaa is A or G or is absent
PKAXXAPTKLNAISVLYFXXXXXXXXXLKKYRNMVVKAX

SEQ ID NO: 8703 - protein, 36 aa, Artificial Sequence
  GFR-binding peptide
  MOD_RES (2), (3), (35): Xaa is C or S
AXXVPTELSATSMLYYDEYDKVVLRKHREMVVEGXG

SEQ ID NO: 8704 - protein, 34 aa, Artificial Sequence
  GFR-binding peptide
  MOD_RES (15), (16), (17), (18), (19): Xaa is A or G
  MOD_RES (20), (21), (22), (23): Xaa is A or G or is absent
PTQVQLSPISVLYKXXXXXXXXXLKYHYTLEDHL

SEQ ID NO: 8705 - protein, 40 aa, Artificial Sequence
  GFR-binding peptide
  MOD_RES (37), (39): Xaa is C or S
RPTQVQLSPISVLYKEIVRKKPIFLKYHYTLEDHLAXKXE

SEQ ID NO: 8706 - protein, 43 aa, Artificial Sequence
  GFR-binding peptide
  MOD_RES (5), (6), (40), (42): Xaa is C or S
  MOD_RES (20), (21), (22), (23), (24): Xaa is A or G
  MOD_RES (25), (26), (27), (28): Xaa is A or G or is absent
VPKPXXAPTQLSAISVLYLXXXXXXXXXLKNYQNMVVRAXGXH

SEQ ID NO: 8707 - protein, 40 aa, Artificial Sequence
  GFR-binding peptide
  MOD_RES (4), (5), (39): Xaa is C or S
  MOD_RES (19), (20), (21), (22), (23): Xaa is A or G
  MOD_RES (24), (25), (26), (27): Xaa is A or G or is absent
PKAXXAPTKLSPISVLYKXXXXXXXXXLKYHYNMVVKAXG

SEQ ID NO: 8708 - protein, 42 aa, Artificial Sequence
  GFR-binding peptide
  MOD_RES (4), (5), (39), (41): Xaa is C or S
  MOD_RES (19), (20), (21), (22), (23): Xaa is A or G
  MOD_RES (24), (25), (26), (27): Xaa is A or G or is absent
PKAXXVPTELSATSMLYYXXXXXXXXXLRKHREMVVEGXGXR

SEQ ID NO: 8709 - protein, 39 aa, Artificial Sequence
  GFR-binding peptide
  MOD_RES (4), (4): Xaa is C or S
  MOD_RES (20), (21), (22), (23), (24): Xaa is A or G
  MOD_RES (25), (26), (27), (28): Xaa is A or G or is absent
NVQXRPTQVQLSATSVLYYXXXXXXXXXLRKHRTLEDHL

SEQ ID NO: 8710 - protein, 34 aa, Artificial Sequence
  GFR-binding peptide
  MOD_RES (2), (34): Xaa is C or S
TXAPTKLSATSVLYYDDSSNVILRKHRNMVVRSX

SEQ ID NO: 8711 - protein, 36 aa, Artificial Sequence
  GFR-binding peptide
  MOD_RES (1), (2), (35): Xaa is C or S
  MOD_RES (16), (17), (18), (19), (20): Xaa is A or G
  MOD_RES (21), (22), (23), (24): Xaa is A or G or is absent
XXVPQALNAISILYFXXXXXXXXXLKKYRMIVRSXK

SEQ ID NO: 8712 - protein, 33 aa, Artificial Sequence
  GFR-binding peptide
  MOD_RES (2), (2): Xaa is C or S
TXAPTKLSPISVLYKDDSSNVILKYHYNMVVRS

SEQ ID NO: 8713 - protein, 33 aa, Artificial Sequence
  GFR-binding peptide
  MOD_RES (2), (3): Xaa is C or S
PXXAPTKLSPISVLYKDDSSNVILKYHYNMVVR

SEQ ID NO: 8714 - protein, 40 aa, Artificial Sequence
  GFR-binding peptide
  MOD_RES (3), (4), (37), (39): Xaa is C or S
KAXXVPTKLSATSVLYYDDMGVPTLRKHREGMSVAEXGXR

SEQ ID NO: 8715 - protein, 32 aa, Artificial Sequence
  GFR-binding peptide
  MOD_RES (1), (1): Xaa is C or S
XAPTKLSAISVLYLDDSSNVILKNYQNMVVRS

SEQ ID NO: 8716 - protein, 36 aa, Artificial Sequence
  GFR-binding peptide
  MOD_RES (3), (4): Xaa is C or S
  MOD_RES (18), (19), (20), (21), (22): Xaa is A or G
  MOD_RES (23), (24), (25), (26): Xaa is A or G or is absent
KPXXAPTKLNAISVLYFXXXXXXXXXLKKYRNMVVR

SEQ ID NO: 8717 - protein, 36 aa, Artificial Sequence
  GFR-binding peptide
  MOD_RES (5), (5): Xaa is C or S
TKPTXAPTKLSATSVLYYDDSSNVILRKHRNMVVRS

SEQ ID NO: 8718 - protein, 34 aa, Artificial Sequence
  GFR-binding peptide
  MOD_RES (1), (34): Xaa is C or S
  MOD_RES (15), (16), (17), (18), (19): Xaa is A or G
  MOD_RES (20), (21), (22), (23): Xaa is A or G or is absent
XVPQDLSATSILYYXXXXXXXXXLRKHRMVVKSX

SEQ ID NO: 8719 - protein, 41 aa, Artificial Sequence
  GFR-binding peptide
  MOD_RES (3), (4), (38), (40): Xaa is C or S
  MOD_RES (18), (19), (20), (21), (22): Xaa is A or G
  MOD_RES (23), (24), (25), (26): Xaa is A or G or is absent
KPXXAPTQLNAISVLYFXXXXXXXXXLKKYRNMVVRAXGXH

SEQ ID NO: 8720 - protein, 40 aa, Artificial Sequence
  GFR-binding peptide
  MOD_RES (6), (7): Xaa is C or S
  MOD_RES (21), (22), (23), (24), (25): Xaa is A or G
  MOD_RES (26), (27), (28), (29): Xaa is A or G or is absent
AVPKAXXAPTKLSAISVLYLXXXXXXXXXLKNYQNMVVKA

SEQ ID NO: 8721 - protein, 37 aa, Artificial Sequence
  GFR-binding peptide
  MOD_RES (6), (7): Xaa is C or S
ASASPXXVSQDLSPISILYKIGKTPKILKYHYMIVKS

SEQ ID NO: 8722 - protein, 35 aa, Artificial Sequence
  GFR-binding peptide
  MOD_RES (1), (33), (35): Xaa is C or S
XAPTKLSPISVLYKDDSSNVILKYHYNMVVRSXGX

SEQ ID NO: 8723 - protein, 37 aa, Artificial Sequence
  GFR-binding peptide
  MOD_RES (3), (3): Xaa is C or S
VQXRPTQVQLSPISVLYKEIVRKKPIFLKYHYTLEDH

SEQ ID NO: 8724 - protein, 38 aa, Artificial Sequence
  GFR-binding peptide
  MOD_RES (1), (2), (35), (37): Xaa is C or S
XXVPTKLNAISVLYFDDMGVPTLKKYREGMSVAEXGXR

SEQ ID NO: 8725 - protein, 42 aa, Artificial Sequence
  GFR-binding peptide
  MOD_RES (6), (7), (40), (42): Xaa is C or S
KVGKAXXVPTKLSAISVLYLDDMGVPTLKNYQEGMSVAEXGX

SEQ ID NO: 8726 - protein, 34 aa, Artificial Sequence
  GFR-binding peptide
  MOD_RES (2), (3): Xaa is C or S
PXXAPTQLSATSVLYYDDSSNVILRKHRNMVVRA

SEQ ID NO: 8727 - protein, 39 aa, Artificial Sequence
  GFR-binding peptide
  MOD_RES (2), (3), (37), (39): Xaa is C or S
  MOD_RES (17), (18), (19), (20), (21): Xaa is A or G
  MOD_RES (22), (23), (24), (25): Xaa is A or G or is absent
PXXAPTQLSPISVLYKXXXXXXXXXLKYHYNMVVRAXGX

SEQ ID NO: 8728 - protein, 37 aa, Artificial Sequence
  GFR-binding peptide
  MOD_RES (5), (6): Xaa is C or S
IPKAXXVPTELNAISMLYFDEYDKVVLKKYREMVVEG

SEQ ID NO: 8729 - protein, 43 aa, Artificial Sequence
  GFR-binding peptide
  MOD_RES (4), (41), (43): Xaa is C or S
NVQXRPTQVQLSATSVLYYEIVRKKPIFLRKHRTLEDHLAXKX

SEQ ID NO: 8730 - protein, 38 aa, Artificial Sequence
  GFR-binding peptide
  MOD_RES (6), (6): Xaa is C or S
  MOD_RES (20), (21), (22), (23), (24): Xaa is A or G
  MOD_RES (25), (26), (27), (28): Xaa is A or G or is absent
VTKPTXAPTKLNAISVLYFXXXXXXXXXLKKYRNMVVR

SEQ ID NO: 8731 - protein, 39 aa, Artificial Sequence
  GFR-binding peptide
  MOD_RES (5), (6): Xaa is C or S
  MOD_RES (20), (21), (22), (23), (24): Xaa is A or G
  MOD_RES (25), (26), (27), (28): Xaa is A or G or is absent
IPKAXXVPTELSPISMLYKXXXXXXXXXLKYHYEMVVEG

SEQ ID NO: 8732 - protein, 38 aa, Artificial Sequence
  GFR-binding peptide
  MOD_RES (1), (35), (37): Xaa is C or S
  MOD_RES (15), (16), (17), (18), (19): Xaa is A or G
  MOD_RES (20), (21), (22), (23): Xaa is A or G or is absent
XVPTELSATSMLYYXXXXXXXXXLRKHRDMVVEGXGXR

SEQ ID NO: 8733 - protein, 42 aa, Artificial Sequence
  GFR-binding peptide
  MOD_RES (6), (7), (39), (41): Xaa is C or S
SIPKAXXVPTELSATSMLYYDEYDKVVLRKHREMVVEGXGXR

SEQ ID NO: 8734 - protein, 39 aa, Artificial Sequence
  GFR-binding peptide
  MOD_RES (1), (38): Xaa is C or S
XRPTQVQLSAISVLYLEIVRKKPIFLKNYQTLEDHLAXK

SEQ ID NO: 8735 - protein, 41 aa, Artificial Sequence
  GFR-binding peptide
  MOD_RES (4), (5), (38), (40): Xaa is C or S
  MOD_RES (19), (20), (21), (22), (23): Xaa is A or G
  MOD_RES (24), (25), (26), (27): Xaa is A or G or is absent
ASPXXVPQDLSPISILYKXXXXXXXXXLKYHYMVVKSXKXS

SEQ ID NO: 8736 - protein, 39 aa, Artificial Sequence
  GFR-binding peptide
  MOD_RES (1), (2), (36), (38): Xaa is C or S
  MOD_RES (16), (17), (18), (19), (20): Xaa is A or G
  MOD_RES (21), (22), (23), (24): Xaa is A or G or is absent
XXVPTELSPISMLYKXXXXXXXXXLKYHYEMVVEGXGXR

SEQ ID NO: 8737 - protein, 40 aa, Artificial Sequence
  GFR-binding peptide
  MOD_RES (6), (7), (39): Xaa is C or S
YVPKPXXAPTKLSAISVLYLDDSSNVILKNYQNMVVRSXG

SEQ ID NO: 8738 - protein, 38 aa, Artificial Sequence
  GFR-binding peptide
  MOD_RES (6), (6): Xaa is C or S
  MOD_RES (20), (21), (22), (23), (24): Xaa is A or G
  MOD_RES (25), (26), (27), (28): Xaa is A or G or is absent
VTKPTXAPTKLSATSVLYYXXXXXXXXXLRKHRNMVVR

SEQ ID NO: 8739 - protein, 42 aa, Artificial Sequence
  GFR-binding peptide
  MOD_RES (6), (7), (41): Xaa is C or S
  MOD_RES (21), (22), (23), (24), (25): Xaa is A or G
  MOD_RES (26), (27), (28), (29): Xaa is A or G or is absent
SIPKAXXVPTELSAISMLYLXXXXXXXXXLKNYQEMVVEGXG

SEQ ID NO: 8740 - protein, 35 aa, Artificial Sequence
  GFR-binding peptide
  MOD_RES (1), (33), (35): Xaa is C or S
XAPTQLSAISVLYLDDSSNVILKNYQNMVVRAXGX

SEQ ID NO: 8741 - protein, 39 aa, Artificial Sequence
  GFR-binding peptide
  MOD_RES (5), (6): Xaa is C or S
  MOD_RES (20), (21), (22), (23), (24): Xaa is A or G
  MOD_RES (25), (26), (27), (28): Xaa is A or G or is absent
VPKPXXAPTQLSAISVLYLXXXXXXXXXLKNYQNMVVRA

SEQ ID NO: 8742 - protein, 39 aa, Artificial Sequence
  GFR-binding peptide
  MOD_RES (3), (4), (38): Xaa is C or S
  MOD_RES (18), (19), (20), (21), (22): Xaa is A or G
  MOD_RES (23), (24), (25), (26): Xaa is A or G or is absent
KPXXAPTQLSPISVLYKXXXXXXXXXLKYHYNMVVRAXG

SEQ ID NO: 8743 - protein, 41 aa, Artificial Sequence
  GFR-binding peptide
  MOD_RES (5), (6), (39), (41): Xaa is C or S
  MOD_RES (20), (21), (22), (23), (24): Xaa is A or G
  MOD_RES (25), (26), (27), (28): Xaa is A or G or is absent
SAAPXXVPQALSAISILYLXXXXXXXXXLKNYQMIVRSXKX

SEQ ID NO: 8744 - protein, 36 aa, Artificial Sequence
  GFR-binding peptide
  MOD_RES (5), (6): Xaa is C or S
IPKAXXVPTELNAISMLYFDEYDKVVLKKYREMVVE

SEQ ID NO: 8745 - protein, 40 aa, Artificial Sequence
  GFR-binding peptide
  MOD_RES (6), (7), (40): Xaa is C or S
KVGKAXXVPTKLSATSVLYYDDMGVPTLRKHREGMSVAEX

SEQ ID NO: 8746 - protein, 33 aa, Artificial Sequence
  GFR-binding peptide
  MOD_RES (14), (15), (16), (17), (18): Xaa is A or G
  MOD_RES (19), (20), (21), (22): Xaa is A or G or is absent
TQVQLSATSVLYYXXXXXXXXXLRKHRTLEDHL

SEQ ID NO: 8747 - protein, 41 aa, Artificial Sequence
  GFR-binding peptide
  MOD_RES (6), (40): Xaa is C or S
  MOD_RES (20), (21), (22), (23), (24): Xaa is A or G
  MOD_RES (25), (26), (27), (28): Xaa is A or G or is absent
VTKPTXAPTKLSATSVLYYXXXXXXXXXLRKHRNMVVRSXG

SEQ ID NO: 8748 - protein, 37 aa, Artificial Sequence
  GFR-binding peptide
  MOD_RES (1), (36): Xaa is C or S
  MOD_RES (15), (16), (17), (18), (19): Xaa is A or G
  MOD_RES (20), (21), (22), (23): Xaa is A or G or is absent
XVPTKLSATSVLYYXXXXXXXXXLRKHREGMSVAEXG

SEQ ID NO: 8749 - protein, 36 aa, Artificial Sequence
  GFR-binding peptide
  MOD_RES (5), (6): Xaa is C or S
SASPXXVSQDLSPISILYKIGKTPKILKYHYMIVKS

SEQ ID NO: 8750 - protein, 38 aa, Artificial Sequence
  GFR-binding peptide
  MOD_RES (2), (3), (37): Xaa is C or S
  MOD_RES (17), (18), (19), (20), (21): Xaa is A or G
  MOD_RES (22), (23), (24), (25): Xaa is A or G or is absent
AXXVPTELSAISMLYLXXXXXXXXXLKNYQEMVVEGXG

SEQ ID NO: 8751 - protein, 42 aa, Artificial Sequence
  GFR-binding peptide
  MOD_RES (6), (7), (39), (41): Xaa is C or S
AVPKAXXAPTKLSAISVLYLDSSNNVILKNYQNMVVKAXGXH

SEQ ID NO: 8752 - protein, 36 aa, Artificial Sequence
  GFR-binding peptide
  MOD_RES (3), (4), (36): Xaa is C or S
KAXXAPTKLNAISVLYFDSSNNVILKKYRNMVVKAX

SEQ ID NO: 8753 - protein, 41 aa, Artificial Sequence
  GFR-binding peptide
  MOD_RES (5), (6), (41): Xaa is C or S
  MOD_RES (20), (21), (22), (23), (24): Xaa is A or G
  MOD_RES (25), (26), (27), (28): Xaa is A or G or is absent
VGKAXXVPTKLNAISVLYFXXXXXXXXXLKKYREGMSVAEX

SEQ ID NO: 8754 - protein, 36 aa, Artificial Sequence
  GFR-binding peptide
  MOD_RES (3), (4): Xaa is C or S
  MOD_RES (18), (19), (20), (21), (22): Xaa is A or G
  MOD_RES (23), (24), (25), (26): Xaa is A or G or is absent
KPXXAPTQLSATSVLYYXXXXXXXXXLRKHRNMVVR

SEQ ID NO: 8755 - protein, 35 aa, Artificial Sequence
  GFR-binding peptide
  MOD_RES (5), (5): Xaa is C or S
TKPTXAPTKLSPISVLYKDDSSNVILKYHYNMVVR

SEQ ID NO: 8756 - protein, 31 aa, Artificial Sequence
  GFR-binding peptide
  MOD_RES (1), (1): Xaa is C or S
XVPTELSATSMLYYDENEKVVLRKHRDMVVE

SEQ ID NO: 8757 - protein, 35 aa, Artificial Sequence
  GFR-binding peptide
  MOD_RES (1), (2), (33), (35): Xaa is C or S
XXVSQDLSAISILYLIGKTPKILKNYQMIVKSXKX

SEQ ID NO: 8758 - protein, 37 aa, Artificial Sequence
  GFR-binding peptide
  MOD_RES (1), (2), (34), (36): Xaa is C or S
XXAPTQLSATSVLYYDDSSNVILRKHRNMVVRAXGXH

SEQ ID NO: 8759 - protein, 36 aa, Artificial Sequence
  GFR-binding peptide
  MOD_RES (2), (3), (35): Xaa is C or S
AXXVPTELSPISMLYKDENEKVVLKYHYDMVVEGXG

SEQ ID NO: 8760 - protein, 41 aa, Artificial Sequence
  GFR-binding peptide
  MOD_RES (6), (7), (41): Xaa is C or S
  MOD_RES (21), (22), (23), (24), (25): Xaa is A or G
  MOD_RES (26), (27), (28), (29): Xaa is A or G or is absent
YVPKPXXAPTKLSATSVLYYXXXXXXXXXLRKHRNMVVRSX

SEQ ID NO: 8761 - protein, 42 aa, Artificial Sequence
  GFR-binding peptide
  MOD_RES (6), (7), (41): Xaa is C or S
  MOD_RES (21), (22), (23), (24), (25): Xaa is A or G
  MOD_RES (26), (27), (28), (29): Xaa is A or G or is absent
AVPKAXXAPTKLSAISVLYLXXXXXXXXXLKNYQNMVVKAXG

SEQ ID NO: 8762 - protein, 38 aa, Artificial Sequence
  GFR-binding peptide
  MOD_RES (1), (2), (36), (38): Xaa is C or S
  MOD_RES (16), (17), (18), (19), (20): Xaa is A or G
  MOD_RES (21), (22), (23), (24): Xaa is A or G or is absent
XXAPTKLSAISVLYLXXXXXXXXXLKNYQNMVVKAXGX

SEQ ID NO: 8763 - protein, 38 aa, Artificial Sequence
  GFR-binding peptide
  MOD_RES (6), (7): Xaa is C or S
AVPKAXXAPTKLNAISVLYFDSSNNVILKKYRNMVVKA

SEQ ID NO: 8764 - protein, 32 aa, Artificial Sequence
  GFR-binding peptide
  MOD_RES (32), (32): Xaa is C or S
VPTELSATSMLYYDENEKVVLRKHRDMVVEGX

SEQ ID NO: 8765 - protein, 37 aa, Artificial Sequence
  GFR-binding peptide
  MOD_RES (6), (7): Xaa is C or S
ASASPXXVPQDLSPISILYKVGRTPKVLKYHYMVVKS

SEQ ID NO: 8766 - protein, 38 aa, Artificial Sequence
  GFR-binding peptide
  MOD_RES (3), (37): Xaa is C or S
  MOD_RES (17), (18), (19), (20), (21): Xaa is A or G
  MOD_RES (22), (23), (24), (25): Xaa is A or G or is absent
PTXAPTKLSPISVLYKXXXXXXXXXLKYHYNMVVRSXG

SEQ ID NO: 8767 - protein, 35 aa, Artificial Sequence
  GFR-binding peptide
  MOD_RES (1), (33), (35): Xaa is C or S
XAPTKLSPISVLYKDSSNNVILKYHYNMVVKAXGX

SEQ ID NO: 8768 - protein, 36 aa, Artificial Sequence
  GFR-binding peptide
  MOD_RES (2), (3): Xaa is C or S
  MOD_RES (17), (18), (19), (20), (21): Xaa is A or G
  MOD_RES (22), (23), (24), (25): Xaa is A or G or is absent
AXXAPTKLSAISVLYLXXXXXXXXXLKNYQNMVVKA

SEQ ID NO: 8769 - protein, 41 aa, Artificial Sequence
  GFR-binding peptide
  MOD_RES (6), (7), (41): Xaa is C or S
  MOD_RES (21), (22), (23), (24), (25): Xaa is A or G
  MOD_RES (26), (27), (28), (29): Xaa is A or G or is absent
KIPKAXXVPTELSATSMLYYXXXXXXXXXLRKHRDMVVEGX

SEQ ID NO: 8770 - protein, 39 aa, Artificial Sequence
  GFR-binding peptide
  MOD_RES (4), (36), (38): Xaa is C or S
KPTXAPTKLSATSVLYYDDSSNVILRKHRNMVVRSXGXH

SEQ ID NO: 8771 - protein, 41 aa, Artificial Sequence
  GFR-binding peptide
  MOD_RES (5), (6), (40): Xaa is C or S
  MOD_RES (20), (21), (22), (23), (24): Xaa is A or G
  MOD_RES (25), (26), (27), (28): Xaa is A or G or is absent
IPKAXXVPTELSPISMLYKXXXXXXXXXLKYHYDMVVEGXG

SEQ ID NO: 8772 - protein, 38 aa, Artificial Sequence
  GFR-binding peptide
  MOD_RES (2), (3), (35), (37): Xaa is C or S
PXXAPTQLSAISVLYLDDSSNVILKNYQNMVVRAXGXH

SEQ ID NO: 8773 - protein, 37 aa, Artificial Sequence
  GFR-binding peptide
  MOD_RES (2), (2): Xaa is C or S
QXRPTQVQLSAISVLYLEIVRKKPIFLKNYQTLEDHL

SEQ ID NO: 8774 - protein, 38 aa, Artificial Sequence
  GFR-binding peptide
  MOD_RES (3), (3): Xaa is C or S
VQXRPTQVQLSPISVLYKEIVRKKPIFLKYHYTLEDHL

SEQ ID NO: 8775 - protein, 38 aa, Artificial Sequence
  GFR-binding peptide
  MOD_RES (5), (6): Xaa is C or S
  MOD_RES (20), (21), (22), (23), (24): Xaa is A or G
  MOD_RES (25), (26), (27), (28): Xaa is A or G or is absent
VPKPXXAPTQLSPISVLYKXXXXXXXXXLKYHYNMVVR

SEQ ID NO: 8776 - protein, 41 aa, Artificial Sequence
  GFR-binding peptide
  MOD_RES (6), (7), (40): Xaa is C or S
KVGKAXXVPTKLSATSVLYYDDMGVPTLRKHREGMSVAEXG

SEQ ID NO: 8777 - protein, 40 aa, Artificial Sequence
  GFR-binding peptide
  MOD_RES (5), (6), (39): Xaa is C or S
  MOD_RES (20), (21), (22), (23), (24): Xaa is A or G
  MOD_RES (25), (26), (27), (28): Xaa is A or G or is absent
SASPXXVPQDLSATSILYYXXXXXXXXXLRKHRMVVKSXK

SEQ ID NO: 8778 - protein, 36 aa, Artificial Sequence
  GFR-binding peptide
  MOD_RES (4), (5), (36): Xaa is C or S
ASPXXVPQDLNAISILYFVGRTPKVLKKYRMVVKSX

SEQ ID NO: 8779 - protein, 31 aa, Artificial Sequence
  GFR-binding peptide
APTKLSATSVLYYDDSSNVILRKHRNMVVRS

SEQ ID NO: 8780 - protein, 33 aa, Artificial Sequence
  GFR-binding peptide
  MOD_RES (1), (1): Xaa is C or S
  MOD_RES (15), (16), (17), (18), (19): Xaa is A or G
  MOD_RES (20), (21), (22), (23): Xaa is A or G or is absent
XAPTKLSATSVLYYXXXXXXXXXLRKHRNMVVR

SEQ ID NO: 8781 - protein, 37 aa, Artificial Sequence
  GFR-binding peptide
  MOD_RES (1), (2), (34), (36): Xaa is C or S
XXVPTELSPISMLYKDEYDKVVLKYHYEMVVEGXGXR

SEQ ID NO: 8782 - protein, 38 aa, Artificial Sequence
  GFR-binding peptide
  MOD_RES (3), (4), (38): Xaa is C or S
  MOD_RES (18), (19), (20), (21), (22): Xaa is A or G
  MOD_RES (23), (24), (25), (26): Xaa is A or G or is absent
KAXXVPTELNAISMLYFXXXXXXXXXLKKYRDMVVEGX

SEQ ID NO: 8783 - protein, 38 aa, Artificial Sequence
  GFR-binding peptide
  MOD_RES (5), (6): Xaa is C or S
  MOD_RES (20), (21), (22), (23), (24): Xaa is A or G
  MOD_RES (25), (26), (27), (28): Xaa is A or G or is absent
SAAPXXVPQALNAISILYFXXXXXXXXXLKKYRMIVRS

SEQ ID NO: 8784 - protein, 35 aa, Artificial Sequence
  GFR-binding peptide
  MOD_RES (5), (5): Xaa is C or S
TKPTXAPTKLSAISVLYLDDSSNVILKNYQNMVVR

SEQ ID NO: 8785 - protein, 30 aa, Artificial Sequence
  GFR-binding peptide
VPTELNAISMLYFDEYDKVVLKKYREMVVE

SEQ ID NO: 8786 - protein, 35 aa, Artificial Sequence
  GFR-binding peptide
  MOD_RES (3), (4), (35): Xaa is C or S
APXXVPQALSATSILYYVGRKPKVLRKHRMIVRSX

SEQ ID NO: 8787 - protein, 41 aa, Artificial Sequence
  GFR-binding peptide
  MOD_RES (7), (41): Xaa is C or S
  MOD_RES (21), (22), (23), (24), (25): Xaa is A or G
  MOD_RES (26), (27), (28), (29): Xaa is A or G or is absent
HVTKPTXAPTKLSATSVLYYXXXXXXXXXLRKHRNMVVRSX

SEQ ID NO: 8788 - protein, 33 aa, Artificial Sequence
  GFR-binding peptide
  MOD_RES (1), (1): Xaa is C or S
  MOD_RES (15), (16), (17), (18), (19): Xaa is A or G
  MOD_RES (20), (21), (22), (23): Xaa is A or G or is absent
XAPTKLSATSVLYYXXXXXXXXXLRKHRNMVVK

SEQ ID NO: 8789 - protein, 34 aa, Artificial Sequence
  GFR-binding peptide
  MOD_RES (16), (17), (18), (19), (20): Xaa is A or G
  MOD_RES (21), (22), (23), (24): Xaa is A or G or is absent
RPTQVQLSAISVLYLXXXXXXXXXLKNYQTLEDH

SEQ ID NO: 8790 - protein, 34 aa, Artificial Sequence
  GFR-binding peptide
  MOD_RES (1), (33): Xaa is C or S
XAPTQLSPISVLYKDDSSNVILKYHYNMVVRAXG

SEQ ID NO: 8791 - protein, 31 aa, Artificial Sequence
  GFR-binding peptide
  MOD_RES (31), (31): Xaa is C or S
VPQALSATSILYYVGRKPKVLRKHRMIVRSX

SEQ ID NO: 8792 - protein, 35 aa, Artificial Sequence
  GFR-binding peptide
  MOD_RES (33), (35): Xaa is C or S
VPTKLNAISVLYFDDMGVPTLKKYREGMSVAEXGX

SEQ ID NO: 8793 - protein, 36 aa, Artificial Sequence
  GFR-binding peptide
  MOD_RES (5), (6): Xaa is C or S
SASPXXVSQDLSAISILYLIGKTPKILKNYQMIVKS

SEQ ID NO: 8794 - protein, 37 aa, Artificial Sequence
  GFR-binding peptide
  MOD_RES (7), (7): Xaa is C or S
HVTKPTXAPTKLSATSVLYYDDSSNVILRKHRNMVVR

SEQ ID NO: 8795 - protein, 32 aa, Artificial Sequence
  GFR-binding peptide
  MOD_RES (1), (2): Xaa is C or S
XXVSQDLNAISILYFIGKTPKILKKYRMIVKS

SEQ ID NO: 8796 - protein, 36 aa, Artificial Sequence
  GFR-binding peptide
  MOD_RES (1), (34), (36): Xaa is C or S
XVPTKLSATSVLYYDDMGVPTLRKHREGMSVAEXGX

SEQ ID NO: 8797 - protein, 33 aa, Artificial Sequence
  GFR-binding peptide
  MOD_RES (31), (33): Xaa is C or S
VPQDLSPISILYKVGRTPKVLKYHYMVVKSXKX

SEQ ID NO: 8798 - protein, 41 aa, Artificial Sequence
  GFR-binding peptide
  MOD_RES (5), (6), (38), (40): Xaa is C or S
VPKPXXAPTKLSPISVLYKDDSSNVILKYHYNMVVRSXGXH

SEQ ID NO: 8799 - protein, 37 aa, Artificial Sequence
  GFR-binding peptide
  MOD_RES (36), (36): Xaa is C or S
  MOD_RES (15), (16), (17), (18), (19): Xaa is A or G
  MOD_RES (20), (21), (22), (23): Xaa is A or G or is absent
PTQVQLSPISVLYKXXXXXXXXXLKYHYTLEDHLAXK

SEQ ID NO: 8800 - protein, 36 aa, Artificial Sequence
  GFR-binding peptide
  MOD_RES (3), (4): Xaa is C or S
  MOD_RES (18), (19), (20), (21), (22): Xaa is A or G
  MOD_RES (23), (24), (25), (26): Xaa is A or G or is absent
KAXXVPTELNAISMLYFXXXXXXXXXLKKYRDMVVE

SEQ ID NO: 8801 - protein, 39 aa, Artificial Sequence
  GFR-binding peptide
  MOD_RES (3), (4), (38): Xaa is C or S
  MOD_RES (18), (19), (20), (21), (22): Xaa is A or G
  MOD_RES (23), (24), (25), (26): Xaa is A or G or is absent
KAXXVPTELSATSMLYYXXXXXXXXXLRKHREMVVEGXG

SEQ ID NO: 8802 - protein, 34 aa, Artificial Sequence
  GFR-binding peptide
  MOD_RES (1), (2): Xaa is C or S
  MOD_RES (16), (17), (18), (19), (20): Xaa is A or G
  MOD_RES (21), (22), (23), (24): Xaa is A or G or is absent
XXVPQALNAISILYFXXXXXXXXXLKKYRMIVRS

SEQ ID NO: 8803 - protein, 37 aa, Artificial Sequence
  GFR-binding peptide
  MOD_RES (3), (4), (36): Xaa is C or S
KPXXAPTQLSATSVLYYDDSSNVILRKHRNMVVRAXG

SEQ ID NO: 8804 - protein, 41 aa, Artificial Sequence
  GFR-binding peptide
  MOD_RES (6), (7), (41): Xaa is C or S
  MOD_RES (21), (22), (23), (24), (25): Xaa is A or G
  MOD_RES (26), (27), (28), (29): Xaa is A or G or is absent
TVPKPXXAPTQLSATSVLYYXXXXXXXXXLRKHRNMVVRAX

SEQ ID NO: 8805 - protein, 34 aa, Artificial Sequence
  GFR-binding peptide
  MOD_RES (1), (2): Xaa is C or S
XXVPTKLSATSVLYYDDMGVPTLRKHREGMSVAE

SEQ ID NO: 8806 - protein, 37 aa, Artificial Sequence
  GFR-binding peptide
  MOD_RES (3), (4): Xaa is C or S
  MOD_RES (18), (19), (20), (21), (22): Xaa is A or G
  MOD_RES (23), (24), (25), (26): Xaa is A or G or is absent
KPXXAPTKLSPISVLYKXXXXXXXXXLKYHYNMVVRS

SEQ ID NO: 8807 - protein, 40 aa, Artificial Sequence
  GFR-binding peptide
  MOD_RES (5), (37), (39): Xaa is C or S
TKPTXAPTKLSATSVLYYDDSSNVILRKHRNMVVRSXGXH

SEQ ID NO: 8808 - protein, 44 aa, Artificial Sequence
  GFR-binding peptide
  MOD_RES (6), (7), (41), (43): Xaa is C or S
  MOD_RES (21), (22), (23), (24), (25): Xaa is A or G
  MOD_RES (26), (27), (28), (29): Xaa is A or G or is absent
KIPKAXXVPTELNAISMLYFXXXXXXXXXLKKYRDMVVEGXGXR

SEQ ID NO: 8809 - protein, 42 aa, Artificial Sequence
  GFR-binding peptide
  MOD_RES (5), (6), (39), (41): Xaa is C or S
  MOD_RES (20), (21), (22), (23), (24): Xaa is A or G
  MOD_RES (25), (26), (27), (28): Xaa is A or G or is absent
SASPXXVSQDLNAISILYFXXXXXXXXXLKKYRMIVKSXKXS

SEQ ID NO: 8810 - protein, 37 aa, Artificial Sequence
  GFR-binding peptide
  MOD_RES (5), (6): Xaa is C or S
VPKPXXAPTQLSAISVLYLDDSSNVILKNYQNMVVRA

SEQ ID NO: 8811 - protein, 40 aa, Artificial Sequence
  GFR-binding peptide
  MOD_RES (6), (7): Xaa is C or S
  MOD_RES (21), (22), (23), (24), (25): Xaa is A or G
  MOD_RES (26), (27), (28), (29): Xaa is A or G or is absent
YVPKPXXAPTKLNAISVLYFXXXXXXXXXLKKYRNMVVRS

SEQ ID NO: 8812 - protein, 33 aa, Artificial Sequence
  GFR-binding peptide
  MOD_RES (33), (33): Xaa is C or S
  MOD_RES (14), (15), (16), (17), (18): Xaa is A or G
  MOD_RES (19), (20), (21), (22): Xaa is A or G or is absent
VSQDLSPISILYKXXXXXXXXXLKYHYMIVKSX

SEQ ID NO: 8813 - protein, 43 aa, Artificial Sequence
  GFR-binding peptide
  MOD_RES (6), (7), (41), (43): Xaa is C or S
  MOD_RES (21), (22), (23), (24), (25): Xaa is A or G
  MOD_RES (26), (27), (28), (29): Xaa is A or G or is absent
KIPKAXXVPTELSAISMLYLXXXXXXXXXLKNYQDMVVEGXGX

SEQ ID NO: 8814 - protein, 32 aa, Artificial Sequence
  GFR-binding peptide
  MOD_RES (14), (15), (16), (17), (18): Xaa is A or G
  MOD_RES (19), (20), (21), (22): Xaa is A or G or is absent
VPTELSAISMLYLXXXXXXXXXLKNYQEMVVE

SEQ ID NO: 8815 - protein, 37 aa, Artificial Sequence
  GFR-binding peptide
  MOD_RES (2), (36): Xaa is C or S
  MOD_RES (16), (17), (18), (19), (20): Xaa is A or G
  MOD_RES (21), (22), (23), (24): Xaa is A or G or is absent
TXAPTKLSATSVLYYXXXXXXXXXLRKHRNMVVRSXG

SEQ ID NO: 8816 - protein, 38 aa, Artificial Sequence
  GFR-binding peptide
  MOD_RES (4), (5), (37): Xaa is C or S
PKAXXVPTELNAISMLYFDEYDKVVLKKYREMVVEGXG

SEQ ID NO: 8817 - protein, 33 aa, Artificial Sequence
  GFR-binding peptide
  MOD_RES (14), (15), (16), (17), (18): Xaa is A or G
  MOD_RES (19), (20), (21), (22): Xaa is A or G or is absent
APTQLNAISVLYFXXXXXXXXXLKKYRNMVVRA

SEQ ID NO: 8818 - protein, 32 aa, Artificial Sequence
  GFR-binding peptide
  MOD_RES (32), (32): Xaa is C or S
APTKLNAISVLYFDSSNNVILKKYRNMVVKAX

SEQ ID NO: 8819 - protein, 40 aa, Artificial Sequence
  GFR-binding peptide
  MOD_RES (2), (3), (37), (39): Xaa is C or S
  MOD_RES (17), (18), (19), (20), (21): Xaa is A or G
  MOD_RES (22), (23), (24), (25): Xaa is A or G or is absent
PXXAPTQLSAISVLYLXXXXXXXXXLKNYQNMVVRAXGXH

SEQ ID NO: 8820 - protein, 37 aa, Artificial Sequence
  GFR-binding peptide
  MOD_RES (6), (7): Xaa is C or S
ASASPXXVSQDLSAISILYLIGKTPKILKNYQMIVKS

SEQ ID NO: 8821 - protein, 32 aa, Artificial Sequence
  GFR-binding peptide
  MOD_RES (1), (32): Xaa is C or S
XVPQALSPISILYKVGRKPKVLKYHYMIVRSX

SEQ ID NO: 8822 - protein, 42 aa, Artificial Sequence
  GFR-binding peptide
  MOD_RES (4), (41): Xaa is C or S
NVQXRPTQVQLSATSVLYYEIVRKKPIFLRKHRTLEDHLAXK

SEQ ID NO: 8823 - protein, 39 aa, Artificial Sequence
  GFR-binding peptide
  MOD_RES (6), (7), (39): Xaa is C or S
KIPKAXXVPTELNAISMLYFDENEKVVLKKYRDMVVEGX

SEQ ID NO: 8824 - protein, 36 aa, Artificial Sequence
  GFR-binding peptide
  MOD_RES (1), (2), (33), (35): Xaa is C or S
XXVPQALNAISILYFVGRKPKVLKKYRMIVRSXKXS

SEQ ID NO: 8825 - protein, 37 aa, Artificial Sequence
  GFR-binding peptide
  MOD_RES (3), (4): Xaa is C or S
  MOD_RES (18), (19), (20), (21), (22): Xaa is A or G
  MOD_RES (23), (24), (25), (26): Xaa is A or G or is absent
KPXXAPTQLSAISVLYLXXXXXXXXXLKNYQNMVVRA

SEQ ID NO: 8826 - protein, 41 aa, Artificial Sequence
  GFR-binding peptide
  MOD_RES (4), (5), (39), (41): Xaa is C or S
  MOD_RES (19), (20), (21), (22), (23): Xaa is A or G
  MOD_RES (24), (25), (26), (27): Xaa is A or G or is absent
PKPXXAPTKLSAISVLYLXXXXXXXXXLKNYQNMVVRSXGX

SEQ ID NO: 8827 - protein, 41 aa, Artificial Sequence
  GFR-binding peptide
  MOD_RES (5), (6), (40): Xaa is C or S
  MOD_RES (20), (21), (22), (23), (24): Xaa is A or G
  MOD_RES (25), (26), (27), (28): Xaa is A or G or is absent
VPKPXXAPTKLSAISVLYLXXXXXXXXXLKNYQNMVVRSXG

SEQ ID NO: 8828 - protein, 31 aa, Artificial Sequence
  GFR-binding peptide
  MOD_RES (1), (1): Xaa is C or S
XVPQDLSAISILYLVGRTPKVLKNYQMVVKS

SEQ ID NO: 8829 - protein, 38 aa, Artificial Sequence
  GFR-binding peptide
  MOD_RES (6), (7): Xaa is C or S
AVPKAXXAPTKLSAISVLYLDSSNNVILKNYQNMVVKA

SEQ ID NO: 8830 - protein, 36 aa, Artificial Sequence
  GFR-binding peptide
  MOD_RES (2), (3), (35): Xaa is C or S
AXXVPTELNAISMLYFDENEKVVLKKYRDMVVEGXG

SEQ ID NO: 8831 - protein, 36 aa, Artificial Sequence
  GFR-binding peptide
  MOD_RES (3), (4), (36): Xaa is C or S
KAXXVPTELSATSMLYYDEYDKVVLRKHREMVVEGX

SEQ ID NO: 8832 - protein, 39 aa, Artificial Sequence
  GFR-binding peptide
  MOD_RES (7), (7): Xaa is C or S
  MOD_RES (21), (22), (23), (24), (25): Xaa is A or G
  MOD_RES (26), (27), (28), (29): Xaa is A or G or is absent
HVTKPTXAPTKLNAISVLYFXXXXXXXXXLKKYRNMVVR

SEQ ID NO: 8833 - protein, 35 aa, Artificial Sequence
  GFR-binding peptide
  MOD_RES (1), (33), (35): Xaa is C or S
XAPTQLSPISVLYKDDSSNVILKYHYNMVVRAXGX

SEQ ID NO: 8834 - protein, 42 aa, Artificial Sequence
  GFR-binding peptide
  MOD_RES (7), (41): Xaa is C or S
  MOD_RES (21), (22), (23), (24), (25): Xaa is A or G
  MOD_RES (26), (27), (28), (29): Xaa is A or G or is absent
HVTKPTXAPTKLSAISVLYLXXXXXXXXXLKNYQNMVVRSXG

SEQ ID NO: 8835 - protein, 35 aa, Artificial Sequence
  GFR-binding peptide
  MOD_RES (32), (34): Xaa is C or S
APTKLSPISVLYKDDSSNVILKYHYNMVVRSXGXH

SEQ ID NO: 8836 - protein, 41 aa, Artificial Sequence
  GFR-binding peptide
  MOD_RES (6), (38), (40): Xaa is C or S
VTKPTXAPTKLSPISVLYKDDSSNVILKYHYNMVVRSXGXH

SEQ ID NO: 8837 - protein, 40 aa, Artificial Sequence
  GFR-binding peptide
  MOD_RES (2), (39): Xaa is C or S
QXRPTQVQLNAISVLYFEIVRKKPIFLKKYRTLEDHLAXK

SEQ ID NO: 8838 - protein, 38 aa, Artificial Sequence
  GFR-binding peptide
  MOD_RES (5), (6): Xaa is C or S
  MOD_RES (20), (21), (22), (23), (24): Xaa is A or G
  MOD_RES (25), (26), (27), (28): Xaa is A or G or is absent
VPKPXXAPTQLSAISVLYLXXXXXXXXXLKNYQNMVVR

SEQ ID NO: 8839 - protein, 43 aa, Artificial Sequence
  GFR-binding peptide
  MOD_RES (6), (40), (42): Xaa is C or S
  MOD_RES (20), (21), (22), (23), (24): Xaa is A or G
  MOD_RES (25), (26), (27), (28): Xaa is A or G or is absent
VTKPTXAPTKLSAISVLYLXXXXXXXXXLKNYQNMVVRSXGXH

SEQ ID NO: 8840 - protein, 36 aa, Artificial Sequence
  GFR-binding peptide
  MOD_RES (3), (4), (36): Xaa is C or S
KAXXVPTELSATSMLYYDENEKVVLRKHRDMVVEGX

SEQ ID NO: 8841 - protein, 41 aa, Artificial Sequence
  GFR-binding peptide
  MOD_RES (3), (4), (38), (40): Xaa is C or S
  MOD_RES (18), (19), (20), (21), (22): Xaa is A or G
  MOD_RES (23), (24), (25), (26): Xaa is A or G or is absent
KAXXVPTELSAISMLYLXXXXXXXXXLKNYQDMVVEGXGXR

SEQ ID NO: 8842 - protein, 37 aa, Artificial Sequence
  GFR-binding peptide
  MOD_RES (3), (4): Xaa is C or S
  MOD_RES (18), (19), (20), (21), (22): Xaa is A or G
  MOD_RES (23), (24), (25), (26): Xaa is A or G or is absent
KAXXVPTELNAISMLYFXXXXXXXXXLKKYRDMVVEG

SEQ ID NO: 8843 - protein, 36 aa, Artificial Sequence
  GFR-binding peptide
  MOD_RES (1), (2), (36): Xaa is C or S
  MOD_RES (16), (17), (18), (19), (20): Xaa is A or G
  MOD_RES (21), (22), (23), (24): Xaa is A or G or is absent
XXVPTELSPISMLYKXXXXXXXXXLKYHYDMVVEGX

SEQ ID NO: 8844 - protein, 37 aa, Artificial Sequence
  GFR-binding peptide
  MOD_RES (5), (6), (37): Xaa is C or S
SASPXXVSQDLSATSILYYIGKTPKILRKHRMIVKSX

SEQ ID NO: 8845 - protein, 32 aa, Artificial Sequence
  GFR-binding peptide
  MOD_RES (1), (2): Xaa is C or S
XXVPQALNAISILYFVGRKPKVLKKYRMIVRS

SEQ ID NO: 8846 - protein, 42 aa, Artificial Sequence
  GFR-binding peptide
  MOD_RES (6), (7), (40), (42): Xaa is C or S
  MOD_RES (21), (22), (23), (24), (25): Xaa is A or G
  MOD_RES (26), (27), (28), (29): Xaa is A or G or is absent
ASASPXXVSQDLSATSILYYXXXXXXXXXLRKHRMIVKSXKX

SEQ ID NO: 8847 - protein, 30 aa, Artificial Sequence
  GFR-binding peptide
APTQLSAISVLYLDDSSNVILKNYQNMVVR

SEQ ID NO: 8848 - protein, 35 aa, Artificial Sequence
  GFR-binding peptide
  MOD_RES (1), (2), (34): Xaa is C or S
XXVPTELSPISMLYKDENEKVVLKYHYDMVVEGXG

SEQ ID NO: 8849 - protein, 34 aa, Artificial Sequence
  GFR-binding peptide
  MOD_RES (1), (32), (34): Xaa is C or S
XVPQDLSPISILYKVGRTPKVLKYHYMVVKSXKX

SEQ ID NO: 8850 - protein, 38 aa, Artificial Sequence
  GFR-binding peptide
  MOD_RES (4), (5), (38): Xaa is C or S
GKAXXVPTKLSATSVLYYDDMGVPTLRKHREGMSVAEX

SEQ ID NO: 8851 - protein, 34 aa, Artificial Sequence
  GFR-binding peptide
  MOD_RES (1), (2): Xaa is C or S
  MOD_RES (16), (17), (18), (19), (20): Xaa is A or G
  MOD_RES (21), (22), (23), (24): Xaa is A or G or is absent
XXVPTELNAISMLYFXXXXXXXXXLKKYREMVVE

SEQ ID NO: 8852 - protein, 32 aa, Artificial Sequence
  GFR-binding peptide
  MOD_RES (32), (32): Xaa is C or S
VPTELSATSMLYYDEYDKVVLRKHREMVVEGX

SEQ ID NO: 8853 - protein, 37 aa, Artificial Sequence
  GFR-binding peptide
  MOD_RES (4), (5): Xaa is C or S
  MOD_RES (19), (20), (21), (22), (23): Xaa is A or G
  MOD_RES (24), (25), (26), (27): Xaa is A or G or is absent
ASPXXVPQDLSPISILYKXXXXXXXXXLKYHYMVVKS

SEQ ID NO: 8854 - protein, 33 aa, Artificial Sequence
  GFR-binding peptide
  MOD_RES (14), (15), (16), (17), (18): Xaa is A or G
  MOD_RES (19), (20), (21), (22): Xaa is A or G or is absent
VPTELNAISMLYFXXXXXXXXXLKKYRDMVVEG

SEQ ID NO: 8855 - protein, 40 aa, Artificial Sequence
  GFR-binding peptide
  MOD_RES (37), (39): Xaa is C or S
RPTQVQLNAISVLYFEIVRKKPIFLKKYRTLEDHLAXKXE

SEQ ID NO: 8856 - protein, 38 aa, Artificial Sequence
  GFR-binding peptide
  MOD_RES (6), (7), (38): Xaa is C or S
ASASPXXVPQDLSPISILYKVGRTPKVLKYHYMVVKSX

SEQ ID NO: 8857 - protein, 35 aa, Artificial Sequence
  GFR-binding peptide
  MOD_RES (1), (35): Xaa is C or S
  MOD_RES (15), (16), (17), (18), (19): Xaa is A or G
  MOD_RES (20), (21), (22), (23): Xaa is A or G or is absent
XVPTELSAISMLYLXXXXXXXXXLKNYQDMVVEGX

SEQ ID NO: 8858 - protein, 36 aa, Artificial Sequence
  GFR-binding peptide
  MOD_RES (3), (4), (35): Xaa is C or S
SPXXVPQDLNAISILYFVGRTPKVLKKYRMVVKSXK

SEQ ID NO: 8859 - protein, 38 aa, Artificial Sequence
  GFR-binding peptide
  MOD_RES (3), (4), (38): Xaa is C or S
  MOD_RES (18), (19), (20), (21), (22): Xaa is A or G
  MOD_RES (23), (24), (25), (26): Xaa is A or G or is absent
KPXXAPTQLSPISVLYKXXXXXXXXXLKYHYNMVVRAX

SEQ ID NO: 8860 - protein, 37 aa, Artificial Sequence
  GFR-binding peptide
  MOD_RES (5), (6), (37): Xaa is C or S
SASPXXVPQDLSPISILYKVGRTPKVLKYHYMVVKSX

SEQ ID NO: 8861 - protein, 32 aa, Artificial Sequence
  GFR-binding peptide
VPTKLSAISVLYLDDMGVPTLKNYQEGMSVAE

SEQ ID NO: 8862 - protein, 44 aa, Artificial Sequence
  GFR-binding peptide
  MOD_RES (6), (7), (41), (43): Xaa is C or S
  MOD_RES (21), (22), (23), (24), (25): Xaa is A or G
  MOD_RES (26), (27), (28), (29): Xaa is A or G or is absent
TVPKPXXAPTQLSPISVLYKXXXXXXXXXLKYHYNMVVRAXGXH

SEQ ID NO: 8863 - protein, 40 aa, Artificial Sequence
  GFR-binding peptide
  MOD_RES (3), (4), (38), (40): Xaa is C or S
  MOD_RES (18), (19), (20), (21), (22): Xaa is A or G
  MOD_RES (23), (24), (25), (26): Xaa is A or G or is absent
KAXXVPTELSAISMLYLXXXXXXXXXLKNYQDMVVEGXGX

SEQ ID NO: 8864 - protein, 38 aa, Artificial Sequence
  GFR-binding peptide
  MOD_RES (1), (38): Xaa is C or S
XRPTQVQLSAISVLYLEIVRKKPIFLKNYQTLEDHLAX

SEQ ID NO: 8865 - protein, 35 aa, Artificial Sequence
  GFR-binding peptide
  MOD_RES (1), (33), (35): Xaa is C or S
XAPTKLSAISVLYLDSSNNVILKNYQNMVVKAXGX

SEQ ID NO: 8866 - protein, 33 aa, Artificial Sequence
  GFR-binding peptide
  MOD_RES (1), (1): Xaa is C or S
  MOD_RES (15), (16), (17), (18), (19): Xaa is A or G
  MOD_RES (20), (21), (22), (23): Xaa is A or G or is absent
XAPTQLSAISVLYLXXXXXXXXXLKNYQNMVVR

SEQ ID NO: 8867 - protein, 42 aa, Artificial Sequence
  GFR-binding peptide
  MOD_RES (4), (5), (39), (41): Xaa is C or S
  MOD_RES (19), (20), (21), (22), (23): Xaa is A or G
  MOD_RES (24), (25), (26), (27): Xaa is A or G or is absent
PKAXXVPTELSPISMLYKXXXXXXXXXLKYHYEMVVEGXGXR

SEQ ID NO: 8868 - protein, 35 aa, Artificial Sequence
  GFR-binding peptide
  MOD_RES (3), (4), (35): Xaa is C or S
SPXXVPQDLNAISILYFVGRTPKVLKKYRMVVKSX

SEQ ID NO: 8869 - protein, 38 aa, Artificial Sequence
  GFR-binding peptide
  MOD_RES (3), (4), (36), (38): Xaa is C or S
KPXXAPTKLSATSVLYYDDSSNVILRKHRNMVVRSXGX

SEQ ID NO: 8870 - protein, 39 aa, Artificial Sequence
  GFR-binding peptide
  MOD_RES (2), (3), (37), (39): Xaa is C or S
  MOD_RES (17), (18), (19), (20), (21): Xaa is A or G
  MOD_RES (22), (23), (24), (25): Xaa is A or G or is absent
AXXAPTKLNAISVLYFXXXXXXXXXLKKYRNMVVKAXGX

SEQ ID NO: 8871 - protein, 36 aa, Artificial Sequence
  GFR-binding peptide
  MOD_RES (4), (5): Xaa is C or S
PKPXXAPTKLSPISVLYKDDSSNVILKYHYNMVVRS

SEQ ID NO: 8872 - protein, 41 aa, Artificial Sequence
  GFR-binding peptide
  MOD_RES (7), (39), (41): Xaa is C or S
HVTKPTXAPTKLSPISVLYKDDSSNVILKYHYNMVVRSXGX

SEQ ID NO: 8873 - protein, 38 aa, Artificial Sequence
  GFR-binding peptide
  MOD_RES (5), (6), (38): Xaa is C or S
IPKAXXVPTELSPISMLYKDENEKVVLKYHYDMVVEGX

SEQ ID NO: 8874 - protein, 36 aa, Artificial Sequence
  GFR-binding peptide
  MOD_RES (3), (4): Xaa is C or S
KAXXVPTKLNAISVLYFDDMGVPTLKKYREGMSVAE

SEQ ID NO: 8875 - protein, 35 aa, Artificial Sequence
  GFR-binding peptide
  MOD_RES (1), (35): Xaa is C or S
  MOD_RES (15), (16), (17), (18), (19): Xaa is A or G
  MOD_RES (20), (21), (22), (23): Xaa is A or G or is absent
XAPTQLSAISVLYLXXXXXXXXXLKNYQNMVVRAX

SEQ ID NO: 8876 - protein, 36 aa, Artificial Sequence
  GFR-binding peptide
  MOD_RES (1), (36): Xaa is C or S
  MOD_RES (15), (16), (17), (18), (19): Xaa is A or G
  MOD_RES (20), (21), (22), (23): Xaa is A or G or is absent
XVPTKLSATSVLYYXXXXXXXXXLRKHREGMSVAEX

SEQ ID NO: 8877 - protein, 44 aa, Artificial Sequence
  GFR-binding peptide
  MOD_RES (5), (42), (44): Xaa is C or S
  MOD_RES (21), (22), (23), (24), (25): Xaa is A or G
  MOD_RES (26), (27), (28), (29): Xaa is A or G or is absent
RNVQXRPTQVQLNAISVLYFXXXXXXXXXLKKYRTLEDHLAXKX

SEQ ID NO: 8878 - protein, 37 aa, Artificial Sequence
  GFR-binding peptide
  MOD_RES (3), (4), (36): Xaa is C or S
KAXXVPTELSATSMLYYDENEKVVLRKHRDMVVEGXG

SEQ ID NO: 8879 - protein, 39 aa, Artificial Sequence
  GFR-binding peptide
  MOD_RES (6), (7): Xaa is C or S
  MOD_RES (21), (22), (23), (24), (25): Xaa is A or G
  MOD_RES (26), (27), (28), (29): Xaa is A or G or is absent
AVPKAXXAPTKLSAISVLYLXXXXXXXXXLKNYQNMVVK

SEQ ID NO: 8880 - protein, 31 aa, Artificial Sequence
  GFR-binding peptide
  MOD_RES (31), (31): Xaa is C or S
VSQDLSPISILYKIGKTPKILKYHYMIVKSX

SEQ ID NO: 8881 - protein, 35 aa, Artificial Sequence
  GFR-binding peptide
  MOD_RES (1), (2), (35): Xaa is C or S
  MOD_RES (16), (17), (18), (19), (20): Xaa is A or G
  MOD_RES (21), (22), (23), (24): Xaa is A or G or is absent
XXVPQALSAISILYLXXXXXXXXXLKNYQMIVRSX

SEQ ID NO: 8882 - protein, 39 aa, Artificial Sequence
  GFR-binding peptide
  MOD_RES (3), (3): Xaa is C or S
VQXRPTQVQLSAISVLYLEIVRKKPIFLKNYQTLEDHLA

SEQ ID NO: 8883 - protein, 39 aa, Artificial Sequence
  GFR-binding peptide
  MOD_RES (3), (3): Xaa is C or S
VQXRPTQVQLSATSVLYYEIVRKKPIFLRKHRTLEDHLA

SEQ ID NO: 8884 - protein, 39 aa, Artificial Sequence
  GFR-binding peptide
  MOD_RES (4), (4): Xaa is C or S
NVQXRPTQVQLSATSVLYYEIVRKKPIFLRKHRTLEDHL

SEQ ID NO: 8885 - protein, 40 aa, Artificial Sequence
  GFR-binding peptide
  MOD_RES (6), (7): Xaa is C or S
  MOD_RES (21), (22), (23), (24), (25): Xaa is A or G
  MOD_RES (26), (27), (28), (29): Xaa is A or G or is absent
KIPKAXXVPTELSPISMLYKXXXXXXXXXLKYHYDMVVEG

SEQ ID NO: 8886 - protein, 32 aa, Artificial Sequence
  GFR-binding peptide
  MOD_RES (1), (2): Xaa is C or S
XXVPQALSAISILYLVGRKPKVLKNYQMIVRS

SEQ ID NO: 8887 - protein, 35 aa, Artificial Sequence
  GFR-binding peptide
  MOD_RES (2), (2): Xaa is C or S
  MOD_RES (16), (17), (18), (19), (20): Xaa is A or G
  MOD_RES (21), (22), (23), (24): Xaa is A or G or is absent
TXAPTKLSPISVLYKXXXXXXXXXLKYHYNMVVRS

SEQ ID NO: 8888 - protein, 41 aa, Artificial Sequence
  GFR-binding peptide
  MOD_RES (4), (5), (40): Xaa is C or S
  MOD_RES (19), (20), (21), (22), (23): Xaa is A or G
  MOD_RES (24), (25), (26), (27): Xaa is A or G or is absent
GKAXXVPTKLSAISVLYLXXXXXXXXXLKNYQEGMSVAEXG

SEQ ID NO: 8889 - protein, 37 aa, Artificial Sequence
  GFR-binding peptide
  MOD_RES (1), (2), (35), (37): Xaa is C or S
  MOD_RES (16), (17), (18), (19), (20): Xaa is A or G
  MOD_RES (21), (22), (23), (24): Xaa is A or G or is absent
XXVPQDLNAISILYFXXXXXXXXXLKKYRMVVKSXKX

SEQ ID NO: 8890 - protein, 40 aa, Artificial Sequence
  GFR-binding peptide
  MOD_RES (5), (6), (38), (40): Xaa is C or S
VPKAXXAPTKLSAISVLYLDSSNNVILKNYQNMVVKAXGX

SEQ ID NO: 8891 - protein, 35 aa, Artificial Sequence
  GFR-binding peptide
  MOD_RES (1), (2), (34): Xaa is C or S
XXAPTKLNAISVLYFDSSNNVILKKYRNMVVKAXG

SEQ ID NO: 8892 - protein, 40 aa, Artificial Sequence
  GFR-binding peptide
  MOD_RES (5), (6), (37), (39): Xaa is C or S
SAAPXXVPQALSAISILYLVGRKPKVLKNYQMIVRSXKXS

SEQ ID NO: 8893 - protein, 37 aa, Artificial Sequence
  GFR-binding peptide
  MOD_RES (2), (3), (36): Xaa is C or S
  MOD_RES (17), (18), (19), (20), (21): Xaa is A or G
  MOD_RES (22), (23), (24), (25): Xaa is A or G or is absent
PXXVSQDLSPISILYKXXXXXXXXXLKYHYMIVKSXK

SEQ ID NO: 8894 - protein, 40 aa, Artificial Sequence
  GFR-binding peptide
  MOD_RES (5), (6), (40): Xaa is C or S
  MOD_RES (20), (21), (22), (23), (24): Xaa is A or G
  MOD_RES (25), (26), (27), (28): Xaa is A or G or is absent
VPKPXXAPTQLSATSVLYYXXXXXXXXXLRKHRNMVVRAX

SEQ ID NO: 8895 - protein, 37 aa, Artificial Sequence
  GFR-binding peptide
  MOD_RES (6), (7): Xaa is C or S
ASASPXXVSQDLNAISILYFIGKTPKILKKYRMIVKS

SEQ ID NO: 8896 - protein, 42 aa, Artificial Sequence
  GFR-binding peptide
  MOD_RES (5), (6), (41): Xaa is C or S
  MOD_RES (20), (21), (22), (23), (24): Xaa is A or G
  MOD_RES (25), (26), (27), (28): Xaa is A or G or is absent
VGKAXXVPTKLNAISVLYFXXXXXXXXXLKKYREGMSVAEXG

SEQ ID NO: 8897 - protein, 34 aa, Artificial Sequence
  GFR-binding peptide
  MOD_RES (2), (2): Xaa is C or S
  MOD_RES (16), (17), (18), (19), (20): Xaa is A or G
  MOD_RES (21), (22), (23), (24): Xaa is A or G or is absent
TXAPTKLNAISVLYFXXXXXXXXXLKKYRNMVVR

SEQ ID NO: 8898 - protein, 41 aa, Artificial Sequence
  GFR-binding peptide
  MOD_RES (6), (7), (38), (40): Xaa is C or S
ASAAPXXVPQALSAISILYLVGRKPKVLKNYQMIVRSXKXS

SEQ ID NO: 8899 - protein, 41 aa, Artificial Sequence
  GFR-binding peptide
  MOD_RES (5), (6), (41): Xaa is C or S
  MOD_RES (20), (21), (22), (23), (24): Xaa is A or G
  MOD_RES (25), (26), (27), (28): Xaa is A or G or is absent
VGKAXXVPTKLSPISVLYKXXXXXXXXXLKYHYEGMSVAEX

SEQ ID NO: 8900 - protein, 38 aa, Artificial Sequence
  GFR-binding peptide
  MOD_RES (1), (2), (37): Xaa is C or S
  MOD_RES (16), (17), (18), (19), (20): Xaa is A or G
  MOD_RES (21), (22), (23), (24): Xaa is A or G or is absent
XXVPTKLSATSVLYYXXXXXXXXXLRKHREGMSVAEXG

SEQ ID NO: 8901 - protein, 35 aa, Artificial Sequence
  GFR-binding peptide
  MOD_RES (2), (3): Xaa is C or S
  MOD_RES (17), (18), (19), (20), (21): Xaa is A or G
  MOD_RES (22), (23), (24), (25): Xaa is A or G or is absent
PXXVPQALSAISILYLXXXXXXXXXLKNYQMIVRS

SEQ ID NO: 8902 - protein, 39 aa, Artificial Sequence
  GFR-binding peptide
  MOD_RES (1), (2), (36), (38): Xaa is C or S
  MOD_RES (16), (17), (18), (19), (20): Xaa is A or G
  MOD_RES (21), (22), (23), (24): Xaa is A or G or is absent
XXAPTQLSAISVLYLXXXXXXXXXLKNYQNMVVRAXGXH

SEQ ID NO: 8903 - protein, 34 aa, Artificial Sequence
  GFR-binding peptide
  MOD_RES (34), (34): Xaa is C or S
  MOD_RES (14), (15), (16), (17), (18): Xaa is A or G
  MOD_RES (19), (20), (21), (22): Xaa is A or G or is absent
APTQLSPISVLYKXXXXXXXXXLKYHYNMVVRAX

SEQ ID NO: 8904 - protein, 35 aa, Artificial Sequence
  GFR-binding peptide
  MOD_RES (2), (3): Xaa is C or S
AXXVPTKLSAISVLYLDDMGVPTLKNYQEGMSVAE

SEQ ID NO: 8905 - protein, 36 aa, Artificial Sequence
  GFR-binding peptide
  MOD_RES (4), (5), (36): Xaa is C or S
ASPXXVPQDLSAISILYLVGRTPKVLKNYQMVVKSX

SEQ ID NO: 8906 - protein, 35 aa, Artificial Sequence
  GFR-binding peptide
  MOD_RES (1), (2), (34): Xaa is C or S
XXVPTELSATSMLYYDEYDKVVLRKHREMVVEGXG

SEQ ID NO: 8907 - protein, 35 aa, Artificial Sequence
  GFR-binding peptide
  MOD_RES (1), (32), (34): Xaa is C or S
XVPQDLSPISILYKVGRTPKVLKYHYMVVKSXKXS

SEQ ID NO: 8908 - protein, 31 aa, Artificial Sequence
  GFR-binding peptide
  MOD_RES (1), (1): Xaa is C or S
XAPTQLSAISVLYLDDSSNVILKNYQNMVVR

SEQ ID NO: 8909 - protein, 40 aa, Artificial Sequence
  GFR-binding peptide
  MOD_RES (2), (39): Xaa is C or S
  MOD_RES (18), (19), (20), (21), (22): Xaa is A or G
  MOD_RES (23), (24), (25), (26): Xaa is A or G or is absent
QXRPTQVQLSATSVLYYXXXXXXXXXLRKHRTLEDHLAXK

SEQ ID NO: 8910 - protein, 42 aa, Artificial Sequence
  GFR-binding peptide
  MOD_RES (5), (6), (39), (41): Xaa is C or S
  MOD_RES (20), (21), (22), (23), (24): Xaa is A or G
  MOD_RES (25), (26), (27), (28): Xaa is A or G or is absent
SAAPXXVPQALSAISILYLXXXXXXXXXLKNYQMIVRSXKXS

SEQ ID NO: 8911 - protein, 34 aa, Artificial Sequence
  GFR-binding peptide
  MOD_RES (1), (32), (34): Xaa is C or S
XVPQALSPISILYKVGRKPKVLKYHYMIVRSXKX

SEQ ID NO: 8912 - protein, 41 aa, Artificial Sequence
  GFR-binding peptide
  MOD_RES (6), (7), (40): Xaa is C or S
  MOD_RES (21), (22), (23), (24), (25): Xaa is A or G
  MOD_RES (26), (27), (28), (29): Xaa is A or G or is absent
ASASPXXVSQDLSAISILYLXXXXXXXXXLKNYQMIVKSXK

SEQ ID NO: 8913 - protein, 41 aa, Artificial Sequence
  GFR-binding peptide
  MOD_RES (6), (7), (40): Xaa is C or S
  MOD_RES (21), (22), (23), (24), (25): Xaa is A or G
  MOD_RES (26), (27), (28), (29): Xaa is A or G or is absent
ASASPXXVSQDLNAISILYFXXXXXXXXXLKKYRMIVKSXK

SEQ ID NO: 8914 - protein, 38 aa, Artificial Sequence
  GFR-binding peptide
  MOD_RES (5), (6): Xaa is C or S
  MOD_RES (20), (21), (22), (23), (24): Xaa is A or G
  MOD_RES (25), (26), (27), (28): Xaa is A or G or is absent
VPKAXXAPTKLSPISVLYKXXXXXXXXXLKYHYNMVVK

SEQ ID NO: 8915 - protein, 39 aa, Artificial Sequence
  GFR-binding peptide
  MOD_RES (2), (3), (37), (39): Xaa is C or S
  MOD_RES (17), (18), (19), (20), (21): Xaa is A or G
  MOD_RES (22), (23), (24), (25): Xaa is A or G or is absent
PXXAPTKLSAISVLYLXXXXXXXXXLKNYQNMVVRSXGX

SEQ ID NO: 8916 - protein, 35 aa, Artificial Sequence
  GFR-binding peptide
  MOD_RES (32), (34): Xaa is C or S
APTKLSAISVLYLDDSSNVILKNYQNMVVRSXGXH

SEQ ID NO: 8917 - protein, 36 aa, Artificial Sequence
  GFR-binding peptide
  MOD_RES (3), (4), (35): Xaa is C or S
APXXVPQALSATSILYYVGRKPKVLRKHRMIVRSXK

SEQ ID NO: 8918 - protein, 35 aa, Artificial Sequence
  GFR-binding peptide
  MOD_RES (4), (5): Xaa is C or S
PKPXXAPTKLSATSVLYYDDSSNVILRKHRNMVVR

SEQ ID NO: 8919 - protein, 39 aa, Artificial Sequence
  GFR-binding peptide
  MOD_RES (2), (3), (36), (38): Xaa is C or S
AXXVPTKLNAISVLYFDDMGVPTLKKYREGMSVAEXGXR

SEQ ID NO: 8920 - protein, 38 aa, Artificial Sequence
  GFR-binding peptide
  MOD_RES (3), (4), (36), (38): Xaa is C or S
KAXXVPTELNAISMLYFDENEKVVLKKYRDMVVEGXGX

SEQ ID NO: 8921 - protein, 35 aa, Artificial Sequence
  GFR-binding peptide
  MOD_RES (1), (2), (35): Xaa is C or S
  MOD_RES (16), (17), (18), (19), (20): Xaa is A or G
  MOD_RES (21), (22), (23), (24): Xaa is A or G or is absent
XXVPQALSATSILYYXXXXXXXXXLRKHRMIVRSX

SEQ ID NO: 8922 - protein, 45 aa, Artificial Sequence
  GFR-binding peptide
  MOD_RES (6), (7), (42), (44): Xaa is C or S
  MOD_RES (21), (22), (23), (24), (25): Xaa is A or G
  MOD_RES (26), (27), (28), (29): Xaa is A or G or is absent
KVGKAXXVPTKLNAISVLYFXXXXXXXXXLKKYREGMSVAEXGXR

SEQ ID NO: 8923 - protein, 37 aa, Artificial Sequence
  GFR-binding peptide
  MOD_RES (3), (4), (37): Xaa is C or S
KAXXVPTKLNAISVLYFDDMGVPTLKKYREGMSVAEX

SEQ ID NO: 8924 - protein, 36 aa, Artificial Sequence
  GFR-binding peptide
  MOD_RES (1), (33), (35): Xaa is C or S
XVPTELSPISMLYKDEYDKVVLKYHYEMVVEGXGXR

SEQ ID NO: 8925 - protein, 33 aa, Artificial Sequence
  GFR-binding peptide
  MOD_RES (1), (1): Xaa is C or S
  MOD_RES (15), (16), (17), (18), (19): Xaa is A or G
  MOD_RES (20), (21), (22), (23): Xaa is A or G or is absent
XVPTELNAISMLYFXXXXXXXXXLKKYRDMVVE

SEQ ID NO: 8926 - protein, 40 aa, Artificial Sequence
  GFR-binding peptide
  MOD_RES (5), (6), (38), (40): Xaa is C or S
IPKAXXVPTELNAISMLYFDEYDKVVLKKYREMVVEGXGX

SEQ ID NO: 8927 - protein, 39 aa, Artificial Sequence
  GFR-binding peptide
  MOD_RES (6), (7), (38): Xaa is C or S
ASASPXXVSQDLSAISILYLIGKTPKILKNYQMIVKSXK

SEQ ID NO: 8928 - protein, 40 aa, Artificial Sequence
  GFR-binding peptide
  MOD_RES (4), (5), (39): Xaa is C or S
  MOD_RES (19), (20), (21), (22), (23): Xaa is A or G
  MOD_RES (24), (25), (26), (27): Xaa is A or G or is absent
PKPXXAPTQLSAISVLYLXXXXXXXXXLKNYQNMVVRAXG

SEQ ID NO: 8929 - protein, 43 aa, Artificial Sequence
  GFR-binding peptide
  MOD_RES (6), (7), (41), (43): Xaa is C or S
  MOD_RES (21), (22), (23), (24), (25): Xaa is A or G
  MOD_RES (26), (27), (28), (29): Xaa is A or G or is absent
AVPKAXXAPTKLSATSVLYYXXXXXXXXXLRKHRNMVVKAXGX

SEQ ID NO: 8930 - protein, 42 aa, Artificial Sequence
  GFR-binding peptide
  MOD_RES (4), (5), (39), (41): Xaa is C or S
  MOD_RES (19), (20), (21), (22), (23): Xaa is A or G
  MOD_RES (24), (25), (26), (27): Xaa is A or G or is absent
PKAXXAPTKLSATSVLYYXXXXXXXXXLRKHRNMVVKAXGXH

SEQ ID NO: 8931 - protein, 39 aa, Artificial Sequence
  GFR-binding peptide
  MOD_RES (2), (3), (37), (39): Xaa is C or S
  MOD_RES (17), (18), (19), (20), (21): Xaa is A or G
  MOD_RES (22), (23), (24), (25): Xaa is A or G or is absent
PXXAPTQLSATSVLYYXXXXXXXXXLRKHRNMVVRAXGX

SEQ ID NO: 8932 - protein, 36 aa, Artificial Sequence
  GFR-binding peptide
  MOD_RES (2), (2): Xaa is C or S
QXRPTQVQLSAISVLYLEIVRKKPIFLKNYQTLEDH

SEQ ID NO: 8933 - protein, 32 aa, Artificial Sequence
  GFR-binding peptide
  MOD_RES (14), (15), (16), (17), (18): Xaa is A or G
  MOD_RES (19), (20), (21), (22): Xaa is A or G or is absent
VPQDLSPISILYKXXXXXXXXXLKYHYMVVKS

SEQ ID NO: 8934 - protein, 32 aa, Artificial Sequence
  GFR-binding peptide
  MOD_RES (31), (31): Xaa is C or S
VPQDLSPISILYKVGRTPKVLKYHYMVVKSXK

SEQ ID NO: 8935 - protein, 39 aa, Artificial Sequence
  GFR-binding peptide
  MOD_RES (3), (4), (37), (39): Xaa is C or S
  MOD_RES (18), (19), (20), (21), (22): Xaa is A or G
  MOD_RES (23), (24), (25), (26): Xaa is A or G or is absent
APXXVPQALNAISILYFXXXXXXXXXLKKYRMIVRSXKX

SEQ ID NO: 8936 - protein, 39 aa, Artificial Sequence
  GFR-binding peptide
  MOD_RES (4), (4): Xaa is C or S
  MOD_RES (20), (21), (22), (23), (24): Xaa is A or G
  MOD_RES (25), (26), (27), (28): Xaa is A or G or is absent
NVQXRPTQVQLSAISVLYLXXXXXXXXXLKNYQTLEDHL

SEQ ID NO: 8937 - protein, 35 aa, Artificial Sequence
  GFR-binding peptide
  MOD_RES (1), (32), (34): Xaa is C or S
XVPQALSAISILYLVGRKPKVLKNYQMIVRSXKXS

SEQ ID NO: 8938 - protein, 40 aa, Artificial Sequence
  GFR-binding peptide
  MOD_RES (6), (7): Xaa is C or S
  MOD_RES (21), (22), (23), (24), (25): Xaa is A or G
  MOD_RES (26), (27), (28), (29): Xaa is A or G or is absent
TVPKPXXAPTQLNAISVLYFXXXXXXXXXLKKYRNMVVRA

SEQ ID NO: 8939 - protein, 37 aa, Artificial Sequence
  GFR-binding peptide
  MOD_RES (2), (3): Xaa is C or S
  MOD_RES (17), (18), (19), (20), (21): Xaa is A or G
  MOD_RES (22), (23), (24), (25): Xaa is A or G or is absent
AXXVPTKLNAISVLYFXXXXXXXXXLKKYREGMSVAE

SEQ ID NO: 8940 - protein, 38 aa, Artificial Sequence
  GFR-binding peptide
  MOD_RES (6), (7): Xaa is C or S
KIPKAXXVPTELSATSMLYYDENEKVVLRKHRDMVVEG

SEQ ID NO: 8941 - protein, 36 aa, Artificial Sequence
  GFR-binding peptide
  MOD_RES (4), (5), (36): Xaa is C or S
ASPXXVSQDLSATSILYYIGKTPKILRKHRMIVKSX

SEQ ID NO: 8942 - protein, 37 aa, Artificial Sequence
  GFR-binding peptide
  MOD_RES (2), (3), (37): Xaa is C or S
  MOD_RES (17), (18), (19), (20), (21): Xaa is A or G
  MOD_RES (22), (23), (24), (25): Xaa is A or G or is absent
AXXVPTELSATSMLYYXXXXXXXXXLRKHREMVVEGX

SEQ ID NO: 8943 - protein, 37 aa, Artificial Sequence
  GFR-binding peptide
  MOD_RES (3), (3): Xaa is C or S
  MOD_RES (19), (20), (21), (22), (23): Xaa is A or G
  MOD_RES (24), (25), (26), (27): Xaa is A or G or is absent
VQXRPTQVQLSPISVLYKXXXXXXXXXLKYHYTLEDH

SEQ ID NO: 8944 - protein, 39 aa, Artificial Sequence
  GFR-binding peptide
  MOD_RES (1), (2), (36), (38): Xaa is C or S
  MOD_RES (16), (17), (18), (19), (20): Xaa is A or G
  MOD_RES (21), (22), (23), (24): Xaa is A or G or is absent
XXAPTKLNAISVLYFXXXXXXXXXLKKYRNMVVRSXGXH

SEQ ID NO: 8945 - protein, 39 aa, Artificial Sequence
  GFR-binding peptide
  MOD_RES (37), (39): Xaa is C or S
  MOD_RES (16), (17), (18), (19), (20): Xaa is A or G
  MOD_RES (21), (22), (23), (24): Xaa is A or G or is absent
RPTQVQLSATSVLYYXXXXXXXXXLRKHRTLEDHLAXKX

SEQ ID NO: 8946 - protein, 43 aa, Artificial Sequence
  GFR-binding peptide
  MOD_RES (3), (40), (42): Xaa is C or S
VQXRPTQVQLSAISVLYLEIVRKKPIFLKNYQTLEDHLAXKXE

SEQ ID NO: 8947 - protein, 40 aa, Artificial Sequence
  GFR-binding peptide
  MOD_RES (6), (7), (39): Xaa is C or S
KIPKAXXVPTELSATSMLYYDENEKVVLRKHRDMVVEGXG

SEQ ID NO: 8948 - protein, 38 aa, Artificial Sequence
  GFR-binding peptide
  MOD_RES (3), (4), (38): Xaa is C or S
  MOD_RES (18), (19), (20), (21), (22): Xaa is A or G
  MOD_RES (23), (24), (25), (26): Xaa is A or G or is absent
KAXXAPTKLSPISVLYKXXXXXXXXXLKYHYNMVVKAX

SEQ ID NO: 8949 - protein, 41 aa, Artificial Sequence
  GFR-binding peptide
  MOD_RES (5), (6), (38), (40): Xaa is C or S
IPKAXXVPTELSATSMLYYDEYDKVVLRKHREMVVEGXGXR

SEQ ID NO: 8950 - protein, 36 aa, Artificial Sequence
  GFR-binding peptide
  MOD_RES (2), (3): Xaa is C or S
  MOD_RES (17), (18), (19), (20), (21): Xaa is A or G
  MOD_RES (22), (23), (24), (25): Xaa is A or G or is absent
PXXAPTKLSAISVLYLXXXXXXXXXLKNYQNMVVRS

SEQ ID NO: 8951 - protein, 35 aa, Artificial Sequence
  GFR-binding peptide
  MOD_RES (2), (3), (35): Xaa is C or S
PXXAPTKLSAISVLYLDDSSNVILKNYQNMVVRSX

SEQ ID NO: 8952 - protein, 39 aa, Artificial Sequence
  GFR-binding peptide
  MOD_RES (5), (6), (38): Xaa is C or S
VPKPXXAPTKLSPISVLYKDDSSNVILKYHYNMVVRSXG

SEQ ID NO: 8953 - protein, 42 aa, Artificial Sequence
  GFR-binding peptide
  MOD_RES (3), (40), (42): Xaa is C or S
VQXRPTQVQLSAISVLYLEIVRKKPIFLKNYQTLEDHLAXKX

SEQ ID NO: 8954 - protein, 41 aa, Artificial Sequence
  GFR-binding peptide
  MOD_RES (3), (40): Xaa is C or S
  MOD_RES (19), (20), (21), (22), (23): Xaa is A or G
  MOD_RES (24), (25), (26), (27): Xaa is A or G or is absent
VQXRPTQVQLSATSVLYYXXXXXXXXXLRKHRTLEDHLAXK

SEQ ID NO: 8955 - protein, 42 aa, Artificial Sequence
  GFR-binding peptide
  MOD_RES (6), (7), (39), (41): Xaa is C or S
TVPKPXXAPTQLSAISVLYLDDSSNVILKNYQNMVVRAXGXH

SEQ ID NO: 8956 - protein, 31 aa, Artificial Sequence
  GFR-binding peptide
  MOD_RES (1), (1): Xaa is C or S
XAPTKLSATSVLYYDDSSNVILRKHRNMVVR

SEQ ID NO: 8957 - protein, 35 aa, Artificial Sequence
  GFR-binding peptide
  MOD_RES (1), (33), (35): Xaa is C or S
XVPTELNAISMLYFDENEKVVLKKYRDMVVEGXGX

SEQ ID NO: 8958 - protein, 33 aa, Artificial Sequence
  GFR-binding peptide
  MOD_RES (2), (3): Xaa is C or S
AXXVPTELSPISMLYKDEYDKVVLKYHYEMVVE

SEQ ID NO: 8959 - protein, 40 aa, Artificial Sequence
  GFR-binding peptide
  MOD_RES (3), (4), (37), (39): Xaa is C or S
  MOD_RES (18), (19), (20), (21), (22): Xaa is A or G
  MOD_RES (23), (24), (25), (26): Xaa is A or G or is absent
APXXVPQALNAISILYFXXXXXXXXXLKKYRMIVRSXKXS

SEQ ID NO: 8960 - protein, 39 aa, Artificial Sequence
  GFR-binding peptide
  MOD_RES (6), (7), (38): Xaa is C or S
ASASPXXVPQDLSAISILYLVGRTPKVLKNYQMVVKSXK

SEQ ID NO: 8961 - protein, 36 aa, Artificial Sequence
  GFR-binding peptide
  MOD_RES (2), (34), (36): Xaa is C or S
TXAPTKLSATSVLYYDDSSNVILRKHRNMVVRSXGX

SEQ ID NO: 8962 - protein, 32 aa, Artificial Sequence
  GFR-binding peptide
  MOD_RES (1), (2): Xaa is C or S
XXVPQALSPISILYKVGRKPKVLKYHYMIVRS

SEQ ID NO: 8963 - protein, 35 aa, Artificial Sequence
  GFR-binding peptide
  MOD_RES (1), (2): Xaa is C or S
  MOD_RES (16), (17), (18), (19), (20): Xaa is A or G
  MOD_RES (21), (22), (23), (24): Xaa is A or G or is absent
XXVPTELSPISMLYKXXXXXXXXXLKYHYEMVVEG

SEQ ID NO: 8964 - protein, 34 aa, Artificial Sequence
  GFR-binding peptide
  MOD_RES (32), (34): Xaa is C or S
APTQLSAISVLYLDDSSNVILKNYQNMVVRAXGX

SEQ ID NO: 8965 - protein, 37 aa, Artificial Sequence
  GFR-binding peptide
  MOD_RES (5), (6): Xaa is C or S
VPKPXXAPTQLSPISVLYKDDSSNVILKYHYNMVVRA

SEQ ID NO: 8966 - protein, 40 aa, Artificial Sequence
  GFR-binding peptide
  MOD_RES (3), (4), (38), (40): Xaa is C or S
  MOD_RES (18), (19), (20), (21), (22): Xaa is A or G
  MOD_RES (23), (24), (25), (26): Xaa is A or G or is absent
KPXXAPTKLSPISVLYKXXXXXXXXXLKYHYNMVVRSXGX

SEQ ID NO: 8967 - protein, 36 aa, Artificial Sequence
  GFR-binding peptide
  MOD_RES (35), (35): Xaa is C or S
  MOD_RES (14), (15), (16), (17), (18): Xaa is A or G
  MOD_RES (19), (20), (21), (22): Xaa is A or G or is absent
TQVQLSATSVLYYXXXXXXXXXLRKHRTLEDHLAXK

SEQ ID NO: 8968 - protein, 35 aa, Artificial Sequence
  GFR-binding peptide
  MOD_RES (32), (34): Xaa is C or S
VPTELNAISMLYFDENEKVVLKKYRDMVVEGXGXR

SEQ ID NO: 8969 - protein, 39 aa, Artificial Sequence
  GFR-binding peptide
  MOD_RES (2), (3), (36), (38): Xaa is C or S
  MOD_RES (17), (18), (19), (20), (21): Xaa is A or G
  MOD_RES (22), (23), (24), (25): Xaa is A or G or is absent
PXXVPQDLSPISILYKXXXXXXXXXLKYHYMVVKSXKXS

SEQ ID NO: 8970 - protein, 38 aa, Artificial Sequence
  GFR-binding peptide
  MOD_RES (3), (4), (35), (37): Xaa is C or S
SPXXVSQDLSATSILYYIGKTPKILRKHRMIVKSXKXS

SEQ ID NO: 8971 - protein, 36 aa, Artificial Sequence
  GFR-binding peptide
  MOD_RES (5), (6): Xaa is C or S
SAAPXXVPQALNAISILYFVGRKPKVLKKYRMIVRS

SEQ ID NO: 8972 - protein, 41 aa, Artificial Sequence
  GFR-binding peptide
  MOD_RES (4), (5), (38), (40): Xaa is C or S
  MOD_RES (19), (20), (21), (22), (23): Xaa is A or G
  MOD_RES (24), (25), (26), (27): Xaa is A or G or is absent
AAPXXVPQALNAISILYFXXXXXXXXXLKKYRMIVRSXKXS

SEQ ID NO: 8973 - protein, 38 aa, Artificial Sequence
  GFR-binding peptide
  MOD_RES (4), (5), (37): Xaa is C or S
PKPXXAPTQLSATSVLYYDDSSNVILRKHRNMVVRAXG

SEQ ID NO: 8974 - protein, 33 aa, Artificial Sequence
  GFR-binding peptide
  MOD_RES (1), (2): Xaa is C or S
XXAPTQLSPISVLYKDDSSNVILKYHYNMVVRA

SEQ ID NO: 8975 - protein, 31 aa, Artificial Sequence
  GFR-binding peptide
  MOD_RES (1), (1): Xaa is C or S
XAPTQLSPISVLYKDDSSNVILKYHYNMVVR

SEQ ID NO: 8976 - protein, 44 aa, Artificial Sequence
  GFR-binding peptide
  MOD_RES (5), (6), (41), (43): Xaa is C or S
  MOD_RES (20), (21), (22), (23), (24): Xaa is A or G
  MOD_RES (25), (26), (27), (28): Xaa is A or G or is absent
VGKAXXVPTKLNAISVLYFXXXXXXXXXLKKYREGMSVAEXGXR

SEQ ID NO: 8977 - protein, 39 aa, Artificial Sequence
  GFR-binding peptide
  MOD_RES (3), (4), (36), (38): Xaa is C or S
KAXXAPTKLNAISVLYFDSSNNVILKKYRNMVVKAXGXH

SEQ ID NO: 8978 - protein, 44 aa, Artificial Sequence
  GFR-binding peptide
  MOD_RES (6), (7), (41), (43): Xaa is C or S
  MOD_RES (21), (22), (23), (24), (25): Xaa is A or G
  MOD_RES (26), (27), (28), (29): Xaa is A or G or is absent
AVPKAXXAPTKLSPISVLYKXXXXXXXXXLKYHYNMVVKAXGXH

SEQ ID NO: 8979 - protein, 42 aa, Artificial Sequence
  GFR-binding peptide
  MOD_RES (6), (7), (41): Xaa is C or S
  MOD_RES (21), (22), (23), (24), (25): Xaa is A or G
  MOD_RES (26), (27), (28), (29): Xaa is A or G or is absent
YVPKPXXAPTKLSAISVLYLXXXXXXXXXLKNYQNMVVRSXG

SEQ ID NO: 8980 - protein, 38 aa, Artificial Sequence
  GFR-binding peptide
  MOD_RES (5), (6), (38): Xaa is C or S
IPKAXXVPTELNAISMLYFDENEKVVLKKYRDMVVEGX

SEQ ID NO: 8981 - protein, 32 aa, Artificial Sequence
  GFR-binding peptide
  MOD_RES (31), (31): Xaa is C or S
VPQDLNAISILYFVGRTPKVLKKYRMVVKSXK

SEQ ID NO: 8982 - protein, 42 aa, Artificial Sequence
  GFR-binding peptide
  MOD_RES (4), (41): Xaa is C or S
  MOD_RES (20), (21), (22), (23), (24): Xaa is A or G
  MOD_RES (25), (26), (27), (28): Xaa is A or G or is absent
NVQXRPTQVQLSPISVLYKXXXXXXXXXLKYHYTLEDHLAXK

SEQ ID NO: 8983 - protein, 38 aa, Artificial Sequence
  GFR-binding peptide
  MOD_RES (5), (6), (37): Xaa is C or S
SASPXXVSQDLSPISILYKIGKTPKILKYHYMIVKSXK

SEQ ID NO: 8984 - protein, 42 aa, Artificial Sequence
  GFR-binding peptide
  MOD_RES (4), (5), (39), (41): Xaa is C or S
  MOD_RES (19), (20), (21), (22), (23): Xaa is A or G
  MOD_RES (24), (25), (26), (27): Xaa is A or G or is absent
PKAXXVPTELSPISMLYKXXXXXXXXXLKYHYDMVVEGXGXR

SEQ ID NO: 8985 - protein, 40 aa, Artificial Sequence
  GFR-binding peptide
  MOD_RES (6), (40): Xaa is C or S
  MOD_RES (20), (21), (22), (23), (24): Xaa is A or G
  MOD_RES (25), (26), (27), (28): Xaa is A or G or is absent
VTKPTXAPTKLSATSVLYYXXXXXXXXXLRKHRNMVVRSX

SEQ ID NO: 8986 - protein, 39 aa, Artificial Sequence
  GFR-binding peptide
  MOD_RES (36), (38): Xaa is C or S
PTQVQLSPISVLYKEIVRKKPIFLKYHYTLEDHLAXKXE

SEQ ID NO: 8987 - protein, 35 aa, Artificial Sequence
  GFR-binding peptide
  MOD_RES (3), (3): Xaa is C or S
  MOD_RES (17), (18), (19), (20), (21): Xaa is A or G
  MOD_RES (22), (23), (24), (25): Xaa is A or G or is absent
PTXAPTKLSAISVLYLXXXXXXXXXLKNYQNMVVR

SEQ ID NO: 8988 - protein, 35 aa, Artificial Sequence
  GFR-binding peptide
  MOD_RES (35), (35): Xaa is C or S
TQVQLSATSVLYYEIVRKKPIFLRKHRTLEDHLAX

SEQ ID NO: 8989 - protein, 38 aa, Artificial Sequence
  GFR-binding peptide
  MOD_RES (5), (6): Xaa is C or S
  MOD_RES (20), (21), (22), (23), (24): Xaa is A or G
  MOD_RES (25), (26), (27), (28): Xaa is A or G or is absent
VPKAXXAPTKLSATSVLYYXXXXXXXXXLRKHRNMVVK

SEQ ID NO: 8990 - protein, 39 aa, Artificial Sequence
  GFR-binding peptide
  MOD_RES (1), (36), (38): Xaa is C or S
  MOD_RES (15), (16), (17), (18), (19): Xaa is A or G
  MOD_RES (20), (21), (22), (23): Xaa is A or G or is absent
XVPTKLNAISVLYFXXXXXXXXXLKKYREGMSVAEXGXR

SEQ ID NO: 8991 - protein, 41 aa, Artificial Sequence
  GFR-binding peptide
  MOD_RES (5), (6), (40): Xaa is C or S
  MOD_RES (20), (21), (22), (23), (24): Xaa is A or G
  MOD_RES (25), (26), (27), (28): Xaa is A or G or is absent
IPKAXXVPTELSAISMLYLXXXXXXXXXLKNYQEMVVEGXG

SEQ ID NO: 8992 - protein, 33 aa, Artificial Sequence
  GFR-binding peptide
  MOD_RES (1), (33): Xaa is C or S
XAPTKLSPISVLYKDSSNNVILKYHYNMVVKAX

SEQ ID NO: 8993 - protein, 30 aa, Artificial Sequence
  GFR-binding peptide
VPTELSATSMLYYDENEKVVLRKHRDMVVE

SEQ ID NO: 8994 - protein, 38 aa, Artificial Sequence
  GFR-binding peptide
  MOD_RES (36), (38): Xaa is C or S
PTQVQLSPISVLYKEIVRKKPIFLKYHYTLEDHLAXKX

SEQ ID NO: 8995 - protein, 35 aa, Artificial Sequence
  GFR-binding peptide
  MOD_RES (1), (34): Xaa is C or S
  MOD_RES (15), (16), (17), (18), (19): Xaa is A or G
  MOD_RES (20), (21), (22), (23): Xaa is A or G or is absent
XVPQALSAISILYLXXXXXXXXXLKNYQMIVRSXK

SEQ ID NO: 8996 - protein, 39 aa, Artificial Sequence
  GFR-binding peptide
  MOD_RES (4), (5), (39): Xaa is C or S
  MOD_RES (19), (20), (21), (22), (23): Xaa is A or G
  MOD_RES (24), (25), (26), (27): Xaa is A or G or is absent
PKPXXAPTQLSATSVLYYXXXXXXXXXLRKHRNMVVRAX

SEQ ID NO: 8997 - protein, 33 aa, Artificial Sequence
  GFR-binding peptide
  MOD_RES (1), (33): Xaa is C or S
XVPTELNAISMLYFDEYDKVVLKKYREMVVEGX

SEQ ID NO: 8998 - protein, 41 aa, Artificial Sequence
  GFR-binding peptide
  MOD_RES (4), (5), (39), (41): Xaa is C or S
  MOD_RES (19), (20), (21), (22), (23): Xaa is A or G
  MOD_RES (24), (25), (26), (27): Xaa is A or G or is absent
PKAXXAPTKLSPISVLYKXXXXXXXXXLKYHYNMVVKAXGX

SEQ ID NO: 8999 - protein, 40 aa, Artificial Sequence
  GFR-binding peptide
  MOD_RES (6), (7), (38), (40): Xaa is C or S
ASAAPXXVPQALSATSILYYVGRKPKVLRKHRMIVRSXKX

SEQ ID NO: 9000 - protein, 39 aa, Artificial Sequence
  GFR-binding peptide
  MOD_RES (7), (39): Xaa is C or S
HVTKPTXAPTKLSATSVLYYDDSSNVILRKHRNMVVRSX

SEQ ID NO: 9001 - protein, 36 aa, Artificial Sequence
  GFR-binding peptide
  MOD_RES (2), (3): Xaa is C or S
  MOD_RES (17), (18), (19), (20), (21): Xaa is A or G
  MOD_RES (22), (23), (24), (25): Xaa is A or G or is absent
PXXAPTQLNAISVLYFXXXXXXXXXLKKYRNMVVRA

SEQ ID NO: 9002 - protein, 39 aa, Artificial Sequence
  GFR-binding peptide
  MOD_RES (36), (38): Xaa is C or S
PTQVQLSAISVLYLEIVRKKPIFLKNYQTLEDHLAXKXE

SEQ ID NO: 9003 - protein, 31 aa, Artificial Sequence
  GFR-binding peptide
  MOD_RES (1), (1): Xaa is C or S
XVPQDLNAISILYFVGRTPKVLKKYRMVVKS

SEQ ID NO: 9004 - protein, 40 aa, Artificial Sequence
  GFR-binding peptide
  MOD_RES (37), (39): Xaa is C or S
RPTQVQLSATSVLYYEIVRKKPIFLRKHRTLEDHLAXKXE

SEQ ID NO: 9005 - protein, 38 aa, Artificial Sequence
  GFR-binding peptide
  MOD_RES (3), (4), (36), (38): Xaa is C or S
KAXXVPTELNAISMLYFDEYDKVVLKKYREMVVEGXGX

SEQ ID NO: 9006 - protein, 42 aa, Artificial Sequence
  GFR-binding peptide
  MOD_RES (5), (6), (40), (42): Xaa is C or S
  MOD_RES (20), (21), (22), (23), (24): Xaa is A or G
  MOD_RES (25), (26), (27), (28): Xaa is A or G or is absent
VPKPXXAPTKLSAISVLYLXXXXXXXXXLKNYQNMVVRSXGX

SEQ ID NO: 9007 - protein, 40 aa, Artificial Sequence
  GFR-binding peptide
  MOD_RES (2), (39): Xaa is C or S
  MOD_RES (18), (19), (20), (21), (22): Xaa is A or G
  MOD_RES (23), (24), (25), (26): Xaa is A or G or is absent
QXRPTQVQLSAISVLYLXXXXXXXXXLKNYQTLEDHLAXK

SEQ ID NO: 9008 - protein, 39 aa, Artificial Sequence
  GFR-binding peptide
  MOD_RES (4), (36), (38): Xaa is C or S
KPTXAPTKLSPISVLYKDDSSNVILKYHYNMVVRSXGXH

SEQ ID NO: 9009 - protein, 39 aa, Artificial Sequence
  GFR-binding peptide
  MOD_RES (1), (2), (36), (38): Xaa is C or S
  MOD_RES (16), (17), (18), (19), (20): Xaa is A or G
  MOD_RES (21), (22), (23), (24): Xaa is A or G or is absent
XXVPTELSAISMLYLXXXXXXXXXLKNYQEMVVEGXGXR

SEQ ID NO: 9010 - protein, 32 aa, Artificial Sequence
  GFR-binding peptide
  MOD_RES (1), (2): Xaa is C or S
XXAPTKLSPISVLYKDDSSNVILKYHYNMVVR

SEQ ID NO: 9011 - protein, 33 aa, Artificial Sequence
  GFR-binding peptide
  MOD_RES (1), (2): Xaa is C or S
XXAPTKLNAISVLYFDSSNNVILKKYRNMVVKA

SEQ ID NO: 9012 - protein, 32 aa, Artificial Sequence
  GFR-binding peptide
  MOD_RES (1), (2): Xaa is C or S
XXVPQDLNAISILYFVGRTPKVLKKYRMVVKS

SEQ ID NO: 9013 - protein, 39 aa, Artificial Sequence
  GFR-binding peptide
  MOD_RES (4), (5), (37), (39): Xaa is C or S
PKAXXVPTELSPISMLYKDEYDKVVLKYHYEMVVEGXGX

SEQ ID NO: 9014 - protein, 44 aa, Artificial Sequence
  GFR-binding peptide
  MOD_RES (6), (7), (41), (43): Xaa is C or S
  MOD_RES (21), (22), (23), (24), (25): Xaa is A or G
  MOD_RES (26), (27), (28), (29): Xaa is A or G or is absent
TVPKPXXAPTQLNAISVLYFXXXXXXXXXLKKYRNMVVRAXGXH

SEQ ID NO: 9015 - protein, 34 aa, Artificial Sequence
  GFR-binding peptide
  MOD_RES (1), (32), (34): Xaa is C or S
XVSQDLSAISILYLIGKTPKILKNYQMIVKSXKX

SEQ ID NO: 9016 - protein, 33 aa, Artificial Sequence
  GFR-binding peptide
  MOD_RES (2), (3): Xaa is C or S
PXXVSQDLSPISILYKIGKTPKILKYHYMIVKS

SEQ ID NO: 9017 - protein, 39 aa, Artificial Sequence
  GFR-binding peptide
  MOD_RES (7), (7): Xaa is C or S
  MOD_RES (21), (22), (23), (24), (25): Xaa is A or G
  MOD_RES (26), (27), (28), (29): Xaa is A or G or is absent
HVTKPTXAPTKLSAISVLYLXXXXXXXXXLKNYQNMVVR

SEQ ID NO: 9018 - protein, 45 aa, Artificial Sequence
  GFR-binding peptide
  MOD_RES (6), (7), (42), (44): Xaa is C or S
  MOD_RES (21), (22), (23), (24), (25): Xaa is A or G
  MOD_RES (26), (27), (28), (29): Xaa is A or G or is absent
KVGKAXXVPTKLSAISVLYLXXXXXXXXXLKNYQEGMSVAEXGXR

SEQ ID NO: 9019 - protein, 37 aa, Artificial Sequence
  GFR-binding peptide
  MOD_RES (6), (7): Xaa is C or S
ASASPXXVPQDLSAISILYLVGRTPKVLKNYQMVVKS

SEQ ID NO: 9020 - protein, 40 aa, Artificial Sequence
  GFR-binding peptide
  MOD_RES (5), (6), (40): Xaa is C or S
  MOD_RES (20), (21), (22), (23), (24): Xaa is A or G
  MOD_RES (25), (26), (27), (28): Xaa is A or G or is absent
IPKAXXVPTELNAISMLYFXXXXXXXXXLKKYRDMVVEGX

SEQ ID NO: 9021 - protein, 41 aa, Artificial Sequence
  GFR-binding peptide
  MOD_RES (3), (4), (38), (40): Xaa is C or S
  MOD_RES (18), (19), (20), (21), (22): Xaa is A or G
  MOD_RES (23), (24), (25), (26): Xaa is A or G or is absent
KAXXVPTELSATSMLYYXXXXXXXXXLRKHREMVVEGXGXR

SEQ ID NO: 9022 - protein, 34 aa, Artificial Sequence
  GFR-binding peptide
  MOD_RES (1), (2): Xaa is C or S
  MOD_RES (16), (17), (18), (19), (20): Xaa is A or G
  MOD_RES (21), (22), (23), (24): Xaa is A or G or is absent
XXVSQDLSATSILYYXXXXXXXXXLRKHRMIVKS

SEQ ID NO: 9023 - protein, 36 aa, Artificial Sequence
  GFR-binding peptide
  MOD_RES (3), (4): Xaa is C or S
  MOD_RES (18), (19), (20), (21), (22): Xaa is A or G
  MOD_RES (23), (24), (25), (26): Xaa is A or G or is absent
KAXXVPTELSPISMLYKXXXXXXXXXLKYHYDMVVE

SEQ ID NO: 9024 - protein, 35 aa, Artificial Sequence
  GFR-binding peptide
  MOD_RES (3), (4): Xaa is C or S
KAXXVPTELSPISMLYKDENEKVVLKYHYDMVVEG

SEQ ID NO: 9025 - protein, 35 aa, Artificial Sequence
  GFR-binding peptide
  MOD_RES (4), (5): Xaa is C or S
PKPXXAPTQLSPISVLYKDDSSNVILKYHYNMVVR

SEQ ID NO: 9026 - protein, 37 aa, Artificial Sequence
  GFR-binding peptide
  MOD_RES (2), (3), (35), (37): Xaa is C or S
PXXAPTQLSATSVLYYDDSSNVILRKHRNMVVRAXGX

SEQ ID NO: 9027 - protein, 41 aa, Artificial Sequence
  GFR-binding peptide
  MOD_RES (6), (7), (41): Xaa is C or S
  MOD_RES (21), (22), (23), (24), (25): Xaa is A or G
  MOD_RES (26), (27), (28), (29): Xaa is A or G or is absent
AVPKAXXAPTKLNAISVLYFXXXXXXXXXLKKYRNMVVKAX

SEQ ID NO: 9028 - protein, 37 aa, Artificial Sequence
  GFR-binding peptide
  MOD_RES (3), (37): Xaa is C or S
  MOD_RES (17), (18), (19), (20), (21): Xaa is A or G
  MOD_RES (22), (23), (24), (25): Xaa is A or G or is absent
PTXAPTKLSATSVLYYXXXXXXXXXLRKHRNMVVRSX

SEQ ID NO: 9029 - protein, 34 aa, Artificial Sequence
  GFR-binding peptide
  MOD_RES (1), (2): Xaa is C or S
  MOD_RES (16), (17), (18), (19), (20): Xaa is A or G
  MOD_RES (21), (22), (23), (24): Xaa is A or G or is absent
XXAPTKLSATSVLYYXXXXXXXXXLRKHRNMVVR

SEQ ID NO: 9030 - protein, 33 aa, Artificial Sequence
  GFR-binding peptide
  MOD_RES (2), (3): Xaa is C or S
PXXVSQDLSAISILYLIGKTPKILKNYQMIVKS

SEQ ID NO: 9031 - protein, 35 aa, Artificial Sequence
  GFR-binding peptide
  MOD_RES (2), (3): Xaa is C or S
AXXVPTKLNAISVLYFDDMGVPTLKKYREGMSVAE

SEQ ID NO: 9032 - protein, 33 aa, Artificial Sequence
  GFR-binding peptide
  MOD_RES (1), (33): Xaa is C or S
XAPTKLNAISVLYFDSSNNVILKKYRNMVVKAX

SEQ ID NO: 9033 - protein, 40 aa, Artificial Sequence
  GFR-binding peptide
  MOD_RES (6), (7): Xaa is C or S
  MOD_RES (21), (22), (23), (24), (25): Xaa is A or G
  MOD_RES (26), (27), (28), (29): Xaa is A or G or is absent
AVPKAXXAPTKLNAISVLYFXXXXXXXXXLKKYRNMVVKA

SEQ ID NO: 9034 - protein, 37 aa, Artificial Sequence
  GFR-binding peptide
  MOD_RES (3), (4): Xaa is C or S
  MOD_RES (18), (19), (20), (21), (22): Xaa is A or G
  MOD_RES (23), (24), (25), (26): Xaa is A or G or is absent
KAXXAPTKLSATSVLYYXXXXXXXXXLRKHRNMVVKA

SEQ ID NO: 9035 - protein, 34 aa, Artificial Sequence
  GFR-binding peptide
  MOD_RES (1), (2): Xaa is C or S
  MOD_RES (16), (17), (18), (19), (20): Xaa is A or G
  MOD_RES (21), (22), (23), (24): Xaa is A or G or is absent
XXAPTKLSATSVLYYXXXXXXXXXLRKHRNMVVK

SEQ ID NO: 9036 - protein, 36 aa, Artificial Sequence
  GFR-binding peptide
  MOD_RES (2), (34), (36): Xaa is C or S
TXAPTKLSAISVLYLDDSSNVILKNYQNMVVRSXGX

SEQ ID NO: 9037 - protein, 36 aa, Artificial Sequence
  GFR-binding peptide
  MOD_RES (34), (36): Xaa is C or S
  MOD_RES (14), (15), (16), (17), (18): Xaa is A or G
  MOD_RES (19), (20), (21), (22): Xaa is A or G or is absent
APTKLSPISVLYKXXXXXXXXXLKYHYNMVVKAXGX

SEQ ID NO: 9038 - protein, 36 aa, Artificial Sequence
  GFR-binding peptide
  MOD_RES (1), (34), (36): Xaa is C or S
  MOD_RES (15), (16), (17), (18), (19): Xaa is A or G
  MOD_RES (20), (21), (22), (23): Xaa is A or G or is absent
XVPQDLNAISILYFXXXXXXXXXLKKYRMVVKSXKX

SEQ ID NO: 9039 - protein, 37 aa, Artificial Sequence
  GFR-binding peptide
  MOD_RES (35), (37): Xaa is C or S
  MOD_RES (14), (15), (16), (17), (18): Xaa is A or G
  MOD_RES (19), (20), (21), (22): Xaa is A or G or is absent
TQVQLNAISVLYFXXXXXXXXXLKKYRTLEDHLAXKX

SEQ ID NO: 9040 - protein, 36 aa, Artificial Sequence
  GFR-binding peptide
  MOD_RES (33), (35): Xaa is C or S
  MOD_RES (14), (15), (16), (17), (18): Xaa is A or G
  MOD_RES (19), (20), (21), (22): Xaa is A or G or is absent
VSQDLNAISILYFXXXXXXXXXLKKYRMIVKSXKXS

SEQ ID NO: 9041 - protein, 39 aa, Artificial Sequence
  GFR-binding peptide
  MOD_RES (3), (4), (37), (39): Xaa is C or S
  MOD_RES (18), (19), (20), (21), (22): Xaa is A or G
  MOD_RES (23), (24), (25), (26): Xaa is A or G or is absent
SPXXVPQDLNAISILYFXXXXXXXXXLKKYRMVVKSXKX

SEQ ID NO: 9042 - protein, 39 aa, Artificial Sequence
  GFR-binding peptide
  MOD_RES (3), (37), (39): Xaa is C or S
  MOD_RES (17), (18), (19), (20), (21): Xaa is A or G
  MOD_RES (22), (23), (24), (25): Xaa is A or G or is absent
PTXAPTKLSAISVLYLXXXXXXXXXLKNYQNMVVRSXGX

SEQ ID NO: 9043 - protein, 41 aa, Artificial Sequence
  GFR-binding peptide
  MOD_RES (6), (38), (40): Xaa is C or S
VTKPTXAPTKLSAISVLYLDDSSNVILKNYQNMVVRSXGXH

SEQ ID NO: 9044 - protein, 39 aa, Artificial Sequence
  GFR-binding peptide
  MOD_RES (5), (6), (38): Xaa is C or S
VPKPXXAPTKLSAISVLYLDDSSNVILKNYQNMVVRSXG

SEQ ID NO: 9045 - protein, 34 aa, Artificial Sequence
  GFR-binding peptide
  MOD_RES (34), (34): Xaa is C or S
  MOD_RES (14), (15), (16), (17), (18): Xaa is A or G
  MOD_RES (19), (20), (21), (22): Xaa is A or G or is absent
VPTELSPISMLYKXXXXXXXXXLKYHYDMVVEGX

SEQ ID NO: 9046 - protein, 32 aa, Artificial Sequence
  GFR-binding peptide
  MOD_RES (14), (15), (16), (17), (18): Xaa is A or G
  MOD_RES (19), (20), (21), (22): Xaa is A or G or is absent
VPQDLSATSILYYXXXXXXXXXLRKHRMVVKS

SEQ ID NO: 9047 - protein, 37 aa, Artificial Sequence
  GFR-binding peptide
  MOD_RES (34), (36): Xaa is C or S
  MOD_RES (14), (15), (16), (17), (18): Xaa is A or G
  MOD_RES (19), (20), (21), (22): Xaa is A or G or is absent
APTKLSAISVLYLXXXXXXXXXLKNYQNMVVKAXGXH

SEQ ID NO: 9048 - protein, 35 aa, Artificial Sequence
  GFR-binding peptide
  MOD_RES (1), (34): Xaa is C or S
  MOD_RES (15), (16), (17), (18), (19): Xaa is A or G
  MOD_RES (20), (21), (22), (23): Xaa is A or G or is absent
XVPQDLSPISILYKXXXXXXXXXLKYHYMVVKSXK

SEQ ID NO: 9049 - protein, 40 aa, Artificial Sequence
  GFR-binding peptide
  MOD_RES (5), (6), (38), (40): Xaa is C or S
VPKPXXAPTKLSATSVLYYDDSSNVILRKHRNMVVRSXGX

SEQ ID NO: 9050 - protein, 40 aa, Artificial Sequence
  GFR-binding peptide
  MOD_RES (5), (6), (37), (39): Xaa is C or S
SASPXXVSQDLSAISILYLIGKTPKILKNYQMIVKSXKXS

SEQ ID NO: 9051 - protein, 38 aa, Artificial Sequence
  GFR-binding peptide
  MOD_RES (35), (37): Xaa is C or S
  MOD_RES (14), (15), (16), (17), (18): Xaa is A or G
  MOD_RES (19), (20), (21), (22): Xaa is A or G or is absent
TQVQLSPISVLYKXXXXXXXXXLKYHYTLEDHLAXKXE

SEQ ID NO: 9052 - protein, 37 aa, Artificial Sequence
  GFR-binding peptide
  MOD_RES (2), (3), (37): Xaa is C or S
  MOD_RES (17), (18), (19), (20), (21): Xaa is A or G
  MOD_RES (22), (23), (24), (25): Xaa is A or G or is absent
AXXAPTKLSATSVLYYXXXXXXXXXLRKHRNMVVKAX

SEQ ID NO: 9053 - protein, 43 aa, Artificial Sequence
  GFR-binding peptide
  MOD_RES (5), (6), (40), (42): Xaa is C or S
  MOD_RES (20), (21), (22), (23), (24): Xaa is A or G
  MOD_RES (25), (26), (27), (28): Xaa is A or G or is absent
IPKAXXVPTELNAISMLYFXXXXXXXXXLKKYRDMVVEGXGXR

SEQ ID NO: 9054 - protein, 40 aa, Artificial Sequence
  GFR-binding peptide
  MOD_RES (6), (7): Xaa is C or S
  MOD_RES (21), (22), (23), (24), (25): Xaa is A or G
  MOD_RES (26), (27), (28), (29): Xaa is A or G or is absent
TVPKPXXAPTQLSAISVLYLXXXXXXXXXLKNYQNMVVRA

SEQ ID NO: 9055 - protein, 35 aa, Artificial Sequence
  GFR-binding peptide
  MOD_RES (4), (5): Xaa is C or S
PKPXXAPTQLSAISVLYLDDSSNVILKNYQNMVVR

SEQ ID NO: 9056 - protein, 42 aa, Artificial Sequence
  GFR-binding peptide
  MOD_RES (6), (7), (41): Xaa is C or S
  MOD_RES (21), (22), (23), (24), (25): Xaa is A or G
  MOD_RES (26), (27), (28), (29): Xaa is A or G or is absent
SIPKAXXVPTELNAISMLYFXXXXXXXXXLKKYREMVVEGXG

SEQ ID NO: 9057 - protein, 43 aa, Artificial Sequence
  GFR-binding peptide
  MOD_RES (7), (41), (43): Xaa is C or S
  MOD_RES (21), (22), (23), (24), (25): Xaa is A or G
  MOD_RES (26), (27), (28), (29): Xaa is A or G or is absent
HVTKPTXAPTKLSATSVLYYXXXXXXXXXLRKHRNMVVRSXGX

SEQ ID NO: 9058 - protein, 36 aa, Artificial Sequence
  GFR-binding peptide
  MOD_RES (5), (6): Xaa is C or S
SAAPXXVPQALSATSILYYVGRKPKVLRKHRMIVRS

SEQ ID NO: 9059 - protein, 41 aa, Artificial Sequence
  GFR-binding peptide
  MOD_RES (4), (5), (40): Xaa is C or S
  MOD_RES (19), (20), (21), (22), (23): Xaa is A or G
  MOD_RES (24), (25), (26), (27): Xaa is A or G or is absent
GKAXXVPTKLSATSVLYYXXXXXXXXXLRKHREGMSVAEXG

SEQ ID NO: 9060 - protein, 40 aa, Artificial Sequence
  GFR-binding peptide
  MOD_RES (5), (6), (40): Xaa is C or S
  MOD_RES (20), (21), (22), (23), (24): Xaa is A or G
  MOD_RES (25), (26), (27), (28): Xaa is A or G or is absent
IPKAXXVPTELSPISMLYKXXXXXXXXXLKYHYEMVVEGX

SEQ ID NO: 9061 - protein, 32 aa, Artificial Sequence
  GFR-binding peptide
  MOD_RES (14), (15), (16), (17), (18): Xaa is A or G
  MOD_RES (19), (20), (21), (22): Xaa is A or G or is absent
TQVQLSAISVLYLXXXXXXXXXLKNYQTLEDH

SEQ ID NO: 9062 - protein, 40 aa, Artificial Sequence
  GFR-binding peptide
  MOD_RES (1), (38), (40): Xaa is C or S
XRPTQVQLSPISVLYKEIVRKKPIFLKYHYTLEDHLAXKX

SEQ ID NO: 9063 - protein, 37 aa, Artificial Sequence
  GFR-binding peptide
  MOD_RES (2), (3), (34), (36): Xaa is C or S
PXXVPQALSPISILYKVGRKPKVLKYHYMIVRSXKXS

SEQ ID NO: 9064 - protein, 43 aa, Artificial Sequence
  GFR-binding peptide
  MOD_RES (5), (6), (40), (42): Xaa is C or S
  MOD_RES (20), (21), (22), (23), (24): Xaa is A or G
  MOD_RES (25), (26), (27), (28): Xaa is A or G or is absent
VPKPXXAPTQLSATSVLYYXXXXXXXXXLRKHRNMVVRAXGXH

SEQ ID NO: 9065 - protein, 41 aa, Artificial Sequence
  GFR-binding peptide
  MOD_RES (3), (4), (38), (40): Xaa is C or S
  MOD_RES (18), (19), (20), (21), (22): Xaa is A or G
  MOD_RES (23), (24), (25), (26): Xaa is A or G or is absent
KPXXAPTQLSATSVLYYXXXXXXXXXLRKHRNMVVRAXGXH

SEQ ID NO: 9066 - protein, 39 aa, Artificial Sequence
  GFR-binding peptide
  MOD_RES (1), (2), (36), (38): Xaa is C or S
  MOD_RES (16), (17), (18), (19), (20): Xaa is A or G
  MOD_RES (21), (22), (23), (24): Xaa is A or G or is absent
XXVPTELSATSMLYYXXXXXXXXXLRKHREMVVEGXGXR

SEQ ID NO: 9067 - protein, 41 aa, Artificial Sequence
  GFR-binding peptide
  MOD_RES (5), (6), (40): Xaa is C or S
  MOD_RES (20), (21), (22), (23), (24): Xaa is A or G
  MOD_RES (25), (26), (27), (28): Xaa is A or G or is absent
IPKAXXVPTELSATSMLYYXXXXXXXXXLRKHREMVVEGXG

SEQ ID NO: 9068 - protein, 35 aa, Artificial Sequence
  GFR-binding peptide
  MOD_RES (3), (4): Xaa is C or S
KAXXAPTKLSPISVLYKDSSNNVILKYHYNMVVKA

SEQ ID NO: 9069 - protein, 44 aa, Artificial Sequence
  GFR-binding peptide
  MOD_RES (5), (42), (44): Xaa is C or S
RNVQXRPTQVQLSPISVLYKEIVRKKPIFLKYHYTLEDHLAXKX

SEQ ID NO: 9070 - protein, 39 aa, Artificial Sequence
  GFR-binding peptide
  MOD_RES (3), (4), (37), (39): Xaa is C or S
  MOD_RES (18), (19), (20), (21), (22): Xaa is A or G
  MOD_RES (23), (24), (25), (26): Xaa is A or G or is absent
SPXXVSQDLNAISILYFXXXXXXXXXLKKYRMIVKSXKX

SEQ ID NO: 9071 - protein, 38 aa, Artificial Sequence
  GFR-binding peptide
  MOD_RES (3), (4), (37): Xaa is C or S
  MOD_RES (18), (19), (20), (21), (22): Xaa is A or G
  MOD_RES (23), (24), (25), (26): Xaa is A or G or is absent
APXXVPQALNAISILYFXXXXXXXXXLKKYRMIVRSXK

SEQ ID NO: 9072 - protein, 35 aa, Artificial Sequence
  GFR-binding peptide
  MOD_RES (1), (35): Xaa is C or S
  MOD_RES (15), (16), (17), (18), (19): Xaa is A or G
  MOD_RES (20), (21), (22), (23): Xaa is A or G or is absent
XVPTELNAISMLYFXXXXXXXXXLKKYRDMVVEGX

SEQ ID NO: 9073 - protein, 39 aa, Artificial Sequence
  GFR-binding peptide
  MOD_RES (4), (5), (36), (38): Xaa is C or S
ASPXXVPQDLSPISILYKVGRTPKVLKYHYMVVKSXKXS

SEQ ID NO: 9074 - protein, 38 aa, Artificial Sequence
  GFR-binding peptide
  MOD_RES (2), (3), (37): Xaa is C or S
  MOD_RES (17), (18), (19), (20), (21): Xaa is A or G
  MOD_RES (22), (23), (24), (25): Xaa is A or G or is absent
PXXAPTKLSPISVLYKXXXXXXXXXLKYHYNMVVRSXG

SEQ ID NO: 9075 - protein, 37 aa, Artificial Sequence
  GFR-binding peptide
  MOD_RES (1), (2), (34), (36): Xaa is C or S
XXAPTKLSAISVLYLDDSSNVILKNYQNMVVRSXGXH

SEQ ID NO: 9076 - protein, 36 aa, Artificial Sequence
  GFR-binding peptide
  MOD_RES (1), (34), (36): Xaa is C or S
  MOD_RES (15), (16), (17), (18), (19): Xaa is A or G
  MOD_RES (20), (21), (22), (23): Xaa is A or G or is absent
XVSQDLSPISILYKXXXXXXXXXLKYHYMIVKSXKX

SEQ ID NO: 9077 - protein, 39 aa, Artificial Sequence
  GFR-binding peptide
  MOD_RES (6), (7): Xaa is C or S
  MOD_RES (21), (22), (23), (24), (25): Xaa is A or G
  MOD_RES (26), (27), (28), (29): Xaa is A or G or is absent
SIPKAXXVPTELSATSMLYYXXXXXXXXXLRKHREMVVE

SEQ ID NO: 9078 - protein, 41 aa, Artificial Sequence
  GFR-binding peptide
  MOD_RES (2), (39), (41): Xaa is C or S
  MOD_RES (18), (19), (20), (21), (22): Xaa is A or G
  MOD_RES (23), (24), (25), (26): Xaa is A or G or is absent
QXRPTQVQLSAISVLYLXXXXXXXXXLKNYQTLEDHLAXKX

SEQ ID NO: 9079 - protein, 36 aa, Artificial Sequence
  GFR-binding peptide
  MOD_RES (1), (35): Xaa is C or S
  MOD_RES (15), (16), (17), (18), (19): Xaa is A or G
  MOD_RES (20), (21), (22), (23): Xaa is A or G or is absent
XAPTQLSAISVLYLXXXXXXXXXLKNYQNMVVRAXG

SEQ ID NO: 9080 - protein, 31 aa, Artificial Sequence
  GFR-binding peptide
  MOD_RES (1), (1): Xaa is C or S
XAPTKLNAISVLYFDSSNNVILKKYRNMVVK

SEQ ID NO: 9081 - protein, 44 aa, Artificial Sequence
  GFR-binding peptide
  MOD_RES (5), (6), (41), (43): Xaa is C or S
  MOD_RES (20), (21), (22), (23), (24): Xaa is A or G
  MOD_RES (25), (26), (27), (28): Xaa is A or G or is absent
VGKAXXVPTKLSAISVLYLXXXXXXXXXLKNYQEGMSVAEXGXR

SEQ ID NO: 9082 - protein, 38 aa, Artificial Sequence
  GFR-binding peptide
  MOD_RES (1), (2), (35), (37): Xaa is C or S
XXVPTKLSATSVLYYDDMGVPTLRKHREGMSVAEXGXR

SEQ ID NO: 9083 - protein, 41 aa, Artificial Sequence
  GFR-binding peptide
  MOD_RES (6), (7), (39), (41): Xaa is C or S
AVPKAXXAPTKLSAISVLYLDSSNNVILKNYQNMVVKAXGX

SEQ ID NO: 9084 - protein, 34 aa, Artificial Sequence
  GFR-binding peptide
  MOD_RES (31), (33): Xaa is C or S
VSQDLSATSILYYIGKTPKILRKHRMIVKSXKXS

SEQ ID NO: 9085 - protein, 36 aa, Artificial Sequence
  GFR-binding peptide
  MOD_RES (3), (4): Xaa is C or S
  MOD_RES (18), (19), (20), (21), (22): Xaa is A or G
  MOD_RES (23), (24), (25), (26): Xaa is A or G or is absent
APXXVPQALSAISILYLXXXXXXXXXLKNYQMIVRS

SEQ ID NO: 9086 - protein, 36 aa, Artificial Sequence
  GFR-binding peptide
  MOD_RES (2), (3): Xaa is C or S
  MOD_RES (17), (18), (19), (20), (21): Xaa is A or G
  MOD_RES (22), (23), (24), (25): Xaa is A or G or is absent
AXXAPTKLSATSVLYYXXXXXXXXXLRKHRNMVVKA

SEQ ID NO: 9087 - protein, 34 aa, Artificial Sequence
  GFR-binding peptide
  MOD_RES (2), (3), (34): Xaa is C or S
PXXVPQDLSATSILYYVGRTPKVLRKHRMVVKSX

SEQ ID NO: 9088 - protein, 39 aa, Artificial Sequence
  GFR-binding peptide
  MOD_RES (4), (5), (37), (39): Xaa is C or S
PKAXXVPTELSPISMLYKDENEKVVLKYHYDMVVEGXGX

SEQ ID NO: 9089 - protein, 44 aa, Artificial Sequence
  GFR-binding peptide
  MOD_RES (6), (7), (42), (44): Xaa is C or S
  MOD_RES (21), (22), (23), (24), (25): Xaa is A or G
  MOD_RES (26), (27), (28), (29): Xaa is A or G or is absent
KVGKAXXVPTKLSATSVLYYXXXXXXXXXLRKHREGMSVAEXGX

SEQ ID NO: 9090 - protein, 36 aa, Artificial Sequence
  GFR-binding peptide
  MOD_RES (35), (35): Xaa is C or S
  MOD_RES (14), (15), (16), (17), (18): Xaa is A or G
  MOD_RES (19), (20), (21), (22): Xaa is A or G or is absent
VPTKLSATSVLYYXXXXXXXXXLRKHREGMSVAEXG

SEQ ID NO: 9091 - protein, 33 aa, Artificial Sequence
  GFR-binding peptide
  MOD_RES (1), (1): Xaa is C or S
  MOD_RES (15), (16), (17), (18), (19): Xaa is A or G
  MOD_RES (20), (21), (22), (23): Xaa is A or G or is absent
XAPTKLSPISVLYKXXXXXXXXXLKYHYNMVVK

SEQ ID NO: 9092 - protein, 38 aa, Artificial Sequence
  GFR-binding peptide
  MOD_RES (2), (3), (37): Xaa is C or S
  MOD_RES (17), (18), (19), (20), (21): Xaa is A or G
  MOD_RES (22), (23), (24), (25): Xaa is A or G or is absent
AXXAPTKLSATSVLYYXXXXXXXXXLRKHRNMVVKAXG

SEQ ID NO: 9093 - protein, 33 aa, Artificial Sequence
  GFR-binding peptide
  MOD_RES (1), (33): Xaa is C or S
XVPTELSATSMLYYDENEKVVLRKHRDMVVEGX

SEQ ID NO: 9094 - protein, 33 aa, Artificial Sequence
  GFR-binding peptide
  MOD_RES (1), (1): Xaa is C or S
  MOD_RES (15), (16), (17), (18), (19): Xaa is A or G
  MOD_RES (20), (21), (22), (23): Xaa is A or G or is absent
XAPTKLSPISVLYKXXXXXXXXXLKYHYNMVVR

SEQ ID NO: 9095 - protein, 33 aa, Artificial Sequence
  GFR-binding peptide
  MOD_RES (1), (1): Xaa is C or S
  MOD_RES (15), (16), (17), (18), (19): Xaa is A or G
  MOD_RES (20), (21), (22), (23): Xaa is A or G or is absent
XVPQDLSATSILYYXXXXXXXXXLRKHRMVVKS

SEQ ID NO: 9096 - protein, 40 aa, Artificial Sequence
  GFR-binding peptide
  MOD_RES (4), (38), (40): Xaa is C or S
  MOD_RES (18), (19), (20), (21), (22): Xaa is A or G
  MOD_RES (23), (24), (25), (26): Xaa is A or G or is absent
KPTXAPTKLNAISVLYFXXXXXXXXXLKKYRNMVVRSXGX

SEQ ID NO: 9097 - protein, 35 aa, Artificial Sequence
  GFR-binding peptide
  MOD_RES (35), (35): Xaa is C or S
  MOD_RES (14), (15), (16), (17), (18): Xaa is A or G
  MOD_RES (19), (20), (21), (22): Xaa is A or G or is absent
TQVQLSAISVLYLXXXXXXXXXLKNYQTLEDHLAX

SEQ ID NO: 9098 - protein, 44 aa, Artificial Sequence
  GFR-binding peptide
  MOD_RES (4), (41), (43): Xaa is C or S
NVQXRPTQVQLSPISVLYKEIVRKKPIFLKYHYTLEDHLAXKXE

SEQ ID NO: 9099 - protein, 36 aa, Artificial Sequence
  GFR-binding peptide
  MOD_RES (1), (2), (36): Xaa is C or S
  MOD_RES (16), (17), (18), (19), (20): Xaa is A or G
  MOD_RES (21), (22), (23), (24): Xaa is A or G or is absent
XXVPTELSAISMLYLXXXXXXXXXLKNYQDMVVEGX

SEQ ID NO: 9100 - protein, 32 aa, Artificial Sequence
  GFR-binding peptide
  MOD_RES (1), (2): Xaa is C or S
XXAPTKLSAISVLYLDDSSNVILKNYQNMVVR

SEQ ID NO: 9101 - protein, 38 aa, Artificial Sequence
  GFR-binding peptide
  MOD_RES (1), (35), (37): Xaa is C or S
  MOD_RES (15), (16), (17), (18), (19): Xaa is A or G
  MOD_RES (20), (21), (22), (23): Xaa is A or G or is absent
XVPTELSAISMLYLXXXXXXXXXLKNYQDMVVEGXGXR

SEQ ID NO: 9102 - protein, 40 aa, Artificial Sequence
  GFR-binding peptide
  MOD_RES (6), (7), (40): Xaa is C or S
  MOD_RES (21), (22), (23), (24), (25): Xaa is A or G
  MOD_RES (26), (27), (28), (29): Xaa is A or G or is absent
ASAAPXXVPQALSPISILYKXXXXXXXXXLKYHYMIVRSX

SEQ ID NO: 9103 - protein, 39 aa, Artificial Sequence
  GFR-binding peptide
  MOD_RES (1), (38): Xaa is C or S
XRPTQVQLSPISVLYKEIVRKKPIFLKYHYTLEDHLAXK

SEQ ID NO: 9104 - protein, 35 aa, Artificial Sequence
  GFR-binding peptide
  MOD_RES (33), (35): Xaa is C or S
  MOD_RES (14), (15), (16), (17), (18): Xaa is A or G
  MOD_RES (19), (20), (21), (22): Xaa is A or G or is absent
VSQDLNAISILYFXXXXXXXXXLKKYRMIVKSXKX

SEQ ID NO: 9105 - protein, 34 aa, Artificial Sequence
  GFR-binding peptide
  MOD_RES (1), (33): Xaa is C or S
XVPTELSPISMLYKDEYDKVVLKYHYEMVVEGXG

SEQ ID NO: 9106 - protein, 33 aa, Artificial Sequence
  GFR-binding peptide
  MOD_RES (1), (2), (33): Xaa is C or S
XXVPQDLSATSILYYVGRTPKVLRKHRMVVKSX

SEQ ID NO: 9107 - protein, 33 aa, Artificial Sequence
  GFR-binding peptide
  MOD_RES (14), (15), (16), (17), (18): Xaa is A or G
  MOD_RES (19), (20), (21), (22): Xaa is A or G or is absent
VPTELNAISMLYFXXXXXXXXXLKKYREMVVEG

SEQ ID NO: 9108 - protein, 34 aa, Artificial Sequence
  GFR-binding peptide
  MOD_RES (1), (33): Xaa is C or S
XAPTKLSAISVLYLDSSNNVILKNYQNMVVKAXG

SEQ ID NO: 9109 - protein, 39 aa, Artificial Sequence
  GFR-binding peptide
  MOD_RES (1), (2), (36), (38): Xaa is C or S
  MOD_RES (16), (17), (18), (19), (20): Xaa is A or G
  MOD_RES (21), (22), (23), (24): Xaa is A or G or is absent
XXAPTQLSATSVLYYXXXXXXXXXLRKHRNMVVRAXGXH

SEQ ID NO: 9110 - protein, 41 aa, Artificial Sequence
  GFR-binding peptide
  MOD_RES (4), (5), (39), (41): Xaa is C or S
  MOD_RES (19), (20), (21), (22), (23): Xaa is A or G
  MOD_RES (24), (25), (26), (27): Xaa is A or G or is absent
PKAXXVPTELSAISMLYLXXXXXXXXXLKNYQDMVVEGXGX

SEQ ID NO: 9111 - protein, 31 aa, Artificial Sequence
  GFR-binding peptide
  MOD_RES (31), (31): Xaa is C or S
VSQDLNAISILYFIGKTPKILKKYRMIVKSX

SEQ ID NO: 9112 - protein, 40 aa, Artificial Sequence
  GFR-binding peptide
  MOD_RES (6), (7): Xaa is C or S
  MOD_RES (21), (22), (23), (24), (25): Xaa is A or G
  MOD_RES (26), (27), (28), (29): Xaa is A or G or is absent
KIPKAXXVPTELSATSMLYYXXXXXXXXXLRKHRDMVVEG

SEQ ID NO: 9113 - protein, 40 aa, Artificial Sequence
  GFR-binding peptide
  MOD_RES (5), (6), (39): Xaa is C or S
  MOD_RES (20), (21), (22), (23), (24): Xaa is A or G
  MOD_RES (25), (26), (27), (28): Xaa is A or G or is absent
SAAPXXVPQALSAISILYLXXXXXXXXXLKNYQMIVRSXK

SEQ ID NO: 9114 - protein, 41 aa, Artificial Sequence
  GFR-binding peptide
  MOD_RES (4), (5), (38), (40): Xaa is C or S
GKAXXVPTKLSAISVLYLDDMGVPTLKNYQEGMSVAEXGXR

SEQ ID NO: 9115 - protein, 38 aa, Artificial Sequence
  GFR-binding peptide
  MOD_RES (2), (36), (38): Xaa is C or S
  MOD_RES (16), (17), (18), (19), (20): Xaa is A or G
  MOD_RES (21), (22), (23), (24): Xaa is A or G or is absent
TXAPTKLSATSVLYYXXXXXXXXXLRKHRNMVVRSXGX

SEQ ID NO: 9116 - protein, 37 aa, Artificial Sequence
  GFR-binding peptide
  MOD_RES (3), (4), (37): Xaa is C or S
  MOD_RES (18), (19), (20), (21), (22): Xaa is A or G
  MOD_RES (23), (24), (25), (26): Xaa is A or G or is absent
APXXVPQALSATSILYYXXXXXXXXXLRKHRMIVRSX

SEQ ID NO: 9117 - protein, 36 aa, Artificial Sequence
  GFR-binding peptide
  MOD_RES (34), (36): Xaa is C or S
  MOD_RES (14), (15), (16), (17), (18): Xaa is A or G
  MOD_RES (19), (20), (21), (22): Xaa is A or G or is absent
VPTELSAISMLYLXXXXXXXXXLKNYQDMVVEGXGX

SEQ ID NO: 9118 - protein, 39 aa, Artificial Sequence
  GFR-binding peptide
  MOD_RES (1), (36), (38): Xaa is C or S
  MOD_RES (15), (16), (17), (18), (19): Xaa is A or G
  MOD_RES (20), (21), (22), (23): Xaa is A or G or is absent
XVPTKLSAISVLYLXXXXXXXXXLKNYQEGMSVAEXGXR

SEQ ID NO: 9119 - protein, 38 aa, Artificial Sequence
  GFR-binding peptide
  MOD_RES (1), (36), (38): Xaa is C or S
  MOD_RES (15), (16), (17), (18), (19): Xaa is A or G
  MOD_RES (20), (21), (22), (23): Xaa is A or G or is absent
XVPTKLSATSVLYYXXXXXXXXXLRKHREGMSVAEXGX

SEQ ID NO: 9120 - protein, 43 aa, Artificial Sequence
  GFR-binding peptide
  MOD_RES (6), (7), (40), (42): Xaa is C or S
  MOD_RES (21), (22), (23), (24), (25): Xaa is A or G
  MOD_RES (26), (27), (28), (29): Xaa is A or G or is absent
ASASPXXVPQDLSPISILYKXXXXXXXXXLKYHYMVVKSXKXS

SEQ ID NO: 9121 - protein, 41 aa, Artificial Sequence
  GFR-binding peptide
  MOD_RES (6), (7), (40): Xaa is C or S
  MOD_RES (21), (22), (23), (24), (25): Xaa is A or G
  MOD_RES (26), (27), (28), (29): Xaa is A or G or is absent
ASAAPXXVPQALSPISILYKXXXXXXXXXLKYHYMIVRSXK

SEQ ID NO: 9122 - protein, 31 aa, Artificial Sequence
  GFR-binding peptide
  MOD_RES (1), (1): Xaa is C or S
XVPQALSPISILYKVGRKPKVLKYHYMIVRS

SEQ ID NO: 9123 - protein, 37 aa, Artificial Sequence
  GFR-binding peptide
  MOD_RES (6), (7): Xaa is C or S
ASASPXXVPQDLSATSILYYVGRTPKVLRKHRMVVKS

SEQ ID NO: 9124 - protein, 38 aa, Artificial Sequence
  GFR-binding peptide
  MOD_RES (5), (6): Xaa is C or S
  MOD_RES (20), (21), (22), (23), (24): Xaa is A or G
  MOD_RES (25), (26), (27), (28): Xaa is A or G or is absent
SAAPXXVPQALSATSILYYXXXXXXXXXLRKHRMIVRS

SEQ ID NO: 9125 - protein, 39 aa, Artificial Sequence
  GFR-binding peptide
  MOD_RES (3), (4), (39): Xaa is C or S
  MOD_RES (18), (19), (20), (21), (22): Xaa is A or G
  MOD_RES (23), (24), (25), (26): Xaa is A or G or is absent
KAXXVPTKLNAISVLYFXXXXXXXXXLKKYREGMSVAEX

SEQ ID NO: 9126 - protein, 43 aa, Artificial Sequence
  GFR-binding peptide
  MOD_RES (6), (7), (41), (43): Xaa is C or S
  MOD_RES (21), (22), (23), (24), (25): Xaa is A or G
  MOD_RES (26), (27), (28), (29): Xaa is A or G or is absent
KIPKAXXVPTELSATSMLYYXXXXXXXXXLRKHRDMVVEGXGX

SEQ ID NO: 9127 - protein, 41 aa, Artificial Sequence
  GFR-binding peptide
  MOD_RES (2), (39), (41): Xaa is C or S
  MOD_RES (18), (19), (20), (21), (22): Xaa is A or G
  MOD_RES (23), (24), (25), (26): Xaa is A or G or is absent
QXRPTQVQLSATSVLYYXXXXXXXXXLRKHRTLEDHLAXKX

SEQ ID NO: 9128 - protein, 37 aa, Artificial Sequence
  GFR-binding peptide
  MOD_RES (4), (5), (36): Xaa is C or S
AAPXXVPQALSAISILYLVGRKPKVLKNYQMIVRSXK

SEQ ID NO: 9129 - protein, 36 aa, Artificial Sequence
  GFR-binding peptide
  MOD_RES (4), (36): Xaa is C or S
KPTXAPTKLSATSVLYYDDSSNVILRKHRNMVVRSX

SEQ ID NO: 9130 - protein, 32 aa, Artificial Sequence
  GFR-binding peptide
  MOD_RES (1), (2): Xaa is C or S
XXAPTKLSATSVLYYDDSSNVILRKHRNMVVR

SEQ ID NO: 9131 - protein, 44 aa, Artificial Sequence
  GFR-binding peptide
  MOD_RES (6), (7), (41), (43): Xaa is C or S
  MOD_RES (21), (22), (23), (24), (25): Xaa is A or G
  MOD_RES (26), (27), (28), (29): Xaa is A or G or is absent
SIPKAXXVPTELNAISMLYFXXXXXXXXXLKKYREMVVEGXGXR

SEQ ID NO: 9132 - protein, 35 aa, Artificial Sequence
  GFR-binding peptide
  MOD_RES (16), (17), (18), (19), (20): Xaa is A or G
  MOD_RES (21), (22), (23), (24): Xaa is A or G or is absent
RPTQVQLNAISVLYFXXXXXXXXXLKKYRTLEDHL

SEQ ID NO: 9133 - protein, 38 aa, Artificial Sequence
  GFR-binding peptide
  MOD_RES (5), (6), (38): Xaa is C or S
VPKPXXAPTKLSAISVLYLDDSSNVILKNYQNMVVRSX

SEQ ID NO: 9134 - protein, 37 aa, Artificial Sequence
  GFR-binding peptide
  MOD_RES (3), (4), (37): Xaa is C or S
  MOD_RES (18), (19), (20), (21), (22): Xaa is A or G
  MOD_RES (23), (24), (25), (26): Xaa is A or G or is absent
APXXVPQALSAISILYLXXXXXXXXXLKNYQMIVRSX

SEQ ID NO: 9135 - protein, 38 aa, Artificial Sequence
  GFR-binding peptide
  MOD_RES (1), (2), (35), (37): Xaa is C or S
XXVPTKLSAISVLYLDDMGVPTLKNYQEGMSVAEXGXR

SEQ ID NO: 9136 - protein, 35 aa, Artificial Sequence
  GFR-binding peptide
  MOD_RES (16), (17), (18), (19), (20): Xaa is A or G
  MOD_RES (21), (22), (23), (24): Xaa is A or G or is absent
RPTQVQLSAISVLYLXXXXXXXXXLKNYQTLEDHL

SEQ ID NO: 9137 - protein, 34 aa, Artificial Sequence
  GFR-binding peptide
  MOD_RES (1), (33): Xaa is C or S
XAPTKLSPISVLYKDSSNNVILKYHYNMVVKAXG

SEQ ID NO: 9138 - protein, 39 aa, Artificial Sequence
  GFR-binding peptide
  MOD_RES (4), (5), (38): Xaa is C or S
  MOD_RES (19), (20), (21), (22), (23): Xaa is A or G
  MOD_RES (24), (25), (26), (27): Xaa is A or G or is absent
AAPXXVPQALNAISILYFXXXXXXXXXLKKYRMIVRSXK

SEQ ID NO: 9139 - protein, 39 aa, Artificial Sequence
  GFR-binding peptide
  MOD_RES (2), (3), (38): Xaa is C or S
  MOD_RES (17), (18), (19), (20), (21): Xaa is A or G
  MOD_RES (22), (23), (24), (25): Xaa is A or G or is absent
AXXVPTKLSAISVLYLXXXXXXXXXLKNYQEGMSVAEXG

SEQ ID NO: 9140 - protein, 36 aa, Artificial Sequence
  GFR-binding peptide
  MOD_RES (1), (2), (33), (35): Xaa is C or S
XXVSQDLSATSILYYIGKTPKILRKHRMIVKSXKXS

SEQ ID NO: 9141 - protein, 43 aa, Artificial Sequence
  GFR-binding peptide
  MOD_RES (5), (6), (40), (42): Xaa is C or S
  MOD_RES (20), (21), (22), (23), (24): Xaa is A or G
  MOD_RES (25), (26), (27), (28): Xaa is A or G or is absent
VPKPXXAPTKLNAISVLYFXXXXXXXXXLKKYRNMVVRSXGXH

SEQ ID NO: 9142 - protein, 38 aa, Artificial Sequence
  GFR-binding peptide
  MOD_RES (4), (5), (37): Xaa is C or S
PKAXXVPTELSATSMLYYDENEKVVLRKHRDMVVEGXG

SEQ ID NO: 9143 - protein, 36 aa, Artificial Sequence
  GFR-binding peptide
  MOD_RES (5), (6): Xaa is C or S
IPKAXXVPTELSPISMLYKDENEKVVLKYHYDMVVE

SEQ ID NO: 9144 - protein, 36 aa, Artificial Sequence
  GFR-binding peptide
  MOD_RES (4), (5): Xaa is C or S
PKPXXAPTQLSATSVLYYDDSSNVILRKHRNMVVRA

SEQ ID NO: 9145 - protein, 36 aa, Artificial Sequence
  GFR-binding peptide
  MOD_RES (3), (4): Xaa is C or S
  MOD_RES (18), (19), (20), (21), (22): Xaa is A or G
  MOD_RES (23), (24), (25), (26): Xaa is A or G or is absent
KAXXVPTELSATSMLYYXXXXXXXXXLRKHRDMVVE

SEQ ID NO: 9146 - protein, 32 aa, Artificial Sequence
  GFR-binding peptide
  MOD_RES (1), (2): Xaa is C or S
XXAPTQLSAISVLYLDDSSNVILKNYQNMVVR

SEQ ID NO: 9147 - protein, 34 aa, Artificial Sequence
  GFR-binding peptide
  MOD_RES (32), (34): Xaa is C or S
APTKLSPISVLYKDSSNNVILKYHYNMVVKAXGX

SEQ ID NO: 9148 - protein, 40 aa, Artificial Sequence
  GFR-binding peptide
  MOD_RES (3), (37), (39): Xaa is C or S
  MOD_RES (17), (18), (19), (20), (21): Xaa is A or G
  MOD_RES (22), (23), (24), (25): Xaa is A or G or is absent
PTXAPTKLSAISVLYLXXXXXXXXXLKNYQNMVVRSXGXH

SEQ ID NO: 9149 - protein, 42 aa, Artificial Sequence
  GFR-binding peptide
  MOD_RES (4), (5), (39), (41): Xaa is C or S
  MOD_RES (19), (20), (21), (22), (23): Xaa is A or G
  MOD_RES (24), (25), (26), (27): Xaa is A or G or is absent
PKAXXAPTKLSAISVLYLXXXXXXXXXLKNYQNMVVKAXGXH

SEQ ID NO: 9150 - protein, 34 aa, Artificial Sequence
  GFR-binding peptide
  MOD_RES (3), (4): Xaa is C or S
APXXVPQALSATSILYYVGRKPKVLRKHRMIVRS

SEQ ID NO: 9151 - protein, 38 aa, Artificial Sequence
  GFR-binding peptide
  MOD_RES (35), (37): Xaa is C or S
TQVQLSPISVLYKEIVRKKPIFLKYHYTLEDHLAXKXE

SEQ ID NO: 9152 - protein, 35 aa, Artificial Sequence
  GFR-binding peptide
  MOD_RES (34), (34): Xaa is C or S
  MOD_RES (14), (15), (16), (17), (18): Xaa is A or G
  MOD_RES (19), (20), (21), (22): Xaa is A or G or is absent
APTKLSAISVLYLXXXXXXXXXLKNYQNMVVRSXG

SEQ ID NO: 9153 - protein, 34 aa, Artificial Sequence
  GFR-binding peptide
  MOD_RES (33), (33): Xaa is C or S
  MOD_RES (14), (15), (16), (17), (18): Xaa is A or G
  MOD_RES (19), (20), (21), (22): Xaa is A or G or is absent
VPQALSAISILYLXXXXXXXXXLKNYQMIVRSXK

SEQ ID NO: 9154 - protein, 35 aa, Artificial Sequence
  GFR-binding peptide
RPTQVQLSATSVLYYEIVRKKPIFLRKHRTLEDHL

SEQ ID NO: 9155 - protein, 39 aa, Artificial Sequence
  GFR-binding peptide
  MOD_RES (4), (5), (39): Xaa is C or S
  MOD_RES (19), (20), (21), (22), (23): Xaa is A or G
  MOD_RES (24), (25), (26), (27): Xaa is A or G or is absent
PKAXXVPTELNAISMLYFXXXXXXXXXLKKYREMVVEGX

SEQ ID NO: 9156 - protein, 40 aa, Artificial Sequence
  GFR-binding peptide
  MOD_RES (2), (3), (38), (40): Xaa is C or S
  MOD_RES (17), (18), (19), (20), (21): Xaa is A or G
  MOD_RES (22), (23), (24), (25): Xaa is A or G or is absent
AXXVPTKLNAISVLYFXXXXXXXXXLKKYREGMSVAEXGX

SEQ ID NO: 9157 - protein, 35 aa, Artificial Sequence
  GFR-binding peptide
  MOD_RES (34), (34): Xaa is C or S
  MOD_RES (14), (15), (16), (17), (18): Xaa is A or G
  MOD_RES (19), (20), (21), (22): Xaa is A or G or is absent
VPTELNAISMLYFXXXXXXXXXLKKYRDMVVEGXG

SEQ ID NO: 9158 - protein, 37 aa, Artificial Sequence
  GFR-binding peptide
  MOD_RES (4), (5), (37): Xaa is C or S
PKPXXAPTQLSPISVLYKDDSSNVILKYHYNMVVRAX

SEQ ID NO: 9159 - protein, 37 aa, Artificial Sequence
  GFR-binding peptide
  MOD_RES (37), (37): Xaa is C or S
RPTQVQLSAISVLYLEIVRKKPIFLKNYQTLEDHLAX

SEQ ID NO: 9160 - protein, 43 aa, Artificial Sequence
  GFR-binding peptide
  MOD_RES (5), (6), (41), (43): Xaa is C or S
  MOD_RES (20), (21), (22), (23), (24): Xaa is A or G
  MOD_RES (25), (26), (27), (28): Xaa is A or G or is absent
VGKAXXVPTKLSATSVLYYXXXXXXXXXLRKHREGMSVAEXGX

SEQ ID NO: 9161 - protein, 40 aa, Artificial Sequence
  GFR-binding peptide
  MOD_RES (4), (5), (38), (40): Xaa is C or S
  MOD_RES (19), (20), (21), (22), (23): Xaa is A or G
  MOD_RES (24), (25), (26), (27): Xaa is A or G or is absent
ASPXXVPQDLNAISILYFXXXXXXXXXLKKYRMVVKSXKX

SEQ ID NO: 9162 - protein, 36 aa, Artificial Sequence
  GFR-binding peptide
  MOD_RES (1), (35): Xaa is C or S
  MOD_RES (15), (16), (17), (18), (19): Xaa is A or G
  MOD_RES (20), (21), (22), (23): Xaa is A or G or is absent
XVPTELSAISMLYLXXXXXXXXXLKNYQEMVVEGXG

SEQ ID NO: 9163 - protein, 41 aa, Artificial Sequence
  GFR-binding peptide
  MOD_RES (6), (7), (41): Xaa is C or S
  MOD_RES (21), (22), (23), (24), (25): Xaa is A or G
  MOD_RES (26), (27), (28), (29): Xaa is A or G or is absent
AVPKAXXAPTKLSPISVLYKXXXXXXXXXLKYHYNMVVKAX

SEQ ID NO: 9164 - protein, 34 aa, Artificial Sequence
  GFR-binding peptide
  MOD_RES (2), (3): Xaa is C or S
PXXAPTKLSPISVLYKDDSSNVILKYHYNMVVRS

SEQ ID NO: 9165 - protein, 41 aa, Artificial Sequence
  GFR-binding peptide
  MOD_RES (6), (7), (41): Xaa is C or S
  MOD_RES (21), (22), (23), (24), (25): Xaa is A or G
  MOD_RES (26), (27), (28), (29): Xaa is A or G or is absent
KIPKAXXVPTELSAISMLYLXXXXXXXXXLKNYQDMVVEGX

SEQ ID NO: 9166 - protein, 35 aa, Artificial Sequence
  GFR-binding peptide
  MOD_RES (32), (34): Xaa is C or S
APTQLSPISVLYKDDSSNVILKYHYNMVVRAXGXH

SEQ ID NO: 9167 - protein, 38 aa, Artificial Sequence
  GFR-binding peptide
  MOD_RES (5), (6): Xaa is C or S
  MOD_RES (20), (21), (22), (23), (24): Xaa is A or G
  MOD_RES (25), (26), (27), (28): Xaa is A or G or is absent
VPKPXXAPTQLSATSVLYYXXXXXXXXXLRKHRNMVVR

SEQ ID NO: 9168 - protein, 40 aa, Artificial Sequence
  GFR-binding peptide
  MOD_RES (37), (39): Xaa is C or S
  MOD_RES (16), (17), (18), (19), (20): Xaa is A or G
  MOD_RES (21), (22), (23), (24): Xaa is A or G or is absent
RPTQVQLNAISVLYFXXXXXXXXXLKKYRTLEDHLAXKXE

SEQ ID NO: 9169 - protein, 34 aa, Artificial Sequence
  GFR-binding peptide
  MOD_RES (3), (3): Xaa is C or S
PTXAPTKLSATSVLYYDDSSNVILRKHRNMVVRS

SEQ ID NO: 9170 - protein, 42 aa, Artificial Sequence
  GFR-binding peptide
  MOD_RES (6), (7), (41): Xaa is C or S
  MOD_RES (21), (22), (23), (24), (25): Xaa is A or G
  MOD_RES (26), (27), (28), (29): Xaa is A or G or is absent
SIPKAXXVPTELSPISMLYKXXXXXXXXXLKYHYEMVVEGXG

SEQ ID NO: 9171 - protein, 32 aa, Artificial Sequence
  GFR-binding peptide
  MOD_RES (1), (2): Xaa is C or S
XXAPTKLSPISVLYKDSSNNVILKYHYNMVVK

SEQ ID NO: 9172 - protein, 37 aa, Artificial Sequence
  GFR-binding peptide
  MOD_RES (2), (3), (37): Xaa is C or S
  MOD_RES (17), (18), (19), (20), (21): Xaa is A or G
  MOD_RES (22), (23), (24), (25): Xaa is A or G or is absent
PXXAPTKLNAISVLYFXXXXXXXXXLKKYRNMVVRSX

SEQ ID NO: 9173 - protein, 41 aa, Artificial Sequence
  GFR-binding peptide
  MOD_RES (5), (6), (38), (40): Xaa is C or S
IPKAXXVPTELSATSMLYYDENEKVVLRKHRDMVVEGXGXR

SEQ ID NO: 9174 - protein, 39 aa, Artificial Sequence
  GFR-binding peptide
  MOD_RES (3), (4), (37), (39): Xaa is C or S
KAXXVPTKLNAISVLYFDDMGVPTLKKYREGMSVAEXGX

SEQ ID NO: 9175 - protein, 35 aa, Artificial Sequence
  GFR-binding peptide
  MOD_RES (1), (34): Xaa is C or S
  MOD_RES (15), (16), (17), (18), (19): Xaa is A or G
  MOD_RES (20), (21), (22), (23): Xaa is A or G or is absent
XVPQALSATSILYYXXXXXXXXXLRKHRMIVRSXK

SEQ ID NO: 9176 - protein, 34 aa, Artificial Sequence
  GFR-binding peptide
RPTQVQLSAISVLYLEIVRKKPIFLKNYQTLEDH

SEQ ID NO: 9177 - protein, 38 aa, Artificial Sequence
  GFR-binding peptide
  MOD_RES (37), (37): Xaa is C or S
  MOD_RES (16), (17), (18), (19), (20): Xaa is A or G
  MOD_RES (21), (22), (23), (24): Xaa is A or G or is absent
RPTQVQLSPISVLYKXXXXXXXXXLKYHYTLEDHLAXK

SEQ ID NO: 9178 - protein, 36 aa, Artificial Sequence
  GFR-binding peptide
  MOD_RES (35), (35): Xaa is C or S
TQVQLSATSVLYYEIVRKKPIFLRKHRTLEDHLAXK

SEQ ID NO: 9179 - protein, 32 aa, Artificial Sequence
  GFR-binding peptide
  MOD_RES (1), (1): Xaa is C or S
XAPTKLSATSVLYYDDSSNVILRKHRNMVVRS

SEQ ID NO: 9180 - protein, 32 aa, Artificial Sequence
  GFR-binding peptide
  MOD_RES (1), (2): Xaa is C or S
XXAPTQLSPISVLYKDDSSNVILKYHYNMVVR

SEQ ID NO: 9181 - protein, 35 aa, Artificial Sequence
  GFR-binding peptide
  MOD_RES (2), (3): Xaa is C or S
  MOD_RES (17), (18), (19), (20), (21): Xaa is A or G
  MOD_RES (22), (23), (24), (25): Xaa is A or G or is absent
PXXVSQDLSATSILYYXXXXXXXXXLRKHRMIVKS

SEQ ID NO: 9182 - protein, 38 aa, Artificial Sequence
  GFR-binding peptide
  MOD_RES (2), (3), (37): Xaa is C or S
  MOD_RES (17), (18), (19), (20), (21): Xaa is A or G
  MOD_RES (22), (23), (24), (25): Xaa is A or G or is absent
AXXAPTKLSAISVLYLXXXXXXXXXLKNYQNMVVKAXG

SEQ ID NO: 9183 - protein, 36 aa, Artificial Sequence
  GFR-binding peptide
  MOD_RES (1), (2), (36): Xaa is C or S
  MOD_RES (16), (17), (18), (19), (20): Xaa is A or G
  MOD_RES (21), (22), (23), (24): Xaa is A or G or is absent
XXVPTELSATSMLYYXXXXXXXXXLRKHRDMVVEGX

SEQ ID NO: 9184 - protein, 38 aa, Artificial Sequence
  GFR-binding peptide
  MOD_RES (5), (6): Xaa is C or S
  MOD_RES (20), (21), (22), (23), (24): Xaa is A or G
  MOD_RES (25), (26), (27), (28): Xaa is A or G or is absent
VPKPXXAPTKLNAISVLYFXXXXXXXXXLKKYRNMVVR

SEQ ID NO: 9185 - protein, 32 aa, Artificial Sequence
  GFR-binding peptide
  MOD_RES (1), (32): Xaa is C or S
XVSQDLSPISILYKIGKTPKILKYHYMIVKSX

SEQ ID NO: 9186 - protein, 39 aa, Artificial Sequence
  GFR-binding peptide
  MOD_RES (3), (4), (38): Xaa is C or S
  MOD_RES (18), (19), (20), (21), (22): Xaa is A or G
  MOD_RES (23), (24), (25), (26): Xaa is A or G or is absent
KAXXVPTELSAISMLYLXXXXXXXXXLKNYQEMVVEGXG

SEQ ID NO: 9187 - protein, 39 aa, Artificial Sequence
  GFR-binding peptide
  MOD_RES (5), (6): Xaa is C or S
  MOD_RES (20), (21), (22), (23), (24): Xaa is A or G
  MOD_RES (25), (26), (27), (28): Xaa is A or G or is absent
VPKAXXAPTKLSAISVLYLXXXXXXXXXLKNYQNMVVKA

SEQ ID NO: 9188 - protein, 38 aa, Artificial Sequence
  GFR-binding peptide
  MOD_RES (2), (3), (37): Xaa is C or S
  MOD_RES (17), (18), (19), (20), (21): Xaa is A or G
  MOD_RES (22), (23), (24), (25): Xaa is A or G or is absent
AXXVPTELSAISMLYLXXXXXXXXXLKNYQDMVVEGXG

SEQ ID NO: 9189 - protein, 38 aa, Artificial Sequence
  GFR-binding peptide
  MOD_RES (2), (3), (37): Xaa is C or S
  MOD_RES (17), (18), (19), (20), (21): Xaa is A or G
  MOD_RES (22), (23), (24), (25): Xaa is A or G or is absent
AXXVPTELSATSMLYYXXXXXXXXXLRKHREMVVEGXG

SEQ ID NO: 9190 - protein, 42 aa, Artificial Sequence
  GFR-binding peptide
  MOD_RES (5), (6), (40), (42): Xaa is C or S
  MOD_RES (20), (21), (22), (23), (24): Xaa is A or G
  MOD_RES (25), (26), (27), (28): Xaa is A or G or is absent
IPKAXXVPTELSATSMLYYXXXXXXXXXLRKHREMVVEGXGX

SEQ ID NO: 9191 - protein, 35 aa, Artificial Sequence
  GFR-binding peptide
  MOD_RES (34), (34): Xaa is C or S
  MOD_RES (14), (15), (16), (17), (18): Xaa is A or G
  MOD_RES (19), (20), (21), (22): Xaa is A or G or is absent
APTKLNAISVLYFXXXXXXXXXLKKYRNMVVKAXG

SEQ ID NO: 9192 - protein, 40 aa, Artificial Sequence
  GFR-binding peptide
  MOD_RES (5), (6), (40): Xaa is C or S
  MOD_RES (20), (21), (22), (23), (24): Xaa is A or G
  MOD_RES (25), (26), (27), (28): Xaa is A or G or is absent
VPKAXXAPTKLSAISVLYLXXXXXXXXXLKNYQNMVVKAX

SEQ ID NO: 9193 - protein, 35 aa, Artificial Sequence
  GFR-binding peptide
  MOD_RES (4), (5): Xaa is C or S
ASPXXVSQDLSPISILYKIGKTPKILKYHYMIVKS

SEQ ID NO: 9194 - protein, 40 aa, Artificial Sequence
  GFR-binding peptide
  MOD_RES (37), (39): Xaa is C or S
  MOD_RES (16), (17), (18), (19), (20): Xaa is A or G
  MOD_RES (21), (22), (23), (24): Xaa is A or G or is absent
RPTQVQLSATSVLYYXXXXXXXXXLRKHRTLEDHLAXKXE

SEQ ID NO: 9195 - protein, 40 aa, Artificial Sequence
  GFR-binding peptide
  MOD_RES (3), (4), (38), (40): Xaa is C or S
  MOD_RES (18), (19), (20), (21), (22): Xaa is A or G
  MOD_RES (23), (24), (25), (26): Xaa is A or G or is absent
KAXXVPTELNAISMLYFXXXXXXXXXLKKYREMVVEGXGX

SEQ ID NO: 9196 - protein, 35 aa, Artificial Sequence
  GFR-binding peptide
  MOD_RES (2), (3): Xaa is C or S
  MOD_RES (17), (18), (19), (20), (21): Xaa is A or G
  MOD_RES (22), (23), (24), (25): Xaa is A or G or is absent
AXXVPTELSPISMLYKXXXXXXXXXLKYHYDMVVE

SEQ ID NO: 9197 - protein, 31 aa, Artificial Sequence
  GFR-binding peptide
APTQLSAISVLYLDDSSNVILKNYQNMVVRA

SEQ ID NO: 9198 - protein, 36 aa, Artificial Sequence
  GFR-binding peptide
  MOD_RES (1), (34), (36): Xaa is C or S
  MOD_RES (15), (16), (17), (18), (19): Xaa is A or G
  MOD_RES (20), (21), (22), (23): Xaa is A or G or is absent
XVPQALSAISILYLXXXXXXXXXLKNYQMIVRSXKX

SEQ ID NO: 9199 - protein, 33 aa, Artificial Sequence
  GFR-binding peptide
  MOD_RES (1), (33): Xaa is C or S
XAPTQLSATSVLYYDDSSNVILRKHRNMVVRAX

SEQ ID NO: 9200 - protein, 39 aa, Artificial Sequence
  GFR-binding peptide
  MOD_RES (6), (7): Xaa is C or S
  MOD_RES (21), (22), (23), (24), (25): Xaa is A or G
  MOD_RES (26), (27), (28), (29): Xaa is A or G or is absent
YVPKPXXAPTKLSPISVLYKXXXXXXXXXLKYHYNMVVR

SEQ ID NO: 9201 - protein, 43 aa, Artificial Sequence
  GFR-binding peptide
  MOD_RES (3), (40), (42): Xaa is C or S
  MOD_RES (19), (20), (21), (22), (23): Xaa is A or G
  MOD_RES (24), (25), (26), (27): Xaa is A or G or is absent
VQXRPTQVQLNAISVLYFXXXXXXXXXLKKYRTLEDHLAXKXE

SEQ ID NO: 9202 - protein, 34 aa, Artificial Sequence
  GFR-binding peptide
  MOD_RES (31), (33): Xaa is C or S
VPQDLNAISILYFVGRTPKVLKKYRMVVKSXKXS

SEQ ID NO: 9203 - protein, 41 aa, Artificial Sequence
  GFR-binding peptide
  MOD_RES (4), (38), (40): Xaa is C or S
  MOD_RES (18), (19), (20), (21), (22): Xaa is A or G
  MOD_RES (23), (24), (25), (26): Xaa is A or G or is absent
KPTXAPTKLSPISVLYKXXXXXXXXXLKYHYNMVVRSXGXH

SEQ ID NO: 9204 - protein, 37 aa, Artificial Sequence
  GFR-binding peptide
  MOD_RES (35), (37): Xaa is C or S
TQVQLSPISVLYKEIVRKKPIFLKYHYTLEDHLAXKX

SEQ ID NO: 9205 - protein, 37 aa, Artificial Sequence
  GFR-binding peptide
  MOD_RES (2), (3), (35), (37): Xaa is C or S
PXXAPTKLSPISVLYKDDSSNVILKYHYNMVVRSXGX

SEQ ID NO: 9206 - protein, 37 aa, Artificial Sequence
  GFR-binding peptide
  MOD_RES (4), (5), (37): Xaa is C or S
PKPXXAPTKLSATSVLYYDDSSNVILRKHRNMVVRSX

SEQ ID NO: 9207 - protein, 32 aa, Artificial Sequence
  GFR-binding peptide
  MOD_RES (1), (2): Xaa is C or S
XXVPQDLSATSILYYVGRTPKVLRKHRMVVKS

SEQ ID NO: 9208 - protein, 35 aa, Artificial Sequence
  GFR-binding peptide
  MOD_RES (1), (35): Xaa is C or S
  MOD_RES (15), (16), (17), (18), (19): Xaa is A or G
  MOD_RES (20), (21), (22), (23): Xaa is A or G or is absent
XVPTELSPISMLYKXXXXXXXXXLKYHYEMVVEGX

SEQ ID NO: 9209 - protein, 37 aa, Artificial Sequence
  GFR-binding peptide
  MOD_RES (35), (37): Xaa is C or S
  MOD_RES (14), (15), (16), (17), (18): Xaa is A or G
  MOD_RES (19), (20), (21), (22): Xaa is A or G or is absent
VPTKLSPISVLYKXXXXXXXXXLKYHYEGMSVAEXGX

SEQ ID NO: 9210 - protein, 42 aa, Artificial Sequence
  GFR-binding peptide
  MOD_RES (3), (4), (39), (41): Xaa is C or S
  MOD_RES (18), (19), (20), (21), (22): Xaa is A or G
  MOD_RES (23), (24), (25), (26): Xaa is A or G or is absent
KAXXVPTKLNAISVLYFXXXXXXXXXLKKYREGMSVAEXGXR

SEQ ID NO: 9211 - protein, 42 aa, Artificial Sequence
  GFR-binding peptide
  MOD_RES (5), (6), (40), (42): Xaa is C or S
  MOD_RES (20), (21), (22), (23), (24): Xaa is A or G
  MOD_RES (25), (26), (27), (28): Xaa is A or G or is absent
VPKPXXAPTQLSATSVLYYXXXXXXXXXLRKHRNMVVRAXGX

SEQ ID NO: 9212 - protein, 40 aa, Artificial Sequence
  GFR-binding peptide
  MOD_RES (5), (6), (38), (40): Xaa is C or S
VPKPXXAPTQLSPISVLYKDDSSNVILKYHYNMVVRAXGX

SEQ ID NO: 9213 - protein, 36 aa, Artificial Sequence
  GFR-binding peptide
  MOD_RES (1), (35): Xaa is C or S
  MOD_RES (15), (16), (17), (18), (19): Xaa is A or G
  MOD_RES (20), (21), (22), (23): Xaa is A or G or is absent
XAPTQLNAISVLYFXXXXXXXXXLKKYRNMVVRAXG

SEQ ID NO: 9214 - protein, 40 aa, Artificial Sequence
  GFR-binding peptide
  MOD_RES (3), (40): Xaa is C or S
VQXRPTQVQLSPISVLYKEIVRKKPIFLKYHYTLEDHLAX

SEQ ID NO: 9215 - protein, 38 aa, Artificial Sequence
  GFR-binding peptide
  MOD_RES (1), (2), (37): Xaa is C or S
  MOD_RES (16), (17), (18), (19), (20): Xaa is A or G
  MOD_RES (21), (22), (23), (24): Xaa is A or G or is absent
XXVPTKLSAISVLYLXXXXXXXXXLKNYQEGMSVAEXG

SEQ ID NO: 9216 - protein, 38 aa, Artificial Sequence
  GFR-binding peptide
  MOD_RES (2), (3), (38): Xaa is C or S
  MOD_RES (17), (18), (19), (20), (21): Xaa is A or G
  MOD_RES (22), (23), (24), (25): Xaa is A or G or is absent
AXXVPTKLSPISVLYKXXXXXXXXXLKYHYEGMSVAEX

SEQ ID NO: 9217 - protein, 38 aa, Artificial Sequence
  GFR-binding peptide
  MOD_RES (4), (5): Xaa is C or S
  MOD_RES (19), (20), (21), (22), (23): Xaa is A or G
  MOD_RES (24), (25), (26), (27): Xaa is A or G or is absent
PKAXXVPTELSATSMLYYXXXXXXXXXLRKHRDMVVEG

SEQ ID NO: 9218 - protein, 36 aa, Artificial Sequence
  GFR-binding peptide
  MOD_RES (2), (3): Xaa is C or S
  MOD_RES (17), (18), (19), (20), (21): Xaa is A or G
  MOD_RES (22), (23), (24), (25): Xaa is A or G or is absent
AXXVPTELSAISMLYLXXXXXXXXXLKNYQDMVVEG

SEQ ID NO: 9219 - protein, 39 aa, Artificial Sequence
  GFR-binding peptide
  MOD_RES (2), (3), (37), (39): Xaa is C or S
  MOD_RES (17), (18), (19), (20), (21): Xaa is A or G
  MOD_RES (22), (23), (24), (25): Xaa is A or G or is absent
AXXVPTELSPISMLYKXXXXXXXXXLKYHYEMVVEGXGX

SEQ ID NO: 9220 - protein, 38 aa, Artificial Sequence
  GFR-binding peptide
  MOD_RES (6), (6): Xaa is C or S
  MOD_RES (20), (21), (22), (23), (24): Xaa is A or G
  MOD_RES (25), (26), (27), (28): Xaa is A or G or is absent
VTKPTXAPTKLSAISVLYLXXXXXXXXXLKNYQNMVVR

SEQ ID NO: 9221 - protein, 33 aa, Artificial Sequence
  GFR-binding peptide
  MOD_RES (14), (15), (16), (17), (18): Xaa is A or G
  MOD_RES (19), (20), (21), (22): Xaa is A or G or is absent
APTKLNAISVLYFXXXXXXXXXLKKYRNMVVKA

SEQ ID NO: 9222 - protein, 35 aa, Artificial Sequence
  GFR-binding peptide
  MOD_RES (2), (3), (34): Xaa is C or S
PXXVPQDLSAISILYLVGRTPKVLKNYQMVVKSXK

SEQ ID NO: 9223 - protein, 36 aa, Artificial Sequence
  GFR-binding peptide
  MOD_RES (2), (3): Xaa is C or S
  MOD_RES (17), (18), (19), (20), (21): Xaa is A or G
  MOD_RES (22), (23), (24), (25): Xaa is A or G or is absent
AXXVPTELNAISMLYFXXXXXXXXXLKKYRDMVVEG

SEQ ID NO: 9224 - protein, 36 aa, Artificial Sequence
  GFR-binding peptide
  MOD_RES (1), (2): Xaa is C or S
  MOD_RES (16), (17), (18), (19), (20): Xaa is A or G
  MOD_RES (21), (22), (23), (24): Xaa is A or G or is absent
XXVPTKLSPISVLYKXXXXXXXXXLKYHYEGMSVAE

SEQ ID NO: 9225 - protein, 42 aa, Artificial Sequence
  GFR-binding peptide
  MOD_RES (5), (6), (40), (42): Xaa is C or S
  MOD_RES (20), (21), (22), (23), (24): Xaa is A or G
  MOD_RES (25), (26), (27), (28): Xaa is A or G or is absent
IPKAXXVPTELNAISMLYFXXXXXXXXXLKKYREMVVEGXGX

SEQ ID NO: 9226 - protein, 34 aa, Artificial Sequence
  GFR-binding peptide
  MOD_RES (16), (17), (18), (19), (20): Xaa is A or G
  MOD_RES (21), (22), (23), (24): Xaa is A or G or is absent
RPTQVQLSATSVLYYXXXXXXXXXLRKHRTLEDH

SEQ ID NO: 9227 - protein, 34 aa, Artificial Sequence
  GFR-binding peptide
  MOD_RES (1), (2): Xaa is C or S
  MOD_RES (16), (17), (18), (19), (20): Xaa is A or G
  MOD_RES (21), (22), (23), (24): Xaa is A or G or is absent
XXVPQALSPISILYKXXXXXXXXXLKYHYMIVRS

SEQ ID NO: 9228 - protein, 38 aa, Artificial Sequence
  GFR-binding peptide
  MOD_RES (1), (2), (36), (38): Xaa is C or S
  MOD_RES (16), (17), (18), (19), (20): Xaa is A or G
  MOD_RES (21), (22), (23), (24): Xaa is A or G or is absent
XXVPTELNAISMLYFXXXXXXXXXLKKYRDMVVEGXGX

SEQ ID NO: 9229 - protein, 34 aa, Artificial Sequence
  GFR-binding peptide
  MOD_RES (2), (3), (34): Xaa is C or S
PXXVSQDLSPISILYKIGKTPKILKYHYMIVKSX

SEQ ID NO: 9230 - protein, 40 aa, Artificial Sequence
  GFR-binding peptide
  MOD_RES (5), (6), (39): Xaa is C or S
  MOD_RES (20), (21), (22), (23), (24): Xaa is A or G
  MOD_RES (25), (26), (27), (28): Xaa is A or G or is absent
SAAPXXVPQALSPISILYKXXXXXXXXXLKYHYMIVRSXK

SEQ ID NO: 9231 - protein, 39 aa, Artificial Sequence
  GFR-binding peptide
  MOD_RES (1), (2), (36), (38): Xaa is C or S
  MOD_RES (16), (17), (18), (19), (20): Xaa is A or G
  MOD_RES (21), (22), (23), (24): Xaa is A or G or is absent
XXVPTELSPISMLYKXXXXXXXXXLKYHYDMVVEGXGXR

SEQ ID NO: 9232 - protein, 32 aa, Artificial Sequence
  GFR-binding peptide
  MOD_RES (1), (2): Xaa is C or S
XXAPTKLSAISVLYLDSSNNVILKNYQNMVVK

SEQ ID NO: 9233 - protein, 35 aa, Artificial Sequence
  GFR-binding peptide
  MOD_RES (2), (3): Xaa is C or S
  MOD_RES (17), (18), (19), (20), (21): Xaa is A or G
  MOD_RES (22), (23), (24), (25): Xaa is A or G or is absent
PXXAPTKLSAISVLYLXXXXXXXXXLKNYQNMVVR

SEQ ID NO: 9234 - protein, 39 aa, Artificial Sequence
  GFR-binding peptide
  MOD_RES (37), (39): Xaa is C or S
  MOD_RES (16), (17), (18), (19), (20): Xaa is A or G
  MOD_RES (21), (22), (23), (24): Xaa is A or G or is absent
RPTQVQLSAISVLYLXXXXXXXXXLKNYQTLEDHLAXKX

SEQ ID NO: 9235 - protein, 37 aa, Artificial Sequence
  GFR-binding peptide
  MOD_RES (2), (3), (36): Xaa is C or S
  MOD_RES (17), (18), (19), (20), (21): Xaa is A or G
  MOD_RES (22), (23), (24), (25): Xaa is A or G or is absent
PXXVSQDLNAISILYFXXXXXXXXXLKKYRMIVKSXK

SEQ ID NO: 9236 - protein, 37 aa, Artificial Sequence
  GFR-binding peptide
  MOD_RES (4), (5): Xaa is C or S
GKAXXVPTKLSAISVLYLDDMGVPTLKNYQEGMSVAE

SEQ ID NO: 9237 - protein, 33 aa, Artificial Sequence
  GFR-binding peptide
  MOD_RES (14), (15), (16), (17), (18): Xaa is A or G
  MOD_RES (19), (20), (21), (22): Xaa is A or G or is absent
APTKLSAISVLYLXXXXXXXXXLKNYQNMVVKA

SEQ ID NO: 9238 - protein, 37 aa, Artificial Sequence
  GFR-binding peptide
  MOD_RES (1), (2), (35), (37): Xaa is C or S
  MOD_RES (16), (17), (18), (19), (20): Xaa is A or G
  MOD_RES (21), (22), (23), (24): Xaa is A or G or is absent
XXVSQDLNAISILYFXXXXXXXXXLKKYRMIVKSXKX

SEQ ID NO: 9239 - protein, 33 aa, Artificial Sequence
  GFR-binding peptide
  MOD_RES (1), (33): Xaa is C or S
XVPTELSPISMLYKDEYDKVVLKYHYEMVVEGX

SEQ ID NO: 9240 - protein, 41 aa, Artificial Sequence
  GFR-binding peptide
  MOD_RES (5), (6), (39), (41): Xaa is C or S
  MOD_RES (20), (21), (22), (23), (24): Xaa is A or G
  MOD_RES (25), (26), (27), (28): Xaa is A or G or is absent
SASPXXVSQDLSPISILYKXXXXXXXXXLKYHYMIVKSXKX

SEQ ID NO: 9241 - protein, 36 aa, Artificial Sequence
  GFR-binding peptide
  MOD_RES (1), (34), (36): Xaa is C or S
  MOD_RES (15), (16), (17), (18), (19): Xaa is A or G
  MOD_RES (20), (21), (22), (23): Xaa is A or G or is absent
XVPQALSATSILYYXXXXXXXXXLRKHRMIVRSXKX

SEQ ID NO: 9242 - protein, 39 aa, Artificial Sequence
  GFR-binding peptide
  MOD_RES (2), (3), (37), (39): Xaa is C or S
  MOD_RES (17), (18), (19), (20), (21): Xaa is A or G
  MOD_RES (22), (23), (24), (25): Xaa is A or G or is absent
PXXAPTQLNAISVLYFXXXXXXXXXLKKYRNMVVRAXGX

SEQ ID NO: 9243 - protein, 45 aa, Artificial Sequence
  GFR-binding peptide
  MOD_RES (5), (42), (44): Xaa is C or S
  MOD_RES (21), (22), (23), (24), (25): Xaa is A or G
  MOD_RES (26), (27), (28), (29): Xaa is A or G or is absent
RNVQXRPTQVQLSATSVLYYXXXXXXXXXLRKHRTLEDHLAXKXE

SEQ ID NO: 9244 - protein, 37 aa, Artificial Sequence
  GFR-binding peptide
  MOD_RES (3), (4), (37): Xaa is C or S
  MOD_RES (18), (19), (20), (21), (22): Xaa is A or G
  MOD_RES (23), (24), (25), (26): Xaa is A or G or is absent
SPXXVPQDLNAISILYFXXXXXXXXXLKKYRMVVKSX

SEQ ID NO: 9245 - protein, 41 aa, Artificial Sequence
  GFR-binding peptide
  MOD_RES (3), (4), (39), (41): Xaa is C or S
  MOD_RES (18), (19), (20), (21), (22): Xaa is A or G
  MOD_RES (23), (24), (25), (26): Xaa is A or G or is absent
KAXXVPTKLNAISVLYFXXXXXXXXXLKKYREGMSVAEXGX

SEQ ID NO: 9246 - protein, 40 aa, Artificial Sequence
  GFR-binding peptide
  MOD_RES (4), (5), (37), (39): Xaa is C or S
PKPXXAPTQLSATSVLYYDDSSNVILRKHRNMVVRAXGXH

SEQ ID NO: 9247 - protein, 33 aa, Artificial Sequence
  GFR-binding peptide
  MOD_RES (1), (1): Xaa is C or S
  MOD_RES (15), (16), (17), (18), (19): Xaa is A or G
  MOD_RES (20), (21), (22), (23): Xaa is A or G or is absent
XVPQDLSPISILYKXXXXXXXXXLKYHYMVVKS

SEQ ID NO: 9248 - protein, 39 aa, Artificial Sequence
  GFR-binding peptide
  MOD_RES (3), (4), (36), (38): Xaa is C or S
KPXXAPTQLSPISVLYKDDSSNVILKYHYNMVVRAXGXH

SEQ ID NO: 9249 - protein, 34 aa, Artificial Sequence
  GFR-binding peptide
  MOD_RES (1), (2), (34): Xaa is C or S
XXAPTQLSATSVLYYDDSSNVILRKHRNMVVRAX

SEQ ID NO: 9250 - protein, 43 aa, Artificial Sequence
  GFR-binding peptide
  MOD_RES (6), (7), (41), (43): Xaa is C or S
  MOD_RES (21), (22), (23), (24), (25): Xaa is A or G
  MOD_RES (26), (27), (28), (29): Xaa is A or G or is absent
YVPKPXXAPTKLSPISVLYKXXXXXXXXXLKYHYNMVVRSXGX

SEQ ID NO: 9251 - protein, 38 aa, Artificial Sequence
  GFR-binding peptide
  MOD_RES (37), (37): Xaa is C or S
RPTQVQLSPISVLYKEIVRKKPIFLKYHYTLEDHLAXK

SEQ ID NO: 9252 - protein, 39 aa, Artificial Sequence
  GFR-binding peptide
  MOD_RES (6), (7): Xaa is C or S
  MOD_RES (21), (22), (23), (24), (25): Xaa is A or G
  MOD_RES (26), (27), (28), (29): Xaa is A or G or is absent
ASASPXXVSQDLSAISILYLXXXXXXXXXLKNYQMIVKS

SEQ ID NO: 9253 - protein, 36 aa, Artificial Sequence
  GFR-binding peptide
  MOD_RES (1), (34), (36): Xaa is C or S
  MOD_RES (15), (16), (17), (18), (19): Xaa is A or G
  MOD_RES (20), (21), (22), (23): Xaa is A or G or is absent
XVPQALNAISILYFXXXXXXXXXLKKYRMIVRSXKX

SEQ ID NO: 9254 - protein, 36 aa, Artificial Sequence
  GFR-binding peptide
  MOD_RES (2), (3): Xaa is C or S
  MOD_RES (17), (18), (19), (20), (21): Xaa is A or G
  MOD_RES (22), (23), (24), (25): Xaa is A or G or is absent
PXXAPTKLNAISVLYFXXXXXXXXXLKKYRNMVVRS

SEQ ID NO: 9255 - protein, 38 aa, Artificial Sequence
  GFR-binding peptide
  MOD_RES (5), (6), (37): Xaa is C or S
SASPXXVSQDLNAISILYFIGKTPKILKKYRMIVKSXK

SEQ ID NO: 9256 - protein, 37 aa, Artificial Sequence
  GFR-binding peptide
  MOD_RES (34), (36): Xaa is C or S
  MOD_RES (14), (15), (16), (17), (18): Xaa is A or G
  MOD_RES (19), (20), (21), (22): Xaa is A or G or is absent
APTKLSATSVLYYXXXXXXXXXLRKHRNMVVKAXGXH

SEQ ID NO: 9257 - protein, 36 aa, Artificial Sequence
  GFR-binding peptide
  MOD_RES (1), (33), (35): Xaa is C or S
XVPTELNAISMLYFDEYDKVVLKKYREMVVEGXGXR

SEQ ID NO: 9258 - protein, 37 aa, Artificial Sequence
  GFR-binding peptide
  MOD_RES (4), (5), (36): Xaa is C or S
AAPXXVPQALNAISILYFVGRKPKVLKKYRMIVRSXK

SEQ ID NO: 9259 - protein, 36 aa, Artificial Sequence
  GFR-binding peptide
  MOD_RES (6), (6): Xaa is C or S
VTKPTXAPTKLSATSVLYYDDSSNVILRKHRNMVVR

SEQ ID NO: 9260 - protein, 41 aa, Artificial Sequence
  GFR-binding peptide
  MOD_RES (6), (7), (41): Xaa is C or S
  MOD_RES (21), (22), (23), (24), (25): Xaa is A or G
  MOD_RES (26), (27), (28), (29): Xaa is A or G or is absent
KIPKAXXVPTELSPISMLYKXXXXXXXXXLKYHYDMVVEGX

SEQ ID NO: 9261 - protein, 34 aa, Artificial Sequence
  GFR-binding peptide
  MOD_RES (3), (4): Xaa is C or S
APXXVPQALNAISILYFVGRKPKVLKKYRMIVRS

SEQ ID NO: 9262 - protein, 34 aa, Artificial Sequence
  GFR-binding peptide
  MOD_RES (34), (34): Xaa is C or S
  MOD_RES (14), (15), (16), (17), (18): Xaa is A or G
  MOD_RES (19), (20), (21), (22): Xaa is A or G or is absent
APTQLSAISVLYLXXXXXXXXXLKNYQNMVVRAX

SEQ ID NO: 9263 - protein, 41 aa, Artificial Sequence
  GFR-binding peptide
  MOD_RES (6), (7), (41): Xaa is C or S
  MOD_RES (21), (22), (23), (24), (25): Xaa is A or G
  MOD_RES (26), (27), (28), (29): Xaa is A or G or is absent
AVPKAXXAPTKLSAISVLYLXXXXXXXXXLKNYQNMVVKAX

SEQ ID NO: 9264 - protein, 40 aa, Artificial Sequence
  GFR-binding peptide
  MOD_RES (4), (5), (37), (39): Xaa is C or S
PKPXXAPTQLSAISVLYLDDSSNVILKNYQNMVVRAXGXH

SEQ ID NO: 9265 - protein, 37 aa, Artificial Sequence
  GFR-binding peptide
  MOD_RES (4), (5): Xaa is C or S
  MOD_RES (19), (20), (21), (22), (23): Xaa is A or G
  MOD_RES (24), (25), (26), (27): Xaa is A or G or is absent
ASPXXVSQDLNAISILYFXXXXXXXXXLKKYRMIVKS

SEQ ID NO: 9266 - protein, 32 aa, Artificial Sequence
  GFR-binding peptide
  MOD_RES (1), (32): Xaa is C or S
XVPQDLSATSILYYVGRTPKVLRKHRMVVKSX

SEQ ID NO: 9267 - protein, 42 aa, Artificial Sequence
  GFR-binding peptide
  MOD_RES (3), (40), (42): Xaa is C or S
  MOD_RES (19), (20), (21), (22), (23): Xaa is A or G
  MOD_RES (24), (25), (26), (27): Xaa is A or G or is absent
VQXRPTQVQLSATSVLYYXXXXXXXXXLRKHRTLEDHLAXKX

SEQ ID NO: 9268 - protein, 41 aa, Artificial Sequence
  GFR-binding peptide
  MOD_RES (6), (7), (40): Xaa is C or S
  MOD_RES (21), (22), (23), (24), (25): Xaa is A or G
  MOD_RES (26), (27), (28), (29): Xaa is A or G or is absent
ASASPXXVSQDLSPISILYKXXXXXXXXXLKYHYMIVKSXK

SEQ ID NO: 9269 - protein, 41 aa, Artificial Sequence
  GFR-binding peptide
  MOD_RES (5), (6), (39), (41): Xaa is C or S
  MOD_RES (20), (21), (22), (23), (24): Xaa is A or G
  MOD_RES (25), (26), (27), (28): Xaa is A or G or is absent
SAAPXXVPQALSPISILYKXXXXXXXXXLKYHYMIVRSXKX

SEQ ID NO: 9270 - protein, 39 aa, Artificial Sequence
  GFR-binding peptide
  MOD_RES (1), (38): Xaa is C or S
  MOD_RES (17), (18), (19), (20), (21): Xaa is A or G
  MOD_RES (22), (23), (24), (25): Xaa is A or G or is absent
XRPTQVQLSPISVLYKXXXXXXXXXLKYHYTLEDHLAXK

SEQ ID NO: 9271 - protein, 40 aa, Artificial Sequence
  GFR-binding peptide
  MOD_RES (3), (4), (38), (40): Xaa is C or S
  MOD_RES (18), (19), (20), (21), (22): Xaa is A or G
  MOD_RES (23), (24), (25), (26): Xaa is A or G or is absent
KAXXVPTELSATSMLYYXXXXXXXXXLRKHRDMVVEGXGX

SEQ ID NO: 9272 - protein, 38 aa, Artificial Sequence
  GFR-binding peptide
  MOD_RES (2), (3), (37): Xaa is C or S
  MOD_RES (17), (18), (19), (20), (21): Xaa is A or G
  MOD_RES (22), (23), (24), (25): Xaa is A or G or is absent
PXXAPTQLSATSVLYYXXXXXXXXXLRKHRNMVVRAXG

SEQ ID NO: 9273 - protein, 36 aa, Artificial Sequence
  GFR-binding peptide
  MOD_RES (2), (3): Xaa is C or S
  MOD_RES (17), (18), (19), (20), (21): Xaa is A or G
  MOD_RES (22), (23), (24), (25): Xaa is A or G or is absent
PXXAPTQLSAISVLYLXXXXXXXXXLKNYQNMVVRA

SEQ ID NO: 9274 - protein, 40 aa, Artificial Sequence
  GFR-binding peptide
  MOD_RES (2), (3), (37), (39): Xaa is C or S
  MOD_RES (17), (18), (19), (20), (21): Xaa is A or G
  MOD_RES (22), (23), (24), (25): Xaa is A or G or is absent
PXXAPTQLSPISVLYKXXXXXXXXXLKYHYNMVVRAXGXH

SEQ ID NO: 9275 - protein, 31 aa, Artificial Sequence
  GFR-binding peptide
  MOD_RES (31), (31): Xaa is C or S
VPQDLSATSILYYVGRTPKVLRKHRMVVKSX

SEQ ID NO: 9276 - protein, 41 aa, Artificial Sequence
  GFR-binding peptide
  MOD_RES (6), (7), (38), (40): Xaa is C or S
ASASPXXVSQDLNAISILYFIGKTPKILKKYRMIVKSXKXS

SEQ ID NO: 9277 - protein, 35 aa, Artificial Sequence
  GFR-binding peptide
  MOD_RES (2), (3): Xaa is C or S
  MOD_RES (17), (18), (19), (20), (21): Xaa is A or G
  MOD_RES (22), (23), (24), (25): Xaa is A or G or is absent
PXXAPTKLSPISVLYKXXXXXXXXXLKYHYNMVVR

SEQ ID NO: 9278 - protein, 35 aa, Artificial Sequence
  GFR-binding peptide
  MOD_RES (35), (35): Xaa is C or S
  MOD_RES (14), (15), (16), (17), (18): Xaa is A or G
  MOD_RES (19), (20), (21), (22): Xaa is A or G or is absent
TQVQLSPISVLYKXXXXXXXXXLKYHYTLEDHLAX

SEQ ID NO: 9279 - protein, 39 aa, Artificial Sequence
  GFR-binding peptide
  MOD_RES (4), (5), (36), (38): Xaa is C or S
AAPXXVPQALNAISILYFVGRKPKVLKKYRMIVRSXKXS

SEQ ID NO: 9280 - protein, 37 aa, Artificial Sequence
  GFR-binding peptide
  MOD_RES (1), (2), (36): Xaa is C or S
  MOD_RES (16), (17), (18), (19), (20): Xaa is A or G
  MOD_RES (21), (22), (23), (24): Xaa is A or G or is absent
XXAPTKLNAISVLYFXXXXXXXXXLKKYRNMVVRSXG

SEQ ID NO: 9281 - protein, 42 aa, Artificial Sequence
  GFR-binding peptide
  MOD_RES (6), (7), (41): Xaa is C or S
  MOD_RES (21), (22), (23), (24), (25): Xaa is A or G
  MOD_RES (26), (27), (28), (29): Xaa is A or G or is absent
YVPKPXXAPTKLNAISVLYFXXXXXXXXXLKKYRNMVVRSXG

SEQ ID NO: 9282 - protein, 36 aa, Artificial Sequence
  GFR-binding peptide
  MOD_RES (1), (2), (34), (36): Xaa is C or S
XXAPTKLSAISVLYLDSSNNVILKNYQNMVVKAXGX

SEQ ID NO: 9283 - protein, 34 aa, Artificial Sequence
  GFR-binding peptide
  MOD_RES (34), (34): Xaa is C or S
  MOD_RES (14), (15), (16), (17), (18): Xaa is A or G
  MOD_RES (19), (20), (21), (22): Xaa is A or G or is absent
APTKLSPISVLYKXXXXXXXXXLKYHYNMVVKAX

SEQ ID NO: 9284 - protein, 33 aa, Artificial Sequence
  GFR-binding peptide
  MOD_RES (32), (32): Xaa is C or S
APTQLSAISVLYLDDSSNVILKNYQNMVVRAXG

SEQ ID NO: 9285 - protein, 37 aa, Artificial Sequence
  GFR-binding peptide
  MOD_RES (4), (5): Xaa is C or S
  MOD_RES (19), (20), (21), (22), (23): Xaa is A or G
  MOD_RES (24), (25), (26), (27): Xaa is A or G or is absent
PKAXXVPTELNAISMLYFXXXXXXXXXLKKYREMVVE

SEQ ID NO: 9286 - protein, 40 aa, Artificial Sequence
  GFR-binding peptide
  MOD_RES (4), (5), (40): Xaa is C or S
  MOD_RES (19), (20), (21), (22), (23): Xaa is A or G
  MOD_RES (24), (25), (26), (27): Xaa is A or G or is absent
GKAXXVPTKLSAISVLYLXXXXXXXXXLKNYQEGMSVAEX

SEQ ID NO: 9287 - protein, 40 aa, Artificial Sequence
  GFR-binding peptide
  MOD_RES (5), (6), (38), (40): Xaa is C or S
IPKAXXVPTELNAISMLYFDENEKVVLKKYRDMVVEGXGX

SEQ ID NO: 9288 - protein, 39 aa, Artificial Sequence
  GFR-binding peptide
  MOD_RES (5), (6), (39): Xaa is C or S
VGKAXXVPTKLSATSVLYYDDMGVPTLRKHREGMSVAEX

SEQ ID NO: 9289 - protein, 34 aa, Artificial Sequence
  GFR-binding peptide
  MOD_RES (3), (4): Xaa is C or S
KAXXVPTELSPISMLYKDENEKVVLKYHYDMVVE

SEQ ID NO: 9290 - protein, 39 aa, Artificial Sequence
  GFR-binding peptide
  MOD_RES (5), (6), (38): Xaa is C or S
IPKAXXVPTELSATSMLYYDEYDKVVLRKHREMVVEGXG

SEQ ID NO: 9291 - protein, 42 aa, Artificial Sequence
  GFR-binding peptide
  MOD_RES (4), (5), (39), (41): Xaa is C or S
  MOD_RES (19), (20), (21), (22), (23): Xaa is A or G
  MOD_RES (24), (25), (26), (27): Xaa is A or G or is absent
PKAXXVPTELSAISMLYLXXXXXXXXXLKNYQEMVVEGXGXR

SEQ ID NO: 9292 - protein, 39 aa, Artificial Sequence
  GFR-binding peptide
  MOD_RES (6), (7): Xaa is C or S
  MOD_RES (21), (22), (23), (24), (25): Xaa is A or G
  MOD_RES (26), (27), (28), (29): Xaa is A or G or is absent
ASASPXXVPQDLNAISILYFXXXXXXXXXLKKYRMVVKS

SEQ ID NO: 9293 - protein, 34 aa, Artificial Sequence
  GFR-binding peptide
  MOD_RES (1), (2): Xaa is C or S
  MOD_RES (16), (17), (18), (19), (20): Xaa is A or G
  MOD_RES (21), (22), (23), (24): Xaa is A or G or is absent
XXVSQDLSPISILYKXXXXXXXXXLKYHYMIVKS

SEQ ID NO: 9294 - protein, 44 aa, Artificial Sequence
  GFR-binding peptide
  MOD_RES (6), (7), (41), (43): Xaa is C or S
  MOD_RES (21), (22), (23), (24), (25): Xaa is A or G
  MOD_RES (26), (27), (28), (29): Xaa is A or G or is absent
YVPKPXXAPTKLNAISVLYFXXXXXXXXXLKKYRNMVVRSXGXH

SEQ ID NO: 9295 - protein, 39 aa, Artificial Sequence
  GFR-binding peptide
  MOD_RES (4), (4): Xaa is C or S
  MOD_RES (20), (21), (22), (23), (24): Xaa is A or G
  MOD_RES (25), (26), (27), (28): Xaa is A or G or is absent
NVQXRPTQVQLNAISVLYFXXXXXXXXXLKKYRTLEDHL

SEQ ID NO: 9296 - protein, 36 aa, Artificial Sequence
  GFR-binding peptide
  MOD_RES (35), (35): Xaa is C or S
  MOD_RES (14), (15), (16), (17), (18): Xaa is A or G
  MOD_RES (19), (20), (21), (22): Xaa is A or G or is absent
VPTKLSAISVLYLXXXXXXXXXLKNYQEGMSVAEXG

SEQ ID NO: 9297 - protein, 38 aa, Artificial Sequence
  GFR-binding peptide
  MOD_RES (35), (37): Xaa is C or S
  MOD_RES (14), (15), (16), (17), (18): Xaa is A or G
  MOD_RES (19), (20), (21), (22): Xaa is A or G or is absent
TQVQLSAISVLYLXXXXXXXXXLKNYQTLEDHLAXKXE

SEQ ID NO: 9298 - protein, 39 aa, Artificial Sequence
  GFR-binding peptide
  MOD_RES (1), (2), (37), (39): Xaa is C or S
  MOD_RES (16), (17), (18), (19), (20): Xaa is A or G
  MOD_RES (21), (22), (23), (24): Xaa is A or G or is absent
XXVPTKLNAISVLYFXXXXXXXXXLKKYREGMSVAEXGX

SEQ ID NO: 9299 - protein, 41 aa, Artificial Sequence
  GFR-binding peptide
  MOD_RES (4), (5), (39), (41): Xaa is C or S
  MOD_RES (19), (20), (21), (22), (23): Xaa is A or G
  MOD_RES (24), (25), (26), (27): Xaa is A or G or is absent
PKPXXAPTKLNAISVLYFXXXXXXXXXLKKYRNMVVRSXGX

SEQ ID NO: 9300 - protein, 36 aa, Artificial Sequence
  GFR-binding peptide
  MOD_RES (5), (6): Xaa is C or S
IPKAXXVPTELSPISMLYKDEYDKVVLKYHYEMVVE

SEQ ID NO: 9301 - protein, 39 aa, Artificial Sequence
  GFR-binding peptide
  MOD_RES (2), (3), (38): Xaa is C or S
  MOD_RES (17), (18), (19), (20), (21): Xaa is A or G
  MOD_RES (22), (23), (24), (25): Xaa is A or G or is absent
AXXVPTKLSATSVLYYXXXXXXXXXLRKHREGMSVAEXG

SEQ ID NO: 9302 - protein, 42 aa, Artificial Sequence
  GFR-binding peptide
  MOD_RES (6), (7), (40), (42): Xaa is C or S
  MOD_RES (21), (22), (23), (24), (25): Xaa is A or G
  MOD_RES (26), (27), (28), (29): Xaa is A or G or is absent
ASASPXXVPQDLNAISILYFXXXXXXXXXLKKYRMVVKSXKX

SEQ ID NO: 9303 - protein, 43 aa, Artificial Sequence
  GFR-binding peptide
  MOD_RES (6), (7), (40), (42): Xaa is C or S
  MOD_RES (21), (22), (23), (24), (25): Xaa is A or G
  MOD_RES (26), (27), (28), (29): Xaa is A or G or is absent
ASASPXXVPQDLNAISILYFXXXXXXXXXLKKYRMVVKSXKXS

SEQ ID NO: 9304 - protein, 33 aa, Artificial Sequence
  GFR-binding peptide
  MOD_RES (31), (33): Xaa is C or S
VPQDLNAISILYFVGRTPKVLKKYRMVVKSXKX

SEQ ID NO: 9305 - protein, 40 aa, Artificial Sequence
  GFR-binding peptide
  MOD_RES (6), (40): Xaa is C or S
  MOD_RES (20), (21), (22), (23), (24): Xaa is A or G
  MOD_RES (25), (26), (27), (28): Xaa is A or G or is absent
VTKPTXAPTKLSAISVLYLXXXXXXXXXLKNYQNMVVRSX

SEQ ID NO: 9306 - protein, 41 aa, Artificial Sequence
  GFR-binding peptide
  MOD_RES (5), (6), (38), (40): Xaa is C or S
VPKPXXAPTQLSPISVLYKDDSSNVILKYHYNMVVRAXGXH

SEQ ID NO: 9307 - protein, 35 aa, Artificial Sequence
  GFR-binding peptide
  MOD_RES (34), (34): Xaa is C or S
  MOD_RES (14), (15), (16), (17), (18): Xaa is A or G
  MOD_RES (19), (20), (21), (22): Xaa is A or G or is absent
VPTELSATSMLYYXXXXXXXXXLRKHRDMVVEGXG

SEQ ID NO: 9308 - protein, 39 aa, Artificial Sequence
  GFR-binding peptide
  MOD_RES (3), (4), (39): Xaa is C or S
  MOD_RES (18), (19), (20), (21), (22): Xaa is A or G
  MOD_RES (23), (24), (25), (26): Xaa is A or G or is absent
KAXXVPTKLSATSVLYYXXXXXXXXXLRKHREGMSVAEX

SEQ ID NO: 9309 - protein, 39 aa, Artificial Sequence
  GFR-binding peptide
  MOD_RES (5), (37), (39): Xaa is C or S
TKPTXAPTKLSAISVLYLDDSSNVILKNYQNMVVRSXGX

SEQ ID NO: 9310 - protein, 41 aa, Artificial Sequence
  GFR-binding peptide
  MOD_RES (3), (4), (38), (40): Xaa is C or S
  MOD_RES (18), (19), (20), (21), (22): Xaa is A or G
  MOD_RES (23), (24), (25), (26): Xaa is A or G or is absent
KAXXVPTELSPISMLYKXXXXXXXXXLKYHYDMVVEGXGXR

SEQ ID NO: 9311 - protein, 35 aa, Artificial Sequence
  GFR-binding peptide
  MOD_RES (1), (35): Xaa is C or S
  MOD_RES (15), (16), (17), (18), (19): Xaa is A or G
  MOD_RES (20), (21), (22), (23): Xaa is A or G or is absent
XAPTKLSPISVLYKXXXXXXXXXLKYHYNMVVKAX

SEQ ID NO: 9312 - protein, 38 aa, Artificial Sequence
  GFR-binding peptide
  MOD_RES (2), (36), (38): Xaa is C or S
  MOD_RES (16), (17), (18), (19), (20): Xaa is A or G
  MOD_RES (21), (22), (23), (24): Xaa is A or G or is absent
TXAPTKLNAISVLYFXXXXXXXXXLKKYRNMVVRSXGX

SEQ ID NO: 9313 - protein, 33 aa, Artificial Sequence
  GFR-binding peptide
  MOD_RES (32), (32): Xaa is C or S
APTKLSAISVLYLDDSSNVILKNYQNMVVRSXG

SEQ ID NO: 9314 - protein, 39 aa, Artificial Sequence
  GFR-binding peptide
  MOD_RES (2), (3), (36), (38): Xaa is C or S
  MOD_RES (17), (18), (19), (20), (21): Xaa is A or G
  MOD_RES (22), (23), (24), (25): Xaa is A or G or is absent
PXXVPQALSPISILYKXXXXXXXXXLKYHYMIVRSXKXS

SEQ ID NO: 9315 - protein, 36 aa, Artificial Sequence
  GFR-binding peptide
  MOD_RES (1), (2), (34), (36): Xaa is C or S
XXAPTQLSATSVLYYDDSSNVILRKHRNMVVRAXGX

SEQ ID NO: 9316 - protein, 36 aa, Artificial Sequence
  GFR-binding peptide
  MOD_RES (3), (4): Xaa is C or S
  MOD_RES (18), (19), (20), (21), (22): Xaa is A or G
  MOD_RES (23), (24), (25), (26): Xaa is A or G or is absent
SPXXVPQDLNAISILYFXXXXXXXXXLKKYRMVVKS

SEQ ID NO: 9317 - protein, 37 aa, Artificial Sequence
  GFR-binding peptide
  MOD_RES (3), (4), (37): Xaa is C or S
  MOD_RES (18), (19), (20), (21), (22): Xaa is A or G
  MOD_RES (23), (24), (25), (26): Xaa is A or G or is absent
SPXXVSQDLNAISILYFXXXXXXXXXLKKYRMIVKSX

SEQ ID NO: 9318 - protein, 38 aa, Artificial Sequence
  GFR-binding peptide
  MOD_RES (5), (6), (38): Xaa is C or S
IPKAXXVPTELSATSMLYYDENEKVVLRKHRDMVVEGX

SEQ ID NO: 9319 - protein, 40 aa, Artificial Sequence
  GFR-binding peptide
  MOD_RES (4), (4): Xaa is C or S
NVQXRPTQVQLSPISVLYKEIVRKKPIFLKYHYTLEDHLA

SEQ ID NO: 9320 - protein, 37 aa, Artificial Sequence
  GFR-binding peptide
  MOD_RES (3), (35), (37): Xaa is C or S
PTXAPTKLSATSVLYYDDSSNVILRKHRNMVVRSXGX

SEQ ID NO: 9321 - protein, 42 aa, Artificial Sequence
  GFR-binding peptide
  MOD_RES (6), (40), (42): Xaa is C or S
  MOD_RES (20), (21), (22), (23), (24): Xaa is A or G
  MOD_RES (25), (26), (27), (28): Xaa is A or G or is absent
VTKPTXAPTKLSATSVLYYXXXXXXXXXLRKHRNMVVRSXGX

SEQ ID NO: 9322 - protein, 33 aa, Artificial Sequence
  GFR-binding peptide
  MOD_RES (1), (32): Xaa is C or S
XVSQDLSAISILYLIGKTPKILKNYQMIVKSXK

SEQ ID NO: 9323 - protein, 40 aa, Artificial Sequence
  GFR-binding peptide
  MOD_RES (5), (6), (40): Xaa is C or S
  MOD_RES (20), (21), (22), (23), (24): Xaa is A or G
  MOD_RES (25), (26), (27), (28): Xaa is A or G or is absent
VPKPXXAPTQLSAISVLYLXXXXXXXXXLKNYQNMVVRAX

SEQ ID NO: 9324 - protein, 35 aa, Artificial Sequence
  GFR-binding peptide
  MOD_RES (1), (33), (35): Xaa is C or S
XVPTELNAISMLYFDEYDKVVLKKYREMVVEGXGX

SEQ ID NO: 9325 - protein, 39 aa, Artificial Sequence
  GFR-binding peptide
  MOD_RES (5), (6): Xaa is C or S
  MOD_RES (20), (21), (22), (23), (24): Xaa is A or G
  MOD_RES (25), (26), (27), (28): Xaa is A or G or is absent
VPKAXXAPTKLNAISVLYFXXXXXXXXXLKKYRNMVVKA

SEQ ID NO: 9326 - protein, 40 aa, Artificial Sequence
  GFR-binding peptide
  MOD_RES (4), (5), (39): Xaa is C or S
  MOD_RES (19), (20), (21), (22), (23): Xaa is A or G
  MOD_RES (24), (25), (26), (27): Xaa is A or G or is absent
PKPXXAPTKLSPISVLYKXXXXXXXXXLKYHYNMVVRSXG

SEQ ID NO: 9327 - protein, 37 aa, Artificial Sequence
  GFR-binding peptide
  MOD_RES (1), (2), (35), (37): Xaa is C or S
  MOD_RES (16), (17), (18), (19), (20): Xaa is A or G
  MOD_RES (21), (22), (23), (24): Xaa is A or G or is absent
XXVPQALNAISILYFXXXXXXXXXLKKYRMIVRSXKX

SEQ ID NO: 9328 - protein, 37 aa, Artificial Sequence
  GFR-binding peptide
  MOD_RES (3), (4), (36): Xaa is C or S
KAXXVPTELNAISMLYFDENEKVVLKKYRDMVVEGXG

SEQ ID NO: 9329 - protein, 37 aa, Artificial Sequence
  GFR-binding peptide
  MOD_RES (2), (3), (37): Xaa is C or S
  MOD_RES (17), (18), (19), (20), (21): Xaa is A or G
  MOD_RES (22), (23), (24), (25): Xaa is A or G or is absent
PXXAPTKLSATSVLYYXXXXXXXXXLRKHRNMVVRSX

SEQ ID NO: 9330 - protein, 36 aa, Artificial Sequence
  GFR-binding peptide
  MOD_RES (34), (36): Xaa is C or S
  MOD_RES (14), (15), (16), (17), (18): Xaa is A or G
  MOD_RES (19), (20), (21), (22): Xaa is A or G or is absent
APTQLNAISVLYFXXXXXXXXXLKKYRNMVVRAXGX

SEQ ID NO: 9331 - protein, 33 aa, Artificial Sequence
  GFR-binding peptide
  MOD_RES (14), (15), (16), (17), (18): Xaa is A or G
  MOD_RES (19), (20), (21), (22): Xaa is A or G or is absent
APTKLSAISVLYLXXXXXXXXXLKNYQNMVVRS

SEQ ID NO: 9332 - protein, 35 aa, Artificial Sequence
  GFR-binding peptide
  MOD_RES (3), (4), (35): Xaa is C or S
APXXVPQALNAISILYFVGRKPKVLKKYRMIVRSX

SEQ ID NO: 9333 - protein, 43 aa, Artificial Sequence
  GFR-binding peptide
  MOD_RES (4), (5), (40), (42): Xaa is C or S
  MOD_RES (19), (20), (21), (22), (23): Xaa is A or G
  MOD_RES (24), (25), (26), (27): Xaa is A or G or is absent
GKAXXVPTKLSATSVLYYXXXXXXXXXLRKHREGMSVAEXGXR

SEQ ID NO: 9334 - protein, 43 aa, Artificial Sequence
  GFR-binding peptide
  MOD_RES (6), (7), (41), (43): Xaa is C or S
  MOD_RES (21), (22), (23), (24), (25): Xaa is A or G
  MOD_RES (26), (27), (28), (29): Xaa is A or G or is absent
YVPKPXXAPTKLSAISVLYLXXXXXXXXXLKNYQNMVVRSXGX

SEQ ID NO: 9335 - protein, 35 aa, Artificial Sequence
  GFR-binding peptide
  MOD_RES (2), (3), (34): Xaa is C or S
PXXVPQDLNAISILYFVGRTPKVLKKYRMVVKSXK

SEQ ID NO: 9336 - protein, 36 aa, Artificial Sequence
  GFR-binding peptide
  MOD_RES (3), (4), (36): Xaa is C or S
KAXXAPTKLSAISVLYLDSSNNVILKNYQNMVVKAX

SEQ ID NO: 9337 - protein, 36 aa, Artificial Sequence
  GFR-binding peptide
  MOD_RES (2), (3): Xaa is C or S
  MOD_RES (17), (18), (19), (20), (21): Xaa is A or G
  MOD_RES (22), (23), (24), (25): Xaa is A or G or is absent
AXXVPTELSAISMLYLXXXXXXXXXLKNYQEMVVEG

SEQ ID NO: 9338 - protein, 33 aa, Artificial Sequence
  GFR-binding peptide
  MOD_RES (14), (15), (16), (17), (18): Xaa is A or G
  MOD_RES (19), (20), (21), (22): Xaa is A or G or is absent
TQVQLNAISVLYFXXXXXXXXXLKKYRTLEDHL

SEQ ID NO: 9339 - protein, 34 aa, Artificial Sequence
  GFR-binding peptide
RPTQVQLSPISVLYKEIVRKKPIFLKYHYTLEDH

SEQ ID NO: 9340 - protein, 38 aa, Artificial Sequence
  GFR-binding peptide
  MOD_RES (1), (2), (36), (38): Xaa is C or S
  MOD_RES (16), (17), (18), (19), (20): Xaa is A or G
  MOD_RES (21), (22), (23), (24): Xaa is A or G or is absent
XXAPTKLSPISVLYKXXXXXXXXXLKYHYNMVVKAXGX

SEQ ID NO: 9341 - protein, 33 aa, Artificial Sequence
  GFR-binding peptide
  MOD_RES (14), (15), (16), (17), (18): Xaa is A or G
  MOD_RES (19), (20), (21), (22): Xaa is A or G or is absent
APTKLNAISVLYFXXXXXXXXXLKKYRNMVVRS

SEQ ID NO: 9342 - protein, 41 aa, Artificial Sequence
  GFR-binding peptide
  MOD_RES (6), (7), (38), (40): Xaa is C or S
ASASPXXVPQDLSATSILYYVGRTPKVLRKHRMVVKSXKXS

SEQ ID NO: 9343 - protein, 31 aa, Artificial Sequence
  GFR-binding peptide
VPTELNAISMLYFDEYDKVVLKKYREMVVEG

SEQ ID NO: 9344 - protein, 39 aa, Artificial Sequence
  GFR-binding peptide
  MOD_RES (3), (4), (38): Xaa is C or S
  MOD_RES (18), (19), (20), (21), (22): Xaa is A or G
  MOD_RES (23), (24), (25), (26): Xaa is A or G or is absent
KPXXAPTKLSPISVLYKXXXXXXXXXLKYHYNMVVRSXG

SEQ ID NO: 9345 - protein, 39 aa, Artificial Sequence
  GFR-binding peptide
  MOD_RES (1), (2), (36), (38): Xaa is C or S
  MOD_RES (16), (17), (18), (19), (20): Xaa is A or G
  MOD_RES (21), (22), (23), (24): Xaa is A or G or is absent
XXAPTKLSAISVLYLXXXXXXXXXLKNYQNMVVKAXGXH

SEQ ID NO: 9346 - protein, 34 aa, Artificial Sequence
  GFR-binding peptide
  MOD_RES (15), (16), (17), (18), (19): Xaa is A or G
  MOD_RES (20), (21), (22), (23): Xaa is A or G or is absent
PTQVQLSAISVLYLXXXXXXXXXLKNYQTLEDHL

SEQ ID NO: 9347 - protein, 37 aa, Artificial Sequence
  GFR-binding peptide
  MOD_RES (34), (36): Xaa is C or S
  MOD_RES (14), (15), (16), (17), (18): Xaa is A or G
  MOD_RES (19), (20), (21), (22): Xaa is A or G or is absent
APTQLSAISVLYLXXXXXXXXXLKNYQNMVVRAXGXH

SEQ ID NO: 9348 - protein, 41 aa, Artificial Sequence
  GFR-binding peptide
  MOD_RES (4), (5), (38), (40): Xaa is C or S
  MOD_RES (19), (20), (21), (22), (23): Xaa is A or G
  MOD_RES (24), (25), (26), (27): Xaa is A or G or is absent
AAPXXVPQALSPISILYKXXXXXXXXXLKYHYMIVRSXKXS

SEQ ID NO: 9349 - protein, 38 aa, Artificial Sequence
  GFR-binding peptide
  MOD_RES (3), (4), (35), (37): Xaa is C or S
APXXVPQALSPISILYKVGRKPKVLKYHYMIVRSXKXS

SEQ ID NO: 9350 - protein, 35 aa, Artificial Sequence
  GFR-binding peptide
  MOD_RES (1), (35): Xaa is C or S
  MOD_RES (15), (16), (17), (18), (19): Xaa is A or G
  MOD_RES (20), (21), (22), (23): Xaa is A or G or is absent
XVPTELSAISMLYLXXXXXXXXXLKNYQEMVVEGX

SEQ ID NO: 9351 - protein, 37 aa, Artificial Sequence
  GFR-binding peptide
  MOD_RES (5), (6): Xaa is C or S
VPKPXXAPTKLSATSVLYYDDSSNVILRKHRNMVVRS

SEQ ID NO: 9352 - protein, 39 aa, Artificial Sequence
  GFR-binding peptide
  MOD_RES (5), (6), (38): Xaa is C or S
IPKAXXVPTELNAISMLYFDENEKVVLKKYRDMVVEGXG

SEQ ID NO: 9353 - protein, 36 aa, Artificial Sequence
  GFR-binding peptide
  MOD_RES (33), (35): Xaa is C or S
  MOD_RES (14), (15), (16), (17), (18): Xaa is A or G
  MOD_RES (19), (20), (21), (22): Xaa is A or G or is absent
VPQALSPISILYKXXXXXXXXXLKYHYMIVRSXKXS

SEQ ID NO: 9354 - protein, 36 aa, Artificial Sequence
  GFR-binding peptide
  MOD_RES (3), (4): Xaa is C or S
  MOD_RES (18), (19), (20), (21), (22): Xaa is A or G
  MOD_RES (23), (24), (25), (26): Xaa is A or G or is absent
KPXXAPTKLSAISVLYLXXXXXXXXXLKNYQNMVVR

SEQ ID NO: 9355 - protein, 37 aa, Artificial Sequence
  GFR-binding peptide
  MOD_RES (4), (5), (37): Xaa is C or S
PKPXXAPTKLSPISVLYKDDSSNVILKYHYNMVVRSX

SEQ ID NO: 9356 - protein, 36 aa, Artificial Sequence
  GFR-binding peptide
  MOD_RES (1), (2), (34), (36): Xaa is C or S
XXVPTELSPISMLYKDENEKVVLKYHYDMVVEGXGX

SEQ ID NO: 9357 - protein, 41 aa, Artificial Sequence
  GFR-binding peptide
  MOD_RES (2), (3), (38), (40): Xaa is C or S
  MOD_RES (17), (18), (19), (20), (21): Xaa is A or G
  MOD_RES (22), (23), (24), (25): Xaa is A or G or is absent
AXXVPTKLSPISVLYKXXXXXXXXXLKYHYEGMSVAEXGXR

SEQ ID NO: 9358 - protein, 33 aa, Artificial Sequence
  GFR-binding peptide
  MOD_RES (1), (1): Xaa is C or S
XVPTKLSATSVLYYDDMGVPTLRKHREGMSVAE

SEQ ID NO: 9359 - protein, 35 aa, Artificial Sequence
  GFR-binding peptide
  MOD_RES (4), (5): Xaa is C or S
ASPXXVPQDLNAISILYFVGRTPKVLKKYRMVVKS

SEQ ID NO: 9360 - protein, 36 aa, Artificial Sequence
  GFR-binding peptide
  MOD_RES (1), (33), (35): Xaa is C or S
XAPTQLSATSVLYYDDSSNVILRKHRNMVVRAXGXH

SEQ ID NO: 9361 - protein, 38 aa, Artificial Sequence
  GFR-binding peptide
  MOD_RES (3), (4), (38): Xaa is C or S
  MOD_RES (18), (19), (20), (21), (22): Xaa is A or G
  MOD_RES (23), (24), (25), (26): Xaa is A or G or is absent
KAXXVPTELNAISMLYFXXXXXXXXXLKKYREMVVEGX

SEQ ID NO: 9362 - protein, 38 aa, Artificial Sequence
  GFR-binding peptide
  MOD_RES (4), (4): Xaa is C or S
NVQXRPTQVQLSAISVLYLEIVRKKPIFLKNYQTLEDH

SEQ ID NO: 9363 - protein, 37 aa, Artificial Sequence
  GFR-binding peptide
  MOD_RES (34), (36): Xaa is C or S
  MOD_RES (14), (15), (16), (17), (18): Xaa is A or G
  MOD_RES (19), (20), (21), (22): Xaa is A or G or is absent
VPTELSATSMLYYXXXXXXXXXLRKHREMVVEGXGXR

SEQ ID NO: 9364 - protein, 38 aa, Artificial Sequence
  GFR-binding peptide
  MOD_RES (5), (6), (37): Xaa is C or S
SASPXXVSQDLSAISILYLIGKTPKILKNYQMIVKSXK

SEQ ID NO: 9365 - protein, 39 aa, Artificial Sequence
  GFR-binding peptide
  MOD_RES (5), (5): Xaa is C or S
  MOD_RES (21), (22), (23), (24), (25): Xaa is A or G
  MOD_RES (26), (27), (28), (29): Xaa is A or G or is absent
RNVQXRPTQVQLNAISVLYFXXXXXXXXXLKKYRTLEDH

SEQ ID NO: 9366 - protein, 40 aa, Artificial Sequence
  GFR-binding peptide
  MOD_RES (2), (3), (37), (39): Xaa is C or S
  MOD_RES (17), (18), (19), (20), (21): Xaa is A or G
  MOD_RES (22), (23), (24), (25): Xaa is A or G or is absent
AXXVPTELSAISMLYLXXXXXXXXXLKNYQEMVVEGXGXR

SEQ ID NO: 9367 - protein, 31 aa, Artificial Sequence
  GFR-binding peptide
  MOD_RES (1), (1): Xaa is C or S
XVPTELSPISMLYKDENEKVVLKYHYDMVVE

SEQ ID NO: 9368 - protein, 35 aa, Artificial Sequence
  GFR-binding peptide
  MOD_RES (1), (2): Xaa is C or S
  MOD_RES (16), (17), (18), (19), (20): Xaa is A or G
  MOD_RES (21), (22), (23), (24): Xaa is A or G or is absent
XXAPTQLSPISVLYKXXXXXXXXXLKYHYNMVVRA

SEQ ID NO: 9369 - protein, 34 aa, Artificial Sequence
  GFR-binding peptide
  MOD_RES (1), (2), (34): Xaa is C or S
XXVPTELSPISMLYKDEYDKVVLKYHYEMVVEGX

SEQ ID NO: 9370 - protein, 39 aa, Artificial Sequence
  GFR-binding peptide
  MOD_RES (6), (7): Xaa is C or S
  MOD_RES (21), (22), (23), (24), (25): Xaa is A or G
  MOD_RES (26), (27), (28), (29): Xaa is A or G or is absent
ASAAPXXVPQALSPISILYKXXXXXXXXXLKYHYMIVRS

SEQ ID NO: 9371 - protein, 41 aa, Artificial Sequence
  GFR-binding peptide
  MOD_RES (6), (7), (39), (41): Xaa is C or S
AVPKAXXAPTKLNAISVLYFDSSNNVILKKYRNMVVKAXGX

SEQ ID NO: 9372 - protein, 37 aa, Artificial Sequence
  GFR-binding peptide
  MOD_RES (3), (4), (37): Xaa is C or S
  MOD_RES (18), (19), (20), (21), (22): Xaa is A or G
  MOD_RES (23), (24), (25), (26): Xaa is A or G or is absent
SPXXVSQDLSATSILYYXXXXXXXXXLRKHRMIVKSX

SEQ ID NO: 9373 - protein, 39 aa, Artificial Sequence
  GFR-binding peptide
  MOD_RES (4), (5), (36), (38): Xaa is C or S
ASPXXVSQDLNAISILYFIGKTPKILKKYRMIVKSXKXS

SEQ ID NO: 9374 - protein, 42 aa, Artificial Sequence
  GFR-binding peptide
  MOD_RES (4), (5), (39), (41): Xaa is C or S
  MOD_RES (19), (20), (21), (22), (23): Xaa is A or G
  MOD_RES (24), (25), (26), (27): Xaa is A or G or is absent
PKPXXAPTQLSPISVLYKXXXXXXXXXLKYHYNMVVRAXGXH

SEQ ID NO: 9375 - protein, 33 aa, Artificial Sequence
  GFR-binding peptide
  MOD_RES (32), (32): Xaa is C or S
APTKLSPISVLYKDDSSNVILKYHYNMVVRSXG

SEQ ID NO: 9376 - protein, 37 aa, Artificial Sequence
  GFR-binding peptide
  MOD_RES (5), (6): Xaa is C or S
VPKAXXAPTKLSAISVLYLDSSNNVILKNYQNMVVKA

SEQ ID NO: 9377 - protein, 37 aa, Artificial Sequence
  GFR-binding peptide
  MOD_RES (1), (34), (36): Xaa is C or S
  MOD_RES (15), (16), (17), (18), (19): Xaa is A or G
  MOD_RES (20), (21), (22), (23): Xaa is A or G or is absent
XVPQALSAISILYLXXXXXXXXXLKNYQMIVRSXKXS

SEQ ID NO: 9378 - protein, 36 aa, Artificial Sequence
  GFR-binding peptide
  MOD_RES (4), (4): Xaa is C or S
  MOD_RES (18), (19), (20), (21), (22): Xaa is A or G
  MOD_RES (23), (24), (25), (26): Xaa is A or G or is absent
KPTXAPTKLSATSVLYYXXXXXXXXXLRKHRNMVVR

SEQ ID NO: 9379 - protein, 36 aa, Artificial Sequence
  GFR-binding peptide
  MOD_RES (5), (6): Xaa is C or S
IPKAXXVPTELSATSMLYYDENEKVVLRKHRDMVVE

SEQ ID NO: 9380 - protein, 37 aa, Artificial Sequence
  GFR-binding peptide
  MOD_RES (3), (4), (37): Xaa is C or S
  MOD_RES (18), (19), (20), (21), (22): Xaa is A or G
  MOD_RES (23), (24), (25), (26): Xaa is A or G or is absent
SPXXVSQDLSAISILYLXXXXXXXXXLKNYQMIVKSX

SEQ ID NO: 9381 - protein, 35 aa, Artificial Sequence
  GFR-binding peptide
  MOD_RES (2), (3): Xaa is C or S
  MOD_RES (17), (18), (19), (20), (21): Xaa is A or G
  MOD_RES (22), (23), (24), (25): Xaa is A or G or is absent
PXXAPTKLSATSVLYYXXXXXXXXXLRKHRNMVVR

SEQ ID NO: 9382 - protein, 42 aa, Artificial Sequence
  GFR-binding peptide
  MOD_RES (5), (6), (39), (41): Xaa is C or S
  MOD_RES (20), (21), (22), (23), (24): Xaa is A or G
  MOD_RES (25), (26), (27), (28): Xaa is A or G or is absent
SASPXXVSQDLSAISILYLXXXXXXXXXLKNYQMIVKSXKXS

SEQ ID NO: 9383 - protein, 32 aa, Artificial Sequence
  GFR-binding peptide
  MOD_RES (14), (15), (16), (17), (18): Xaa is A or G
  MOD_RES (19), (20), (21), (22): Xaa is A or G or is absent
VSQDLNAISILYFXXXXXXXXXLKKYRMIVKS

SEQ ID NO: 9384 - protein, 43 aa, Artificial Sequence
  GFR-binding peptide
  MOD_RES (6), (7), (42): Xaa is C or S
  MOD_RES (21), (22), (23), (24), (25): Xaa is A or G
  MOD_RES (26), (27), (28), (29): Xaa is A or G or is absent
KVGKAXXVPTKLSATSVLYYXXXXXXXXXLRKHREGMSVAEXG

SEQ ID NO: 9385 - protein, 35 aa, Artificial Sequence
  GFR-binding peptide
  MOD_RES (4), (5): Xaa is C or S
PKPXXAPTQLSATSVLYYDDSSNVILRKHRNMVVR

SEQ ID NO: 9386 - protein, 37 aa, Artificial Sequence
  GFR-binding peptide
  MOD_RES (2), (3), (35), (37): Xaa is C or S
AXXVPTELSPISMLYKDEYDKVVLKYHYEMVVEGXGX

SEQ ID NO: 9387 - protein, 39 aa, Artificial Sequence
  GFR-binding peptide
  MOD_RES (4), (5), (39): Xaa is C or S
  MOD_RES (19), (20), (21), (22), (23): Xaa is A or G
  MOD_RES (24), (25), (26), (27): Xaa is A or G or is absent
PKPXXAPTQLNAISVLYFXXXXXXXXXLKKYRNMVVRAX

SEQ ID NO: 9388 - protein, 40 aa, Artificial Sequence
  GFR-binding peptide
  MOD_RES (3), (4), (38), (40): Xaa is C or S
  MOD_RES (18), (19), (20), (21), (22): Xaa is A or G
  MOD_RES (23), (24), (25), (26): Xaa is A or G or is absent
KAXXVPTELSATSMLYYXXXXXXXXXLRKHREMVVEGXGX

SEQ ID NO: 9389 - protein, 38 aa, Artificial Sequence
  GFR-binding peptide
  MOD_RES (3), (4), (37): Xaa is C or S
  MOD_RES (18), (19), (20), (21), (22): Xaa is A or G
  MOD_RES (23), (24), (25), (26): Xaa is A or G or is absent
SPXXVPQDLSATSILYYXXXXXXXXXLRKHRMVVKSXK

SEQ ID NO: 9390 - protein, 38 aa, Artificial Sequence
  GFR-binding peptide
  MOD_RES (1), (2), (35), (37): Xaa is C or S
  MOD_RES (16), (17), (18), (19), (20): Xaa is A or G
  MOD_RES (21), (22), (23), (24): Xaa is A or G or is absent
XXVPQALNAISILYFXXXXXXXXXLKKYRMIVRSXKXS

SEQ ID NO: 9391 - protein, 34 aa, Artificial Sequence
  GFR-binding peptide
  MOD_RES (3), (4): Xaa is C or S
APXXVPQALSPISILYKVGRKPKVLKYHYMIVRS

SEQ ID NO: 9392 - protein, 34 aa, Artificial Sequence
  GFR-binding peptide
  MOD_RES (1), (1): Xaa is C or S
  MOD_RES (15), (16), (17), (18), (19): Xaa is A or G
  MOD_RES (20), (21), (22), (23): Xaa is A or G or is absent
XVPTELSPISMLYKXXXXXXXXXLKYHYEMVVEG

SEQ ID NO: 9393 - protein, 34 aa, Artificial Sequence
  GFR-binding peptide
PTQVQLSATSVLYYEIVRKKPIFLRKHRTLEDHL

SEQ ID NO: 9394 - protein, 37 aa, Artificial Sequence
  GFR-binding peptide
  MOD_RES (35), (37): Xaa is C or S
  MOD_RES (14), (15), (16), (17), (18): Xaa is A or G
  MOD_RES (19), (20), (21), (22): Xaa is A or G or is absent
VPTKLNAISVLYFXXXXXXXXXLKKYREGMSVAEXGX

SEQ ID NO: 9395 - protein, 38 aa, Artificial Sequence
  GFR-binding peptide
  MOD_RES (3), (4), (38): Xaa is C or S
  MOD_RES (18), (19), (20), (21), (22): Xaa is A or G
  MOD_RES (23), (24), (25), (26): Xaa is A or G or is absent
KAXXAPTKLNAISVLYFXXXXXXXXXLKKYRNMVVKAX

SEQ ID NO: 9396 - protein, 42 aa, Artificial Sequence
  GFR-binding peptide
  MOD_RES (5), (6), (40), (42): Xaa is C or S
  MOD_RES (20), (21), (22), (23), (24): Xaa is A or G
  MOD_RES (25), (26), (27), (28): Xaa is A or G or is absent
VPKPXXAPTKLSPISVLYKXXXXXXXXXLKYHYNMVVRSXGX

SEQ ID NO: 9397 - protein, 38 aa, Artificial Sequence
  GFR-binding peptide
  MOD_RES (5), (6): Xaa is C or S
  MOD_RES (20), (21), (22), (23), (24): Xaa is A or G
  MOD_RES (25), (26), (27), (28): Xaa is A or G or is absent
SASPXXVSQDLSAISILYLXXXXXXXXXLKNYQMIVKS

SEQ ID NO: 9398 - protein, 34 aa, Artificial Sequence
  GFR-binding peptide
  MOD_RES (1), (2): Xaa is C or S
  MOD_RES (16), (17), (18), (19), (20): Xaa is A or G
  MOD_RES (21), (22), (23), (24): Xaa is A or G or is absent
XXVPQALSAISILYLXXXXXXXXXLKNYQMIVRS

SEQ ID NO: 9399 - protein, 38 aa, Artificial Sequence
  GFR-binding peptide
  MOD_RES (4), (5), (38): Xaa is C or S
  MOD_RES (19), (20), (21), (22), (23): Xaa is A or G
  MOD_RES (24), (25), (26), (27): Xaa is A or G or is absent
AAPXXVPQALSATSILYYXXXXXXXXXLRKHRMIVRSX

SEQ ID NO: 9400 - protein, 39 aa, Artificial Sequence
  GFR-binding peptide
  MOD_RES (4), (5), (39): Xaa is C or S
  MOD_RES (19), (20), (21), (22), (23): Xaa is A or G
  MOD_RES (24), (25), (26), (27): Xaa is A or G or is absent
PKPXXAPTQLSAISVLYLXXXXXXXXXLKNYQNMVVRAX

SEQ ID NO: 9401 - protein, 38 aa, Artificial Sequence
  GFR-binding peptide
  MOD_RES (4), (5), (38): Xaa is C or S
  MOD_RES (19), (20), (21), (22), (23): Xaa is A or G
  MOD_RES (24), (25), (26), (27): Xaa is A or G or is absent
AAPXXVPQALSAISILYLXXXXXXXXXLKNYQMIVRSX

SEQ ID NO: 9402 - protein, 40 aa, Artificial Sequence
  GFR-binding peptide
  MOD_RES (7), (7): Xaa is C or S
  MOD_RES (21), (22), (23), (24), (25): Xaa is A or G
  MOD_RES (26), (27), (28), (29): Xaa is A or G or is absent
HVTKPTXAPTKLSATSVLYYXXXXXXXXXLRKHRNMVVRS

SEQ ID NO: 9403 - protein, 36 aa, Artificial Sequence
  GFR-binding peptide
  MOD_RES (4), (5), (36): Xaa is C or S
ASPXXVPQDLSPISILYKVGRTPKVLKYHYMVVKSX

SEQ ID NO: 9404 - protein, 34 aa, Artificial Sequence
  GFR-binding peptide
  MOD_RES (1), (2), (34): Xaa is C or S
XXVPTELNAISMLYFDEYDKVVLKKYREMVVEGX

SEQ ID NO: 9405 - protein, 35 aa, Artificial Sequence
  GFR-binding peptide
  MOD_RES (35), (35): Xaa is C or S
  MOD_RES (14), (15), (16), (17), (18): Xaa is A or G
  MOD_RES (19), (20), (21), (22): Xaa is A or G or is absent
VPTKLSAISVLYLXXXXXXXXXLKNYQEGMSVAEX

SEQ ID NO: 9406 - protein, 37 aa, Artificial Sequence
  GFR-binding peptide
  MOD_RES (4), (5), (36): Xaa is C or S
ASPXXVPQDLNAISILYFVGRTPKVLKKYRMVVKSXK

SEQ ID NO: 9407 - protein, 37 aa, Artificial Sequence
  GFR-binding peptide
  MOD_RES (5), (5): Xaa is C or S
  MOD_RES (19), (20), (21), (22), (23): Xaa is A or G
  MOD_RES (24), (25), (26), (27): Xaa is A or G or is absent
TKPTXAPTKLNAISVLYFXXXXXXXXXLKKYRNMVVR

SEQ ID NO: 9408 - protein, 38 aa, Artificial Sequence
  GFR-binding peptide
  MOD_RES (3), (4), (38): Xaa is C or S
  MOD_RES (18), (19), (20), (21), (22): Xaa is A or G
  MOD_RES (23), (24), (25), (26): Xaa is A or G or is absent
KAXXAPTKLSAISVLYLXXXXXXXXXLKNYQNMVVKAX

SEQ ID NO: 9409 - protein, 36 aa, Artificial Sequence
  GFR-binding peptide
  MOD_RES (1), (2), (35): Xaa is C or S
XXVPTKLNAISVLYFDDMGVPTLKKYREGMSVAEXG

SEQ ID NO: 9410 - protein, 34 aa, Artificial Sequence
  GFR-binding peptide
  MOD_RES (33), (33): Xaa is C or S
  MOD_RES (14), (15), (16), (17), (18): Xaa is A or G
  MOD_RES (19), (20), (21), (22): Xaa is A or G or is absent
VPQALSATSILYYXXXXXXXXXLRKHRMIVRSXK

SEQ ID NO: 9411 - protein, 41 aa, Artificial Sequence
  GFR-binding peptide
  MOD_RES (4), (5), (38), (40): Xaa is C or S
GKAXXVPTKLSATSVLYYDDMGVPTLRKHREGMSVAEXGXR

SEQ ID NO: 9412 - protein, 43 aa, Artificial Sequence
  GFR-binding peptide
  MOD_RES (6), (7), (42): Xaa is C or S
  MOD_RES (21), (22), (23), (24), (25): Xaa is A or G
  MOD_RES (26), (27), (28), (29): Xaa is A or G or is absent
KVGKAXXVPTKLSAISVLYLXXXXXXXXXLKNYQEGMSVAEXG

SEQ ID NO: 9413 - protein, 42 aa, Artificial Sequence
  GFR-binding peptide
  MOD_RES (2), (39), (41): Xaa is C or S
QXRPTQVQLSAISVLYLEIVRKKPIFLKNYQTLEDHLAXKXE

SEQ ID NO: 9414 - protein, 35 aa, Artificial Sequence
  GFR-binding peptide
  MOD_RES (2), (3), (34): Xaa is C or S
PXXVPQDLSPISILYKVGRTPKVLKYHYMVVKSXK

SEQ ID NO: 9415 - protein, 36 aa, Artificial Sequence
  GFR-binding peptide
  MOD_RES (1), (35): Xaa is C or S
  MOD_RES (15), (16), (17), (18), (19): Xaa is A or G
  MOD_RES (20), (21), (22), (23): Xaa is A or G or is absent
XVPTELSPISMLYKXXXXXXXXXLKYHYEMVVEGXG

SEQ ID NO: 9416 - protein, 32 aa, Artificial Sequence
  GFR-binding peptide
  MOD_RES (1), (32): Xaa is C or S
XVSQDLNAISILYFIGKTPKILKKYRMIVKSX

SEQ ID NO: 9417 - protein, 42 aa, Artificial Sequence
  GFR-binding peptide
  MOD_RES (7), (41): Xaa is C or S
  MOD_RES (21), (22), (23), (24), (25): Xaa is A or G
  MOD_RES (26), (27), (28), (29): Xaa is A or G or is absent
HVTKPTXAPTKLNAISVLYFXXXXXXXXXLKKYRNMVVRSXG

SEQ ID NO: 9418 - protein, 36 aa, Artificial Sequence
  GFR-binding peptide
  MOD_RES (2), (3), (35): Xaa is C or S
AXXVPTELSATSMLYYDENEKVVLRKHRDMVVEGXG

SEQ ID NO: 9419 - protein, 40 aa, Artificial Sequence
  GFR-binding peptide
  MOD_RES (6), (38), (40): Xaa is C or S
VTKPTXAPTKLSAISVLYLDDSSNVILKNYQNMVVRSXGX

SEQ ID NO: 9420 - protein, 36 aa, Artificial Sequence
  GFR-binding peptide
  MOD_RES (2), (3): Xaa is C or S
  MOD_RES (17), (18), (19), (20), (21): Xaa is A or G
  MOD_RES (22), (23), (24), (25): Xaa is A or G or is absent
AXXVPTELNAISMLYFXXXXXXXXXLKKYREMVVEG

SEQ ID NO: 9421 - protein, 33 aa, Artificial Sequence
  GFR-binding peptide
  MOD_RES (33), (33): Xaa is C or S
  MOD_RES (14), (15), (16), (17), (18): Xaa is A or G
  MOD_RES (19), (20), (21), (22): Xaa is A or G or is absent
VPQDLSATSILYYXXXXXXXXXLRKHRMVVKSX

SEQ ID NO: 9422 - protein, 37 aa, Artificial Sequence
  GFR-binding peptide
  MOD_RES (4), (5): Xaa is C or S
GKAXXVPTKLSATSVLYYDDMGVPTLRKHREGMSVAE

SEQ ID NO: 9423 - protein, 39 aa, Artificial Sequence
  GFR-binding peptide
  MOD_RES (3), (4), (36), (38): Xaa is C or S
KAXXVPTELSATSMLYYDENEKVVLRKHRDMVVEGXGXR

SEQ ID NO: 9424 - protein, 40 aa, Artificial Sequence
  GFR-binding peptide
  MOD_RES (37), (39): Xaa is C or S
RPTQVQLSAISVLYLEIVRKKPIFLKNYQTLEDHLAXKXE

SEQ ID NO: 9425 - protein, 39 aa, Artificial Sequence
  GFR-binding peptide
  MOD_RES (6), (7), (39): Xaa is C or S
YVPKPXXAPTKLSATSVLYYDDSSNVILRKHRNMVVRSX

SEQ ID NO: 9426 - protein, 38 aa, Artificial Sequence
  GFR-binding peptide
  MOD_RES (35), (37): Xaa is C or S
TQVQLSATSVLYYEIVRKKPIFLRKHRTLEDHLAXKXE

SEQ ID NO: 9427 - protein, 34 aa, Artificial Sequence
  GFR-binding peptide
  MOD_RES (1), (2): Xaa is C or S
  MOD_RES (16), (17), (18), (19), (20): Xaa is A or G
  MOD_RES (21), (22), (23), (24): Xaa is A or G or is absent
XXVPTELSPISMLYKXXXXXXXXXLKYHYEMVVE

SEQ ID NO: 9428 - protein, 39 aa, Artificial Sequence
  GFR-binding peptide
  MOD_RES (2), (3), (37), (39): Xaa is C or S
  MOD_RES (17), (18), (19), (20), (21): Xaa is A or G
  MOD_RES (22), (23), (24), (25): Xaa is A or G or is absent
AXXVPTELSATSMLYYXXXXXXXXXLRKHRDMVVEGXGX

SEQ ID NO: 9429 - protein, 32 aa, Artificial Sequence
  GFR-binding peptide
  MOD_RES (1), (32): Xaa is C or S
XVPQDLSAISILYLVGRTPKVLKNYQMVVKSX

SEQ ID NO: 9430 - protein, 37 aa, Artificial Sequence
  GFR-binding peptide
  MOD_RES (5), (6): Xaa is C or S
IPKAXXVPTELSATSMLYYDENEKVVLRKHRDMVVEG

SEQ ID NO: 9431 - protein, 38 aa, Artificial Sequence
  GFR-binding peptide
  MOD_RES (1), (35), (37): Xaa is C or S
  MOD_RES (15), (16), (17), (18), (19): Xaa is A or G
  MOD_RES (20), (21), (22), (23): Xaa is A or G or is absent
XAPTKLSAISVLYLXXXXXXXXXLKNYQNMVVRSXGXH

SEQ ID NO: 9432 - protein, 39 aa, Artificial Sequence
  GFR-binding peptide
  MOD_RES (3), (4), (37), (39): Xaa is C or S
KAXXVPTKLSAISVLYLDDMGVPTLKNYQEGMSVAEXGX

SEQ ID NO: 9433 - protein, 38 aa, Artificial Sequence
  GFR-binding peptide
  MOD_RES (1), (2), (35), (37): Xaa is C or S
  MOD_RES (16), (17), (18), (19), (20): Xaa is A or G
  MOD_RES (21), (22), (23), (24): Xaa is A or G or is absent
XXVPQDLSAISILYLXXXXXXXXXLKNYQMVVKSXKXS

SEQ ID NO: 9434 - protein, 36 aa, Artificial Sequence
  GFR-binding peptide
  MOD_RES (1), (2), (36): Xaa is C or S
  MOD_RES (16), (17), (18), (19), (20): Xaa is A or G
  MOD_RES (21), (22), (23), (24): Xaa is A or G or is absent
XXAPTKLSAISVLYLXXXXXXXXXLKNYQNMVVRSX

SEQ ID NO: 9435 - protein, 34 aa, Artificial Sequence
  GFR-binding peptide
RPTQVQLSATSVLYYEIVRKKPIFLRKHRTLEDH

SEQ ID NO: 9436 - protein, 34 aa, Artificial Sequence
  GFR-binding peptide
  MOD_RES (32), (34): Xaa is C or S
VPTELSATSMLYYDEYDKVVLRKHREMVVEGXGX

SEQ ID NO: 9437 - protein, 40 aa, Artificial Sequence
  GFR-binding peptide
  MOD_RES (3), (4), (38), (40): Xaa is C or S
  MOD_RES (18), (19), (20), (21), (22): Xaa is A or G
  MOD_RES (23), (24), (25), (26): Xaa is A or G or is absent
KPXXAPTQLSATSVLYYXXXXXXXXXLRKHRNMVVRAXGX

SEQ ID NO: 9438 - protein, 38 aa, Artificial Sequence
  GFR-binding peptide
  MOD_RES (2), (3), (36), (38): Xaa is C or S
  MOD_RES (17), (18), (19), (20), (21): Xaa is A or G
  MOD_RES (22), (23), (24), (25): Xaa is A or G or is absent
PXXVPQALSPISILYKXXXXXXXXXLKYHYMIVRSXKX

SEQ ID NO: 9439 - protein, 37 aa, Artificial Sequence
  GFR-binding peptide
  MOD_RES (4), (4): Xaa is C or S
  MOD_RES (18), (19), (20), (21), (22): Xaa is A or G
  MOD_RES (23), (24), (25), (26): Xaa is A or G or is absent
KPTXAPTKLSPISVLYKXXXXXXXXXLKYHYNMVVRS

SEQ ID NO: 9440 - protein, 31 aa, Artificial Sequence
  GFR-binding peptide
  MOD_RES (31), (31): Xaa is C or S
VSQDLSAISILYLIGKTPKILKNYQMIVKSX

SEQ ID NO: 9441 - protein, 36 aa, Artificial Sequence
  GFR-binding peptide
  MOD_RES (2), (3), (35): Xaa is C or S
AXXAPTKLSAISVLYLDSSNNVILKNYQNMVVKAXG

SEQ ID NO: 9442 - protein, 39 aa, Artificial Sequence
  GFR-binding peptide
  MOD_RES (6), (7), (39): Xaa is C or S
KIPKAXXVPTELSATSMLYYDENEKVVLRKHRDMVVEGX

SEQ ID NO: 9443 - protein, 34 aa, Artificial Sequence
  GFR-binding peptide
  MOD_RES (31), (33): Xaa is C or S
VSQDLSAISILYLIGKTPKILKNYQMIVKSXKXS

SEQ ID NO: 9444 - protein, 30 aa, Artificial Sequence
  GFR-binding peptide
VPQALNAISILYFVGRKPKVLKKYRMIVRS

SEQ ID NO: 9445 - protein, 41 aa, Artificial Sequence
  GFR-binding peptide
  MOD_RES (3), (4), (38), (40): Xaa is C or S
  MOD_RES (18), (19), (20), (21), (22): Xaa is A or G
  MOD_RES (23), (24), (25), (26): Xaa is A or G or is absent
KPXXAPTKLNAISVLYFXXXXXXXXXLKKYRNMVVRSXGXH

SEQ ID NO: 9446 - protein, 38 aa, Artificial Sequence
  GFR-binding peptide
  MOD_RES (5), (6), (37): Xaa is C or S
SASPXXVPQDLSAISILYLVGRTPKVLKNYQMVVKSXK

SEQ ID NO: 9447 - protein, 38 aa, Artificial Sequence
  GFR-binding peptide
  MOD_RES (6), (7): Xaa is C or S
TVPKPXXAPTQLSPISVLYKDDSSNVILKYHYNMVVRA

SEQ ID NO: 9448 - protein, 38 aa, Artificial Sequence
  GFR-binding peptide
  MOD_RES (4), (5), (36), (38): Xaa is C or S
ASPXXVSQDLSAISILYLIGKTPKILKNYQMIVKSXKX

SEQ ID NO: 9449 - protein, 31 aa, Artificial Sequence
  GFR-binding peptide
APTKLSPISVLYKDDSSNVILKYHYNMVVRS

SEQ ID NO: 9450 - protein, 39 aa, Artificial Sequence
  GFR-binding peptide
  MOD_RES (3), (4), (38): Xaa is C or S
  MOD_RES (18), (19), (20), (21), (22): Xaa is A or G
  MOD_RES (23), (24), (25), (26): Xaa is A or G or is absent
KPXXAPTKLNAISVLYFXXXXXXXXXLKKYRNMVVRSXG

SEQ ID NO: 9451 - protein, 41 aa, Artificial Sequence
  GFR-binding peptide
  MOD_RES (5), (6), (41): Xaa is C or S
  MOD_RES (20), (21), (22), (23), (24): Xaa is A or G
  MOD_RES (25), (26), (27), (28): Xaa is A or G or is absent
VGKAXXVPTKLSAISVLYLXXXXXXXXXLKNYQEGMSVAEX

SEQ ID NO: 9452 - protein, 35 aa, Artificial Sequence
  GFR-binding peptide
  MOD_RES (3), (4), (35): Xaa is C or S
APXXVPQALSAISILYLVGRKPKVLKNYQMIVRSX

SEQ ID NO: 9453 - protein, 39 aa, Artificial Sequence
  GFR-binding peptide
  MOD_RES (5), (6): Xaa is C or S
  MOD_RES (20), (21), (22), (23), (24): Xaa is A or G
  MOD_RES (25), (26), (27), (28): Xaa is A or G or is absent
VPKPXXAPTKLSAISVLYLXXXXXXXXXLKNYQNMVVRS

SEQ ID NO: 9454 - protein, 37 aa, Artificial Sequence
  GFR-binding peptide
  MOD_RES (37), (37): Xaa is C or S
  MOD_RES (16), (17), (18), (19), (20): Xaa is A or G
  MOD_RES (21), (22), (23), (24): Xaa is A or G or is absent
RPTQVQLNAISVLYFXXXXXXXXXLKKYRTLEDHLAX

SEQ ID NO: 9455 - protein, 40 aa, Artificial Sequence
  GFR-binding peptide
  MOD_RES (4), (5), (37), (39): Xaa is C or S
PKAXXVPTELSPISMLYKDENEKVVLKYHYDMVVEGXGXR

SEQ ID NO: 9456 - protein, 38 aa, Artificial Sequence
  GFR-binding peptide
  MOD_RES (5), (6): Xaa is C or S
  MOD_RES (20), (21), (22), (23), (24): Xaa is A or G
  MOD_RES (25), (26), (27), (28): Xaa is A or G or is absent
IPKAXXVPTELSPISMLYKXXXXXXXXXLKYHYDMVVE

SEQ ID NO: 9457 - protein, 40 aa, Artificial Sequence
  GFR-binding peptide
  MOD_RES (6), (40): Xaa is C or S
  MOD_RES (20), (21), (22), (23), (24): Xaa is A or G
  MOD_RES (25), (26), (27), (28): Xaa is A or G or is absent
VTKPTXAPTKLSPISVLYKXXXXXXXXXLKYHYNMVVRSX

SEQ ID NO: 9458 - protein, 36 aa, Artificial Sequence
  GFR-binding peptide
  MOD_RES (35), (35): Xaa is C or S
TQVQLSAISVLYLEIVRKKPIFLKNYQTLEDHLAXK

SEQ ID NO: 9459 - protein, 38 aa, Artificial Sequence
  GFR-binding peptide
  MOD_RES (2), (3), (35), (37): Xaa is C or S
PXXAPTQLSPISVLYKDDSSNVILKYHYNMVVRAXGXH

SEQ ID NO: 9460 - protein, 36 aa, Artificial Sequence
  GFR-binding peptide
  MOD_RES (35), (35): Xaa is C or S
  MOD_RES (14), (15), (16), (17), (18): Xaa is A or G
  MOD_RES (19), (20), (21), (22): Xaa is A or G or is absent
VPTKLNAISVLYFXXXXXXXXXLKKYREGMSVAEXG

SEQ ID NO: 9461 - protein, 34 aa, Artificial Sequence
  GFR-binding peptide
  MOD_RES (1), (33): Xaa is C or S
XAPTKLSATSVLYYDDSSNVILRKHRNMVVRSXG

SEQ ID NO: 9462 - protein, 36 aa, Artificial Sequence
  GFR-binding peptide
  MOD_RES (3), (4): Xaa is C or S
  MOD_RES (18), (19), (20), (21), (22): Xaa is A or G
  MOD_RES (23), (24), (25), (26): Xaa is A or G or is absent
KPXXAPTKLSPISVLYKXXXXXXXXXLKYHYNMVVR

SEQ ID NO: 9463 - protein, 37 aa, Artificial Sequence
  GFR-binding peptide
  MOD_RES (2), (3), (36): Xaa is C or S
  MOD_RES (17), (18), (19), (20), (21): Xaa is A or G
  MOD_RES (22), (23), (24), (25): Xaa is A or G or is absent
PXXVSQDLSAISILYLXXXXXXXXXLKNYQMIVKSXK

SEQ ID NO: 9464 - protein, 39 aa, Artificial Sequence
  GFR-binding peptide
  MOD_RES (7), (39): Xaa is C or S
HVTKPTXAPTKLSPISVLYKDDSSNVILKYHYNMVVRSX

SEQ ID NO: 9465 - protein, 39 aa, Artificial Sequence
  GFR-binding peptide
  MOD_RES (3), (4), (36), (38): Xaa is C or S
KAXXVPTELSPISMLYKDEYDKVVLKYHYEMVVEGXGXR

SEQ ID NO: 9466 - protein, 34 aa, Artificial Sequence
  GFR-binding peptide
  MOD_RES (3), (4): Xaa is C or S
APXXVPQALSAISILYLVGRKPKVLKNYQMIVRS

SEQ ID NO: 9467 - protein, 41 aa, Artificial Sequence
  GFR-binding peptide
  MOD_RES (5), (6), (39), (41): Xaa is C or S
  MOD_RES (20), (21), (22), (23), (24): Xaa is A or G
  MOD_RES (25), (26), (27), (28): Xaa is A or G or is absent
SASPXXVPQDLSAISILYLXXXXXXXXXLKNYQMVVKSXKX

SEQ ID NO: 9468 - protein, 36 aa, Artificial Sequence
  GFR-binding peptide
  MOD_RES (3), (4), (35): Xaa is C or S
APXXVPQALNAISILYFVGRKPKVLKKYRMIVRSXK

SEQ ID NO: 9469 - protein, 37 aa, Artificial Sequence
  GFR-binding peptide
  MOD_RES (1), (2), (34), (36): Xaa is C or S
XXAPTKLSATSVLYYDDSSNVILRKHRNMVVRSXGXH

SEQ ID NO: 9470 - protein, 36 aa, Artificial Sequence
  GFR-binding peptide
  MOD_RES (1), (2), (34), (36): Xaa is C or S
XXAPTKLSPISVLYKDDSSNVILKYHYNMVVRSXGX

SEQ ID NO: 9471 - protein, 40 aa, Artificial Sequence
  GFR-binding peptide
  MOD_RES (4), (5), (40): Xaa is C or S
  MOD_RES (19), (20), (21), (22), (23): Xaa is A or G
  MOD_RES (24), (25), (26), (27): Xaa is A or G or is absent
GKAXXVPTKLSPISVLYKXXXXXXXXXLKYHYEGMSVAEX

SEQ ID NO: 9472 - protein, 39 aa, Artificial Sequence
  GFR-binding peptide
  MOD_RES (2), (36), (38): Xaa is C or S
  MOD_RES (16), (17), (18), (19), (20): Xaa is A or G
  MOD_RES (21), (22), (23), (24): Xaa is A or G or is absent
TXAPTKLNAISVLYFXXXXXXXXXLKKYRNMVVRSXGXH

SEQ ID NO: 9473 - protein, 39 aa, Artificial Sequence
  GFR-binding peptide
  MOD_RES (6), (7): Xaa is C or S
  MOD_RES (21), (22), (23), (24), (25): Xaa is A or G
  MOD_RES (26), (27), (28), (29): Xaa is A or G or is absent
ASAAPXXVPQALSAISILYLXXXXXXXXXLKNYQMIVRS

SEQ ID NO: 9474 - protein, 35 aa, Artificial Sequence
  GFR-binding peptide
  MOD_RES (2), (3), (34): Xaa is C or S
PXXVSQDLNAISILYFIGKTPKILKKYRMIVKSXK

SEQ ID NO: 9475 - protein, 39 aa, Artificial Sequence
  GFR-binding peptide
  MOD_RES (5), (6), (38): Xaa is C or S
VPKAXXAPTKLNAISVLYFDSSNNVILKKYRNMVVKAXG

SEQ ID NO: 9476 - protein, 36 aa, Artificial Sequence
  GFR-binding peptide
  MOD_RES (1), (1): Xaa is C or S
  MOD_RES (17), (18), (19), (20), (21): Xaa is A or G
  MOD_RES (22), (23), (24), (25): Xaa is A or G or is absent
XRPTQVQLNAISVLYFXXXXXXXXXLKKYRTLEDHL

SEQ ID NO: 9477 - protein, 34 aa, Artificial Sequence
  GFR-binding peptide
  MOD_RES (1), (1): Xaa is C or S
  MOD_RES (15), (16), (17), (18), (19): Xaa is A or G
  MOD_RES (20), (21), (22), (23): Xaa is A or G or is absent
XVPTELSPISMLYKXXXXXXXXXLKYHYDMVVEG

SEQ ID NO: 9478 - protein, 38 aa, Artificial Sequence
  GFR-binding peptide
  MOD_RES (5), (6): Xaa is C or S
  MOD_RES (20), (21), (22), (23), (24): Xaa is A or G
  MOD_RES (25), (26), (27), (28): Xaa is A or G or is absent
SASPXXVSQDLSPISILYKXXXXXXXXXLKYHYMIVKS

SEQ ID NO: 9479 - protein, 37 aa, Artificial Sequence
  GFR-binding peptide
  MOD_RES (5), (6): Xaa is C or S
VPKAXXAPTKLNAISVLYFDSSNNVILKKYRNMVVKA

SEQ ID NO: 9480 - protein, 38 aa, Artificial Sequence
  GFR-binding peptide
  MOD_RES (5), (6): Xaa is C or S
  MOD_RES (20), (21), (22), (23), (24): Xaa is A or G
  MOD_RES (25), (26), (27), (28): Xaa is A or G or is absent
SAAPXXVPQALSPISILYKXXXXXXXXXLKYHYMIVRS

SEQ ID NO: 9481 - protein, 36 aa, Artificial Sequence
  GFR-binding peptide
  MOD_RES (33), (35): Xaa is C or S
  MOD_RES (14), (15), (16), (17), (18): Xaa is A or G
  MOD_RES (19), (20), (21), (22): Xaa is A or G or is absent
VSQDLSATSILYYXXXXXXXXXLRKHRMIVKSXKXS

SEQ ID NO: 9482 - protein, 39 aa, Artificial Sequence
  GFR-binding peptide
  MOD_RES (6), (7), (38): Xaa is C or S
ASASPXXVSQDLSPISILYKIGKTPKILKYHYMIVKSXK

SEQ ID NO: 9483 - protein, 32 aa, Artificial Sequence
  GFR-binding peptide
TQVQLSAISVLYLEIVRKKPIFLKNYQTLEDH

SEQ ID NO: 9484 - protein, 35 aa, Artificial Sequence
  GFR-binding peptide
  MOD_RES (1), (2), (34): Xaa is C or S
XXAPTQLSPISVLYKDDSSNVILKYHYNMVVRAXG

SEQ ID NO: 9485 - protein, 41 aa, Artificial Sequence
  GFR-binding peptide
  MOD_RES (3), (4), (38), (40): Xaa is C or S
  MOD_RES (18), (19), (20), (21), (22): Xaa is A or G
  MOD_RES (23), (24), (25), (26): Xaa is A or G or is absent
KAXXVPTELNAISMLYFXXXXXXXXXLKKYRDMVVEGXGXR

SEQ ID NO: 9486 - protein, 37 aa, Artificial Sequence
  GFR-binding peptide
  MOD_RES (6), (7): Xaa is C or S
AVPKAXXAPTKLNAISVLYFDSSNNVILKKYRNMVVK

SEQ ID NO: 9487 - protein, 41 aa, Artificial Sequence
  GFR-binding peptide
  MOD_RES (4), (5), (39), (41): Xaa is C or S
  MOD_RES (19), (20), (21), (22), (23): Xaa is A or G
  MOD_RES (24), (25), (26), (27): Xaa is A or G or is absent
PKAXXVPTELSATSMLYYXXXXXXXXXLRKHREMVVEGXGX

SEQ ID NO: 9488 - protein, 36 aa, Artificial Sequence
  GFR-binding peptide
  MOD_RES (5), (5): Xaa is C or S
TKPTXAPTKLSAISVLYLDDSSNVILKNYQNMVVRS

SEQ ID NO: 9489 - protein, 37 aa, Artificial Sequence
  GFR-binding peptide
  MOD_RES (2), (3), (34), (36): Xaa is C or S
PXXVSQDLSATSILYYIGKTPKILRKHRMIVKSXKXS

SEQ ID NO: 9490 - protein, 34 aa, Artificial Sequence
  GFR-binding peptide
  MOD_RES (2), (3): Xaa is C or S
PXXAPTQLSAISVLYLDDSSNVILKNYQNMVVRA

SEQ ID NO: 9491 - protein, 36 aa, Artificial Sequence
  GFR-binding peptide
  MOD_RES (1), (2), (35): Xaa is C or S
  MOD_RES (16), (17), (18), (19), (20): Xaa is A or G
  MOD_RES (21), (22), (23), (24): Xaa is A or G or is absent
XXVSQDLSPISILYKXXXXXXXXXLKYHYMIVKSXK

SEQ ID NO: 9492 - protein, 40 aa, Artificial Sequence
  GFR-binding peptide
  MOD_RES (2), (3), (37), (39): Xaa is C or S
  MOD_RES (17), (18), (19), (20), (21): Xaa is A or G
  MOD_RES (22), (23), (24), (25): Xaa is A or G or is absent
AXXVPTELNAISMLYFXXXXXXXXXLKKYREMVVEGXGXR

SEQ ID NO: 9493 - protein, 40 aa, Artificial Sequence
  GFR-binding peptide
  MOD_RES (3), (4), (38), (40): Xaa is C or S
  MOD_RES (18), (19), (20), (21), (22): Xaa is A or G
  MOD_RES (23), (24), (25), (26): Xaa is A or G or is absent
KPXXAPTKLSAISVLYLXXXXXXXXXLKNYQNMVVRSXGX

SEQ ID NO: 9494 - protein, 40 aa, Artificial Sequence
  GFR-binding peptide
  MOD_RES (6), (7), (39): Xaa is C or S
AVPKAXXAPTKLSPISVLYKDSSNNVILKYHYNMVVKAXG

SEQ ID NO: 9495 - protein, 32 aa, Artificial Sequence
  GFR-binding peptide
  MOD_RES (1), (2): Xaa is C or S
XXAPTKLNAISVLYFDSSNNVILKKYRNMVVK

SEQ ID NO: 9496 - protein, 34 aa, Artificial Sequence
  GFR-binding peptide
  MOD_RES (1), (2): Xaa is C or S
  MOD_RES (16), (17), (18), (19), (20): Xaa is A or G
  MOD_RES (21), (22), (23), (24): Xaa is A or G or is absent
XXVPTELSAISMLYLXXXXXXXXXLKNYQEMVVE

SEQ ID NO: 9497 - protein, 45 aa, Artificial Sequence
  GFR-binding peptide
  MOD_RES (5), (42), (44): Xaa is C or S
  MOD_RES (21), (22), (23), (24), (25): Xaa is A or G
  MOD_RES (26), (27), (28), (29): Xaa is A or G or is absent
RNVQXRPTQVQLSPISVLYKXXXXXXXXXLKYHYTLEDHLAXKXE

SEQ ID NO: 9498 - protein, 39 aa, Artificial Sequence
  GFR-binding peptide
  MOD_RES (1), (2), (37), (39): Xaa is C or S
  MOD_RES (16), (17), (18), (19), (20): Xaa is A or G
  MOD_RES (21), (22), (23), (24): Xaa is A or G or is absent
XXVPTKLSPISVLYKXXXXXXXXXLKYHYEGMSVAEXGX

SEQ ID NO: 9499 - protein, 34 aa, Artificial Sequence
  GFR-binding peptide
  MOD_RES (34), (34): Xaa is C or S
  MOD_RES (14), (15), (16), (17), (18): Xaa is A or G
  MOD_RES (19), (20), (21), (22): Xaa is A or G or is absent
VPTELNAISMLYFXXXXXXXXXLKKYRDMVVEGX

SEQ ID NO: 9500 - protein, 37 aa, Artificial Sequence
  GFR-binding peptide
  MOD_RES (2), (2): Xaa is C or S
QXRPTQVQLSPISVLYKEIVRKKPIFLKYHYTLEDHL

SEQ ID NO: 9501 - protein, 36 aa, Artificial Sequence
  GFR-binding peptide
  MOD_RES (3), (4): Xaa is C or S
  MOD_RES (18), (19), (20), (21), (22): Xaa is A or G
  MOD_RES (23), (24), (25), (26): Xaa is A or G or is absent
KAXXVPTELSAISMLYLXXXXXXXXXLKNYQDMVVE

SEQ ID NO: 9502 - protein, 39 aa, Artificial Sequence
  GFR-binding peptide
  MOD_RES (5), (6), (39): Xaa is C or S
  MOD_RES (20), (21), (22), (23), (24): Xaa is A or G
  MOD_RES (25), (26), (27), (28): Xaa is A or G or is absent
SASPXXVSQDLSATSILYYXXXXXXXXXLRKHRMIVKSX

SEQ ID NO: 9503 - protein, 43 aa, Artificial Sequence
  GFR-binding peptide
  MOD_RES (6), (7), (40), (42): Xaa is C or S
  MOD_RES (21), (22), (23), (24), (25): Xaa is A or G
  MOD_RES (26), (27), (28), (29): Xaa is A or G or is absent
ASAAPXXVPQALNAISILYFXXXXXXXXXLKKYRMIVRSXKXS

SEQ ID NO: 9504 - protein, 41 aa, Artificial Sequence
  GFR-binding peptide
  MOD_RES (6), (7), (38), (40): Xaa is C or S
ASAAPXXVPQALNAISILYFVGRKPKVLKKYRMIVRSXKXS

SEQ ID NO: 9505 - protein, 35 aa, Artificial Sequence
  GFR-binding peptide
  MOD_RES (4), (5): Xaa is C or S
ASPXXVSQDLSAISILYLIGKTPKILKNYQMIVKS

SEQ ID NO: 9506 - protein, 35 aa, Artificial Sequence
  GFR-binding peptide
  MOD_RES (1), (2), (34): Xaa is C or S
XXVPTELNAISMLYFDEYDKVVLKKYREMVVEGXG

SEQ ID NO: 9507 - protein, 36 aa, Artificial Sequence
  GFR-binding peptide
  MOD_RES (1), (33), (35): Xaa is C or S
XAPTKLNAISVLYFDSSNNVILKKYRNMVVKAXGXH

SEQ ID NO: 9508 - protein, 42 aa, Artificial Sequence
  GFR-binding peptide
  MOD_RES (7), (41): Xaa is C or S
  MOD_RES (21), (22), (23), (24), (25): Xaa is A or G
  MOD_RES (26), (27), (28), (29): Xaa is A or G or is absent
HVTKPTXAPTKLSPISVLYKXXXXXXXXXLKYHYNMVVRSXG

SEQ ID NO: 9509 - protein, 39 aa, Artificial Sequence
  GFR-binding peptide
  MOD_RES (5), (6), (39): Xaa is C or S
  MOD_RES (20), (21), (22), (23), (24): Xaa is A or G
  MOD_RES (25), (26), (27), (28): Xaa is A or G or is absent
SASPXXVSQDLSAISILYLXXXXXXXXXLKNYQMIVKSX

SEQ ID NO: 9510 - protein, 38 aa, Artificial Sequence
  GFR-binding peptide
  MOD_RES (36), (38): Xaa is C or S
  MOD_RES (15), (16), (17), (18), (19): Xaa is A or G
  MOD_RES (20), (21), (22), (23): Xaa is A or G or is absent
PTQVQLSPISVLYKXXXXXXXXXLKYHYTLEDHLAXKX

SEQ ID NO: 9511 - protein, 38 aa, Artificial Sequence
  GFR-binding peptide
  MOD_RES (3), (4), (36), (38): Xaa is C or S
KAXXAPTKLSAISVLYLDSSNNVILKNYQNMVVKAXGX

SEQ ID NO: 9512 - protein, 35 aa, Artificial Sequence
  GFR-binding peptide
  MOD_RES (1), (35): Xaa is C or S
  MOD_RES (15), (16), (17), (18), (19): Xaa is A or G
  MOD_RES (20), (21), (22), (23): Xaa is A or G or is absent
XAPTKLSAISVLYLXXXXXXXXXLKNYQNMVVKAX

SEQ ID NO: 9513 - protein, 37 aa, Artificial Sequence
  GFR-binding peptide
  MOD_RES (4), (5), (36): Xaa is C or S
ASPXXVSQDLSATSILYYIGKTPKILRKHRMIVKSXK

SEQ ID NO: 9514 - protein, 33 aa, Artificial Sequence
  GFR-binding peptide
  MOD_RES (1), (2), (33): Xaa is C or S
XXVSQDLSATSILYYIGKTPKILRKHRMIVKSX

SEQ ID NO: 9515 - protein, 33 aa, Artificial Sequence
  GFR-binding peptide
  MOD_RES (33), (33): Xaa is C or S
  MOD_RES (14), (15), (16), (17), (18): Xaa is A or G
  MOD_RES (19), (20), (21), (22): Xaa is A or G or is absent
VPQALSAISILYLXXXXXXXXXLKNYQMIVRSX

SEQ ID NO: 9516 - protein, 44 aa, Artificial Sequence
  GFR-binding peptide
  MOD_RES (6), (7), (41), (43): Xaa is C or S
  MOD_RES (21), (22), (23), (24), (25): Xaa is A or G
  MOD_RES (26), (27), (28), (29): Xaa is A or G or is absent
KIPKAXXVPTELSPISMLYKXXXXXXXXXLKYHYDMVVEGXGXR

SEQ ID NO: 9517 - protein, 38 aa, Artificial Sequence
  GFR-binding peptide
  MOD_RES (1), (35), (37): Xaa is C or S
  MOD_RES (15), (16), (17), (18), (19): Xaa is A or G
  MOD_RES (20), (21), (22), (23): Xaa is A or G or is absent
XAPTKLSATSVLYYXXXXXXXXXLRKHRNMVVRSXGXH

SEQ ID NO: 9518 - protein, 34 aa, Artificial Sequence
  GFR-binding peptide
  MOD_RES (33), (33): Xaa is C or S
  MOD_RES (14), (15), (16), (17), (18): Xaa is A or G
  MOD_RES (19), (20), (21), (22): Xaa is A or G or is absent
VPQDLSPISILYKXXXXXXXXXLKYHYMVVKSXK

SEQ ID NO: 9519 - protein, 31 aa, Artificial Sequence
  GFR-binding peptide
VPTELSPISMLYKDENEKVVLKYHYDMVVEG

SEQ ID NO: 9520 - protein, 36 aa, Artificial Sequence
  GFR-binding peptide
  MOD_RES (34), (36): Xaa is C or S
  MOD_RES (14), (15), (16), (17), (18): Xaa is A or G
  MOD_RES (19), (20), (21), (22): Xaa is A or G or is absent
VPTELSAISMLYLXXXXXXXXXLKNYQEMVVEGXGX

SEQ ID NO: 9521 - protein, 40 aa, Artificial Sequence
  GFR-binding peptide
  MOD_RES (3), (4), (39): Xaa is C or S
  MOD_RES (18), (19), (20), (21), (22): Xaa is A or G
  MOD_RES (23), (24), (25), (26): Xaa is A or G or is absent
KAXXVPTKLSPISVLYKXXXXXXXXXLKYHYEGMSVAEXG

SEQ ID NO: 9522 - protein, 42 aa, Artificial Sequence
  GFR-binding peptide
  MOD_RES (4), (5), (39), (41): Xaa is C or S
  MOD_RES (19), (20), (21), (22), (23): Xaa is A or G
  MOD_RES (24), (25), (26), (27): Xaa is A or G or is absent
PKPXXAPTQLNAISVLYFXXXXXXXXXLKKYRNMVVRAXGXH

SEQ ID NO: 9523 - protein, 32 aa, Artificial Sequence
  GFR-binding peptide
  MOD_RES (31), (31): Xaa is C or S
VPQDLSAISILYLVGRTPKVLKNYQMVVKSXK

SEQ ID NO: 9524 - protein, 39 aa, Artificial Sequence
  GFR-binding peptide
  MOD_RES (2), (3), (36), (38): Xaa is C or S
  MOD_RES (17), (18), (19), (20), (21): Xaa is A or G
  MOD_RES (22), (23), (24), (25): Xaa is A or G or is absent
PXXVSQDLSATSILYYXXXXXXXXXLRKHRMIVKSXKXS

SEQ ID NO: 9525 - protein, 39 aa, Artificial Sequence
  GFR-binding peptide
  MOD_RES (2), (3), (36), (38): Xaa is C or S
  MOD_RES (17), (18), (19), (20), (21): Xaa is A or G
  MOD_RES (22), (23), (24), (25): Xaa is A or G or is absent
PXXVPQALNAISILYFXXXXXXXXXLKKYRMIVRSXKXS

SEQ ID NO: 9526 - protein, 38 aa, Artificial Sequence
  GFR-binding peptide
  MOD_RES (3), (4), (38): Xaa is C or S
  MOD_RES (18), (19), (20), (21), (22): Xaa is A or G
  MOD_RES (23), (24), (25), (26): Xaa is A or G or is absent
KAXXVPTELSAISMLYLXXXXXXXXXLKNYQEMVVEGX

SEQ ID NO: 9527 - protein, 33 aa, Artificial Sequence
  GFR-binding peptide
  MOD_RES (33), (33): Xaa is C or S
  MOD_RES (14), (15), (16), (17), (18): Xaa is A or G
  MOD_RES (19), (20), (21), (22): Xaa is A or G or is absent
VPQALSATSILYYXXXXXXXXXLRKHRMIVRSX

SEQ ID NO: 9528 - protein, 36 aa, Artificial Sequence
  GFR-binding peptide
  MOD_RES (3), (4), (35): Xaa is C or S
APXXVPQALSPISILYKVGRKPKVLKYHYMIVRSXK

SEQ ID NO: 9529 - protein, 38 aa, Artificial Sequence
  GFR-binding peptide
  MOD_RES (3), (37): Xaa is C or S
  MOD_RES (17), (18), (19), (20), (21): Xaa is A or G
  MOD_RES (22), (23), (24), (25): Xaa is A or G or is absent
PTXAPTKLSAISVLYLXXXXXXXXXLKNYQNMVVRSXG

SEQ ID NO: 9530 - protein, 42 aa, Artificial Sequence
  GFR-binding peptide
  MOD_RES (2), (39), (41): Xaa is C or S
QXRPTQVQLNAISVLYFEIVRKKPIFLKKYRTLEDHLAXKXE

SEQ ID NO: 9531 - protein, 39 aa, Artificial Sequence
  GFR-binding peptide
  MOD_RES (4), (5), (36), (38): Xaa is C or S
ASPXXVPQDLSATSILYYVGRTPKVLRKHRMVVKSXKXS

SEQ ID NO: 9532 - protein, 40 aa, Artificial Sequence
  GFR-binding peptide
  MOD_RES (2), (3), (37), (39): Xaa is C or S
  MOD_RES (17), (18), (19), (20), (21): Xaa is A or G
  MOD_RES (22), (23), (24), (25): Xaa is A or G or is absent
PXXAPTQLNAISVLYFXXXXXXXXXLKKYRNMVVRAXGXH

SEQ ID NO: 9533 - protein, 36 aa, Artificial Sequence
  GFR-binding peptide
  MOD_RES (2), (3): Xaa is C or S
  MOD_RES (17), (18), (19), (20), (21): Xaa is A or G
  MOD_RES (22), (23), (24), (25): Xaa is A or G or is absent
PXXAPTQLSPISVLYKXXXXXXXXXLKYHYNMVVRA

SEQ ID NO: 9534 - protein, 30 aa, Artificial Sequence
  GFR-binding peptide
VPTELSPISMLYKDENEKVVLKYHYDMVVE

SEQ ID NO: 9535 - protein, 39 aa, Artificial Sequence
  GFR-binding peptide
  MOD_RES (36), (38): Xaa is C or S
  MOD_RES (15), (16), (17), (18), (19): Xaa is A or G
  MOD_RES (20), (21), (22), (23): Xaa is A or G or is absent
PTQVQLSAISVLYLXXXXXXXXXLKNYQTLEDHLAXKXE

SEQ ID NO: 9536 - protein, 38 aa, Artificial Sequence
  GFR-binding peptide
  MOD_RES (6), (7): Xaa is C or S
SIPKAXXVPTELNAISMLYFDEYDKVVLKKYREMVVEG

SEQ ID NO: 9537 - protein, 39 aa, Artificial Sequence
  GFR-binding peptide
  MOD_RES (5), (6): Xaa is C or S
  MOD_RES (20), (21), (22), (23), (24): Xaa is A or G
  MOD_RES (25), (26), (27), (28): Xaa is A or G or is absent
VPKPXXAPTKLNAISVLYFXXXXXXXXXLKKYRNMVVRS

SEQ ID NO: 9538 - protein, 40 aa, Artificial Sequence
  GFR-binding peptide
  MOD_RES (5), (6), (37), (39): Xaa is C or S
SASPXXVSQDLNAISILYFIGKTPKILKKYRMIVKSXKXS

SEQ ID NO: 9539 - protein, 37 aa, Artificial Sequence
  GFR-binding peptide
  MOD_RES (4), (36): Xaa is C or S
KPTXAPTKLSAISVLYLDDSSNVILKNYQNMVVRSXG

SEQ ID NO: 9540 - protein, 41 aa, Artificial Sequence
  GFR-binding peptide
  MOD_RES (3), (40): Xaa is C or S
VQXRPTQVQLSPISVLYKEIVRKKPIFLKYHYTLEDHLAXK

SEQ ID NO: 9541 - protein, 40 aa, Artificial Sequence
  GFR-binding peptide
  MOD_RES (4), (5), (39): Xaa is C or S
  MOD_RES (19), (20), (21), (22), (23): Xaa is A or G
  MOD_RES (24), (25), (26), (27): Xaa is A or G or is absent
PKPXXAPTKLNAISVLYFXXXXXXXXXLKKYRNMVVRSXG

SEQ ID NO: 9542 - protein, 36 aa, Artificial Sequence
  GFR-binding peptide
  MOD_RES (1), (34), (36): Xaa is C or S
  MOD_RES (15), (16), (17), (18), (19): Xaa is A or G
  MOD_RES (20), (21), (22), (23): Xaa is A or G or is absent
XVPQDLSATSILYYXXXXXXXXXLRKHRMVVKSXKX

SEQ ID NO: 9543 - protein, 39 aa, Artificial Sequence
  GFR-binding peptide
  MOD_RES (2), (39): Xaa is C or S
QXRPTQVQLSAISVLYLEIVRKKPIFLKNYQTLEDHLAX

SEQ ID NO: 9544 - protein, 33 aa, Artificial Sequence
  GFR-binding peptide
  MOD_RES (3), (3): Xaa is C or S
PTXAPTKLSATSVLYYDDSSNVILRKHRNMVVR

SEQ ID NO: 9545 - protein, 34 aa, Artificial Sequence
  GFR-binding peptide
  MOD_RES (1), (33): Xaa is C or S
XVPTELSPISMLYKDENEKVVLKYHYDMVVEGXG

SEQ ID NO: 9546 - protein, 39 aa, Artificial Sequence
  GFR-binding peptide
  MOD_RES (6), (7), (38): Xaa is C or S
ASASPXXVSQDLNAISILYFIGKTPKILKKYRMIVKSXK

SEQ ID NO: 9547 - protein, 38 aa, Artificial Sequence
  GFR-binding peptide
  MOD_RES (35), (37): Xaa is C or S
  MOD_RES (14), (15), (16), (17), (18): Xaa is A or G
  MOD_RES (19), (20), (21), (22): Xaa is A or G or is absent
TQVQLSATSVLYYXXXXXXXXXLRKHRTLEDHLAXKXE

SEQ ID NO: 9548 - protein, 37 aa, Artificial Sequence
  GFR-binding peptide
  MOD_RES (1), (2), (35), (37): Xaa is C or S
XXVPTKLNAISVLYFDDMGVPTLKKYREGMSVAEXGX

SEQ ID NO: 9549 - protein, 41 aa, Artificial Sequence
  GFR-binding peptide
  MOD_RES (4), (5), (38), (40): Xaa is C or S
  MOD_RES (19), (20), (21), (22), (23): Xaa is A or G
  MOD_RES (24), (25), (26), (27): Xaa is A or G or is absent
ASPXXVPQDLSAISILYLXXXXXXXXXLKNYQMVVKSXKXS

SEQ ID NO: 9550 - protein, 34 aa, Artificial Sequence
  GFR-binding peptide
  MOD_RES (34), (34): Xaa is C or S
  MOD_RES (14), (15), (16), (17), (18): Xaa is A or G
  MOD_RES (19), (20), (21), (22): Xaa is A or G or is absent
VPTELSATSMLYYXXXXXXXXXLRKHREMVVEGX

SEQ ID NO: 9551 - protein, 37 aa, Artificial Sequence
  GFR-binding peptide
  MOD_RES (1), (36): Xaa is C or S
  MOD_RES (15), (16), (17), (18), (19): Xaa is A or G
  MOD_RES (20), (21), (22), (23): Xaa is A or G or is absent
XVPTKLSPISVLYKXXXXXXXXXLKYHYEGMSVAEXG

SEQ ID NO: 9552 - protein, 39 aa, Artificial Sequence
  GFR-binding peptide
  MOD_RES (3), (3): Xaa is C or S
  MOD_RES (19), (20), (21), (22), (23): Xaa is A or G
  MOD_RES (24), (25), (26), (27): Xaa is A or G or is absent
VQXRPTQVQLSATSVLYYXXXXXXXXXLRKHRTLEDHLA

SEQ ID NO: 9553 - protein, 40 aa, Artificial Sequence
  GFR-binding peptide
  MOD_RES (6), (7), (40): Xaa is C or S
KVGKAXXVPTKLNAISVLYFDDMGVPTLKKYREGMSVAEX

SEQ ID NO: 9554 - protein, 40 aa, Artificial Sequence
  GFR-binding peptide
  MOD_RES (3), (40): Xaa is C or S
VQXRPTQVQLNAISVLYFEIVRKKPIFLKKYRTLEDHLAX

SEQ ID NO: 9555 - protein, 37 aa, Artificial Sequence
  GFR-binding peptide
  MOD_RES (1), (2), (37): Xaa is C or S
  MOD_RES (16), (17), (18), (19), (20): Xaa is A or G
  MOD_RES (21), (22), (23), (24): Xaa is A or G or is absent
XXVPTKLNAISVLYFXXXXXXXXXLKKYREGMSVAEX

SEQ ID NO: 9556 - protein, 32 aa, Artificial Sequence
  GFR-binding peptide
  MOD_RES (1), (1): Xaa is C or S
XAPTKLNAISVLYFDSSNNVILKKYRNMVVKA

SEQ ID NO: 9557 - protein, 39 aa, Artificial Sequence
  GFR-binding peptide
  MOD_RES (6), (7): Xaa is C or S
  MOD_RES (21), (22), (23), (24), (25): Xaa is A or G
  MOD_RES (26), (27), (28), (29): Xaa is A or G or is absent
SIPKAXXVPTELSPISMLYKXXXXXXXXXLKYHYEMVVE

SEQ ID NO: 9558 - protein, 38 aa, Artificial Sequence
  GFR-binding peptide
  MOD_RES (2), (2): Xaa is C or S
QXRPTQVQLSPISVLYKEIVRKKPIFLKYHYTLEDHLA

SEQ ID NO: 9559 - protein, 34 aa, Artificial Sequence
  GFR-binding peptide
  MOD_RES (1), (32), (34): Xaa is C or S
XVPQALNAISILYFVGRKPKVLKKYRMIVRSXKX

SEQ ID NO: 9560 - protein, 33 aa, Artificial Sequence
  GFR-binding peptide
  MOD_RES (14), (15), (16), (17), (18): Xaa is A or G
  MOD_RES (19), (20), (21), (22): Xaa is A or G or is absent
VPTELSAISMLYLXXXXXXXXXLKNYQEMVVEG

SEQ ID NO: 9561 - protein, 40 aa, Artificial Sequence
  GFR-binding peptide
  MOD_RES (5), (5): Xaa is C or S
RNVQXRPTQVQLNAISVLYFEIVRKKPIFLKKYRTLEDHL

SEQ ID NO: 9562 - protein, 40 aa, Artificial Sequence
  GFR-binding peptide
  MOD_RES (5), (6), (39): Xaa is C or S
  MOD_RES (20), (21), (22), (23), (24): Xaa is A or G
  MOD_RES (25), (26), (27), (28): Xaa is A or G or is absent
SAAPXXVPQALNAISILYFXXXXXXXXXLKKYRMIVRSXK

SEQ ID NO: 9563 - protein, 32 aa, Artificial Sequence
  GFR-binding peptide
  MOD_RES (2), (2): Xaa is C or S
TXAPTKLSATSVLYYDDSSNVILRKHRNMVVR

SEQ ID NO: 9564 - protein, 36 aa, Artificial Sequence
  GFR-binding peptide
  MOD_RES (1), (33), (35): Xaa is C or S
XAPTKLSPISVLYKDSSNNVILKYHYNMVVKAXGXH

SEQ ID NO: 9565 - protein, 41 aa, Artificial Sequence
  GFR-binding peptide
  MOD_RES (3), (4), (39), (41): Xaa is C or S
  MOD_RES (18), (19), (20), (21), (22): Xaa is A or G
  MOD_RES (23), (24), (25), (26): Xaa is A or G or is absent
KAXXVPTKLSAISVLYLXXXXXXXXXLKNYQEGMSVAEXGX

SEQ ID NO: 9566 - protein, 37 aa, Artificial Sequence
  GFR-binding peptide
  MOD_RES (3), (4), (36): Xaa is C or S
KAXXVPTELSATSMLYYDEYDKVVLRKHREMVVEGXG

SEQ ID NO: 9567 - protein, 36 aa, Artificial Sequence
  GFR-binding peptide
  MOD_RES (4), (5), (36): Xaa is C or S
ASPXXVPQDLSATSILYYVGRTPKVLRKHRMVVKSX

SEQ ID NO: 9568 - protein, 37 aa, Artificial Sequence
  GFR-binding peptide
  MOD_RES (2), (3), (37): Xaa is C or S
  MOD_RES (17), (18), (19), (20), (21): Xaa is A or G
  MOD_RES (22), (23), (24), (25): Xaa is A or G or is absent
AXXVPTELSPISMLYKXXXXXXXXXLKYHYDMVVEGX

SEQ ID NO: 9569 - protein, 36 aa, Artificial Sequence
  GFR-binding peptide
  MOD_RES (1), (35): Xaa is C or S
  MOD_RES (15), (16), (17), (18), (19): Xaa is A or G
  MOD_RES (20), (21), (22), (23): Xaa is A or G or is absent
XVPTELSPISMLYKXXXXXXXXXLKYHYDMVVEGXG

SEQ ID NO: 9570 - protein, 33 aa, Artificial Sequence
  GFR-binding peptide
  MOD_RES (14), (15), (16), (17), (18): Xaa is A or G
  MOD_RES (19), (20), (21), (22): Xaa is A or G or is absent
VPTELSPISMLYKXXXXXXXXXLKYHYDMVVEG

SEQ ID NO: 9571 - protein, 36 aa, Artificial Sequence
  GFR-binding peptide
  MOD_RES (33), (35): Xaa is C or S
  MOD_RES (14), (15), (16), (17), (18): Xaa is A or G
  MOD_RES (19), (20), (21), (22): Xaa is A or G or is absent
VPQDLSAISILYLXXXXXXXXXLKNYQMVVKSXKXS

SEQ ID NO: 9572 - protein, 33 aa, Artificial Sequence
  GFR-binding peptide
  MOD_RES (1), (1): Xaa is C or S
  MOD_RES (15), (16), (17), (18), (19): Xaa is A or G
  MOD_RES (20), (21), (22), (23): Xaa is A or G or is absent
XVSQDLNAISILYFXXXXXXXXXLKKYRMIVKS

SEQ ID NO: 9573 - protein, 42 aa, Artificial Sequence
  GFR-binding peptide
  MOD_RES (5), (6), (39), (41): Xaa is C or S
VGKAXXVPTKLSATSVLYYDDMGVPTLRKHREGMSVAEXGXR

SEQ ID NO: 9574 - protein, 40 aa, Artificial Sequence
  GFR-binding peptide
  MOD_RES (2), (39): Xaa is C or S
QXRPTQVQLSAISVLYLEIVRKKPIFLKNYQTLEDHLAXK

SEQ ID NO: 9575 - protein, 38 aa, Artificial Sequence
  GFR-binding peptide
  MOD_RES (3), (3): Xaa is C or S
VQXRPTQVQLNAISVLYFEIVRKKPIFLKKYRTLEDHL

SEQ ID NO: 9576 - protein, 41 aa, Artificial Sequence
  GFR-binding peptide
  MOD_RES (3), (4), (38), (40): Xaa is C or S
  MOD_RES (18), (19), (20), (21), (22): Xaa is A or G
  MOD_RES (23), (24), (25), (26): Xaa is A or G or is absent
KPXXAPTQLSAISVLYLXXXXXXXXXLKNYQNMVVRAXGXH

SEQ ID NO: 9577 - protein, 38 aa, Artificial Sequence
  GFR-binding peptide
  MOD_RES (4), (5), (37): Xaa is C or S
PKAXXVPTELNAISMLYFDENEKVVLKKYRDMVVEGXG

SEQ ID NO: 9578 - protein, 38 aa, Artificial Sequence
  GFR-binding peptide
  MOD_RES (4), (5), (38): Xaa is C or S
  MOD_RES (19), (20), (21), (22), (23): Xaa is A or G
  MOD_RES (24), (25), (26), (27): Xaa is A or G or is absent
ASPXXVPQDLSPISILYKXXXXXXXXXLKYHYMVVKSX

SEQ ID NO: 9579 - protein, 34 aa, Artificial Sequence
  GFR-binding peptide
  MOD_RES (3), (4): Xaa is C or S
KAXXAPTKLNAISVLYFDSSNNVILKKYRNMVVK

SEQ ID NO: 9580 - protein, 41 aa, Artificial Sequence
  GFR-binding peptide
  MOD_RES (6), (7), (41): Xaa is C or S
  MOD_RES (21), (22), (23), (24), (25): Xaa is A or G
  MOD_RES (26), (27), (28), (29): Xaa is A or G or is absent
KIPKAXXVPTELNAISMLYFXXXXXXXXXLKKYRDMVVEGX

SEQ ID NO: 9581 - protein, 37 aa, Artificial Sequence
  GFR-binding peptide
  MOD_RES (4), (5): Xaa is C or S
  MOD_RES (19), (20), (21), (22), (23): Xaa is A or G
  MOD_RES (24), (25), (26), (27): Xaa is A or G or is absent
PKPXXAPTQLNAISVLYFXXXXXXXXXLKKYRNMVVR

SEQ ID NO: 9582 - protein, 40 aa, Artificial Sequence
  GFR-binding peptide
  MOD_RES (6), (7), (40): Xaa is C or S
  MOD_RES (21), (22), (23), (24), (25): Xaa is A or G
  MOD_RES (26), (27), (28), (29): Xaa is A or G or is absent
ASASPXXVPQDLSATSILYYXXXXXXXXXLRKHRMVVKSX

SEQ ID NO: 9583 - protein, 38 aa, Artificial Sequence
  GFR-binding peptide
  MOD_RES (6), (7): Xaa is C or S
AVPKAXXAPTKLSPISVLYKDSSNNVILKYHYNMVVKA

SEQ ID NO: 9584 - protein, 32 aa, Artificial Sequence
  GFR-binding peptide
  MOD_RES (31), (31): Xaa is C or S
VSQDLSPISILYKIGKTPKILKYHYMIVKSXK

SEQ ID NO: 9585 - protein, 39 aa, Artificial Sequence
  GFR-binding peptide
  MOD_RES (5), (6), (39): Xaa is C or S
VGKAXXVPTKLNAISVLYFDDMGVPTLKKYREGMSVAEX

SEQ ID NO: 9586 - protein, 35 aa, Artificial Sequence
  GFR-binding peptide
  MOD_RES (1), (2), (34): Xaa is C or S
XXAPTKLSAISVLYLDDSSNVILKNYQNMVVRSXG

SEQ ID NO: 9587 - protein, 34 aa, Artificial Sequence
  GFR-binding peptide
  MOD_RES (32), (34): Xaa is C or S
VPTELSATSMLYYDENEKVVLRKHRDMVVEGXGX

SEQ ID NO: 9588 - protein, 30 aa, Artificial Sequence
  GFR-binding peptide
VPQALSPISILYKVGRKPKVLKYHYMIVRS

SEQ ID NO: 9589 - protein, 39 aa, Artificial Sequence
  GFR-binding peptide
  MOD_RES (1), (2), (36), (38): Xaa is C or S
  MOD_RES (16), (17), (18), (19), (20): Xaa is A or G
  MOD_RES (21), (22), (23), (24): Xaa is A or G or is absent
XXAPTKLSATSVLYYXXXXXXXXXLRKHRNMVVKAXGXH

SEQ ID NO: 9590 - protein, 37 aa, Artificial Sequence
  GFR-binding peptide
  MOD_RES (2), (3), (35), (37): Xaa is C or S
AXXVPTELSPISMLYKDENEKVVLKYHYDMVVEGXGX

SEQ ID NO: 9591 - protein, 36 aa, Artificial Sequence
  GFR-binding peptide
  MOD_RES (1), (34), (36): Xaa is C or S
  MOD_RES (15), (16), (17), (18), (19): Xaa is A or G
  MOD_RES (20), (21), (22), (23): Xaa is A or G or is absent
XVPQDLSAISILYLXXXXXXXXXLKNYQMVVKSXKX

SEQ ID NO: 9592 - protein, 36 aa, Artificial Sequence
  GFR-binding peptide
  MOD_RES (1), (35): Xaa is C or S
  MOD_RES (15), (16), (17), (18), (19): Xaa is A or G
  MOD_RES (20), (21), (22), (23): Xaa is A or G or is absent
XAPTQLSPISVLYKXXXXXXXXXLKYHYNMVVRAXG

SEQ ID NO: 9593 - protein, 40 aa, Artificial Sequence
  GFR-binding peptide
  MOD_RES (5), (6), (40): Xaa is C or S
  MOD_RES (20), (21), (22), (23), (24): Xaa is A or G
  MOD_RES (25), (26), (27), (28): Xaa is A or G or is absent
VPKAXXAPTKLNAISVLYFXXXXXXXXXLKKYRNMVVKAX

SEQ ID NO: 9594 - protein, 40 aa, Artificial Sequence
  GFR-binding peptide
  MOD_RES (6), (40): Xaa is C or S
  MOD_RES (20), (21), (22), (23), (24): Xaa is A or G
  MOD_RES (25), (26), (27), (28): Xaa is A or G or is absent
VTKPTXAPTKLNAISVLYFXXXXXXXXXLKKYRNMVVRSX

SEQ ID NO: 9595 - protein, 32 aa, Artificial Sequence
  GFR-binding peptide
  MOD_RES (14), (15), (16), (17), (18): Xaa is A or G
  MOD_RES (19), (20), (21), (22): Xaa is A or G or is absent
VPQALNAISILYFXXXXXXXXXLKKYRMIVRS

SEQ ID NO: 9596 - protein, 36 aa, Artificial Sequence
  GFR-binding peptide
  MOD_RES (6), (6): Xaa is C or S
VTKPTXAPTKLSAISVLYLDDSSNVILKNYQNMVVR

SEQ ID NO: 9597 - protein, 39 aa, Artificial Sequence
  GFR-binding peptide
  MOD_RES (3), (3): Xaa is C or S
  MOD_RES (19), (20), (21), (22), (23): Xaa is A or G
  MOD_RES (24), (25), (26), (27): Xaa is A or G or is absent
VQXRPTQVQLSAISVLYLXXXXXXXXXLKNYQTLEDHLA

SEQ ID NO: 9598 - protein, 42 aa, Artificial Sequence
  GFR-binding peptide
  MOD_RES (6), (7), (40), (42): Xaa is C or S
  MOD_RES (21), (22), (23), (24), (25): Xaa is A or G
  MOD_RES (26), (27), (28), (29): Xaa is A or G or is absent
ASASPXXVSQDLNAISILYFXXXXXXXXXLKKYRMIVKSXKX

SEQ ID NO: 9599 - protein, 35 aa, Artificial Sequence
  GFR-binding peptide
  MOD_RES (1), (35): Xaa is C or S
  MOD_RES (15), (16), (17), (18), (19): Xaa is A or G
  MOD_RES (20), (21), (22), (23): Xaa is A or G or is absent
XAPTKLSATSVLYYXXXXXXXXXLRKHRNMVVKAX

SEQ ID NO: 9600 - protein, 40 aa, Artificial Sequence
  GFR-binding peptide
  MOD_RES (6), (7), (40): Xaa is C or S
  MOD_RES (21), (22), (23), (24), (25): Xaa is A or G
  MOD_RES (26), (27), (28), (29): Xaa is A or G or is absent
ASASPXXVPQDLSAISILYLXXXXXXXXXLKNYQMVVKSX

SEQ ID NO: 9601 - protein, 40 aa, Artificial Sequence
  GFR-binding peptide
  MOD_RES (5), (5): Xaa is C or S
RNVQXRPTQVQLSAISVLYLEIVRKKPIFLKNYQTLEDHL

SEQ ID NO: 9602 - protein, 37 aa, Artificial Sequence
  GFR-binding peptide
  MOD_RES (4), (5), (37): Xaa is C or S
PKAXXVPTELSPISMLYKDENEKVVLKYHYDMVVEGX

SEQ ID NO: 9603 - protein, 33 aa, Artificial Sequence
  GFR-binding peptide
  MOD_RES (1), (2): Xaa is C or S
XXVPTELSPISMLYKDEYDKVVLKYHYEMVVEG

SEQ ID NO: 9604 - protein, 39 aa, Artificial Sequence
  GFR-binding peptide
  MOD_RES (4), (5), (37), (39): Xaa is C or S
PKPXXAPTKLSPISVLYKDDSSNVILKYHYNMVVRSXGX

SEQ ID NO: 9605 - protein, 40 aa, Artificial Sequence
  GFR-binding peptide
  MOD_RES (5), (39): Xaa is C or S
  MOD_RES (19), (20), (21), (22), (23): Xaa is A or G
  MOD_RES (24), (25), (26), (27): Xaa is A or G or is absent
TKPTXAPTKLSATSVLYYXXXXXXXXXLRKHRNMVVRSXG

SEQ ID NO: 9606 - protein, 35 aa, Artificial Sequence
  GFR-binding peptide
  MOD_RES (2), (3): Xaa is C or S
  MOD_RES (17), (18), (19), (20), (21): Xaa is A or G
  MOD_RES (22), (23), (24), (25): Xaa is A or G or is absent
PXXVSQDLSPISILYKXXXXXXXXXLKYHYMIVKS

SEQ ID NO: 9607 - protein, 36 aa, Artificial Sequence
  GFR-binding peptide
  MOD_RES (3), (4), (36): Xaa is C or S
KAXXVPTELSPISMLYKDENEKVVLKYHYDMVVEGX

SEQ ID NO: 9608 - protein, 35 aa, Artificial Sequence
  GFR-binding peptide
  MOD_RES (32), (34): Xaa is C or S
VPTELSATSMLYYDEYDKVVLRKHREMVVEGXGXR

SEQ ID NO: 9609 - protein, 36 aa, Artificial Sequence
  GFR-binding peptide
  MOD_RES (35), (35): Xaa is C or S
  MOD_RES (14), (15), (16), (17), (18): Xaa is A or G
  MOD_RES (19), (20), (21), (22): Xaa is A or G or is absent
TQVQLSAISVLYLXXXXXXXXXLKNYQTLEDHLAXK

SEQ ID NO: 9610 - protein, 41 aa, Artificial Sequence
  GFR-binding peptide
  MOD_RES (5), (6), (40): Xaa is C or S
  MOD_RES (20), (21), (22), (23), (24): Xaa is A or G
  MOD_RES (25), (26), (27), (28): Xaa is A or G or is absent
VPKPXXAPTKLSPISVLYKXXXXXXXXXLKYHYNMVVRSXG

SEQ ID NO: 9611 - protein, 35 aa, Artificial Sequence
  GFR-binding peptide
  MOD_RES (4), (5): Xaa is C or S
ASPXXVSQDLSATSILYYIGKTPKILRKHRMIVKS

SEQ ID NO: 9612 - protein, 43 aa, Artificial Sequence
  GFR-binding peptide
  MOD_RES (6), (7), (40), (42): Xaa is C or S
KVGKAXXVPTKLSAISVLYLDDMGVPTLKNYQEGMSVAEXGXR

SEQ ID NO: 9613 - protein, 39 aa, Artificial Sequence
  GFR-binding peptide
  MOD_RES (5), (6), (39): Xaa is C or S
  MOD_RES (20), (21), (22), (23), (24): Xaa is A or G
  MOD_RES (25), (26), (27), (28): Xaa is A or G or is absent
SASPXXVPQDLSPISILYKXXXXXXXXXLKYHYMVVKSX

SEQ ID NO: 9614 - protein, 42 aa, Artificial Sequence
  GFR-binding peptide
  MOD_RES (6), (7), (41): Xaa is C or S
  MOD_RES (21), (22), (23), (24), (25): Xaa is A or G
  MOD_RES (26), (27), (28), (29): Xaa is A or G or is absent
TVPKPXXAPTQLNAISVLYFXXXXXXXXXLKKYRNMVVRAXG

SEQ ID NO: 9615 - protein, 36 aa, Artificial Sequence
  GFR-binding peptide
  MOD_RES (4), (5): Xaa is C or S
PKAXXVPTELSATSMLYYDEYDKVVLRKHREMVVEG

SEQ ID NO: 9616 - protein, 38 aa, Artificial Sequence
  GFR-binding peptide
  MOD_RES (1), (2), (35), (37): Xaa is C or S
  MOD_RES (16), (17), (18), (19), (20): Xaa is A or G
  MOD_RES (21), (22), (23), (24): Xaa is A or G or is absent
XXVSQDLSATSILYYXXXXXXXXXLRKHRMIVKSXKXS

SEQ ID NO: 9617 - protein, 35 aa, Artificial Sequence
  GFR-binding peptide
  MOD_RES (1), (35): Xaa is C or S
  MOD_RES (15), (16), (17), (18), (19): Xaa is A or G
  MOD_RES (20), (21), (22), (23): Xaa is A or G or is absent
XAPTQLSATSVLYYXXXXXXXXXLRKHRNMVVRAX

SEQ ID NO: 9618 - protein, 36 aa, Artificial Sequence
  GFR-binding peptide
  MOD_RES (2), (3), (35): Xaa is C or S
PXXAPTKLSATSVLYYDDSSNVILRKHRNMVVRSXG

SEQ ID NO: 9619 - protein, 42 aa, Artificial Sequence
  GFR-binding peptide
  MOD_RES (6), (7), (41): Xaa is C or S
  MOD_RES (21), (22), (23), (24), (25): Xaa is A or G
  MOD_RES (26), (27), (28), (29): Xaa is A or G or is absent
KIPKAXXVPTELSATSMLYYXXXXXXXXXLRKHRDMVVEGXG

SEQ ID NO: 9620 - protein, 37 aa, Artificial Sequence
  GFR-binding peptide
  MOD_RES (3), (4): Xaa is C or S
  MOD_RES (18), (19), (20), (21), (22): Xaa is A or G
  MOD_RES (23), (24), (25), (26): Xaa is A or G or is absent
KAXXVPTELSATSMLYYXXXXXXXXXLRKHREMVVEG

SEQ ID NO: 9621 - protein, 35 aa, Artificial Sequence
  GFR-binding peptide
  MOD_RES (1), (2): Xaa is C or S
  MOD_RES (16), (17), (18), (19), (20): Xaa is A or G
  MOD_RES (21), (22), (23), (24): Xaa is A or G or is absent
XXAPTKLNAISVLYFXXXXXXXXXLKKYRNMVVKA

SEQ ID NO: 9622 - protein, 40 aa, Artificial Sequence
  GFR-binding peptide
  MOD_RES (4), (5), (38), (40): Xaa is C or S
  MOD_RES (19), (20), (21), (22), (23): Xaa is A or G
  MOD_RES (24), (25), (26), (27): Xaa is A or G or is absent
ASPXXVSQDLNAISILYFXXXXXXXXXLKKYRMIVKSXKX

SEQ ID NO: 9623 - protein, 39 aa, Artificial Sequence
  GFR-binding peptide
  MOD_RES (36), (38): Xaa is C or S
PTQVQLSATSVLYYEIVRKKPIFLRKHRTLEDHLAXKXE

SEQ ID NO: 9624 - protein, 37 aa, Artificial Sequence
  GFR-binding peptide
  MOD_RES (2), (3), (37): Xaa is C or S
  MOD_RES (17), (18), (19), (20), (21): Xaa is A or G
  MOD_RES (22), (23), (24), (25): Xaa is A or G or is absent
PXXAPTKLSAISVLYLXXXXXXXXXLKNYQNMVVRSX

SEQ ID NO: 9625 - protein, 36 aa, Artificial Sequence
  GFR-binding peptide
  MOD_RES (1), (2), (33), (35): Xaa is C or S
XXVPQALSPISILYKVGRKPKVLKYHYMIVRSXKXS

SEQ ID NO: 9626 - protein, 39 aa, Artificial Sequence
  GFR-binding peptide
  MOD_RES (4), (5), (39): Xaa is C or S
  MOD_RES (19), (20), (21), (22), (23): Xaa is A or G
  MOD_RES (24), (25), (26), (27): Xaa is A or G or is absent
PKPXXAPTQLSPISVLYKXXXXXXXXXLKYHYNMVVRAX

SEQ ID NO: 9627 - protein, 33 aa, Artificial Sequence
  GFR-binding peptide
  MOD_RES (2), (3): Xaa is C or S
AXXVPTELSATSMLYYDEYDKVVLRKHREMVVE

SEQ ID NO: 9628 - protein, 41 aa, Artificial Sequence
  GFR-binding peptide
  MOD_RES (6), (7), (41): Xaa is C or S
  MOD_RES (21), (22), (23), (24), (25): Xaa is A or G
  MOD_RES (26), (27), (28), (29): Xaa is A or G or is absent
SIPKAXXVPTELSATSMLYYXXXXXXXXXLRKHREMVVEGX

SEQ ID NO: 9629 - protein, 35 aa, Artificial Sequence
  GFR-binding peptide
  MOD_RES (1), (2), (35): Xaa is C or S
  MOD_RES (16), (17), (18), (19), (20): Xaa is A or G
  MOD_RES (21), (22), (23), (24): Xaa is A or G or is absent
XXVPQDLSATSILYYXXXXXXXXXLRKHRMVVKSX

SEQ ID NO: 9630 - protein, 42 aa, Artificial Sequence
  GFR-binding peptide
  MOD_RES (5), (42): Xaa is C or S
RNVQXRPTQVQLSAISVLYLEIVRKKPIFLKNYQTLEDHLAX

SEQ ID NO: 9631 - protein, 42 aa, Artificial Sequence
  GFR-binding peptide
  MOD_RES (5), (6), (39), (41): Xaa is C or S
  MOD_RES (20), (21), (22), (23), (24): Xaa is A or G
  MOD_RES (25), (26), (27), (28): Xaa is A or G or is absent
SASPXXVPQDLSATSILYYXXXXXXXXXLRKHRMVVKSXKXS

SEQ ID NO: 9632 - protein, 36 aa, Artificial Sequence
  GFR-binding peptide
  MOD_RES (4), (5): Xaa is C or S
PKAXXAPTKLSPISVLYKDSSNNVILKYHYNMVVKA

SEQ ID NO: 9633 - protein, 39 aa, Artificial Sequence
  GFR-binding peptide
  MOD_RES (3), (37), (39): Xaa is C or S
  MOD_RES (17), (18), (19), (20), (21): Xaa is A or G
  MOD_RES (22), (23), (24), (25): Xaa is A or G or is absent
PTXAPTKLSPISVLYKXXXXXXXXXLKYHYNMVVRSXGX

SEQ ID NO: 9634 - protein, 33 aa, Artificial Sequence
  GFR-binding peptide
  MOD_RES (32), (32): Xaa is C or S
APTQLSPISVLYKDDSSNVILKYHYNMVVRAXG

SEQ ID NO: 9635 - protein, 32 aa, Artificial Sequence
  GFR-binding peptide
  MOD_RES (1), (32): Xaa is C or S
XVSQDLSAISILYLIGKTPKILKNYQMIVKSX

SEQ ID NO: 9636 - protein, 40 aa, Artificial Sequence
  GFR-binding peptide
  MOD_RES (6), (7), (39): Xaa is C or S
SIPKAXXVPTELSATSMLYYDEYDKVVLRKHREMVVEGXG

SEQ ID NO: 9637 - protein, 40 aa, Artificial Sequence
  GFR-binding peptide
  MOD_RES (7), (39): Xaa is C or S
HVTKPTXAPTKLSATSVLYYDDSSNVILRKHRNMVVRSXG

SEQ ID NO: 9638 - protein, 34 aa, Artificial Sequence
  GFR-binding peptide
  MOD_RES (1), (1): Xaa is C or S
  MOD_RES (15), (16), (17), (18), (19): Xaa is A or G
  MOD_RES (20), (21), (22), (23): Xaa is A or G or is absent
XAPTKLSAISVLYLXXXXXXXXXLKNYQNMVVRS

SEQ ID NO: 9639 - protein, 43 aa, Artificial Sequence
  GFR-binding peptide
  MOD_RES (6), (7), (41), (43): Xaa is C or S
  MOD_RES (21), (22), (23), (24), (25): Xaa is A or G
  MOD_RES (26), (27), (28), (29): Xaa is A or G or is absent
SIPKAXXVPTELSATSMLYYXXXXXXXXXLRKHREMVVEGXGX

SEQ ID NO: 9640 - protein, 40 aa, Artificial Sequence
  GFR-binding peptide
  MOD_RES (4), (5), (39): Xaa is C or S
  MOD_RES (19), (20), (21), (22), (23): Xaa is A or G
  MOD_RES (24), (25), (26), (27): Xaa is A or G or is absent
PKAXXAPTKLSAISVLYLXXXXXXXXXLKNYQNMVVKAXG

SEQ ID NO: 9641 - protein, 36 aa, Artificial Sequence
  GFR-binding peptide
  MOD_RES (4), (5): Xaa is C or S
PKPXXAPTKLSAISVLYLDDSSNVILKNYQNMVVRS

SEQ ID NO: 9642 - protein, 42 aa, Artificial Sequence
  GFR-binding peptide
  MOD_RES (4), (5), (40), (42): Xaa is C or S
  MOD_RES (19), (20), (21), (22), (23): Xaa is A or G
  MOD_RES (24), (25), (26), (27): Xaa is A or G or is absent
GKAXXVPTKLSPISVLYKXXXXXXXXXLKYHYEGMSVAEXGX

SEQ ID NO: 9643 - protein, 34 aa, Artificial Sequence
  GFR-binding peptide
  MOD_RES (1), (1): Xaa is C or S
  MOD_RES (15), (16), (17), (18), (19): Xaa is A or G
  MOD_RES (20), (21), (22), (23): Xaa is A or G or is absent
XAPTKLNAISVLYFXXXXXXXXXLKKYRNMVVKA

SEQ ID NO: 9644 - protein, 41 aa, Artificial Sequence
  GFR-binding peptide
  MOD_RES (7), (41): Xaa is C or S
  MOD_RES (21), (22), (23), (24), (25): Xaa is A or G
  MOD_RES (26), (27), (28), (29): Xaa is A or G or is absent
HVTKPTXAPTKLNAISVLYFXXXXXXXXXLKKYRNMVVRSX

SEQ ID NO: 9645 - protein, 37 aa, Artificial Sequence
  GFR-binding peptide
  MOD_RES (34), (36): Xaa is C or S
  MOD_RES (14), (15), (16), (17), (18): Xaa is A or G
  MOD_RES (19), (20), (21), (22): Xaa is A or G or is absent
VPTELSPISMLYKXXXXXXXXXLKYHYDMVVEGXGXR

SEQ ID NO: 9646 - protein, 39 aa, Artificial Sequence
  GFR-binding peptide
  MOD_RES (2), (3), (37), (39): Xaa is C or S
  MOD_RES (17), (18), (19), (20), (21): Xaa is A or G
  MOD_RES (22), (23), (24), (25): Xaa is A or G or is absent
AXXVPTELNAISMLYFXXXXXXXXXLKKYREMVVEGXGX

SEQ ID NO: 9647 - protein, 41 aa, Artificial Sequence
  GFR-binding peptide
  MOD_RES (5), (6), (38), (40): Xaa is C or S
VPKAXXAPTKLSPISVLYKDSSNNVILKYHYNMVVKAXGXH

SEQ ID NO: 9648 - protein, 34 aa, Artificial Sequence
  GFR-binding peptide
  MOD_RES (34), (34): Xaa is C or S
  MOD_RES (14), (15), (16), (17), (18): Xaa is A or G
  MOD_RES (19), (20), (21), (22): Xaa is A or G or is absent
APTQLSATSVLYYXXXXXXXXXLRKHRNMVVRAX

SEQ ID NO: 9649 - protein, 41 aa, Artificial Sequence
  GFR-binding peptide
  MOD_RES (5), (6), (38), (40): Xaa is C or S
VPKPXXAPTKLSAISVLYLDDSSNVILKNYQNMVVRSXGXH

SEQ ID NO: 9650 - protein, 32 aa, Artificial Sequence
  GFR-binding peptide
  MOD_RES (31), (31): Xaa is C or S
VSQDLNAISILYFIGKTPKILKKYRMIVKSXK

SEQ ID NO: 9651 - protein, 37 aa, Artificial Sequence
  GFR-binding peptide
  MOD_RES (1), (34), (36): Xaa is C or S
  MOD_RES (15), (16), (17), (18), (19): Xaa is A or G
  MOD_RES (20), (21), (22), (23): Xaa is A or G or is absent
XVPQDLSATSILYYXXXXXXXXXLRKHRMVVKSXKXS

SEQ ID NO: 9652 - protein, 42 aa, Artificial Sequence
  GFR-binding peptide
  MOD_RES (6), (7), (40), (42): Xaa is C or S
  MOD_RES (21), (22), (23), (24), (25): Xaa is A or G
  MOD_RES (26), (27), (28), (29): Xaa is A or G or is absent
ASAAPXXVPQALNAISILYFXXXXXXXXXLKKYRMIVRSXKX

SEQ ID NO: 9653 - protein, 38 aa, Artificial Sequence
  GFR-binding peptide
  MOD_RES (3), (3): Xaa is C or S
VQXRPTQVQLSAISVLYLEIVRKKPIFLKNYQTLEDHL

SEQ ID NO: 9654 - protein, 41 aa, Artificial Sequence
  GFR-binding peptide
  MOD_RES (4), (5), (39), (41): Xaa is C or S
  MOD_RES (19), (20), (21), (22), (23): Xaa is A or G
  MOD_RES (24), (25), (26), (27): Xaa is A or G or is absent
PKAXXAPTKLSAISVLYLXXXXXXXXXLKNYQNMVVKAXGX

SEQ ID NO: 9655 - protein, 41 aa, Artificial Sequence
  GFR-binding peptide
  MOD_RES (6), (7), (41): Xaa is C or S
  MOD_RES (21), (22), (23), (24), (25): Xaa is A or G
  MOD_RES (26), (27), (28), (29): Xaa is A or G or is absent
TVPKPXXAPTQLNAISVLYFXXXXXXXXXLKKYRNMVVRAX

SEQ ID NO: 9656 - protein, 37 aa, Artificial Sequence
  GFR-binding peptide
  MOD_RES (1), (2), (34), (36): Xaa is C or S
XXAPTQLSAISVLYLDDSSNVILKNYQNMVVRAXGXH

SEQ ID NO: 9657 - protein, 39 aa, Artificial Sequence
  GFR-binding peptide
  MOD_RES (5), (5): Xaa is C or S
RNVQXRPTQVQLNAISVLYFEIVRKKPIFLKKYRTLEDH

SEQ ID NO: 9658 - protein, 38 aa, Artificial Sequence
  GFR-binding peptide
  MOD_RES (5), (6): Xaa is C or S
  MOD_RES (20), (21), (22), (23), (24): Xaa is A or G
  MOD_RES (25), (26), (27), (28): Xaa is A or G or is absent
IPKAXXVPTELSATSMLYYXXXXXXXXXLRKHRDMVVE

SEQ ID NO: 9659 - protein, 44 aa, Artificial Sequence
  GFR-binding peptide
  MOD_RES (6), (7), (42), (44): Xaa is C or S
  MOD_RES (21), (22), (23), (24), (25): Xaa is A or G
  MOD_RES (26), (27), (28), (29): Xaa is A or G or is absent
KVGKAXXVPTKLSAISVLYLXXXXXXXXXLKNYQEGMSVAEXGX

SEQ ID NO: 9660 - protein, 35 aa, Artificial Sequence
  GFR-binding peptide
  MOD_RES (4), (5): Xaa is C or S
PKAXXAPTKLSPISVLYKDSSNNVILKYHYNMVVK

SEQ ID NO: 9661 - protein, 36 aa, Artificial Sequence
  GFR-binding peptide
  MOD_RES (3), (4), (36): Xaa is C or S
KAXXVPTELNAISMLYFDENEKVVLKKYRDMVVEGX

SEQ ID NO: 9662 - protein, 43 aa, Artificial Sequence
  GFR-binding peptide
  MOD_RES (5), (6), (40), (42): Xaa is C or S
  MOD_RES (20), (21), (22), (23), (24): Xaa is A or G
  MOD_RES (25), (26), (27), (28): Xaa is A or G or is absent
VPKAXXAPTKLSPISVLYKXXXXXXXXXLKYHYNMVVKAXGXH

SEQ ID NO: 9663 - protein, 42 aa, Artificial Sequence
  GFR-binding peptide
  MOD_RES (4), (41): Xaa is C or S
NVQXRPTQVQLSPISVLYKEIVRKKPIFLKYHYTLEDHLAXK

SEQ ID NO: 9664 - protein, 37 aa, Artificial Sequence
  GFR-binding peptide
  MOD_RES (2), (3), (37): Xaa is C or S
  MOD_RES (17), (18), (19), (20), (21): Xaa is A or G
  MOD_RES (22), (23), (24), (25): Xaa is A or G or is absent
PXXAPTKLSPISVLYKXXXXXXXXXLKYHYNMVVRSX

SEQ ID NO: 9665 - protein, 39 aa, Artificial Sequence
  GFR-binding peptide
  MOD_RES (4), (5), (37), (39): Xaa is C or S
PKAXXAPTKLSAISVLYLDSSNNVILKNYQNMVVKAXGX

SEQ ID NO: 9666 - protein, 35 aa, Artificial Sequence
  GFR-binding peptide
  MOD_RES (2), (3), (34): Xaa is C or S
PXXVSQDLSPISILYKIGKTPKILKYHYMIVKSXK

SEQ ID NO: 9667 - protein, 43 aa, Artificial Sequence
  GFR-binding peptide
  MOD_RES (6), (7), (41), (43): Xaa is C or S
  MOD_RES (21), (22), (23), (24), (25): Xaa is A or G
  MOD_RES (26), (27), (28), (29): Xaa is A or G or is absent
TVPKPXXAPTQLSAISVLYLXXXXXXXXXLKNYQNMVVRAXGX

SEQ ID NO: 9668 - protein, 43 aa, Artificial Sequence
  GFR-binding peptide
  MOD_RES (5), (6), (40), (42): Xaa is C or S
  MOD_RES (20), (21), (22), (23), (24): Xaa is A or G
  MOD_RES (25), (26), (27), (28): Xaa is A or G or is absent
VPKPXXAPTKLSAISVLYLXXXXXXXXXLKNYQNMVVRSXGXH

SEQ ID NO: 9669 - protein, 35 aa, Artificial Sequence
  GFR-binding peptide
  MOD_RES (4), (5): Xaa is C or S
PKAXXAPTKLSAISVLYLDSSNNVILKNYQNMVVK

SEQ ID NO: 9670 - protein, 40 aa, Artificial Sequence
  GFR-binding peptide
  MOD_RES (3), (40): Xaa is C or S
  MOD_RES (19), (20), (21), (22), (23): Xaa is A or G
  MOD_RES (24), (25), (26), (27): Xaa is A or G or is absent
VQXRPTQVQLSATSVLYYXXXXXXXXXLRKHRTLEDHLAX

SEQ ID NO: 9671 - protein, 38 aa, Artificial Sequence
  GFR-binding peptide
  MOD_RES (3), (4), (36), (38): Xaa is C or S
KPXXAPTQLSPISVLYKDDSSNVILKYHYNMVVRAXGX

SEQ ID NO: 9672 - protein, 40 aa, Artificial Sequence
  GFR-binding peptide
  MOD_RES (6), (7), (39): Xaa is C or S
TVPKPXXAPTQLSATSVLYYDDSSNVILRKHRNMVVRAXG

SEQ ID NO: 9673 - protein, 37 aa, Artificial Sequence
  GFR-binding peptide
  MOD_RES (34), (36): Xaa is C or S
  MOD_RES (14), (15), (16), (17), (18): Xaa is A or G
  MOD_RES (19), (20), (21), (22): Xaa is A or G or is absent
APTKLNAISVLYFXXXXXXXXXLKKYRNMVVRSXGXH

SEQ ID NO: 9674 - protein, 33 aa, Artificial Sequence
  GFR-binding peptide
  MOD_RES (1), (2), (33): Xaa is C or S
XXVSQDLSPISILYKIGKTPKILKYHYMIVKSX

SEQ ID NO: 9675 - protein, 31 aa, Artificial Sequence
  GFR-binding peptide
  MOD_RES (1), (1): Xaa is C or S
XAPTQLSATSVLYYDDSSNVILRKHRNMVVR

SEQ ID NO: 9676 - protein, 39 aa, Artificial Sequence
  GFR-binding peptide
  MOD_RES (2), (3), (36), (38): Xaa is C or S
  MOD_RES (17), (18), (19), (20), (21): Xaa is A or G
  MOD_RES (22), (23), (24), (25): Xaa is A or G or is absent
PXXVPQDLSAISILYLXXXXXXXXXLKNYQMVVKSXKXS

SEQ ID NO: 9677 - protein, 36 aa, Artificial Sequence
  GFR-binding peptide
  MOD_RES (3), (3): Xaa is C or S
  MOD_RES (17), (18), (19), (20), (21): Xaa is A or G
  MOD_RES (22), (23), (24), (25): Xaa is A or G or is absent
PTXAPTKLNAISVLYFXXXXXXXXXLKKYRNMVVRS

SEQ ID NO: 9678 - protein, 36 aa, Artificial Sequence
  GFR-binding peptide
  MOD_RES (1), (35): Xaa is C or S
  MOD_RES (15), (16), (17), (18), (19): Xaa is A or G
  MOD_RES (20), (21), (22), (23): Xaa is A or G or is absent
XAPTKLSPISVLYKXXXXXXXXXLKYHYNMVVKAXG

SEQ ID NO: 9679 - protein, 35 aa, Artificial Sequence
  GFR-binding peptide
  MOD_RES (2), (3): Xaa is C or S
  MOD_RES (17), (18), (19), (20), (21): Xaa is A or G
  MOD_RES (22), (23), (24), (25): Xaa is A or G or is absent
PXXVSQDLSAISILYLXXXXXXXXXLKNYQMIVKS

SEQ ID NO: 9680 - protein, 36 aa, Artificial Sequence
  GFR-binding peptide
  MOD_RES (3), (3): Xaa is C or S
  MOD_RES (17), (18), (19), (20), (21): Xaa is A or G
  MOD_RES (22), (23), (24), (25): Xaa is A or G or is absent
PTXAPTKLSAISVLYLXXXXXXXXXLKNYQNMVVRS

SEQ ID NO: 9681 - protein, 39 aa, Artificial Sequence
  GFR-binding peptide
  MOD_RES (6), (7): Xaa is C or S
  MOD_RES (21), (22), (23), (24), (25): Xaa is A or G
  MOD_RES (26), (27), (28), (29): Xaa is A or G or is absent
ASASPXXVSQDLSATSILYYXXXXXXXXXLRKHRMIVKS

SEQ ID NO: 9682 - protein, 36 aa, Artificial Sequence
  GFR-binding peptide
  MOD_RES (1), (2), (34), (36): Xaa is C or S
XXVPTELSPISMLYKDEYDKVVLKYHYEMVVEGXGX

SEQ ID NO: 9683 - protein, 36 aa, Artificial Sequence
  GFR-binding peptide
  MOD_RES (5), (6): Xaa is C or S
IPKAXXVPTELNAISMLYFDENEKVVLKKYRDMVVE

SEQ ID NO: 9684 - protein, 34 aa, Artificial Sequence
  GFR-binding peptide
  MOD_RES (1), (2), (33): Xaa is C or S
XXVPQDLSAISILYLVGRTPKVLKNYQMVVKSXK

SEQ ID NO: 9685 - protein, 38 aa, Artificial Sequence
  GFR-binding peptide
  MOD_RES (3), (4), (38): Xaa is C or S
  MOD_RES (18), (19), (20), (21), (22): Xaa is A or G
  MOD_RES (23), (24), (25), (26): Xaa is A or G or is absent
KAXXVPTELSPISMLYKXXXXXXXXXLKYHYEMVVEGX

SEQ ID NO: 9686 - protein, 40 aa, Artificial Sequence
  GFR-binding peptide
  MOD_RES (5), (37), (39): Xaa is C or S
TKPTXAPTKLSAISVLYLDDSSNVILKNYQNMVVRSXGXH

SEQ ID NO: 9687 - protein, 42 aa, Artificial Sequence
  GFR-binding peptide
  MOD_RES (3), (40), (42): Xaa is C or S
VQXRPTQVQLSATSVLYYEIVRKKPIFLRKHRTLEDHLAXKX

SEQ ID NO: 9688 - protein, 37 aa, Artificial Sequence
  GFR-binding peptide
  MOD_RES (6), (7): Xaa is C or S
AVPKAXXAPTKLSAISVLYLDSSNNVILKNYQNMVVK

SEQ ID NO: 9689 - protein, 41 aa, Artificial Sequence
  GFR-binding peptide
  MOD_RES (6), (7), (40): Xaa is C or S
  MOD_RES (21), (22), (23), (24), (25): Xaa is A or G
  MOD_RES (26), (27), (28), (29): Xaa is A or G or is absent
ASAAPXXVPQALNAISILYFXXXXXXXXXLKKYRMIVRSXK

SEQ ID NO: 9690 - protein, 37 aa, Artificial Sequence
  GFR-binding peptide
  MOD_RES (4), (5): Xaa is C or S
  MOD_RES (19), (20), (21), (22), (23): Xaa is A or G
  MOD_RES (24), (25), (26), (27): Xaa is A or G or is absent
AAPXXVPQALNAISILYFXXXXXXXXXLKKYRMIVRS

SEQ ID NO: 9691 - protein, 35 aa, Artificial Sequence
  GFR-binding peptide
  MOD_RES (1), (2), (35): Xaa is C or S
  MOD_RES (16), (17), (18), (19), (20): Xaa is A or G
  MOD_RES (21), (22), (23), (24): Xaa is A or G or is absent
XXVPQDLSAISILYLXXXXXXXXXLKNYQMVVKSX

SEQ ID NO: 9692 - protein, 42 aa, Artificial Sequence
  GFR-binding peptide
  MOD_RES (6), (7), (40), (42): Xaa is C or S
KVGKAXXVPTKLNAISVLYFDDMGVPTLKKYREGMSVAEXGX

SEQ ID NO: 9693 - protein, 40 aa, Artificial Sequence
  GFR-binding peptide
  MOD_RES (1), (38), (40): Xaa is C or S
  MOD_RES (17), (18), (19), (20), (21): Xaa is A or G
  MOD_RES (22), (23), (24), (25): Xaa is A or G or is absent
XRPTQVQLNAISVLYFXXXXXXXXXLKKYRTLEDHLAXKX

SEQ ID NO: 9694 - protein, 40 aa, Artificial Sequence
  GFR-binding peptide
  MOD_RES (2), (39): Xaa is C or S
QXRPTQVQLSATSVLYYEIVRKKPIFLRKHRTLEDHLAXK

SEQ ID NO: 9695 - protein, 30 aa, Artificial Sequence
  GFR-binding peptide
VPTELNAISMLYFDENEKVVLKKYRDMVVE

SEQ ID NO: 9696 - protein, 40 aa, Artificial Sequence
  GFR-binding peptide
  MOD_RES (6), (7): Xaa is C or S
  MOD_RES (21), (22), (23), (24), (25): Xaa is A or G
  MOD_RES (26), (27), (28), (29): Xaa is A or G or is absent
YVPKPXXAPTKLSPISVLYKXXXXXXXXXLKYHYNMVVRS

SEQ ID NO: 9697 - protein, 42 aa, Artificial Sequence
  GFR-binding peptide
  MOD_RES (5), (6), (39), (41): Xaa is C or S
VGKAXXVPTKLSAISVLYLDDMGVPTLKNYQEGMSVAEXGXR

SEQ ID NO: 9698 - protein, 34 aa, Artificial Sequence
  GFR-binding peptide
  MOD_RES (14), (15), (16), (17), (18): Xaa is A or G
  MOD_RES (19), (20), (21), (22): Xaa is A or G or is absent
VPTKLSPISVLYKXXXXXXXXXLKYHYEGMSVAE

SEQ ID NO: 9699 - protein, 44 aa, Artificial Sequence
  GFR-binding peptide
  MOD_RES (6), (7), (41), (43): Xaa is C or S
  MOD_RES (21), (22), (23), (24), (25): Xaa is A or G
  MOD_RES (26), (27), (28), (29): Xaa is A or G or is absent
AVPKAXXAPTKLNAISVLYFXXXXXXXXXLKKYRNMVVKAXGXH

SEQ ID NO: 9700 - protein, 35 aa, Artificial Sequence
  GFR-binding peptide
  MOD_RES (2), (3): Xaa is C or S
  MOD_RES (17), (18), (19), (20), (21): Xaa is A or G
  MOD_RES (22), (23), (24), (25): Xaa is A or G or is absent
PXXVPQALSPISILYKXXXXXXXXXLKYHYMIVRS

SEQ ID NO: 9701 - protein, 39 aa, Artificial Sequence
  GFR-binding peptide
  MOD_RES (5), (6): Xaa is C or S
  MOD_RES (20), (21), (22), (23), (24): Xaa is A or G
  MOD_RES (25), (26), (27), (28): Xaa is A or G or is absent
VPKPXXAPTQLSPISVLYKXXXXXXXXXLKYHYNMVVRA

SEQ ID NO: 9702 - protein, 37 aa, Artificial Sequence
  GFR-binding peptide
  MOD_RES (4), (5): Xaa is C or S
  MOD_RES (19), (20), (21), (22), (23): Xaa is A or G
  MOD_RES (24), (25), (26), (27): Xaa is A or G or is absent
PKAXXAPTKLNAISVLYFXXXXXXXXXLKKYRNMVVK

SEQ ID NO: 9703 - protein, 37 aa, Artificial Sequence
  GFR-binding peptide
  MOD_RES (2), (3): Xaa is C or S
  MOD_RES (17), (18), (19), (20), (21): Xaa is A or G
  MOD_RES (22), (23), (24), (25): Xaa is A or G or is absent
AXXVPTKLSATSVLYYXXXXXXXXXLRKHREGMSVAE

SEQ ID NO: 9704 - protein, 38 aa, Artificial Sequence
  GFR-binding peptide
  MOD_RES (2), (3), (38): Xaa is C or S
  MOD_RES (17), (18), (19), (20), (21): Xaa is A or G
  MOD_RES (22), (23), (24), (25): Xaa is A or G or is absent
AXXVPTKLNAISVLYFXXXXXXXXXLKKYREGMSVAEX

SEQ ID NO: 9705 - protein, 37 aa, Artificial Sequence
  GFR-binding peptide
  MOD_RES (4), (36): Xaa is C or S
KPTXAPTKLSPISVLYKDDSSNVILKYHYNMVVRSXG

SEQ ID NO: 9706 - protein, 33 aa, Artificial Sequence
  GFR-binding peptide
  MOD_RES (31), (33): Xaa is C or S
VPQALNAISILYFVGRKPKVLKKYRMIVRSXKX

SEQ ID NO: 9707 - protein, 39 aa, Artificial Sequence
  GFR-binding peptide
  MOD_RES (5), (6): Xaa is C or S
  MOD_RES (20), (21), (22), (23), (24): Xaa is A or G
  MOD_RES (25), (26), (27), (28): Xaa is A or G or is absent
IPKAXXVPTELSATSMLYYXXXXXXXXXLRKHRDMVVEG

SEQ ID NO: 9708 - protein, 39 aa, Artificial Sequence
  GFR-binding peptide
  MOD_RES (6), (7): Xaa is C or S
  MOD_RES (21), (22), (23), (24), (25): Xaa is A or G
  MOD_RES (26), (27), (28), (29): Xaa is A or G or is absent
KIPKAXXVPTELNAISMLYFXXXXXXXXXLKKYRDMVVE

SEQ ID NO: 9709 - protein, 40 aa, Artificial Sequence
  GFR-binding peptide
  MOD_RES (5), (6), (39): Xaa is C or S
  MOD_RES (20), (21), (22), (23), (24): Xaa is A or G
  MOD_RES (25), (26), (27), (28): Xaa is A or G or is absent
SASPXXVSQDLNAISILYFXXXXXXXXXLKKYRMIVKSXK

SEQ ID NO: 9710 - protein, 37 aa, Artificial Sequence
  GFR-binding peptide
  MOD_RES (2), (3), (36): Xaa is C or S
AXXVPTKLSATSVLYYDDMGVPTLRKHREGMSVAEXG

SEQ ID NO: 9711 - protein, 40 aa, Artificial Sequence
  GFR-binding peptide
  MOD_RES (37), (39): Xaa is C or S
  MOD_RES (16), (17), (18), (19), (20): Xaa is A or G
  MOD_RES (21), (22), (23), (24): Xaa is A or G or is absent
RPTQVQLSAISVLYLXXXXXXXXXLKNYQTLEDHLAXKXE

SEQ ID NO: 9712 - protein, 35 aa, Artificial Sequence
  GFR-binding peptide
  MOD_RES (1), (35): Xaa is C or S
  MOD_RES (15), (16), (17), (18), (19): Xaa is A or G
  MOD_RES (20), (21), (22), (23): Xaa is A or G or is absent
XVPTELSATSMLYYXXXXXXXXXLRKHREMVVEGX

SEQ ID NO: 9713 - protein, 35 aa, Artificial Sequence
  GFR-binding peptide
  MOD_RES (4), (5): Xaa is C or S
ASPXXVPQDLSAISILYLVGRTPKVLKNYQMVVKS

SEQ ID NO: 9714 - protein, 35 aa, Artificial Sequence
  GFR-binding peptide
  MOD_RES (2), (3): Xaa is C or S
  MOD_RES (17), (18), (19), (20), (21): Xaa is A or G
  MOD_RES (22), (23), (24), (25): Xaa is A or G or is absent
AXXVPTELSATSMLYYXXXXXXXXXLRKHRDMVVE

SEQ ID NO: 9715 - protein, 42 aa, Artificial Sequence
  GFR-binding peptide
  MOD_RES (6), (7), (41): Xaa is C or S
  MOD_RES (21), (22), (23), (24), (25): Xaa is A or G
  MOD_RES (26), (27), (28), (29): Xaa is A or G or is absent
YVPKPXXAPTKLSPISVLYKXXXXXXXXXLKYHYNMVVRSXG

SEQ ID NO: 9716 - protein, 37 aa, Artificial Sequence
  GFR-binding peptide
  MOD_RES (2), (3): Xaa is C or S
  MOD_RES (17), (18), (19), (20), (21): Xaa is A or G
  MOD_RES (22), (23), (24), (25): Xaa is A or G or is absent
AXXVPTKLSAISVLYLXXXXXXXXXLKNYQEGMSVAE

SEQ ID NO: 9717 - protein, 40 aa, Artificial Sequence
  GFR-binding peptide
  MOD_RES (2), (3), (37), (39): Xaa is C or S
  MOD_RES (17), (18), (19), (20), (21): Xaa is A or G
  MOD_RES (22), (23), (24), (25): Xaa is A or G or is absent
AXXAPTKLSATSVLYYXXXXXXXXXLRKHRNMVVKAXGXH

SEQ ID NO: 9718 - protein, 34 aa, Artificial Sequence
  GFR-binding peptide
  MOD_RES (2), (3): Xaa is C or S
AXXVPTELNAISMLYFDEYDKVVLKKYREMVVEG

SEQ ID NO: 9719 - protein, 34 aa, Artificial Sequence
  GFR-binding peptide
  MOD_RES (1), (2): Xaa is C or S
  MOD_RES (16), (17), (18), (19), (20): Xaa is A or G
  MOD_RES (21), (22), (23), (24): Xaa is A or G or is absent
XXAPTKLSPISVLYKXXXXXXXXXLKYHYNMVVK

SEQ ID NO: 9720 - protein, 35 aa, Artificial Sequence
  GFR-binding peptide
  MOD_RES (1), (34): Xaa is C or S
  MOD_RES (15), (16), (17), (18), (19): Xaa is A or G
  MOD_RES (20), (21), (22), (23): Xaa is A or G or is absent
XVPQDLSAISILYLXXXXXXXXXLKNYQMVVKSXK

SEQ ID NO: 9721 - protein, 37 aa, Artificial Sequence
  GFR-binding peptide
  MOD_RES (4), (5), (37): Xaa is C or S
PKAXXVPTELNAISMLYFDENEKVVLKKYRDMVVEGX

SEQ ID NO: 9722 - protein, 37 aa, Artificial Sequence
  GFR-binding peptide
  MOD_RES (1), (2), (36): Xaa is C or S
  MOD_RES (16), (17), (18), (19), (20): Xaa is A or G
  MOD_RES (21), (22), (23), (24): Xaa is A or G or is absent
XXAPTKLSPISVLYKXXXXXXXXXLKYHYNMVVRSXG

SEQ ID NO: 9723 - protein, 38 aa, Artificial Sequence
  GFR-binding peptide
  MOD_RES (3), (4), (36), (38): Xaa is C or S
KPXXAPTKLSPISVLYKDDSSNVILKYHYNMVVRSXGX

SEQ ID NO: 9724 - protein, 34 aa, Artificial Sequence
  GFR-binding peptide
  MOD_RES (1), (2): Xaa is C or S
  MOD_RES (16), (17), (18), (19), (20): Xaa is A or G
  MOD_RES (21), (22), (23), (24): Xaa is A or G or is absent
XXVPTELNAISMLYFXXXXXXXXXLKKYRDMVVE

SEQ ID NO: 9725 - protein, 38 aa, Artificial Sequence
  GFR-binding peptide
  MOD_RES (5), (37): Xaa is C or S
TKPTXAPTKLSPISVLYKDDSSNVILKYHYNMVVRSXG

SEQ ID NO: 9726 - protein, 39 aa, Artificial Sequence
  GFR-binding peptide
  MOD_RES (37), (39): Xaa is C or S
RPTQVQLSAISVLYLEIVRKKPIFLKNYQTLEDHLAXKX

SEQ ID NO: 9727 - protein, 44 aa, Artificial Sequence
  GFR-binding peptide
  MOD_RES (7), (41), (43): Xaa is C or S
  MOD_RES (21), (22), (23), (24), (25): Xaa is A or G
  MOD_RES (26), (27), (28), (29): Xaa is A or G or is absent
HVTKPTXAPTKLSPISVLYKXXXXXXXXXLKYHYNMVVRSXGXH

SEQ ID NO: 9728 - protein, 37 aa, Artificial Sequence
  GFR-binding peptide
  MOD_RES (34), (36): Xaa is C or S
  MOD_RES (14), (15), (16), (17), (18): Xaa is A or G
  MOD_RES (19), (20), (21), (22): Xaa is A or G or is absent
APTQLSATSVLYYXXXXXXXXXLRKHRNMVVRAXGXH

SEQ ID NO: 9729 - protein, 30 aa, Artificial Sequence
  GFR-binding peptide
VPQALSAISILYLVGRKPKVLKNYQMIVRS

SEQ ID NO: 9730 - protein, 39 aa, Artificial Sequence
  GFR-binding peptide
  MOD_RES (6), (7): Xaa is C or S
  MOD_RES (21), (22), (23), (24), (25): Xaa is A or G
  MOD_RES (26), (27), (28), (29): Xaa is A or G or is absent
YVPKPXXAPTKLSATSVLYYXXXXXXXXXLRKHRNMVVR

SEQ ID NO: 9731 - protein, 40 aa, Artificial Sequence
  GFR-binding peptide
  MOD_RES (6), (7), (39): Xaa is C or S
KIPKAXXVPTELNAISMLYFDENEKVVLKKYRDMVVEGXG

SEQ ID NO: 9732 - protein, 33 aa, Artificial Sequence
  GFR-binding peptide
  MOD_RES (14), (15), (16), (17), (18): Xaa is A or G
  MOD_RES (19), (20), (21), (22): Xaa is A or G or is absent
APTQLSPISVLYKXXXXXXXXXLKYHYNMVVRA

SEQ ID NO: 9733 - protein, 37 aa, Artificial Sequence
  GFR-binding peptide
  MOD_RES (3), (4), (35), (37): Xaa is C or S
SPXXVSQDLSAISILYLIGKTPKILKNYQMIVKSXKX

SEQ ID NO: 9734 - protein, 44 aa, Artificial Sequence
  GFR-binding peptide
  MOD_RES (4), (41), (43): Xaa is C or S
  MOD_RES (20), (21), (22), (23), (24): Xaa is A or G
  MOD_RES (25), (26), (27), (28): Xaa is A or G or is absent
NVQXRPTQVQLSATSVLYYXXXXXXXXXLRKHRTLEDHLAXKXE

SEQ ID NO: 9735 - protein, 40 aa, Artificial Sequence
  GFR-binding peptide
  MOD_RES (5), (6), (40): Xaa is C or S
  MOD_RES (20), (21), (22), (23), (24): Xaa is A or G
  MOD_RES (25), (26), (27), (28): Xaa is A or G or is absent
IPKAXXVPTELSAISMLYLXXXXXXXXXLKNYQEMVVEGX

SEQ ID NO: 9736 - protein, 38 aa, Artificial Sequence
  GFR-binding peptide
  MOD_RES (4), (4): Xaa is C or S
NVQXRPTQVQLSATSVLYYEIVRKKPIFLRKHRTLEDH

SEQ ID NO: 9737 - protein, 43 aa, Artificial Sequence
  GFR-binding peptide
  MOD_RES (3), (40), (42): Xaa is C or S
VQXRPTQVQLNAISVLYFEIVRKKPIFLKKYRTLEDHLAXKXE

SEQ ID NO: 9738 - protein, 37 aa, Artificial Sequence
  GFR-binding peptide
  MOD_RES (4), (5), (37): Xaa is C or S
PKAXXAPTKLSAISVLYLDSSNNVILKNYQNMVVKAX

SEQ ID NO: 9739 - protein, 32 aa, Artificial Sequence
  GFR-binding peptide
  MOD_RES (1), (2): Xaa is C or S
XXAPTQLSATSVLYYDDSSNVILRKHRNMVVR

SEQ ID NO: 9740 - protein, 35 aa, Artificial Sequence
  GFR-binding peptide
  MOD_RES (15), (16), (17), (18), (19): Xaa is A or G
  MOD_RES (20), (21), (22), (23): Xaa is A or G or is absent
PTQVQLNAISVLYFXXXXXXXXXLKKYRTLEDHLA

SEQ ID NO: 9741 - protein, 40 aa, Artificial Sequence
  GFR-binding peptide
  MOD_RES (4), (5), (38), (40): Xaa is C or S
  MOD_RES (19), (20), (21), (22), (23): Xaa is A or G
  MOD_RES (24), (25), (26), (27): Xaa is A or G or is absent
AAPXXVPQALNAISILYFXXXXXXXXXLKKYRMIVRSXKX

SEQ ID NO: 9742 - protein, 38 aa, Artificial Sequence
  GFR-binding peptide
  MOD_RES (2), (3), (35), (37): Xaa is C or S
AXXVPTELSATSMLYYDENEKVVLRKHRDMVVEGXGXR

SEQ ID NO: 9743 - protein, 37 aa, Artificial Sequence
  GFR-binding peptide
  MOD_RES (4), (5), (36): Xaa is C or S
ASPXXVPQDLSPISILYKVGRTPKVLKYHYMVVKSXK

SEQ ID NO: 9744 - protein, 38 aa, Artificial Sequence
  GFR-binding peptide
  MOD_RES (5), (6): Xaa is C or S
  MOD_RES (20), (21), (22), (23), (24): Xaa is A or G
  MOD_RES (25), (26), (27), (28): Xaa is A or G or is absent
SASPXXVSQDLSATSILYYXXXXXXXXXLRKHRMIVKS

SEQ ID NO: 9745 - protein, 37 aa, Artificial Sequence
  GFR-binding peptide
  MOD_RES (34), (36): Xaa is C or S
  MOD_RES (14), (15), (16), (17), (18): Xaa is A or G
  MOD_RES (19), (20), (21), (22): Xaa is A or G or is absent
VPTELSAISMLYLXXXXXXXXXLKNYQEMVVEGXGXR

SEQ ID NO: 9746 - protein, 34 aa, Artificial Sequence
  GFR-binding peptide
  MOD_RES (1), (1): Xaa is C or S
  MOD_RES (15), (16), (17), (18), (19): Xaa is A or G
  MOD_RES (20), (21), (22), (23): Xaa is A or G or is absent
XAPTKLNAISVLYFXXXXXXXXXLKKYRNMVVRS

SEQ ID NO: 9747 - protein, 34 aa, Artificial Sequence
  GFR-binding peptide
  MOD_RES (1), (2): Xaa is C or S
  MOD_RES (16), (17), (18), (19), (20): Xaa is A or G
  MOD_RES (21), (22), (23), (24): Xaa is A or G or is absent
XXAPTKLSPISVLYKXXXXXXXXXLKYHYNMVVR

SEQ ID NO: 9748 - protein, 40 aa, Artificial Sequence
  GFR-binding peptide
  MOD_RES (4), (5), (39): Xaa is C or S
  MOD_RES (19), (20), (21), (22), (23): Xaa is A or G
  MOD_RES (24), (25), (26), (27): Xaa is A or G or is absent
PKAXXVPTELSAISMLYLXXXXXXXXXLKNYQDMVVEGXG

SEQ ID NO: 9749 - protein, 37 aa, Artificial Sequence
  GFR-binding peptide
  MOD_RES (3), (4), (37): Xaa is C or S
  MOD_RES (18), (19), (20), (21), (22): Xaa is A or G
  MOD_RES (23), (24), (25), (26): Xaa is A or G or is absent
SPXXVPQDLSPISILYKXXXXXXXXXLKYHYMVVKSX

SEQ ID NO: 9750 - protein, 38 aa, Artificial Sequence
  GFR-binding peptide
  MOD_RES (6), (38): Xaa is C or S
VTKPTXAPTKLSATSVLYYDDSSNVILRKHRNMVVRSX

SEQ ID NO: 9751 - protein, 36 aa, Artificial Sequence
  GFR-binding peptide
  MOD_RES (34), (36): Xaa is C or S
  MOD_RES (14), (15), (16), (17), (18): Xaa is A or G
  MOD_RES (19), (20), (21), (22): Xaa is A or G or is absent
VPTELSPISMLYKXXXXXXXXXLKYHYDMVVEGXGX

SEQ ID NO: 9752 - protein, 40 aa, Artificial Sequence
  GFR-binding peptide
  MOD_RES (6), (7), (39): Xaa is C or S
AVPKAXXAPTKLSAISVLYLDSSNNVILKNYQNMVVKAXG

SEQ ID NO: 9753 - protein, 36 aa, Artificial Sequence
  GFR-binding peptide
  MOD_RES (1), (34), (36): Xaa is C or S
XVPTKLSAISVLYLDDMGVPTLKNYQEGMSVAEXGX

SEQ ID NO: 9754 - protein, 35 aa, Artificial Sequence
  GFR-binding peptide
  MOD_RES (1), (2), (34): Xaa is C or S
XXAPTQLSAISVLYLDDSSNVILKNYQNMVVRAXG

SEQ ID NO: 9755 - protein, 39 aa, Artificial Sequence
  GFR-binding peptide
  MOD_RES (3), (4), (36), (38): Xaa is C or S
KPXXAPTKLSAISVLYLDDSSNVILKNYQNMVVRSXGXH

SEQ ID NO: 9756 - protein, 38 aa, Artificial Sequence
  GFR-binding peptide
  MOD_RES (1), (35), (37): Xaa is C or S
  MOD_RES (15), (16), (17), (18), (19): Xaa is A or G
  MOD_RES (20), (21), (22), (23): Xaa is A or G or is absent
XVPTELNAISMLYFXXXXXXXXXLKKYRDMVVEGXGXR

SEQ ID NO: 9757 - protein, 37 aa, Artificial Sequence
  GFR-binding peptide
  MOD_RES (1), (34), (36): Xaa is C or S
  MOD_RES (15), (16), (17), (18), (19): Xaa is A or G
  MOD_RES (20), (21), (22), (23): Xaa is A or G or is absent
XVSQDLSPISILYKXXXXXXXXXLKYHYMIVKSXKXS

SEQ ID NO: 9758 - protein, 32 aa, Artificial Sequence
  GFR-binding peptide
  MOD_RES (1), (1): Xaa is C or S
XAPTKLSAISVLYLDSSNNVILKNYQNMVVKA

SEQ ID NO: 9759 - protein, 34 aa, Artificial Sequence
  GFR-binding peptide
  MOD_RES (34), (34): Xaa is C or S
  MOD_RES (14), (15), (16), (17), (18): Xaa is A or G
  MOD_RES (19), (20), (21), (22): Xaa is A or G or is absent
APTKLSATSVLYYXXXXXXXXXLRKHRNMVVKAX

SEQ ID NO: 9760 - protein, 36 aa, Artificial Sequence
  GFR-binding peptide
  MOD_RES (6), (6): Xaa is C or S
VTKPTXAPTKLSPISVLYKDDSSNVILKYHYNMVVR

SEQ ID NO: 9761 - protein, 40 aa, Artificial Sequence
  GFR-binding peptide
  MOD_RES (4), (5), (37), (39): Xaa is C or S
PKPXXAPTKLSATSVLYYDDSSNVILRKHRNMVVRSXGXH

SEQ ID NO: 9762 - protein, 39 aa, Artificial Sequence
  GFR-binding peptide
  MOD_RES (2), (3), (37), (39): Xaa is C or S
  MOD_RES (17), (18), (19), (20), (21): Xaa is A or G
  MOD_RES (22), (23), (24), (25): Xaa is A or G or is absent
AXXAPTKLSATSVLYYXXXXXXXXXLRKHRNMVVKAXGX

SEQ ID NO: 9763 - protein, 41 aa, Artificial Sequence
  GFR-binding peptide
  MOD_RES (5), (6), (39), (41): Xaa is C or S
  MOD_RES (20), (21), (22), (23), (24): Xaa is A or G
  MOD_RES (25), (26), (27), (28): Xaa is A or G or is absent
SASPXXVPQDLSATSILYYXXXXXXXXXLRKHRMVVKSXKX

SEQ ID NO: 9764 - protein, 37 aa, Artificial Sequence
  GFR-binding peptide
  MOD_RES (3), (4), (35), (37): Xaa is C or S
SPXXVPQDLSAISILYLVGRTPKVLKNYQMVVKSXKX

SEQ ID NO: 9765 - protein, 41 aa, Artificial Sequence
  GFR-binding peptide
  MOD_RES (2), (39), (41): Xaa is C or S
QXRPTQVQLNAISVLYFEIVRKKPIFLKKYRTLEDHLAXKX

SEQ ID NO: 9766 - protein, 38 aa, Artificial Sequence
  GFR-binding peptide
  MOD_RES (1), (36), (38): Xaa is C or S
  MOD_RES (15), (16), (17), (18), (19): Xaa is A or G
  MOD_RES (20), (21), (22), (23): Xaa is A or G or is absent
XVPTKLSAISVLYLXXXXXXXXXLKNYQEGMSVAEXGX

SEQ ID NO: 9767 - protein, 35 aa, Artificial Sequence
  GFR-binding peptide
  MOD_RES (1), (2): Xaa is C or S
  MOD_RES (16), (17), (18), (19), (20): Xaa is A or G
  MOD_RES (21), (22), (23), (24): Xaa is A or G or is absent
XXAPTKLNAISVLYFXXXXXXXXXLKKYRNMVVRS

SEQ ID NO: 9768 - protein, 36 aa, Artificial Sequence
  GFR-binding peptide
  MOD_RES (2), (3), (35): Xaa is C or S
AXXAPTKLSPISVLYKDSSNNVILKYHYNMVVKAXG

SEQ ID NO: 9769 - protein, 39 aa, Artificial Sequence
  GFR-binding peptide
  MOD_RES (3), (4), (38): Xaa is C or S
  MOD_RES (18), (19), (20), (21), (22): Xaa is A or G
  MOD_RES (23), (24), (25), (26): Xaa is A or G or is absent
KAXXAPTKLSAISVLYLXXXXXXXXXLKNYQNMVVKAXG

SEQ ID NO: 9770 - protein, 35 aa, Artificial Sequence
  GFR-binding peptide
  MOD_RES (1), (32), (34): Xaa is C or S
XVSQDLNAISILYFIGKTPKILKKYRMIVKSXKXS

SEQ ID NO: 9771 - protein, 36 aa, Artificial Sequence
  GFR-binding peptide
  MOD_RES (2), (3), (36): Xaa is C or S
  MOD_RES (17), (18), (19), (20), (21): Xaa is A or G
  MOD_RES (22), (23), (24), (25): Xaa is A or G or is absent
PXXVSQDLSPISILYKXXXXXXXXXLKYHYMIVKSX

SEQ ID NO: 9772 - protein, 36 aa, Artificial Sequence
  GFR-binding peptide
  MOD_RES (1), (2), (36): Xaa is C or S
  MOD_RES (16), (17), (18), (19), (20): Xaa is A or G
  MOD_RES (21), (22), (23), (24): Xaa is A or G or is absent
XXAPTKLSPISVLYKXXXXXXXXXLKYHYNMVVRSX

SEQ ID NO: 9773 - protein, 39 aa, Artificial Sequence
  GFR-binding peptide
  MOD_RES (3), (4), (36), (38): Xaa is C or S
KAXXAPTKLSPISVLYKDSSNNVILKYHYNMVVKAXGXH

SEQ ID NO: 9774 - protein, 34 aa, Artificial Sequence
  GFR-binding peptide
  MOD_RES (15), (16), (17), (18), (19): Xaa is A or G
  MOD_RES (20), (21), (22), (23): Xaa is A or G or is absent
PTQVQLNAISVLYFXXXXXXXXXLKKYRTLEDHL

SEQ ID NO: 9775 - protein, 33 aa, Artificial Sequence
  GFR-binding peptide
  MOD_RES (2), (3): Xaa is C or S
AXXVPTELNAISMLYFDEYDKVVLKKYREMVVE

SEQ ID NO: 9776 - protein, 33 aa, Artificial Sequence
  GFR-binding peptide
  MOD_RES (1), (32): Xaa is C or S
XVPQDLSAISILYLVGRTPKVLKNYQMVVKSXK

SEQ ID NO: 9777 - protein, 38 aa, Artificial Sequence; identical to SEQ ID NO: 2269
  GFR-binding peptide
  MOD_RES (32), (33): Xaa is C or S

SEQ ID NO: 9778 - protein, 43 aa, Artificial Sequence; identical to SEQ ID NO: 2270
  GFR-binding peptide
  MOD_RES (2), (4), (38), (39): Xaa is C or S
  MOD_RES (16), (17), (18), (19), (20): Xaa is A or G
  MOD_RES (21), (22), (23), (24): Xaa is A or G or is absent

SEQ ID NO: 9779 - protein, 35 aa, Artificial Sequence; identical to SEQ ID NO: 2271
  GFR-binding peptide
  MOD_RES (2), (4): Xaa is C or S

SEQ ID NO: 9780 - protein, 36 aa, Artificial Sequence
  GFR-binding peptide
  MOD_RES (2), (4), (36): Xaa is C or S
HXGXSRVVMNNSLQEIVNSSDDYYVVPLPELKTPAX

SEQ ID NO: 9781 - protein, 40 aa, Artificial Sequence; identical to SEQ ID NO: 2275
  GFR-binding peptide
  MOD_RES (1), (3), (36), (37): Xaa is C or S
  MOD_RES (14), (15), (16), (17), (18): Xaa is A or G
  MOD_RES (19), (20), (21), (22): Xaa is A or G or is absent

SEQ ID NO: 9782 - protein, 33 aa, Artificial Sequence; identical to SEQ ID NO: 2277
  GFR-binding peptide
  MOD_RES (2), (2): Xaa is C or S

SEQ ID NO: 9783 - protein, 38 aa, Artificial Sequence; identical to SEQ ID NO: 2279
  GFR-binding peptide
  MOD_RES (1), (3), (37), (38): Xaa is C or S
  MOD_RES (15), (16), (17), (18), (19): Xaa is A or G
  MOD_RES (20), (21), (22), (23): Xaa is A or G or is absent

SEQ ID NO: 9784 - protein, 35 aa, Artificial Sequence
  GFR-binding peptide
  MOD_RES (1), (33), (34): Xaa is C or S
XGEVVMENSLQEVVKDYEDYYVMPLPELETPVXXA

SEQ ID NO: 9785 - protein, 34 aa, Artificial Sequence
  GFR-binding peptide
  MOD_RES (2), (34): Xaa is C or S
GXARVVMNNSLQEIVNSSDDYYLVTLPELQTPAX

SEQ ID NO: 9786 - protein, 40 aa, Artificial Sequence
  GFR-binding peptide
  MOD_RES (2), (34), (35): Xaa is C or S
GXGEVVMDNSLQEVVKENEDYYVMPLPELETPVXXAKPIK

SEQ ID NO: 9787 - protein, 38 aa, Artificial Sequence; identical to SEQ ID NO: 2284
  GFR-binding peptide
  MOD_RES (1), (3), (34), (35): Xaa is C or S

SEQ ID NO: 9788 - protein, 39 aa, Artificial Sequence
  GFR-binding peptide
  MOD_RES (1), (3), (37), (38): Xaa is C or S
  MOD_RES (15), (16), (17), (18), (19): Xaa is A or G
  MOD_RES (20), (21), (22), (23): Xaa is A or G or is absent
XGXSEVVMDEYQKYXXXXXXXXXIFLISIPSLRTPVXXT

SEQ ID NO: 9789 - protein, 35 aa, Artificial Sequence
  GFR-binding peptide
  MOD_RES (1), (33), (34): Xaa is C or S
XSRVVMNEYQKYIVNSSDDIFLVSIPSLKTPAXXP

SEQ ID NO: 9790 - protein, 36 aa, Artificial Sequence
  GFR-binding peptide
  MOD_RES (1), (35), (36): Xaa is C or S
  MOD_RES (13), (14), (15), (16), (17): Xaa is A or G
  MOD_RES (18), (19), (20), (21): Xaa is A or G or is absent
XGEVVMDNSLQEXXXXXXXXXYYVMPLPELETPVXX

SEQ ID NO: 9791 - protein, 41 aa, Artificial Sequence
  GFR-binding peptide
  MOD_RES (1), (3), (37), (38): Xaa is C or S
  MOD_RES (15), (16), (17), (18), (19): Xaa is A or G
  MOD_RES (20), (21), (22), (23): Xaa is A or G or is absent
XGXGEVVMENSLQEXXXXXXXXXYYVMPLPELETPVXXAKP

SEQ ID NO: 9792 - protein, 35 aa, Artificial Sequence; identical to SEQ ID NO: 2288
  GFR-binding peptide
  MOD_RES (31), (32): Xaa is C or S

SEQ ID NO: 9793 - protein, 42 aa, Artificial Sequence
  GFR-binding peptide
  MOD_RES (1), (3), (36), (37): Xaa is C or S
  MOD_RES (14), (15), (16), (17), (18): Xaa is A or G
  MOD_RES (19), (20), (21), (22): Xaa is A or G or is absent
XKXSKVVMNSLQEXXXXXXXXXYYLITLPELDQPVXXPSASA

SEQ ID NO: 9794 - protein, 30 aa, Artificial Sequence; identical to SEQ ID NO: 2292
  GFR-binding peptide

SEQ ID NO: 9795 - protein, 42 aa, Artificial Sequence; identical to SEQ ID NO: 2293
  GFR-binding peptide
  MOD_RES (2), (4), (36), (37): Xaa is C or S

SEQ ID NO: 9796 - protein, 35 aa, Artificial Sequence
  GFR-binding peptide
  MOD_RES (1), (33), (34): Xaa is C or S
XSEVVMDNSLQEVVNNASDYYVIPLPELRTPVXXT

SEQ ID NO: 9797 - protein, 35 aa, Artificial Sequence
  GFR-binding peptide
  MOD_RES (2), (34), (35): Xaa is C or S
GXGEVVMENSLQEVVKDYEDYYVMPLPELETPVXX

SEQ ID NO: 9798 - protein, 32 aa, Artificial Sequence; identical to SEQ ID NO: 2297
  GFR-binding peptide
  MOD_RES (11), (12), (13), (14), (15): Xaa is A or G
  MOD_RES (16), (17), (18), (19): Xaa is A or G or is absent

SEQ ID NO: 9799 - protein, 38 aa, Artificial Sequence; identical to SEQ ID NO: 2298
  GFR-binding peptide
  MOD_RES (1), (35), (36): Xaa is C or S
  MOD_RES (13), (14), (15), (16), (17): Xaa is A or G
  MOD_RES (18), (19), (20), (21): Xaa is A or G or is absent

SEQ ID NO: 9800 - protein, 33 aa, Artificial Sequence
  GFR-binding peptide
  MOD_RES (12), (13), (14), (15), (16): Xaa is A or G
  MOD_RES (17), (18), (19), (20): Xaa is A or G or is absent
GEVVMDNSLQEXXXXXXXXXYYVMPLPELETPV

SEQ ID NO: 9801 - protein, 39 aa, Artificial Sequence; identical to SEQ ID NO: 2299
  GFR-binding peptide
  MOD_RES (1), (3), (35), (36): Xaa is C or S

SEQ ID NO: 9802 - protein, 35 aa, Artificial Sequence; identical to SEQ ID NO: 2300
  GFR-binding peptide
  MOD_RES (1), (32), (33): Xaa is C or S

SEQ ID NO: 9803 - protein, 39 aa, Artificial Sequence
  GFR-binding peptide
  MOD_RES (1), (3), (34), (35): Xaa is C or S
XKXSKVVMNSLQEVKPTRGVYYLITLPELDQPVXXPSAS

SEQ ID NO: 9804 - protein, 40 aa, Artificial Sequence; identical to SEQ ID NO: 2303
  GFR-binding peptide
  MOD_RES (1), (3), (36), (37): Xaa is C or S
  MOD_RES (14), (15), (16), (17), (18): Xaa is A or G
  MOD_RES (19), (20), (21), (22): Xaa is A or G or is absent

SEQ ID NO: 9805 - protein, 39 aa, Artificial Sequence
  GFR-binding peptide
  MOD_RES (1), (3), (37): Xaa is C or S
  MOD_RES (15), (16), (17), (18), (19): Xaa is A or G
  MOD_RES (20), (21), (22), (23): Xaa is A or G or is absent
XGXSRVVMNNSLQEXXXXXXXXXYYLVTLPELKTPAXTP

SEQ ID NO: 9806 - protein, 34 aa, Artificial Sequence; identical to SEQ ID NO: 2305
  GFR-binding peptide
  MOD_RES (2), (2): Xaa is C or S
  MOD_RES (13), (14), (15), (16), (17): Xaa is A or G
  MOD_RES (18), (19), (20), (21): Xaa is A or G or is absent

SEQ ID NO: 9807 - protein, 37 aa, Artificial Sequence
  GFR-binding peptide
  MOD_RES (1), (34), (35): Xaa is C or S
  MOD_RES (12), (13), (14), (15), (16): Xaa is A or G
  MOD_RES (17), (18), (19), (20): Xaa is A or G or is absent
XSKVIMEYQKYXXXXXXXXXIFLISIPSLDQSVXXPS

SEQ ID NO: 9808 - protein, 36 aa, Artificial Sequence
  GFR-binding peptide
  MOD_RES (2), (36): Xaa is C or S
  MOD_RES (14), (15), (16), (17), (18): Xaa is A or G
  MOD_RES (19), (20), (21), (22): Xaa is A or G or is absent
GXSEVVMDRYKKLXXXXXXXXXFYLISIANLRTPVX

SEQ ID NO: 9809 - protein, 37 aa, Artificial Sequence
  GFR-binding peptide
  MOD_RES (32), (33): Xaa is C or S
GEVVMENSLQEVVKDYEDYYLMTLPELETPVXXAKPI

SEQ ID NO: 9810 - protein, 37 aa, Artificial Sequence; identical to SEQ ID NO: 2310
  GFR-binding peptide
  MOD_RES (31), (32): Xaa is C or S

SEQ ID NO: 9811 - protein, 33 aa, Artificial Sequence
  GFR-binding peptide
  MOD_RES (2), (2): Xaa is C or S
GXSEVVMDEYQKYVVNNASDIFLISIPSLRTPV

SEQ ID NO: 9812 - protein, 44 aa, Artificial Sequence; identical to SEQ ID NO: 2311
  GFR-binding peptide
  MOD_RES (2), (4), (38), (39): Xaa is C or S
  MOD_RES (16), (17), (18), (19), (20): Xaa is A or G
  MOD_RES (21), (22), (23), (24): Xaa is A or G or is absent

SEQ ID NO: 9813 - protein, 36 aa, Artificial Sequence
  GFR-binding peptide
  MOD_RES (33), (34): Xaa is C or S
  MOD_RES (11), (12), (13), (14), (15): Xaa is A or G
  MOD_RES (16), (17), (18), (19): Xaa is A or G or is absent
SRVIMNSLQEXXXXXXXXXYYLITLPELAQPVXXPA

SEQ ID NO: 9814 - protein, 35 aa, Artificial Sequence
  GFR-binding peptide
  MOD_RES (31), (32): Xaa is C or S
EVVMDNSLQEVVNNASDYYLITLPELRTPVXXTPP

SEQ ID NO: 9815 - protein, 41 aa, Artificial Sequence
  GFR-binding peptide
  MOD_RES (1), (3), (36), (37): Xaa is C or S
  MOD_RES (14), (15), (16), (17), (18): Xaa is A or G
  MOD_RES (19), (20), (21), (22): Xaa is A or G or is absent
XKXSKVVMNSLQEXXXXXXXXXYYVIPLPELDQPVXXPSAS

SEQ ID NO: 9816 - protein, 38 aa, Artificial Sequence; identical to SEQ ID NO: 2316
  GFR-binding peptide
  MOD_RES (32), (32): Xaa is C or S

SEQ ID NO: 9817 - protein, 39 aa, Artificial Sequence
  GFR-binding peptide
  MOD_RES (1), (3), (36), (37): Xaa is C or S
  MOD_RES (14), (15), (16), (17), (18): Xaa is A or G
  MOD_RES (19), (20), (21), (22): Xaa is A or G or is absent
XKXSKVIMNSLQEXXXXXXXXXYYVIPLPELDQSVXXPS

SEQ ID NO: 9818 - protein, 33 aa, Artificial Sequence
  GFR-binding peptide
  MOD_RES (2), (2): Xaa is C or S
GXSRVVMNEYQKYIVNSSDDIFLVSIPSLKTPA

SEQ ID NO: 9819 - protein, 37 aa, Artificial Sequence
  GFR-binding peptide
  MOD_RES (1), (33), (34): Xaa is C or S
XSEVVMDNSLQEVVNNASDYYVIPLPELRTPVXXTPP

SEQ ID NO: 9820 - protein, 32 aa, Artificial Sequence; identical to SEQ ID NO: 2327
  GFR-binding peptide
  MOD_RES (31), (32): Xaa is C or S

SEQ ID NO: 9821 - protein, 41 aa, Artificial Sequence
  GFR-binding peptide
  MOD_RES (1), (3), (35), (36): Xaa is C or S
XGXSEVVMDQYNKLVVNNASDLYLISIASLRTPVXXTPPTS

SEQ ID NO: 9822 - protein, 35 aa, Artificial Sequence; identical to SEQ ID NO: 2332
  GFR-binding peptide
  MOD_RES (2), (4), (35): Xaa is C or S

SEQ ID NO: 9823 - protein, 36 aa, Artificial Sequence
  GFR-binding peptide
  MOD_RES (1), (3): Xaa is C or S
  MOD_RES (15), (16), (17), (18), (19): Xaa is A or G
  MOD_RES (20), (21), (22), (23): Xaa is A or G or is absent
XGXGEVVMENSLQEXXXXXXXXXYYVMPLPELETPV

SEQ ID NO: 9824 - protein, 38 aa, Artificial Sequence
  GFR-binding peptide
  MOD_RES (2), (4), (38): Xaa is C or S
  MOD_RES (16), (17), (18), (19), (20): Xaa is A or G
  MOD_RES (21), (22), (23), (24): Xaa is A or G or is absent
HXGXSRVVMNNSLQEXXXXXXXXXYYLVTLPELKTPAX

SEQ ID NO: 9825 - protein, 40 aa, Artificial Sequence
  GFR-binding peptide
  MOD_RES (1), (3), (34), (35): Xaa is C or S
XKXSKVVMEYQKYVKPTRGVIFLISIPSLDQPVXXPSASA

SEQ ID NO: 9826 - protein, 39 aa, Artificial Sequence; identical to SEQ ID NO: 2336
  GFR-binding peptide
  MOD_RES (2), (35), (36): Xaa is C or S
  MOD_RES (13), (14), (15), (16), (17): Xaa is A or G
  MOD_RES (18), (19), (20), (21): Xaa is A or G or is absent

SEQ ID NO: 9827 - protein, 35 aa, Artificial Sequence
  GFR-binding peptide
  MOD_RES (2), (4): Xaa is C or S
HXGXSRVVMNNSLQEIVNSSDDYYVVPLPELKTPA

SEQ ID NO: 9828 - protein, 39 aa, Artificial Sequence; identical to SEQ ID NO: 2338
  GFR-binding peptide
  MOD_RES (2), (36), (37): Xaa is C or S
  MOD_RES (14), (15), (16), (17), (18): Xaa is A or G
  MOD_RES (19), (20), (21), (22): Xaa is A or G or is absent

SEQ ID NO: 9829 - protein, 34 aa, Artificial Sequence
  GFR-binding peptide
  MOD_RES (1), (1): Xaa is C or S
  MOD_RES (13), (14), (15), (16), (17): Xaa is A or G
  MOD_RES (18), (19), (20), (21): Xaa is A or G or is absent
XARVVMNEYQKYXXXXXXXXXIFLVSIPSLQTPA

SEQ ID NO: 9830 - protein, 38 aa, Artificial Sequence
  GFR-binding peptide
  MOD_RES (33), (34): Xaa is C or S
  MOD_RES (11), (12), (13), (14), (15): Xaa is A or G
  MOD_RES (16), (17), (18), (19): Xaa is A or G or is absent
EVVMENSLQEXXXXXXXXXYYLMTLPELETPVXXAKPI

SEQ ID NO: 9831 - protein, 31 aa, Artificial Sequence
  GFR-binding peptide
SRVVMNNSLQEIVNSSDDYYVVPLPELKTPA

SEQ ID NO: 9832 - protein, 40 aa, Artificial Sequence
  GFR-binding peptide
  MOD_RES (2), (36), (37): Xaa is C or S
  MOD_RES (14), (15), (16), (17), (18): Xaa is A or G
  MOD_RES (19), (20), (21), (22): Xaa is A or G or is absent
GXGEVVMDEYQKYXXXXXXXXXIFLMSIPSLETPVXXAKP

SEQ ID NO: 9833 - protein, 37 aa, Artificial Sequence; identical to SEQ ID NO: 2340
  GFR-binding peptide
  MOD_RES (1), (33), (34): Xaa is C or S

SEQ ID NO: 9834 - protein, 32 aa, Artificial Sequence
  GFR-binding peptide
  MOD_RES (1), (1): Xaa is C or S
XARVVMNNSLQEIVNSSDDYYLVTLPELQTPA

SEQ ID NO: 9835 - protein, 41 aa, Artificial Sequence
  GFR-binding peptide
  MOD_RES (2), (4), (38), (39): Xaa is C or S
  MOD_RES (16), (17), (18), (19), (20): Xaa is A or G
  MOD_RES (21), (22), (23), (24): Xaa is A or G or is absent
HXGXARVVMNNSLQEXXXXXXXXXYYVVPLPELQTPAXXPK

SEQ ID NO: 9836 - protein, 35 aa, Artificial Sequence
  GFR-binding peptide
  MOD_RES (31), (32): Xaa is C or S
EVVMDNSLQEVVKENEDYYLMTLPELETPVXXAKP

SEQ ID NO: 9837 - protein, 41 aa, Artificial Sequence; identical to SEQ ID NO: 2343
  GFR-binding peptide
  MOD_RES (1), (3), (37): Xaa is C or S
  MOD_RES (15), (16), (17), (18), (19): Xaa is A or G
  MOD_RES (20), (21), (22), (23): Xaa is A or G or is absent

SEQ ID NO: 9838 - protein, 42 aa, Artificial Sequence
  GFR-binding peptide
  MOD_RES (2), (4), (37), (38): Xaa is C or S
  MOD_RES (15), (16), (17), (18), (19): Xaa is A or G
  MOD_RES (20), (21), (22), (23): Xaa is A or G or is absent
SXKXSKVIMNSLQEXXXXXXXXXYYVIPLPELDQSVXXPSAS

SEQ ID NO: 9839 - protein, 36 aa, Artificial Sequence
  GFR-binding peptide
  MOD_RES (1), (3), (36): Xaa is C or S
  MOD_RES (14), (15), (16), (17), (18): Xaa is A or G
  MOD_RES (19), (20), (21), (22): Xaa is A or G or is absent
XKXSRVIMEYQKYXXXXXXXXXIFLISIPSLAQPVX

SEQ ID NO: 9840 - protein, 34 aa, Artificial Sequence; identical to SEQ ID NO: 2344
  GFR-binding peptide
  MOD_RES (31), (32): Xaa is C or S

SEQ ID NO: 9841 - protein, 37 aa, Artificial Sequence
  GFR-binding peptide
  MOD_RES (1), (3), (37): Xaa is C or S
  MOD_RES (15), (16), (17), (18), (19): Xaa is A or G
  MOD_RES (20), (21), (22), (23): Xaa is A or G or is absent
XGXSEVVMDNSLQEXXXXXXXXXYYVIPLPELRTPVX

SEQ ID NO: 9842 - protein, 36 aa, Artificial Sequence
  GFR-binding peptide
  MOD_RES (1), (33), (34): Xaa is C or S
XSEVVMDNSLQEVVNNASDYYLITLPELRTPVXXTP

SEQ ID NO: 9843 - protein, 37 aa, Artificial Sequence
  GFR-binding peptide
  MOD_RES (2), (36), (37): Xaa is C or S
  MOD_RES (14), (15), (16), (17), (18): Xaa is A or G
  MOD_RES (19), (20), (21), (22): Xaa is A or G or is absent
GXSRVVMNNSLQEXXXXXXXXXYYVVPLPELKTPAXX

SEQ ID NO: 9844 - protein, 38 aa, Artificial Sequence; identical to SEQ ID NO: 2349
  GFR-binding peptide
  MOD_RES (34), (35): Xaa is C or S
  MOD_RES (12), (13), (14), (15), (16): Xaa is A or G
  MOD_RES (17), (18), (19), (20): Xaa is A or G or is absent

SEQ ID NO: 9845 - protein, 39 aa, Artificial Sequence; identical to SEQ ID NO: 2350
  GFR-binding peptide
  MOD_RES (2), (4), (36), (37): Xaa is C or S

SEQ ID NO: 9846 - protein, 38 aa, Artificial Sequence; identical to SEQ ID NO: 2351
  GFR-binding peptide
  MOD_RES (1), (3), (35), (36): Xaa is C or S

SEQ ID NO: 9847 - protein, 39 aa, Artificial Sequence
  GFR-binding peptide
  MOD_RES (2), (4), (38): Xaa is C or S
  MOD_RES (16), (17), (18), (19), (20): Xaa is A or G
  MOD_RES (21), (22), (23), (24): Xaa is A or G or is absent
HXGXSRVVMNNSLQEXXXXXXXXXYYLVTLPELKTPAXT

SEQ ID NO: 9848 - protein, 34 aa, Artificial Sequence; identical to SEQ ID NO: 2356
  GFR-binding peptide
  MOD_RES (1), (34): Xaa is C or S
  MOD_RES (12), (13), (14), (15), (16): Xaa is A or G
  MOD_RES (17), (18), (19), (20): Xaa is A or G or is absent

SEQ ID NO: 9849 - protein, 43 aa, Artificial Sequence; identical to SEQ ID NO: 2357
  GFR-binding peptide
  MOD_RES (2), (4), (38), (39): Xaa is C or S
  MOD_RES (16), (17), (18), (19), (20): Xaa is A or G
  MOD_RES (21), (22), (23), (24): Xaa is A or G or is absent

SEQ ID NO: 9850 - protein, 37 aa, Artificial Sequence
  GFR-binding peptide
  MOD_RES (2), (4): Xaa is C or S
  MOD_RES (16), (17), (18), (19), (20): Xaa is A or G
  MOD_RES (21), (22), (23), (24): Xaa is A or G or is absent
HXGXSRVVMNNSLQEXXXXXXXXXYYLVTLPELKTPA

SEQ ID NO: 9851 - protein, 33 aa, Artificial Sequence; identical to SEQ ID NO: 2358
  GFR-binding peptide
  MOD_RES (33), (33): Xaa is C or S
  MOD_RES (11), (12), (13), (14), (15): Xaa is A or G
  MOD_RES (16), (17), (18), (19): Xaa is A or G or is absent

SEQ ID NO: 9852 - protein, 38 aa, Artificial Sequence; identical to SEQ ID NO: 2359
  GFR-binding peptide
  MOD_RES (1), (34), (35): Xaa is C or S
  MOD_RES (12), (13), (14), (15), (16): Xaa is A or G
  MOD_RES (17), (18), (19), (20): Xaa is A or G or is absent

SEQ ID NO: 9853 - protein, 41 aa, Artificial Sequence
  GFR-binding peptide
  MOD_RES (2), (4), (36), (37): Xaa is C or S
RXGXGEVVMDEYQKYVVKENEDIFLMSIPSLETPVXXAKPI

SEQ ID NO: 9854 - protein, 37 aa, Artificial Sequence; identical to SEQ ID NO: 2360
  GFR-binding peptide
  MOD_RES (1), (3), (37): Xaa is C or S
  MOD_RES (15), (16), (17), (18), (19): Xaa is A or G
  MOD_RES (20), (21), (22), (23): Xaa is A or G or is absent

SEQ ID NO: 9855 - protein, 38 aa, Artificial Sequence
  GFR-binding peptide
  MOD_RES (2), (33), (34): Xaa is C or S
KXSKVVMNSLQEVKPTRGVYYLITLPELDQPVXXPSAS

SEQ ID NO: 9856 - protein, 34 aa, Artificial Sequence; identical to SEQ ID NO: 2362
  GFR-binding peptide
  MOD_RES (1), (33), (34): Xaa is C or S

SEQ ID NO: 9857 - protein, 39 aa, Artificial Sequence; identical to SEQ ID NO: 2363
  GFR-binding peptide
  MOD_RES (33), (34): Xaa is C or S
  MOD_RES (11), (12), (13), (14), (15): Xaa is A or G
  MOD_RES (16), (17), (18), (19): Xaa is A or G or is absent

SEQ ID NO: 9858 - protein, 40 aa, Artificial Sequence
  GFR-binding peptide
  MOD_RES (1), (35), (36): Xaa is C or S
  MOD_RES (13), (14), (15), (16), (17): Xaa is A or G
  MOD_RES (18), (19), (20), (21): Xaa is A or G or is absent
XGEVVMEEYQKYXXXXXXXXXIFLMSIPSLETPVXXAKPI

SEQ ID NO: 9859 - protein, 41 aa, Artificial Sequence; identical to SEQ ID NO: 2364
  GFR-binding peptide
  MOD_RES (2), (4), (37), (38): Xaa is C or S
  MOD_RES (15), (16), (17), (18), (19): Xaa is A or G
  MOD_RES (20), (21), (22), (23): Xaa is A or G or is absent

SEQ ID NO: 9860 - protein, 32 aa, Artificial Sequence
  GFR-binding peptide
  MOD_RES (31), (32): Xaa is C or S
RVVMNEYQKYIVNSSDDIFLVSIPSLKTPAXX

SEQ ID NO: 9861 - protein, 35 aa, Artificial Sequence; identical to SEQ ID NO: 2367
  GFR-binding peptide
  MOD_RES (34), (35): Xaa is C or S
  MOD_RES (12), (13), (14), (15), (16): Xaa is A or G
  MOD_RES (17), (18), (19), (20): Xaa is A or G or is absent

SEQ ID NO: 9862 - protein, 40 aa, Artificial Sequence
  GFR-binding peptide
  MOD_RES (2), (4), (35), (36): Xaa is C or S
SXKXSRVIMEYQKYVKPKRGVIFLISIPSLAQPVXXPAAS

SEQ ID NO: 9863 - protein, 34 aa, Artificial Sequence; identical to SEQ ID NO: 2368
  GFR-binding peptide
  MOD_RES (32), (33): Xaa is C or S

SEQ ID NO: 9864 - protein, 42 aa, Artificial Sequence
  GFR-binding peptide
  MOD_RES (2), (4), (38): Xaa is C or S
  MOD_RES (16), (17), (18), (19), (20): Xaa is A or G
  MOD_RES (21), (22), (23), (24): Xaa is A or G or is absent
HXGXSRVVMNEYQKYXXXXXXXXXIFLVSIPSLKTPAXTPKT

SEQ ID NO: 9865 - protein, 36 aa, Artificial Sequence
  GFR-binding peptide
  MOD_RES (1), (34), (35): Xaa is C or S
  MOD_RES (12), (13), (14), (15), (16): Xaa is A or G
  MOD_RES (17), (18), (19), (20): Xaa is A or G or is absent
XSRVIMEYQKYXXXXXXXXXIFLISIPSLAQPVXXP

SEQ ID NO: 9866 - protein, 32 aa, Artificial Sequence
  GFR-binding peptide
  MOD_RES (32), (32): Xaa is C or S
GEVVMENSLQEVVKDYEDYYLMTLPELETPVX

SEQ ID NO: 9867 - protein, 39 aa, Artificial Sequence
  GFR-binding peptide
  MOD_RES (1), (3), (35), (36): Xaa is C or S
XGXSRVVMNNSLQEIVNSSDDYYLVTLPELKTPAXXPKP

SEQ ID NO: 9868 - protein, 37 aa, Artificial Sequence; identical to SEQ ID NO: 2377
  GFR-binding peptide
  MOD_RES (1), (33), (34): Xaa is C or S

SEQ ID NO: 9869 - protein, 42 aa, Artificial Sequence; identical to SEQ ID NO: 2379
  GFR-binding peptide
  MOD_RES (2), (4), (38), (39): Xaa is C or S
  MOD_RES (16), (17), (18), (19), (20): Xaa is A or G
  MOD_RES (21), (22), (23), (24): Xaa is A or G or is absent

SEQ ID NO: 9870 - protein, 38 aa, Artificial Sequence; identical to SEQ ID NO: 2382
  GFR-binding peptide
  MOD_RES (1), (3), (37), (38): Xaa is C or S
  MOD_RES (15), (16), (17), (18), (19): Xaa is A or G
  MOD_RES (20), (21), (22), (23): Xaa is A or G or is absent

SEQ ID NO: 9871 - protein, 38 aa, Artificial Sequence
  GFR-binding peptide
  MOD_RES (1), (35): Xaa is C or S
  MOD_RES (13), (14), (15), (16), (17): Xaa is A or G
  MOD_RES (18), (19), (20), (21): Xaa is A or G or is absent
XSRVVMNNSLQEXXXXXXXXXYYLVTLPELKTPAXTPK

SEQ ID NO: 9872 - protein, 43 aa, Artificial Sequence
  GFR-binding peptide
  MOD_RES (2), (4), (37), (38): Xaa is C or S
  MOD_RES (15), (16), (17), (18), (19): Xaa is A or G
  MOD_RES (20), (21), (22), (23): Xaa is A or G or is absent
SXKXSRVIMEYQKYXXXXXXXXXIFLISIPSLAQPVXXPAASA

SEQ ID NO: 9873 - protein, 34 aa, Artificial Sequence; identical to SEQ ID NO: 2387
  GFR-binding peptide
  MOD_RES (33), (34): Xaa is C or S
  MOD_RES (11), (12), (13), (14), (15): Xaa is A or G
  MOD_RES (16), (17), (18), (19): Xaa is A or G or is absent

SEQ ID NO: 9874 - protein, 31 aa, Artificial Sequence
  GFR-binding peptide
  MOD_RES (31), (31): Xaa is C or S
RVVMNEYQKYIVNSSDDIFLVSIPSLQTPAX

SEQ ID NO: 9875 - protein, 31 aa, Artificial Sequence
  GFR-binding peptide
  MOD_RES (31), (31): Xaa is C or S
SRVIMNSLQEVKPKRGVYYVIPLPELAQPVX

SEQ ID NO: 9876 - protein, 41 aa, Artificial Sequence
  GFR-binding peptide
  MOD_RES (1), (3), (37), (38): Xaa is C or S
  MOD_RES (15), (16), (17), (18), (19): Xaa is A or G
  MOD_RES (20), (21), (22), (23): Xaa is A or G or is absent
XGXSEVVMDNSLQEXXXXXXXXXYYVIPLPELRTPVXXTPP

SEQ ID NO: 9877 - protein, 39 aa, Artificial Sequence; identical to SEQ ID NO: 2389
  GFR-binding peptide
  MOD_RES (1), (3), (37), (38): Xaa is C or S
  MOD_RES (15), (16), (17), (18), (19): Xaa is A or G
  MOD_RES (20), (21), (22), (23): Xaa is A or G or is absent

SEQ ID NO: 9878 - protein, 35 aa, Artificial Sequence; identical to SEQ ID NO: 2390
  GFR-binding peptide
  MOD_RES (1), (32), (33): Xaa is C or S

SEQ ID NO: 9879 - protein, 32 aa, Artificial Sequence
  GFR-binding peptide
  MOD_RES (31), (32): Xaa is C or S
SRVIMEYQKYVKPKRGVIFLISIPSLAQPVXX

SEQ ID NO: 9880 - protein, 41 aa, Artificial Sequence; identical to SEQ ID NO: 2394
  GFR-binding peptide
  MOD_RES (2), (36), (37): Xaa is C or S
  MOD_RES (14), (15), (16), (17), (18): Xaa is A or G
  MOD_RES (19), (20), (21), (22): Xaa is A or G or is absent

SEQ ID NO: 9881 - protein, 38 aa, Artificial Sequence
  GFR-binding peptide
  MOD_RES (2), (4), (37), (38): Xaa is C or S
  MOD_RES (15), (16), (17), (18), (19): Xaa is A or G
  MOD_RES (20), (21), (22), (23): Xaa is A or G or is absent
SXKXSKVVMNSLQEXXXXXXXXXYYVIPLPELDQPVXX

SEQ ID NO: 9882 - protein, 39 aa, Artificial Sequence
  GFR-binding peptide
  MOD_RES (33), (33): Xaa is C or S
  MOD_RES (11), (12), (13), (14), (15): Xaa is A or G
  MOD_RES (16), (17), (18), (19): Xaa is A or G or is absent
RVVMNNSLQEXXXXXXXXXYYVVPLPELKTPAXTPKTVH

SEQ ID NO: 9883 - protein, 39 aa, Artificial Sequence
  GFR-binding peptide
  MOD_RES (1), (3), (36), (37): Xaa is C or S
  MOD_RES (14), (15), (16), (17), (18): Xaa is A or G
  MOD_RES (19), (20), (21), (22): Xaa is A or G or is absent
XKXSRVIMNSLQEXXXXXXXXXYYVIPLPELAQPVXXPA

SEQ ID NO: 9884 - protein, 35 aa, Artificial Sequence
  GFR-binding peptide
  MOD_RES (33), (34): Xaa is C or S
  MOD_RES (11), (12), (13), (14), (15): Xaa is A or G
  MOD_RES (16), (17), (18), (19): Xaa is A or G or is absent
RVVMNNSLQEXXXXXXXXXYYVVPLPELQTPAXXP

SEQ ID NO: 9885 - protein, 37 aa, Artificial Sequence
  GFR-binding peptide
  MOD_RES (34), (35): Xaa is C or S
  MOD_RES (12), (13), (14), (15), (16): Xaa is A or G
  MOD_RES (17), (18), (19), (20): Xaa is A or G or is absent
ARVVMNNSLQEXXXXXXXXXYYLVTLPELQTPAXXPK

SEQ ID NO: 9886 - protein, 34 aa, Artificial Sequence
  GFR-binding peptide
  MOD_RES (31), (31): Xaa is C or S
RVVMNNSLQEIVNSSDDYYLVTLPELKTPAXTPK

SEQ ID NO: 9887 - protein, 44 aa, Artificial Sequence
  GFR-binding peptide
  MOD_RES (2), (4), (38), (39): Xaa is C or S
  MOD_RES (16), (17), (18), (19), (20): Xaa is A or G
  MOD_RES (21), (22), (23), (24): Xaa is A or G or is absent
HXGXARVVMNEYQKYXXXXXXXXXIFLVSIPSLQTPAXXPKPVT

SEQ ID NO: 9888 - protein, 36 aa, Artificial Sequence; identical to SEQ ID NO: 2398
  GFR-binding peptide
  MOD_RES (1), (34), (35): Xaa is C or S
  MOD_RES (12), (13), (14), (15), (16): Xaa is A or G
  MOD_RES (17), (18), (19), (20): Xaa is A or G or is absent

SEQ ID NO: 9889 - protein, 37 aa, Artificial Sequence; identical to SEQ ID NO: 2399
  GFR-binding peptide
  MOD_RES (1), (3), (37): Xaa is C or S
  MOD_RES (15), (16), (17), (18), (19): Xaa is A or G
  MOD_RES (20), (21), (22), (23): Xaa is A or G or is absent

SEQ ID NO: 9890 - protein, 39 aa, Artificial Sequence
  GFR-binding peptide
  MOD_RES (34), (35): Xaa is C or S
  MOD_RES (12), (13), (14), (15), (16): Xaa is A or G
  MOD_RES (17), (18), (19), (20): Xaa is A or G or is absent
SEVVMDNSLQEXXXXXXXXXYYLITLPELRTPVXXTPPT

SEQ ID NO: 9891 - protein, 42 aa, Artificial Sequence
  GFR-binding peptide
  MOD_RES (1), (3), (37): Xaa is C or S
  MOD_RES (15), (16), (17), (18), (19): Xaa is A or G
  MOD_RES (20), (21), (22), (23): Xaa is A or G or is absent
XGXSRVVMNNSLQEXXXXXXXXXYYVVPLPELKTPAXTPKTV

SEQ ID NO: 9892 - protein, 39 aa, Artificial Sequence
  GFR-binding peptide
  MOD_RES (2), (4), (37), (38): Xaa is C or S
  MOD_RES (15), (16), (17), (18), (19): Xaa is A or G
  MOD_RES (20), (21), (22), (23): Xaa is A or G or is absent
SXKXSKVIMNSLQEXXXXXXXXXYYVIPLPELDQSVXXP

SEQ ID NO: 9893 - protein, 41 aa, Artificial Sequence
  GFR-binding peptide
  MOD_RES (1), (3), (37), (38): Xaa is C or S
  MOD_RES (15), (16), (17), (18), (19): Xaa is A or G
  MOD_RES (20), (21), (22), (23): Xaa is A or G or is absent
XGXARVVMNEYQKYXXXXXXXXXIFLVSIPSLQTPAXXPKP

SEQ ID NO: 9894 - protein, 37 aa, Artificial Sequence
  GFR-binding peptide
  MOD_RES (2), (4), (37): Xaa is C or S
  MOD_RES (15), (16), (17), (18), (19): Xaa is A or G
  MOD_RES (20), (21), (22), (23): Xaa is A or G or is absent
SXKXSKVIMNSLQEXXXXXXXXXYYVIPLPELDQSVX

SEQ ID NO: 9895 - protein, 38 aa, Artificial Sequence
  GFR-binding peptide
  MOD_RES (1), (33), (34): Xaa is C or S
XSEVVMDQYNKLVVNNASDLYLISIASLRTPVXXTPPT

SEQ ID NO: 9896 - protein, 39 aa, Artificial Sequence
  GFR-binding peptide
  MOD_RES (1), (35), (36): Xaa is C or S
  MOD_RES (13), (14), (15), (16), (17): Xaa is A or G
  MOD_RES (18), (19), (20), (21): Xaa is A or G or is absent
XGEVVMDNSLQEXXXXXXXXXYYLMTLPELETPVXXAKP

SEQ ID NO: 9897 - protein, 36 aa, Artificial Sequence
  GFR-binding peptide
  MOD_RES (33), (34): Xaa is C or S
  MOD_RES (11), (12), (13), (14), (15): Xaa is A or G
  MOD_RES (16), (17), (18), (19): Xaa is A or G or is absent
RVVMNNSLQEXXXXXXXXXYYLVTLPELQTPAXXPK

SEQ ID NO: 9898 - protein, 38 aa, Artificial Sequence
  GFR-binding peptide
  MOD_RES (1), (3), (37), (38): Xaa is C or S
  MOD_RES (15), (16), (17), (18), (19): Xaa is A or G
  MOD_RES (20), (21), (22), (23): Xaa is A or G or is absent
XGXGEVVMDNSLQEXXXXXXXXXYYVMPLPELETPVXX

SEQ ID NO: 9899 - protein, 39 aa, Artificial Sequence
  GFR-binding peptide
  MOD_RES (2), (34): Xaa is C or S
GXSRVVMNEYQKYIVNSSDDIFLVSIPSLKTPAXTPKTV

SEQ ID NO: 9900 - protein, 39 aa, Artificial Sequence; identical to SEQ ID NO: 2406
  GFR-binding peptide
  MOD_RES (2), (4), (38), (39): Xaa is C or S
  MOD_RES (16), (17), (18), (19), (20): Xaa is A or G
  MOD_RES (21), (22), (23), (24): Xaa is A or G or is absent

SEQ ID NO: 9901 - protein, 37 aa, Artificial Sequence
  GFR-binding peptide
  MOD_RES (33), (34): Xaa is C or S
  MOD_RES (11), (12), (13), (14), (15): Xaa is A or G
  MOD_RES (16), (17), (18), (19): Xaa is A or G or is absent
SKVVMNSLQEXXXXXXXXXYYVIPLPELDQPVXXPSA

SEQ ID NO: 9902 - protein, 38 aa, Artificial Sequence; identical to SEQ ID NO: 2407
  GFR-binding peptide
  MOD_RES (33), (34): Xaa is C or S
  MOD_RES (11), (12), (13), (14), (15): Xaa is A or G
  MOD_RES (16), (17), (18), (19): Xaa is A or G or is absent

SEQ ID NO: 9903 - protein, 34 aa, Artificial Sequence; identical to SEQ ID NO: 2408
  GFR-binding peptide
  MOD_RES (33), (34): Xaa is C or S
  MOD_RES (11), (12), (13), (14), (15): Xaa is A or G
  MOD_RES (16), (17), (18), (19): Xaa is A or G or is absent

SEQ ID NO: 9904 - protein, 41 aa, Artificial Sequence
  GFR-binding peptide
  MOD_RES (2), (35), (36): Xaa is C or S
  MOD_RES (13), (14), (15), (16), (17): Xaa is A or G
  MOD_RES (18), (19), (20), (21): Xaa is A or G or is absent
KXSKVIMNSLQEXXXXXXXXXYYVIPLPELDQSVXXPSASA

SEQ ID NO: 9905 - protein, 32 aa, Artificial Sequence; identical to SEQ ID NO: 2409
  GFR-binding peptide
  MOD_RES (31), (31): Xaa is C or S

SEQ ID NO: 9906 - protein, 41 aa, Artificial Sequence; identical to SEQ ID NO: 2410
  GFR-binding peptide
  MOD_RES (1), (3), (35), (36): Xaa is C or S

SEQ ID NO: 9907 - protein, 35 aa, Artificial Sequence
  GFR-binding peptide
  MOD_RES (1), (3), (34), (35): Xaa is C or S
XKXSKVIMNSLQEIKPTKGIYYVIPLPELDQSVXX

SEQ ID NO: 9908 - protein, 38 aa, Artificial Sequence
  GFR-binding peptide
  MOD_RES (2), (4), (36), (37): Xaa is C or S
RXGXGEVVMENSLQEVVKDYEDYYVMPLPELETPVXXA

SEQ ID NO: 9909 - protein, 35 aa, Artificial Sequence
  GFR-binding peptide
  MOD_RES (1), (3): Xaa is C or S
  MOD_RES (14), (15), (16), (17), (18): Xaa is A or G
  MOD_RES (19), (20), (21), (22): Xaa is A or G or is absent
XKXSRVIMEYQKYXXXXXXXXXIFLISIPSLAQPV

SEQ ID NO: 9910 - protein, 34 aa, Artificial Sequence
  GFR-binding peptide
  MOD_RES (32), (33): Xaa is C or S
ARVVMNNSLQEIVNSSDDYYVVPLPELQTPAXXP

SEQ ID NO: 9911 - protein, 40 aa, Artificial Sequence
  GFR-binding peptide
  MOD_RES (2), (34), (35): Xaa is C or S
GXSEVVMDRYKKLVVNNASDFYLISIANLRTPVXXTPPTS

SEQ ID NO: 9912 - protein, 38 aa, Artificial Sequence
  GFR-binding peptide
  MOD_RES (2), (4), (37), (38): Xaa is C or S
  MOD_RES (15), (16), (17), (18), (19): Xaa is A or G
  MOD_RES (20), (21), (22), (23): Xaa is A or G or is absent
SXKXSKVIMEYQKYXXXXXXXXXIFLISIPSLDQSVXX

SEQ ID NO: 9913 - protein, 36 aa, Artificial Sequence; identical to SEQ ID NO: 2418
  GFR-binding peptide
  MOD_RES (1), (32), (33): Xaa is C or S

SEQ ID NO: 9914 - protein, 34 aa, Artificial Sequence
  GFR-binding peptide
  MOD_RES (1), (3): Xaa is C or S
XGXARVVMNEYQKYIVNSSDDIFLVSIPSLQTPA

SEQ ID NO: 9915 - protein, 37 aa, Artificial Sequence; identical to SEQ ID NO: 2423
  GFR-binding peptide
  MOD_RES (1), (35), (36): Xaa is C or S
  MOD_RES (13), (14), (15), (16), (17): Xaa is A or G
  MOD_RES (18), (19), (20), (21): Xaa is A or G or is absent

SEQ ID NO: 9916 - protein, 41 aa, Artificial Sequence
  GFR-binding peptide
  MOD_RES (1), (35): Xaa is C or S
  MOD_RES (13), (14), (15), (16), (17): Xaa is A or G
  MOD_RES (18), (19), (20), (21): Xaa is A or G or is absent
XSRVVMNNSLQEXXXXXXXXXYYLVTLPELKTPAXTPKTVH

SEQ ID NO: 9917 - protein, 35 aa, Artificial Sequence; identical to SEQ ID NO: 2424
  GFR-binding peptide
  MOD_RES (2), (35): Xaa is C or S
  MOD_RES (13), (14), (15), (16), (17): Xaa is A or G
  MOD_RES (18), (19), (20), (21): Xaa is A or G or is absent

SEQ ID NO: 9918 - protein, 35 aa, Artificial Sequence; identical to SEQ ID NO: 2426
  GFR-binding peptide
  MOD_RES (2), (2): Xaa is C or S
  MOD_RES (14), (15), (16), (17), (18): Xaa is A or G
  MOD_RES (19), (20), (21), (22): Xaa is A or G or is absent

SEQ ID NO: 9919 - protein, 30 aa, Artificial Sequence
  GFR-binding peptide
EVVMDNSLQEVVKENEDYYLMTLPELETPV

SEQ ID NO: 9920 - protein, 40 aa, Artificial Sequence
  GFR-binding peptide
  MOD_RES (34), (35): Xaa is C or S
  MOD_RES (12), (13), (14), (15), (16): Xaa is A or G
  MOD_RES (17), (18), (19), (20): Xaa is A or G or is absent
GEVVMENSLQEXXXXXXXXXYYVMPLPELETPVXXAKPIS

SEQ ID NO: 9921 - protein, 37 aa, Artificial Sequence
  GFR-binding peptide
  MOD_RES (1), (3), (34), (35): Xaa is C or S
XKXSRVIMEYQKYVKPKRGVIFLISIPSLAQPVXXPA

SEQ ID NO: 9922 - protein, 32 aa, Artificial Sequence
  GFR-binding peptide
  MOD_RES (11), (12), (13), (14), (15): Xaa is A or G
  MOD_RES (16), (17), (18), (19): Xaa is A or G or is absent
EVVMENSLQEXXXXXXXXXYYLMTLPELETPV

SEQ ID NO: 9923 - protein, 38 aa, Artificial Sequence
  GFR-binding peptide
  MOD_RES (1), (35), (36): Xaa is C or S
  MOD_RES (13), (14), (15), (16), (17): Xaa is A or G
  MOD_RES (18), (19), (20), (21): Xaa is A or G or is absent
XGEVVMEEYQKYXXXXXXXXXIFLMSIPSLETPVXXAK

SEQ ID NO: 9924 - protein, 38 aa, Artificial Sequence
  GFR-binding peptide
  MOD_RES (2), (4), (36), (37): Xaa is C or S
HXGXARVVMNNSLQEIVNSSDDYYVVPLPELQTPAXXP

SEQ ID NO: 9925 - protein, 37 aa, Artificial Sequence
  GFR-binding peptide
  MOD_RES (1), (3), (37): Xaa is C or S
  MOD_RES (15), (16), (17), (18), (19): Xaa is A or G
  MOD_RES (20), (21), (22), (23): Xaa is A or G or is absent
XGXGEVVMDNSLQEXXXXXXXXXYYLMTLPELETPVX

SEQ ID NO: 9926 - protein, 38 aa, Artificial Sequence
  GFR-binding peptide
  MOD_RES (33), (34): Xaa is C or S
  MOD_RES (11), (12), (13), (14), (15): Xaa is A or G
  MOD_RES (16), (17), (18), (19): Xaa is A or G or is absent
EVVMDEYQKYXXXXXXXXXIFLMSIPSLETPVXXAKPI

SEQ ID NO: 9927 - protein, 31 aa, Artificial Sequence
  GFR-binding peptide
  MOD_RES (31), (31): Xaa is C or S
RVVMNNSLQEIVNSSDDYYVVPLPELKTPAX

SEQ ID NO: 9928 - protein, 36 aa, Artificial Sequence
  GFR-binding peptide
  MOD_RES (2), (36): Xaa is C or S
  MOD_RES (14), (15), (16), (17), (18): Xaa is A or G
  MOD_RES (19), (20), (21), (22): Xaa is A or G or is absent
GXARVVMNEYQKYXXXXXXXXXIFLVSIPSLQTPAX

SEQ ID NO: 9929 - protein, 39 aa, Artificial Sequence
  GFR-binding peptide
  MOD_RES (33), (34): Xaa is C or S
  MOD_RES (11), (12), (13), (14), (15): Xaa is A or G
  MOD_RES (16), (17), (18), (19): Xaa is A or G or is absent
RVVMNEYQKYXXXXXXXXXIFLVSIPSLKTPAXXPKPVY

SEQ ID NO: 9930 - protein, 42 aa, Artificial Sequence; identical to SEQ ID NO: 2435
  GFR-binding peptide
  MOD_RES (1), (3), (37), (38): Xaa is C or S
  MOD_RES (15), (16), (17), (18), (19): Xaa is A or G
  MOD_RES (20), (21), (22), (23): Xaa is A or G or is absent

SEQ ID NO: 9931 - protein, 36 aa, Artificial Sequence
  GFR-binding peptide
  MOD_RES (2), (36): Xaa is C or S
  MOD_RES (14), (15), (16), (17), (18): Xaa is A or G
  MOD_RES (19), (20), (21), (22): Xaa is A or G or is absent
GXARVVMNNSLQEXXXXXXXXXYYLVTLPELQTPAX

SEQ ID NO: 9932 - protein, 32 aa, Artificial Sequence
  GFR-binding peptide
  MOD_RES (1), (32): Xaa is C or S
XSRVIMNSLQEVKPKRGVYYVIPLPELAQPVX

SEQ ID NO: 9933 - protein, 34 aa, Artificial Sequence; identical to SEQ ID NO: 2438
  GFR-binding peptide
  MOD_RES (1), (3), (34): Xaa is C or S

SEQ ID NO: 9934 - protein, 33 aa, Artificial Sequence; identical to SEQ ID NO: 2439
  GFR-binding peptide
  MOD_RES (31), (32): Xaa is C or S

SEQ ID NO: 9935 - protein, 37 aa, Artificial Sequence
  GFR-binding peptide
  MOD_RES (31), (32): Xaa is C or S
SKVVMEYQKYVKPTRGVIFLISIPSLDQPVXXPSASA

SEQ ID NO: 9936 - protein, 36 aa, Artificial Sequence
  GFR-binding peptide
  MOD_RES (32), (33): Xaa is C or S
ARVVMNNSLQEIVNSSDDYYLVTLPELQTPAXXPKP

SEQ ID NO: 9937 - protein, 40 aa, Artificial Sequence
  GFR-binding peptide
  MOD_RES (2), (4), (35), (36): Xaa is C or S
SXKXSRVIMNSLQEVKPKRGVYYVIPLPELAQPVXXPAAS

SEQ ID NO: 9938 - protein, 37 aa, Artificial Sequence
  GFR-binding peptide
  MOD_RES (1), (3), (37): Xaa is C or S
  MOD_RES (15), (16), (17), (18), (19): Xaa is A or G
  MOD_RES (20), (21), (22), (23): Xaa is A or G or is absent
XGXGEVVMENSLQEXXXXXXXXXYYLMTLPELETPVX

SEQ ID NO: 9939 - protein, 38 aa, Artificial Sequence
  GFR-binding peptide
  MOD_RES (33), (34): Xaa is C or S
  MOD_RES (11), (12), (13), (14), (15): Xaa is A or G
  MOD_RES (16), (17), (18), (19): Xaa is A or G or is absent
EVVMDRYKKLXXXXXXXXXFYLISIANLRTPVXXTPPT

SEQ ID NO: 9940 - protein, 31 aa, Artificial Sequence
  GFR-binding peptide
  MOD_RES (1), (1): Xaa is C or S
XSKVVMNSLQEVKPTRGVYYVIPLPELDQPV

SEQ ID NO: 9941 - protein, 32 aa, Artificial Sequence
  GFR-binding peptide
  MOD_RES (11), (12), (13), (14), (15): Xaa is A or G
  MOD_RES (16), (17), (18), (19): Xaa is A or G or is absent
EVVMENSLQEXXXXXXXXXYYVMPLPELETPV

SEQ ID NO: 9942 - protein, 34 aa, Artificial Sequence
  GFR-binding peptide
  MOD_RES (1), (3): Xaa is C or S
XGXGEVVMDNSLQEVVKENEDYYLMTLPELETPV

SEQ ID NO: 9943 - protein, 41 aa, Artificial Sequence
  GFR-binding peptide
  MOD_RES (2), (36), (37): Xaa is C or S
  MOD_RES (14), (15), (16), (17), (18): Xaa is A or G
  MOD_RES (19), (20), (21), (22): Xaa is A or G or is absent
GXSEVVMDNSLQEXXXXXXXXXYYLITLPELRTPVXXTPPT

SEQ ID NO: 9944 - protein, 40 aa, Artificial Sequence
  GFR-binding peptide
  MOD_RES (34), (35): Xaa is C or S
  MOD_RES (12), (13), (14), (15), (16): Xaa is A or G
  MOD_RES (17), (18), (19), (20): Xaa is A or G or is absent
ARVVMNNSLQEXXXXXXXXXYYLVTLPELQTPAXXPKPVT

SEQ ID NO: 9945 - protein, 34 aa, Artificial Sequence
  GFR-binding peptide
  MOD_RES (2), (2): Xaa is C or S
  MOD_RES (13), (14), (15), (16), (17): Xaa is A or G
  MOD_RES (18), (19), (20), (21): Xaa is A or G or is absent
KXSRVIMEYQKYXXXXXXXXXIFLISIPSLAQPV

SEQ ID NO: 9946 - protein, 34 aa, Artificial Sequence
  GFR-binding peptide
  MOD_RES (34), (34): Xaa is C or S
  MOD_RES (12), (13), (14), (15), (16): Xaa is A or G
  MOD_RES (17), (18), (19), (20): Xaa is A or G or is absent
ARVVMNNSLQEXXXXXXXXXYYVVPLPELQTPAX

SEQ ID NO: 9947 - protein, 39 aa, Artificial Sequence
  GFR-binding peptide
  MOD_RES (1), (3), (37), (38): Xaa is C or S
  MOD_RES (15), (16), (17), (18), (19): Xaa is A or G
  MOD_RES (20), (21), (22), (23): Xaa is A or G or is absent
XGXGEVVMEEYQKYXXXXXXXXXIFLMSIPSLETPVXXA

SEQ ID NO: 9948 - protein, 34 aa, Artificial Sequence
  GFR-binding peptide
  MOD_RES (1), (1): Xaa is C or S
  MOD_RES (13), (14), (15), (16), (17): Xaa is A or G
  MOD_RES (18), (19), (20), (21): Xaa is A or G or is absent
XSEVVMDNSLQEXXXXXXXXXYYVIPLPELRTPV

SEQ ID NO: 9949 - protein, 31 aa, Artificial Sequence; identical to SEQ ID NO: 2448
  GFR-binding peptide
  MOD_RES (31), (31): Xaa is C or S

SEQ ID NO: 9950 - protein, 34 aa, Artificial Sequence
  GFR-binding peptide
  MOD_RES (32), (33): Xaa is C or S
SEVVMDRYKKLVVNNASDFYLISIANLRTPVXXT

SEQ ID NO: 9951 - protein, 39 aa, Artificial Sequence
  GFR-binding peptide
  MOD_RES (34), (35): Xaa is C or S
  MOD_RES (12), (13), (14), (15), (16): Xaa is A or G
  MOD_RES (17), (18), (19), (20): Xaa is A or G or is absent
GEVVMDNSLQEXXXXXXXXXYYLMTLPELETPVXXAKPI

SEQ ID NO: 9952 - protein, 41 aa, Artificial Sequence
  GFR-binding peptide
  MOD_RES (2), (4), (36), (37): Xaa is C or S
RXGXSEVVMDNSLQEVVNNASDYYLITLPELRTPVXXTPPT

SEQ ID NO: 9953 - protein, 38 aa, Artificial Sequence; identical to SEQ ID NO: 2453
  GFR-binding peptide
  MOD_RES (33), (34): Xaa is C or S
  MOD_RES (11), (12), (13), (14), (15): Xaa is A or G
  MOD_RES (16), (17), (18), (19): Xaa is A or G or is absent

SEQ ID NO: 9954 - protein, 40 aa, Artificial Sequence; identical to SEQ ID NO: 2454
  GFR-binding peptide
  MOD_RES (2), (4), (36), (37): Xaa is C or S

SEQ ID NO: 9955 - protein, 42 aa, Artificial Sequence
  GFR-binding peptide
  MOD_RES (2), (4), (37), (38): Xaa is C or S
  MOD_RES (15), (16), (17), (18), (19): Xaa is A or G
  MOD_RES (20), (21), (22), (23): Xaa is A or G or is absent
SXKXSKVVMNSLQEXXXXXXXXXYYLITLPELDQPVXXPSAS

SEQ ID NO: 9956 - protein, 32 aa, Artificial Sequence; identical to SEQ ID NO: 2456
  GFR-binding peptide
  MOD_RES (31), (32): Xaa is C or S

SEQ ID NO: 9957 - protein, 33 aa, Artificial Sequence
  GFR-binding peptide
  MOD_RES (1), (33): Xaa is C or S
XGEVVMENSLQEVVKDYEDYYLMTLPELETPVX

SEQ ID NO: 9958 - protein, 40 aa, Artificial Sequence
  GFR-binding peptide
  MOD_RES (1), (35), (36): Xaa is C or S
  MOD_RES (13), (14), (15), (16), (17): Xaa is A or G
  MOD_RES (18), (19), (20), (21): Xaa is A or G or is absent
XSEVVMDEYQKYXXXXXXXXXIFLISIPSLRTPVXXTPPT

SEQ ID NO: 9959 - protein, 35 aa, Artificial Sequence
  GFR-binding peptide
  MOD_RES (1), (33), (34): Xaa is C or S
XGEVVMEEYQKYVVKDYEDIFLMSIPSLETPVXXA

SEQ ID NO: 9960 - protein, 37 aa, Artificial Sequence
  GFR-binding peptide
  MOD_RES (32), (33): Xaa is C or S
GEVVMDNSLQEVVKENEDYYVMPLPELETPVXXAKPI

SEQ ID NO: 9961 - protein, 33 aa, Artificial Sequence; identical to SEQ ID NO: 2458
  GFR-binding peptide
  MOD_RES (33), (33): Xaa is C or S
  MOD_RES (11), (12), (13), (14), (15): Xaa is A or G
  MOD_RES (16), (17), (18), (19): Xaa is A or G or is absent

SEQ ID NO: 9962 - protein, 38 aa, Artificial Sequence
  GFR-binding peptide
  MOD_RES (2), (4), (37), (38): Xaa is C or S
  MOD_RES (15), (16), (17), (18), (19): Xaa is A or G
  MOD_RES (20), (21), (22), (23): Xaa is A or G or is absent
SXKXSRVIMNSLQEXXXXXXXXXYYVIPLPELAQPVXX

SEQ ID NO: 9963 - protein, 38 aa, Artificial Sequence
  GFR-binding peptide
  MOD_RES (1), (33), (34): Xaa is C or S
XGEVVMEEYQKYVVKDYEDIFLMSIPSLETPVXXAKPI

SEQ ID NO: 9964 - protein, 38 aa, Artificial Sequence; identical to SEQ ID NO: 2462
  GFR-binding peptide
  MOD_RES (1), (32), (33): Xaa is C or S

SEQ ID NO: 9965 - protein, 37 aa, Artificial Sequence
  GFR-binding peptide
  MOD_RES (1), (3), (34), (35): Xaa is C or S
XKXSRVIMNSLQEVKPKRGVYYLITLPELAQPVXXPA

SEQ ID NO: 9966 - protein, 35 aa, Artificial Sequence
  GFR-binding peptide
  MOD_RES (1), (32), (33): Xaa is C or S
XSKVIMNSLQEIKPTKGIYYVIPLPELDQSVXXPS

SEQ ID NO: 9967 - protein, 40 aa, Artificial Sequence
  GFR-binding peptide
  MOD_RES (2), (4), (38), (39): Xaa is C or S
  MOD_RES (16), (17), (18), (19), (20): Xaa is A or G
  MOD_RES (21), (22), (23), (24): Xaa is A or G or is absent
RXGXSEVVMDEYQKYXXXXXXXXXIFLISIPSLRTPVXXT

SEQ ID NO: 9968 - protein, 33 aa, Artificial Sequence; identical to SEQ ID NO: 2464
  GFR-binding peptide
  MOD_RES (33), (33): Xaa is C or S
  MOD_RES (11), (12), (13), (14), (15): Xaa is A or G
  MOD_RES (16), (17), (18), (19): Xaa is A or G or is absent

SEQ ID NO: 9969 - protein, 40 aa, Artificial Sequence
  GFR-binding peptide
  MOD_RES (2), (4), (38), (39): Xaa is C or S
  MOD_RES (16), (17), (18), (19), (20): Xaa is A or G
  MOD_RES (21), (22), (23), (24): Xaa is A or G or is absent
RXGXGEVVMENSLQEXXXXXXXXXYYVMPLPELETPVXXA

SEQ ID NO: 9970 - protein, 34 aa, Artificial Sequence
  GFR-binding peptide
  MOD_RES (31), (32): Xaa is C or S
EVVMDEYQKYVVKENEDIFLMSIPSLETPVXXAK

SEQ ID NO: 9971 - protein, 32 aa, Artificial Sequence; identical to SEQ ID NO: 2466
  GFR-binding peptide
  MOD_RES (1), (32): Xaa is C or S

SEQ ID NO: 9972 - protein, 32 aa, Artificial Sequence; identical to SEQ ID NO: 2470
  GFR-binding peptide
  MOD_RES (11), (12), (13), (14), (15): Xaa is A or G
  MOD_RES (16), (17), (18), (19): Xaa is A or G or is absent

SEQ ID NO: 9973 - protein, 40 aa, Artificial Sequence
  GFR-binding peptide
  MOD_RES (1), (35), (36): Xaa is C or S
  MOD_RES (13), (14), (15), (16), (17): Xaa is A or G
  MOD_RES (18), (19), (20), (21): Xaa is A or G or is absent
XSRVVMNEYQKYXXXXXXXXXIFLVSIPSLKTPAXXPKPV

SEQ ID NO: 9974 - protein, 31 aa, Artificial Sequence; identical to SEQ ID NO: 2474
  GFR-binding peptide
  MOD_RES (1), (1): Xaa is C or S

SEQ ID NO: 9975 - protein, 39 aa, Artificial Sequence; identical to SEQ ID NO: 2476
  GFR-binding peptide
  MOD_RES (2), (36), (37): Xaa is C or S
  MOD_RES (14), (15), (16), (17), (18): Xaa is A or G
  MOD_RES (19), (20), (21), (22): Xaa is A or G or is absent

SEQ ID NO: 9976 - protein, 35 aa, Artificial Sequence
  GFR-binding peptide
  MOD_RES (33), (34): Xaa is C or S
  MOD_RES (11), (12), (13), (14), (15): Xaa is A or G
  MOD_RES (16), (17), (18), (19): Xaa is A or G or is absent
RVVMNNSLQEXXXXXXXXXYYLVTLPELKTPAXXP

SEQ ID NO: 9977 - protein, 34 aa, Artificial Sequence
  GFR-binding peptide
  MOD_RES (1), (33), (34): Xaa is C or S
XGEVVMDNSLQEVVKENEDYYLMTLPELETPVXX

SEQ ID NO: 9978 - protein, 34 aa, Artificial Sequence
  GFR-binding peptide
  MOD_RES (1), (34): Xaa is C or S
  MOD_RES (12), (13), (14), (15), (16): Xaa is A or G
  MOD_RES (17), (18), (19), (20): Xaa is A or G or is absent
XSRVIMNSLQEXXXXXXXXXYYVIPLPELAQPVX

SEQ ID NO: 9979 - protein, 40 aa, Artificial Sequence; identical to SEQ ID NO: 2479
  GFR-binding peptide
  MOD_RES (2), (34), (35): Xaa is C or S

SEQ ID NO: 9980 - protein, 39 aa, Artificial Sequence
  GFR-binding peptide
  MOD_RES (2), (4), (35), (36): Xaa is C or S
SXKXSKVVMNSLQEVKPTRGVYYLITLPELDQPVXXPSA

SEQ ID NO: 9981 - protein, 34 aa, Artificial Sequence
  GFR-binding peptide
  MOD_RES (1), (3): Xaa is C or S
XGXGEVVMEEYQKYVVKDYEDIFLMSIPSLETPV

SEQ ID NO: 9982 - protein, 31 aa, Artificial Sequence
  GFR-binding peptide
  MOD_RES (1), (1): Xaa is C or S
XSKVVMNSLQEVKPTRGVYYLITLPELDQPV

SEQ ID NO: 9983 - protein, 41 aa, Artificial Sequence; identical to SEQ ID NO: 2483
  GFR-binding peptide
  MOD_RES (2), (4), (36), (37): Xaa is C or S

SEQ ID NO: 9984 - protein, 40 aa, Artificial Sequence; identical to SEQ ID NO: 2484
  GFR-binding peptide
  MOD_RES (2), (4), (37), (38): Xaa is C or S
  MOD_RES (15), (16), (17), (18), (19): Xaa is A or G
  MOD_RES (20), (21), (22), (23): Xaa is A or G or is absent

SEQ ID NO: 9985 - protein, 38 aa, Artificial Sequence; identical to SEQ ID NO: 2485
  GFR-binding peptide
  MOD_RES (32), (33): Xaa is C or S

SEQ ID NO: 9986 - protein, 34 aa, Artificial Sequence
  GFR-binding peptide
  MOD_RES (32), (32): Xaa is C or S
SRVVMNNSLQEIVNSSDDYYLVTLPELKTPAXTP

SEQ ID NO: 9987 - protein, 33 aa, Artificial Sequence; identical to SEQ ID NO: 2486
  GFR-binding peptide
  MOD_RES (1), (33): Xaa is C or S

SEQ ID NO: 9988 - protein, 39 aa, Artificial Sequence; identical to SEQ ID NO: 2487
  GFR-binding peptide
  MOD_RES (2), (4), (35), (36): Xaa is C or S

SEQ ID NO: 9989 - protein, 37 aa, Artificial Sequence
  GFR-binding peptide
  MOD_RES (1), (34), (35): Xaa is C or S
  MOD_RES (12), (13), (14), (15), (16): Xaa is A or G
  MOD_RES (17), (18), (19), (20): Xaa is A or G or is absent
XSKVVMNSLQEXXXXXXXXXYYVIPLPELDQPVXXPS

SEQ ID NO: 9990 - protein, 39 aa, Artificial Sequence; identical to SEQ ID NO: 2489
  GFR-binding peptide
  MOD_RES (34), (35): Xaa is C or S
  MOD_RES (12), (13), (14), (15), (16): Xaa is A or G
  MOD_RES (17), (18), (19), (20): Xaa is A or G or is absent

SEQ ID NO: 9991 - protein, 35 aa, Artificial Sequence; identical to SEQ ID NO: 2490
  GFR-binding peptide
  MOD_RES (1), (3): Xaa is C or S
  MOD_RES (14), (15), (16), (17), (18): Xaa is A or G
  MOD_RES (19), (20), (21), (22): Xaa is A or G or is absent

SEQ ID NO: 9992 - protein, 34 aa, Artificial Sequence
  GFR-binding peptide
  MOD_RES (2), (33), (34): Xaa is C or S
KXSRVIMEYQKYVKPKRGVIFLISIPSLAQPVXX

SEQ ID NO: 9993 - protein, 40 aa, Artificial Sequence
  GFR-binding peptide
  MOD_RES (34), (34): Xaa is C or S
  MOD_RES (12), (13), (14), (15), (16): Xaa is A or G
  MOD_RES (17), (18), (19), (20): Xaa is A or G or is absent
SRVVMNEYQKYXXXXXXXXXIFLVSIPSLKTPAXTPKTVH

SEQ ID NO: 9994 - protein, 40 aa, Artificial Sequence; identical to SEQ ID NO: 2493
  GFR-binding peptide
  MOD_RES (2), (34): Xaa is C or S

SEQ ID NO: 9995 - protein, 39 aa, Artificial Sequence
  GFR-binding peptide
  MOD_RES (34), (35): Xaa is C or S
  MOD_RES (12), (13), (14), (15), (16): Xaa is A or G
  MOD_RES (17), (18), (19), (20): Xaa is A or G or is absent
ARVVMNNSLQEXXXXXXXXXYYLVTLPELQTPAXXPKPV

SEQ ID NO: 9996 - protein, 35 aa, Artificial Sequence
  GFR-binding peptide
  MOD_RES (1), (35): Xaa is C or S
  MOD_RES (13), (14), (15), (16), (17): Xaa is A or G
  MOD_RES (18), (19), (20), (21): Xaa is A or G or is absent
XSEVVMDNSLQEXXXXXXXXXYYLITLPELRTPVX

SEQ ID NO: 9997 - protein, 36 aa, Artificial Sequence
  GFR-binding peptide
  MOD_RES (31), (31): Xaa is C or S
RVVMNEYQKYIVNSSDDIFLVSIPSLKTPAXTPKTV

SEQ ID NO: 9998 - protein, 39 aa, Artificial Sequence
  GFR-binding peptide
  MOD_RES (33), (34): Xaa is C or S
  MOD_RES (11), (12), (13), (14), (15): Xaa is A or G
  MOD_RES (16), (17), (18), (19): Xaa is A or G or is absent
EVVMDQYNKLXXXXXXXXXLYLISIASLRTPVXXTPPTS

SEQ ID NO: 9999 - protein, 34 aa, Artificial Sequence; identical to SEQ ID NO: 2498
  GFR-binding peptide
  MOD_RES (1), (3): Xaa is C or S

SEQ ID NO: 10000 - protein, 41 aa, Artificial Sequence
  GFR-binding peptide
  MOD_RES (2), (4), (36), (37): Xaa is C or S
RXGXSEVVMDRYKKLVVNNASDFYLISIANLRTPVXXTPPT

SEQ ID NO: 10001 - protein, 38 aa, Artificial Sequence; identical to SEQ ID NO: 2500
  GFR-binding peptide
  MOD_RES (2), (4), (35), (36): Xaa is C or S

SEQ ID NO: 10002 - protein, 39 aa, Artificial Sequence
  GFR-binding peptide
  MOD_RES (2), (4), (38), (39): Xaa is C or S
  MOD_RES (16), (17), (18), (19), (20): Xaa is A or G
  MOD_RES (21), (22), (23), (24): Xaa is A or G or is absent
RXGXGEVVMDNSLQEXXXXXXXXXYYVMPLPELETPVXX

SEQ ID NO: 10003 - protein, 37 aa, Artificial Sequence
  GFR-binding peptide
  MOD_RES (2), (35), (36): Xaa is C or S
  MOD_RES (13), (14), (15), (16), (17): Xaa is A or G
  MOD_RES (18), (19), (20), (21): Xaa is A or G or is absent
KXSKVIMEYQKYXXXXXXXXXIFLISIPSLDQSVXXP

SEQ ID NO: 10004 - protein, 38 aa, Artificial Sequence
  GFR-binding peptide
  MOD_RES (1), (32), (33): Xaa is C or S
XSRVIMNSLQEVKPKRGVYYVIPLPELAQPVXXPAASA

SEQ ID NO: 10005 - protein, 34 aa, Artificial Sequence
  GFR-binding peptide
  MOD_RES (1), (33), (34): Xaa is C or S
XGEVVMENSLQEVVKDYEDYYLMTLPELETPVXX

SEQ ID NO: 10006 - protein, 33 aa, Artificial Sequence
  GFR-binding peptide
  MOD_RES (31), (32): Xaa is C or S
EVVMDQYNKLVVNNASDLYLISIASLRTPVXXT

SEQ ID NO: 10007 - protein, 30 aa, Artificial Sequence
  GFR-binding peptide
EVVMDNSLQEVVKENEDYYVMPLPELETPV

SEQ ID NO: 10008 - protein, 37 aa, Artificial Sequence
  GFR-binding peptide
  MOD_RES (1), (3), (36), (37): Xaa is C or S
  MOD_RES (14), (15), (16), (17), (18): Xaa is A or G
  MOD_RES (19), (20), (21), (22): Xaa is A or G or is absent
XKXSRVIMEYQKYXXXXXXXXXIFLISIPSLAQPVXX

SEQ ID NO: 10009 - protein, 42 aa, Artificial Sequence
  GFR-binding peptide
  MOD_RES (1), (3), (37), (38): Xaa is C or S
  MOD_RES (15), (16), (17), (18), (19): Xaa is A or G
  MOD_RES (20), (21), (22), (23): Xaa is A or G or is absent
XGXSEVVMDQYNKLXXXXXXXXXLYLISIASLRTPVXXTPPT

SEQ ID NO: 10010 - protein, 33 aa, Artificial Sequence; identical to SEQ ID NO: 2515
  GFR-binding peptide
  MOD_RES (32), (32): Xaa is C or S

SEQ ID NO: 10011 - protein, 36 aa, Artificial Sequence
  GFR-binding peptide
  MOD_RES (34), (34): Xaa is C or S
  MOD_RES (12), (13), (14), (15), (16): Xaa is A or G
  MOD_RES (17), (18), (19), (20): Xaa is A or G or is absent
SRVVMNEYQKYXXXXXXXXXIFLVSIPSLKTPAXTP

SEQ ID NO: 10012 - protein, 39 aa, Artificial Sequence
  GFR-binding peptide
  MOD_RES (2), (34), (35): Xaa is C or S
GXGEVVMDNSLQEVVKENEDYYLMTLPELETPVXXAKPI

SEQ ID NO: 10013 - protein, 37 aa, Artificial Sequence; identical to SEQ ID NO: 2518
  GFR-binding peptide
  MOD_RES (33), (34): Xaa is C or S
  MOD_RES (11), (12), (13), (14), (15): Xaa is A or G
  MOD_RES (16), (17), (18), (19): Xaa is A or G or is absent

SEQ ID NO: 10014 - protein, 35 aa, Artificial Sequence
  GFR-binding peptide
  MOD_RES (34), (35): Xaa is C or S
  MOD_RES (12), (13), (14), (15), (16): Xaa is A or G
  MOD_RES (17), (18), (19), (20): Xaa is A or G or is absent
ARVVMNNSLQEXXXXXXXXXYYVVPLPELQTPAXX

SEQ ID NO: 10015 - protein, 35 aa, Artificial Sequence
  GFR-binding peptide
  MOD_RES (31), (32): Xaa is C or S
RVVMNNSLQEIVNSSDDYYVVPLPELKTPAXXPKP

SEQ ID NO: 10016 - protein, 35 aa, Artificial Sequence
  GFR-binding peptide
  MOD_RES (1), (33), (34): Xaa is C or S
XSRVVMNNSLQEIVNSSDDYYVVPLPELKTPAXXP

SEQ ID NO: 10017 - protein, 36 aa, Artificial Sequence
  GFR-binding peptide
  MOD_RES (2), (34), (35): Xaa is C or S
GXGEVVMENSLQEVVKDYEDYYVMPLPELETPVXXA

SEQ ID NO: 10018 - protein, 36 aa, Artificial Sequence
  GFR-binding peptide
  MOD_RES (2), (34), (35): Xaa is C or S
GXSRVVMNNSLQEIVNSSDDYYVVPLPELKTPAXXP

SEQ ID NO: 10019 - protein, 34 aa, Artificial Sequence
  GFR-binding peptide
  MOD_RES (1), (3): Xaa is C or S
XGXSEVVMDRYKKLVVNNASDFYLISIANLRTPV

SEQ ID NO: 10020 - protein, 32 aa, Artificial Sequence
  GFR-binding peptide
  MOD_RES (11), (12), (13), (14), (15): Xaa is A or G
  MOD_RES (16), (17), (18), (19): Xaa is A or G or is absent
EVVMDEYQKYXXXXXXXXXIFLMSIPSLETPV

SEQ ID NO: 10021 - protein, 39 aa, Artificial Sequence; identical to SEQ ID NO: 2525
  GFR-binding peptide
  MOD_RES (1), (3), (34), (35): Xaa is C or S

SEQ ID NO: 10022 - protein, 34 aa, Artificial Sequence
  GFR-binding peptide
  MOD_RES (31), (32): Xaa is C or S
EVVMDEYQKYVVNNASDIFLISIPSLRTPVXXTP

SEQ ID NO: 10023 - protein, 37 aa, Artificial Sequence; identical to SEQ ID NO: 2526
  GFR-binding peptide
  MOD_RES (2), (36): Xaa is C or S
  MOD_RES (14), (15), (16), (17), (18): Xaa is A or G
  MOD_RES (19), (20), (21), (22): Xaa is A or G or is absent

SEQ ID NO: 10024 - protein, 39 aa, Artificial Sequence
  GFR-binding peptide
  MOD_RES (1), (3), (35), (36): Xaa is C or S
XGXGEVVMDNSLQEVVKENEDYYLMTLPELETPVXXAKP

SEQ ID NO: 10025 - protein, 35 aa, Artificial Sequence
  GFR-binding peptide
  MOD_RES (1), (33), (34): Xaa is C or S
XSEVVMDRYKKLVVNNASDFYLISIANLRTPVXXT

SEQ ID NO: 10026 - protein, 35 aa, Artificial Sequence
  GFR-binding peptide
  MOD_RES (1), (33), (34): Xaa is C or S
XARVVMNEYQKYIVNSSDDIFLVSIPSLQTPAXXP

SEQ ID NO: 10027 - protein, 39 aa, Artificial Sequence; identical to SEQ ID NO: 2531
  GFR-binding peptide
  MOD_RES (2), (4), (38): Xaa is C or S
  MOD_RES (16), (17), (18), (19), (20): Xaa is A or G
  MOD_RES (21), (22), (23), (24): Xaa is A or G or is absent

SEQ ID NO: 10028 - protein, 34 aa, Artificial Sequence
  GFR-binding peptide
  MOD_RES (2), (34): Xaa is C or S
GXGEVVMEEYQKYVVKDYEDIFLMSIPSLETPVX

SEQ ID NO: 10029 - protein, 32 aa, Artificial Sequence
  GFR-binding peptide
  MOD_RES (1), (1): Xaa is C or S
XGEVVMDNSLQEVVKENEDYYLMTLPELETPV

SEQ ID NO: 10030 - protein, 33 aa, Artificial Sequence
  GFR-binding peptide
  MOD_RES (1), (1): Xaa is C or S
  MOD_RES (12), (13), (14), (15), (16): Xaa is A or G
  MOD_RES (17), (18), (19), (20): Xaa is A or G or is absent
XSRVIMEYQKYXXXXXXXXXIFLISIPSLAQPV

SEQ ID NO: 10031 - protein, 38 aa, Artificial Sequence; identical to SEQ ID NO: 2535
  GFR-binding peptide
  MOD_RES (1), (34), (35): Xaa is C or S
  MOD_RES (12), (13), (14), (15), (16): Xaa is A or G
  MOD_RES (17), (18), (19), (20): Xaa is A or G or is absent

SEQ ID NO: 10032 - protein, 32 aa, Artificial Sequence
  GFR-binding peptide
  MOD_RES (2), (2): Xaa is C or S
KXSRVIMEYQKYVKPKRGVIFLISIPSLAQPV

SEQ ID NO: 10033 - protein, 36 aa, Artificial Sequence
  GFR-binding peptide
  MOD_RES (2), (4), (36): Xaa is C or S
HXGXARVVMNEYQKYIVNSSDDIFLVSIPSLQTPAX

SEQ ID NO: 10034 - protein, 42 aa, Artificial Sequence
  GFR-binding peptide
  MOD_RES (2), (36), (37): Xaa is C or S
  MOD_RES (14), (15), (16), (17), (18): Xaa is A or G
  MOD_RES (19), (20), (21), (22): Xaa is A or G or is absent
GXGEVVMENSLQEXXXXXXXXXYYLMTLPELETPVXXAKPIS

SEQ ID NO: 10035 - protein, 40 aa, Artificial Sequence
  GFR-binding peptide
  MOD_RES (1), (3), (37): Xaa is C or S
  MOD_RES (15), (16), (17), (18), (19): Xaa is A or G
  MOD_RES (20), (21), (22), (23): Xaa is A or G or is absent
XGXSRVVMNNSLQEXXXXXXXXXYYVVPLPELKTPAXTPK

SEQ ID NO: 10036 - protein, 43 aa, Artificial Sequence
  GFR-binding peptide
  MOD_RES (2), (4), (37), (38): Xaa is C or S
  MOD_RES (15), (16), (17), (18), (19): Xaa is A or G
  MOD_RES (20), (21), (22), (23): Xaa is A or G or is absent
SXKXSKVIMNSLQEXXXXXXXXXYYVIPLPELDQSVXXPSASA

SEQ ID NO: 10037 - protein, 37 aa, Artificial Sequence; identical to SEQ ID NO: 2539
  GFR-binding peptide
  MOD_RES (2), (33), (34): Xaa is C or S

SEQ ID NO: 10038 - protein, 32 aa, Artificial Sequence
  GFR-binding peptide
  MOD_RES (31), (32): Xaa is C or S
EVVMDRYKKLVVNNASDFYLISIANLRTPVXX

SEQ ID NO: 10039 - protein, 40 aa, Artificial Sequence; identical to SEQ ID NO: 2541
  GFR-binding peptide
  MOD_RES (34), (35): Xaa is C or S
  MOD_RES (12), (13), (14), (15), (16): Xaa is A or G
  MOD_RES (17), (18), (19), (20): Xaa is A or G or is absent

SEQ ID NO: 10040 - protein, 40 aa, Artificial Sequence; identical to SEQ ID NO: 2542
  GFR-binding peptide
  MOD_RES (1), (3), (35), (36): Xaa is C or S

SEQ ID NO: 10041 - protein, 41 aa, Artificial Sequence; identical to SEQ ID NO: 2544
  GFR-binding peptide
  MOD_RES (2), (4), (36), (37): Xaa is C or S

SEQ ID NO: 10042 - protein, 36 aa, Artificial Sequence
  GFR-binding peptide
  MOD_RES (2), (4): Xaa is C or S
  MOD_RES (15), (16), (17), (18), (19): Xaa is A or G
  MOD_RES (20), (21), (22), (23): Xaa is A or G or is absent
SXKXSKVVMNSLQEXXXXXXXXXYYVIPLPELDQPV

SEQ ID NO: 10043 - protein, 38 aa, Artificial Sequence; identical to SEQ ID NO: 2549
  GFR-binding peptide
  MOD_RES (2), (35), (36): Xaa is C or S
  MOD_RES (13), (14), (15), (16), (17): Xaa is A or G
  MOD_RES (18), (19), (20), (21): Xaa is A or G or is absent

SEQ ID NO: 10044 - protein, 31 aa, Artificial Sequence
  GFR-binding peptide
  MOD_RES (31), (31): Xaa is C or S
EVVMENSLQEVVKDYEDYYVMPLPELETPVX

SEQ ID NO: 10045 - protein, 34 aa, Artificial Sequence; identical to SEQ ID NO: 2550
  GFR-binding peptide
  MOD_RES (1), (33): Xaa is C or S

SEQ ID NO: 10046 - protein, 38 aa, Artificial Sequence
  GFR-binding peptide
  MOD_RES (1), (3), (37), (38): Xaa is C or S
  MOD_RES (15), (16), (17), (18), (19): Xaa is A or G
  MOD_RES (20), (21), (22), (23): Xaa is A or G or is absent
XGXSEVVMDEYQKYXXXXXXXXXIFLISIPSLRTPVXX

SEQ ID NO: 10047 - protein, 35 aa, Artificial Sequence
  GFR-binding peptide
  MOD_RES (1), (33), (34): Xaa is C or S
XGEVVMDEYQKYVVKENEDIFLMSIPSLETPVXXA

SEQ ID NO: 10048 - protein, 39 aa, Artificial Sequence
  GFR-binding peptide
  MOD_RES (1), (3), (35): Xaa is C or S
XGXSRVVMNEYQKYIVNSSDDIFLVSIPSLKTPAXTPKT

SEQ ID NO: 10049 - protein, 41 aa, Artificial Sequence
  GFR-binding peptide
  MOD_RES (2), (4), (36): Xaa is C or S
HXGXSRVVMNNSLQEIVNSSDDYYLVTLPELKTPAXTPKTV

SEQ ID NO: 10050 - protein, 36 aa, Artificial Sequence
  GFR-binding peptide
  MOD_RES (2), (34), (35): Xaa is C or S
GXSRVVMNEYQKYIVNSSDDIFLVSIPSLKTPAXXP

SEQ ID NO: 10051 - protein, 41 aa, Artificial Sequence; identical to SEQ ID NO: 2551
  GFR-binding peptide
  MOD_RES (2), (4), (38), (39): Xaa is C or S
  MOD_RES (16), (17), (18), (19), (20): Xaa is A or G
  MOD_RES (21), (22), (23), (24): Xaa is A or G or is absent

SEQ ID NO: 10052 - protein, 36 aa, Artificial Sequence
  GFR-binding peptide
  MOD_RES (31), (32): Xaa is C or S
EVVMEEYQKYVVKDYEDIFLMSIPSLETPVXXAKPI

SEQ ID NO: 10053 - protein, 37 aa, Artificial Sequence
  GFR-binding peptide
  MOD_RES (1), (3), (37): Xaa is C or S
  MOD_RES (15), (16), (17), (18), (19): Xaa is A or G
  MOD_RES (20), (21), (22), (23): Xaa is A or G or is absent
XGXSRVVMNNSLQEXXXXXXXXXYYLVTLPELKTPAX

SEQ ID NO: 10054 - protein, 36 aa, Artificial Sequence; identical to SEQ ID NO: 2554
  GFR-binding peptide
  MOD_RES (32), (33): Xaa is C or S

SEQ ID NO: 10055 - protein, 37 aa, Artificial Sequence; identical to SEQ ID NO: 2557
  GFR-binding peptide
  MOD_RES (2), (4): Xaa is C or S
  MOD_RES (16), (17), (18), (19), (20): Xaa is A or G
  MOD_RES (21), (22), (23), (24): Xaa is A or G or is absent

SEQ ID NO: 10056 - protein, 34 aa, Artificial Sequence; identical to SEQ ID NO: 2558
  GFR-binding peptide
  MOD_RES (2), (4): Xaa is C or S

SEQ ID NO: 10057 - protein, 40 aa, Artificial Sequence; identical to SEQ ID NO: 2563
  GFR-binding peptide
  MOD_RES (1), (3), (35), (36): Xaa is C or S

SEQ ID NO: 10058 - protein, 37 aa, Artificial Sequence
  GFR-binding peptide
  MOD_RES (34), (35): Xaa is C or S
  MOD_RES (12), (13), (14), (15), (16): Xaa is A or G
  MOD_RES (17), (18), (19), (20): Xaa is A or G or is absent
SRVVMNNSLQEXXXXXXXXXYYLVTLPELKTPAXXPK

SEQ ID NO: 10059 - protein, 36 aa, Artificial Sequence
  GFR-binding peptide
  MOD_RES (1), (3): Xaa is C or S
  MOD_RES (15), (16), (17), (18), (19): Xaa is A or G
  MOD_RES (20), (21), (22), (23): Xaa is A or G or is absent
XGXARVVMNNSLQEXXXXXXXXXYYLVTLPELQTPA

SEQ ID NO: 10060 - protein, 35 aa, Artificial Sequence; identical to SEQ ID NO: 2569
  GFR-binding peptide
  MOD_RES (1), (33), (34): Xaa is C or S

SEQ ID NO: 10061 - protein, 39 aa, Artificial Sequence
  GFR-binding peptide
  MOD_RES (2), (4), (38), (39): Xaa is C or S
  MOD_RES (16), (17), (18), (19), (20): Xaa is A or G
  MOD_RES (21), (22), (23), (24): Xaa is A or G or is absent
RXGXSEVVMDEYQKYXXXXXXXXXIFLISIPSLRTPVXX

SEQ ID NO: 10062 - protein, 39 aa, Artificial Sequence; identical to SEQ ID NO: 2573
  GFR-binding peptide
  MOD_RES (1), (3), (34), (35): Xaa is C or S

SEQ ID NO: 10063 - protein, 40 aa, Artificial Sequence
  GFR-binding peptide
  MOD_RES (1), (3), (35): Xaa is C or S
XGXSRVVMNNSLQEIVNSSDDYYLVTLPELKTPAXTPKTV

SEQ ID NO: 10064 - protein, 35 aa, Artificial Sequence
  GFR-binding peptide
  MOD_RES (2), (33), (34): Xaa is C or S
KXSKVVMNSLQEVKPTRGVYYLITLPELDQPVXXP

SEQ ID NO: 10065 - protein, 31 aa, Artificial Sequence
  GFR-binding peptide
  MOD_RES (1), (1): Xaa is C or S
XSRVIMEYQKYVKPKRGVIFLISIPSLAQPV

SEQ ID NO: 10066 - protein, 42 aa, Artificial Sequence
  GFR-binding peptide
  MOD_RES (2), (4), (36), (37): Xaa is C or S
RXGXGEVVMDNSLQEVVKENEDYYVMPLPELETPVXXAKPIK

SEQ ID NO: 10067 - protein, 37 aa, Artificial Sequence
  GFR-binding peptide
  MOD_RES (2), (36), (37): Xaa is C or S
  MOD_RES (14), (15), (16), (17), (18): Xaa is A or G
  MOD_RES (19), (20), (21), (22): Xaa is A or G or is absent
GXGEVVMDNSLQEXXXXXXXXXYYVMPLPELETPVXX

SEQ ID NO: 10068 - protein, 42 aa, Artificial Sequence
  GFR-binding peptide
  MOD_RES (1), (3), (36), (37): Xaa is C or S
  MOD_RES (14), (15), (16), (17), (18): Xaa is A or G
  MOD_RES (19), (20), (21), (22): Xaa is A or G or is absent
XKXSKVIMEYQKYXXXXXXXXXIFLISIPSLDQSVXXPSASA

SEQ ID NO: 10069 - protein, 36 aa, Artificial Sequence
  GFR-binding peptide
  MOD_RES (2), (4), (35), (36): Xaa is C or S
SXKXSKVIMNSLQEIKPTKGIYYVIPLPELDQSVXX

SEQ ID NO: 10070 - protein, 38 aa, Artificial Sequence
  GFR-binding peptide
  MOD_RES (2), (34), (35): Xaa is C or S
GXSEVVMDEYQKYVVNNASDIFLISIPSLRTPVXXTPP

SEQ ID NO: 10071 - protein, 38 aa, Artificial Sequence; identical to SEQ ID NO: 2579
  GFR-binding peptide
  MOD_RES (1), (3), (36), (37): Xaa is C or S
  MOD_RES (14), (15), (16), (17), (18): Xaa is A or G
  MOD_RES (19), (20), (21), (22): Xaa is A or G or is absent

SEQ ID NO: 10072 - protein, 33 aa, Artificial Sequence
  GFR-binding peptide
  MOD_RES (1), (3): Xaa is C or S
XKXSRVIMNSLQEVKPKRGVYYLITLPELAQPV

SEQ ID NO: 10073 - protein, 38 aa, Artificial Sequence
  GFR-binding peptide
  MOD_RES (34), (35): Xaa is C or S
  MOD_RES (12), (13), (14), (15), (16): Xaa is A or G
  MOD_RES (17), (18), (19), (20): Xaa is A or G or is absent
GEVVMENSLQEXXXXXXXXXYYVMPLPELETPVXXAKP

SEQ ID NO: 10074 - protein, 39 aa, Artificial Sequence
  GFR-binding peptide
  MOD_RES (2), (4), (38), (39): Xaa is C or S
  MOD_RES (16), (17), (18), (19), (20): Xaa is A or G
  MOD_RES (21), (22), (23), (24): Xaa is A or G or is absent
RXGXGEVVMDNSLQEXXXXXXXXXYYLMTLPELETPVXX

SEQ ID NO: 10075 - protein, 36 aa, Artificial Sequence
  GFR-binding peptide
  MOD_RES (31), (32): Xaa is C or S
EVVMDEYQKYVVKENEDIFLMSIPSLETPVXXAKPI

SEQ ID NO: 10076 - protein, 36 aa, Artificial Sequence; identical to SEQ ID NO: 2585
  GFR-binding peptide
  MOD_RES (1), (32), (33): Xaa is C or S

SEQ ID NO: 10077 - protein, 35 aa, Artificial Sequence
  GFR-binding peptide
  MOD_RES (32), (33): Xaa is C or S
SEVVMDNSLQEVVNNASDYYLITLPELRTPVXXTP

SEQ ID NO: 10078 - protein, 37 aa, Artificial Sequence; identical to SEQ ID NO: 2589
  GFR-binding peptide
  MOD_RES (1), (3), (36), (37): Xaa is C or S
  MOD_RES (14), (15), (16), (17), (18): Xaa is A or G
  MOD_RES (19), (20), (21), (22): Xaa is A or G or is absent

SEQ ID NO: 10079 - protein, 33 aa, Artificial Sequence; identical to SEQ ID NO: 2590
  GFR-binding peptide
  MOD_RES (31), (32): Xaa is C or S

SEQ ID NO: 10080 - protein, 33 aa, Artificial Sequence
  GFR-binding peptide
  MOD_RES (31), (32): Xaa is C or S
EVVMDNSLQEVVNNASDYYLITLPELRTPVXXT

SEQ ID NO: 10081 - protein, 36 aa, Artificial Sequence
  GFR-binding peptide
  MOD_RES (33), (34): Xaa is C or S
  MOD_RES (11), (12), (13), (14), (15): Xaa is A or G
  MOD_RES (16), (17), (18), (19): Xaa is A or G or is absent
EVVMDQYNKLXXXXXXXXXLYLISIASLRTPVXXTP

SEQ ID NO: 10082 - protein, 42 aa, Artificial Sequence; identical to SEQ ID NO: 2592
  GFR-binding peptide
  MOD_RES (2), (4), (36): Xaa is C or S

SEQ ID NO: 10083 - protein, 34 aa, Artificial Sequence
  GFR-binding peptide
  MOD_RES (31), (32): Xaa is C or S
RVVMNEYQKYIVNSSDDIFLVSIPSLKTPAXXPK

SEQ ID NO: 10084 - protein, 38 aa, Artificial Sequence
  GFR-binding peptide
  MOD_RES (1), (32), (33): Xaa is C or S
XSKVVMEYQKYVKPTRGVIFLISIPSLDQPVXXPSASA

SEQ ID NO: 10085 - protein, 41 aa, Artificial Sequence; identical to SEQ ID NO: 2593
  GFR-binding peptide
  MOD_RES (2), (36): Xaa is C or S
  MOD_RES (14), (15), (16), (17), (18): Xaa is A or G
  MOD_RES (19), (20), (21), (22): Xaa is A or G or is absent

SEQ ID NO: 10086 - protein, 41 aa, Artificial Sequence; identical to SEQ ID NO: 2597
  GFR-binding peptide
  MOD_RES (2), (36), (37): Xaa is C or S
  MOD_RES (14), (15), (16), (17), (18): Xaa is A or G
  MOD_RES (19), (20), (21), (22): Xaa is A or G or is absent

SEQ ID NO: 10087 - protein, 37 aa, Artificial Sequence
  GFR-binding peptide
  MOD_RES (31), (32): Xaa is C or S
RVVMNNSLQEIVNSSDDYYLVTLPELKTPAXXPKPVY

SEQ ID NO: 10088 - protein, 34 aa, Artificial Sequence; identical to SEQ ID NO: 2599
  GFR-binding peptide
  MOD_RES (1), (33), (34): Xaa is C or S

SEQ ID NO: 10089 - protein, 44 aa, Artificial Sequence; identical to SEQ ID NO: 2603
  GFR-binding peptide
  MOD_RES (2), (4), (38), (39): Xaa is C or S
  MOD_RES (16), (17), (18), (19), (20): Xaa is A or G
  MOD_RES (21), (22), (23), (24): Xaa is A or G or is absent

SEQ ID NO: 10090 - protein, 37 aa, Artificial Sequence
  GFR-binding peptide
  MOD_RES (2), (4), (36), (37): Xaa is C or S
HXGXSRVVMNNSLQEIVNSSDDYYLVTLPELKTPAXX

SEQ ID NO: 10091 - protein, 38 aa, Artificial Sequence
  GFR-binding peptide
  MOD_RES (2), (35), (36): Xaa is C or S
  MOD_RES (13), (14), (15), (16), (17): Xaa is A or G
  MOD_RES (18), (19), (20), (21): Xaa is A or G or is absent
KXSRVIMEYQKYXXXXXXXXXIFLISIPSLAQPVXXPA

SEQ ID NO: 10092 - protein, 38 aa, Artificial Sequence
  GFR-binding peptide
  MOD_RES (1), (33), (34): Xaa is C or S
XGEVVMENSLQEVVKDYEDYYVMPLPELETPVXXAKPI

SEQ ID NO: 10093 - protein, 32 aa, Artificial Sequence; identical to SEQ ID NO: 2604
  GFR-binding peptide
  MOD_RES (11), (12), (13), (14), (15): Xaa is A or G
  MOD_RES (16), (17), (18), (19): Xaa is A or G or is absent

SEQ ID NO: 10094 - protein, 37 aa, Artificial Sequence; identical to SEQ ID NO: 2605
  GFR-binding peptide
  MOD_RES (1), (3), (35), (36): Xaa is C or S

SEQ ID NO: 10095 - protein, 33 aa, Artificial Sequence
  GFR-binding peptide
  MOD_RES (31), (32): Xaa is C or S
EVVMENSLQEVVKDYEDYYVMPLPELETPVXXA

SEQ ID NO: 10096 - protein, 38 aa, Artificial Sequence
  GFR-binding peptide
  MOD_RES (1), (34), (35): Xaa is C or S
  MOD_RES (12), (13), (14), (15), (16): Xaa is A or G
  MOD_RES (17), (18), (19), (20): Xaa is A or G or is absent
XSKVVMNSLQEXXXXXXXXXYYLITLPELDQPVXXPSA

SEQ ID NO: 10097 - protein, 38 aa, Artificial Sequence
  GFR-binding peptide
  MOD_RES (1), (3), (34), (35): Xaa is C or S
XKXSRVIMNSLQEVKPKRGVYYLITLPELAQPVXXPAA

SEQ ID NO: 10098 - protein, 36 aa, Artificial Sequence
  GFR-binding peptide
  MOD_RES (33), (34): Xaa is C or S
  MOD_RES (11), (12), (13), (14), (15): Xaa is A or G
  MOD_RES (16), (17), (18), (19): Xaa is A or G or is absent
RVVMNNSLQEXXXXXXXXXYYVVPLPELQTPAXXPK

SEQ ID NO: 10099 - protein, 33 aa, Artificial Sequence; identical to SEQ ID NO: 2612
  GFR-binding peptide
  MOD_RES (1), (1): Xaa is C or S
  MOD_RES (12), (13), (14), (15), (16): Xaa is A or G
  MOD_RES (17), (18), (19), (20): Xaa is A or G or is absent

SEQ ID NO: 10100 - protein, 35 aa, Artificial Sequence; identical to SEQ ID NO: 2614
  GFR-binding peptide
  MOD_RES (33), (34): Xaa is C or S
  MOD_RES (11), (12), (13), (14), (15): Xaa is A or G
  MOD_RES (16), (17), (18), (19): Xaa is A or G or is absent

SEQ ID NO: 10101 - protein, 34 aa, Artificial Sequence
  GFR-binding peptide
  MOD_RES (1), (3): Xaa is C or S
XGXGEVVMENSLQEVVKDYEDYYVMPLPELETPV

SEQ ID NO: 10102 - protein, 40 aa, Artificial Sequence; identical to SEQ ID NO: 2618
  GFR-binding peptide
  MOD_RES (2), (4), (35), (36): Xaa is C or S

SEQ ID NO: 10103 - protein, 35 aa, Artificial Sequence
  GFR-binding peptide
  MOD_RES (2), (4), (35): Xaa is C or S
SXKXSKVVMEYQKYVKPTRGVIFLISIPSLDQPVX

SEQ ID NO: 10104 - protein, 39 aa, Artificial Sequence
  GFR-binding peptide
  MOD_RES (2), (4), (37), (38): Xaa is C or S
  MOD_RES (15), (16), (17), (18), (19): Xaa is A or G
  MOD_RES (20), (21), (22), (23): Xaa is A or G or is absent
SXKXSKVVMNSLQEXXXXXXXXXYYLITLPELDQPVXXP

SEQ ID NO: 10105 - protein, 40 aa, Artificial Sequence
  GFR-binding peptide
  MOD_RES (1), (3), (36), (37): Xaa is C or S
  MOD_RES (14), (15), (16), (17), (18): Xaa is A or G
  MOD_RES (19), (20), (21), (22): Xaa is A or G or is absent
XKXSKVIMNSLQEXXXXXXXXXYYVIPLPELDQSVXXPSA

SEQ ID NO: 10106 - protein, 36 aa, Artificial Sequence
  GFR-binding peptide
  MOD_RES (1), (32), (33): Xaa is C or S
XSKVIMNSLQEIKPTKGIYYVIPLPELDQSVXXPSA

SEQ ID NO: 10107 - protein, 36 aa, Artificial Sequence; identical to SEQ ID NO: 2620
  GFR-binding peptide
  MOD_RES (1), (34), (35): Xaa is C or S
  MOD_RES (12), (13), (14), (15), (16): Xaa is A or G
  MOD_RES (17), (18), (19), (20): Xaa is A or G or is absent

SEQ ID NO: 10108 - protein, 34 aa, Artificial Sequence; identical to SEQ ID NO: 2621
  GFR-binding peptide
  MOD_RES (31), (32): Xaa is C or S

SEQ ID NO: 10109 - protein, 40 aa, Artificial Sequence
  GFR-binding peptide
  MOD_RES (1), (3), (35), (36): Xaa is C or S
XGXSRVVMNNSLQEIVNSSDDYYVVPLPELKTPAXXPKPV

SEQ ID NO: 10110 - protein, 41 aa, Artificial Sequence; identical to SEQ ID NO: 2622
  GFR-binding peptide
  MOD_RES (1), (3), (35), (36): Xaa is C or S

SEQ ID NO: 10111 - protein, 33 aa, Artificial Sequence; identical to SEQ ID NO: 2623
  GFR-binding peptide
  MOD_RES (1), (33): Xaa is C or S

SEQ ID NO: 10112 - protein, 40 aa, Artificial Sequence
  GFR-binding peptide
  MOD_RES (2), (4), (36), (37): Xaa is C or S
RXGXGEVVMDNSLQEVVKENEDYYLMTLPELETPVXXAKP

SEQ ID NO: 10113 - protein, 36 aa, Artificial Sequence
  GFR-binding peptide
  MOD_RES (34), (35): Xaa is C or S
  MOD_RES (12), (13), (14), (15), (16): Xaa is A or G
  MOD_RES (17), (18), (19), (20): Xaa is A or G or is absent
GEVVMDNSLQEXXXXXXXXXYYLMTLPELETPVXXA

SEQ ID NO: 10114 - protein, 31 aa, Artificial Sequence; identical to SEQ ID NO: 2628
  GFR-binding peptide
  MOD_RES (31), (31): Xaa is C or S

SEQ ID NO: 10115 - protein, 37 aa, Artificial Sequence; identical to SEQ ID NO: 2629
  GFR-binding peptide
  MOD_RES (32), (32): Xaa is C or S

SEQ ID NO: 10116 - protein, 35 aa, Artificial Sequence; identical to SEQ ID NO: 2630
  GFR-binding peptide
  MOD_RES (34), (34): Xaa is C or S
  MOD_RES (12), (13), (14), (15), (16): Xaa is A or G
  MOD_RES (17), (18), (19), (20): Xaa is A or G or is absent

SEQ ID NO: 10117 - protein, 41 aa, Artificial Sequence; identical to SEQ ID NO: 2632
  GFR-binding peptide
  MOD_RES (2), (4), (36), (37): Xaa is C or S

SEQ ID NO: 10118 - protein, 35 aa, Artificial Sequence
  GFR-binding peptide
  MOD_RES (33), (34): Xaa is C or S
  MOD_RES (11), (12), (13), (14), (15): Xaa is A or G
  MOD_RES (16), (17), (18), (19): Xaa is A or G or is absent
RVVMNNSLQEXXXXXXXXXYYLVTLPELQTPAXXP

SEQ ID NO: 10119 - protein, 41 aa, Artificial Sequence; identical to SEQ ID NO: 2634
  GFR-binding peptide
  MOD_RES (2), (35), (36): Xaa is C or S
  MOD_RES (13), (14), (15), (16), (17): Xaa is A or G
  MOD_RES (18), (19), (20), (21): Xaa is A or G or is absent

SEQ ID NO: 10120 - protein, 40 aa, Artificial Sequence
  GFR-binding peptide
  MOD_RES (1), (3), (34), (35): Xaa is C or S
XKXSKVVMNSLQEVKPTRGVYYLITLPELDQPVXXPSASA

SEQ ID NO: 10121 - protein, 39 aa, Artificial Sequence; identical to SEQ ID NO: 2637
  GFR-binding peptide
  MOD_RES (2), (4), (37), (38): Xaa is C or S
  MOD_RES (15), (16), (17), (18), (19): Xaa is A or G
  MOD_RES (20), (21), (22), (23): Xaa is A or G or is absent

SEQ ID NO: 10122 - protein, 37 aa, Artificial Sequence; identical to SEQ ID NO: 2638
  GFR-binding peptide
  MOD_RES (1), (33), (34): Xaa is C or S

SEQ ID NO: 10123 - protein, 38 aa, Artificial Sequence; identical to SEQ ID NO: 2639
  GFR-binding peptide
  MOD_RES (34), (34): Xaa is C or S
  MOD_RES (12), (13), (14), (15), (16): Xaa is A or G
  MOD_RES (17), (18), (19), (20): Xaa is A or G or is absent

SEQ ID NO: 10124 - protein, 35 aa, Artificial Sequence
  GFR-binding peptide
  MOD_RES (1), (3), (35): Xaa is C or S
XGXGEVVMENSLQEVVKDYEDYYVMPLPELETPVX

SEQ ID NO: 10125 - protein, 38 aa, Artificial Sequence
  GFR-binding peptide
  MOD_RES (2), (4), (38): Xaa is C or S
  MOD_RES (16), (17), (18), (19), (20): Xaa is A or G
  MOD_RES (21), (22), (23), (24): Xaa is A or G or is absent
HXGXSRVVMNNSLQEXXXXXXXXXYYVVPLPELKTPAX

SEQ ID NO: 10126 - protein, 37 aa, Artificial Sequence
  GFR-binding peptide
  MOD_RES (2), (4): Xaa is C or S
  MOD_RES (16), (17), (18), (19), (20): Xaa is A or G
  MOD_RES (21), (22), (23), (24): Xaa is A or G or is absent
RXGXGEVVMDNSLQEXXXXXXXXXYYVMPLPELETPV

SEQ ID NO: 10127 - protein, 37 aa, Artificial Sequence; identical to SEQ ID NO: 2642
  GFR-binding peptide
  MOD_RES (31), (32): Xaa is C or S

SEQ ID NO: 10128 - protein, 36 aa, Artificial Sequence
  GFR-binding peptide
  MOD_RES (1), (3), (35): Xaa is C or S
XGXSRVVMNNSLQEIVNSSDDYYLVTLPELKTPAXT

SEQ ID NO: 10129 - protein, 37 aa, Artificial Sequence; identical to SEQ ID NO: 2645
  GFR-binding peptide
  MOD_RES (1), (33): Xaa is C or S

SEQ ID NO: 10130 - protein, 32 aa, Artificial Sequence; identical to SEQ ID NO: 2646
  GFR-binding peptide
  MOD_RES (1), (1): Xaa is C or S

SEQ ID NO: 10131 - protein, 39 aa, Artificial Sequence
  GFR-binding peptide
  MOD_RES (33), (34): Xaa is C or S
  MOD_RES (11), (12), (13), (14), (15): Xaa is A or G
  MOD_RES (16), (17), (18), (19): Xaa is A or G or is absent
SKVIMNSLQEXXXXXXXXXYYVIPLPELDQSVXXPSASA

SEQ ID NO: 10132 - protein, 39 aa, Artificial Sequence; identical to SEQ ID NO: 2652
  GFR-binding peptide
  MOD_RES (2), (4), (35), (36): Xaa is C or S

SEQ ID NO: 10133 - protein, 38 aa, Artificial Sequence
  GFR-binding peptide
  MOD_RES (33), (34): Xaa is C or S
  MOD_RES (11), (12), (13), (14), (15): Xaa is A or G
  MOD_RES (16), (17), (18), (19): Xaa is A or G or is absent
SKVVMNSLQEXXXXXXXXXYYLITLPELDQPVXXPSAS

SEQ ID NO: 10134 - protein, 33 aa, Artificial Sequence
  GFR-binding peptide
  MOD_RES (33), (33): Xaa is C or S
  MOD_RES (11), (12), (13), (14), (15): Xaa is A or G
  MOD_RES (16), (17), (18), (19): Xaa is A or G or is absent
SKVVMEYQKYXXXXXXXXXIFLISIPSLDQPVX

SEQ ID NO: 10135 - protein, 36 aa, Artificial Sequence
  GFR-binding peptide
  MOD_RES (2), (34), (35): Xaa is C or S
GXSEVVMDRYKKLVVNNASDFYLISIANLRTPVXXT

SEQ ID NO: 10136 - protein, 37 aa, Artificial Sequence
  GFR-binding peptide
  MOD_RES (2), (4): Xaa is C or S
  MOD_RES (16), (17), (18), (19), (20): Xaa is A or G
  MOD_RES (21), (22), (23), (24): Xaa is A or G or is absent
HXGXSRVVMNNSLQEXXXXXXXXXYYVVPLPELKTPA

SEQ ID NO: 10137 - protein, 36 aa, Artificial Sequence; identical to SEQ ID NO: 2657
  GFR-binding peptide
  MOD_RES (1), (3): Xaa is C or S
  MOD_RES (15), (16), (17), (18), (19): Xaa is A or G
  MOD_RES (20), (21), (22), (23): Xaa is A or G or is absent

SEQ ID NO: 10138 - protein, 38 aa, Artificial Sequence; identical to SEQ ID NO: 2658
  GFR-binding peptide
  MOD_RES (1), (3), (37), (38): Xaa is C or S
  MOD_RES (15), (16), (17), (18), (19): Xaa is A or G
  MOD_RES (20), (21), (22), (23): Xaa is A or G or is absent

SEQ ID NO: 10139 - protein, 38 aa, Artificial Sequence
  GFR-binding peptide
  MOD_RES (2), (36), (37): Xaa is C or S
  MOD_RES (14), (15), (16), (17), (18): Xaa is A or G
  MOD_RES (19), (20), (21), (22): Xaa is A or G or is absent
GXGEVVMEEYQKYXXXXXXXXXIFLMSIPSLETPVXXA

SEQ ID NO: 10140 - protein, 40 aa, Artificial Sequence
  GFR-binding peptide
  MOD_RES (1), (3), (36), (37): Xaa is C or S
  MOD_RES (14), (15), (16), (17), (18): Xaa is A or G
  MOD_RES (19), (20), (21), (22): Xaa is A or G or is absent
XKXSRVIMNSLQEXXXXXXXXXYYVIPLPELAQPVXXPAA

SEQ ID NO: 10141 - protein, 35 aa, Artificial Sequence; identical to SEQ ID NO: 2659
  GFR-binding peptide
  MOD_RES (2), (4), (35): Xaa is C or S

SEQ ID NO: 10142 - protein, 37 aa, Artificial Sequence; identical to SEQ ID NO: 2660
  GFR-binding peptide
  MOD_RES (2), (33), (34): Xaa is C or S

SEQ ID NO: 10143 - protein, 35 aa, Artificial Sequence; identical to SEQ ID NO: 2661
  GFR-binding peptide
  MOD_RES (1), (3), (34), (35): Xaa is C or S

SEQ ID NO: 10144 - protein, 37 aa, Artificial Sequence; identical to SEQ ID NO: 2663
  GFR-binding peptide
  MOD_RES (33), (34): Xaa is C or S
  MOD_RES (11), (12), (13), (14), (15): Xaa is A or G
  MOD_RES (16), (17), (18), (19): Xaa is A or G or is absent

SEQ ID NO: 10145 - protein, 37 aa, Artificial Sequence
  GFR-binding peptide
  MOD_RES (31), (32): Xaa is C or S
EVVMEEYQKYVVKDYEDIFLMSIPSLETPVXXAKPIS

SEQ ID NO: 10146 - protein, 36 aa, Artificial Sequence; identical to SEQ ID NO: 2664
  GFR-binding peptide
  MOD_RES (2), (36): Xaa is C or S
  MOD_RES (14), (15), (16), (17), (18): Xaa is A or G
  MOD_RES (19), (20), (21), (22): Xaa is A or G or is absent

SEQ ID NO: 10147 - protein, 35 aa, Artificial Sequence
  GFR-binding peptide
  MOD_RES (2), (4), (35): Xaa is C or S
SXKXSRVIMNSLQEVKPKRGVYYLITLPELAQPVX

SEQ ID NO: 10148 - protein, 35 aa, Artificial Sequence
  GFR-binding peptide
  MOD_RES (31), (32): Xaa is C or S
RVVMNEYQKYIVNSSDDIFLVSIPSLQTPAXXPKP

SEQ ID NO: 10149 - protein, 40 aa, Artificial Sequence
  GFR-binding peptide
  MOD_RES (2), (36), (37): Xaa is C or S
  MOD_RES (14), (15), (16), (17), (18): Xaa is A or G
  MOD_RES (19), (20), (21), (22): Xaa is A or G or is absent
GXGEVVMDNSLQEXXXXXXXXXYYLMTLPELETPVXXAKP

SEQ ID NO: 10150 - protein, 35 aa, Artificial Sequence
  GFR-binding peptide
  MOD_RES (1), (35): Xaa is C or S
  MOD_RES (13), (14), (15), (16), (17): Xaa is A or G
  MOD_RES (18), (19), (20), (21): Xaa is A or G or is absent
XSEVVMDRYKKLXXXXXXXXXFYLISIANLRTPVX

SEQ ID NO: 10151 - protein, 33 aa, Artificial Sequence; identical to SEQ ID NO: 2667
  GFR-binding peptide
  MOD_RES (1), (1): Xaa is C or S
  MOD_RES (12), (13), (14), (15), (16): Xaa is A or G
  MOD_RES (17), (18), (19), (20): Xaa is A or G or is absent

SEQ ID NO: 10152 - protein, 42 aa, Artificial Sequence
  GFR-binding peptide
  MOD_RES (2), (4), (38), (39): Xaa is C or S
  MOD_RES (16), (17), (18), (19), (20): Xaa is A or G
  MOD_RES (21), (22), (23), (24): Xaa is A or G or is absent
HXGXSRVVMNNSLQEXXXXXXXXXYYLVTLPELKTPAXXPKP

SEQ ID NO: 10153 - protein, 41 aa, Artificial Sequence
  GFR-binding peptide
  MOD_RES (1), (35), (36): Xaa is C or S
  MOD_RES (13), (14), (15), (16), (17): Xaa is A or G
  MOD_RES (18), (19), (20), (21): Xaa is A or G or is absent
XGEVVMDEYQKYXXXXXXXXXIFLMSIPSLETPVXXAKPIK

SEQ ID NO: 10154 - protein, 35 aa, Artificial Sequence
  GFR-binding peptide
  MOD_RES (1), (35): Xaa is C or S
  MOD_RES (13), (14), (15), (16), (17): Xaa is A or G
  MOD_RES (18), (19), (20), (21): Xaa is A or G or is absent
XARVVMNEYQKYXXXXXXXXXIFLVSIPSLQTPAX

SEQ ID NO: 10155 - protein, 34 aa, Artificial Sequence; identical to SEQ ID NO: 2668
  GFR-binding peptide
  MOD_RES (31), (31): Xaa is C or S

SEQ ID NO: 10156 - protein, 36 aa, Artificial Sequence
  GFR-binding peptide
  MOD_RES (33), (33): Xaa is C or S
  MOD_RES (11), (12), (13), (14), (15): Xaa is A or G
  MOD_RES (16), (17), (18), (19): Xaa is A or G or is absent
RVVMNEYQKYXXXXXXXXXIFLVSIPSLKTPAXTPK

SEQ ID NO: 10157 - protein, 39 aa, Artificial Sequence; identical to SEQ ID NO: 2672
  GFR-binding peptide
  MOD_RES (1), (33), (34): Xaa is C or S

SEQ ID NO: 10158 - protein, 38 aa, Artificial Sequence
  GFR-binding peptide
  MOD_RES (1), (3), (34), (35): Xaa is C or S
XKXSKVIMNSLQEIKPTKGIYYVIPLPELDQSVXXPSA

SEQ ID NO: 10159 - protein, 38 aa, Artificial Sequence
  GFR-binding peptide
  MOD_RES (34), (35): Xaa is C or S
  MOD_RES (12), (13), (14), (15), (16): Xaa is A or G
  MOD_RES (17), (18), (19), (20): Xaa is A or G or is absent
SEVVMDQYNKLXXXXXXXXXLYLISIASLRTPVXXTPP

SEQ ID NO: 10160 - protein, 33 aa, Artificial Sequence
  GFR-binding peptide
  MOD_RES (31), (32): Xaa is C or S
RVVMNNSLQEIVNSSDDYYLVTLPELQTPAXXP

SEQ ID NO: 10161 - protein, 38 aa, Artificial Sequence
  GFR-binding peptide
  MOD_RES (34), (35): Xaa is C or S
  MOD_RES (12), (13), (14), (15), (16): Xaa is A or G
  MOD_RES (17), (18), (19), (20): Xaa is A or G or is absent
ARVVMNNSLQEXXXXXXXXXYYVVPLPELQTPAXXPKP

SEQ ID NO: 10162 - protein, 36 aa, Artificial Sequence; identical to SEQ ID NO: 2677
  GFR-binding peptide
  MOD_RES (1), (3), (36): Xaa is C or S
  MOD_RES (14), (15), (16), (17), (18): Xaa is A or G
  MOD_RES (19), (20), (21), (22): Xaa is A or G or is absent

SEQ ID NO: 10163 - protein, 34 aa, Artificial Sequence
  GFR-binding peptide
  MOD_RES (1), (3), (34): Xaa is C or S
XKXSRVIMNSLQEVKPKRGVYYLITLPELAQPVX

SEQ ID NO: 10164 - protein, 39 aa, Artificial Sequence
  GFR-binding peptide
  MOD_RES (2), (4), (36), (37): Xaa is C or S
RXGXSEVVMDNSLQEVVNNASDYYVIPLPELRTPVXXTP

SEQ ID NO: 10165 - protein, 35 aa, Artificial Sequence; identical to SEQ ID NO: 2680
  GFR-binding peptide
  MOD_RES (1), (3), (35): Xaa is C or S

SEQ ID NO: 10166 - protein, 39 aa, Artificial Sequence
  GFR-binding peptide
  MOD_RES (2), (36), (37): Xaa is C or S
  MOD_RES (14), (15), (16), (17), (18): Xaa is A or G
  MOD_RES (19), (20), (21), (22): Xaa is A or G or is absent
GXSRVVMNNSLQEXXXXXXXXXYYVVPLPELKTPAXXPK

SEQ ID NO: 10167 - protein, 36 aa, Artificial Sequence; identical to SEQ ID NO: 2681
  GFR-binding peptide
  MOD_RES (32), (33): Xaa is C or S

SEQ ID NO: 10168 - protein, 38 aa, Artificial Sequence
  GFR-binding peptide
  MOD_RES (32), (33): Xaa is C or S
ARVVMNEYQKYIVNSSDDIFLVSIPSLQTPAXXPKPVT

SEQ ID NO: 10169 - protein, 31 aa, Artificial Sequence
  GFR-binding peptide
SEVVMDNSLQEVVNNASDYYVIPLPELRTPV

SEQ ID NO: 10170 - protein, 41 aa, Artificial Sequence
  GFR-binding peptide
  MOD_RES (2), (4), (36), (37): Xaa is C or S
RXGXGEVVMDNSLQEVVKENEDYYLMTLPELETPVXXAKPI

SEQ ID NO: 10171 - protein, 35 aa, Artificial Sequence
  GFR-binding peptide
  MOD_RES (32), (33): Xaa is C or S
SEVVMDNSLQEVVNNASDYYVIPLPELRTPVXXTP

SEQ ID NO: 10172 - protein, 35 aa, Artificial Sequence; identical to SEQ ID NO: 2683
  GFR-binding peptide
  MOD_RES (32), (32): Xaa is C or S

SEQ ID NO: 10173 - protein, 31 aa, Artificial Sequence
  GFR-binding peptide
  MOD_RES (31), (31): Xaa is C or S
SRVIMNSLQEVKPKRGVYYLITLPELAQPVX

SEQ ID NO: 10174 - protein, 37 aa, Artificial Sequence; identical to SEQ ID NO: 2690
  GFR-binding peptide
  MOD_RES (2), (4), (36), (37): Xaa is C or S

SEQ ID NO: 10175 - protein, 38 aa, Artificial Sequence
  GFR-binding peptide
  MOD_RES (33), (34): Xaa is C or S
  MOD_RES (11), (12), (13), (14), (15): Xaa is A or G
  MOD_RES (16), (17), (18), (19): Xaa is A or G or is absent
EVVMENSLQEXXXXXXXXXYYVMPLPELETPVXXAKPI

SEQ ID NO: 10176 - protein, 39 aa, Artificial Sequence
  GFR-binding peptide
  MOD_RES (33), (34): Xaa is C or S
  MOD_RES (11), (12), (13), (14), (15): Xaa is A or G
  MOD_RES (16), (17), (18), (19): Xaa is A or G or is absent
EVVMDEYQKYXXXXXXXXXIFLISIPSLRTPVXXTPPTS

SEQ ID NO: 10177 - protein, 42 aa, Artificial Sequence
  GFR-binding peptide
  MOD_RES (1), (3), (37), (38): Xaa is C or S
  MOD_RES (15), (16), (17), (18), (19): Xaa is A or G
  MOD_RES (20), (21), (22), (23): Xaa is A or G or is absent
XGXGEVVMDNSLQEXXXXXXXXXYYVMPLPELETPVXXAKPI

SEQ ID NO: 10178 - protein, 34 aa, Artificial Sequence
  GFR-binding peptide
  MOD_RES (1), (3), (34): Xaa is C or S
XKXSKVIMNSLQEIKPTKGIYYVIPLPELDQSVX

SEQ ID NO: 10179 - protein, 36 aa, Artificial Sequence
  GFR-binding peptide
  MOD_RES (33), (34): Xaa is C or S
  MOD_RES (11), (12), (13), (14), (15): Xaa is A or G
  MOD_RES (16), (17), (18), (19): Xaa is A or G or is absent
SKVVMNSLQEXXXXXXXXXYYVIPLPELDQPVXXPS

SEQ ID NO: 10180 - protein, 38 aa, Artificial Sequence
  GFR-binding peptide
  MOD_RES (34), (35): Xaa is C or S
  MOD_RES (12), (13), (14), (15), (16): Xaa is A or G
  MOD_RES (17), (18), (19), (20): Xaa is A or G or is absent
GEVVMDEYQKYXXXXXXXXXIFLMSIPSLETPVXXAKP

SEQ ID NO: 10181 - protein, 40 aa, Artificial Sequence
  GFR-binding peptide
  MOD_RES (2), (4), (38), (39): Xaa is C or S
  MOD_RES (16), (17), (18), (19), (20): Xaa is A or G
  MOD_RES (21), (22), (23), (24): Xaa is A or G or is absent
RXGXGEVVMDNSLQEXXXXXXXXXYYLMTLPELETPVXXA

SEQ ID NO: 10182 - protein, 41 aa, Artificial Sequence; identical to SEQ ID NO: 2697
  GFR-binding peptide
  MOD_RES (1), (35), (36): Xaa is C or S
  MOD_RES (13), (14), (15), (16), (17): Xaa is A or G
  MOD_RES (18), (19), (20), (21): Xaa is A or G or is absent

SEQ ID NO: 10183 - protein, 34 aa, Artificial Sequence; identical to SEQ ID NO: 2698
  GFR-binding peptide
  MOD_RES (2), (4): Xaa is C or S

SEQ ID NO: 10184 - protein, 39 aa, Artificial Sequence
  GFR-binding peptide
  MOD_RES (1), (35), (36): Xaa is C or S
  MOD_RES (13), (14), (15), (16), (17): Xaa is A or G
  MOD_RES (18), (19), (20), (21): Xaa is A or G or is absent
XGEVVMENSLQEXXXXXXXXXYYVMPLPELETPVXXAKP

SEQ ID NO: 10185 - protein, 41 aa, Artificial Sequence
  GFR-binding peptide
  MOD_RES (2), (4), (36), (37): Xaa is C or S
HXGXSRVVMNEYQKYIVNSSDDIFLVSIPSLKTPAXXPKPV

SEQ ID NO: 10186 - protein, 35 aa, Artificial Sequence
  GFR-binding peptide
  MOD_RES (1), (32), (33): Xaa is C or S
XSRVIMEYQKYVKPKRGVIFLISIPSLAQPVXXPA

SEQ ID NO: 10187 - protein, 30 aa, Artificial Sequence; identical to SEQ ID NO: 2703
  GFR-binding peptide

SEQ ID NO: 10188 - protein, 35 aa, Artificial Sequence; identical to SEQ ID NO: 2705
  GFR-binding peptide
  MOD_RES (2), (34), (35): Xaa is C or S

SEQ ID NO: 10189 - protein, 39 aa, Artificial Sequence
  GFR-binding peptide
  MOD_RES (34), (35): Xaa is C or S
  MOD_RES (12), (13), (14), (15), (16): Xaa is A or G
  MOD_RES (17), (18), (19), (20): Xaa is A or G or is absent
SRVVMNNSLQEXXXXXXXXXYYLVTLPELKTPAXXPKPV

SEQ ID NO: 10190 - protein, 41 aa, Artificial Sequence
  GFR-binding peptide
  MOD_RES (1), (35), (36): Xaa is C or S
  MOD_RES (13), (14), (15), (16), (17): Xaa is A or G
  MOD_RES (18), (19), (20), (21): Xaa is A or G or is absent
XSRVVMNEYQKYXXXXXXXXXIFLVSIPSLKTPAXXPKPVY

SEQ ID NO: 10191 - protein, 33 aa, Artificial Sequence
  GFR-binding peptide
  MOD_RES (32), (33): Xaa is C or S
SEVVMDQYNKLVVNNASDLYLISIASLRTPVXX

SEQ ID NO: 10192 - protein, 37 aa, Artificial Sequence
  GFR-binding peptide
  MOD_RES (34), (35): Xaa is C or S
  MOD_RES (12), (13), (14), (15), (16): Xaa is A or G
  MOD_RES (17), (18), (19), (20): Xaa is A or G or is absent
SRVVMNEYQKYXXXXXXXXXIFLVSIPSLKTPAXXPK

SEQ ID NO: 10193 - protein, 34 aa, Artificial Sequence; identical to SEQ ID NO: 2709
  GFR-binding peptide
  MOD_RES (1), (1): Xaa is C or S
  MOD_RES (13), (14), (15), (16), (17): Xaa is A or G
  MOD_RES (18), (19), (20), (21): Xaa is A or G or is absent

SEQ ID NO: 10194 - protein, 41 aa, Artificial Sequence
  GFR-binding peptide
  MOD_RES (2), (4), (35), (36): Xaa is C or S
SXKXSKVIMNSLQEIKPTKGIYYLITLPELDQSVXXPSASA

SEQ ID NO: 10195 - protein, 39 aa, Artificial Sequence; identical to SEQ ID NO: 2710
  GFR-binding peptide
  MOD_RES (1), (3), (35), (36): Xaa is C or S

SEQ ID NO: 10196 - protein, 36 aa, Artificial Sequence
  GFR-binding peptide
  MOD_RES (1), (3), (35), (36): Xaa is C or S
XGXSEVVMDEYQKYVVNNASDIFLISIPSLRTPVXX

SEQ ID NO: 10197 - protein, 34 aa, Artificial Sequence; identical to SEQ ID NO: 2714
  GFR-binding peptide
  MOD_RES (34), (34): Xaa is C or S
  MOD_RES (12), (13), (14), (15), (16): Xaa is A or G
  MOD_RES (17), (18), (19), (20): Xaa is A or G or is absent

SEQ ID NO: 10198 - protein, 34 aa, Artificial Sequence
  GFR-binding peptide
  MOD_RES (31), (31): Xaa is C or S
RVVMNNSLQEIVNSSDDYYVVPLPELKTPAXTPK

SEQ ID NO: 10199 - protein, 35 aa, Artificial Sequence
  GFR-binding peptide
  MOD_RES (34), (35): Xaa is C or S
  MOD_RES (12), (13), (14), (15), (16): Xaa is A or G
  MOD_RES (17), (18), (19), (20): Xaa is A or G or is absent
SRVVMNNSLQEXXXXXXXXXYYVVPLPELKTPAXX

SEQ ID NO: 10200 - protein, 37 aa, Artificial Sequence
  GFR-binding peptide
  MOD_RES (34), (34): Xaa is C or S
  MOD_RES (12), (13), (14), (15), (16): Xaa is A or G
  MOD_RES (17), (18), (19), (20): Xaa is A or G or is absent
SRVVMNEYQKYXXXXXXXXXIFLVSIPSLKTPAXTPK

SEQ ID NO: 10201 - protein, 37 aa, Artificial Sequence
  GFR-binding peptide
  MOD_RES (31), (31): Xaa is C or S
RVVMNNSLQEIVNSSDDYYVVPLPELKTPAXTPKTVH

SEQ ID NO: 10202 - protein, 35 aa, Artificial Sequence; identical to SEQ ID NO: 2719
  GFR-binding peptide
  MOD_RES (34), (35): Xaa is C or S
  MOD_RES (12), (13), (14), (15), (16): Xaa is A or G
  MOD_RES (17), (18), (19), (20): Xaa is A or G or is absent

SEQ ID NO: 10203 - protein, 32 aa, Artificial Sequence
  GFR-binding peptide
  MOD_RES (32), (32): Xaa is C or S
SEVVMDRYKKLVVNNASDFYLISIANLRTPVX

SEQ ID NO: 10204 - protein, 41 aa, Artificial Sequence
  GFR-binding peptide
  MOD_RES (2), (35), (36): Xaa is C or S
  MOD_RES (13), (14), (15), (16), (17): Xaa is A or G
  MOD_RES (18), (19), (20), (21): Xaa is A or G or is absent
KXSKVVMNSLQEXXXXXXXXXYYVIPLPELDQPVXXPSASA

SEQ ID NO: 10205 - protein, 33 aa, Artificial Sequence; identical to SEQ ID NO: 2723
  GFR-binding peptide
  MOD_RES (32), (33): Xaa is C or S

SEQ ID NO: 10206 - protein, 34 aa, Artificial Sequence
  GFR-binding peptide
  MOD_RES (33), (34): Xaa is C or S
  MOD_RES (11), (12), (13), (14), (15): Xaa is A or G
  MOD_RES (16), (17), (18), (19): Xaa is A or G or is absent
EVVMDEYQKYXXXXXXXXXIFLMSIPSLETPVXX

SEQ ID NO: 10207 - protein, 36 aa, Artificial Sequence; identical to SEQ ID NO: 2728
  GFR-binding peptide
  MOD_RES (2), (35), (36): Xaa is C or S
  MOD_RES (13), (14), (15), (16), (17): Xaa is A or G
  MOD_RES (18), (19), (20), (21): Xaa is A or G or is absent

SEQ ID NO: 10208 - protein, 34 aa, Artificial Sequence
  GFR-binding peptide
  MOD_RES (1), (33): Xaa is C or S
XSRVVMNNSLQEIVNSSDDYYLVTLPELKTPAXT

SEQ ID NO: 10209 - protein, 42 aa, Artificial Sequence
  GFR-binding peptide
  MOD_RES (2), (36), (37): Xaa is C or S
  MOD_RES (14), (15), (16), (17), (18): Xaa is A or G
  MOD_RES (19), (20), (21), (22): Xaa is A or G or is absent
GXSEVVMDNSLQEXXXXXXXXXYYVIPLPELRTPVXXTPPTS

SEQ ID NO: 10210 - protein, 42 aa, Artificial Sequence
  GFR-binding peptide
  MOD_RES (2), (36), (37): Xaa is C or S
  MOD_RES (14), (15), (16), (17), (18): Xaa is A or G
  MOD_RES (19), (20), (21), (22): Xaa is A or G or is absent
GXGEVVMEEYQKYXXXXXXXXXIFLMSIPSLETPVXXAKPIS

SEQ ID NO: 10211 - protein, 36 aa, Artificial Sequence
  GFR-binding peptide
  MOD_RES (1), (33), (34): Xaa is C or S
XGEVVMDNSLQEVVKENEDYYLMTLPELETPVXXAK

SEQ ID NO: 10212 - protein, 33 aa, Artificial Sequence
  GFR-binding peptide
  MOD_RES (31), (32): Xaa is C or S
SKVIMEYQKYIKPTKGIIFLISIPSLDQSVXXP

SEQ ID NO: 10213 - protein, 37 aa, Artificial Sequence
  GFR-binding peptide
  MOD_RES (1), (32), (33): Xaa is C or S
XSKVIMEYQKYIKPTKGIIFLISIPSLDQSVXXPSAS

SEQ ID NO: 10214 - protein, 37 aa, Artificial Sequence; identical to SEQ ID NO: 2733
  GFR-binding peptide
  MOD_RES (33), (34): Xaa is C or S
  MOD_RES (11), (12), (13), (14), (15): Xaa is A or G
  MOD_RES (16), (17), (18), (19): Xaa is A or G or is absent

SEQ ID NO: 10215 - protein, 41 aa, Artificial Sequence
  GFR-binding peptide
  MOD_RES (1), (35), (36): Xaa is C or S
  MOD_RES (13), (14), (15), (16), (17): Xaa is A or G
  MOD_RES (18), (19), (20), (21): Xaa is A or G or is absent
XSEVVMDQYNKLXXXXXXXXXLYLISIASLRTPVXXTPPTS

SEQ ID NO: 10216 - protein, 36 aa, Artificial Sequence; identical to SEQ ID NO: 2734
  GFR-binding peptide
  MOD_RES (2), (34), (35): Xaa is C or S

SEQ ID NO: 10217 - protein, 36 aa, Artificial Sequence; identical to SEQ ID NO: 2735
  GFR-binding peptide
  MOD_RES (2), (34), (35): Xaa is C or S

SEQ ID NO: 10218 - protein, 32 aa, Artificial Sequence; identical to SEQ ID NO: 2736
  GFR-binding peptide
  MOD_RES (31), (32): Xaa is C or S

SEQ ID NO: 10219 - protein, 30 aa, Artificial Sequence; identical to SEQ ID NO: 2738
  GFR-binding peptide

SEQ ID NO: 10220 - protein, 40 aa, Artificial Sequence; identical to SEQ ID NO: 2739
  GFR-binding peptide
  MOD_RES (2), (4), (36), (37): Xaa is C or S

SEQ ID NO: 10221 - protein, 38 aa, Artificial Sequence
  GFR-binding peptide
  MOD_RES (1), (3), (37), (38): Xaa is C or S
  MOD_RES (15), (16), (17), (18), (19): Xaa is A or G
  MOD_RES (20), (21), (22), (23): Xaa is A or G or is absent
XGXARVVMNNSLQEXXXXXXXXXYYLVTLPELQTPAXX

SEQ ID NO: 10222 - protein, 33 aa, Artificial Sequence; identical to SEQ ID NO: 2740
  GFR-binding peptide
  MOD_RES (32), (33): Xaa is C or S

SEQ ID NO: 10223 - protein, 33 aa, Artificial Sequence; identical to SEQ ID NO: 2741
  GFR-binding peptide
  MOD_RES (1), (33): Xaa is C or S

SEQ ID NO: 10224 - protein, 32 aa, Artificial Sequence
  GFR-binding peptide
  MOD_RES (11), (12), (13), (14), (15): Xaa is A or G
  MOD_RES (16), (17), (18), (19): Xaa is A or G or is absent
EVVMDRYKKLXXXXXXXXXFYLISIANLRTPV

SEQ ID NO: 10225 - protein, 34 aa, Artificial Sequence
  GFR-binding peptide
  MOD_RES (34), (34): Xaa is C or S
  MOD_RES (12), (13), (14), (15), (16): Xaa is A or G
  MOD_RES (17), (18), (19), (20): Xaa is A or G or is absent
SRVVMNNSLQEXXXXXXXXXYYVVPLPELKTPAX

SEQ ID NO: 10226 - protein, 31 aa, Artificial Sequence; identical to SEQ ID NO: 2746
  GFR-binding peptide
  MOD_RES (1), (1): Xaa is C or S

SEQ ID NO: 10227 - protein, 40 aa, Artificial Sequence
  GFR-binding peptide
  MOD_RES (2), (34): Xaa is C or S
GXSRVVMNNSLQEIVNSSDDYYVVPLPELKTPAXTPKTVH

SEQ ID NO: 10228 - protein, 39 aa, Artificial Sequence; identical to SEQ ID NO: 2747
  GFR-binding peptide
  MOD_RES (1), (34), (35): Xaa is C or S
  MOD_RES (12), (13), (14), (15), (16): Xaa is A or G
  MOD_RES (17), (18), (19), (20): Xaa is A or G or is absent

SEQ ID NO: 10229 - protein, 40 aa, Artificial Sequence
  GFR-binding peptide
  MOD_RES (1), (35), (36): Xaa is C or S
  MOD_RES (13), (14), (15), (16), (17): Xaa is A or G
  MOD_RES (18), (19), (20), (21): Xaa is A or G or is absent
XARVVMNNSLQEXXXXXXXXXYYVVPLPELQTPAXXPKPV

SEQ ID NO: 10230 - protein, 31 aa, Artificial Sequence
  GFR-binding peptide
SRVVMNNSLQEIVNSSDDYYLVTLPELKTPA

SEQ ID NO: 10231 - protein, 35 aa, Artificial Sequence
  GFR-binding peptide
  MOD_RES (2), (2): Xaa is C or S
  MOD_RES (14), (15), (16), (17), (18): Xaa is A or G
  MOD_RES (19), (20), (21), (22): Xaa is A or G or is absent
GXGEVVMDEYQKYXXXXXXXXXIFLMSIPSLETPV

SEQ ID NO: 10232 - protein, 37 aa, Artificial Sequence
  GFR-binding peptide
  MOD_RES (34), (35): Xaa is C or S
  MOD_RES (12), (13), (14), (15), (16): Xaa is A or G
  MOD_RES (17), (18), (19), (20): Xaa is A or G or is absent
SEVVMDEYQKYXXXXXXXXXIFLISIPSLRTPVXXTP

SEQ ID NO: 10233 - protein, 37 aa, Artificial Sequence
  GFR-binding peptide
  MOD_RES (34), (35): Xaa is C or S
  MOD_RES (12), (13), (14), (15), (16): Xaa is A or G
  MOD_RES (17), (18), (19), (20): Xaa is A or G or is absent
GEVVMDNSLQEXXXXXXXXXYYVMPLPELETPVXXAK

SEQ ID NO: 10234 - protein, 38 aa, Artificial Sequence
  GFR-binding peptide
  MOD_RES (2), (4), (38): Xaa is C or S
  MOD_RES (16), (17), (18), (19), (20): Xaa is A or G
  MOD_RES (21), (22), (23), (24): Xaa is A or G or is absent
RXGXGEVVMDNSLQEXXXXXXXXXYYVMPLPELETPVX

SEQ ID NO: 10235 - protein, 41 aa, Artificial Sequence; identical to SEQ ID NO: 2751
  GFR-binding peptide
  MOD_RES (2), (4), (37), (38): Xaa is C or S
  MOD_RES (15), (16), (17), (18), (19): Xaa is A or G
  MOD_RES (20), (21), (22), (23): Xaa is A or G or is absent

SEQ ID NO: 10236 - protein, 39 aa, Artificial Sequence; identical to SEQ ID NO: 2753
  GFR-binding peptide
  MOD_RES (33), (34): Xaa is C or S
  MOD_RES (11), (12), (13), (14), (15): Xaa is A or G
  MOD_RES (16), (17), (18), (19): Xaa is A or G or is absent

SEQ ID NO: 10237 - protein, 36 aa, Artificial Sequence
  GFR-binding peptide
  MOD_RES (1), (3), (35), (36): Xaa is C or S
XGXARVVMNNSLQEIVNSSDDYYLVTLPELQTPAXX

SEQ ID NO: 10238 - protein, 39 aa, Artificial Sequence
  GFR-binding peptide
  MOD_RES (34), (35): Xaa is C or S
  MOD_RES (12), (13), (14), (15), (16): Xaa is A or G
  MOD_RES (17), (18), (19), (20): Xaa is A or G or is absent
GEVVMEEYQKYXXXXXXXXXIFLMSIPSLETPVXXAKPI

SEQ ID NO: 10239 - protein, 37 aa, Artificial Sequence; identical to SEQ ID NO: 2755
  GFR-binding peptide
  MOD_RES (1), (33), (34): Xaa is C or S

SEQ ID NO: 10240 - protein, 34 aa, Artificial Sequence
  GFR-binding peptide
  MOD_RES (33), (34): Xaa is C or S
  MOD_RES (11), (12), (13), (14), (15): Xaa is A or G
  MOD_RES (16), (17), (18), (19): Xaa is A or G or is absent
SKVIMEYQKYXXXXXXXXXIFLISIPSLDQSVXX

SEQ ID NO: 10241 - protein, 33 aa, Artificial Sequence; identical to SEQ ID NO: 2757
  GFR-binding peptide
  MOD_RES (1), (33): Xaa is C or S

SEQ ID NO: 10242 - protein, 38 aa, Artificial Sequence
  GFR-binding peptide
  MOD_RES (1), (34), (35): Xaa is C or S
  MOD_RES (12), (13), (14), (15), (16): Xaa is A or G
  MOD_RES (17), (18), (19), (20): Xaa is A or G or is absent
XSRVIMEYQKYXXXXXXXXXIFLISIPSLAQPVXXPAA

SEQ ID NO: 10243 - protein, 42 aa, Artificial Sequence
  GFR-binding peptide
  MOD_RES (1), (3), (37), (38): Xaa is C or S
  MOD_RES (15), (16), (17), (18), (19): Xaa is A or G
  MOD_RES (20), (21), (22), (23): Xaa is A or G or is absent
XGXGEVVMENSLQEXXXXXXXXXYYVMPLPELETPVXXAKPI

SEQ ID NO: 10244 - protein, 30 aa, Artificial Sequence
  GFR-binding peptide
EVVMENSLQEVVKDYEDYYLMTLPELETPV

SEQ ID NO: 10245 - protein, 37 aa, Artificial Sequence
  GFR-binding peptide
  MOD_RES (31), (32): Xaa is C or S
RVVMNNSLQEIVNSSDDYYVVPLPELKTPAXXPKPVY

SEQ ID NO: 10246 - protein, 33 aa, Artificial Sequence; identical to SEQ ID NO: 2763
  GFR-binding peptide
  MOD_RES (31), (32): Xaa is C or S

SEQ ID NO: 10247 - protein, 36 aa, Artificial Sequence
  GFR-binding peptide
  MOD_RES (2), (4), (36): Xaa is C or S
HXGXSRVVMNNSLQEIVNSSDDYYLVTLPELKTPAX

SEQ ID NO: 10248 - protein, 40 aa, Artificial Sequence
  GFR-binding peptide
  MOD_RES (2), (34), (35): Xaa is C or S
GXSEVVMDNSLQEVVNNASDYYLITLPELRTPVXXTPPTS

SEQ ID NO: 10249 - protein, 43 aa, Artificial Sequence
  GFR-binding peptide
  MOD_RES (2), (4), (37), (38): Xaa is C or S
  MOD_RES (15), (16), (17), (18), (19): Xaa is A or G
  MOD_RES (20), (21), (22), (23): Xaa is A or G or is absent
SXKXSKVVMNSLQEXXXXXXXXXYYLITLPELDQPVXXPSASA

SEQ ID NO: 10250 - protein, 37 aa, Artificial Sequence
  GFR-binding peptide
  MOD_RES (1), (33), (34): Xaa is C or S
XSEVVMDEYQKYVVNNASDIFLISIPSLRTPVXXTPP

SEQ ID NO: 10251 - protein, 40 aa, Artificial Sequence
  GFR-binding peptide
  MOD_RES (2), (36), (37): Xaa is C or S
  MOD_RES (14), (15), (16), (17), (18): Xaa is A or G
  MOD_RES (19), (20), (21), (22): Xaa is A or G or is absent
GXSEVVMDQYNKLXXXXXXXXXLYLISIASLRTPVXXTPP

SEQ ID NO: 10252 - protein, 35 aa, Artificial Sequence
  GFR-binding peptide
  MOD_RES (1), (3), (34), (35): Xaa is C or S
XKXSRVIMEYQKYVKPKRGVIFLISIPSLAQPVXX

SEQ ID NO: 10253 - protein, 37 aa, Artificial Sequence; identical to SEQ ID NO: 2766
  GFR-binding peptide
  MOD_RES (1), (35), (36): Xaa is C or S
  MOD_RES (13), (14), (15), (16), (17): Xaa is A or G
  MOD_RES (18), (19), (20), (21): Xaa is A or G or is absent

SEQ ID NO: 10254 - protein, 41 aa, Artificial Sequence
  GFR-binding peptide
  MOD_RES (1), (3), (36), (37): Xaa is C or S
  MOD_RES (14), (15), (16), (17), (18): Xaa is A or G
  MOD_RES (19), (20), (21), (22): Xaa is A or G or is absent
XKXSRVIMEYQKYXXXXXXXXXIFLISIPSLAQPVXXPAAS

SEQ ID NO: 10255 - protein, 36 aa, Artificial Sequence
  GFR-binding peptide
  MOD_RES (32), (32): Xaa is C or S
SRVVMNNSLQEIVNSSDDYYVVPLPELKTPAXTPKT

SEQ ID NO: 10256 - protein, 40 aa, Artificial Sequence; identical to SEQ ID NO: 2769
  GFR-binding peptide
  MOD_RES (1), (34), (35): Xaa is C or S
  MOD_RES (12), (13), (14), (15), (16): Xaa is A or G
  MOD_RES (17), (18), (19), (20): Xaa is A or G or is absent

SEQ ID NO: 10257 - protein, 35 aa, Artificial Sequence
  GFR-binding peptide
  MOD_RES (1), (3), (34), (35): Xaa is C or S
XKXSKVIMEYQKYIKPTKGIIFLISIPSLDQSVXX

SEQ ID NO: 10258 - protein, 36 aa, Artificial Sequence
  GFR-binding peptide
  MOD_RES (33), (34): Xaa is C or S
  MOD_RES (11), (12), (13), (14), (15): Xaa is A or G
  MOD_RES (16), (17), (18), (19): Xaa is A or G or is absent
SKVVMEYQKYXXXXXXXXXIFLISIPSLDQPVXXPS

SEQ ID NO: 10259 - protein, 32 aa, Artificial Sequence; identical to SEQ ID NO: 2771
  GFR-binding peptide
  MOD_RES (11), (12), (13), (14), (15): Xaa is A or G
  MOD_RES (16), (17), (18), (19): Xaa is A or G or is absent

SEQ ID NO: 10260 - protein, 33 aa, Artificial Sequence; identical to SEQ ID NO: 2773
  GFR-binding peptide
  MOD_RES (1), (33): Xaa is C or S

SEQ ID NO: 10261 - protein, 37 aa, Artificial Sequence; identical to SEQ ID NO: 2780
  GFR-binding peptide
  MOD_RES (1), (34), (35): Xaa is C or S
  MOD_RES (12), (13), (14), (15), (16): Xaa is A or G
  MOD_RES (17), (18), (19), (20): Xaa is A or G or is absent

SEQ ID NO: 10262 - protein, 39 aa, Artificial Sequence
  GFR-binding peptide
  MOD_RES (2), (4), (38), (39): Xaa is C or S
  MOD_RES (16), (17), (18), (19), (20): Xaa is A or G
  MOD_RES (21), (22), (23), (24): Xaa is A or G or is absent
HXGXSRVVMNNSLQEXXXXXXXXXYYLVTLPELKTPAXX

SEQ ID NO: 10263 - protein, 41 aa, Artificial Sequence
  GFR-binding peptide
  MOD_RES (1), (3), (36), (37): Xaa is C or S
  MOD_RES (14), (15), (16), (17), (18): Xaa is A or G
  MOD_RES (19), (20), (21), (22): Xaa is A or G or is absent
XKXSKVIMEYQKYXXXXXXXXXIFLISIPSLDQSVXXPSAS

SEQ ID NO: 10264 - protein, 37 aa, Artificial Sequence
  GFR-binding peptide
  MOD_RES (1), (3), (34), (35): Xaa is C or S
XKXSRVIMNSLQEVKPKRGVYYVIPLPELAQPVXXPA

SEQ ID NO: 10265 - protein, 32 aa, Artificial Sequence; identical to SEQ ID NO: 2782
  GFR-binding peptide
  MOD_RES (32), (32): Xaa is C or S

SEQ ID NO: 10266 - protein, 40 aa, Artificial Sequence
  GFR-binding peptide
  MOD_RES (2), (36), (37): Xaa is C or S
  MOD_RES (14), (15), (16), (17), (18): Xaa is A or G
  MOD_RES (19), (20), (21), (22): Xaa is A or G or is absent
GXSEVVMDEYQKYXXXXXXXXXIFLISIPSLRTPVXXTPP

SEQ ID NO: 10267 - protein, 35 aa, Artificial Sequence; identical to SEQ ID NO: 2785
  GFR-binding peptide
  MOD_RES (2), (4): Xaa is C or S

SEQ ID NO: 10268 - protein, 41 aa, Artificial Sequence; identical to SEQ ID NO: 2786
  GFR-binding peptide
  MOD_RES (1), (3), (37), (38): Xaa is C or S
  MOD_RES (15), (16), (17), (18), (19): Xaa is A or G
  MOD_RES (20), (21), (22), (23): Xaa is A or G or is absent

SEQ ID NO: 10269 - protein, 35 aa, Artificial Sequence; identical to SEQ ID NO: 2789
  GFR-binding peptide
  MOD_RES (33), (34): Xaa is C or S
  MOD_RES (11), (12), (13), (14), (15): Xaa is A or G
  MOD_RES (16), (17), (18), (19): Xaa is A or G or is absent

SEQ ID NO: 10270 - protein, 37 aa, Artificial Sequence; identical to SEQ ID NO: 2791
  GFR-binding peptide
  MOD_RES (1), (3), (34), (35): Xaa is C or S

SEQ ID NO: 10271 - protein, 36 aa, Artificial Sequence; identical to SEQ ID NO: 2792
  GFR-binding peptide
  MOD_RES (32), (33): Xaa is C or S

SEQ ID NO: 10272 - protein, 32 aa, Artificial Sequence; identical to SEQ ID NO: 2794
  GFR-binding peptide
  MOD_RES (31), (32): Xaa is C or S

SEQ ID NO: 10273 - protein, 41 aa, Artificial Sequence
  GFR-binding peptide
  MOD_RES (2), (4), (38): Xaa is C or S
  MOD_RES (16), (17), (18), (19), (20): Xaa is A or G
  MOD_RES (21), (22), (23), (24): Xaa is A or G or is absent
HXGXSRVVMNNSLQEXXXXXXXXXYYLVTLPELKTPAXTPK

SEQ ID NO: 10274 - protein, 35 aa, Artificial Sequence
  GFR-binding peptide
  MOD_RES (1), (3), (34), (35): Xaa is C or S
XKXSKVVMNSLQEVKPTRGVYYVIPLPELDQPVXX

SEQ ID NO: 10275 - protein, 37 aa, Artificial Sequence
  GFR-binding peptide
  MOD_RES (1), (3), (35), (36): Xaa is C or S
XGXSEVVMDNSLQEVVNNASDYYVIPLPELRTPVXXT

SEQ ID NO: 10276 - protein, 36 aa, Artificial Sequence
  GFR-binding peptide
  MOD_RES (34), (35): Xaa is C or S
  MOD_RES (12), (13), (14), (15), (16): Xaa is A or G
  MOD_RES (17), (18), (19), (20): Xaa is A or G or is absent
GEVVMDEYQKYXXXXXXXXXIFLMSIPSLETPVXXA

SEQ ID NO: 10277 - protein, 38 aa, Artificial Sequence
  GFR-binding peptide
  MOD_RES (1), (3), (37), (38): Xaa is C or S
  MOD_RES (15), (16), (17), (18), (19): Xaa is A or G
  MOD_RES (20), (21), (22), (23): Xaa is A or G or is absent
XGXSRVVMNNSLQEXXXXXXXXXYYVVPLPELKTPAXX

SEQ ID NO: 10278 - protein, 38 aa, Artificial Sequence
  GFR-binding peptide
  MOD_RES (34), (35): Xaa is C or S
  MOD_RES (12), (13), (14), (15), (16): Xaa is A or G
  MOD_RES (17), (18), (19), (20): Xaa is A or G or is absent
SEVVMDNSLQEXXXXXXXXXYYVIPLPELRTPVXXTPP

SEQ ID NO: 10279 - protein, 34 aa, Artificial Sequence; identical to SEQ ID NO: 2801
  GFR-binding peptide
  MOD_RES (2), (34): Xaa is C or S

SEQ ID NO: 10280 - protein, 38 aa, Artificial Sequence
  GFR-binding peptide
  MOD_RES (2), (36): Xaa is C or S
  MOD_RES (14), (15), (16), (17), (18): Xaa is A or G
  MOD_RES (19), (20), (21), (22): Xaa is A or G or is absent
GXSRVVMNNSLQEXXXXXXXXXYYVVPLPELKTPAXTP

SEQ ID NO: 10281 - protein, 31 aa, Artificial Sequence
  GFR-binding peptide
GEVVMDNSLQEVVKENEDYYLMTLPELETPV

SEQ ID NO: 10282 - protein, 39 aa, Artificial Sequence
  GFR-binding peptide
  MOD_RES (1), (3), (35): Xaa is C or S
XGXSRVVMNNSLQEIVNSSDDYYVVPLPELKTPAXTPKT

SEQ ID NO: 10283 - protein, 37 aa, Artificial Sequence
  GFR-binding peptide
  MOD_RES (1), (33): Xaa is C or S
XSRVVMNNSLQEIVNSSDDYYLVTLPELKTPAXTPKT

SEQ ID NO: 10284 - protein, 40 aa, Artificial Sequence; identical to SEQ ID NO: 2809
  GFR-binding peptide
  MOD_RES (1), (35), (36): Xaa is C or S
  MOD_RES (13), (14), (15), (16), (17): Xaa is A or G
  MOD_RES (18), (19), (20), (21): Xaa is A or G or is absent

SEQ ID NO: 10285 - protein, 33 aa, Artificial Sequence
  GFR-binding peptide
  MOD_RES (31), (32): Xaa is C or S
SKVVMEYQKYVKPTRGVIFLISIPSLDQPVXXP

SEQ ID NO: 10286 - protein, 35 aa, Artificial Sequence; identical to SEQ ID NO: 2810
  GFR-binding peptide
  MOD_RES (32), (33): Xaa is C or S

SEQ ID NO: 10287 - protein, 38 aa, Artificial Sequence
  GFR-binding peptide
  MOD_RES (32), (33): Xaa is C or S
SEVVMDQYNKLVVNNASDLYLISIASLRTPVXXTPPTS

SEQ ID NO: 10288 - protein, 36 aa, Artificial Sequence; identical to SEQ ID NO: 2811
  GFR-binding peptide
  MOD_RES (2), (36): Xaa is C or S
  MOD_RES (14), (15), (16), (17), (18): Xaa is A or G
  MOD_RES (19), (20), (21), (22): Xaa is A or G or is absent

SEQ ID NO: 10289 - protein, 33 aa, Artificial Sequence; identical to SEQ ID NO: 2812
  GFR-binding peptide
  MOD_RES (1), (1): Xaa is C or S
  MOD_RES (12), (13), (14), (15), (16): Xaa is A or G
  MOD_RES (17), (18), (19), (20): Xaa is A or G or is absent

SEQ ID NO: 10290 - protein, 34 aa, Artificial Sequence; identical to SEQ ID NO: 2814
  GFR-binding peptide
  MOD_RES (34), (34): Xaa is C or S
  MOD_RES (12), (13), (14), (15), (16): Xaa is A or G
  MOD_RES (17), (18), (19), (20): Xaa is A or G or is absent

SEQ ID NO: 10291 - protein, 32 aa, Artificial Sequence
  GFR-binding peptide
  MOD_RES (1), (32): Xaa is C or S
XSRVIMNSLQEVKPKRGVYYLITLPELAQPVX

SEQ ID NO: 10292 - protein, 34 aa, Artificial Sequence
  GFR-binding peptide
  MOD_RES (1), (3), (34): Xaa is C or S
XKXSKVIMEYQKYIKPTKGIIFLISIPSLDQSVX

SEQ ID NO: 10293 - protein, 37 aa, Artificial Sequence
  GFR-binding peptide
  MOD_RES (1), (32), (33): Xaa is C or S
XSKVVMNSLQEVKPTRGVYYLITLPELDQPVXXPSAS

SEQ ID NO: 10294 - protein, 32 aa, Artificial Sequence
  GFR-binding peptide
  MOD_RES (31), (31): Xaa is C or S
RVVMNNSLQEIVNSSDDYYLVTLPELKTPAXT

SEQ ID NO: 10295 - protein, 37 aa, Artificial Sequence
  GFR-binding peptide
  MOD_RES (2), (36), (37): Xaa is C or S
  MOD_RES (14), (15), (16), (17), (18): Xaa is A or G
  MOD_RES (19), (20), (21), (22): Xaa is A or G or is absent
GXSEVVMDNSLQEXXXXXXXXXYYVIPLPELRTPVXX

SEQ ID NO: 10296 - protein, 34 aa, Artificial Sequence
  GFR-binding peptide
  MOD_RES (1), (3), (34): Xaa is C or S
XKXSRVIMEYQKYVKPKRGVIFLISIPSLAQPVX

SEQ ID NO: 10297 - protein, 38 aa, Artificial Sequence; identical to SEQ ID NO: 2817
  GFR-binding peptide
  MOD_RES (2), (36), (37): Xaa is C or S
  MOD_RES (14), (15), (16), (17), (18): Xaa is A or G
  MOD_RES (19), (20), (21), (22): Xaa is A or G or is absent

SEQ ID NO: 10298 - protein, 35 aa, Artificial Sequence
  GFR-binding peptide
  MOD_RES (1), (34), (35): Xaa is C or S
  MOD_RES (12), (13), (14), (15), (16): Xaa is A or G
  MOD_RES (17), (18), (19), (20): Xaa is A or G or is absent
XSRVIMNSLQEXXXXXXXXXYYVIPLPELAQPVXX

SEQ ID NO: 10299 - protein, 33 aa, Artificial Sequence; identical to SEQ ID NO: 2819
  GFR-binding peptide
  MOD_RES (32), (33): Xaa is C or S

SEQ ID NO: 10300 - protein, 38 aa, Artificial Sequence
  GFR-binding peptide
  MOD_RES (1), (35), (36): Xaa is C or S
  MOD_RES (13), (14), (15), (16), (17): Xaa is A or G
  MOD_RES (18), (19), (20), (21): Xaa is A or G or is absent
XGEVVMDEYQKYXXXXXXXXXIFLMSIPSLETPVXXAK

SEQ ID NO: 10301 - protein, 35 aa, Artificial Sequence
  GFR-binding peptide
  MOD_RES (2), (2): Xaa is C or S
  MOD_RES (14), (15), (16), (17), (18): Xaa is A or G
  MOD_RES (19), (20), (21), (22): Xaa is A or G or is absent
GXARVVMNNSLQEXXXXXXXXXYYLVTLPELQTPA

SEQ ID NO: 10302 - protein, 34 aa, Artificial Sequence
  GFR-binding peptide
  MOD_RES (33), (34): Xaa is C or S
  MOD_RES (11), (12), (13), (14), (15): Xaa is A or G
  MOD_RES (16), (17), (18), (19): Xaa is A or G or is absent
EVVMENSLQEXXXXXXXXXYYVMPLPELETPVXX

SEQ ID NO: 10303 - protein, 39 aa, Artificial Sequence; identical to SEQ ID NO: 2829
  GFR-binding peptide
  MOD_RES (2), (4), (37), (38): Xaa is C or S
  MOD_RES (15), (16), (17), (18), (19): Xaa is A or G
  MOD_RES (20), (21), (22), (23): Xaa is A or G or is absent

SEQ ID NO: 10304 - protein, 44 aa, Artificial Sequence
  GFR-binding peptide
  MOD_RES (2), (4), (38), (39): Xaa is C or S
  MOD_RES (16), (17), (18), (19), (20): Xaa is A or G
  MOD_RES (21), (22), (23), (24): Xaa is A or G or is absent
RXGXGEVVMENSLQEXXXXXXXXXYYVMPLPELETPVXXAKPIS

SEQ ID NO: 10305 - protein, 38 aa, Artificial Sequence
  GFR-binding peptide
  MOD_RES (32), (33): Xaa is C or S
ARVVMNNSLQEIVNSSDDYYLVTLPELQTPAXXPKPVT

SEQ ID NO: 10306 - protein, 37 aa, Artificial Sequence
  GFR-binding peptide
  MOD_RES (1), (33), (34): Xaa is C or S
XGEVVMDNSLQEVVKENEDYYVMPLPELETPVXXAKP

SEQ ID NO: 10307 - protein, 37 aa, Artificial Sequence
  GFR-binding peptide
  MOD_RES (1), (3), (35), (36): Xaa is C or S
XGXARVVMNNSLQEIVNSSDDYYLVTLPELQTPAXXP

SEQ ID NO: 10308 - protein, 35 aa, Artificial Sequence
  GFR-binding peptide
  MOD_RES (1), (3), (35): Xaa is C or S
XGXARVVMNNSLQEIVNSSDDYYVVPLPELQTPAX

SEQ ID NO: 10309 - protein, 36 aa, Artificial Sequence
  GFR-binding peptide
  MOD_RES (2), (34), (35): Xaa is C or S
GXSEVVMDQYNKLVVNNASDLYLISIASLRTPVXXT

SEQ ID NO: 10310 - protein, 37 aa, Artificial Sequence
  GFR-binding peptide
  MOD_RES (1), (3), (35), (36): Xaa is C or S
XGXSRVVMNNSLQEIVNSSDDYYLVTLPELKTPAXXP

SEQ ID NO: 10311 - protein, 34 aa, Artificial Sequence
  GFR-binding peptide
  MOD_RES (32), (32): Xaa is C or S
SRVVMNNSLQEIVNSSDDYYVVPLPELKTPAXTP

SEQ ID NO: 10312 - protein, 33 aa, Artificial Sequence
  GFR-binding peptide
  MOD_RES (31), (32): Xaa is C or S
EVVMENSLQEVVKDYEDYYLMTLPELETPVXXA

SEQ ID NO: 10313 - protein, 33 aa, Artificial Sequence; identical to SEQ ID NO: 2848
  GFR-binding peptide
  MOD_RES (1), (3): Xaa is C or S

SEQ ID NO: 10314 - protein, 33 aa, Artificial Sequence
  GFR-binding peptide
  MOD_RES (2), (2): Xaa is C or S
GXGEVVMDNSLQEVVKENEDYYVMPLPELETPV

SEQ ID NO: 10315 - protein, 40 aa, Artificial Sequence; identical to SEQ ID NO: 2850
  GFR-binding peptide
  MOD_RES (1), (3), (37), (38): Xaa is C or S
  MOD_RES (15), (16), (17), (18), (19): Xaa is A or G
  MOD_RES (20), (21), (22), (23): Xaa is A or G or is absent

SEQ ID NO: 10316 - protein, 38 aa, Artificial Sequence
  GFR-binding peptide
  MOD_RES (33), (33): Xaa is C or S
  MOD_RES (11), (12), (13), (14), (15): Xaa is A or G
  MOD_RES (16), (17), (18), (19): Xaa is A or G or is absent
RVVMNEYQKYXXXXXXXXXIFLVSIPSLKTPAXTPKTV

SEQ ID NO: 10317 - protein, 35 aa, Artificial Sequence
  GFR-binding peptide
  MOD_RES (31), (32): Xaa is C or S
EVVMDNSLQEVVKENEDYYVMPLPELETPVXXAKP

SEQ ID NO: 10318 - protein, 36 aa, Artificial Sequence
  GFR-binding peptide
  MOD_RES (2), (4): Xaa is C or S
  MOD_RES (15), (16), (17), (18), (19): Xaa is A or G
  MOD_RES (20), (21), (22), (23): Xaa is A or G or is absent
SXKXSRVIMNSLQEXXXXXXXXXYYVIPLPELAQPV

SEQ ID NO: 10319 - protein, 43 aa, Artificial Sequence; identical to SEQ ID NO: 2853
  GFR-binding peptide
  MOD_RES (1), (3), (37), (38): Xaa is C or S
  MOD_RES (15), (16), (17), (18), (19): Xaa is A or G
  MOD_RES (20), (21), (22), (23): Xaa is A or G or is absent

SEQ ID NO: 10320 - protein, 34 aa, Artificial Sequence
  GFR-binding peptide
  MOD_RES (33), (34): Xaa is C or S
  MOD_RES (11), (12), (13), (14), (15): Xaa is A or G
  MOD_RES (16), (17), (18), (19): Xaa is A or G or is absent
SRVIMNSLQEXXXXXXXXXYYVIPLPELAQPVXX

SEQ ID NO: 10321 - protein, 36 aa, Artificial Sequence
  GFR-binding peptide
  MOD_RES (1), (35): Xaa is C or S
  MOD_RES (13), (14), (15), (16), (17): Xaa is A or G
  MOD_RES (18), (19), (20), (21): Xaa is A or G or is absent
XSRVVMNNSLQEXXXXXXXXXYYVVPLPELKTPAXT

SEQ ID NO: 10322 - protein, 38 aa, Artificial Sequence
  GFR-binding peptide
  MOD_RES (2), (4), (38): Xaa is C or S
  MOD_RES (16), (17), (18), (19), (20): Xaa is A or G
  MOD_RES (21), (22), (23), (24): Xaa is A or G or is absent
RXGXSEVVMDRYKKLXXXXXXXXXFYLISIANLRTPVX

SEQ ID NO: 10323 - protein, 38 aa, Artificial Sequence; identical to SEQ ID NO: 2855
  GFR-binding peptide
  MOD_RES (2), (4), (36), (37): Xaa is C or S

SEQ ID NO: 10324 - protein, 38 aa, Artificial Sequence
  GFR-binding peptide
  MOD_RES (1), (33), (34): Xaa is C or S
XSRVVMNNSLQEIVNSSDDYYLVTLPELKTPAXXPKPV

SEQ ID NO: 10325 - protein, 38 aa, Artificial Sequence; identical to SEQ ID NO: 2858
  GFR-binding peptide
  MOD_RES (1), (3), (35), (36): Xaa is C or S

SEQ ID NO: 10326 - protein, 37 aa, Artificial Sequence; identical to SEQ ID NO: 2859
  GFR-binding peptide
  MOD_RES (1), (33), (34): Xaa is C or S

SEQ ID NO: 10327 - protein, 40 aa, Artificial Sequence; identical to SEQ ID NO: 2862
  GFR-binding peptide
  MOD_RES (1), (3), (37), (38): Xaa is C or S
  MOD_RES (15), (16), (17), (18), (19): Xaa is A or G
  MOD_RES (20), (21), (22), (23): Xaa is A or G or is absent

SEQ ID NO: 10328 - protein, 35 aa, Artificial Sequence
  GFR-binding peptide
  MOD_RES (31), (32): Xaa is C or S
EVVMDNSLQEVVNNASDYYVIPLPELRTPVXXTPP

SEQ ID NO: 10329 - protein, 35 aa, Artificial Sequence; identical to SEQ ID NO: 2863
  GFR-binding peptide
  MOD_RES (2), (4), (35): Xaa is C or S

SEQ ID NO: 10330 - protein, 44 aa, Artificial Sequence; identical to SEQ ID NO: 2864
  GFR-binding peptide
  MOD_RES (2), (4), (38): Xaa is C or S
  MOD_RES (16), (17), (18), (19), (20): Xaa is A or G
  MOD_RES (21), (22), (23), (24): Xaa is A or G or is absent

SEQ ID NO: 10331 - protein, 39 aa, Artificial Sequence
  GFR-binding peptide
  MOD_RES (2), (36), (37): Xaa is C or S
  MOD_RES (14), (15), (16), (17), (18): Xaa is A or G
  MOD_RES (19), (20), (21), (22): Xaa is A or G or is absent
GXSEVVMDQYNKLXXXXXXXXXLYLISIASLRTPVXXTP

SEQ ID NO: 10332 - protein, 39 aa, Artificial Sequence; identical to SEQ ID NO: 2870
  GFR-binding peptide
  MOD_RES (1), (34), (35): Xaa is C or S
  MOD_RES (12), (13), (14), (15), (16): Xaa is A or G
  MOD_RES (17), (18), (19), (20): Xaa is A or G or is absent

SEQ ID NO: 10333 - protein, 35 aa, Artificial Sequence; identical to SEQ ID NO: 2871
  GFR-binding peptide
  MOD_RES (1), (34), (35): Xaa is C or S
  MOD_RES (12), (13), (14), (15), (16): Xaa is A or G
  MOD_RES (17), (18), (19), (20): Xaa is A or G or is absent

SEQ ID NO: 10334 - protein, 40 aa, Artificial Sequence
  GFR-binding peptide
  MOD_RES (1), (3), (37), (38): Xaa is C or S
  MOD_RES (15), (16), (17), (18), (19): Xaa is A or G
  MOD_RES (20), (21), (22), (23): Xaa is A or G or is absent
XGXSEVVMDEYQKYXXXXXXXXXIFLISIPSLRTPVXXTP

SEQ ID NO: 10335 - protein, 36 aa, Artificial Sequence
  GFR-binding peptide
  MOD_RES (2), (4): Xaa is C or S
  MOD_RES (15), (16), (17), (18), (19): Xaa is A or G
  MOD_RES (20), (21), (22), (23): Xaa is A or G or is absent
SXKXSKVVMEYQKYXXXXXXXXXIFLISIPSLDQPV

SEQ ID NO: 10336 - protein, 34 aa, Artificial Sequence
  GFR-binding peptide
  MOD_RES (1), (3), (34): Xaa is C or S
XKXSKVVMNSLQEVKPTRGVYYVIPLPELDQPVX

SEQ ID NO: 10337 - protein, 38 aa, Artificial Sequence
  GFR-binding peptide
  MOD_RES (2), (4), (36), (37): Xaa is C or S
HXGXARVVMNNSLQEIVNSSDDYYLVTLPELQTPAXXP

SEQ ID NO: 10338 - protein, 40 aa, Artificial Sequence
  GFR-binding peptide
  MOD_RES (2), (4), (38), (39): Xaa is C or S
  MOD_RES (16), (17), (18), (19), (20): Xaa is A or G
  MOD_RES (21), (22), (23), (24): Xaa is A or G or is absent
RXGXGEVVMDNSLQEXXXXXXXXXYYVMPLPELETPVXXA

SEQ ID NO: 10339 - protein, 38 aa, Artificial Sequence
  GFR-binding peptide
  MOD_RES (1), (35): Xaa is C or S
  MOD_RES (13), (14), (15), (16), (17): Xaa is A or G
  MOD_RES (18), (19), (20), (21): Xaa is A or G or is absent
XSRVVMNNSLQEXXXXXXXXXYYVVPLPELKTPAXTPK

SEQ ID NO: 10340 - protein, 33 aa, Artificial Sequence; identical to SEQ ID NO: 2877
  GFR-binding peptide
  MOD_RES (32), (33): Xaa is C or S

SEQ ID NO: 10341 - protein, 37 aa, Artificial Sequence; identical to SEQ ID NO: 2879
  GFR-binding peptide
  MOD_RES (2), (36), (37): Xaa is C or S
  MOD_RES (14), (15), (16), (17), (18): Xaa is A or G
  MOD_RES (19), (20), (21), (22): Xaa is A or G or is absent

SEQ ID NO: 10342 - protein, 33 aa, Artificial Sequence; identical to SEQ ID NO: 2880
  GFR-binding peptide
  MOD_RES (1), (33): Xaa is C or S

SEQ ID NO: 10343 - protein, 33 aa, Artificial Sequence
  GFR-binding peptide
  MOD_RES (12), (13), (14), (15), (16): Xaa is A or G
  MOD_RES (17), (18), (19), (20): Xaa is A or G or is absent
GEVVMENSLQEXXXXXXXXXYYLMTLPELETPV

SEQ ID NO: 10344 - protein, 41 aa, Artificial Sequence
  GFR-binding peptide
  MOD_RES (2), (4), (36), (37): Xaa is C or S
RXGXSEVVMDNSLQEVVNNASDYYVIPLPELRTPVXXTPPT

SEQ ID NO: 10345 - protein, 40 aa, Artificial Sequence; identical to SEQ ID NO: 2883
  GFR-binding peptide
  MOD_RES (2), (4), (38), (39): Xaa is C or S
  MOD_RES (16), (17), (18), (19), (20): Xaa is A or G
  MOD_RES (21), (22), (23), (24): Xaa is A or G or is absent

SEQ ID NO: 10346 - protein, 36 aa, Artificial Sequence
  GFR-binding peptide
  MOD_RES (1), (33), (34): Xaa is C or S
XSEVVMDQYNKLVVNNASDLYLISIASLRTPVXXTP

SEQ ID NO: 10347 - protein, 37 aa, Artificial Sequence
  GFR-binding peptide
  MOD_RES (2), (4), (35), (36): Xaa is C or S
SXKXSKVIMNSLQEIKPTKGIYYVIPLPELDQSVXXP

SEQ ID NO: 10348 - protein, 38 aa, Artificial Sequence
  GFR-binding peptide
  MOD_RES (33), (34): Xaa is C or S
  MOD_RES (11), (12), (13), (14), (15): Xaa is A or G
  MOD_RES (16), (17), (18), (19): Xaa is A or G or is absent
EVVMDQYNKLXXXXXXXXXLYLISIASLRTPVXXTPPT

SEQ ID NO: 10349 - protein, 37 aa, Artificial Sequence
  GFR-binding peptide
  MOD_RES (32), (33): Xaa is C or S
GEVVMEEYQKYVVKDYEDIFLMSIPSLETPVXXAKPI

SEQ ID NO: 10350 - protein, 36 aa, Artificial Sequence; identical to SEQ ID NO: 2886
  GFR-binding peptide
  MOD_RES (1), (3), (35), (36): Xaa is C or S

SEQ ID NO: 10351 - protein, 41 aa, Artificial Sequence
  GFR-binding peptide
  MOD_RES (2), (4), (38), (39): Xaa is C or S
  MOD_RES (16), (17), (18), (19), (20): Xaa is A or G
  MOD_RES (21), (22), (23), (24): Xaa is A or G or is absent
HXGXARVVMNNSLQEXXXXXXXXXYYLVTLPELQTPAXXPK

SEQ ID NO: 10352 - protein, 39 aa, Artificial Sequence
  GFR-binding peptide
  MOD_RES (1), (3), (35), (36): Xaa is C or S
XGXGEVVMEEYQKYVVKDYEDIFLMSIPSLETPVXXAKP

SEQ ID NO: 10353 - protein, 39 aa, Artificial Sequence; identical to SEQ ID NO: 2892
  GFR-binding peptide
  MOD_RES (1), (34), (35): Xaa is C or S
  MOD_RES (12), (13), (14), (15), (16): Xaa is A or G
  MOD_RES (17), (18), (19), (20): Xaa is A or G or is absent

SEQ ID NO: 10354 - protein, 32 aa, Artificial Sequence
  GFR-binding peptide
  MOD_RES (31), (32): Xaa is C or S
EVVMDNSLQEVVKENEDYYLMTLPELETPVXX

SEQ ID NO: 10355 - protein, 35 aa, Artificial Sequence
  GFR-binding peptide
  MOD_RES (1), (3): Xaa is C or S
  MOD_RES (14), (15), (16), (17), (18): Xaa is A or G
  MOD_RES (19), (20), (21), (22): Xaa is A or G or is absent
XKXSKVVMEYQKYXXXXXXXXXIFLISIPSLDQPV

SEQ ID NO: 10356 - protein, 37 aa, Artificial Sequence; identical to SEQ ID NO: 2894
  GFR-binding peptide
  MOD_RES (2), (35), (36): Xaa is C or S
  MOD_RES (13), (14), (15), (16), (17): Xaa is A or G
  MOD_RES (18), (19), (20), (21): Xaa is A or G or is absent

SEQ ID NO: 10357 - protein, 39 aa, Artificial Sequence
  GFR-binding peptide
  MOD_RES (1), (35), (36): Xaa is C or S
  MOD_RES (13), (14), (15), (16), (17): Xaa is A or G
  MOD_RES (18), (19), (20), (21): Xaa is A or G or is absent
XSEVVMDNSLQEXXXXXXXXXYYLITLPELRTPVXXTPP

SEQ ID NO: 10358 - protein, 37 aa, Artificial Sequence
  GFR-binding peptide
  MOD_RES (1), (35), (36): Xaa is C or S
  MOD_RES (13), (14), (15), (16), (17): Xaa is A or G
  MOD_RES (18), (19), (20), (21): Xaa is A or G or is absent
XARVVMNNSLQEXXXXXXXXXYYVVPLPELQTPAXXP

SEQ ID NO: 10359 - protein, 34 aa, Artificial Sequence
  GFR-binding peptide
  MOD_RES (33), (33): Xaa is C or S
  MOD_RES (11), (12), (13), (14), (15): Xaa is A or G
  MOD_RES (16), (17), (18), (19): Xaa is A or G or is absent
RVVMNNSLQEXXXXXXXXXYYVVPLPELKTPAXT

SEQ ID NO: 10360 - protein, 37 aa, Artificial Sequence; identical to SEQ ID NO: 2896
  GFR-binding peptide
  MOD_RES (2), (4), (35), (36): Xaa is C or S

SEQ ID NO: 10361 - protein, 38 aa, Artificial Sequence
  GFR-binding peptide
  MOD_RES (32), (33): Xaa is C or S
SEVVMDRYKKLVVNNASDFYLISIANLRTPVXXTPPTS

SEQ ID NO: 10362 - protein, 36 aa, Artificial Sequence
  GFR-binding peptide
  MOD_RES (2), (34), (35): Xaa is C or S
GXSEVVMDNSLQEVVNNASDYYLITLPELRTPVXXT

SEQ ID NO: 10363 - protein, 42 aa, Artificial Sequence; identical to SEQ ID NO: 2900
  GFR-binding peptide
  MOD_RES (2), (36), (37): Xaa is C or S
  MOD_RES (14), (15), (16), (17), (18): Xaa is A or G
  MOD_RES (19), (20), (21), (22): Xaa is A or G or is absent

SEQ ID NO: 10364 - protein, 34 aa, Artificial Sequence
  GFR-binding peptide
  MOD_RES (2), (34): Xaa is C or S
GXSEVVMDNSLQEVVNNASDYYLITLPELRTPVX

SEQ ID NO: 10365 - protein, 36 aa, Artificial Sequence
  GFR-binding peptide
  MOD_RES (1), (35), (36): Xaa is C or S
  MOD_RES (13), (14), (15), (16), (17): Xaa is A or G
  MOD_RES (18), (19), (20), (21): Xaa is A or G or is absent
XGEVVMENSLQEXXXXXXXXXYYVMPLPELETPVXX

SEQ ID NO: 10366 - protein, 44 aa, Artificial Sequence
  GFR-binding peptide
  MOD_RES (2), (4), (38), (39): Xaa is C or S
  MOD_RES (16), (17), (18), (19), (20): Xaa is A or G
  MOD_RES (21), (22), (23), (24): Xaa is A or G or is absent
RXGXGEVVMDNSLQEXXXXXXXXXYYLMTLPELETPVXXAKPIK

SEQ ID NO: 10367 - protein, 34 aa, Artificial Sequence; identical to SEQ ID NO: 2903
  GFR-binding peptide
  MOD_RES (33), (34): Xaa is C or S
  MOD_RES (11), (12), (13), (14), (15): Xaa is A or G
  MOD_RES (16), (17), (18), (19): Xaa is A or G or is absent

SEQ ID NO: 10368 - protein, 41 aa, Artificial Sequence
  GFR-binding peptide
  MOD_RES (2), (36), (37): Xaa is C or S
  MOD_RES (14), (15), (16), (17), (18): Xaa is A or G
  MOD_RES (19), (20), (21), (22): Xaa is A or G or is absent
GXGEVVMENSLQEXXXXXXXXXYYVMPLPELETPVXXAKPI

SEQ ID NO: 10369 - protein, 33 aa, Artificial Sequence
  GFR-binding peptide
  MOD_RES (1), (32), (33): Xaa is C or S
XSRVIMEYQKYVKPKRGVIFLISIPSLAQPVXX

SEQ ID NO: 10370 - protein, 32 aa, Artificial Sequence; identical to SEQ ID NO: 2904
  GFR-binding peptide
  MOD_RES (32), (32): Xaa is C or S

SEQ ID NO: 10371 - protein, 32 aa, Artificial Sequence; identical to SEQ ID NO: 2906
  GFR-binding peptide
  MOD_RES (32), (32): Xaa is C or S

SEQ ID NO: 10372 - protein, 38 aa, Artificial Sequence
  GFR-binding peptide
  MOD_RES (1), (3), (34), (35): Xaa is C or S
XKXSRVIMEYQKYVKPKRGVIFLISIPSLAQPVXXPAA

SEQ ID NO: 10373 - protein, 37 aa, Artificial Sequence
  GFR-binding peptide
  MOD_RES (1), (33), (34): Xaa is C or S
XGEVVMDEYQKYVVKENEDIFLMSIPSLETPVXXAKP

SEQ ID NO: 10374 - protein, 35 aa, Artificial Sequence; identical to SEQ ID NO: 2911
  GFR-binding peptide
  MOD_RES (31), (32): Xaa is C or S

SEQ ID NO: 10375 - protein, 39 aa, Artificial Sequence; identical to SEQ ID NO: 2912
  GFR-binding peptide
  MOD_RES (33), (34): Xaa is C or S
  MOD_RES (11), (12), (13), (14), (15): Xaa is A or G
  MOD_RES (16), (17), (18), (19): Xaa is A or G or is absent

SEQ ID NO: 10376 - protein, 36 aa, Artificial Sequence
  GFR-binding peptide
  MOD_RES (31), (32): Xaa is C or S
EVVMDRYKKLVVNNASDFYLISIANLRTPVXXTPPT

SEQ ID NO: 10377 - protein, 38 aa, Artificial Sequence
  GFR-binding peptide
  MOD_RES (1), (3), (35): Xaa is C or S
XGXSRVVMNNSLQEIVNSSDDYYVVPLPELKTPAXTPK

SEQ ID NO: 10378 - protein, 39 aa, Artificial Sequence
  GFR-binding peptide
  MOD_RES (2), (4), (36), (37): Xaa is C or S
RXGXSEVVMDNSLQEVVNNASDYYLITLPELRTPVXXTP

SEQ ID NO: 10379 - protein, 42 aa, Artificial Sequence; identical to SEQ ID NO: 2913
  GFR-binding peptide
  MOD_RES (2), (4), (37), (38): Xaa is C or S
  MOD_RES (15), (16), (17), (18), (19): Xaa is A or G
  MOD_RES (20), (21), (22), (23): Xaa is A or G or is absent

SEQ ID NO: 10380 - protein, 42 aa, Artificial Sequence
  GFR-binding peptide
  MOD_RES (2), (4), (36), (37): Xaa is C or S
HXGXSRVVMNEYQKYIVNSSDDIFLVSIPSLKTPAXXPKPVY

SEQ ID NO: 10381 - protein, 38 aa, Artificial Sequence
  GFR-binding peptide
  MOD_RES (1), (3), (35), (36): Xaa is C or S
XGXGEVVMENSLQEVVKDYEDYYLMTLPELETPVXXAK

SEQ ID NO: 10382 - protein, 38 aa, Artificial Sequence; identical to SEQ ID NO: 2914
  GFR-binding peptide
  MOD_RES (1), (3), (37), (38): Xaa is C or S
  MOD_RES (15), (16), (17), (18), (19): Xaa is A or G
  MOD_RES (20), (21), (22), (23): Xaa is A or G or is absent

SEQ ID NO: 10383 - protein, 35 aa, Artificial Sequence
  GFR-binding peptide
  MOD_RES (2), (2): Xaa is C or S
  MOD_RES (14), (15), (16), (17), (18): Xaa is A or G
  MOD_RES (19), (20), (21), (22): Xaa is A or G or is absent
GXSEVVMDRYKKLXXXXXXXXXFYLISIANLRTPV

SEQ ID NO: 10384 - protein, 35 aa, Artificial Sequence; identical to SEQ ID NO: 2918
  GFR-binding peptide
  MOD_RES (33), (34): Xaa is C or S
  MOD_RES (11), (12), (13), (14), (15): Xaa is A or G
  MOD_RES (16), (17), (18), (19): Xaa is A or G or is absent

SEQ ID NO: 10385 - protein, 40 aa, Artificial Sequence; identical to SEQ ID NO: 2919
  GFR-binding peptide
  MOD_RES (1), (35), (36): Xaa is C or S
  MOD_RES (13), (14), (15), (16), (17): Xaa is A or G
  MOD_RES (18), (19), (20), (21): Xaa is A or G or is absent

SEQ ID NO: 10386 - protein, 37 aa, Artificial Sequence; identical to SEQ ID NO: 2920
  GFR-binding peptide
  MOD_RES (32), (33): Xaa is C or S

SEQ ID NO: 10387 - protein, 42 aa, Artificial Sequence
  GFR-binding peptide
  MOD_RES (2), (4), (36): Xaa is C or S
HXGXSRVVMNEYQKYIVNSSDDIFLVSIPSLKTPAXTPKTVH

SEQ ID NO: 10388 - protein, 40 aa, Artificial Sequence
  GFR-binding peptide
  MOD_RES (2), (34), (35): Xaa is C or S
GXGEVVMEEYQKYVVKDYEDIFLMSIPSLETPVXXAKPIS

SEQ ID NO: 10389 - protein, 40 aa, Artificial Sequence; identical to SEQ ID NO: 2924
  GFR-binding peptide
  MOD_RES (2), (4), (37), (38): Xaa is C or S
  MOD_RES (15), (16), (17), (18), (19): Xaa is A or G
  MOD_RES (20), (21), (22), (23): Xaa is A or G or is absent

SEQ ID NO: 10390 - protein, 38 aa, Artificial Sequence
  GFR-binding peptide
  MOD_RES (1), (32), (33): Xaa is C or S
XSKVVMNSLQEVKPTRGVYYLITLPELDQPVXXPSASA

SEQ ID NO: 10391 - protein, 40 aa, Artificial Sequence; identical to SEQ ID NO: 2929
  GFR-binding peptide
  MOD_RES (1), (3), (34), (35): Xaa is C or S

SEQ ID NO: 10392 - protein, 41 aa, Artificial Sequence
  GFR-binding peptide
  MOD_RES (1), (3), (37), (38): Xaa is C or S
  MOD_RES (15), (16), (17), (18), (19): Xaa is A or G
  MOD_RES (20), (21), (22), (23): Xaa is A or G or is absent
XGXSEVVMDQYNKLXXXXXXXXXLYLISIASLRTPVXXTPP

SEQ ID NO: 10393 - protein, 33 aa, Artificial Sequence
  GFR-binding peptide
  MOD_RES (2), (2): Xaa is C or S
GXSRVVMNNSLQEIVNSSDDYYVVPLPELKTPA

SEQ ID NO: 10394 - protein, 37 aa, Artificial Sequence; identical to SEQ ID NO: 2931
  GFR-binding peptide
  MOD_RES (2), (4): Xaa is C or S
  MOD_RES (16), (17), (18), (19), (20): Xaa is A or G
  MOD_RES (21), (22), (23), (24): Xaa is A or G or is absent

SEQ ID NO: 10395 - protein, 39 aa, Artificial Sequence
  GFR-binding peptide
  MOD_RES (2), (4), (38): Xaa is C or S
  MOD_RES (16), (17), (18), (19), (20): Xaa is A or G
  MOD_RES (21), (22), (23), (24): Xaa is A or G or is absent
HXGXSRVVMNNSLQEXXXXXXXXXYYVVPLPELKTPAXT

SEQ ID NO: 10396 - protein, 38 aa, Artificial Sequence
  GFR-binding peptide
  MOD_RES (1), (3), (37), (38): Xaa is C or S
  MOD_RES (15), (16), (17), (18), (19): Xaa is A or G
  MOD_RES (20), (21), (22), (23): Xaa is A or G or is absent
XGXGEVVMENSLQEXXXXXXXXXYYVMPLPELETPVXX

SEQ ID NO: 10397 - protein, 36 aa, Artificial Sequence
  GFR-binding peptide
  MOD_RES (1), (3), (34), (35): Xaa is C or S
XKXSRVIMNSLQEVKPKRGVYYVIPLPELAQPVXXP

SEQ ID NO: 10398 - protein, 39 aa, Artificial Sequence
  GFR-binding peptide
  MOD_RES (1), (3), (34), (35): Xaa is C or S
XKXSKVVMEYQKYVKPTRGVIFLISIPSLDQPVXXPSAS

SEQ ID NO: 10399 - protein, 38 aa, Artificial Sequence
  GFR-binding peptide
  MOD_RES (1), (3), (35), (36): Xaa is C or S
XGXGEVVMDNSLQEVVKENEDYYVMPLPELETPVXXAK

SEQ ID NO: 10400 - protein, 37 aa, Artificial Sequence; identical to SEQ ID NO: 2935
  GFR-binding peptide
  MOD_RES (2), (4), (37): Xaa is C or S
  MOD_RES (15), (16), (17), (18), (19): Xaa is A or G
  MOD_RES (20), (21), (22), (23): Xaa is A or G or is absent

SEQ ID NO: 10401 - protein, 35 aa, Artificial Sequence
  GFR-binding peptide
  MOD_RES (31), (32): Xaa is C or S
EVVMENSLQEVVKDYEDYYLMTLPELETPVXXAKP

SEQ ID NO: 10402 - protein, 34 aa, Artificial Sequence
  GFR-binding peptide
  MOD_RES (2), (34): Xaa is C or S
GXSRVVMNNSLQEIVNSSDDYYLVTLPELKTPAX

SEQ ID NO: 10403 - protein, 35 aa, Artificial Sequence; identical to SEQ ID NO: 2943
  GFR-binding peptide
  MOD_RES (32), (33): Xaa is C or S

SEQ ID NO: 10404 - protein, 38 aa, Artificial Sequence
  GFR-binding peptide
  MOD_RES (1), (3), (37): Xaa is C or S
  MOD_RES (15), (16), (17), (18), (19): Xaa is A or G
  MOD_RES (20), (21), (22), (23): Xaa is A or G or is absent
XGXSRVVMNEYQKYXXXXXXXXXIFLVSIPSLKTPAXT

SEQ ID NO: 10405 - protein, 38 aa, Artificial Sequence
  GFR-binding peptide
  MOD_RES (1), (33), (34): Xaa is C or S
XSEVVMDNSLQEVVNNASDYYLITLPELRTPVXXTPPT

SEQ ID NO: 10406 - protein, 38 aa, Artificial Sequence
  GFR-binding peptide
  MOD_RES (1), (35), (36): Xaa is C or S
  MOD_RES (13), (14), (15), (16), (17): Xaa is A or G
  MOD_RES (18), (19), (20), (21): Xaa is A or G or is absent
XGEVVMENSLQEXXXXXXXXXYYLMTLPELETPVXXAK

SEQ ID NO: 10407 - protein, 32 aa, Artificial Sequence
  GFR-binding peptide
  MOD_RES (11), (12), (13), (14), (15): Xaa is A or G
  MOD_RES (16), (17), (18), (19): Xaa is A or G or is absent
EVVMDQYNKLXXXXXXXXXLYLISIASLRTPV

SEQ ID NO: 10408 - protein, 37 aa, Artificial Sequence; identical to SEQ ID NO: 2946
  GFR-binding peptide
  MOD_RES (2), (4), (36), (37): Xaa is C or S

SEQ ID NO: 10409 - protein, 34 aa, Artificial Sequence; identical to SEQ ID NO: 2947
  GFR-binding peptide
  MOD_RES (1), (1): Xaa is C or S
  MOD_RES (13), (14), (15), (16), (17): Xaa is A or G
  MOD_RES (18), (19), (20), (21): Xaa is A or G or is absent

SEQ ID NO: 10410 - protein, 38 aa, Artificial Sequence
  GFR-binding peptide
  MOD_RES (1), (3), (35), (36): Xaa is C or S
XGXGEVVMDEYQKYVVKENEDIFLMSIPSLETPVXXAK

SEQ ID NO: 10411 - protein, 35 aa, Artificial Sequence; identical to SEQ ID NO: 2950
  GFR-binding peptide
  MOD_RES (1), (33), (34): Xaa is C or S

SEQ ID NO: 10412 - protein, 38 aa, Artificial Sequence; identical to SEQ ID NO: 2952
  GFR-binding peptide
  MOD_RES (1), (34), (35): Xaa is C or S
  MOD_RES (12), (13), (14), (15), (16): Xaa is A or G
  MOD_RES (17), (18), (19), (20): Xaa is A or G or is absent

SEQ ID NO: 10413 - protein, 31 aa, Artificial Sequence; identical to SEQ ID NO: 2956
  GFR-binding peptide
  MOD_RES (31), (31): Xaa is C or S

SEQ ID NO: 10414 - protein, 33 aa, Artificial Sequence
  GFR-binding peptide
  MOD_RES (33), (33): Xaa is C or S
  MOD_RES (11), (12), (13), (14), (15): Xaa is A or G
  MOD_RES (16), (17), (18), (19): Xaa is A or G or is absent
SRVIMEYQKYXXXXXXXXXIFLISIPSLAQPVX

SEQ ID NO: 10415 - protein, 36 aa, Artificial Sequence
  GFR-binding peptide
  MOD_RES (1), (35), (36): Xaa is C or S
  MOD_RES (13), (14), (15), (16), (17): Xaa is A or G
  MOD_RES (18), (19), (20), (21): Xaa is A or G or is absent
XARVVMNEYQKYXXXXXXXXXIFLVSIPSLQTPAXX

SEQ ID NO: 10416 - protein, 31 aa, Artificial Sequence; identical to SEQ ID NO: 2959
  GFR-binding peptide
  MOD_RES (31), (31): Xaa is C or S

SEQ ID NO: 10417 - protein, 32 aa, Artificial Sequence
  GFR-binding peptide
  MOD_RES (11), (12), (13), (14), (15): Xaa is A or G
  MOD_RES (16), (17), (18), (19): Xaa is A or G or is absent
RVVMNEYQKYXXXXXXXXXIFLVSIPSLKTPA

SEQ ID NO: 10418 - protein, 36 aa, Artificial Sequence; identical to SEQ ID NO: 2967
  GFR-binding peptide
  MOD_RES (33), (34): Xaa is C or S
  MOD_RES (11), (12), (13), (14), (15): Xaa is A or G
  MOD_RES (16), (17), (18), (19): Xaa is A or G or is absent

SEQ ID NO: 10419 - protein, 33 aa, Artificial Sequence
  GFR-binding peptide
  MOD_RES (1), (33): Xaa is C or S
XSRVVMNNSLQEIVNSSDDYYVVPLPELKTPAX

SEQ ID NO: 10420 - protein, 41 aa, Artificial Sequence; identical to SEQ ID NO: 2968
  GFR-binding peptide
  MOD_RES (2), (4), (36), (37): Xaa is C or S

SEQ ID NO: 10421 - protein, 40 aa, Artificial Sequence
  GFR-binding peptide
  MOD_RES (2), (4), (37), (38): Xaa is C or S
  MOD_RES (15), (16), (17), (18), (19): Xaa is A or G
  MOD_RES (20), (21), (22), (23): Xaa is A or G or is absent
SXKXSRVIMNSLQEXXXXXXXXXYYVIPLPELAQPVXXPA

SEQ ID NO: 10422 - protein, 38 aa, Artificial Sequence
  GFR-binding peptide
  MOD_RES (33), (33): Xaa is C or S
  MOD_RES (11), (12), (13), (14), (15): Xaa is A or G
  MOD_RES (16), (17), (18), (19): Xaa is A or G or is absent
RVVMNNSLQEXXXXXXXXXYYLVTLPELKTPAXTPKTV

SEQ ID NO: 10423 - protein, 39 aa, Artificial Sequence
  GFR-binding peptide
  MOD_RES (1), (33), (34): Xaa is C or S
XGEVVMENSLQEVVKDYEDYYLMTLPELETPVXXAKPIS

SEQ ID NO: 10424 - protein, 36 aa, Artificial Sequence
  GFR-binding peptide
  MOD_RES (32), (33): Xaa is C or S
ARVVMNNSLQEIVNSSDDYYVVPLPELQTPAXXPKP

SEQ ID NO: 10425 - protein, 42 aa, Artificial Sequence
  GFR-binding peptide
  MOD_RES (2), (4), (38), (39): Xaa is C or S
  MOD_RES (16), (17), (18), (19), (20): Xaa is A or G
  MOD_RES (21), (22), (23), (24): Xaa is A or G or is absent
RXGXGEVVMENSLQEXXXXXXXXXYYVMPLPELETPVXXAKP

SEQ ID NO: 10426 - protein, 34 aa, Artificial Sequence
  GFR-binding peptide
  MOD_RES (2), (33), (34): Xaa is C or S
KXSRVIMNSLQEVKPKRGVYYVIPLPELAQPVXX

SEQ ID NO: 10427 - protein, 32 aa, Artificial Sequence
  GFR-binding peptide
  MOD_RES (11), (12), (13), (14), (15): Xaa is A or G
  MOD_RES (16), (17), (18), (19): Xaa is A or G or is absent
SKVIMEYQKYXXXXXXXXXIFLISIPSLDQSV

SEQ ID NO: 10428 - protein, 40 aa, Artificial Sequence
  GFR-binding peptide
  MOD_RES (2), (4), (36), (37): Xaa is C or S
RXGXGEVVMDNSLQEVVKENEDYYVMPLPELETPVXXAKP

SEQ ID NO: 10429 - protein, 39 aa, Artificial Sequence
  GFR-binding peptide
  MOD_RES (2), (4), (37), (38): Xaa is C or S
  MOD_RES (15), (16), (17), (18), (19): Xaa is A or G
  MOD_RES (20), (21), (22), (23): Xaa is A or G or is absent
SXKXSRVIMNSLQEXXXXXXXXXYYLITLPELAQPVXXP

SEQ ID NO: 10430 - protein, 35 aa, Artificial Sequence
  GFR-binding peptide
  MOD_RES (2), (4), (35): Xaa is C or S
SXKXSKVVMNSLQEVKPTRGVYYVIPLPELDQPVX

SEQ ID NO: 10431 - protein, 38 aa, Artificial Sequence
  GFR-binding peptide
  MOD_RES (33), (34): Xaa is C or S
  MOD_RES (11), (12), (13), (14), (15): Xaa is A or G
  MOD_RES (16), (17), (18), (19): Xaa is A or G or is absent
EVVMDEYQKYXXXXXXXXXIFLISIPSLRTPVXXTPPT

SEQ ID NO: 10432 - protein, 38 aa, Artificial Sequence; identical to SEQ ID NO: 2976
  GFR-binding peptide
  MOD_RES (2), (4), (37), (38): Xaa is C or S
  MOD_RES (15), (16), (17), (18), (19): Xaa is A or G
  MOD_RES (20), (21), (22), (23): Xaa is A or G or is absent

SEQ ID NO: 10433 - protein, 36 aa, Artificial Sequence
  GFR-binding peptide
  MOD_RES (32), (33): Xaa is C or S
SEVVMDRYKKLVVNNASDFYLISIANLRTPVXXTPP

SEQ ID NO: 10434 - protein, 34 aa, Artificial Sequence
  GFR-binding peptide
  MOD_RES (2), (4): Xaa is C or S
SXKXSRVIMNSLQEVKPKRGVYYLITLPELAQPV

SEQ ID NO: 10435 - protein, 40 aa, Artificial Sequence; identical to SEQ ID NO: 2983
  GFR-binding peptide
  MOD_RES (1), (3), (34), (35): Xaa is C or S

SEQ ID NO: 10436 - protein, 37 aa, Artificial Sequence
  GFR-binding peptide
  MOD_RES (2), (4), (37): Xaa is C or S
  MOD_RES (15), (16), (17), (18), (19): Xaa is A or G
  MOD_RES (20), (21), (22), (23): Xaa is A or G or is absent
SXKXSRVIMNSLQEXXXXXXXXXYYLITLPELAQPVX

SEQ ID NO: 10437 - protein, 30 aa, Artificial Sequence; identical to SEQ ID NO: 2986
  GFR-binding peptide

SEQ ID NO: 10438 - protein, 37 aa, Artificial Sequence
  GFR-binding peptide
  MOD_RES (2), (4): Xaa is C or S
  MOD_RES (16), (17), (18), (19), (20): Xaa is A or G
  MOD_RES (21), (22), (23), (24): Xaa is A or G or is absent
RXGXGEVVMENSLQEXXXXXXXXXYYVMPLPELETPV

SEQ ID NO: 10439 - protein, 39 aa, Artificial Sequence; identical to SEQ ID NO: 2987
  GFR-binding peptide
  MOD_RES (34), (34): Xaa is C or S
  MOD_RES (12), (13), (14), (15), (16): Xaa is A or G
  MOD_RES (17), (18), (19), (20): Xaa is A or G or is absent

SEQ ID NO: 10440 - protein, 40 aa, Artificial Sequence; identical to SEQ ID NO: 2989
  GFR-binding peptide
  MOD_RES (1), (35), (36): Xaa is C or S
  MOD_RES (13), (14), (15), (16), (17): Xaa is A or G
  MOD_RES (18), (19), (20), (21): Xaa is A or G or is absent

SEQ ID NO: 10441 - protein, 33 aa, Artificial Sequence
  GFR-binding peptide
  MOD_RES (2), (2): Xaa is C or S
GXSEVVMDNSLQEVVNNASDYYVIPLPELRTPV

SEQ ID NO: 10442 - protein, 35 aa, Artificial Sequence
  GFR-binding peptide
  MOD_RES (1), (33), (34): Xaa is C or S
XGEVVMDNSLQEVVKENEDYYVMPLPELETPVXXA

SEQ ID NO: 10443 - protein, 40 aa, Artificial Sequence
  GFR-binding peptide
  MOD_RES (2), (4), (36), (37): Xaa is C or S
HXGXSRVVMNEYQKYIVNSSDDIFLVSIPSLKTPAXXPKP

SEQ ID NO: 10444 - protein, 32 aa, Artificial Sequence
  GFR-binding peptide
  MOD_RES (2), (2): Xaa is C or S
KXSKVVMEYQKYVKPTRGVIFLISIPSLDQPV

SEQ ID NO: 10445 - protein, 36 aa, Artificial Sequence
  GFR-binding peptide
  MOD_RES (2), (35), (36): Xaa is C or S
  MOD_RES (13), (14), (15), (16), (17): Xaa is A or G
  MOD_RES (18), (19), (20), (21): Xaa is A or G or is absent
KXSKVVMNSLQEXXXXXXXXXYYVIPLPELDQPVXX

SEQ ID NO: 10446 - protein, 36 aa, Artificial Sequence
  GFR-binding peptide
  MOD_RES (1), (35), (36): Xaa is C or S
  MOD_RES (13), (14), (15), (16), (17): Xaa is A or G
  MOD_RES (18), (19), (20), (21): Xaa is A or G or is absent
XSEVVMDRYKKLXXXXXXXXXFYLISIANLRTPVXX

SEQ ID NO: 10447 - protein, 37 aa, Artificial Sequence
  GFR-binding peptide
  MOD_RES (2), (34), (35): Xaa is C or S
GXSEVVMDEYQKYVVNNASDIFLISIPSLRTPVXXTP

SEQ ID NO: 10448 - protein, 34 aa, Artificial Sequence
  GFR-binding peptide
  MOD_RES (33), (34): Xaa is C or S
  MOD_RES (11), (12), (13), (14), (15): Xaa is A or G
  MOD_RES (16), (17), (18), (19): Xaa is A or G or is absent
EVVMDRYKKLXXXXXXXXXFYLISIANLRTPVXX

SEQ ID NO: 10449 - protein, 33 aa, Artificial Sequence; identical to SEQ ID NO: 2995
  GFR-binding peptide
  MOD_RES (1), (32), (33): Xaa is C or S

SEQ ID NO: 10450 - protein, 39 aa, Artificial Sequence
  GFR-binding peptide
  MOD_RES (1), (34), (35): Xaa is C or S
  MOD_RES (12), (13), (14), (15), (16): Xaa is A or G
  MOD_RES (17), (18), (19), (20): Xaa is A or G or is absent
XSRVIMNSLQEXXXXXXXXXYYVIPLPELAQPVXXPAAS

SEQ ID NO: 10451 - protein, 38 aa, Artificial Sequence; identical to SEQ ID NO: 2999
  GFR-binding peptide
  MOD_RES (2), (4), (38): Xaa is C or S
  MOD_RES (16), (17), (18), (19), (20): Xaa is A or G
  MOD_RES (21), (22), (23), (24): Xaa is A or G or is absent

SEQ ID NO: 10452 - protein, 38 aa, Artificial Sequence; identical to SEQ ID NO: 3000
  GFR-binding peptide
  MOD_RES (1), (35), (36): Xaa is C or S
  MOD_RES (13), (14), (15), (16), (17): Xaa is A or G
  MOD_RES (18), (19), (20), (21): Xaa is A or G or is absent

SEQ ID NO: 10453 - protein, 35 aa, Artificial Sequence; identical to SEQ ID NO: 3004
  GFR-binding peptide
  MOD_RES (1), (34), (35): Xaa is C or S
  MOD_RES (12), (13), (14), (15), (16): Xaa is A or G
  MOD_RES (17), (18), (19), (20): Xaa is A or G or is absent

SEQ ID NO: 10454 - protein, 36 aa, Artificial Sequence
  GFR-binding peptide
  MOD_RES (34), (35): Xaa is C or S
  MOD_RES (12), (13), (14), (15), (16): Xaa is A or G
  MOD_RES (17), (18), (19), (20): Xaa is A or G or is absent
SEVVMDNSLQEXXXXXXXXXYYVIPLPELRTPVXXT

SEQ ID NO: 10455 - protein, 36 aa, Artificial Sequence; identical to SEQ ID NO: 3005
  GFR-binding peptide
  MOD_RES (33), (33): Xaa is C or S
  MOD_RES (11), (12), (13), (14), (15): Xaa is A or G
  MOD_RES (16), (17), (18), (19): Xaa is A or G or is absent

SEQ ID NO: 10456 - protein, 37 aa, Artificial Sequence; identical to SEQ ID NO: 3008
  GFR-binding peptide
  MOD_RES (1), (35), (36): Xaa is C or S
  MOD_RES (13), (14), (15), (16), (17): Xaa is A or G
  MOD_RES (18), (19), (20), (21): Xaa is A or G or is absent

SEQ ID NO: 10457 - protein, 33 aa, Artificial Sequence
  GFR-binding peptide
  MOD_RES (2), (33): Xaa is C or S
KXSRVIMEYQKYVKPKRGVIFLISIPSLAQPVX

SEQ ID NO: 10458 - protein, 36 aa, Artificial Sequence; identical to SEQ ID NO: 3011
  GFR-binding peptide
  MOD_RES (2), (34), (35): Xaa is C or S

SEQ ID NO: 10459 - protein, 36 aa, Artificial Sequence
  GFR-binding peptide
  MOD_RES (32), (33): Xaa is C or S
SRVVMNEYQKYIVNSSDDIFLVSIPSLKTPAXXPKP

SEQ ID NO: 10460 - protein, 36 aa, Artificial Sequence
  GFR-binding peptide
  MOD_RES (2), (34), (35): Xaa is C or S
GXARVVMNEYQKYIVNSSDDIFLVSIPSLQTPAXXP

SEQ ID NO: 10461 - protein, 35 aa, Artificial Sequence
  GFR-binding peptide
  MOD_RES (33), (34): Xaa is C or S
  MOD_RES (11), (12), (13), (14), (15): Xaa is A or G
  MOD_RES (16), (17), (18), (19): Xaa is A or G or is absent
SKVIMNSLQEXXXXXXXXXYYVIPLPELDQSVXXP

SEQ ID NO: 10462 - protein, 33 aa, Artificial Sequence; identical to SEQ ID NO: 3013
  GFR-binding peptide
  MOD_RES (2), (2): Xaa is C or S

SEQ ID NO: 10463 - protein, 42 aa, Artificial Sequence
  GFR-binding peptide
  MOD_RES (2), (4), (36), (37): Xaa is C or S
HXGXSRVVMNNSLQEIVNSSDDYYVVPLPELKTPAXXPKPVY

SEQ ID NO: 10464 - protein, 37 aa, Artificial Sequence; identical to SEQ ID NO: 3014
  GFR-binding peptide
  MOD_RES (1), (3), (37): Xaa is C or S
  MOD_RES (15), (16), (17), (18), (19): Xaa is A or G
  MOD_RES (20), (21), (22), (23): Xaa is A or G or is absent

SEQ ID NO: 10465 - protein, 34 aa, Artificial Sequence
  GFR-binding peptide
  MOD_RES (32), (32): Xaa is C or S
SRVVMNEYQKYIVNSSDDIFLVSIPSLKTPAXTP

SEQ ID NO: 10466 - protein, 39 aa, Artificial Sequence
  GFR-binding peptide
  MOD_RES (2), (34): Xaa is C or S
GXSRVVMNNSLQEIVNSSDDYYVVPLPELKTPAXTPKTV

SEQ ID NO: 10467 - protein, 34 aa, Artificial Sequence
  GFR-binding peptide
  MOD_RES (33), (34): Xaa is C or S
  MOD_RES (11), (12), (13), (14), (15): Xaa is A or G
  MOD_RES (16), (17), (18), (19): Xaa is A or G or is absent
SRVIMNSLQEXXXXXXXXXYYLITLPELAQPVXX

SEQ ID NO: 10468 - protein, 38 aa, Artificial Sequence; identical to SEQ ID NO: 3018
  GFR-binding peptide
  MOD_RES (34), (35): Xaa is C or S
  MOD_RES (12), (13), (14), (15), (16): Xaa is A or G
  MOD_RES (17), (18), (19), (20): Xaa is A or G or is absent

SEQ ID NO: 10469 - protein, 35 aa, Artificial Sequence
  GFR-binding peptide
  MOD_RES (2), (4): Xaa is C or S
RXGXGEVVMENSLQEVVKDYEDYYVMPLPELETPV

SEQ ID NO: 10470 - protein, 36 aa, Artificial Sequence
  GFR-binding peptide
  MOD_RES (33), (34): Xaa is C or S
  MOD_RES (11), (12), (13), (14), (15): Xaa is A or G
  MOD_RES (16), (17), (18), (19): Xaa is A or G or is absent
EVVMDEYQKYXXXXXXXXXIFLISIPSLRTPVXXTP

SEQ ID NO: 10471 - protein, 36 aa, Artificial Sequence
  GFR-binding peptide
  MOD_RES (2), (4), (36): Xaa is C or S
HXGXARVVMNNSLQEIVNSSDDYYLVTLPELQTPAX

SEQ ID NO: 10472 - protein, 43 aa, Artificial Sequence; identical to SEQ ID NO: 3020
  GFR-binding peptide
  MOD_RES (2), (4), (37), (38): Xaa is C or S
  MOD_RES (15), (16), (17), (18), (19): Xaa is A or G
  MOD_RES (20), (21), (22), (23): Xaa is A or G or is absent

SEQ ID NO: 10473 - protein, 36 aa, Artificial Sequence
  GFR-binding peptide
  MOD_RES (34), (35): Xaa is C or S
  MOD_RES (12), (13), (14), (15), (16): Xaa is A or G
  MOD_RES (17), (18), (19), (20): Xaa is A or G or is absent
ARVVMNNSLQEXXXXXXXXXYYVVPLPELQTPAXXP

SEQ ID NO: 10474 - protein, 37 aa, Artificial Sequence
  GFR-binding peptide
  MOD_RES (31), (32): Xaa is C or S
RVVMNNSLQEIVNSSDDYYVVPLPELQTPAXXPKPVT

SEQ ID NO: 10475 - protein, 36 aa, Artificial Sequence
  GFR-binding peptide
  MOD_RES (32), (33): Xaa is C or S
ARVVMNEYQKYIVNSSDDIFLVSIPSLQTPAXXPKP

SEQ ID NO: 10476 - protein, 40 aa, Artificial Sequence; identical to SEQ ID NO: 3025
  GFR-binding peptide
  MOD_RES (2), (4), (37), (38): Xaa is C or S
  MOD_RES (15), (16), (17), (18), (19): Xaa is A or G
  MOD_RES (20), (21), (22), (23): Xaa is A or G or is absent

SEQ ID NO: 10477 - protein, 35 aa, Artificial Sequence; identical to SEQ ID NO: 3026
  GFR-binding peptide
  MOD_RES (1), (3), (35): Xaa is C or S

SEQ ID NO: 10478 - protein, 36 aa, Artificial Sequence
  GFR-binding peptide
  MOD_RES (31), (32): Xaa is C or S
RVVMNEYQKYIVNSSDDIFLVSIPSLKTPAXXPKPV

SEQ ID NO: 10479 - protein, 35 aa, Artificial Sequence; identical to SEQ ID NO: 3028
  GFR-binding peptide
  MOD_RES (32), (33): Xaa is C or S

SEQ ID NO: 10480 - protein, 33 aa, Artificial Sequence
  GFR-binding peptide
  MOD_RES (2), (2): Xaa is C or S
GXGEVVMENSLQEVVKDYEDYYLMTLPELETPV

SEQ ID NO: 10481 - protein, 35 aa, Artificial Sequence; identical to SEQ ID NO: 3031
  GFR-binding peptide
  MOD_RES (1), (34), (35): Xaa is C or S
  MOD_RES (12), (13), (14), (15), (16): Xaa is A or G
  MOD_RES (17), (18), (19), (20): Xaa is A or G or is absent

SEQ ID NO: 10482 - protein, 34 aa, Artificial Sequence
  GFR-binding peptide
  MOD_RES (1), (33), (34): Xaa is C or S
XSRVVMNNSLQEIVNSSDDYYLVTLPELKTPAXX

SEQ ID NO: 10483 - protein, 35 aa, Artificial Sequence; identical to SEQ ID NO: 3033
  GFR-binding peptide
  MOD_RES (2), (33), (34): Xaa is C or S

SEQ ID NO: 10484 - protein, 32 aa, Artificial Sequence
  GFR-binding peptide
  MOD_RES (11), (12), (13), (14), (15): Xaa is A or G
  MOD_RES (16), (17), (18), (19): Xaa is A or G or is absent
EVVMDEYQKYXXXXXXXXXIFLISIPSLRTPV

SEQ ID NO: 10485 - protein, 37 aa, Artificial Sequence
  GFR-binding peptide
  MOD_RES (2), (34): Xaa is C or S
GXSRVVMNNSLQEIVNSSDDYYVVPLPELKTPAXTPK

SEQ ID NO: 10486 - protein, 40 aa, Artificial Sequence
  GFR-binding peptide
  MOD_RES (1), (3), (35), (36): Xaa is C or S
XGXSEVVMDEYQKYVVNNASDIFLISIPSLRTPVXXTPPT

SEQ ID NO: 10487 - protein, 37 aa, Artificial Sequence
  GFR-binding peptide
  MOD_RES (1), (3), (37): Xaa is C or S
  MOD_RES (15), (16), (17), (18), (19): Xaa is A or G
  MOD_RES (20), (21), (22), (23): Xaa is A or G or is absent
XGXARVVMNEYQKYXXXXXXXXXIFLVSIPSLQTPAX

SEQ ID NO: 10488 - protein, 37 aa, Artificial Sequence
  GFR-binding peptide
  MOD_RES (32), (33): Xaa is C or S
GEVVMDNSLQEVVKENEDYYLMTLPELETPVXXAKPI

SEQ ID NO: 10489 - protein, 36 aa, Artificial Sequence
  GFR-binding peptide
  MOD_RES (1), (3), (36): Xaa is C or S
  MOD_RES (14), (15), (16), (17), (18): Xaa is A or G
  MOD_RES (19), (20), (21), (22): Xaa is A or G or is absent
XKXSKVIMNSLQEXXXXXXXXXYYVIPLPELDQSVX

SEQ ID NO: 10490 - protein, 38 aa, Artificial Sequence
  GFR-binding peptide
  MOD_RES (33), (33): Xaa is C or S
  MOD_RES (11), (12), (13), (14), (15): Xaa is A or G
  MOD_RES (16), (17), (18), (19): Xaa is A or G or is absent
RVVMNNSLQEXXXXXXXXXYYVVPLPELKTPAXTPKTV

SEQ ID NO: 10491 - protein, 36 aa, Artificial Sequence
  GFR-binding peptide
  MOD_RES (1), (35), (36): Xaa is C or S
  MOD_RES (13), (14), (15), (16), (17): Xaa is A or G
  MOD_RES (18), (19), (20), (21): Xaa is A or G or is absent
XSRVVMNNSLQEXXXXXXXXXYYVVPLPELKTPAXX

SEQ ID NO: 10492 - protein, 39 aa, Artificial Sequence; identical to SEQ ID NO: 3039
  GFR-binding peptide
  MOD_RES (2), (35), (36): Xaa is C or S
  MOD_RES (13), (14), (15), (16), (17): Xaa is A or G
  MOD_RES (18), (19), (20), (21): Xaa is A or G or is absent

SEQ ID NO: 10493 - protein, 38 aa, Artificial Sequence; identical to SEQ ID NO: 3041
  GFR-binding peptide
  MOD_RES (1), (3), (35): Xaa is C or S

SEQ ID NO: 10494 - protein, 35 aa, Artificial Sequence; identical to SEQ ID NO: 3042
  GFR-binding peptide
  MOD_RES (32), (33): Xaa is C or S

SEQ ID NO: 10495 - protein, 33 aa, Artificial Sequence
  GFR-binding peptide
  MOD_RES (2), (33): Xaa is C or S
KXSRVIMNSLQEVKPKRGVYYVIPLPELAQPVX

SEQ ID NO: 10496 - protein, 44 aa, Artificial Sequence
  GFR-binding peptide
  MOD_RES (2), (4), (38), (39): Xaa is C or S
  MOD_RES (16), (17), (18), (19), (20): Xaa is A or G
  MOD_RES (21), (22), (23), (24): Xaa is A or G or is absent
RXGXSEVVMDEYQKYXXXXXXXXXIFLISIPSLRTPVXXTPPTS

SEQ ID NO: 10497 - protein, 35 aa, Artificial Sequence
  GFR-binding peptide
  MOD_RES (1), (3), (35): Xaa is C or S
XGXARVVMNEYQKYIVNSSDDIFLVSIPSLQTPAX

SEQ ID NO: 10498 - protein, 39 aa, Artificial Sequence
  GFR-binding peptide
  MOD_RES (1), (3), (36), (37): Xaa is C or S
  MOD_RES (14), (15), (16), (17), (18): Xaa is A or G
  MOD_RES (19), (20), (21), (22): Xaa is A or G or is absent
XKXSRVIMNSLQEXXXXXXXXXYYLITLPELAQPVXXPA

SEQ ID NO: 10499 - protein, 35 aa, Artificial Sequence
  GFR-binding peptide
  MOD_RES (2), (4): Xaa is C or S
HXGXARVVMNEYQKYIVNSSDDIFLVSIPSLQTPA

SEQ ID NO: 10500 - protein, 37 aa, Artificial Sequence; identical to SEQ ID NO: 3046
  GFR-binding peptide
  MOD_RES (2), (33), (34): Xaa is C or S

SEQ ID NO: 10501 - protein, 37 aa, Artificial Sequence
  GFR-binding peptide
  MOD_RES (33), (34): Xaa is C or S
  MOD_RES (11), (12), (13), (14), (15): Xaa is A or G
  MOD_RES (16), (17), (18), (19): Xaa is A or G or is absent
SKVVMEYQKYXXXXXXXXXIFLISIPSLDQPVXXPSA

SEQ ID NO: 10502 - protein, 39 aa, Artificial Sequence
  GFR-binding peptide
  MOD_RES (1), (3), (36), (37): Xaa is C or S
  MOD_RES (14), (15), (16), (17), (18): Xaa is A or G
  MOD_RES (19), (20), (21), (22): Xaa is A or G or is absent
XKXSKVVMEYQKYXXXXXXXXXIFLISIPSLDQPVXXPS

SEQ ID NO: 10503 - protein, 39 aa, Artificial Sequence
  GFR-binding peptide
  MOD_RES (1), (3), (37), (38): Xaa is C or S
  MOD_RES (15), (16), (17), (18), (19): Xaa is A or G
  MOD_RES (20), (21), (22), (23): Xaa is A or G or is absent
XGXSRVVMNNSLQEXXXXXXXXXYYLVTLPELKTPAXXP

SEQ ID NO: 10504 - protein, 34 aa, Artificial Sequence
  GFR-binding peptide
  MOD_RES (31), (32): Xaa is C or S
SKVVMNSLQEVKPTRGVYYLITLPELDQPVXXPS

SEQ ID NO: 10505 - protein, 41 aa, Artificial Sequence; identical to SEQ ID NO: 3049
  GFR-binding peptide
  MOD_RES (2), (4), (35), (36): Xaa is C or S

SEQ ID NO: 10506 - protein, 33 aa, Artificial Sequence
  GFR-binding peptide
  MOD_RES (33), (33): Xaa is C or S
  MOD_RES (11), (12), (13), (14), (15): Xaa is A or G
  MOD_RES (16), (17), (18), (19): Xaa is A or G or is absent
EVVMEEYQKYXXXXXXXXXIFLMSIPSLETPVX

SEQ ID NO: 10507 - protein, 38 aa, Artificial Sequence
  GFR-binding peptide
  MOD_RES (2), (36), (37): Xaa is C or S
  MOD_RES (14), (15), (16), (17), (18): Xaa is A or G
  MOD_RES (19), (20), (21), (22): Xaa is A or G or is absent
GXGEVVMDNSLQEXXXXXXXXXYYLMTLPELETPVXXA

SEQ ID NO: 10508 - protein, 39 aa, Artificial Sequence; identical to SEQ ID NO: 3052
  GFR-binding peptide
  MOD_RES (1), (35), (36): Xaa is C or S
  MOD_RES (13), (14), (15), (16), (17): Xaa is A or G
  MOD_RES (18), (19), (20), (21): Xaa is A or G or is absent

SEQ ID NO: 10509 - protein, 39 aa, Artificial Sequence
  GFR-binding peptide
  MOD_RES (2), (36), (37): Xaa is C or S
  MOD_RES (14), (15), (16), (17), (18): Xaa is A or G
  MOD_RES (19), (20), (21), (22): Xaa is A or G or is absent
GXGEVVMENSLQEXXXXXXXXXYYLMTLPELETPVXXAK

SEQ ID NO: 10510 - protein, 43 aa, Artificial Sequence; identical to SEQ ID NO: 3053
  GFR-binding peptide
  MOD_RES (2), (4), (38), (39): Xaa is C or S
  MOD_RES (16), (17), (18), (19), (20): Xaa is A or G
  MOD_RES (21), (22), (23), (24): Xaa is A or G or is absent

SEQ ID NO: 10511 - protein, 39 aa, Artificial Sequence
  GFR-binding peptide
  MOD_RES (1), (3), (34), (35): Xaa is C or S
XKXSKVVMNSLQEVKPTRGVYYVIPLPELDQPVXXPSAS

SEQ ID NO: 10512 - protein, 38 aa, Artificial Sequence; identical to SEQ ID NO: 3054
  GFR-binding peptide
  MOD_RES (1), (3), (36), (37): Xaa is C or S
  MOD_RES (14), (15), (16), (17), (18): Xaa is A or G
  MOD_RES (19), (20), (21), (22): Xaa is A or G or is absent

SEQ ID NO: 10513 - protein, 34 aa, Artificial Sequence
  GFR-binding peptide
  MOD_RES (33), (34): Xaa is C or S
  MOD_RES (11), (12), (13), (14), (15): Xaa is A or G
  MOD_RES (16), (17), (18), (19): Xaa is A or G or is absent
EVVMENSLQEXXXXXXXXXYYLMTLPELETPVXX

SEQ ID NO: 10514 - protein, 37 aa, Artificial Sequence; identical to SEQ ID NO: 3057
  GFR-binding peptide
  MOD_RES (34), (35): Xaa is C or S
  MOD_RES (12), (13), (14), (15), (16): Xaa is A or G
  MOD_RES (17), (18), (19), (20): Xaa is A or G or is absent

SEQ ID NO: 10515 - protein, 33 aa, Artificial Sequence
  GFR-binding peptide
  MOD_RES (31), (32): Xaa is C or S
EVVMDNSLQEVVKENEDYYVMPLPELETPVXXA

SEQ ID NO: 10516 - protein, 40 aa, Artificial Sequence
  GFR-binding peptide
  MOD_RES (1), (34), (35): Xaa is C or S
  MOD_RES (12), (13), (14), (15), (16): Xaa is A or G
  MOD_RES (17), (18), (19), (20): Xaa is A or G or is absent
XSKVVMEYQKYXXXXXXXXXIFLISIPSLDQPVXXPSASA

SEQ ID NO: 10517 - protein, 44 aa, Artificial Sequence
  GFR-binding peptide
  MOD_RES (2), (4), (38), (39): Xaa is C or S
  MOD_RES (16), (17), (18), (19), (20): Xaa is A or G
  MOD_RES (21), (22), (23), (24): Xaa is A or G or is absent
HXGXSRVVMNEYQKYXXXXXXXXXIFLVSIPSLKTPAXXPKPVY

SEQ ID NO: 10518 - protein, 40 aa, Artificial Sequence
  GFR-binding peptide
  MOD_RES (2), (36): Xaa is C or S
  MOD_RES (14), (15), (16), (17), (18): Xaa is A or G
  MOD_RES (19), (20), (21), (22): Xaa is A or G or is absent
GXSRVVMNEYQKYXXXXXXXXXIFLVSIPSLKTPAXTPKT

SEQ ID NO: 10519 - protein, 40 aa, Artificial Sequence; identical to SEQ ID NO: 3059
  GFR-binding peptide
  MOD_RES (1), (3), (37): Xaa is C or S
  MOD_RES (15), (16), (17), (18), (19): Xaa is A or G
  MOD_RES (20), (21), (22), (23): Xaa is A or G or is absent

SEQ ID NO: 10520 - protein, 32 aa, Artificial Sequence; identical to SEQ ID NO: 3061
  GFR-binding peptide
  MOD_RES (11), (12), (13), (14), (15): Xaa is A or G
  MOD_RES (16), (17), (18), (19): Xaa is A or G or is absent

SEQ ID NO: 10521 - protein, 35 aa, Artificial Sequence; identical to SEQ ID NO: 3064
  GFR-binding peptide
  MOD_RES (32), (33): Xaa is C or S

SEQ ID NO: 10522 - protein, 34 aa, Artificial Sequence
  GFR-binding peptide
  MOD_RES (34), (34): Xaa is C or S
  MOD_RES (12), (13), (14), (15), (16): Xaa is A or G
  MOD_RES (17), (18), (19), (20): Xaa is A or G or is absent
GEVVMENSLQEXXXXXXXXXYYVMPLPELETPVX

SEQ ID NO: 10523 - protein, 38 aa, Artificial Sequence
  GFR-binding peptide
  MOD_RES (2), (36), (37): Xaa is C or S
  MOD_RES (14), (15), (16), (17), (18): Xaa is A or G
  MOD_RES (19), (20), (21), (22): Xaa is A or G or is absent
GXSEVVMDNSLQEXXXXXXXXXYYLITLPELRTPVXXT

SEQ ID NO: 10524 - protein, 38 aa, Artificial Sequence
  GFR-binding peptide
  MOD_RES (1), (3), (37), (38): Xaa is C or S
  MOD_RES (15), (16), (17), (18), (19): Xaa is A or G
  MOD_RES (20), (21), (22), (23): Xaa is A or G or is absent
XGXSRVVMNNSLQEXXXXXXXXXYYLVTLPELKTPAXX

SEQ ID NO: 10525 - protein, 40 aa, Artificial Sequence
  GFR-binding peptide
  MOD_RES (2), (4), (37), (38): Xaa is C or S
  MOD_RES (15), (16), (17), (18), (19): Xaa is A or G
  MOD_RES (20), (21), (22), (23): Xaa is A or G or is absent
SXKXSRVIMNSLQEXXXXXXXXXYYLITLPELAQPVXXPA

SEQ ID NO: 10526 - protein, 36 aa, Artificial Sequence; identical to SEQ ID NO: 3070
  GFR-binding peptide
  MOD_RES (2), (34), (35): Xaa is C or S

SEQ ID NO: 10527 - protein, 32 aa, Artificial Sequence
  GFR-binding peptide
  MOD_RES (31), (32): Xaa is C or S
SKVVMNSLQEVKPTRGVYYVIPLPELDQPVXX

SEQ ID NO: 10528 - protein, 37 aa, Artificial Sequence
  GFR-binding peptide
  MOD_RES (1), (3), (37): Xaa is C or S
  MOD_RES (15), (16), (17), (18), (19): Xaa is A or G
  MOD_RES (20), (21), (22), (23): Xaa is A or G or is absent
XGXSEVVMDEYQKYXXXXXXXXXIFLISIPSLRTPVX

SEQ ID NO: 10529 - protein, 35 aa, Artificial Sequence
  GFR-binding peptide
  MOD_RES (1), (34), (35): Xaa is C or S
  MOD_RES (12), (13), (14), (15), (16): Xaa is A or G
  MOD_RES (17), (18), (19), (20): Xaa is A or G or is absent
XSKVVMEYQKYXXXXXXXXXIFLISIPSLDQPVXX

SEQ ID NO: 10530 - protein, 31 aa, Artificial Sequence; identical to SEQ ID NO: 3074
  GFR-binding peptide
  MOD_RES (31), (31): Xaa is C or S

SEQ ID NO: 10531 - protein, 39 aa, Artificial Sequence
  GFR-binding peptide
  MOD_RES (1), (3), (37), (38): Xaa is C or S
  MOD_RES (15), (16), (17), (18), (19): Xaa is A or G
  MOD_RES (20), (21), (22), (23): Xaa is A or G or is absent
XGXGEVVMDEYQKYXXXXXXXXXIFLMSIPSLETPVXXA

SEQ ID NO: 10532 - protein, 37 aa, Artificial Sequence
  GFR-binding peptide
  MOD_RES (34), (35): Xaa is C or S
  MOD_RES (12), (13), (14), (15), (16): Xaa is A or G
  MOD_RES (17), (18), (19), (20): Xaa is A or G or is absent
SEVVMDRYKKLXXXXXXXXXFYLISIANLRTPVXXTP

SEQ ID NO: 10533 - protein, 34 aa, Artificial Sequence
  GFR-binding peptide
  MOD_RES (31), (32): Xaa is C or S
EVVMEEYQKYVVKDYEDIFLMSIPSLETPVXXAK

SEQ ID NO: 10534 - protein, 41 aa, Artificial Sequence
  GFR-binding peptide
  MOD_RES (1), (35), (36): Xaa is C or S
  MOD_RES (13), (14), (15), (16), (17): Xaa is A or G
  MOD_RES (18), (19), (20), (21): Xaa is A or G or is absent
XARVVMNNSLQEXXXXXXXXXYYLVTLPELQTPAXXPKPVT

SEQ ID NO: 10535 - protein, 36 aa, Artificial Sequence
  GFR-binding peptide
  MOD_RES (31), (32): Xaa is C or S
SKVVMEYQKYVKPTRGVIFLISIPSLDQPVXXPSAS

SEQ ID NO: 10536 - protein, 38 aa, Artificial Sequence
  GFR-binding peptide
  MOD_RES (2), (4), (38): Xaa is C or S
  MOD_RES (16), (17), (18), (19), (20): Xaa is A or G
  MOD_RES (21), (22), (23), (24): Xaa is A or G or is absent
RXGXSEVVMDEYQKYXXXXXXXXXIFLISIPSLRTPVX

SEQ ID NO: 10537 - protein, 34 aa, Artificial Sequence; identical to SEQ ID NO: 3078
  GFR-binding peptide
  MOD_RES (33), (34): Xaa is C or S
  MOD_RES (11), (12), (13), (14), (15): Xaa is A or G
  MOD_RES (16), (17), (18), (19): Xaa is A or G or is absent

SEQ ID NO: 10538 - protein, 32 aa, Artificial Sequence
  GFR-binding peptide
  MOD_RES (1), (32): Xaa is C or S
XSKVIMNSLQEIKPTKGIYYVIPLPELDQSVX

SEQ ID NO: 10539 - protein, 42 aa, Artificial Sequence
  GFR-binding peptide
  MOD_RES (2), (4), (38), (39): Xaa is C or S
  MOD_RES (16), (17), (18), (19), (20): Xaa is A or G
  MOD_RES (21), (22), (23), (24): Xaa is A or G or is absent
HXGXSRVVMNNSLQEXXXXXXXXXYYVVPLPELKTPAXXPKP

SEQ ID NO: 10540 - protein, 35 aa, Artificial Sequence; identical to SEQ ID NO: 3082
  GFR-binding peptide
  MOD_RES (1), (33), (34): Xaa is C or S

SEQ ID NO: 10541 - protein, 37 aa, Artificial Sequence
  GFR-binding peptide
  MOD_RES (31), (32): Xaa is C or S
SRVIMEYQKYVKPKRGVIFLISIPSLAQPVXXPAASA

SEQ ID NO: 10542 - protein, 33 aa, Artificial Sequence
  GFR-binding peptide
  MOD_RES (32), (32): Xaa is C or S
SRVVMNEYQKYIVNSSDDIFLVSIPSLKTPAXT

SEQ ID NO: 10543 - protein, 32 aa, Artificial Sequence
  GFR-binding peptide
  MOD_RES (1), (1): Xaa is C or S
XSRVVMNNSLQEIVNSSDDYYLVTLPELKTPA

SEQ ID NO: 10544 - protein, 34 aa, Artificial Sequence; identical to SEQ ID NO: 3087
  GFR-binding peptide
  MOD_RES (1), (32), (33): Xaa is C or S

SEQ ID NO: 10545 - protein, 35 aa, Artificial Sequence
  GFR-binding peptide
  MOD_RES (2), (34): Xaa is C or S
GXSRVVMNNSLQEIVNSSDDYYVVPLPELKTPAXT

SEQ ID NO: 10546 - protein, 38 aa, Artificial Sequence; identical to SEQ ID NO: 3088
  GFR-binding peptide
  MOD_RES (1), (32), (33): Xaa is C or S

SEQ ID NO: 10547 - protein, 40 aa, Artificial Sequence
  GFR-binding peptide
  MOD_RES (34), (35): Xaa is C or S
  MOD_RES (12), (13), (14), (15), (16): Xaa is A or G
  MOD_RES (17), (18), (19), (20): Xaa is A or G or is absent
ARVVMNEYQKYXXXXXXXXXIFLVSIPSLQTPAXXPKPVT

SEQ ID NO: 10548 - protein, 35 aa, Artificial Sequence
  GFR-binding peptide
  MOD_RES (2), (4): Xaa is C or S
HXGXARVVMNNSLQEIVNSSDDYYLVTLPELQTPA

SEQ ID NO: 10549 - protein, 37 aa, Artificial Sequence
  GFR-binding peptide
  MOD_RES (34), (35): Xaa is C or S
  MOD_RES (12), (13), (14), (15), (16): Xaa is A or G
  MOD_RES (17), (18), (19), (20): Xaa is A or G or is absent
GEVVMENSLQEXXXXXXXXXYYLMTLPELETPVXXAK

SEQ ID NO: 10550 - protein, 41 aa, Artificial Sequence
  GFR-binding peptide
  MOD_RES (2), (36), (37): Xaa is C or S
  MOD_RES (14), (15), (16), (17), (18): Xaa is A or G
  MOD_RES (19), (20), (21), (22): Xaa is A or G or is absent
GXARVVMNNSLQEXXXXXXXXXYYLVTLPELQTPAXXPKPV

SEQ ID NO: 10551 - protein, 40 aa, Artificial Sequence
  GFR-binding peptide
  MOD_RES (2), (36), (37): Xaa is C or S
  MOD_RES (14), (15), (16), (17), (18): Xaa is A or G
  MOD_RES (19), (20), (21), (22): Xaa is A or G or is absent
GXARVVMNNSLQEXXXXXXXXXYYVVPLPELQTPAXXPKP

SEQ ID NO: 10552 - protein, 33 aa, Artificial Sequence; identical to SEQ ID NO: 3092
  GFR-binding peptide
  MOD_RES (12), (13), (14), (15), (16): Xaa is A or G
  MOD_RES (17), (18), (19), (20): Xaa is A or G or is absent

SEQ ID NO: 10553 - protein, 39 aa, Artificial Sequence; identical to SEQ ID NO: 3093
  GFR-binding peptide
  MOD_RES (2), (4), (38), (39): Xaa is C or S
  MOD_RES (16), (17), (18), (19), (20): Xaa is A or G
  MOD_RES (21), (22), (23), (24): Xaa is A or G or is absent

SEQ ID NO: 10554 - protein, 37 aa, Artificial Sequence
  GFR-binding peptide
  MOD_RES (1), (34), (35): Xaa is C or S
  MOD_RES (12), (13), (14), (15), (16): Xaa is A or G
  MOD_RES (17), (18), (19), (20): Xaa is A or G or is absent
XSRVIMNSLQEXXXXXXXXXYYVIPLPELAQPVXXPA

SEQ ID NO: 10555 - protein, 40 aa, Artificial Sequence
  GFR-binding peptide
  MOD_RES (1), (3), (36), (37): Xaa is C or S
  MOD_RES (14), (15), (16), (17), (18): Xaa is A or G
  MOD_RES (19), (20), (21), (22): Xaa is A or G or is absent
XKXSRVIMNSLQEXXXXXXXXXYYLITLPELAQPVXXPAA

SEQ ID NO: 10556 - protein, 35 aa, Artificial Sequence
  GFR-binding peptide
  MOD_RES (1), (3): Xaa is C or S
  MOD_RES (14), (15), (16), (17), (18): Xaa is A or G
  MOD_RES (19), (20), (21), (22): Xaa is A or G or is absent
XKXSKVIMNSLQEXXXXXXXXXYYVIPLPELDQSV

SEQ ID NO: 10557 - protein, 37 aa, Artificial Sequence
  GFR-binding peptide
  MOD_RES (1), (32), (33): Xaa is C or S
XSKVVMNSLQEVKPTRGVYYVIPLPELDQPVXXPSAS

SEQ ID NO: 10558 - protein, 35 aa, Artificial Sequence
  GFR-binding peptide
  MOD_RES (1), (3), (34), (35): Xaa is C or S
XKXSRVIMNSLQEVKPKRGVYYLITLPELAQPVXX

SEQ ID NO: 10559 - protein, 35 aa, Artificial Sequence
  GFR-binding peptide
  MOD_RES (34), (35): Xaa is C or S
  MOD_RES (12), (13), (14), (15), (16): Xaa is A or G
  MOD_RES (17), (18), (19), (20): Xaa is A or G or is absent
GEVVMENSLQEXXXXXXXXXYYVMPLPELETPVXX

SEQ ID NO: 10560 - protein, 30 aa, Artificial Sequence
  GFR-binding peptide
SKVVMNSLQEVKPTRGVYYLITLPELDQPV

SEQ ID NO: 10561 - protein, 36 aa, Artificial Sequence
  GFR-binding peptide
  MOD_RES (2), (4), (36): Xaa is C or S
RXGXGEVVMENSLQEVVKDYEDYYVMPLPELETPVX

SEQ ID NO: 10562 - protein, 42 aa, Artificial Sequence
  GFR-binding peptide
  MOD_RES (2), (36), (37): Xaa is C or S
  MOD_RES (14), (15), (16), (17), (18): Xaa is A or G
  MOD_RES (19), (20), (21), (22): Xaa is A or G or is absent
GXARVVMNNSLQEXXXXXXXXXYYVVPLPELQTPAXXPKPVT

SEQ ID NO: 10563 - protein, 37 aa, Artificial Sequence; identical to SEQ ID NO: 3101
  GFR-binding peptide
  MOD_RES (1), (3), (35), (36): Xaa is C or S

SEQ ID NO: 10564 - protein, 40 aa, Artificial Sequence; identical to SEQ ID NO: 3102
  GFR-binding peptide
  MOD_RES (34), (35): Xaa is C or S
  MOD_RES (12), (13), (14), (15), (16): Xaa is A or G
  MOD_RES (17), (18), (19), (20): Xaa is A or G or is absent

SEQ ID NO: 10565 - protein, 34 aa, Artificial Sequence
  GFR-binding peptide
  MOD_RES (33), (34): Xaa is C or S
  MOD_RES (11), (12), (13), (14), (15): Xaa is A or G
  MOD_RES (16), (17), (18), (19): Xaa is A or G or is absent
SKVIMNSLQEXXXXXXXXXYYVIPLPELDQSVXX

SEQ ID NO: 10566 - protein, 37 aa, Artificial Sequence; identical to SEQ ID NO: 3104
  GFR-binding peptide
  MOD_RES (31), (32): Xaa is C or S

SEQ ID NO: 10567 - protein, 35 aa, Artificial Sequence
  GFR-binding peptide
  MOD_RES (2), (34), (35): Xaa is C or S
GXGEVVMDEYQKYVVKENEDIFLMSIPSLETPVXX

SEQ ID NO: 10568 - protein, 39 aa, Artificial Sequence
  GFR-binding peptide
  MOD_RES (1), (35): Xaa is C or S
  MOD_RES (13), (14), (15), (16), (17): Xaa is A or G
  MOD_RES (18), (19), (20), (21): Xaa is A or G or is absent
XSRVVMNEYQKYXXXXXXXXXIFLVSIPSLKTPAXTPKT

SEQ ID NO: 10569 - protein, 39 aa, Artificial Sequence
  GFR-binding peptide
  MOD_RES (1), (3), (34), (35): Xaa is C or S
XKXSKVIMEYQKYIKPTKGIIFLISIPSLDQSVXXPSAS

SEQ ID NO: 10570 - protein, 40 aa, Artificial Sequence; identical to SEQ ID NO: 3107
  GFR-binding peptide
  MOD_RES (1), (3), (34), (35): Xaa is C or S

SEQ ID NO: 10571 - protein, 37 aa, Artificial Sequence; identical to SEQ ID NO: 3108
  GFR-binding peptide
  MOD_RES (34), (35): Xaa is C or S
  MOD_RES (12), (13), (14), (15), (16): Xaa is A or G
  MOD_RES (17), (18), (19), (20): Xaa is A or G or is absent

SEQ ID NO: 10572 - protein, 39 aa, Artificial Sequence; identical to SEQ ID NO: 3110
  GFR-binding peptide
  MOD_RES (1), (3), (35), (36): Xaa is C or S

SEQ ID NO: 10573 - protein, 40 aa, Artificial Sequence; identical to SEQ ID NO: 3117
  GFR-binding peptide
  MOD_RES (2), (36), (37): Xaa is C or S
  MOD_RES (14), (15), (16), (17), (18): Xaa is A or G
  MOD_RES (19), (20), (21), (22): Xaa is A or G or is absent

SEQ ID NO: 10574 - protein, 37 aa, Artificial Sequence; identical to SEQ ID NO: 3118
  GFR-binding peptide
  MOD_RES (33), (34): Xaa is C or S
  MOD_RES (11), (12), (13), (14), (15): Xaa is A or G
  MOD_RES (16), (17), (18), (19): Xaa is A or G or is absent

SEQ ID NO: 10575 - protein, 39 aa, Artificial Sequence; identical to SEQ ID NO: 3121
  GFR-binding peptide
  MOD_RES (2), (35), (36): Xaa is C or S
  MOD_RES (13), (14), (15), (16), (17): Xaa is A or G
  MOD_RES (18), (19), (20), (21): Xaa is A or G or is absent

SEQ ID NO: 10576 - protein, 36 aa, Artificial Sequence
  GFR-binding peptide
  MOD_RES (34), (34): Xaa is C or S
  MOD_RES (12), (13), (14), (15), (16): Xaa is A or G
  MOD_RES (17), (18), (19), (20): Xaa is A or G or is absent
SRVVMNNSLQEXXXXXXXXXYYLVTLPELKTPAXTP

SEQ ID NO: 10577 - protein, 37 aa, Artificial Sequence; identical to SEQ ID NO: 3124
  GFR-binding peptide
  MOD_RES (2), (4), (37): Xaa is C or S
  MOD_RES (15), (16), (17), (18), (19): Xaa is A or G
  MOD_RES (20), (21), (22), (23): Xaa is A or G or is absent

SEQ ID NO: 10578 - protein, 40 aa, Artificial Sequence; identical to SEQ ID NO: 3125
  GFR-binding peptide
  MOD_RES (1), (34), (35): Xaa is C or S
  MOD_RES (12), (13), (14), (15), (16): Xaa is A or G
  MOD_RES (17), (18), (19), (20): Xaa is A or G or is absent

SEQ ID NO: 10579 - protein, 39 aa, Artificial Sequence
  GFR-binding peptide
  MOD_RES (33), (33): Xaa is C or S
  MOD_RES (11), (12), (13), (14), (15): Xaa is A or G
  MOD_RES (16), (17), (18), (19): Xaa is A or G or is absent
RVVMNNSLQEXXXXXXXXXYYLVTLPELKTPAXTPKTVH

SEQ ID NO: 10580 - protein, 32 aa, Artificial Sequence
  GFR-binding peptide
  MOD_RES (32), (32): Xaa is C or S
GEVVMDNSLQEVVKENEDYYLMTLPELETPVX

SEQ ID NO: 10581 - protein, 43 aa, Artificial Sequence
  GFR-binding peptide
  MOD_RES (1), (3), (37), (38): Xaa is C or S
  MOD_RES (15), (16), (17), (18), (19): Xaa is A or G
  MOD_RES (20), (21), (22), (23): Xaa is A or G or is absent
XGXSRVVMNEYQKYXXXXXXXXXIFLVSIPSLKTPAXXPKPVY

SEQ ID NO: 10582 - protein, 37 aa, Artificial Sequence; identical to SEQ ID NO: 3128
  GFR-binding peptide
  MOD_RES (2), (36), (37): Xaa is C or S
  MOD_RES (14), (15), (16), (17), (18): Xaa is A or G
  MOD_RES (19), (20), (21), (22): Xaa is A or G or is absent

SEQ ID NO: 10583 - protein, 41 aa, Artificial Sequence
  GFR-binding peptide
  MOD_RES (2), (4), (36), (37): Xaa is C or S
RXGXGEVVMDNSLQEVVKENEDYYVMPLPELETPVXXAKPI

SEQ ID NO: 10584 - protein, 39 aa, Artificial Sequence
  GFR-binding peptide
  MOD_RES (2), (4), (38), (39): Xaa is C or S
  MOD_RES (16), (17), (18), (19), (20): Xaa is A or G
  MOD_RES (21), (22), (23), (24): Xaa is A or G or is absent
RXGXGEVVMENSLQEXXXXXXXXXYYVMPLPELETPVXX

SEQ ID NO: 10585 - protein, 42 aa, Artificial Sequence
  GFR-binding peptide
  MOD_RES (2), (4), (38), (39): Xaa is C or S
  MOD_RES (16), (17), (18), (19), (20): Xaa is A or G
  MOD_RES (21), (22), (23), (24): Xaa is A or G or is absent
RXGXGEVVMDNSLQEXXXXXXXXXYYVMPLPELETPVXXAKP

SEQ ID NO: 10586 - protein, 35 aa, Artificial Sequence; identical to SEQ ID NO: 3133
  GFR-binding peptide
  MOD_RES (34), (35): Xaa is C or S
  MOD_RES (12), (13), (14), (15), (16): Xaa is A or G
  MOD_RES (17), (18), (19), (20): Xaa is A or G or is absent

SEQ ID NO: 10587 - protein, 33 aa, Artificial Sequence
  GFR-binding peptide
  MOD_RES (1), (33): Xaa is C or S
XARVVMNEYQKYIVNSSDDIFLVSIPSLQTPAX

SEQ ID NO: 10588 - protein, 43 aa, Artificial Sequence
  GFR-binding peptide
  MOD_RES (2), (4), (38), (39): Xaa is C or S
  MOD_RES (16), (17), (18), (19), (20): Xaa is A or G
  MOD_RES (21), (22), (23), (24): Xaa is A or G or is absent
RXGXGEVVMENSLQEXXXXXXXXXYYLMTLPELETPVXXAKPI

SEQ ID NO: 10589 - protein, 37 aa, Artificial Sequence; identical to SEQ ID NO: 3137
  GFR-binding peptide
  MOD_RES (1), (3), (35), (36): Xaa is C or S

SEQ ID NO: 10590 - protein, 39 aa, Artificial Sequence
  GFR-binding peptide
  MOD_RES (1), (3), (37), (38): Xaa is C or S
  MOD_RES (15), (16), (17), (18), (19): Xaa is A or G
  MOD_RES (20), (21), (22), (23): Xaa is A or G or is absent
XGXSEVVMDNSLQEXXXXXXXXXYYVIPLPELRTPVXXT

SEQ ID NO: 10591 - protein, 38 aa, Artificial Sequence; identical to SEQ ID NO: 3138
  GFR-binding peptide
  MOD_RES (34), (35): Xaa is C or S
  MOD_RES (12), (13), (14), (15), (16): Xaa is A or G
  MOD_RES (17), (18), (19), (20): Xaa is A or G or is absent

SEQ ID NO: 10592 - protein, 32 aa, Artificial Sequence; identical to SEQ ID NO: 3139
  GFR-binding peptide
  MOD_RES (11), (12), (13), (14), (15): Xaa is A or G
  MOD_RES (16), (17), (18), (19): Xaa is A or G or is absent

SEQ ID NO: 10593 - protein, 39 aa, Artificial Sequence
  GFR-binding peptide
  MOD_RES (2), (4), (36), (37): Xaa is C or S
RXGXGEVVMDEYQKYVVKENEDIFLMSIPSLETPVXXAK

SEQ ID NO: 10594 - protein, 41 aa, Artificial Sequence
  GFR-binding peptide
  MOD_RES (1), (3), (37), (38): Xaa is C or S
  MOD_RES (15), (16), (17), (18), (19): Xaa is A or G
  MOD_RES (20), (21), (22), (23): Xaa is A or G or is absent
XGXGEVVMDNSLQEXXXXXXXXXYYVMPLPELETPVXXAKP

SEQ ID NO: 10595 - protein, 37 aa, Artificial Sequence
  GFR-binding peptide
  MOD_RES (2), (4): Xaa is C or S
  MOD_RES (16), (17), (18), (19), (20): Xaa is A or G
  MOD_RES (21), (22), (23), (24): Xaa is A or G or is absent
RXGXGEVVMEEYQKYXXXXXXXXXIFLMSIPSLETPV

SEQ ID NO: 10596 - protein, 33 aa, Artificial Sequence; identical to SEQ ID NO: 3144
  GFR-binding peptide
  MOD_RES (33), (33): Xaa is C or S
  MOD_RES (11), (12), (13), (14), (15): Xaa is A or G
  MOD_RES (16), (17), (18), (19): Xaa is A or G or is absent

SEQ ID NO: 10597 - protein, 35 aa, Artificial Sequence
  GFR-binding peptide
  MOD_RES (31), (31): Xaa is C or S
RVVMNNSLQEIVNSSDDYYVVPLPELKTPAXTPKT

SEQ ID NO: 10598 - protein, 39 aa, Artificial Sequence
  GFR-binding peptide
  MOD_RES (2), (34), (35): Xaa is C or S
GXSEVVMDEYQKYVVNNASDIFLISIPSLRTPVXXTPPT

SEQ ID NO: 10599 - protein, 34 aa, Artificial Sequence; identical to SEQ ID NO: 3147
  GFR-binding peptide
  MOD_RES (31), (32): Xaa is C or S

SEQ ID NO: 10600 - protein, 32 aa, Artificial Sequence
  GFR-binding peptide
  MOD_RES (2), (2): Xaa is C or S
KXSRVIMNSLQEVKPKRGVYYVIPLPELAQPV

SEQ ID NO: 10601 - protein, 42 aa, Artificial Sequence
  GFR-binding peptide
  MOD_RES (2), (4), (36), (37): Xaa is C or S
HXGXSRVVMNNSLQEIVNSSDDYYLVTLPELKTPAXXPKPVY

SEQ ID NO: 10602 - protein, 40 aa, Artificial Sequence
  GFR-binding peptide
  MOD_RES (2), (35), (36): Xaa is C or S
  MOD_RES (13), (14), (15), (16), (17): Xaa is A or G
  MOD_RES (18), (19), (20), (21): Xaa is A or G or is absent
KXSKVVMNSLQEXXXXXXXXXYYLITLPELDQPVXXPSAS

SEQ ID NO: 10603 - protein, 31 aa, Artificial Sequence; identical to SEQ ID NO: 3149
  GFR-binding peptide
  MOD_RES (31), (31): Xaa is C or S

SEQ ID NO: 10604 - protein, 36 aa, Artificial Sequence
  GFR-binding peptide
  MOD_RES (1), (3): Xaa is C or S
  MOD_RES (15), (16), (17), (18), (19): Xaa is A or G
  MOD_RES (20), (21), (22), (23): Xaa is A or G or is absent
XGXSRVVMNNSLQEXXXXXXXXXYYVVPLPELKTPA

SEQ ID NO: 10605 - protein, 35 aa, Artificial Sequence
  GFR-binding peptide
  MOD_RES (2), (2): Xaa is C or S
  MOD_RES (14), (15), (16), (17), (18): Xaa is A or G
  MOD_RES (19), (20), (21), (22): Xaa is A or G or is absent
GXSEVVMDEYQKYXXXXXXXXXIFLISIPSLRTPV

SEQ ID NO: 10606 - protein, 40 aa, Artificial Sequence
  GFR-binding peptide
  MOD_RES (2), (4), (38): Xaa is C or S
  MOD_RES (16), (17), (18), (19), (20): Xaa is A or G
  MOD_RES (21), (22), (23), (24): Xaa is A or G or is absent
HXGXSRVVMNNSLQEXXXXXXXXXYYVVPLPELKTPAXTP

SEQ ID NO: 10607 - protein, 41 aa, Artificial Sequence
  GFR-binding peptide
  MOD_RES (2), (4), (35), (36): Xaa is C or S
SXKXSRVIMNSLQEVKPKRGVYYVIPLPELAQPVXXPAASA

SEQ ID NO: 10608 - protein, 38 aa, Artificial Sequence
  GFR-binding peptide
  MOD_RES (2), (34), (35): Xaa is C or S
GXGEVVMEEYQKYVVKDYEDIFLMSIPSLETPVXXAKP

SEQ ID NO: 10609 - protein, 38 aa, Artificial Sequence; identical to SEQ ID NO: 3157
  GFR-binding peptide
  MOD_RES (32), (33): Xaa is C or S

SEQ ID NO: 10610 - protein, 35 aa, Artificial Sequence
  GFR-binding peptide
  MOD_RES (1), (3), (35): Xaa is C or S
XGXSRVVMNNSLQEIVNSSDDYYVVPLPELKTPAX

SEQ ID NO: 10611 - protein, 35 aa, Artificial Sequence
  GFR-binding peptide
  MOD_RES (1), (33), (34): Xaa is C or S
XARVVMNNSLQEIVNSSDDYYVVPLPELQTPAXXP

SEQ ID NO: 10612 - protein, 38 aa, Artificial Sequence
  GFR-binding peptide
  MOD_RES (1), (3), (35): Xaa is C or S
XGXSRVVMNEYQKYIVNSSDDIFLVSIPSLKTPAXTPK

SEQ ID NO: 10613 - protein, 40 aa, Artificial Sequence
  GFR-binding peptide
  MOD_RES (2), (34), (35): Xaa is C or S
GXSRVVMNNSLQEIVNSSDDYYLVTLPELKTPAXXPKPVY

SEQ ID NO: 10614 - protein, 33 aa, Artificial Sequence; identical to SEQ ID NO: 3162
  GFR-binding peptide
  MOD_RES (12), (13), (14), (15), (16): Xaa is A or G
  MOD_RES (17), (18), (19), (20): Xaa is A or G or is absent

SEQ ID NO: 10615 - protein, 40 aa, Artificial Sequence
  GFR-binding peptide
  MOD_RES (1), (3), (37), (38): Xaa is C or S
  MOD_RES (15), (16), (17), (18), (19): Xaa is A or G
  MOD_RES (20), (21), (22), (23): Xaa is A or G or is absent
XGXGEVVMEEYQKYXXXXXXXXXIFLMSIPSLETPVXXAK

SEQ ID NO: 10616 - protein, 36 aa, Artificial Sequence
  GFR-binding peptide
  MOD_RES (1), (34), (35): Xaa is C or S
  MOD_RES (12), (13), (14), (15), (16): Xaa is A or G
  MOD_RES (17), (18), (19), (20): Xaa is A or G or is absent
XSRVIMNSLQEXXXXXXXXXYYLITLPELAQPVXXP

SEQ ID NO: 10617 - protein, 37 aa, Artificial Sequence
  GFR-binding peptide
  MOD_RES (1), (33), (34): Xaa is C or S
XGEVVMENSLQEVVKDYEDYYVMPLPELETPVXXAKP

SEQ ID NO: 10618 - protein, 40 aa, Artificial Sequence
  GFR-binding peptide
  MOD_RES (1), (3), (34), (35): Xaa is C or S
XKXSKVVMNSLQEVKPTRGVYYVIPLPELDQPVXXPSASA

SEQ ID NO: 10619 - protein, 35 aa, Artificial Sequence
  GFR-binding peptide
  MOD_RES (1), (3), (35): Xaa is C or S
XGXSRVVMNEYQKYIVNSSDDIFLVSIPSLKTPAX

SEQ ID NO: 10620 - protein, 32 aa, Artificial Sequence
  GFR-binding peptide
  MOD_RES (31), (32): Xaa is C or S
EVVMEEYQKYVVKDYEDIFLMSIPSLETPVXX

SEQ ID NO: 10621 - protein, 35 aa, Artificial Sequence; identical to SEQ ID NO: 3170
  GFR-binding peptide
  MOD_RES (1), (3): Xaa is C or S
  MOD_RES (14), (15), (16), (17), (18): Xaa is A or G
  MOD_RES (19), (20), (21), (22): Xaa is A or G or is absent

SEQ ID NO: 10622 - protein, 36 aa, Artificial Sequence; identical to SEQ ID NO: 3171
  GFR-binding peptide
  MOD_RES (2), (4), (35), (36): Xaa is C or S

SEQ ID NO: 10623 - protein, 34 aa, Artificial Sequence; identical to SEQ ID NO: 3174
  GFR-binding peptide
  MOD_RES (1), (32), (33): Xaa is C or S

SEQ ID NO: 10624 - protein, 39 aa, Artificial Sequence
  GFR-binding peptide
  MOD_RES (2), (4), (37), (38): Xaa is C or S
  MOD_RES (15), (16), (17), (18), (19): Xaa is A or G
  MOD_RES (20), (21), (22), (23): Xaa is A or G or is absent
SXKXSKVIMEYQKYXXXXXXXXXIFLISIPSLDQSVXXP

SEQ ID NO: 10625 - protein, 38 aa, Artificial Sequence
  GFR-binding peptide
  MOD_RES (2), (33), (34): Xaa is C or S
KXSRVIMNSLQEVKPKRGVYYLITLPELAQPVXXPAAS

SEQ ID NO: 10626 - protein, 33 aa, Artificial Sequence; identical to SEQ ID NO: 3175
  GFR-binding peptide
  MOD_RES (33), (33): Xaa is C or S
  MOD_RES (11), (12), (13), (14), (15): Xaa is A or G
  MOD_RES (16), (17), (18), (19): Xaa is A or G or is absent

SEQ ID NO: 10627 - protein, 34 aa, Artificial Sequence
  GFR-binding peptide
  MOD_RES (1), (3), (34): Xaa is C or S
XKXSRVIMNSLQEVKPKRGVYYVIPLPELAQPVX

SEQ ID NO: 10628 - protein, 37 aa, Artificial Sequence
  GFR-binding peptide
  MOD_RES (2), (4): Xaa is C or S
  MOD_RES (16), (17), (18), (19), (20): Xaa is A or G
  MOD_RES (21), (22), (23), (24): Xaa is A or G or is absent
HXGXARVVMNNSLQEXXXXXXXXXYYLVTLPELQTPA

SEQ ID NO: 10629 - protein, 35 aa, Artificial Sequence
  GFR-binding peptide
  MOD_RES (1), (3), (35): Xaa is C or S
XGXSEVVMDQYNKLVVNNASDLYLISIASLRTPVX

SEQ ID NO: 10630 - protein, 39 aa, Artificial Sequence; identical to SEQ ID NO: 3179
  GFR-binding peptide
  MOD_RES (1), (3), (36), (37): Xaa is C or S
  MOD_RES (14), (15), (16), (17), (18): Xaa is A or G
  MOD_RES (19), (20), (21), (22): Xaa is A or G or is absent

SEQ ID NO: 10631 - protein, 37 aa, Artificial Sequence
  GFR-binding peptide
  MOD_RES (33), (34): Xaa is C or S
  MOD_RES (11), (12), (13), (14), (15): Xaa is A or G
  MOD_RES (16), (17), (18), (19): Xaa is A or G or is absent
EVVMDEYQKYXXXXXXXXXIFLMSIPSLETPVXXAKP

SEQ ID NO: 10632 - protein, 39 aa, Artificial Sequence
  GFR-binding peptide
  MOD_RES (33), (34): Xaa is C or S
  MOD_RES (11), (12), (13), (14), (15): Xaa is A or G
  MOD_RES (16), (17), (18), (19): Xaa is A or G or is absent
EVVMDNSLQEXXXXXXXXXYYVIPLPELRTPVXXTPPTS

SEQ ID NO: 10633 - protein, 41 aa, Artificial Sequence; identical to SEQ ID NO: 3185
  GFR-binding peptide
  MOD_RES (2), (4), (38): Xaa is C or S
  MOD_RES (16), (17), (18), (19), (20): Xaa is A or G
  MOD_RES (21), (22), (23), (24): Xaa is A or G or is absent

SEQ ID NO: 10634 - protein, 40 aa, Artificial Sequence
  GFR-binding peptide
  MOD_RES (1), (3), (36), (37): Xaa is C or S
  MOD_RES (14), (15), (16), (17), (18): Xaa is A or G
  MOD_RES (19), (20), (21), (22): Xaa is A or G or is absent
XKXSKVVMEYQKYXXXXXXXXXIFLISIPSLDQPVXXPSA

SEQ ID NO: 10635 - protein, 36 aa, Artificial Sequence; identical to SEQ ID NO: 3187
  GFR-binding peptide
  MOD_RES (2), (36): Xaa is C or S
  MOD_RES (14), (15), (16), (17), (18): Xaa is A or G
  MOD_RES (19), (20), (21), (22): Xaa is A or G or is absent

SEQ ID NO: 10636 - protein, 36 aa, Artificial Sequence; identical to SEQ ID NO: 3189
  GFR-binding peptide
  MOD_RES (1), (3), (35), (36): Xaa is C or S

SEQ ID NO: 10637 - protein, 42 aa, Artificial Sequence
  GFR-binding peptide
  MOD_RES (2), (36), (37): Xaa is C or S
  MOD_RES (14), (15), (16), (17), (18): Xaa is A or G
  MOD_RES (19), (20), (21), (22): Xaa is A or G or is absent
GXGEVVMDEYQKYXXXXXXXXXIFLMSIPSLETPVXXAKPIK

SEQ ID NO: 10638 - protein, 31 aa, Artificial Sequence
  GFR-binding peptide
  MOD_RES (1), (1): Xaa is C or S
XSKVIMEYQKYIKPTKGIIFLISIPSLDQSV

SEQ ID NO: 10639 - protein, 34 aa, Artificial Sequence; identical to SEQ ID NO: 3192
  GFR-binding peptide
  MOD_RES (1), (34): Xaa is C or S
  MOD_RES (12), (13), (14), (15), (16): Xaa is A or G
  MOD_RES (17), (18), (19), (20): Xaa is A or G or is absent

SEQ ID NO: 10640 - protein, 41 aa, Artificial Sequence; identical to SEQ ID NO: 3195
  GFR-binding peptide
  MOD_RES (1), (3), (36), (37): Xaa is C or S
  MOD_RES (14), (15), (16), (17), (18): Xaa is A or G
  MOD_RES (19), (20), (21), (22): Xaa is A or G or is absent

SEQ ID NO: 10641 - protein, 36 aa, Artificial Sequence
  GFR-binding peptide
  MOD_RES (1), (35): Xaa is C or S
  MOD_RES (13), (14), (15), (16), (17): Xaa is A or G
  MOD_RES (18), (19), (20), (21): Xaa is A or G or is absent
XSRVVMNNSLQEXXXXXXXXXYYLVTLPELKTPAXT

SEQ ID NO: 10642 - protein, 42 aa, Artificial Sequence; identical to SEQ ID NO: 3201
  GFR-binding peptide
  MOD_RES (1), (3), (37): Xaa is C or S
  MOD_RES (15), (16), (17), (18), (19): Xaa is A or G
  MOD_RES (20), (21), (22), (23): Xaa is A or G or is absent

SEQ ID NO: 10643 - protein, 37 aa, Artificial Sequence
  GFR-binding peptide
  MOD_RES (32), (33): Xaa is C or S
SRVVMNNSLQEIVNSSDDYYLVTLPELKTPAXXPKPV

SEQ ID NO: 10644 - protein, 37 aa, Artificial Sequence
  GFR-binding peptide
  MOD_RES (2), (4): Xaa is C or S
  MOD_RES (16), (17), (18), (19), (20): Xaa is A or G
  MOD_RES (21), (22), (23), (24): Xaa is A or G or is absent
RXGXGEVVMDNSLQEXXXXXXXXXYYLMTLPELETPV

SEQ ID NO: 10645 - protein, 36 aa, Artificial Sequence
  GFR-binding peptide
  MOD_RES (2), (34), (35): Xaa is C or S
GXGEVVMDEYQKYVVKENEDIFLMSIPSLETPVXXA

SEQ ID NO: 10646 - protein, 37 aa, Artificial Sequence
  GFR-binding peptide
  MOD_RES (2), (33), (34): Xaa is C or S
KXSKVVMNSLQEVKPTRGVYYVIPLPELDQPVXXPSA

SEQ ID NO: 10647 - protein, 39 aa, Artificial Sequence; identical to SEQ ID NO: 3207
  GFR-binding peptide
  MOD_RES (34), (35): Xaa is C or S
  MOD_RES (12), (13), (14), (15), (16): Xaa is A or G
  MOD_RES (17), (18), (19), (20): Xaa is A or G or is absent

SEQ ID NO: 10648 - protein, 34 aa, Artificial Sequence; identical to SEQ ID NO: 3208
  GFR-binding peptide
  MOD_RES (33), (34): Xaa is C or S
  MOD_RES (11), (12), (13), (14), (15): Xaa is A or G
  MOD_RES (16), (17), (18), (19): Xaa is A or G or is absent

SEQ ID NO: 10649 - protein, 40 aa, Artificial Sequence; identical to SEQ ID NO: 3209
  GFR-binding peptide
  MOD_RES (2), (4), (36), (37): Xaa is C or S

SEQ ID NO: 10650 - protein, 30 aa, Artificial Sequence
  GFR-binding peptide
EVVMDEYQKYVVNNASDIFLISIPSLRTPV

SEQ ID NO: 10651 - protein, 35 aa, Artificial Sequence
  GFR-binding peptide
  MOD_RES (1), (35): Xaa is C or S
  MOD_RES (13), (14), (15), (16), (17): Xaa is A or G
  MOD_RES (18), (19), (20), (21): Xaa is A or G or is absent
XSRVVMNNSLQEXXXXXXXXXYYVVPLPELKTPAX

SEQ ID NO: 10652 - protein, 34 aa, Artificial Sequence
  GFR-binding peptide
  MOD_RES (1), (34): Xaa is C or S
  MOD_RES (12), (13), (14), (15), (16): Xaa is A or G
  MOD_RES (17), (18), (19), (20): Xaa is A or G or is absent
XSKVIMNSLQEXXXXXXXXXYYVIPLPELDQSVX

SEQ ID NO: 10653 - protein, 37 aa, Artificial Sequence; identical to SEQ ID NO: 3211
  GFR-binding peptide
  MOD_RES (1), (35): Xaa is C or S
  MOD_RES (13), (14), (15), (16), (17): Xaa is A or G
  MOD_RES (18), (19), (20), (21): Xaa is A or G or is absent

SEQ ID NO: 10654 - protein, 34 aa, Artificial Sequence
  GFR-binding peptide
  MOD_RES (31), (32): Xaa is C or S
SRVIMNSLQEVKPKRGVYYLITLPELAQPVXXPA

SEQ ID NO: 10655 - protein, 41 aa, Artificial Sequence
  GFR-binding peptide
  MOD_RES (2), (36): Xaa is C or S
  MOD_RES (14), (15), (16), (17), (18): Xaa is A or G
  MOD_RES (19), (20), (21), (22): Xaa is A or G or is absent
GXSRVVMNNSLQEXXXXXXXXXYYVVPLPELKTPAXTPKTV

SEQ ID NO: 10656 - protein, 37 aa, Artificial Sequence
  GFR-binding peptide
  MOD_RES (1), (33), (34): Xaa is C or S
XSEVVMDQYNKLVVNNASDLYLISIASLRTPVXXTPP

SEQ ID NO: 10657 - protein, 39 aa, Artificial Sequence
  GFR-binding peptide
  MOD_RES (33), (34): Xaa is C or S
  MOD_RES (11), (12), (13), (14), (15): Xaa is A or G
  MOD_RES (16), (17), (18), (19): Xaa is A or G or is absent
EVVMDRYKKLXXXXXXXXXFYLISIANLRTPVXXTPPTS

SEQ ID NO: 10658 - protein, 40 aa, Artificial Sequence
  GFR-binding peptide
  MOD_RES (1), (34), (35): Xaa is C or S
  MOD_RES (12), (13), (14), (15), (16): Xaa is A or G
  MOD_RES (17), (18), (19), (20): Xaa is A or G or is absent
XSRVIMEYQKYXXXXXXXXXIFLISIPSLAQPVXXPAASA

SEQ ID NO: 10659 - protein, 36 aa, Artificial Sequence
  GFR-binding peptide
  MOD_RES (1), (33), (34): Xaa is C or S
XSRVVMNNSLQEIVNSSDDYYLVTLPELKTPAXXPK

SEQ ID NO: 10660 - protein, 37 aa, Artificial Sequence; identical to SEQ ID NO: 3222
  GFR-binding peptide
  MOD_RES (2), (36), (37): Xaa is C or S
  MOD_RES (14), (15), (16), (17), (18): Xaa is A or G
  MOD_RES (19), (20), (21), (22): Xaa is A or G or is absent

SEQ ID NO: 10661 - protein, 37 aa, Artificial Sequence; identical to SEQ ID NO: 3223
  GFR-binding peptide
  MOD_RES (2), (4), (36), (37): Xaa is C or S

SEQ ID NO: 10662 - protein, 39 aa, Artificial Sequence
  GFR-binding peptide
  MOD_RES (1), (33), (34): Xaa is C or S
XARVVMNNSLQEIVNSSDDYYLVTLPELQTPAXXPKPVT

SEQ ID NO: 10663 - protein, 35 aa, Artificial Sequence
  GFR-binding peptide
  MOD_RES (2), (35): Xaa is C or S
  MOD_RES (13), (14), (15), (16), (17): Xaa is A or G
  MOD_RES (18), (19), (20), (21): Xaa is A or G or is absent
KXSKVVMNSLQEXXXXXXXXXYYVIPLPELDQPVX

SEQ ID NO: 10664 - protein, 36 aa, Artificial Sequence
  GFR-binding peptide
  MOD_RES (33), (34): Xaa is C or S
  MOD_RES (11), (12), (13), (14), (15): Xaa is A or G
  MOD_RES (16), (17), (18), (19): Xaa is A or G or is absent
RVVMNNSLQEXXXXXXXXXYYVVPLPELKTPAXXPK

SEQ ID NO: 10665 - protein, 43 aa, Artificial Sequence; identical to SEQ ID NO: 3229
  GFR-binding peptide
  MOD_RES (2), (4), (37), (38): Xaa is C or S
  MOD_RES (15), (16), (17), (18), (19): Xaa is A or G
  MOD_RES (20), (21), (22), (23): Xaa is A or G or is absent

SEQ ID NO: 10666 - protein, 39 aa, Artificial Sequence
  GFR-binding peptide
  MOD_RES (2), (34), (35): Xaa is C or S
GXGEVVMENSLQEVVKDYEDYYLMTLPELETPVXXAKPI

SEQ ID NO: 10667 - protein, 42 aa, Artificial Sequence; identical to SEQ ID NO: 3231
  GFR-binding peptide
  MOD_RES (2), (4), (36), (37): Xaa is C or S

SEQ ID NO: 10668 - protein, 34 aa, Artificial Sequence; identical to SEQ ID NO: 3234
  GFR-binding peptide
  MOD_RES (1), (1): Xaa is C or S
  MOD_RES (13), (14), (15), (16), (17): Xaa is A or G
  MOD_RES (18), (19), (20), (21): Xaa is A or G or is absent

SEQ ID NO: 10669 - protein, 35 aa, Artificial Sequence
  GFR-binding peptide
  MOD_RES (2), (2): Xaa is C or S
  MOD_RES (14), (15), (16), (17), (18): Xaa is A or G
  MOD_RES (19), (20), (21), (22): Xaa is A or G or is absent
GXSRVVMNNSLQEXXXXXXXXXYYLVTLPELKTPA

SEQ ID NO: 10670 - protein, 37 aa, Artificial Sequence
  GFR-binding peptide
  MOD_RES (2), (36): Xaa is C or S
  MOD_RES (14), (15), (16), (17), (18): Xaa is A or G
  MOD_RES (19), (20), (21), (22): Xaa is A or G or is absent
GXSRVVMNNSLQEXXXXXXXXXYYLVTLPELKTPAXT

SEQ ID NO: 10671 - protein, 42 aa, Artificial Sequence; identical to SEQ ID NO: 3238
  GFR-binding peptide
  MOD_RES (2), (4), (38), (39): Xaa is C or S
  MOD_RES (16), (17), (18), (19), (20): Xaa is A or G
  MOD_RES (21), (22), (23), (24): Xaa is A or G or is absent

SEQ ID NO: 10672 - protein, 33 aa, Artificial Sequence; identical to SEQ ID NO: 3241
  GFR-binding peptide
  MOD_RES (1), (32), (33): Xaa is C or S

SEQ ID NO: 10673 - protein, 37 aa, Artificial Sequence
  GFR-binding peptide
  MOD_RES (2), (4), (36), (37): Xaa is C or S
HXGXSRVVMNNSLQEIVNSSDDYYVVPLPELKTPAXX

SEQ ID NO: 10674 - protein, 40 aa, Artificial Sequence
  GFR-binding peptide
  MOD_RES (1), (3), (35), (36): Xaa is C or S
XGXSEVVMDNSLQEVVNNASDYYVIPLPELRTPVXXTPPT

SEQ ID NO: 10675 - protein, 41 aa, Artificial Sequence
  GFR-binding peptide
  MOD_RES (2), (4), (35), (36): Xaa is C or S
SXKXSKVVMNSLQEVKPTRGVYYLITLPELDQPVXXPSASA

SEQ ID NO: 10676 - protein, 36 aa, Artificial Sequence
  GFR-binding peptide
  MOD_RES (33), (34): Xaa is C or S
  MOD_RES (11), (12), (13), (14), (15): Xaa is A or G
  MOD_RES (16), (17), (18), (19): Xaa is A or G or is absent
EVVMDNSLQEXXXXXXXXXYYLMTLPELETPVXXAK

SEQ ID NO: 10677 - protein, 33 aa, Artificial Sequence; identical to SEQ ID NO: 3248
  GFR-binding peptide
  MOD_RES (31), (32): Xaa is C or S

SEQ ID NO: 10678 - protein, 33 aa, Artificial Sequence; identical to SEQ ID NO: 3250
  GFR-binding peptide
  MOD_RES (31), (32): Xaa is C or S

SEQ ID NO: 10679 - protein, 35 aa, Artificial Sequence
  GFR-binding peptide
  MOD_RES (1), (3), (35): Xaa is C or S
XGXSEVVMDNSLQEVVNNASDYYLITLPELRTPVX

SEQ ID NO: 10680 - protein, 35 aa, Artificial Sequence
  GFR-binding peptide
  MOD_RES (34), (34): Xaa is C or S
  MOD_RES (12), (13), (14), (15), (16): Xaa is A or G
  MOD_RES (17), (18), (19), (20): Xaa is A or G or is absent
SRVVMNNSLQEXXXXXXXXXYYVVPLPELKTPAXT

SEQ ID NO: 10681 - protein, 35 aa, Artificial Sequence; identical to SEQ ID NO: 3254
  GFR-binding peptide
  MOD_RES (31), (32): Xaa is C or S

SEQ ID NO: 10682 - protein, 40 aa, Artificial Sequence
  GFR-binding peptide
  MOD_RES (2), (36), (37): Xaa is C or S
  MOD_RES (14), (15), (16), (17), (18): Xaa is A or G
  MOD_RES (19), (20), (21), (22): Xaa is A or G or is absent
GXGEVVMENSLQEXXXXXXXXXYYLMTLPELETPVXXAKP

SEQ ID NO: 10683 - protein, 36 aa, Artificial Sequence
  GFR-binding peptide
  MOD_RES (31), (32): Xaa is C or S
SRVIMEYQKYVKPKRGVIFLISIPSLAQPVXXPAAS

SEQ ID NO: 10684 - protein, 32 aa, Artificial Sequence; identical to SEQ ID NO: 3256
  GFR-binding peptide
  MOD_RES (2), (2): Xaa is C or S

SEQ ID NO: 10685 - protein, 41 aa, Artificial Sequence
  GFR-binding peptide
  MOD_RES (2), (4), (36), (37): Xaa is C or S
HXGXARVVMNEYQKYIVNSSDDIFLVSIPSLQTPAXXPKPV

SEQ ID NO: 10686 - protein, 40 aa, Artificial Sequence
  GFR-binding peptide
  MOD_RES (1), (3), (34), (35): Xaa is C or S
XKXSKVIMEYQKYIKPTKGIIFLISIPSLDQSVXXPSASA

SEQ ID NO: 10687 - protein, 42 aa, Artificial Sequence
  GFR-binding peptide
  MOD_RES (1), (3), (36), (37): Xaa is C or S
  MOD_RES (14), (15), (16), (17), (18): Xaa is A or G
  MOD_RES (19), (20), (21), (22): Xaa is A or G or is absent
XKXSKVVMNSLQEXXXXXXXXXYYVIPLPELDQPVXXPSASA

SEQ ID NO: 10688 - protein, 41 aa, Artificial Sequence
  GFR-binding peptide
  MOD_RES (2), (4), (38), (39): Xaa is C or S
  MOD_RES (16), (17), (18), (19), (20): Xaa is A or G
  MOD_RES (21), (22), (23), (24): Xaa is A or G or is absent
RXGXSEVVMDQYNKLXXXXXXXXXLYLISIASLRTPVXXTP

SEQ ID NO: 10689 - protein, 37 aa, Artificial Sequence
  GFR-binding peptide
  MOD_RES (34), (35): Xaa is C or S
  MOD_RES (12), (13), (14), (15), (16): Xaa is A or G
  MOD_RES (17), (18), (19), (20): Xaa is A or G or is absent
GEVVMEEYQKYXXXXXXXXXIFLMSIPSLETPVXXAK

SEQ ID NO: 10690 - protein, 40 aa, Artificial Sequence
  GFR-binding peptide
  MOD_RES (1), (3), (34), (35): Xaa is C or S
XKXSKVIMNSLQEIKPTKGIYYVIPLPELDQSVXXPSASA

SEQ ID NO: 10691 - protein, 34 aa, Artificial Sequence
  GFR-binding peptide
  MOD_RES (1), (34): Xaa is C or S
  MOD_RES (12), (13), (14), (15), (16): Xaa is A or G
  MOD_RES (17), (18), (19), (20): Xaa is A or G or is absent
XSKVVMNSLQEXXXXXXXXXYYLITLPELDQPVX

SEQ ID NO: 10692 - protein, 36 aa, Artificial Sequence
  GFR-binding peptide
  MOD_RES (33), (34): Xaa is C or S
  MOD_RES (11), (12), (13), (14), (15): Xaa is A or G
  MOD_RES (16), (17), (18), (19): Xaa is A or G or is absent
EVVMDNSLQEXXXXXXXXXYYVMPLPELETPVXXAK

SEQ ID NO: 10693 - protein, 39 aa, Artificial Sequence; identical to SEQ ID NO: 3259
  GFR-binding peptide
  MOD_RES (1), (3), (36), (37): Xaa is C or S
  MOD_RES (14), (15), (16), (17), (18): Xaa is A or G
  MOD_RES (19), (20), (21), (22): Xaa is A or G or is absent

SEQ ID NO: 10694 - protein, 42 aa, Artificial Sequence
  GFR-binding peptide
  MOD_RES (2), (4), (38), (39): Xaa is C or S
  MOD_RES (16), (17), (18), (19), (20): Xaa is A or G
  MOD_RES (21), (22), (23), (24): Xaa is A or G or is absent
RXGXSEVVMDEYQKYXXXXXXXXXIFLISIPSLRTPVXXTPP

SEQ ID NO: 10695 - protein, 38 aa, Artificial Sequence; identical to SEQ ID NO: 3260
  GFR-binding peptide
  MOD_RES (1), (3), (35), (36): Xaa is C or S

SEQ ID NO: 10696 - protein, 38 aa, Artificial Sequence
  GFR-binding peptide
  MOD_RES (33), (34): Xaa is C or S
  MOD_RES (11), (12), (13), (14), (15): Xaa is A or G
  MOD_RES (16), (17), (18), (19): Xaa is A or G or is absent
SRVIMNSLQEXXXXXXXXXYYLITLPELAQPVXXPAAS

SEQ ID NO: 10697 - protein, 35 aa, Artificial Sequence
  GFR-binding peptide
  MOD_RES (32), (33): Xaa is C or S
GEVVMENSLQEVVKDYEDYYLMTLPELETPVXXAK

SEQ ID NO: 10698 - protein, 36 aa, Artificial Sequence; identical to SEQ ID NO: 3261
  GFR-binding peptide
  MOD_RES (2), (4), (36): Xaa is C or S

SEQ ID NO: 10699 - protein, 33 aa, Artificial Sequence
  GFR-binding peptide
  MOD_RES (1), (3): Xaa is C or S
XKXSRVIMNSLQEVKPKRGVYYVIPLPELAQPV

SEQ ID NO: 10700 - protein, 36 aa, Artificial Sequence
  GFR-binding peptide
  MOD_RES (33), (34): Xaa is C or S
  MOD_RES (11), (12), (13), (14), (15): Xaa is A or G
  MOD_RES (16), (17), (18), (19): Xaa is A or G or is absent
RVVMNNSLQEXXXXXXXXXYYLVTLPELKTPAXXPK

SEQ ID NO: 10701 - protein, 41 aa, Artificial Sequence
  GFR-binding peptide
  MOD_RES (2), (35), (36): Xaa is C or S
  MOD_RES (13), (14), (15), (16), (17): Xaa is A or G
  MOD_RES (18), (19), (20), (21): Xaa is A or G or is absent
KXSKVVMNSLQEXXXXXXXXXYYLITLPELDQPVXXPSASA

SEQ ID NO: 10702 - protein, 35 aa, Artificial Sequence
  GFR-binding peptide
  MOD_RES (2), (4), (35): Xaa is C or S
SXKXSKVIMEYQKYIKPTKGIIFLISIPSLDQSVX

SEQ ID NO: 10703 - protein, 32 aa, Artificial Sequence; identical to SEQ ID NO: 3264
  GFR-binding peptide
  MOD_RES (11), (12), (13), (14), (15): Xaa is A or G
  MOD_RES (16), (17), (18), (19): Xaa is A or G or is absent

SEQ ID NO: 10704 - protein, 37 aa, Artificial Sequence
  GFR-binding peptide
  MOD_RES (2), (35), (36): Xaa is C or S
  MOD_RES (13), (14), (15), (16), (17): Xaa is A or G
  MOD_RES (18), (19), (20), (21): Xaa is A or G or is absent
KXSKVVMEYQKYXXXXXXXXXIFLISIPSLDQPVXXP

SEQ ID NO: 10705 - protein, 33 aa, Artificial Sequence
  GFR-binding peptide
  MOD_RES (1), (3): Xaa is C or S
XKXSRVIMEYQKYVKPKRGVIFLISIPSLAQPV

SEQ ID NO: 10706 - protein, 35 aa, Artificial Sequence
  GFR-binding peptide
  MOD_RES (31), (32): Xaa is C or S
EVVMDQYNKLVVNNASDLYLISIASLRTPVXXTPP

SEQ ID NO: 10707 - protein, 42 aa, Artificial Sequence; identical to SEQ ID NO: 3269
  GFR-binding peptide
  MOD_RES (2), (4), (36), (37): Xaa is C or S

SEQ ID NO: 10708 - protein, 42 aa, Artificial Sequence; identical to SEQ ID NO: 3271
  GFR-binding peptide
  MOD_RES (1), (3), (37), (38): Xaa is C or S
  MOD_RES (15), (16), (17), (18), (19): Xaa is A or G
  MOD_RES (20), (21), (22), (23): Xaa is A or G or is absent

SEQ ID NO: 10709 - protein, 38 aa, Artificial Sequence
  GFR-binding peptide
  MOD_RES (1), (3), (36), (37): Xaa is C or S
  MOD_RES (14), (15), (16), (17), (18): Xaa is A or G
  MOD_RES (19), (20), (21), (22): Xaa is A or G or is absent
XKXSKVIMEYQKYXXXXXXXXXIFLISIPSLDQSVXXP

SEQ ID NO: 10710 - protein, 42 aa, Artificial Sequence; identical to SEQ ID NO: 3272
  GFR-binding peptide
  MOD_RES (2), (4), (36), (37): Xaa is C or S

SEQ ID NO: 10711 - protein, 36 aa, Artificial Sequence
  GFR-binding peptide
  MOD_RES (2), (4): Xaa is C or S
  MOD_RES (15), (16), (17), (18), (19): Xaa is A or G
  MOD_RES (20), (21), (22), (23): Xaa is A or G or is absent
SXKXSKVIMEYQKYXXXXXXXXXIFLISIPSLDQSV

SEQ ID NO: 10712 - protein, 37 aa, Artificial Sequence
  GFR-binding peptide
  MOD_RES (1), (35), (36): Xaa is C or S
  MOD_RES (13), (14), (15), (16), (17): Xaa is A or G
  MOD_RES (18), (19), (20), (21): Xaa is A or G or is absent
XSRVVMNEYQKYXXXXXXXXXIFLVSIPSLKTPAXXP

SEQ ID NO: 10713 - protein, 35 aa, Artificial Sequence
  GFR-binding peptide
  MOD_RES (2), (4): Xaa is C or S
HXGXARVVMNNSLQEIVNSSDDYYVVPLPELQTPA

SEQ ID NO: 10714 - protein, 38 aa, Artificial Sequence; identical to SEQ ID NO: 3274
  GFR-binding peptide
  MOD_RES (1), (3), (37), (38): Xaa is C or S
  MOD_RES (15), (16), (17), (18), (19): Xaa is A or G
  MOD_RES (20), (21), (22), (23): Xaa is A or G or is absent

SEQ ID NO: 10715 - protein, 35 aa, Artificial Sequence; identical to SEQ ID NO: 3276
  GFR-binding peptide
  MOD_RES (33), (34): Xaa is C or S
  MOD_RES (11), (12), (13), (14), (15): Xaa is A or G
  MOD_RES (16), (17), (18), (19): Xaa is A or G or is absent

SEQ ID NO: 10716 - protein, 32 aa, Artificial Sequence
  GFR-binding peptide
  MOD_RES (11), (12), (13), (14), (15): Xaa is A or G
  MOD_RES (16), (17), (18), (19): Xaa is A or G or is absent
EVVMEEYQKYXXXXXXXXXIFLMSIPSLETPV

SEQ ID NO: 10717 - protein, 32 aa, Artificial Sequence; identical to SEQ ID NO: 3280
  GFR-binding peptide
  MOD_RES (1), (1): Xaa is C or S

SEQ ID NO: 10718 - protein, 33 aa, Artificial Sequence; identical to SEQ ID NO: 3281
  GFR-binding peptide
  MOD_RES (2), (33): Xaa is C or S

SEQ ID NO: 10719 - protein, 38 aa, Artificial Sequence
  GFR-binding peptide
  MOD_RES (1), (3), (34), (35): Xaa is C or S
XKXSRVIMNSLQEVKPKRGVYYVIPLPELAQPVXXPAA

SEQ ID NO: 10720 - protein, 36 aa, Artificial Sequence
  GFR-binding peptide
  MOD_RES (1), (32), (33): Xaa is C or S
XSKVIMEYQKYIKPTKGIIFLISIPSLDQSVXXPSA

SEQ ID NO: 10721 - protein, 36 aa, Artificial Sequence
  GFR-binding peptide
  MOD_RES (1), (3): Xaa is C or S
  MOD_RES (15), (16), (17), (18), (19): Xaa is A or G
  MOD_RES (20), (21), (22), (23): Xaa is A or G or is absent
XGXARVVMNNSLQEXXXXXXXXXYYVVPLPELQTPA

SEQ ID NO: 10722 - protein, 35 aa, Artificial Sequence; identical to SEQ ID NO: 3283
  GFR-binding peptide
  MOD_RES (1), (35): Xaa is C or S
  MOD_RES (13), (14), (15), (16), (17): Xaa is A or G
  MOD_RES (18), (19), (20), (21): Xaa is A or G or is absent

SEQ ID NO: 10723 - protein, 36 aa, Artificial Sequence; identical to SEQ ID NO: 3288
  GFR-binding peptide
  MOD_RES (2), (4), (36): Xaa is C or S

SEQ ID NO: 10724 - protein, 36 aa, Artificial Sequence
  GFR-binding peptide
  MOD_RES (33), (34): Xaa is C or S
  MOD_RES (11), (12), (13), (14), (15): Xaa is A or G
  MOD_RES (16), (17), (18), (19): Xaa is A or G or is absent
RVVMNEYQKYXXXXXXXXXIFLVSIPSLQTPAXXPK

SEQ ID NO: 10725 - protein, 36 aa, Artificial Sequence
  GFR-binding peptide
  MOD_RES (34), (35): Xaa is C or S
  MOD_RES (12), (13), (14), (15), (16): Xaa is A or G
  MOD_RES (17), (18), (19), (20): Xaa is A or G or is absent
ARVVMNEYQKYXXXXXXXXXIFLVSIPSLQTPAXXP

SEQ ID NO: 10726 - protein, 38 aa, Artificial Sequence
  GFR-binding peptide
  MOD_RES (2), (34), (35): Xaa is C or S
GXSRVVMNEYQKYIVNSSDDIFLVSIPSLKTPAXXPKP

SEQ ID NO: 10727 - protein, 32 aa, Artificial Sequence
  GFR-binding peptide
  MOD_RES (11), (12), (13), (14), (15): Xaa is A or G
  MOD_RES (16), (17), (18), (19): Xaa is A or G or is absent
SRVIMEYQKYXXXXXXXXXIFLISIPSLAQPV

SEQ ID NO: 10728 - protein, 41 aa, Artificial Sequence
  GFR-binding peptide
  MOD_RES (2), (36), (37): Xaa is C or S
  MOD_RES (14), (15), (16), (17), (18): Xaa is A or G
  MOD_RES (19), (20), (21), (22): Xaa is A or G or is absent
GXGEVVMDNSLQEXXXXXXXXXYYVMPLPELETPVXXAKPI

SEQ ID NO: 10729 - protein, 41 aa, Artificial Sequence; identical to SEQ ID NO: 3292
  GFR-binding peptide
  MOD_RES (1), (3), (36), (37): Xaa is C or S
  MOD_RES (14), (15), (16), (17), (18): Xaa is A or G
  MOD_RES (19), (20), (21), (22): Xaa is A or G or is absent

SEQ ID NO: 10730 - protein, 38 aa, Artificial Sequence
  GFR-binding peptide
  MOD_RES (1), (3), (37), (38): Xaa is C or S
  MOD_RES (15), (16), (17), (18), (19): Xaa is A or G
  MOD_RES (20), (21), (22), (23): Xaa is A or G or is absent
XGXGEVVMDEYQKYXXXXXXXXXIFLMSIPSLETPVXX

SEQ ID NO: 10731 - protein, 39 aa, Artificial Sequence
  GFR-binding peptide
  MOD_RES (1), (33): Xaa is C or S
XSRVVMNEYQKYIVNSSDDIFLVSIPSLKTPAXTPKTVH

SEQ ID NO: 10732 - protein, 42 aa, Artificial Sequence
  GFR-binding peptide
  MOD_RES (1), (3), (37), (38): Xaa is C or S
  MOD_RES (15), (16), (17), (18), (19): Xaa is A or G
  MOD_RES (20), (21), (22), (23): Xaa is A or G or is absent
XGXSEVVMDNSLQEXXXXXXXXXYYLITLPELRTPVXXTPPT

SEQ ID NO: 10733 - protein, 37 aa, Artificial Sequence; identical to SEQ ID NO: 3297
  GFR-binding peptide
  MOD_RES (2), (4): Xaa is C or S
  MOD_RES (16), (17), (18), (19), (20): Xaa is A or G
  MOD_RES (21), (22), (23), (24): Xaa is A or G or is absent

SEQ ID NO: 10734 - protein, 36 aa, Artificial Sequence
  GFR-binding peptide
  MOD_RES (2), (4), (36): Xaa is C or S
RXGXGEVVMENSLQEVVKDYEDYYLMTLPELETPVX

SEQ ID NO: 10735 - protein, 35 aa, Artificial Sequence; identical to SEQ ID NO: 3299
  GFR-binding peptide
  MOD_RES (2), (2): Xaa is C or S
  MOD_RES (14), (15), (16), (17), (18): Xaa is A or G
  MOD_RES (19), (20), (21), (22): Xaa is A or G or is absent

SEQ ID NO: 10736 - protein, 39 aa, Artificial Sequence
  GFR-binding peptide
  MOD_RES (2), (4), (35), (36): Xaa is C or S
SXKXSRVIMEYQKYVKPKRGVIFLISIPSLAQPVXXPAA

SEQ ID NO: 10737 - protein, 42 aa, Artificial Sequence
  GFR-binding peptide
  MOD_RES (2), (4), (36), (37): Xaa is C or S
RXGXGEVVMDEYQKYVVKENEDIFLMSIPSLETPVXXAKPIK

SEQ ID NO: 10738 - protein, 38 aa, Artificial Sequence
  GFR-binding peptide
  MOD_RES (2), (4), (37), (38): Xaa is C or S
  MOD_RES (15), (16), (17), (18), (19): Xaa is A or G
  MOD_RES (20), (21), (22), (23): Xaa is A or G or is absent
SXKXSKVIMNSLQEXXXXXXXXXYYVIPLPELDQSVXX

SEQ ID NO: 10739 - protein, 33 aa, Artificial Sequence
  GFR-binding peptide
  MOD_RES (1), (1): Xaa is C or S
  MOD_RES (12), (13), (14), (15), (16): Xaa is A or G
  MOD_RES (17), (18), (19), (20): Xaa is A or G or is absent
XSKVIMNSLQEXXXXXXXXXYYVIPLPELDQSV

SEQ ID NO: 10740 - protein, 38 aa, Artificial Sequence
  GFR-binding peptide
  MOD_RES (1), (33), (34): Xaa is C or S
XSEVVMDNSLQEVVNNASDYYVIPLPELRTPVXXTPPT

SEQ ID NO: 10741 - protein, 38 aa, Artificial Sequence
  GFR-binding peptide
  MOD_RES (2), (4), (35), (36): Xaa is C or S
SXKXSKVVMNSLQEVKPTRGVYYLITLPELDQPVXXPS

SEQ ID NO: 10742 - protein, 38 aa, Artificial Sequence
  GFR-binding peptide
  MOD_RES (2), (4), (37), (38): Xaa is C or S
  MOD_RES (15), (16), (17), (18), (19): Xaa is A or G
  MOD_RES (20), (21), (22), (23): Xaa is A or G or is absent
SXKXSKVVMEYQKYXXXXXXXXXIFLISIPSLDQPVXX

SEQ ID NO: 10743 - protein, 37 aa, Artificial Sequence
  GFR-binding peptide
  MOD_RES (1), (34), (35): Xaa is C or S
  MOD_RES (12), (13), (14), (15), (16): Xaa is A or G
  MOD_RES (17), (18), (19), (20): Xaa is A or G or is absent
XSKVVMNSLQEXXXXXXXXXYYLITLPELDQPVXXPS

SEQ ID NO: 10744 - protein, 36 aa, Artificial Sequence; identical to SEQ ID NO: 3301
  GFR-binding peptide
  MOD_RES (2), (34), (35): Xaa is C or S

SEQ ID NO: 10745 - protein, 37 aa, Artificial Sequence; identical to SEQ ID NO: 3302
  GFR-binding peptide
  MOD_RES (31), (31): Xaa is C or S

SEQ ID NO: 10746 - protein, 33 aa, Artificial Sequence
  GFR-binding peptide
  MOD_RES (32), (33): Xaa is C or S
ARVVMNNSLQEIVNSSDDYYLVTLPELQTPAXX

SEQ ID NO: 10747 - protein, 37 aa, Artificial Sequence
  GFR-binding peptide
  MOD_RES (1), (3), (35), (36): Xaa is C or S
XGXGEVVMENSLQEVVKDYEDYYVMPLPELETPVXXA

SEQ ID NO: 10748 - protein, 32 aa, Artificial Sequence
  GFR-binding peptide
  MOD_RES (32), (32): Xaa is C or S
SEVVMDQYNKLVVNNASDLYLISIASLRTPVX

SEQ ID NO: 10749 - protein, 37 aa, Artificial Sequence
  GFR-binding peptide
  MOD_RES (32), (33): Xaa is C or S
ARVVMNNSLQEIVNSSDDYYLVTLPELQTPAXXPKPV

SEQ ID NO: 10750 - protein, 37 aa, Artificial Sequence
  GFR-binding peptide
  MOD_RES (2), (4): Xaa is C or S
  MOD_RES (16), (17), (18), (19), (20): Xaa is A or G
  MOD_RES (21), (22), (23), (24): Xaa is A or G or is absent
RXGXGEVVMENSLQEXXXXXXXXXYYLMTLPELETPV

SEQ ID NO: 10751 - protein, 42 aa, Artificial Sequence
  GFR-binding peptide
  MOD_RES (1), (3), (37), (38): Xaa is C or S
  MOD_RES (15), (16), (17), (18), (19): Xaa is A or G
  MOD_RES (20), (21), (22), (23): Xaa is A or G or is absent
XGXGEVVMEEYQKYXXXXXXXXXIFLMSIPSLETPVXXAKPI

SEQ ID NO: 10752 - protein, 35 aa, Artificial Sequence
  GFR-binding peptide
  MOD_RES (2), (34), (35): Xaa is C or S
GXGEVVMENSLQEVVKDYEDYYLMTLPELETPVXX

SEQ ID NO: 10753 - protein, 37 aa, Artificial Sequence
  GFR-binding peptide
  MOD_RES (1), (33), (34): Xaa is C or S
XARVVMNNSLQEIVNSSDDYYVVPLPELQTPAXXPKP

SEQ ID NO: 10754 - protein, 39 aa, Artificial Sequence
  GFR-binding peptide
  MOD_RES (1), (33), (34): Xaa is C or S
XSEVVMDNSLQEVVNNASDYYLITLPELRTPVXXTPPTS

SEQ ID NO: 10755 - protein, 36 aa, Artificial Sequence
  GFR-binding peptide
  MOD_RES (1), (3), (34), (35): Xaa is C or S
XKXSRVIMEYQKYVKPKRGVIFLISIPSLAQPVXXP

SEQ ID NO: 10756 - protein, 30 aa, Artificial Sequence
  GFR-binding peptide
SRVIMNSLQEVKPKRGVYYVIPLPELAQPV

SEQ ID NO: 10757 - protein, 39 aa, Artificial Sequence
  GFR-binding peptide
  MOD_RES (33), (34): Xaa is C or S
  MOD_RES (11), (12), (13), (14), (15): Xaa is A or G
  MOD_RES (16), (17), (18), (19): Xaa is A or G or is absent
EVVMDNSLQEXXXXXXXXXYYLITLPELRTPVXXTPPTS

SEQ ID NO: 10758 - protein, 37 aa, Artificial Sequence
  GFR-binding peptide
  MOD_RES (33), (34): Xaa is C or S
  MOD_RES (11), (12), (13), (14), (15): Xaa is A or G
  MOD_RES (16), (17), (18), (19): Xaa is A or G or is absent
EVVMENSLQEXXXXXXXXXYYLMTLPELETPVXXAKP

SEQ ID NO: 10759 - protein, 30 aa, Artificial Sequence
  GFR-binding peptide
EVVMEEYQKYVVKDYEDIFLMSIPSLETPV

SEQ ID NO: 10760 - protein, 38 aa, Artificial Sequence
  GFR-binding peptide
  MOD_RES (2), (34), (35): Xaa is C or S
GXGEVVMENSLQEVVKDYEDYYVMPLPELETPVXXAKP

SEQ ID NO: 10761 - protein, 40 aa, Artificial Sequence; identical to SEQ ID NO: 3321
  GFR-binding peptide
  MOD_RES (1), (3), (37), (38): Xaa is C or S
  MOD_RES (15), (16), (17), (18), (19): Xaa is A or G
  MOD_RES (20), (21), (22), (23): Xaa is A or G or is absent

SEQ ID NO: 10762 - protein, 37 aa, Artificial Sequence; identical to SEQ ID NO: 3322
  GFR-binding peptide
  MOD_RES (1), (3), (37): Xaa is C or S
  MOD_RES (15), (16), (17), (18), (19): Xaa is A or G
  MOD_RES (20), (21), (22), (23): Xaa is A or G or is absent

SEQ ID NO: 10763 - protein, 36 aa, Artificial Sequence
  GFR-binding peptide
  MOD_RES (2), (35), (36): Xaa is C or S
  MOD_RES (13), (14), (15), (16), (17): Xaa is A or G
  MOD_RES (18), (19), (20), (21): Xaa is A or G or is absent
KXSKVIMNSLQEXXXXXXXXXYYVIPLPELDQSVXX

SEQ ID NO: 10764 - protein, 39 aa, Artificial Sequence; identical to SEQ ID NO: 3330
  GFR-binding peptide
  MOD_RES (1), (33), (34): Xaa is C or S

SEQ ID NO: 10765 - protein, 37 aa, Artificial Sequence
  GFR-binding peptide
  MOD_RES (2), (34), (35): Xaa is C or S
GXSEVVMDQYNKLVVNNASDLYLISIASLRTPVXXTP

SEQ ID NO: 10766 - protein, 33 aa, Artificial Sequence
  GFR-binding peptide
  MOD_RES (31), (31): Xaa is C or S
RVVMNEYQKYIVNSSDDIFLVSIPSLKTPAXTP

SEQ ID NO: 10767 - protein, 38 aa, Artificial Sequence; identical to SEQ ID NO: 3332
  GFR-binding peptide
  MOD_RES (1), (3), (36), (37): Xaa is C or S
  MOD_RES (14), (15), (16), (17), (18): Xaa is A or G
  MOD_RES (19), (20), (21), (22): Xaa is A or G or is absent

SEQ ID NO: 10768 - protein, 41 aa, Artificial Sequence
  GFR-binding peptide
  MOD_RES (1), (3), (35), (36): Xaa is C or S
XGXGEVVMEEYQKYVVKDYEDIFLMSIPSLETPVXXAKPIS

SEQ ID NO: 10769 - protein, 43 aa, Artificial Sequence
  GFR-binding peptide
  MOD_RES (2), (4), (38), (39): Xaa is C or S
  MOD_RES (16), (17), (18), (19), (20): Xaa is A or G
  MOD_RES (21), (22), (23), (24): Xaa is A or G or is absent
HXGXSRVVMNNSLQEXXXXXXXXXYYVVPLPELKTPAXXPKPV

SEQ ID NO: 10770 - protein, 43 aa, Artificial Sequence
  GFR-binding peptide
  MOD_RES (1), (3), (37), (38): Xaa is C or S
  MOD_RES (15), (16), (17), (18), (19): Xaa is A or G
  MOD_RES (20), (21), (22), (23): Xaa is A or G or is absent
XGXSEVVMDNSLQEXXXXXXXXXYYLITLPELRTPVXXTPPTS

SEQ ID NO: 10771 - protein, 37 aa, Artificial Sequence; identical to SEQ ID NO: 3339
  GFR-binding peptide
  MOD_RES (1), (32), (33): Xaa is C or S

SEQ ID NO: 10772 - protein, 37 aa, Artificial Sequence; identical to SEQ ID NO: 3341
  GFR-binding peptide
  MOD_RES (2), (35), (36): Xaa is C or S
  MOD_RES (13), (14), (15), (16), (17): Xaa is A or G
  MOD_RES (18), (19), (20), (21): Xaa is A or G or is absent

SEQ ID NO: 10773 - protein, 33 aa, Artificial Sequence
  GFR-binding peptide
  MOD_RES (1), (1): Xaa is C or S
  MOD_RES (12), (13), (14), (15), (16): Xaa is A or G
  MOD_RES (17), (18), (19), (20): Xaa is A or G or is absent
XSKVVMNSLQEXXXXXXXXXYYVIPLPELDQPV

SEQ ID NO: 10774 - protein, 37 aa, Artificial Sequence; identical to SEQ ID NO: 3342
  GFR-binding peptide
  MOD_RES (1), (32), (33): Xaa is C or S

SEQ ID NO: 10775 - protein, 36 aa, Artificial Sequence
  GFR-binding peptide
  MOD_RES (2), (34), (35): Xaa is C or S
GXSEVVMDEYQKYVVNNASDIFLISIPSLRTPVXXT

SEQ ID NO: 10776 - protein, 41 aa, Artificial Sequence; identical to SEQ ID NO: 3344
  GFR-binding peptide
  MOD_RES (1), (35), (36): Xaa is C or S
  MOD_RES (13), (14), (15), (16), (17): Xaa is A or G
  MOD_RES (18), (19), (20), (21): Xaa is A or G or is absent

SEQ ID NO: 10777 - protein, 36 aa, Artificial Sequence; identical to SEQ ID NO: 3347
  GFR-binding peptide
  MOD_RES (2), (4): Xaa is C or S
  MOD_RES (15), (16), (17), (18), (19): Xaa is A or G
  MOD_RES (20), (21), (22), (23): Xaa is A or G or is absent

SEQ ID NO: 10778 - protein, 42 aa, Artificial Sequence; identical to SEQ ID NO: 3348
  GFR-binding peptide
  MOD_RES (2), (4), (38), (39): Xaa is C or S
  MOD_RES (16), (17), (18), (19), (20): Xaa is A or G
  MOD_RES (21), (22), (23), (24): Xaa is A or G or is absent

SEQ ID NO: 10779 - protein, 37 aa, Artificial Sequence; identical to SEQ ID NO: 3350
  GFR-binding peptide
  MOD_RES (2), (35), (36): Xaa is C or S
  MOD_RES (13), (14), (15), (16), (17): Xaa is A or G
  MOD_RES (18), (19), (20), (21): Xaa is A or G or is absent

SEQ ID NO: 10780 - protein, 40 aa, Artificial Sequence
  GFR-binding peptide
  MOD_RES (2), (34), (35): Xaa is C or S
GXARVVMNEYQKYIVNSSDDIFLVSIPSLQTPAXXPKPVT

SEQ ID NO: 10781 - protein, 43 aa, Artificial Sequence; identical to SEQ ID NO: 3356
  GFR-binding peptide
  MOD_RES (1), (3), (37), (38): Xaa is C or S
  MOD_RES (15), (16), (17), (18), (19): Xaa is A or G
  MOD_RES (20), (21), (22), (23): Xaa is A or G or is absent

SEQ ID NO: 10782 - protein, 32 aa, Artificial Sequence
  GFR-binding peptide
  MOD_RES (2), (2): Xaa is C or S
KXSKVIMNSLQEIKPTKGIYYVIPLPELDQSV

SEQ ID NO: 10783 - protein, 36 aa, Artificial Sequence; identical to SEQ ID NO: 3358
  GFR-binding peptide
  MOD_RES (1), (35), (36): Xaa is C or S
  MOD_RES (13), (14), (15), (16), (17): Xaa is A or G
  MOD_RES (18), (19), (20), (21): Xaa is A or G or is absent

SEQ ID NO: 10784 - protein, 38 aa, Artificial Sequence
  GFR-binding peptide
  MOD_RES (32), (33): Xaa is C or S
ARVVMNNSLQEIVNSSDDYYVVPLPELQTPAXXPKPVT

SEQ ID NO: 10785 - protein, 34 aa, Artificial Sequence
  GFR-binding peptide
  MOD_RES (1), (3), (34): Xaa is C or S
XKXSKVVMEYQKYVKPTRGVIFLISIPSLDQPVX

SEQ ID NO: 10786 - protein, 35 aa, Artificial Sequence
  GFR-binding peptide
  MOD_RES (32), (32): Xaa is C or S
SRVVMNEYQKYIVNSSDDIFLVSIPSLKTPAXTPK

SEQ ID NO: 10787 - protein, 36 aa, Artificial Sequence; identical to SEQ ID NO: 3367
  GFR-binding peptide
  MOD_RES (1), (3), (35), (36): Xaa is C or S

SEQ ID NO: 10788 - protein, 35 aa, Artificial Sequence
  GFR-binding peptide
  MOD_RES (31), (32): Xaa is C or S
SKVVMEYQKYVKPTRGVIFLISIPSLDQPVXXPSA

SEQ ID NO: 10789 - protein, 37 aa, Artificial Sequence; identical to SEQ ID NO: 3368
  GFR-binding peptide
  MOD_RES (2), (4), (36), (37): Xaa is C or S

SEQ ID NO: 10790 - protein, 36 aa, Artificial Sequence; identical to SEQ ID NO: 3370
  GFR-binding peptide
  MOD_RES (1), (35), (36): Xaa is C or S
  MOD_RES (13), (14), (15), (16), (17): Xaa is A or G
  MOD_RES (18), (19), (20), (21): Xaa is A or G or is absent

SEQ ID NO: 10791 - protein, 39 aa, Artificial Sequence
  GFR-binding peptide
  MOD_RES (2), (36), (37): Xaa is C or S
  MOD_RES (14), (15), (16), (17), (18): Xaa is A or G
  MOD_RES (19), (20), (21), (22): Xaa is A or G or is absent
GXARVVMNEYQKYXXXXXXXXXIFLVSIPSLQTPAXXPK

SEQ ID NO: 10792 - protein, 37 aa, Artificial Sequence; identical to SEQ ID NO: 3372
  GFR-binding peptide
  MOD_RES (1), (3), (37): Xaa is C or S
  MOD_RES (15), (16), (17), (18), (19): Xaa is A or G
  MOD_RES (20), (21), (22), (23): Xaa is A or G or is absent

SEQ ID NO: 10793 - protein, 33 aa, Artificial Sequence
  GFR-binding peptide
  MOD_RES (33), (33): Xaa is C or S
  MOD_RES (11), (12), (13), (14), (15): Xaa is A or G
  MOD_RES (16), (17), (18), (19): Xaa is A or G or is absent
EVVMDNSLQEXXXXXXXXXYYLMTLPELETPVX

SEQ ID NO: 10794 - protein, 31 aa, Artificial Sequence
  GFR-binding peptide
GEVVMDNSLQEVVKENEDYYVMPLPELETPV

SEQ ID NO: 10795 - protein, 37 aa, Artificial Sequence; identical to SEQ ID NO: 3373
  GFR-binding peptide
  MOD_RES (1), (3), (34), (35): Xaa is C or S

SEQ ID NO: 10796 - protein, 39 aa, Artificial Sequence
  GFR-binding peptide
  MOD_RES (34), (35): Xaa is C or S
  MOD_RES (12), (13), (14), (15), (16): Xaa is A or G
  MOD_RES (17), (18), (19), (20): Xaa is A or G or is absent
GEVVMENSLQEXXXXXXXXXYYLMTLPELETPVXXAKPI

SEQ ID NO: 10797 - protein, 40 aa, Artificial Sequence
  GFR-binding peptide
  MOD_RES (2), (34), (35): Xaa is C or S
GXGEVVMDNSLQEVVKENEDYYLMTLPELETPVXXAKPIK

SEQ ID NO: 10798 - protein, 38 aa, Artificial Sequence; identical to SEQ ID NO: 3376
  GFR-binding peptide
  MOD_RES (32), (33): Xaa is C or S

SEQ ID NO: 10799 - protein, 36 aa, Artificial Sequence; identical to SEQ ID NO: 3377
  GFR-binding peptide
  MOD_RES (2), (33), (34): Xaa is C or S

SEQ ID NO: 10800 - protein, 36 aa, Artificial Sequence
  GFR-binding peptide
  MOD_RES (2), (36): Xaa is C or S
  MOD_RES (14), (15), (16), (17), (18): Xaa is A or G
  MOD_RES (19), (20), (21), (22): Xaa is A or G or is absent
GXSEVVMDNSLQEXXXXXXXXXYYVIPLPELRTPVX

SEQ ID NO: 10801 - protein, 42 aa, Artificial Sequence; identical to SEQ ID NO: 3378
  GFR-binding peptide
  MOD_RES (1), (3), (37), (38): Xaa is C or S
  MOD_RES (15), (16), (17), (18), (19): Xaa is A or G
  MOD_RES (20), (21), (22), (23): Xaa is A or G or is absent

SEQ ID NO: 10802 - protein, 40 aa, Artificial Sequence
  GFR-binding peptide
  MOD_RES (2), (4), (37), (38): Xaa is C or S
  MOD_RES (15), (16), (17), (18), (19): Xaa is A or G
  MOD_RES (20), (21), (22), (23): Xaa is A or G or is absent
SXKXSKVVMEYQKYXXXXXXXXXIFLISIPSLDQPVXXPS

SEQ ID NO: 10803 - protein, 32 aa, Artificial Sequence
  GFR-binding peptide
  MOD_RES (11), (12), (13), (14), (15): Xaa is A or G
  MOD_RES (16), (17), (18), (19): Xaa is A or G or is absent
EVVMDNSLQEXXXXXXXXXYYVMPLPELETPV

SEQ ID NO: 10804 - protein, 39 aa, Artificial Sequence
  GFR-binding peptide
  MOD_RES (2), (34), (35): Xaa is C or S
GXGEVVMDNSLQEVVKENEDYYVMPLPELETPVXXAKPI

SEQ ID NO: 10805 - protein, 41 aa, Artificial Sequence
  GFR-binding peptide
  MOD_RES (1), (35), (36): Xaa is C or S
  MOD_RES (13), (14), (15), (16), (17): Xaa is A or G
  MOD_RES (18), (19), (20), (21): Xaa is A or G or is absent
XSEVVMDEYQKYXXXXXXXXXIFLISIPSLRTPVXXTPPTS

SEQ ID NO: 10806 - protein, 36 aa, Artificial Sequence; identical to SEQ ID NO: 3381
  GFR-binding peptide
  MOD_RES (1), (3), (34), (35): Xaa is C or S

SEQ ID NO: 10807 - protein, 35 aa, Artificial Sequence
  GFR-binding peptide
  MOD_RES (34), (35): Xaa is C or S
  MOD_RES (12), (13), (14), (15), (16): Xaa is A or G
  MOD_RES (17), (18), (19), (20): Xaa is A or G or is absent
GEVVMENSLQEXXXXXXXXXYYLMTLPELETPVXX

SEQ ID NO: 10808 - protein, 38 aa, Artificial Sequence
  GFR-binding peptide
  MOD_RES (2), (34), (35): Xaa is C or S
GXARVVMNNSLQEIVNSSDDYYLVTLPELQTPAXXPKP

SEQ ID NO: 10809 - protein, 39 aa, Artificial Sequence; identical to SEQ ID NO: 3384
  GFR-binding peptide
  MOD_RES (34), (35): Xaa is C or S
  MOD_RES (12), (13), (14), (15), (16): Xaa is A or G
  MOD_RES (17), (18), (19), (20): Xaa is A or G or is absent

SEQ ID NO: 10810 - protein, 40 aa, Artificial Sequence
  GFR-binding peptide
  MOD_RES (1), (3), (35), (36): Xaa is C or S
XGXSEVVMDRYKKLVVNNASDFYLISIANLRTPVXXTPPT

SEQ ID NO: 10811 - protein, 36 aa, Artificial Sequence; identical to SEQ ID NO: 3388
  GFR-binding peptide
  MOD_RES (2), (4), (36): Xaa is C or S

SEQ ID NO: 10812 - protein, 39 aa, Artificial Sequence
  GFR-binding peptide
  MOD_RES (2), (4), (38), (39): Xaa is C or S
  MOD_RES (16), (17), (18), (19), (20): Xaa is A or G
  MOD_RES (21), (22), (23), (24): Xaa is A or G or is absent
RXGXSEVVMDRYKKLXXXXXXXXXFYLISIANLRTPVXX

SEQ ID NO: 10813 - protein, 32 aa, Artificial Sequence; identical to SEQ ID NO: 3389
  GFR-binding peptide
  MOD_RES (11), (12), (13), (14), (15): Xaa is A or G
  MOD_RES (16), (17), (18), (19): Xaa is A or G or is absent

SEQ ID NO: 10814 - protein, 38 aa, Artificial Sequence
  GFR-binding peptide
  MOD_RES (1), (35), (36): Xaa is C or S
  MOD_RES (13), (14), (15), (16), (17): Xaa is A or G
  MOD_RES (18), (19), (20), (21): Xaa is A or G or is absent
XSRVVMNNSLQEXXXXXXXXXYYVVPLPELKTPAXXPK

SEQ ID NO: 10815 - protein, 31 aa, Artificial Sequence; identical to SEQ ID NO: 3392
  GFR-binding peptide
  MOD_RES (31), (31): Xaa is C or S

SEQ ID NO: 10816 - protein, 34 aa, Artificial Sequence
  GFR-binding peptide
  MOD_RES (1), (34): Xaa is C or S
  MOD_RES (12), (13), (14), (15), (16): Xaa is A or G
  MOD_RES (17), (18), (19), (20): Xaa is A or G or is absent
XSKVIMEYQKYXXXXXXXXXIFLISIPSLDQSVX

SEQ ID NO: 10817 - protein, 36 aa, Artificial Sequence
  GFR-binding peptide
  MOD_RES (1), (35), (36): Xaa is C or S
  MOD_RES (13), (14), (15), (16), (17): Xaa is A or G
  MOD_RES (18), (19), (20), (21): Xaa is A or G or is absent
XSEVVMDEYQKYXXXXXXXXXIFLISIPSLRTPVXX

SEQ ID NO: 10818 - protein, 35 aa, Artificial Sequence
  GFR-binding peptide
  MOD_RES (2), (4), (35): Xaa is C or S
SXKXSKVIMNSLQEIKPTKGIYYVIPLPELDQSVX

SEQ ID NO: 10819 - protein, 39 aa, Artificial Sequence
  GFR-binding peptide
  MOD_RES (1), (3), (37), (38): Xaa is C or S
  MOD_RES (15), (16), (17), (18), (19): Xaa is A or G
  MOD_RES (20), (21), (22), (23): Xaa is A or G or is absent
XGXARVVMNNSLQEXXXXXXXXXYYLVTLPELQTPAXXP

SEQ ID NO: 10820 - protein, 39 aa, Artificial Sequence
  GFR-binding peptide
  MOD_RES (2), (4), (38), (39): Xaa is C or S
  MOD_RES (16), (17), (18), (19), (20): Xaa is A or G
  MOD_RES (21), (22), (23), (24): Xaa is A or G or is absent
HXGXARVVMNEYQKYXXXXXXXXXIFLVSIPSLQTPAXX

SEQ ID NO: 10821 - protein, 38 aa, Artificial Sequence
  GFR-binding peptide
  MOD_RES (2), (4), (36): Xaa is C or S
HXGXSRVVMNEYQKYIVNSSDDIFLVSIPSLKTPAXTP

SEQ ID NO: 10822 - protein, 39 aa, Artificial Sequence
  GFR-binding peptide
  MOD_RES (2), (36): Xaa is C or S
  MOD_RES (14), (15), (16), (17), (18): Xaa is A or G
  MOD_RES (19), (20), (21), (22): Xaa is A or G or is absent
GXSRVVMNNSLQEXXXXXXXXXYYLVTLPELKTPAXTPK

SEQ ID NO: 10823 - protein, 39 aa, Artificial Sequence; identical to SEQ ID NO: 3403
  GFR-binding peptide
  MOD_RES (2), (34), (35): Xaa is C or S

SEQ ID NO: 10824 - protein, 39 aa, Artificial Sequence
  GFR-binding peptide
  MOD_RES (1), (34), (35): Xaa is C or S
  MOD_RES (12), (13), (14), (15), (16): Xaa is A or G
  MOD_RES (17), (18), (19), (20): Xaa is A or G or is absent
XSKVVMEYQKYXXXXXXXXXIFLISIPSLDQPVXXPSAS

SEQ ID NO: 10825 - protein, 35 aa, Artificial Sequence; identical to SEQ ID NO: 3404
  GFR-binding peptide
  MOD_RES (2), (34), (35): Xaa is C or S

SEQ ID NO: 10826 - protein, 40 aa, Artificial Sequence
  GFR-binding peptide
  MOD_RES (2), (4), (36), (37): Xaa is C or S
RXGXSEVVMDNSLQEVVNNASDYYLITLPELRTPVXXTPP

SEQ ID NO: 10827 - protein, 36 aa, Artificial Sequence
  GFR-binding peptide
  MOD_RES (1), (33): Xaa is C or S
XSRVVMNEYQKYIVNSSDDIFLVSIPSLKTPAXTPK

SEQ ID NO: 10828 - protein, 40 aa, Artificial Sequence
  GFR-binding peptide
  MOD_RES (34), (35): Xaa is C or S
  MOD_RES (12), (13), (14), (15), (16): Xaa is A or G
  MOD_RES (17), (18), (19), (20): Xaa is A or G or is absent
SEVVMDEYQKYXXXXXXXXXIFLISIPSLRTPVXXTPPTS

SEQ ID NO: 10829 - protein, 37 aa, Artificial Sequence
  GFR-binding peptide
  MOD_RES (1), (33), (34): Xaa is C or S
XGEVVMDNSLQEVVKENEDYYLMTLPELETPVXXAKP

SEQ ID NO: 10830 - protein, 36 aa, Artificial Sequence
  GFR-binding peptide
  MOD_RES (2), (36): Xaa is C or S
  MOD_RES (14), (15), (16), (17), (18): Xaa is A or G
  MOD_RES (19), (20), (21), (22): Xaa is A or G or is absent
GXGEVVMDNSLQEXXXXXXXXXYYVMPLPELETPVX

SEQ ID NO: 10831 - protein, 33 aa, Artificial Sequence
  GFR-binding peptide
  MOD_RES (32), (33): Xaa is C or S
GEVVMENSLQEVVKDYEDYYLMTLPELETPVXX

SEQ ID NO: 10832 - protein, 40 aa, Artificial Sequence
  GFR-binding peptide
  MOD_RES (2), (36): Xaa is C or S
  MOD_RES (14), (15), (16), (17), (18): Xaa is A or G
  MOD_RES (19), (20), (21), (22): Xaa is A or G or is absent
GXSRVVMNNSLQEXXXXXXXXXYYLVTLPELKTPAXTPKT

SEQ ID NO: 10833 - protein, 34 aa, Artificial Sequence
  GFR-binding peptide
  MOD_RES (34), (34): Xaa is C or S
  MOD_RES (12), (13), (14), (15), (16): Xaa is A or G
  MOD_RES (17), (18), (19), (20): Xaa is A or G or is absent
GEVVMDNSLQEXXXXXXXXXYYVMPLPELETPVX

SEQ ID NO: 10834 - protein, 40 aa, Artificial Sequence; identical to SEQ ID NO: 3411
  GFR-binding peptide
  MOD_RES (1), (34), (35): Xaa is C or S
  MOD_RES (12), (13), (14), (15), (16): Xaa is A or G
  MOD_RES (17), (18), (19), (20): Xaa is A or G or is absent

SEQ ID NO: 10835 - protein, 37 aa, Artificial Sequence
  GFR-binding peptide
  MOD_RES (2), (35), (36): Xaa is C or S
  MOD_RES (13), (14), (15), (16), (17): Xaa is A or G
  MOD_RES (18), (19), (20), (21): Xaa is A or G or is absent
KXSKVVMNSLQEXXXXXXXXXYYLITLPELDQPVXXP

SEQ ID NO: 10836 - protein, 37 aa, Artificial Sequence
  GFR-binding peptide
  MOD_RES (1), (33): Xaa is C or S
XSRVVMNNSLQEIVNSSDDYYVVPLPELKTPAXTPKT

SEQ ID NO: 10837 - protein, 39 aa, Artificial Sequence; identical to SEQ ID NO: 3413
  GFR-binding peptide
  MOD_RES (33), (34): Xaa is C or S
  MOD_RES (11), (12), (13), (14), (15): Xaa is A or G
  MOD_RES (16), (17), (18), (19): Xaa is A or G or is absent

SEQ ID NO: 10838 - protein, 36 aa, Artificial Sequence; identical to SEQ ID NO: 3414
  GFR-binding peptide
  MOD_RES (2), (33), (34): Xaa is C or S

SEQ ID NO: 10839 - protein, 36 aa, Artificial Sequence
  GFR-binding peptide
  MOD_RES (31), (32): Xaa is C or S
SKVIMEYQKYIKPTKGIIFLISIPSLDQSVXXPSAS

SEQ ID NO: 10840 - protein, 42 aa, Artificial Sequence
  GFR-binding peptide
  MOD_RES (2), (4), (37), (38): Xaa is C or S
  MOD_RES (15), (16), (17), (18), (19): Xaa is A or G
  MOD_RES (20), (21), (22), (23): Xaa is A or G or is absent
SXKXSKVVMNSLQEXXXXXXXXXYYVIPLPELDQPVXXPSAS

SEQ ID NO: 10841 - protein, 40 aa, Artificial Sequence; identical to SEQ ID NO: 3417
  GFR-binding peptide
  MOD_RES (2), (34), (35): Xaa is C or S

SEQ ID NO: 10842 - protein, 36 aa, Artificial Sequence; identical to SEQ ID NO: 3418
  GFR-binding peptide
  MOD_RES (33), (34): Xaa is C or S
  MOD_RES (11), (12), (13), (14), (15): Xaa is A or G
  MOD_RES (16), (17), (18), (19): Xaa is A or G or is absent

SEQ ID NO: 10843 - protein, 35 aa, Artificial Sequence
  GFR-binding peptide
  MOD_RES (31), (32): Xaa is C or S
SKVVMNSLQEVKPTRGVYYVIPLPELDQPVXXPSA

SEQ ID NO: 10844 - protein, 41 aa, Artificial Sequence
  GFR-binding peptide
  MOD_RES (1), (35), (36): Xaa is C or S
  MOD_RES (13), (14), (15), (16), (17): Xaa is A or G
  MOD_RES (18), (19), (20), (21): Xaa is A or G or is absent
XGEVVMDNSLQEXXXXXXXXXYYLMTLPELETPVXXAKPIK

SEQ ID NO: 10845 - protein, 43 aa, Artificial Sequence; identical to SEQ ID NO: 3427
  GFR-binding peptide
  MOD_RES (2), (4), (38), (39): Xaa is C or S
  MOD_RES (16), (17), (18), (19), (20): Xaa is A or G
  MOD_RES (21), (22), (23), (24): Xaa is A or G or is absent

SEQ ID NO: 10846 - protein, 38 aa, Artificial Sequence
  GFR-binding peptide
  MOD_RES (2), (35), (36): Xaa is C or S
  MOD_RES (13), (14), (15), (16), (17): Xaa is A or G
  MOD_RES (18), (19), (20), (21): Xaa is A or G or is absent
KXSKVVMEYQKYXXXXXXXXXIFLISIPSLDQPVXXPS

SEQ ID NO: 10847 - protein, 40 aa, Artificial Sequence
  GFR-binding peptide
  MOD_RES (34), (34): Xaa is C or S
  MOD_RES (12), (13), (14), (15), (16): Xaa is A or G
  MOD_RES (17), (18), (19), (20): Xaa is A or G or is absent
SRVVMNNSLQEXXXXXXXXXYYLVTLPELKTPAXTPKTVH

SEQ ID NO: 10848 - protein, 35 aa, Artificial Sequence; identical to SEQ ID NO: 3434
  GFR-binding peptide
  MOD_RES (1), (33), (34): Xaa is C or S

SEQ ID NO: 10849 - protein, 38 aa, Artificial Sequence; identical to SEQ ID NO: 3435
  GFR-binding peptide
  MOD_RES (2), (34), (35): Xaa is C or S

SEQ ID NO: 10850 - protein, 37 aa, Artificial Sequence
  GFR-binding peptide
  MOD_RES (2), (4), (36), (37): Xaa is C or S
RXGXGEVVMENSLQEVVKDYEDYYLMTLPELETPVXX

SEQ ID NO: 10851 - protein, 39 aa, Artificial Sequence
  GFR-binding peptide
  MOD_RES (2), (4), (38), (39): Xaa is C or S
  MOD_RES (16), (17), (18), (19), (20): Xaa is A or G
  MOD_RES (21), (22), (23), (24): Xaa is A or G or is absent
RXGXSEVVMDNSLQEXXXXXXXXXYYVIPLPELRTPVXX

SEQ ID NO: 10852 - protein, 32 aa, Artificial Sequence; identical to SEQ ID NO: 3436
  GFR-binding peptide
  MOD_RES (1), (1): Xaa is C or S

SEQ ID NO: 10853 - protein, 38 aa, Artificial Sequence; identical to SEQ ID NO: 3437
  GFR-binding peptide
  MOD_RES (1), (35), (36): Xaa is C or S
  MOD_RES (13), (14), (15), (16), (17): Xaa is A or G
  MOD_RES (18), (19), (20), (21): Xaa is A or G or is absent

SEQ ID NO: 10854 - protein, 37 aa, Artificial Sequence; identical to SEQ ID NO: 3438
  GFR-binding peptide
  MOD_RES (33), (34): Xaa is C or S
  MOD_RES (11), (12), (13), (14), (15): Xaa is A or G
  MOD_RES (16), (17), (18), (19): Xaa is A or G or is absent

SEQ ID NO: 10855 - protein, 40 aa, Artificial Sequence; identical to SEQ ID NO: 3439
  GFR-binding peptide
  MOD_RES (2), (4), (35), (36): Xaa is C or S

SEQ ID NO: 10856 - protein, 44 aa, Artificial Sequence
  GFR-binding peptide
  MOD_RES (2), (4), (38), (39): Xaa is C or S
  MOD_RES (16), (17), (18), (19), (20): Xaa is A or G
  MOD_RES (21), (22), (23), (24): Xaa is A or G or is absent
RXGXSEVVMDRYKKLXXXXXXXXXFYLISIANLRTPVXXTPPTS

SEQ ID NO: 10857 - protein, 41 aa, Artificial Sequence
  GFR-binding peptide
  MOD_RES (1), (3), (35), (36): Xaa is C or S
XGXARVVMNNSLQEIVNSSDDYYLVTLPELQTPAXXPKPVT

SEQ ID NO: 10858 - protein, 40 aa, Artificial Sequence; identical to SEQ ID NO: 3440
  GFR-binding peptide
  MOD_RES (2), (36), (37): Xaa is C or S
  MOD_RES (14), (15), (16), (17), (18): Xaa is A or G
  MOD_RES (19), (20), (21), (22): Xaa is A or G or is absent

SEQ ID NO: 10859 - protein, 38 aa, Artificial Sequence
  GFR-binding peptide
  MOD_RES (2), (4), (35), (36): Xaa is C or S
SXKXSKVVMEYQKYVKPTRGVIFLISIPSLDQPVXXPS

SEQ ID NO: 10860 - protein, 35 aa, Artificial Sequence; identical to SEQ ID NO: 3441
  GFR-binding peptide
  MOD_RES (34), (35): Xaa is C or S
  MOD_RES (12), (13), (14), (15), (16): Xaa is A or G
  MOD_RES (17), (18), (19), (20): Xaa is A or G or is absent

SEQ ID NO: 10861 - protein, 30 aa, Artificial Sequence; identical to SEQ ID NO: 3442
  GFR-binding peptide

SEQ ID NO: 10862 - protein, 43 aa, Artificial Sequence
  GFR-binding peptide
  MOD_RES (2), (4), (37), (38): Xaa is C or S
  MOD_RES (15), (16), (17), (18), (19): Xaa is A or G
  MOD_RES (20), (21), (22), (23): Xaa is A or G or is absent
SXKXSRVIMNSLQEXXXXXXXXXYYVIPLPELAQPVXXPAASA

SEQ ID NO: 10863 - protein, 32 aa, Artificial Sequence
  GFR-binding peptide
  MOD_RES (31), (32): Xaa is C or S
EVVMDEYQKYVVKENEDIFLMSIPSLETPVXX

SEQ ID NO: 10864 - protein, 37 aa, Artificial Sequence
  GFR-binding peptide
  MOD_RES (31), (32): Xaa is C or S
EVVMDNSLQEVVNNASDYYVIPLPELRTPVXXTPPTS

SEQ ID NO: 10865 - protein, 37 aa, Artificial Sequence
  GFR-binding peptide
  MOD_RES (1), (3), (37): Xaa is C or S
  MOD_RES (15), (16), (17), (18), (19): Xaa is A or G
  MOD_RES (20), (21), (22), (23): Xaa is A or G or is absent
XGXGEVVMDNSLQEXXXXXXXXXYYVMPLPELETPVX

SEQ ID NO: 10866 - protein, 34 aa, Artificial Sequence
  GFR-binding peptide
  MOD_RES (1), (33), (34): Xaa is C or S
XSRVVMNNSLQEIVNSSDDYYVVPLPELKTPAXX

SEQ ID NO: 10867 - protein, 38 aa, Artificial Sequence
  GFR-binding peptide
  MOD_RES (2), (4), (36), (37): Xaa is C or S
HXGXSRVVMNNSLQEIVNSSDDYYVVPLPELKTPAXXP

SEQ ID NO: 10868 - protein, 33 aa, Artificial Sequence
  GFR-binding peptide
  MOD_RES (31), (31): Xaa is C or S
RVVMNNSLQEIVNSSDDYYVVPLPELKTPAXTP

SEQ ID NO: 10869 - protein, 38 aa, Artificial Sequence
  GFR-binding peptide
  MOD_RES (2), (4), (36), (37): Xaa is C or S
HXGXARVVMNEYQKYIVNSSDDIFLVSIPSLQTPAXXP

SEQ ID NO: 10870 - protein, 37 aa, Artificial Sequence; identical to SEQ ID NO: 3451
  GFR-binding peptide
  MOD_RES (34), (35): Xaa is C or S
  MOD_RES (12), (13), (14), (15), (16): Xaa is A or G
  MOD_RES (17), (18), (19), (20): Xaa is A or G or is absent

SEQ ID NO: 10871 - protein, 40 aa, Artificial Sequence
  GFR-binding peptide
  MOD_RES (34), (35): Xaa is C or S
  MOD_RES (12), (13), (14), (15), (16): Xaa is A or G
  MOD_RES (17), (18), (19), (20): Xaa is A or G or is absent
SEVVMDNSLQEXXXXXXXXXYYVIPLPELRTPVXXTPPTS

SEQ ID NO: 10872 - protein, 33 aa, Artificial Sequence
  GFR-binding peptide
  MOD_RES (32), (33): Xaa is C or S
SEVVMDEYQKYVVNNASDIFLISIPSLRTPVXX

SEQ ID NO: 10873 - protein, 36 aa, Artificial Sequence
  GFR-binding peptide
  MOD_RES (2), (33), (34): Xaa is C or S
KXSRVIMEYQKYVKPKRGVIFLISIPSLAQPVXXPA

SEQ ID NO: 10874 - protein, 39 aa, Artificial Sequence
  GFR-binding peptide
  MOD_RES (1), (35), (36): Xaa is C or S
  MOD_RES (13), (14), (15), (16), (17): Xaa is A or G
  MOD_RES (18), (19), (20), (21): Xaa is A or G or is absent
XSEVVMDNSLQEXXXXXXXXXYYVIPLPELRTPVXXTPP

SEQ ID NO: 10875 - protein, 38 aa, Artificial Sequence; identical to SEQ ID NO: 3459
  GFR-binding peptide
  MOD_RES (1), (32), (33): Xaa is C or S

SEQ ID NO: 10876 - protein, 34 aa, Artificial Sequence
  GFR-binding peptide
  MOD_RES (2), (33), (34): Xaa is C or S
KXSKVVMNSLQEVKPTRGVYYLITLPELDQPVXX

SEQ ID NO: 10877 - protein, 39 aa, Artificial Sequence; identical to SEQ ID NO: 3462
  GFR-binding peptide
  MOD_RES (1), (33), (34): Xaa is C or S

SEQ ID NO: 10878 - protein, 41 aa, Artificial Sequence
  GFR-binding peptide
  MOD_RES (1), (3), (35), (36): Xaa is C or S
XGXGEVVMENSLQEVVKDYEDYYLMTLPELETPVXXAKPIS

SEQ ID NO: 10879 - protein, 41 aa, Artificial Sequence
  GFR-binding peptide
  MOD_RES (1), (3), (37), (38): Xaa is C or S
  MOD_RES (15), (16), (17), (18), (19): Xaa is A or G
  MOD_RES (20), (21), (22), (23): Xaa is A or G or is absent
XGXARVVMNNSLQEXXXXXXXXXYYVVPLPELQTPAXXPKP

SEQ ID NO: 10880 - protein, 34 aa, Artificial Sequence; identical to SEQ ID NO: 3465
  GFR-binding peptide
  MOD_RES (31), (32): Xaa is C or S

SEQ ID NO: 10881 - protein, 39 aa, Artificial Sequence
  GFR-binding peptide
  MOD_RES (2), (4), (35), (36): Xaa is C or S
SXKXSKVIMNSLQEIKPTKGIYYVIPLPELDQSVXXPSA

SEQ ID NO: 10882 - protein, 34 aa, Artificial Sequence
  GFR-binding peptide
  MOD_RES (31), (32): Xaa is C or S
RVVMNNSLQEIVNSSDDYYLVTLPELQTPAXXPK

SEQ ID NO: 10883 - protein, 39 aa, Artificial Sequence; identical to SEQ ID NO: 3468
  GFR-binding peptide
  MOD_RES (2), (34), (35): Xaa is C or S

SEQ ID NO: 10884 - protein, 37 aa, Artificial Sequence; identical to SEQ ID NO: 3470
  GFR-binding peptide
  MOD_RES (1), (3), (37): Xaa is C or S
  MOD_RES (15), (16), (17), (18), (19): Xaa is A or G
  MOD_RES (20), (21), (22), (23): Xaa is A or G or is absent

SEQ ID NO: 10885 - protein, 34 aa, Artificial Sequence
  GFR-binding peptide
  MOD_RES (31), (32): Xaa is C or S
RVVMNNSLQEIVNSSDDYYVVPLPELQTPAXXPK

SEQ ID NO: 10886 - protein, 43 aa, Artificial Sequence
  GFR-binding peptide
  MOD_RES (2), (4), (38): Xaa is C or S
  MOD_RES (16), (17), (18), (19), (20): Xaa is A or G
  MOD_RES (21), (22), (23), (24): Xaa is A or G or is absent
HXGXSRVVMNNSLQEXXXXXXXXXYYVVPLPELKTPAXTPKTV

SEQ ID NO: 10887 - protein, 40 aa, Artificial Sequence
  GFR-binding peptide
  MOD_RES (2), (4), (38): Xaa is C or S
  MOD_RES (16), (17), (18), (19), (20): Xaa is A or G
  MOD_RES (21), (22), (23), (24): Xaa is A or G or is absent
HXGXSRVVMNNSLQEXXXXXXXXXYYLVTLPELKTPAXTP

SEQ ID NO: 10888 - protein, 42 aa, Artificial Sequence
  GFR-binding peptide
  MOD_RES (1), (3), (37), (38): Xaa is C or S
  MOD_RES (15), (16), (17), (18), (19): Xaa is A or G
  MOD_RES (20), (21), (22), (23): Xaa is A or G or is absent
XGXSEVVMDRYKKLXXXXXXXXXFYLISIANLRTPVXXTPPT

SEQ ID NO: 10889 - protein, 39 aa, Artificial Sequence
  GFR-binding peptide
  MOD_RES (1), (3), (37), (38): Xaa is C or S
  MOD_RES (15), (16), (17), (18), (19): Xaa is A or G
  MOD_RES (20), (21), (22), (23): Xaa is A or G or is absent
XGXGEVVMDNSLQEXXXXXXXXXYYVMPLPELETPVXXA

SEQ ID NO: 10890 - protein, 33 aa, Artificial Sequence; identical to SEQ ID NO: 3472
  GFR-binding peptide
  MOD_RES (2), (2): Xaa is C or S

SEQ ID NO: 10891 - protein, 38 aa, Artificial Sequence
  GFR-binding peptide
  MOD_RES (2), (4), (36), (37): Xaa is C or S
RXGXGEVVMEEYQKYVVKDYEDIFLMSIPSLETPVXXA

SEQ ID NO: 10892 - protein, 37 aa, Artificial Sequence; identical to SEQ ID NO: 3475
  GFR-binding peptide
  MOD_RES (34), (35): Xaa is C or S
  MOD_RES (12), (13), (14), (15), (16): Xaa is A or G
  MOD_RES (17), (18), (19), (20): Xaa is A or G or is absent

SEQ ID NO: 10893 - protein, 38 aa, Artificial Sequence
  GFR-binding peptide
  MOD_RES (1), (34), (35): Xaa is C or S
  MOD_RES (12), (13), (14), (15), (16): Xaa is A or G
  MOD_RES (17), (18), (19), (20): Xaa is A or G or is absent
XSKVIMEYQKYXXXXXXXXXIFLISIPSLDQSVXXPSA

SEQ ID NO: 10894 - protein, 40 aa, Artificial Sequence
  GFR-binding peptide
  MOD_RES (34), (35): Xaa is C or S
  MOD_RES (12), (13), (14), (15), (16): Xaa is A or G
  MOD_RES (17), (18), (19), (20): Xaa is A or G or is absent
SRVVMNEYQKYXXXXXXXXXIFLVSIPSLKTPAXXPKPVY

SEQ ID NO: 10895 - protein, 34 aa, Artificial Sequence; identical to SEQ ID NO: 3477
  GFR-binding peptide
  MOD_RES (2), (4): Xaa is C or S

SEQ ID NO: 10896 - protein, 42 aa, Artificial Sequence
  GFR-binding peptide
  MOD_RES (2), (36), (37): Xaa is C or S
  MOD_RES (14), (15), (16), (17), (18): Xaa is A or G
  MOD_RES (19), (20), (21), (22): Xaa is A or G or is absent
GXSEVVMDRYKKLXXXXXXXXXFYLISIANLRTPVXXTPPTS

SEQ ID NO: 10897 - protein, 35 aa, Artificial Sequence; identical to SEQ ID NO: 3481
  GFR-binding peptide
  MOD_RES (31), (32): Xaa is C or S

SEQ ID NO: 10898 - protein, 36 aa, Artificial Sequence
  GFR-binding peptide
  MOD_RES (1), (33), (34): Xaa is C or S
XARVVMNNSLQEIVNSSDDYYLVTLPELQTPAXXPK

SEQ ID NO: 10899 - protein, 38 aa, Artificial Sequence
  GFR-binding peptide
  MOD_RES (33), (34): Xaa is C or S
  MOD_RES (11), (12), (13), (14), (15): Xaa is A or G
  MOD_RES (16), (17), (18), (19): Xaa is A or G or is absent
EVVMEEYQKYXXXXXXXXXIFLMSIPSLETPVXXAKPI

SEQ ID NO: 10900 - protein, 35 aa, Artificial Sequence; identical to SEQ ID NO: 3487
  GFR-binding peptide
  MOD_RES (34), (35): Xaa is C or S
  MOD_RES (12), (13), (14), (15), (16): Xaa is A or G
  MOD_RES (17), (18), (19), (20): Xaa is A or G or is absent

SEQ ID NO: 10901 - protein, 36 aa, Artificial Sequence
  GFR-binding peptide
  MOD_RES (2), (34), (35): Xaa is C or S
GXARVVMNNSLQEIVNSSDDYYVVPLPELQTPAXXP

SEQ ID NO: 10902 - protein, 32 aa, Artificial Sequence
  GFR-binding peptide
  MOD_RES (1), (1): Xaa is C or S
XSEVVMDRYKKLVVNNASDFYLISIANLRTPV

SEQ ID NO: 10903 - protein, 33 aa, Artificial Sequence
  GFR-binding peptide
  MOD_RES (2), (2): Xaa is C or S
GXARVVMNNSLQEIVNSSDDYYVVPLPELQTPA

SEQ ID NO: 10904 - protein, 39 aa, Artificial Sequence; identical to SEQ ID NO: 3490
  GFR-binding peptide
  MOD_RES (1), (3), (35), (36): Xaa is C or S

SEQ ID NO: 10905 - protein, 32 aa, Artificial Sequence
  GFR-binding peptide
  MOD_RES (32), (32): Xaa is C or S
SEVVMDNSLQEVVNNASDYYVIPLPELRTPVX

SEQ ID NO: 10906 - protein, 40 aa, Artificial Sequence
  GFR-binding peptide
  MOD_RES (2), (35), (36): Xaa is C or S
  MOD_RES (13), (14), (15), (16), (17): Xaa is A or G
  MOD_RES (18), (19), (20), (21): Xaa is A or G or is absent
KXSRVIMNSLQEXXXXXXXXXYYLITLPELAQPVXXPAAS

SEQ ID NO: 10907 - protein, 40 aa, Artificial Sequence
  GFR-binding peptide
  MOD_RES (2), (34), (35): Xaa is C or S
GXGEVVMENSLQEVVKDYEDYYVMPLPELETPVXXAKPIS

SEQ ID NO: 10908 - protein, 41 aa, Artificial Sequence; identical to SEQ ID NO: 3493
  GFR-binding peptide
  MOD_RES (1), (3), (36), (37): Xaa is C or S
  MOD_RES (14), (15), (16), (17), (18): Xaa is A or G
  MOD_RES (19), (20), (21), (22): Xaa is A or G or is absent

SEQ ID NO: 10909 - protein, 37 aa, Artificial Sequence; identical to SEQ ID NO: 3494
  GFR-binding peptide
  MOD_RES (33), (34): Xaa is C or S
  MOD_RES (11), (12), (13), (14), (15): Xaa is A or G
  MOD_RES (16), (17), (18), (19): Xaa is A or G or is absent

SEQ ID NO: 10910 - protein, 37 aa, Artificial Sequence
  GFR-binding peptide
  MOD_RES (32), (32): Xaa is C or S
SRVVMNEYQKYIVNSSDDIFLVSIPSLKTPAXTPKTV

SEQ ID NO: 10911 - protein, 34 aa, Artificial Sequence; identical to SEQ ID NO: 3496
  GFR-binding peptide
  MOD_RES (33), (34): Xaa is C or S
  MOD_RES (11), (12), (13), (14), (15): Xaa is A or G
  MOD_RES (16), (17), (18), (19): Xaa is A or G or is absent

SEQ ID NO: 10912 - protein, 39 aa, Artificial Sequence; identical to SEQ ID NO: 3499
  GFR-binding peptide
  MOD_RES (2), (36), (37): Xaa is C or S
  MOD_RES (14), (15), (16), (17), (18): Xaa is A or G
  MOD_RES (19), (20), (21), (22): Xaa is A or G or is absent

SEQ ID NO: 10913 - protein, 39 aa, Artificial Sequence
  GFR-binding peptide
  MOD_RES (1), (35), (36): Xaa is C or S
  MOD_RES (13), (14), (15), (16), (17): Xaa is A or G
  MOD_RES (18), (19), (20), (21): Xaa is A or G or is absent
XGEVVMDEYQKYXXXXXXXXXIFLMSIPSLETPVXXAKP

SEQ ID NO: 10914 - protein, 32 aa, Artificial Sequence
  GFR-binding peptide
  MOD_RES (31), (31): Xaa is C or S
RVVMNNSLQEIVNSSDDYYVVPLPELKTPAXT

SEQ ID NO: 10915 - protein, 40 aa, Artificial Sequence; identical to SEQ ID NO: 3503
  GFR-binding peptide
  MOD_RES (1), (3), (35), (36): Xaa is C or S

SEQ ID NO: 10916 - protein, 35 aa, Artificial Sequence
  GFR-binding peptide
  MOD_RES (34), (34): Xaa is C or S
  MOD_RES (12), (13), (14), (15), (16): Xaa is A or G
  MOD_RES (17), (18), (19), (20): Xaa is A or G or is absent
SRVVMNNSLQEXXXXXXXXXYYLVTLPELKTPAXT

SEQ ID NO: 10917 - protein, 35 aa, Artificial Sequence
  GFR-binding peptide
  MOD_RES (31), (32): Xaa is C or S
EVVMDRYKKLVVNNASDFYLISIANLRTPVXXTPP

SEQ ID NO: 10918 - protein, 33 aa, Artificial Sequence
  GFR-binding peptide
  MOD_RES (31), (32): Xaa is C or S
EVVMDNSLQEVVKENEDYYLMTLPELETPVXXA

SEQ ID NO: 10919 - protein, 36 aa, Artificial Sequence
  GFR-binding peptide
  MOD_RES (2), (36): Xaa is C or S
  MOD_RES (14), (15), (16), (17), (18): Xaa is A or G
  MOD_RES (19), (20), (21), (22): Xaa is A or G or is absent
GXSRVVMNNSLQEXXXXXXXXXYYLVTLPELKTPAX

SEQ ID NO: 10920 - protein, 33 aa, Artificial Sequence
  GFR-binding peptide
  MOD_RES (12), (13), (14), (15), (16): Xaa is A or G
  MOD_RES (17), (18), (19), (20): Xaa is A or G or is absent
ARVVMNNSLQEXXXXXXXXXYYLVTLPELQTPA

SEQ ID NO: 10921 - protein, 34 aa, Artificial Sequence
  GFR-binding peptide
  MOD_RES (33), (33): Xaa is C or S
  MOD_RES (11), (12), (13), (14), (15): Xaa is A or G
  MOD_RES (16), (17), (18), (19): Xaa is A or G or is absent
RVVMNNSLQEXXXXXXXXXYYLVTLPELKTPAXT

SEQ ID NO: 10922 - protein, 34 aa, Artificial Sequence; identical to SEQ ID NO: 3512
  GFR-binding peptide
  MOD_RES (32), (32): Xaa is C or S

SEQ ID NO: 10923 - protein, 34 aa, Artificial Sequence; identical to SEQ ID NO: 3514
  GFR-binding peptide
  MOD_RES (34), (34): Xaa is C or S
  MOD_RES (12), (13), (14), (15), (16): Xaa is A or G
  MOD_RES (17), (18), (19), (20): Xaa is A or G or is absent

SEQ ID NO: 10924 - protein, 37 aa, Artificial Sequence; identical to SEQ ID NO: 3515
  GFR-binding peptide
  MOD_RES (2), (4), (35), (36): Xaa is C or S

SEQ ID NO: 10925 - protein, 37 aa, Artificial Sequence; identical to SEQ ID NO: 3516
  GFR-binding peptide
  MOD_RES (1), (3), (36), (37): Xaa is C or S
  MOD_RES (14), (15), (16), (17), (18): Xaa is A or G
  MOD_RES (19), (20), (21), (22): Xaa is A or G or is absent

SEQ ID NO: 10926 - protein, 34 aa, Artificial Sequence; identical to SEQ ID NO: 3517
  GFR-binding peptide
  MOD_RES (2), (34): Xaa is C or S

SEQ ID NO: 10927 - protein, 32 aa, Artificial Sequence
  GFR-binding peptide
  MOD_RES (2), (2): Xaa is C or S
KXSKVIMEYQKYIKPTKGIIFLISIPSLDQSV

SEQ ID NO: 10928 - protein, 42 aa, Artificial Sequence
  GFR-binding peptide
  MOD_RES (2), (4), (37), (38): Xaa is C or S
  MOD_RES (15), (16), (17), (18), (19): Xaa is A or G
  MOD_RES (20), (21), (22), (23): Xaa is A or G or is absent
SXKXSKVIMEYQKYXXXXXXXXXIFLISIPSLDQSVXXPSAS

SEQ ID NO: 10929 - protein, 41 aa, Artificial Sequence
  GFR-binding peptide
  MOD_RES (1), (3), (35), (36): Xaa is C or S
XGXSEVVMDNSLQEVVNNASDYYVIPLPELRTPVXXTPPTS

SEQ ID NO: 10930 - protein, 37 aa, Artificial Sequence
  GFR-binding peptide
  MOD_RES (2), (34), (35): Xaa is C or S
GXGEVVMDNSLQEVVKENEDYYLMTLPELETPVXXAK

SEQ ID NO: 10931 - protein, 37 aa, Artificial Sequence
  GFR-binding peptide
  MOD_RES (2), (33), (34): Xaa is C or S
KXSKVVMNSLQEVKPTRGVYYLITLPELDQPVXXPSA

SEQ ID NO: 10932 - protein, 32 aa, Artificial Sequence; identical to SEQ ID NO: 3520
  GFR-binding peptide
  MOD_RES (1), (1): Xaa is C or S

SEQ ID NO: 10933 - protein, 42 aa, Artificial Sequence; identical to SEQ ID NO: 3521
  GFR-binding peptide
  MOD_RES (2), (4), (36): Xaa is C or S

SEQ ID NO: 10934 - protein, 41 aa, Artificial Sequence; identical to SEQ ID NO: 3522
  GFR-binding peptide
  MOD_RES (2), (4), (37), (38): Xaa is C or S
  MOD_RES (15), (16), (17), (18), (19): Xaa is A or G
  MOD_RES (20), (21), (22), (23): Xaa is A or G or is absent

SEQ ID NO: 10935 - protein, 39 aa, Artificial Sequence
  GFR-binding peptide
  MOD_RES (2), (4), (36), (37): Xaa is C or S
RXGXGEVVMDNSLQEVVKENEDYYLMTLPELETPVXXAK

SEQ ID NO: 10936 - protein, 34 aa, Artificial Sequence; identical to SEQ ID NO: 3524
  GFR-binding peptide
  MOD_RES (1), (32), (33): Xaa is C or S

SEQ ID NO: 10937 - protein, 36 aa, Artificial Sequence; identical to SEQ ID NO: 3527
  GFR-binding peptide
  MOD_RES (1), (3), (34), (35): Xaa is C or S

SEQ ID NO: 10938 - protein, 38 aa, Artificial Sequence; identical to SEQ ID NO: 3528
  GFR-binding peptide
  MOD_RES (2), (4), (35), (36): Xaa is C or S

SEQ ID NO: 10939 - protein, 41 aa, Artificial Sequence
  GFR-binding peptide
  MOD_RES (1), (3), (35), (36): Xaa is C or S
XGXARVVMNEYQKYIVNSSDDIFLVSIPSLQTPAXXPKPVT

SEQ ID NO: 10940 - protein, 39 aa, Artificial Sequence
  GFR-binding peptide
  MOD_RES (1), (3), (37), (38): Xaa is C or S
  MOD_RES (15), (16), (17), (18), (19): Xaa is A or G
  MOD_RES (20), (21), (22), (23): Xaa is A or G or is absent
XGXARVVMNEYQKYXXXXXXXXXIFLVSIPSLQTPAXXP

SEQ ID NO: 10941 - protein, 36 aa, Artificial Sequence
  GFR-binding peptide
  MOD_RES (2), (4), (36): Xaa is C or S
RXGXGEVVMDEYQKYVVKENEDIFLMSIPSLETPVX

SEQ ID NO: 10942 - protein, 36 aa, Artificial Sequence; identical to SEQ ID NO: 3537
  GFR-binding peptide
  MOD_RES (32), (33): Xaa is C or S

SEQ ID NO: 10943 - protein, 35 aa, Artificial Sequence
  GFR-binding peptide
  MOD_RES (1), (3), (35): Xaa is C or S
XGXGEVVMDEYQKYVVKENEDIFLMSIPSLETPVX

SEQ ID NO: 10944 - protein, 40 aa, Artificial Sequence
  GFR-binding peptide
  MOD_RES (1), (35), (36): Xaa is C or S
  MOD_RES (13), (14), (15), (16), (17): Xaa is A or G
  MOD_RES (18), (19), (20), (21): Xaa is A or G or is absent
XARVVMNEYQKYXXXXXXXXXIFLVSIPSLQTPAXXPKPV

SEQ ID NO: 10945 - protein, 38 aa, Artificial Sequence
  GFR-binding peptide
  MOD_RES (1), (3), (34), (35): Xaa is C or S
XKXSKVIMEYQKYIKPTKGIIFLISIPSLDQSVXXPSA

SEQ ID NO: 10946 - protein, 37 aa, Artificial Sequence
  GFR-binding peptide
  MOD_RES (34), (34): Xaa is C or S
  MOD_RES (12), (13), (14), (15), (16): Xaa is A or G
  MOD_RES (17), (18), (19), (20): Xaa is A or G or is absent
SRVVMNNSLQEXXXXXXXXXYYLVTLPELKTPAXTPK

SEQ ID NO: 10947 - protein, 43 aa, Artificial Sequence
  GFR-binding peptide
  MOD_RES (1), (3), (37), (38): Xaa is C or S
  MOD_RES (15), (16), (17), (18), (19): Xaa is A or G
  MOD_RES (20), (21), (22), (23): Xaa is A or G or is absent
XGXSEVVMDRYKKLXXXXXXXXXFYLISIANLRTPVXXTPPTS

SEQ ID NO: 10948 - protein, 35 aa, Artificial Sequence
  GFR-binding peptide
  MOD_RES (1), (35): Xaa is C or S
  MOD_RES (13), (14), (15), (16), (17): Xaa is A or G
  MOD_RES (18), (19), (20), (21): Xaa is A or G or is absent
XGEVVMDNSLQEXXXXXXXXXYYLMTLPELETPVX

SEQ ID NO: 10949 - protein, 36 aa, Artificial Sequence
  GFR-binding peptide
  MOD_RES (2), (4), (36): Xaa is C or S
RXGXGEVVMDNSLQEVVKENEDYYLMTLPELETPVX

SEQ ID NO: 10950 - protein, 41 aa, Artificial Sequence
  GFR-binding peptide
  MOD_RES (2), (36), (37): Xaa is C or S
  MOD_RES (14), (15), (16), (17), (18): Xaa is A or G
  MOD_RES (19), (20), (21), (22): Xaa is A or G or is absent
GXSEVVMDQYNKLXXXXXXXXXLYLISIASLRTPVXXTPPT

SEQ ID NO: 10951 - protein, 35 aa, Artificial Sequence
  GFR-binding peptide
  MOD_RES (2), (34), (35): Xaa is C or S
GXSEVVMDNSLQEVVNNASDYYLITLPELRTPVXX

SEQ ID NO: 10952 - protein, 39 aa, Artificial Sequence
  GFR-binding peptide
  MOD_RES (1), (33), (34): Xaa is C or S
XSEVVMDEYQKYVVNNASDIFLISIPSLRTPVXXTPPTS

SEQ ID NO: 10953 - protein, 42 aa, Artificial Sequence
  GFR-binding peptide
  MOD_RES (1), (3), (37), (38): Xaa is C or S
  MOD_RES (15), (16), (17), (18), (19): Xaa is A or G
  MOD_RES (20), (21), (22), (23): Xaa is A or G or is absent
XGXARVVMNNSLQEXXXXXXXXXYYLVTLPELQTPAXXPKPV

SEQ ID NO: 10954 - protein, 40 aa, Artificial Sequence
  GFR-binding peptide
  MOD_RES (1), (3), (37), (38): Xaa is C or S
  MOD_RES (15), (16), (17), (18), (19): Xaa is A or G
  MOD_RES (20), (21), (22), (23): Xaa is A or G or is absent
XGXGEVVMDNSLQEXXXXXXXXXYYLMTLPELETPVXXAK

SEQ ID NO: 10955 - protein, 37 aa, Artificial Sequence
  GFR-binding peptide
  MOD_RES (2), (36), (37): Xaa is C or S
  MOD_RES (14), (15), (16), (17), (18): Xaa is A or G
  MOD_RES (19), (20), (21), (22): Xaa is A or G or is absent
GXGEVVMENSLQEXXXXXXXXXYYLMTLPELETPVXX

SEQ ID NO: 10956 - protein, 34 aa, Artificial Sequence; identical to SEQ ID NO: 3547
  GFR-binding peptide
  MOD_RES (2), (33), (34): Xaa is C or S

SEQ ID NO: 10957 - protein, 38 aa, Artificial Sequence
  GFR-binding peptide
  MOD_RES (33), (34): Xaa is C or S
  MOD_RES (11), (12), (13), (14), (15): Xaa is A or G
  MOD_RES (16), (17), (18), (19): Xaa is A or G or is absent
RVVMNNSLQEXXXXXXXXXYYVVPLPELKTPAXXPKPV

SEQ ID NO: 10958 - protein, 34 aa, Artificial Sequence
  GFR-binding peptide
  MOD_RES (1), (3): Xaa is C or S
XGXSRVVMNNSLQEIVNSSDDYYLVTLPELKTPA

SEQ ID NO: 10959 - protein, 39 aa, Artificial Sequence; identical to SEQ ID NO: 3548
  GFR-binding peptide
  MOD_RES (1), (35), (36): Xaa is C or S
  MOD_RES (13), (14), (15), (16), (17): Xaa is A or G
  MOD_RES (18), (19), (20), (21): Xaa is A or G or is absent

SEQ ID NO: 10960 - protein, 34 aa, Artificial Sequence; identical to SEQ ID NO: 3549
  GFR-binding peptide
  MOD_RES (2), (2): Xaa is C or S
  MOD_RES (13), (14), (15), (16), (17): Xaa is A or G
  MOD_RES (18), (19), (20), (21): Xaa is A or G or is absent

SEQ ID NO: 10961 - protein, 43 aa, Artificial Sequence
  GFR-binding peptide
  MOD_RES (1), (3), (37), (38): Xaa is C or S
  MOD_RES (15), (16), (17), (18), (19): Xaa is A or G
  MOD_RES (20), (21), (22), (23): Xaa is A or G or is absent
XGXGEVVMDNSLQEXXXXXXXXXYYLMTLPELETPVXXAKPIK

SEQ ID NO: 10962 - protein, 32 aa, Artificial Sequence
  GFR-binding peptide
  MOD_RES (1), (1): Xaa is C or S
XSRVVMNNSLQEIVNSSDDYYVVPLPELKTPA

SEQ ID NO: 10963 - protein, 37 aa, Artificial Sequence
  GFR-binding peptide
  MOD_RES (1), (3), (35), (36): Xaa is C or S
XGXSEVVMDNSLQEVVNNASDYYLITLPELRTPVXXT

SEQ ID NO: 10964 - protein, 36 aa, Artificial Sequence
  GFR-binding peptide
  MOD_RES (2), (4), (36): Xaa is C or S
HXGXSRVVMNEYQKYIVNSSDDIFLVSIPSLKTPAX

SEQ ID NO: 10965 - protein, 40 aa, Artificial Sequence; identical to SEQ ID NO: 3550
  GFR-binding peptide
  MOD_RES (2), (4), (38), (39): Xaa is C or S
  MOD_RES (16), (17), (18), (19), (20): Xaa is A or G
  MOD_RES (21), (22), (23), (24): Xaa is A or G or is absent

SEQ ID NO: 10966 - protein, 38 aa, Artificial Sequence
  GFR-binding peptide
  MOD_RES (32), (33): Xaa is C or S
GEVVMDNSLQEVVKENEDYYVMPLPELETPVXXAKPIK

SEQ ID NO: 10967 - protein, 36 aa, Artificial Sequence
  GFR-binding peptide
  MOD_RES (1), (34), (35): Xaa is C or S
  MOD_RES (12), (13), (14), (15), (16): Xaa is A or G
  MOD_RES (17), (18), (19), (20): Xaa is A or G or is absent
XSKVIMEYQKYXXXXXXXXXIFLISIPSLDQSVXXP

SEQ ID NO: 10968 - protein, 37 aa, Artificial Sequence
  GFR-binding peptide
  MOD_RES (2), (4), (36): Xaa is C or S
HXGXSRVVMNEYQKYIVNSSDDIFLVSIPSLKTPAXT

SEQ ID NO: 10969 - protein, 39 aa, Artificial Sequence
  GFR-binding peptide
  MOD_RES (34), (35): Xaa is C or S
  MOD_RES (12), (13), (14), (15), (16): Xaa is A or G
  MOD_RES (17), (18), (19), (20): Xaa is A or G or is absent
ARVVMNEYQKYXXXXXXXXXIFLVSIPSLQTPAXXPKPV

SEQ ID NO: 10970 - protein, 43 aa, Artificial Sequence
  GFR-binding peptide
  MOD_RES (1), (3), (37): Xaa is C or S
  MOD_RES (15), (16), (17), (18), (19): Xaa is A or G
  MOD_RES (20), (21), (22), (23): Xaa is A or G or is absent
XGXSRVVMNNSLQEXXXXXXXXXYYLVTLPELKTPAXTPKTVH

SEQ ID NO: 10971 - protein, 34 aa, Artificial Sequence; identical to SEQ ID NO: 3551
  GFR-binding peptide
  MOD_RES (32), (33): Xaa is C or S

SEQ ID NO: 10972 - protein, 31 aa, Artificial Sequence
  GFR-binding peptide
  MOD_RES (31), (31): Xaa is C or S
EVVMDNSLQEVVKENEDYYVMPLPELETPVX

SEQ ID NO: 10973 - protein, 37 aa, Artificial Sequence
  GFR-binding peptide
  MOD_RES (1), (3), (35), (36): Xaa is C or S
XGXSEVVMDEYQKYVVNNASDIFLISIPSLRTPVXXT

SEQ ID NO: 10974 - protein, 38 aa, Artificial Sequence
  GFR-binding peptide
  MOD_RES (34), (35): Xaa is C or S
  MOD_RES (12), (13), (14), (15), (16): Xaa is A or G
  MOD_RES (17), (18), (19), (20): Xaa is A or G or is absent
SRVVMNNSLQEXXXXXXXXXYYLVTLPELKTPAXXPKP

SEQ ID NO: 10975 - protein, 34 aa, Artificial Sequence
  GFR-binding peptide
  MOD_RES (1), (3): Xaa is C or S
XGXSRVVMNEYQKYIVNSSDDIFLVSIPSLKTPA

SEQ ID NO: 10976 - protein, 39 aa, Artificial Sequence; identical to SEQ ID NO: 3556
  GFR-binding peptide
  MOD_RES (2), (33), (34): Xaa is C or S

SEQ ID NO: 10977 - protein, 41 aa, Artificial Sequence
  GFR-binding peptide
  MOD_RES (1), (3), (35), (36): Xaa is C or S
XGXGEVVMDNSLQEVVKENEDYYVMPLPELETPVXXAKPIK

SEQ ID NO: 10978 - protein, 30 aa, Artificial Sequence
  GFR-binding peptide
EVVMENSLQEVVKDYEDYYVMPLPELETPV

SEQ ID NO: 10979 - protein, 39 aa, Artificial Sequence; identical to SEQ ID NO: 3560
  GFR-binding peptide
  MOD_RES (1), (3), (37), (38): Xaa is C or S
  MOD_RES (15), (16), (17), (18), (19): Xaa is A or G
  MOD_RES (20), (21), (22), (23): Xaa is A or G or is absent

SEQ ID NO: 10980 - protein, 35 aa, Artificial Sequence; identical to SEQ ID NO: 3562
  GFR-binding peptide
  MOD_RES (2), (4): Xaa is C or S

SEQ ID NO: 10981 - protein, 36 aa, Artificial Sequence; identical to SEQ ID NO: 3563
  GFR-binding peptide
  MOD_RES (31), (32): Xaa is C or S

SEQ ID NO: 10982 - protein, 33 aa, Artificial Sequence
  GFR-binding peptide
  MOD_RES (32), (33): Xaa is C or S
SEVVMDRYKKLVVNNASDFYLISIANLRTPVXX

SEQ ID NO: 10983 - protein, 36 aa, Artificial Sequence
  GFR-binding peptide
  MOD_RES (2), (34): Xaa is C or S
GXSRVVMNNSLQEIVNSSDDYYLVTLPELKTPAXTP

SEQ ID NO: 10984 - protein, 35 aa, Artificial Sequence
  GFR-binding peptide
  MOD_RES (1), (3), (34), (35): Xaa is C or S
XKXSKVVMNSLQEVKPTRGVYYLITLPELDQPVXX

SEQ ID NO: 10985 - protein, 36 aa, Artificial Sequence
  GFR-binding peptide
  MOD_RES (1), (35), (36): Xaa is C or S
  MOD_RES (13), (14), (15), (16), (17): Xaa is A or G
  MOD_RES (18), (19), (20), (21): Xaa is A or G or is absent
XGEVVMENSLQEXXXXXXXXXYYLMTLPELETPVXX

SEQ ID NO: 10986 - protein, 35 aa, Artificial Sequence
  GFR-binding peptide
  MOD_RES (1), (3), (35): Xaa is C or S
XGXGEVVMDNSLQEVVKENEDYYLMTLPELETPVX

SEQ ID NO: 10987 - protein, 43 aa, Artificial Sequence
  GFR-binding peptide
  MOD_RES (2), (4), (38), (39): Xaa is C or S
  MOD_RES (16), (17), (18), (19), (20): Xaa is A or G
  MOD_RES (21), (22), (23), (24): Xaa is A or G or is absent
RXGXSEVVMDNSLQEXXXXXXXXXYYLITLPELRTPVXXTPPT

SEQ ID NO: 10988 - protein, 30 aa, Artificial Sequence; identical to SEQ ID NO: 3571
  GFR-binding peptide

SEQ ID NO: 10989 - protein, 36 aa, Artificial Sequence
  GFR-binding peptide
  MOD_RES (2), (34), (35): Xaa is C or S
GXSRVVMNNSLQEIVNSSDDYYLVTLPELKTPAXXP

SEQ ID NO: 10990 - protein, 40 aa, Artificial Sequence
  GFR-binding peptide
  MOD_RES (2), (34), (35): Xaa is C or S
GXARVVMNNSLQEIVNSSDDYYVVPLPELQTPAXXPKPVT

SEQ ID NO: 10991 - protein, 39 aa, Artificial Sequence
  GFR-binding peptide
  MOD_RES (2), (4), (38), (39): Xaa is C or S
  MOD_RES (16), (17), (18), (19), (20): Xaa is A or G
  MOD_RES (21), (22), (23), (24): Xaa is A or G or is absent
HXGXARVVMNNSLQEXXXXXXXXXYYLVTLPELQTPAXX

SEQ ID NO: 10992 - protein, 38 aa, Artificial Sequence; identical to SEQ ID NO: 3573
  GFR-binding peptide
  MOD_RES (2), (4), (35), (36): Xaa is C or S

SEQ ID NO: 10993 - protein, 32 aa, Artificial Sequence
  GFR-binding peptide
  MOD_RES (2), (2): Xaa is C or S
KXSKVVMNSLQEVKPTRGVYYVIPLPELDQPV

SEQ ID NO: 10994 - protein, 36 aa, Artificial Sequence; identical to SEQ ID NO: 3575
  GFR-binding peptide
  MOD_RES (2), (35), (36): Xaa is C or S
  MOD_RES (13), (14), (15), (16), (17): Xaa is A or G
  MOD_RES (18), (19), (20), (21): Xaa is A or G or is absent

SEQ ID NO: 10995 - protein, 40 aa, Artificial Sequence; identical to SEQ ID NO: 3576
  GFR-binding peptide
  MOD_RES (2), (36), (37): Xaa is C or S
  MOD_RES (14), (15), (16), (17), (18): Xaa is A or G
  MOD_RES (19), (20), (21), (22): Xaa is A or G or is absent

SEQ ID NO: 10996 - protein, 35 aa, Artificial Sequence
  GFR-binding peptide
  MOD_RES (2), (34), (35): Xaa is C or S
GXSEVVMDEYQKYVVNNASDIFLISIPSLRTPVXX

SEQ ID NO: 10997 - protein, 37 aa, Artificial Sequence
  GFR-binding peptide
  MOD_RES (31), (31): Xaa is C or S
RVVMNNSLQEIVNSSDDYYLVTLPELKTPAXTPKTVH

SEQ ID NO: 10998 - protein, 37 aa, Artificial Sequence
  GFR-binding peptide
  MOD_RES (2), (34), (35): Xaa is C or S
GXGEVVMEEYQKYVVKDYEDIFLMSIPSLETPVXXAK

SEQ ID NO: 10999 - protein, 36 aa, Artificial Sequence; identical to SEQ ID NO: 3589
  GFR-binding peptide
  MOD_RES (1), (3), (36): Xaa is C or S
  MOD_RES (14), (15), (16), (17), (18): Xaa is A or G
  MOD_RES (19), (20), (21), (22): Xaa is A or G or is absent

SEQ ID NO: 11000 - protein, 41 aa, Artificial Sequence
  GFR-binding peptide
  MOD_RES (2), (35), (36): Xaa is C or S
  MOD_RES (13), (14), (15), (16), (17): Xaa is A or G
  MOD_RES (18), (19), (20), (21): Xaa is A or G or is absent
KXSKVVMEYQKYXXXXXXXXXIFLISIPSLDQPVXXPSASA

SEQ ID NO: 11001 - protein, 37 aa, Artificial Sequence
  GFR-binding peptide
  MOD_RES (2), (34), (35): Xaa is C or S
GXSRVVMNEYQKYIVNSSDDIFLVSIPSLKTPAXXPK

SEQ ID NO: 11002 - protein, 40 aa, Artificial Sequence
  GFR-binding peptide
  MOD_RES (1), (3), (36), (37): Xaa is C or S
  MOD_RES (14), (15), (16), (17), (18): Xaa is A or G
  MOD_RES (19), (20), (21), (22): Xaa is A or G or is absent
XKXSRVIMEYQKYXXXXXXXXXIFLISIPSLAQPVXXPAA

SEQ ID NO: 11003 - protein, 37 aa, Artificial Sequence
  GFR-binding peptide
  MOD_RES (2), (4), (35), (36): Xaa is C or S
SXKXSKVVMEYQKYVKPTRGVIFLISIPSLDQPVXXP

SEQ ID NO: 11004 - protein, 38 aa, Artificial Sequence; identical to SEQ ID NO: 3596
  GFR-binding peptide
  MOD_RES (2), (4), (36): Xaa is C or S

SEQ ID NO: 11005 - protein, 34 aa, Artificial Sequence
  GFR-binding peptide
  MOD_RES (34), (34): Xaa is C or S
  MOD_RES (12), (13), (14), (15), (16): Xaa is A or G
  MOD_RES (17), (18), (19), (20): Xaa is A or G or is absent
GEVVMENSLQEXXXXXXXXXYYLMTLPELETPVX

SEQ ID NO: 11006 - protein, 32 aa, Artificial Sequence; identical to SEQ ID NO: 3599
  GFR-binding peptide
  MOD_RES (31), (32): Xaa is C or S

SEQ ID NO: 11007 - protein, 42 aa, Artificial Sequence; identical to SEQ ID NO: 3601
  GFR-binding peptide
  MOD_RES (1), (3), (36), (37): Xaa is C or S
  MOD_RES (14), (15), (16), (17), (18): Xaa is A or G
  MOD_RES (19), (20), (21), (22): Xaa is A or G or is absent

SEQ ID NO: 11008 - protein, 35 aa, Artificial Sequence
  GFR-binding peptide
  MOD_RES (31), (32): Xaa is C or S
RVVMNNSLQEIVNSSDDYYLVTLPELQTPAXXPKP

SEQ ID NO: 11009 - protein, 37 aa, Artificial Sequence
  GFR-binding peptide
  MOD_RES (2), (4), (36): Xaa is C or S
HXGXSRVVMNNSLQEIVNSSDDYYLVTLPELKTPAXT

SEQ ID NO: 11010 - protein, 41 aa, Artificial Sequence
  GFR-binding peptide
  MOD_RES (2), (4), (37), (38): Xaa is C or S
  MOD_RES (15), (16), (17), (18), (19): Xaa is A or G
  MOD_RES (20), (21), (22), (23): Xaa is A or G or is absent
SXKXSKVIMNSLQEXXXXXXXXXYYVIPLPELDQSVXXPSA

SEQ ID NO: 11011 - protein, 38 aa, Artificial Sequence
  GFR-binding peptide
  MOD_RES (1), (34), (35): Xaa is C or S
  MOD_RES (12), (13), (14), (15), (16): Xaa is A or G
  MOD_RES (17), (18), (19), (20): Xaa is A or G or is absent
XSKVVMEYQKYXXXXXXXXXIFLISIPSLDQPVXXPSA

SEQ ID NO: 11012 - protein, 37 aa, Artificial Sequence
  GFR-binding peptide
  MOD_RES (1), (35), (36): Xaa is C or S
  MOD_RES (13), (14), (15), (16), (17): Xaa is A or G
  MOD_RES (18), (19), (20), (21): Xaa is A or G or is absent
XGEVVMEEYQKYXXXXXXXXXIFLMSIPSLETPVXXA

SEQ ID NO: 11013 - protein, 41 aa, Artificial Sequence; identical to SEQ ID NO: 3608
  GFR-binding peptide
  MOD_RES (1), (3), (35), (36): Xaa is C or S

SEQ ID NO: 11014 - protein, 40 aa, Artificial Sequence
  GFR-binding peptide
  MOD_RES (34), (35): Xaa is C or S
  MOD_RES (12), (13), (14), (15), (16): Xaa is A or G
  MOD_RES (17), (18), (19), (20): Xaa is A or G or is absent
GEVVMDNSLQEXXXXXXXXXYYVMPLPELETPVXXAKPIK

SEQ ID NO: 11015 - protein, 32 aa, Artificial Sequence
  GFR-binding peptide
  MOD_RES (1), (1): Xaa is C or S
XSEVVMDEYQKYVVNNASDIFLISIPSLRTPV

SEQ ID NO: 11016 - protein, 39 aa, Artificial Sequence; identical to SEQ ID NO: 3609
  GFR-binding peptide
  MOD_RES (1), (3), (34), (35): Xaa is C or S

SEQ ID NO: 11017 - protein, 34 aa, Artificial Sequence
  GFR-binding peptide
  MOD_RES (2), (34): Xaa is C or S
GXGEVVMDNSLQEVVKENEDYYVMPLPELETPVX

SEQ ID NO: 11018 - protein, 38 aa, Artificial Sequence
  GFR-binding peptide
  MOD_RES (1), (33), (34): Xaa is C or S
XSEVVMDEYQKYVVNNASDIFLISIPSLRTPVXXTPPT

SEQ ID NO: 11019 - protein, 36 aa, Artificial Sequence
  GFR-binding peptide
  MOD_RES (1), (35), (36): Xaa is C or S
  MOD_RES (13), (14), (15), (16), (17): Xaa is A or G
  MOD_RES (18), (19), (20), (21): Xaa is A or G or is absent
XARVVMNNSLQEXXXXXXXXXYYLVTLPELQTPAXX

SEQ ID NO: 11020 - protein, 40 aa, Artificial Sequence
  GFR-binding peptide
  MOD_RES (34), (35): Xaa is C or S
  MOD_RES (12), (13), (14), (15), (16): Xaa is A or G
  MOD_RES (17), (18), (19), (20): Xaa is A or G or is absent
GEVVMDNSLQEXXXXXXXXXYYLMTLPELETPVXXAKPIK

SEQ ID NO: 11021 - protein, 31 aa, Artificial Sequence; identical to SEQ ID NO: 3611
  GFR-binding peptide

SEQ ID NO: 11022 - protein, 40 aa, Artificial Sequence
  GFR-binding peptide
  MOD_RES (2), (34): Xaa is C or S
GXSRVVMNNSLQEIVNSSDDYYLVTLPELKTPAXTPKTVH

SEQ ID NO: 11023 - protein, 35 aa, Artificial Sequence
  GFR-binding peptide
  MOD_RES (2), (33), (34): Xaa is C or S
KXSRVIMNSLQEVKPKRGVYYVIPLPELAQPVXXP

SEQ ID NO: 11024 - protein, 37 aa, Artificial Sequence
  GFR-binding peptide
  MOD_RES (2), (4): Xaa is C or S
  MOD_RES (16), (17), (18), (19), (20): Xaa is A or G
  MOD_RES (21), (22), (23), (24): Xaa is A or G or is absent
HXGXARVVMNNSLQEXXXXXXXXXYYVVPLPELQTPA

SEQ ID NO: 11025 - protein, 39 aa, Artificial Sequence
  GFR-binding peptide
  MOD_RES (1), (33), (34): Xaa is C or S
XGEVVMDEYQKYVVKENEDIFLMSIPSLETPVXXAKPIK

SEQ ID NO: 11026 - protein, 37 aa, Artificial Sequence
  GFR-binding peptide
  MOD_RES (2), (36), (37): Xaa is C or S
  MOD_RES (14), (15), (16), (17), (18): Xaa is A or G
  MOD_RES (19), (20), (21), (22): Xaa is A or G or is absent
GXGEVVMEEYQKYXXXXXXXXXIFLMSIPSLETPVXX

SEQ ID NO: 11027 - protein, 38 aa, Artificial Sequence
  GFR-binding peptide
  MOD_RES (2), (34), (35): Xaa is C or S
GXSEVVMDQYNKLVVNNASDLYLISIASLRTPVXXTPP

SEQ ID NO: 11028 - protein, 37 aa, Artificial Sequence
  GFR-binding peptide
  MOD_RES (2), (34), (35): Xaa is C or S
GXGEVVMENSLQEVVKDYEDYYVMPLPELETPVXXAK

SEQ ID NO: 11029 - protein, 34 aa, Artificial Sequence
  GFR-binding peptide
  MOD_RES (1), (33), (34): Xaa is C or S
XSEVVMDEYQKYVVNNASDIFLISIPSLRTPVXX

SEQ ID NO: 11030 - protein, 34 aa, Artificial Sequence; identical to SEQ ID NO: 3615
  GFR-binding peptide
  MOD_RES (31), (32): Xaa is C or S

SEQ ID NO: 11031 - protein, 39 aa, Artificial Sequence
  GFR-binding peptide
  MOD_RES (2), (36), (37): Xaa is C or S
  MOD_RES (14), (15), (16), (17), (18): Xaa is A or G
  MOD_RES (19), (20), (21), (22): Xaa is A or G or is absent
GXGEVVMDNSLQEXXXXXXXXXYYVMPLPELETPVXXAK

SEQ ID NO: 11032 - protein, 36 aa, Artificial Sequence
  GFR-binding peptide
  MOD_RES (31), (32): Xaa is C or S
EVVMDNSLQEVVKENEDYYLMTLPELETPVXXAKPI

SEQ ID NO: 11033 - protein, 37 aa, Artificial Sequence
  GFR-binding peptide
  MOD_RES (2), (4), (36), (37): Xaa is C or S
HXGXARVVMNNSLQEIVNSSDDYYVVPLPELQTPAXX

SEQ ID NO: 11034 - protein, 35 aa, Artificial Sequence
  GFR-binding peptide
  MOD_RES (33), (34): Xaa is C or S
  MOD_RES (11), (12), (13), (14), (15): Xaa is A or G
  MOD_RES (16), (17), (18), (19): Xaa is A or G or is absent
EVVMDEYQKYXXXXXXXXXIFLISIPSLRTPVXXT

SEQ ID NO: 11035 - protein, 38 aa, Artificial Sequence; identical to SEQ ID NO: 3618
  GFR-binding peptide
  MOD_RES (33), (34): Xaa is C or S
  MOD_RES (11), (12), (13), (14), (15): Xaa is A or G
  MOD_RES (16), (17), (18), (19): Xaa is A or G or is absent

SEQ ID NO: 11036 - protein, 37 aa, Artificial Sequence
  GFR-binding peptide
  MOD_RES (1), (35), (36): Xaa is C or S
  MOD_RES (13), (14), (15), (16), (17): Xaa is A or G
  MOD_RES (18), (19), (20), (21): Xaa is A or G or is absent
XSEVVMDRYKKLXXXXXXXXXFYLISIANLRTPVXXT

SEQ ID NO: 11037 - protein, 40 aa, Artificial Sequence; identical to SEQ ID NO: 3621
  GFR-binding peptide
  MOD_RES (2), (4), (37), (38): Xaa is C or S
  MOD_RES (15), (16), (17), (18), (19): Xaa is A or G
  MOD_RES (20), (21), (22), (23): Xaa is A or G or is absent

SEQ ID NO: 11038 - protein, 30 aa, Artificial Sequence
  GFR-binding peptide
RVVMNNSLQEIVNSSDDYYLVTLPELKTPA

SEQ ID NO: 11039 - protein, 38 aa, Artificial Sequence
  GFR-binding peptide
  MOD_RES (1), (3), (37), (38): Xaa is C or S
  MOD_RES (15), (16), (17), (18), (19): Xaa is A or G
  MOD_RES (20), (21), (22), (23): Xaa is A or G or is absent
XGXARVVMNNSLQEXXXXXXXXXYYVVPLPELQTPAXX

SEQ ID NO: 11040 - protein, 39 aa, Artificial Sequence
  GFR-binding peptide
  MOD_RES (2), (4), (36), (37): Xaa is C or S
HXGXARVVMNNSLQEIVNSSDDYYVVPLPELQTPAXXPK

SEQ ID NO: 11041 - protein, 39 aa, Artificial Sequence
  GFR-binding peptide
  MOD_RES (33), (34): Xaa is C or S
  MOD_RES (11), (12), (13), (14), (15): Xaa is A or G
  MOD_RES (16), (17), (18), (19): Xaa is A or G or is absent
EVVMDEYQKYXXXXXXXXXIFLMSIPSLETPVXXAKPIK

SEQ ID NO: 11042 - protein, 41 aa, Artificial Sequence
  GFR-binding peptide
  MOD_RES (2), (35), (36): Xaa is C or S
  MOD_RES (13), (14), (15), (16), (17): Xaa is A or G
  MOD_RES (18), (19), (20), (21): Xaa is A or G or is absent
KXSRVIMNSLQEXXXXXXXXXYYVIPLPELAQPVXXPAASA

SEQ ID NO: 11043 - protein, 33 aa, Artificial Sequence; identical to SEQ ID NO: 3626
  GFR-binding peptide
  MOD_RES (1), (33): Xaa is C or S

SEQ ID NO: 11044 - protein, 43 aa, Artificial Sequence
  GFR-binding peptide
  MOD_RES (2), (4), (38), (39): Xaa is C or S
  MOD_RES (16), (17), (18), (19), (20): Xaa is A or G
  MOD_RES (21), (22), (23), (24): Xaa is A or G or is absent
RXGXGEVVMDNSLQEXXXXXXXXXYYLMTLPELETPVXXAKPI

SEQ ID NO: 11045 - protein, 43 aa, Artificial Sequence; identical to SEQ ID NO: 3628
  GFR-binding peptide
  MOD_RES (1), (3), (37), (38): Xaa is C or S
  MOD_RES (15), (16), (17), (18), (19): Xaa is A or G
  MOD_RES (20), (21), (22), (23): Xaa is A or G or is absent

SEQ ID NO: 11046 - protein, 42 aa, Artificial Sequence
  GFR-binding peptide
  MOD_RES (2), (4), (36), (37): Xaa is C or S
RXGXGEVVMENSLQEVVKDYEDYYVMPLPELETPVXXAKPIS

SEQ ID NO: 11047 - protein, 38 aa, Artificial Sequence; identical to SEQ ID NO: 3630
  GFR-binding peptide
  MOD_RES (33), (34): Xaa is C or S
  MOD_RES (11), (12), (13), (14), (15): Xaa is A or G
  MOD_RES (16), (17), (18), (19): Xaa is A or G or is absent

SEQ ID NO: 11048 - protein, 34 aa, Artificial Sequence; identical to SEQ ID NO: 3631
  GFR-binding peptide
  MOD_RES (1), (33), (34): Xaa is C or S

SEQ ID NO: 11049 - protein, 37 aa, Artificial Sequence
  GFR-binding peptide
  MOD_RES (2), (34), (35): Xaa is C or S
GXSRVVMNNSLQEIVNSSDDYYLVTLPELKTPAXXPK

SEQ ID NO: 11050 - protein, 34 aa, Artificial Sequence
  GFR-binding peptide
  MOD_RES (2), (33), (34): Xaa is C or S
KXSKVIMNSLQEIKPTKGIYYVIPLPELDQSVXX

SEQ ID NO: 11051 - protein, 38 aa, Artificial Sequence
  GFR-binding peptide
  MOD_RES (2), (33), (34): Xaa is C or S
KXSKVIMNSLQEIKPTKGIYYVIPLPELDQSVXXPSAS

SEQ ID NO: 11052 - protein, 37 aa, Artificial Sequence
  GFR-binding peptide
  MOD_RES (33), (33): Xaa is C or S
  MOD_RES (11), (12), (13), (14), (15): Xaa is A or G
  MOD_RES (16), (17), (18), (19): Xaa is A or G or is absent
RVVMNNSLQEXXXXXXXXXYYLVTLPELKTPAXTPKT

SEQ ID NO: 11053 - protein, 34 aa, Artificial Sequence
  GFR-binding peptide
  MOD_RES (32), (33): Xaa is C or S
SRVVMNNSLQEIVNSSDDYYLVTLPELKTPAXXP

SEQ ID NO: 11054 - protein, 35 aa, Artificial Sequence; identical to SEQ ID NO: 3637
  GFR-binding peptide
  MOD_RES (2), (35): Xaa is C or S
  MOD_RES (13), (14), (15), (16), (17): Xaa is A or G
  MOD_RES (18), (19), (20), (21): Xaa is A or G or is absent

SEQ ID NO: 11055 - protein, 37 aa, Artificial Sequence
  GFR-binding peptide
  MOD_RES (1), (33), (34): Xaa is C or S
XARVVMNNSLQEIVNSSDDYYLVTLPELQTPAXXPKP

SEQ ID NO: 11056 - protein, 36 aa, Artificial Sequence; identical to SEQ ID NO: 3639
  GFR-binding peptide
  MOD_RES (2), (4), (35), (36): Xaa is C or S

SEQ ID NO: 11057 - protein, 36 aa, Artificial Sequence; identical to SEQ ID NO: 3640
  GFR-binding peptide
  MOD_RES (1), (35), (36): Xaa is C or S
  MOD_RES (13), (14), (15), (16), (17): Xaa is A or G
  MOD_RES (18), (19), (20), (21): Xaa is A or G or is absent

SEQ ID NO: 11058 - protein, 42 aa, Artificial Sequence
  GFR-binding peptide
  MOD_RES (2), (4), (36): Xaa is C or S
HXGXSRVVMNNSLQEIVNSSDDYYLVTLPELKTPAXTPKTVH

SEQ ID NO: 11059 - protein, 32 aa, Artificial Sequence; identical to SEQ ID NO: 3643
  GFR-binding peptide
  MOD_RES (1), (1): Xaa is C or S

SEQ ID NO: 11060 - protein, 33 aa, Artificial Sequence
  GFR-binding peptide
  MOD_RES (32), (33): Xaa is C or S
ARVVMNNSLQEIVNSSDDYYVVPLPELQTPAXX

SEQ ID NO: 11061 - protein, 38 aa, Artificial Sequence; identical to SEQ ID NO: 3644
  GFR-binding peptide
  MOD_RES (1), (33), (34): Xaa is C or S

SEQ ID NO: 11062 - protein, 37 aa, Artificial Sequence; identical to SEQ ID NO: 3645
  GFR-binding peptide
  MOD_RES (31), (32): Xaa is C or S

SEQ ID NO: 11063 - protein, 40 aa, Artificial Sequence
  GFR-binding peptide
  MOD_RES (1), (3), (35), (36): Xaa is C or S
XGXGEVVMDNSLQEVVKENEDYYVMPLPELETPVXXAKPI

SEQ ID NO: 11064 - protein, 38 aa, Artificial Sequence; identical to SEQ ID NO: 3648
  GFR-binding peptide
  MOD_RES (2), (36), (37): Xaa is C or S
  MOD_RES (14), (15), (16), (17), (18): Xaa is A or G
  MOD_RES (19), (20), (21), (22): Xaa is A or G or is absent

SEQ ID NO: 11065 - protein, 37 aa, Artificial Sequence; identical to SEQ ID NO: 3649
  GFR-binding peptide
  MOD_RES (1), (34), (35): Xaa is C or S
  MOD_RES (12), (13), (14), (15), (16): Xaa is A or G
  MOD_RES (17), (18), (19), (20): Xaa is A or G or is absent

SEQ ID NO: 11066 - protein, 31 aa, Artificial Sequence
  GFR-binding peptide
  MOD_RES (31), (31): Xaa is C or S
RVVMNNSLQEIVNSSDDYYLVTLPELQTPAX

SEQ ID NO: 11067 - protein, 35 aa, Artificial Sequence
  GFR-binding peptide
  MOD_RES (33), (34): Xaa is C or S
  MOD_RES (11), (12), (13), (14), (15): Xaa is A or G
  MOD_RES (16), (17), (18), (19): Xaa is A or G or is absent
EVVMEEYQKYXXXXXXXXXIFLMSIPSLETPVXXA

SEQ ID NO: 11068 - protein, 42 aa, Artificial Sequence
  GFR-binding peptide
  MOD_RES (1), (3), (37): Xaa is C or S
  MOD_RES (15), (16), (17), (18), (19): Xaa is A or G
  MOD_RES (20), (21), (22), (23): Xaa is A or G or is absent
XGXSRVVMNNSLQEXXXXXXXXXYYLVTLPELKTPAXTPKTV

SEQ ID NO: 11069 - protein, 31 aa, Artificial Sequence; identical to SEQ ID NO: 3652
  GFR-binding peptide

SEQ ID NO: 11070 - protein, 37 aa, Artificial Sequence; identical to SEQ ID NO: 3653
  GFR-binding peptide
  MOD_RES (2), (34), (35): Xaa is C or S

SEQ ID NO: 11071 - protein, 36 aa, Artificial Sequence
  GFR-binding peptide
  MOD_RES (33), (34): Xaa is C or S
  MOD_RES (11), (12), (13), (14), (15): Xaa is A or G
  MOD_RES (16), (17), (18), (19): Xaa is A or G or is absent
SKVVMNSLQEXXXXXXXXXYYLITLPELDQPVXXPS

SEQ ID NO: 11072 - protein, 36 aa, Artificial Sequence
  GFR-binding peptide
  MOD_RES (33), (34): Xaa is C or S
  MOD_RES (11), (12), (13), (14), (15): Xaa is A or G
  MOD_RES (16), (17), (18), (19): Xaa is A or G or is absent
EVVMDNSLQEXXXXXXXXXYYLITLPELRTPVXXTP

SEQ ID NO: 11073 - protein, 37 aa, Artificial Sequence
  GFR-binding peptide
  MOD_RES (2), (4), (36), (37): Xaa is C or S
RXGXGEVVMEEYQKYVVKDYEDIFLMSIPSLETPVXX

SEQ ID NO: 11074 - protein, 42 aa, Artificial Sequence
  GFR-binding peptide
  MOD_RES (2), (4), (36), (37): Xaa is C or S
RXGXSEVVMDEYQKYVVNNASDIFLISIPSLRTPVXXTPPTS

SEQ ID NO: 11075 - protein, 33 aa, Artificial Sequence
  GFR-binding peptide
  MOD_RES (33), (33): Xaa is C or S
  MOD_RES (11), (12), (13), (14), (15): Xaa is A or G
  MOD_RES (16), (17), (18), (19): Xaa is A or G or is absent
RVVMNNSLQEXXXXXXXXXYYVVPLPELKTPAX

SEQ ID NO: 11076 - protein, 40 aa, Artificial Sequence
  GFR-binding peptide
  MOD_RES (2), (35), (36): Xaa is C or S
  MOD_RES (13), (14), (15), (16), (17): Xaa is A or G
  MOD_RES (18), (19), (20), (21): Xaa is A or G or is absent
KXSKVVMEYQKYXXXXXXXXXIFLISIPSLDQPVXXPSAS

SEQ ID NO: 11077 - protein, 36 aa, Artificial Sequence; identical to SEQ ID NO: 3658
  GFR-binding peptide
  MOD_RES (32), (33): Xaa is C or S

SEQ ID NO: 11078 - protein, 37 aa, Artificial Sequence
  GFR-binding peptide
  MOD_RES (33), (34): Xaa is C or S
  MOD_RES (11), (12), (13), (14), (15): Xaa is A or G
  MOD_RES (16), (17), (18), (19): Xaa is A or G or is absent
EVVMENSLQEXXXXXXXXXYYVMPLPELETPVXXAKP

SEQ ID NO: 11079 - protein, 33 aa, Artificial Sequence
  GFR-binding peptide
  MOD_RES (33), (33): Xaa is C or S
  MOD_RES (11), (12), (13), (14), (15): Xaa is A or G
  MOD_RES (16), (17), (18), (19): Xaa is A or G or is absent
RVVMNNSLQEXXXXXXXXXYYLVTLPELKTPAX

SEQ ID NO: 11080 - protein, 40 aa, Artificial Sequence
  GFR-binding peptide
  MOD_RES (2), (4), (35), (36): Xaa is C or S
SXKXSKVVMNSLQEVKPTRGVYYVIPLPELDQPVXXPSAS

SEQ ID NO: 11081 - protein, 36 aa, Artificial Sequence; identical to SEQ ID NO: 3661
  GFR-binding peptide
  MOD_RES (1), (3), (35), (36): Xaa is C or S

SEQ ID NO: 11082 - protein, 36 aa, Artificial Sequence
  GFR-binding peptide
  MOD_RES (2), (4): Xaa is C or S
  MOD_RES (15), (16), (17), (18), (19): Xaa is A or G
  MOD_RES (20), (21), (22), (23): Xaa is A or G or is absent
SXKXSKVIMNSLQEXXXXXXXXXYYVIPLPELDQSV

SEQ ID NO: 11083 - protein, 37 aa, Artificial Sequence; identical to SEQ ID NO: 3663
  GFR-binding peptide
  MOD_RES (2), (4), (37): Xaa is C or S
  MOD_RES (15), (16), (17), (18), (19): Xaa is A or G
  MOD_RES (20), (21), (22), (23): Xaa is A or G or is absent

SEQ ID NO: 11084 - protein, 41 aa, Artificial Sequence; identical to SEQ ID NO: 3668
  GFR-binding peptide
  MOD_RES (1), (3), (35), (36): Xaa is C or S

SEQ ID NO: 11085 - protein, 34 aa, Artificial Sequence; identical to SEQ ID NO: 3669
  GFR-binding peptide
  MOD_RES (33), (34): Xaa is C or S
  MOD_RES (11), (12), (13), (14), (15): Xaa is A or G
  MOD_RES (16), (17), (18), (19): Xaa is A or G or is absent

SEQ ID NO: 11086 - protein, 38 aa, Artificial Sequence
  GFR-binding peptide
  MOD_RES (1), (35), (36): Xaa is C or S
  MOD_RES (13), (14), (15), (16), (17): Xaa is A or G
  MOD_RES (18), (19), (20), (21): Xaa is A or G or is absent
XSEVVMDEYQKYXXXXXXXXXIFLISIPSLRTPVXXTP

SEQ ID NO: 11087 - protein, 42 aa, Artificial Sequence
  GFR-binding peptide
  MOD_RES (1), (3), (37), (38): Xaa is C or S
  MOD_RES (15), (16), (17), (18), (19): Xaa is A or G
  MOD_RES (20), (21), (22), (23): Xaa is A or G or is absent
XGXGEVVMENSLQEXXXXXXXXXYYLMTLPELETPVXXAKPI

SEQ ID NO: 11088 - protein, 32 aa, Artificial Sequence
  GFR-binding peptide
  MOD_RES (1), (1): Xaa is C or S
XGEVVMENSLQEVVKDYEDYYLMTLPELETPV

SEQ ID NO: 11089 - protein, 32 aa, Artificial Sequence
  GFR-binding peptide
  MOD_RES (11), (12), (13), (14), (15): Xaa is A or G
  MOD_RES (16), (17), (18), (19): Xaa is A or G or is absent
RVVMNNSLQEXXXXXXXXXYYVVPLPELKTPA

SEQ ID NO: 11090 - protein, 36 aa, Artificial Sequence
  GFR-binding peptide
  MOD_RES (1), (3), (36): Xaa is C or S
  MOD_RES (14), (15), (16), (17), (18): Xaa is A or G
  MOD_RES (19), (20), (21), (22): Xaa is A or G or is absent
XKXSKVVMEYQKYXXXXXXXXXIFLISIPSLDQPVX

SEQ ID NO: 11091 - protein, 37 aa, Artificial Sequence
  GFR-binding peptide
  MOD_RES (31), (32): Xaa is C or S
EVVMDEYQKYVVNNASDIFLISIPSLRTPVXXTPPTS

SEQ ID NO: 11092 - protein, 40 aa, Artificial Sequence; identical to SEQ ID NO: 3675
  GFR-binding peptide
  MOD_RES (1), (35), (36): Xaa is C or S
  MOD_RES (13), (14), (15), (16), (17): Xaa is A or G
  MOD_RES (18), (19), (20), (21): Xaa is A or G or is absent

SEQ ID NO: 11093 - protein, 36 aa, Artificial Sequence
  GFR-binding peptide
  MOD_RES (31), (32): Xaa is C or S
EVVMDNSLQEVVNNASDYYLITLPELRTPVXXTPPT

SEQ ID NO: 11094 - protein, 32 aa, Artificial Sequence
  GFR-binding peptide
  MOD_RES (31), (32): Xaa is C or S
EVVMDNSLQEVVKENEDYYVMPLPELETPVXX

SEQ ID NO: 11095 - protein, 38 aa, Artificial Sequence
  GFR-binding peptide
  MOD_RES (1), (3), (34), (35): Xaa is C or S
XKXSKVVMEYQKYVKPTRGVIFLISIPSLDQPVXXPSA

SEQ ID NO: 11096 - protein, 34 aa, Artificial Sequence; identical to SEQ ID NO: 3682
  GFR-binding peptide
  MOD_RES (1), (32), (33): Xaa is C or S

SEQ ID NO: 11097 - protein, 35 aa, Artificial Sequence; identical to SEQ ID NO: 3685
  GFR-binding peptide
  MOD_RES (33), (34): Xaa is C or S
  MOD_RES (11), (12), (13), (14), (15): Xaa is A or G
  MOD_RES (16), (17), (18), (19): Xaa is A or G or is absent

SEQ ID NO: 11098 - protein, 40 aa, Artificial Sequence
  GFR-binding peptide
  MOD_RES (2), (36), (37): Xaa is C or S
  MOD_RES (14), (15), (16), (17), (18): Xaa is A or G
  MOD_RES (19), (20), (21), (22): Xaa is A or G or is absent
GXSRVVMNNSLQEXXXXXXXXXYYVVPLPELKTPAXXPKP

SEQ ID NO: 11099 - protein, 33 aa, Artificial Sequence
  GFR-binding peptide
  MOD_RES (1), (3): Xaa is C or S
XKXSKVVMEYQKYVKPTRGVIFLISIPSLDQPV

SEQ ID NO: 11100 - protein, 36 aa, Artificial Sequence
  GFR-binding peptide
  MOD_RES (1), (3): Xaa is C or S
  MOD_RES (15), (16), (17), (18), (19): Xaa is A or G
  MOD_RES (20), (21), (22), (23): Xaa is A or G or is absent
XGXGEVVMDEYQKYXXXXXXXXXIFLMSIPSLETPV

SEQ ID NO: 11101 - protein, 38 aa, Artificial Sequence
  GFR-binding peptide
  MOD_RES (33), (34): Xaa is C or S
  MOD_RES (11), (12), (13), (14), (15): Xaa is A or G
  MOD_RES (16), (17), (18), (19): Xaa is A or G or is absent
RVVMNNSLQEXXXXXXXXXYYLVTLPELKTPAXXPKPV

SEQ ID NO: 11102 - protein, 38 aa, Artificial Sequence; identical to SEQ ID NO: 3687
  GFR-binding peptide
  MOD_RES (1), (3), (37), (38): Xaa is C or S
  MOD_RES (15), (16), (17), (18), (19): Xaa is A or G
  MOD_RES (20), (21), (22), (23): Xaa is A or G or is absent

SEQ ID NO: 11103 - protein, 40 aa, Artificial Sequence
  GFR-binding peptide
  MOD_RES (1), (35), (36): Xaa is C or S
  MOD_RES (13), (14), (15), (16), (17): Xaa is A or G
  MOD_RES (18), (19), (20), (21): Xaa is A or G or is absent
XSRVVMNNSLQEXXXXXXXXXYYLVTLPELKTPAXXPKPV

SEQ ID NO: 11104 - protein, 34 aa, Artificial Sequence
  GFR-binding peptide
  MOD_RES (32), (33): Xaa is C or S
GEVVMDEYQKYVVKENEDIFLMSIPSLETPVXXA

SEQ ID NO: 11105 - protein, 32 aa, Artificial Sequence
  GFR-binding peptide
  MOD_RES (1), (32): Xaa is C or S
XSRVIMEYQKYVKPKRGVIFLISIPSLAQPVX

SEQ ID NO: 11106 - protein, 42 aa, Artificial Sequence
  GFR-binding peptide
  MOD_RES (1), (3), (37), (38): Xaa is C or S
  MOD_RES (15), (16), (17), (18), (19): Xaa is A or G
  MOD_RES (20), (21), (22), (23): Xaa is A or G or is absent
XGXGEVVMDNSLQEXXXXXXXXXYYLMTLPELETPVXXAKPI

SEQ ID NO: 11107 - protein, 38 aa, Artificial Sequence; identical to SEQ ID NO: 3688
  GFR-binding peptide
  MOD_RES (2), (35), (36): Xaa is C or S
  MOD_RES (13), (14), (15), (16), (17): Xaa is A or G
  MOD_RES (18), (19), (20), (21): Xaa is A or G or is absent

SEQ ID NO: 11108 - protein, 41 aa, Artificial Sequence; identical to SEQ ID NO: 3689
  GFR-binding peptide
  MOD_RES (2), (4), (35), (36): Xaa is C or S

SEQ ID NO: 11109 - protein, 37 aa, Artificial Sequence
  GFR-binding peptide
  MOD_RES (2), (34), (35): Xaa is C or S
GXARVVMNNSLQEIVNSSDDYYLVTLPELQTPAXXPK

SEQ ID NO: 11110 - protein, 40 aa, Artificial Sequence; identical to SEQ ID NO: 3691
  GFR-binding peptide
  MOD_RES (1), (3), (34), (35): Xaa is C or S

SEQ ID NO: 11111 - protein, 34 aa, Artificial Sequence; identical to SEQ ID NO: 3692
  GFR-binding peptide
  MOD_RES (2), (34): Xaa is C or S

SEQ ID NO: 11112 - protein, 41 aa, Artificial Sequence
  GFR-binding peptide
  MOD_RES (2), (4), (37), (38): Xaa is C or S
  MOD_RES (15), (16), (17), (18), (19): Xaa is A or G
  MOD_RES (20), (21), (22), (23): Xaa is A or G or is absent
SXKXSRVIMEYQKYXXXXXXXXXIFLISIPSLAQPVXXPAA

SEQ ID NO: 11113 - protein, 39 aa, Artificial Sequence
  GFR-binding peptide
  MOD_RES (1), (35): Xaa is C or S
  MOD_RES (13), (14), (15), (16), (17): Xaa is A or G
  MOD_RES (18), (19), (20), (21): Xaa is A or G or is absent
XSRVVMNNSLQEXXXXXXXXXYYLVTLPELKTPAXTPKT

SEQ ID NO: 11114 - protein, 38 aa, Artificial Sequence
  GFR-binding peptide
  MOD_RES (2), (4), (38): Xaa is C or S
  MOD_RES (16), (17), (18), (19), (20): Xaa is A or G
  MOD_RES (21), (22), (23), (24): Xaa is A or G or is absent
HXGXARVVMNNSLQEXXXXXXXXXYYVVPLPELQTPAX

SEQ ID NO: 11115 - protein, 41 aa, Artificial Sequence; identical to SEQ ID NO: 3695
  GFR-binding peptide
  MOD_RES (2), (35), (36): Xaa is C or S
  MOD_RES (13), (14), (15), (16), (17): Xaa is A or G
  MOD_RES (18), (19), (20), (21): Xaa is A or G or is absent

SEQ ID NO: 11116 - protein, 34 aa, Artificial Sequence; identical to SEQ ID NO: 3696
  GFR-binding peptide
  MOD_RES (1), (33), (34): Xaa is C or S

SEQ ID NO: 11117 - protein, 38 aa, Artificial Sequence
  GFR-binding peptide
  MOD_RES (33), (34): Xaa is C or S
  MOD_RES (11), (12), (13), (14), (15): Xaa is A or G
  MOD_RES (16), (17), (18), (19): Xaa is A or G or is absent
SKVVMNSLQEXXXXXXXXXYYVIPLPELDQPVXXPSAS

SEQ ID NO: 11118 - protein, 37 aa, Artificial Sequence; identical to SEQ ID NO: 3697
  GFR-binding peptide
  MOD_RES (31), (32): Xaa is C or S

SEQ ID NO: 11119 - protein, 40 aa, Artificial Sequence
  GFR-binding peptide
  MOD_RES (34), (35): Xaa is C or S
  MOD_RES (12), (13), (14), (15), (16): Xaa is A or G
  MOD_RES (17), (18), (19), (20): Xaa is A or G or is absent
GEVVMENSLQEXXXXXXXXXYYLMTLPELETPVXXAKPIS

SEQ ID NO: 11120 - protein, 41 aa, Artificial Sequence
  GFR-binding peptide
  MOD_RES (2), (4), (38), (39): Xaa is C or S
  MOD_RES (16), (17), (18), (19), (20): Xaa is A or G
  MOD_RES (21), (22), (23), (24): Xaa is A or G or is absent
HXGXSRVVMNNSLQEXXXXXXXXXYYLVTLPELKTPAXXPK

SEQ ID NO: 11121 - protein, 32 aa, Artificial Sequence
  GFR-binding peptide
  MOD_RES (31), (31): Xaa is C or S
RVVMNEYQKYIVNSSDDIFLVSIPSLKTPAXT

SEQ ID NO: 11122 - protein, 42 aa, Artificial Sequence; identical to SEQ ID NO: 3700
  GFR-binding peptide
  MOD_RES (2), (36), (37): Xaa is C or S
  MOD_RES (14), (15), (16), (17), (18): Xaa is A or G
  MOD_RES (19), (20), (21), (22): Xaa is A or G or is absent

SEQ ID NO: 11123 - protein, 36 aa, Artificial Sequence; identical to SEQ ID NO: 3702
  GFR-binding peptide
  MOD_RES (2), (4), (35), (36): Xaa is C or S

SEQ ID NO: 11124 - protein, 37 aa, Artificial Sequence
  GFR-binding peptide
  MOD_RES (2), (4), (37): Xaa is C or S
  MOD_RES (15), (16), (17), (18), (19): Xaa is A or G
  MOD_RES (20), (21), (22), (23): Xaa is A or G or is absent
SXKXSKVIMEYQKYXXXXXXXXXIFLISIPSLDQSVX

SEQ ID NO: 11125 - protein, 36 aa, Artificial Sequence; identical to SEQ ID NO: 3704
  GFR-binding peptide
  MOD_RES (31), (32): Xaa is C or S

SEQ ID NO: 11126 - protein, 37 aa, Artificial Sequence
  GFR-binding peptide
  MOD_RES (1), (3), (35): Xaa is C or S
XGXSRVVMNEYQKYIVNSSDDIFLVSIPSLKTPAXTP

SEQ ID NO: 11127 - protein, 37 aa, Artificial Sequence
  GFR-binding peptide
  MOD_RES (33), (34): Xaa is C or S
  MOD_RES (11), (12), (13), (14), (15): Xaa is A or G
  MOD_RES (16), (17), (18), (19): Xaa is A or G or is absent
SRVIMEYQKYXXXXXXXXXIFLISIPSLAQPVXXPAA

SEQ ID NO: 11128 - protein, 37 aa, Artificial Sequence
  GFR-binding peptide
  MOD_RES (33), (33): Xaa is C or S
  MOD_RES (11), (12), (13), (14), (15): Xaa is A or G
  MOD_RES (16), (17), (18), (19): Xaa is A or G or is absent
RVVMNNSLQEXXXXXXXXXYYVVPLPELKTPAXTPKT

SEQ ID NO: 11129 - protein, 40 aa, Artificial Sequence
  GFR-binding peptide
  MOD_RES (2), (4), (38), (39): Xaa is C or S
  MOD_RES (16), (17), (18), (19), (20): Xaa is A or G
  MOD_RES (21), (22), (23), (24): Xaa is A or G or is absent
RXGXSEVVMDRYKKLXXXXXXXXXFYLISIANLRTPVXXT

SEQ ID NO: 11130 - protein, 40 aa, Artificial Sequence; identical to SEQ ID NO: 3705
  GFR-binding peptide
  MOD_RES (2), (34), (35): Xaa is C or S

SEQ ID NO: 11131 - protein, 33 aa, Artificial Sequence; identical to SEQ ID NO: 3706
  GFR-binding peptide
  MOD_RES (32), (33): Xaa is C or S

SEQ ID NO: 11132 - protein, 36 aa, Artificial Sequence; identical to SEQ ID NO: 3707
  GFR-binding peptide
  MOD_RES (33), (34): Xaa is C or S
  MOD_RES (11), (12), (13), (14), (15): Xaa is A or G
  MOD_RES (16), (17), (18), (19): Xaa is A or G or is absent

SEQ ID NO: 11133 - protein, 37 aa, Artificial Sequence
  GFR-binding peptide
  MOD_RES (2), (33), (34): Xaa is C or S
KXSKVVMEYQKYVKPTRGVIFLISIPSLDQPVXXPSA

SEQ ID NO: 11134 - protein, 36 aa, Artificial Sequence
  GFR-binding peptide
  MOD_RES (33), (34): Xaa is C or S
  MOD_RES (11), (12), (13), (14), (15): Xaa is A or G
  MOD_RES (16), (17), (18), (19): Xaa is A or G or is absent
EVVMDNSLQEXXXXXXXXXYYVIPLPELRTPVXXTP

SEQ ID NO: 11135 - protein, 40 aa, Artificial Sequence
  GFR-binding peptide
  MOD_RES (34), (35): Xaa is C or S
  MOD_RES (12), (13), (14), (15), (16): Xaa is A or G
  MOD_RES (17), (18), (19), (20): Xaa is A or G or is absent
SRVVMNNSLQEXXXXXXXXXYYVVPLPELKTPAXXPKPVY

SEQ ID NO: 11136 - protein, 37 aa, Artificial Sequence
  GFR-binding peptide
  MOD_RES (2), (36), (37): Xaa is C or S
  MOD_RES (14), (15), (16), (17), (18): Xaa is A or G
  MOD_RES (19), (20), (21), (22): Xaa is A or G or is absent
GXSEVVMDRYKKLXXXXXXXXXFYLISIANLRTPVXX

SEQ ID NO: 11137 - protein, 37 aa, Artificial Sequence; identical to SEQ ID NO: 3710
  GFR-binding peptide
  MOD_RES (2), (4), (36), (37): Xaa is C or S

SEQ ID NO: 11138 - protein, 38 aa, Artificial Sequence; identical to SEQ ID NO: 3711
  GFR-binding peptide
  MOD_RES (1), (3), (36), (37): Xaa is C or S
  MOD_RES (14), (15), (16), (17), (18): Xaa is A or G
  MOD_RES (19), (20), (21), (22): Xaa is A or G or is absent

SEQ ID NO: 11139 - protein, 41 aa, Artificial Sequence
  GFR-binding peptide
  MOD_RES (1), (35), (36): Xaa is C or S
  MOD_RES (13), (14), (15), (16), (17): Xaa is A or G
  MOD_RES (18), (19), (20), (21): Xaa is A or G or is absent
XGEVVMEEYQKYXXXXXXXXXIFLMSIPSLETPVXXAKPIS

SEQ ID NO: 11140 - protein, 36 aa, Artificial Sequence; identical to SEQ ID NO: 3716
  GFR-binding peptide
  MOD_RES (31), (32): Xaa is C or S

SEQ ID NO: 11141 - protein, 39 aa, Artificial Sequence
  GFR-binding peptide
  MOD_RES (2), (36), (37): Xaa is C or S
  MOD_RES (14), (15), (16), (17), (18): Xaa is A or G
  MOD_RES (19), (20), (21), (22): Xaa is A or G or is absent
GXGEVVMDEYQKYXXXXXXXXXIFLMSIPSLETPVXXAK

SEQ ID NO: 11142 - protein, 39 aa, Artificial Sequence
  GFR-binding peptide
  MOD_RES (2), (4), (35), (36): Xaa is C or S
SXKXSRVIMNSLQEVKPKRGVYYLITLPELAQPVXXPAA

SEQ ID NO: 11143 - protein, 40 aa, Artificial Sequence
  GFR-binding peptide
  MOD_RES (1), (3), (35), (36): Xaa is C or S
XGXARVVMNNSLQEIVNSSDDYYVVPLPELQTPAXXPKPV

SEQ ID NO: 11144 - protein, 43 aa, Artificial Sequence
  GFR-binding peptide
  MOD_RES (1), (3), (37), (38): Xaa is C or S
  MOD_RES (15), (16), (17), (18), (19): Xaa is A or G
  MOD_RES (20), (21), (22), (23): Xaa is A or G or is absent
XGXGEVVMDNSLQEXXXXXXXXXYYVMPLPELETPVXXAKPIK

SEQ ID NO: 11145 - protein, 33 aa, Artificial Sequence
  GFR-binding peptide
  MOD_RES (12), (13), (14), (15), (16): Xaa is A or G
  MOD_RES (17), (18), (19), (20): Xaa is A or G or is absent
ARVVMNNSLQEXXXXXXXXXYYVVPLPELQTPA

SEQ ID NO: 11146 - protein, 32 aa, Artificial Sequence
  GFR-binding peptide
  MOD_RES (31), (32): Xaa is C or S
RVVMNNSLQEIVNSSDDYYLVTLPELQTPAXX

SEQ ID NO: 11147 - protein, 42 aa, Artificial Sequence
  GFR-binding peptide
  MOD_RES (2), (4), (38), (39): Xaa is C or S
  MOD_RES (16), (17), (18), (19), (20): Xaa is A or G
  MOD_RES (21), (22), (23), (24): Xaa is A or G or is absent
HXGXARVVMNNSLQEXXXXXXXXXYYLVTLPELQTPAXXPKP

SEQ ID NO: 11148 - protein, 34 aa, Artificial Sequence
  GFR-binding peptide
  MOD_RES (32), (33): Xaa is C or S
SRVVMNNSLQEIVNSSDDYYVVPLPELKTPAXXP

SEQ ID NO: 11149 - protein, 40 aa, Artificial Sequence
  GFR-binding peptide
  MOD_RES (2), (34): Xaa is C or S
GXSRVVMNEYQKYIVNSSDDIFLVSIPSLKTPAXTPKTVH

SEQ ID NO: 11150 - protein, 38 aa, Artificial Sequence
  GFR-binding peptide
  MOD_RES (1), (32), (33): Xaa is C or S
XSKVIMEYQKYIKPTKGIIFLISIPSLDQSVXXPSASA

SEQ ID NO: 11151 - protein, 41 aa, Artificial Sequence
  GFR-binding peptide
  MOD_RES (1), (3), (35), (36): Xaa is C or S
XGXSRVVMNNSLQEIVNSSDDYYVVPLPELKTPAXXPKPVY

SEQ ID NO: 11152 - protein, 35 aa, Artificial Sequence
  GFR-binding peptide
  MOD_RES (1), (3), (35): Xaa is C or S
XGXGEVVMEEYQKYVVKDYEDIFLMSIPSLETPVX

SEQ ID NO: 11153 - protein, 38 aa, Artificial Sequence; identical to SEQ ID NO: 3723
  GFR-binding peptide
  MOD_RES (2), (35), (36): Xaa is C or S
  MOD_RES (13), (14), (15), (16), (17): Xaa is A or G
  MOD_RES (18), (19), (20), (21): Xaa is A or G or is absent

SEQ ID NO: 11154 - protein, 34 aa, Artificial Sequence
  GFR-binding peptide
  MOD_RES (2), (4): Xaa is C or S
SXKXSKVVMNSLQEVKPTRGVYYVIPLPELDQPV

SEQ ID NO: 11155 - protein, 40 aa, Artificial Sequence
  GFR-binding peptide
  MOD_RES (1), (3), (36), (37): Xaa is C or S
  MOD_RES (14), (15), (16), (17), (18): Xaa is A or G
  MOD_RES (19), (20), (21), (22): Xaa is A or G or is absent
XKXSKVIMEYQKYXXXXXXXXXIFLISIPSLDQSVXXPSA

SEQ ID NO: 11156 - protein, 38 aa, Artificial Sequence
  GFR-binding peptide
  MOD_RES (1), (3), (37): Xaa is C or S
  MOD_RES (15), (16), (17), (18), (19): Xaa is A or G
  MOD_RES (20), (21), (22), (23): Xaa is A or G or is absent
XGXSRVVMNNSLQEXXXXXXXXXYYLVTLPELKTPAXT

SEQ ID NO: 11157 - protein, 39 aa, Artificial Sequence
  GFR-binding peptide
  MOD_RES (2), (33), (34): Xaa is C or S
KXSRVIMNSLQEVKPKRGVYYVIPLPELAQPVXXPAASA

SEQ ID NO: 11158 - protein, 40 aa, Artificial Sequence
  GFR-binding peptide
  MOD_RES (1), (3), (37), (38): Xaa is C or S
  MOD_RES (15), (16), (17), (18), (19): Xaa is A or G
  MOD_RES (20), (21), (22), (23): Xaa is A or G or is absent
XGXGEVVMENSLQEXXXXXXXXXYYVMPLPELETPVXXAK

SEQ ID NO: 11159 - protein, 39 aa, Artificial Sequence
  GFR-binding peptide
  MOD_RES (34), (35): Xaa is C or S
  MOD_RES (12), (13), (14), (15), (16): Xaa is A or G
  MOD_RES (17), (18), (19), (20): Xaa is A or G or is absent
SEVVMDEYQKYXXXXXXXXXIFLISIPSLRTPVXXTPPT

SEQ ID NO: 11160 - protein, 36 aa, Artificial Sequence
  GFR-binding peptide
  MOD_RES (1), (3), (35), (36): Xaa is C or S
XGXSRVVMNNSLQEIVNSSDDYYVVPLPELKTPAXX

SEQ ID NO: 11161 - protein, 36 aa, Artificial Sequence; identical to SEQ ID NO: 3728
  GFR-binding peptide
  MOD_RES (1), (3), (35), (36): Xaa is C or S

SEQ ID NO: 11162 - protein, 36 aa, Artificial Sequence
  GFR-binding peptide
  MOD_RES (2), (34): Xaa is C or S
GXSRVVMNEYQKYIVNSSDDIFLVSIPSLKTPAXTP

SEQ ID NO: 11163 - protein, 39 aa, Artificial Sequence
  GFR-binding peptide
  MOD_RES (1), (33), (34): Xaa is C or S
XGEVVMENSLQEVVKDYEDYYVMPLPELETPVXXAKPIS

SEQ ID NO: 11164 - protein, 38 aa, Artificial Sequence; identical to SEQ ID NO: 3731
  GFR-binding peptide
  MOD_RES (1), (35), (36): Xaa is C or S
  MOD_RES (13), (14), (15), (16), (17): Xaa is A or G
  MOD_RES (18), (19), (20), (21): Xaa is A or G or is absent

SEQ ID NO: 11165 - protein, 35 aa, Artificial Sequence
  GFR-binding peptide
  MOD_RES (2), (2): Xaa is C or S
  MOD_RES (14), (15), (16), (17), (18): Xaa is A or G
  MOD_RES (19), (20), (21), (22): Xaa is A or G or is absent
GXGEVVMDNSLQEXXXXXXXXXYYLMTLPELETPV

SEQ ID NO: 11166 - protein, 39 aa, Artificial Sequence; identical to SEQ ID NO: 3732
  GFR-binding peptide
  MOD_RES (33), (34): Xaa is C or S
  MOD_RES (11), (12), (13), (14), (15): Xaa is A or G
  MOD_RES (16), (17), (18), (19): Xaa is A or G or is absent

SEQ ID NO: 11167 - protein, 39 aa, Artificial Sequence
  GFR-binding peptide
  MOD_RES (1), (3), (35), (36): Xaa is C or S
XGXGEVVMENSLQEVVKDYEDYYVMPLPELETPVXXAKP

SEQ ID NO: 11168 - protein, 39 aa, Artificial Sequence; identical to SEQ ID NO: 3738
  GFR-binding peptide
  MOD_RES (34), (35): Xaa is C or S
  MOD_RES (12), (13), (14), (15), (16): Xaa is A or G
  MOD_RES (17), (18), (19), (20): Xaa is A or G or is absent

SEQ ID NO: 11169 - protein, 37 aa, Artificial Sequence
  GFR-binding peptide
  MOD_RES (2), (4): Xaa is C or S
  MOD_RES (16), (17), (18), (19), (20): Xaa is A or G
  MOD_RES (21), (22), (23), (24): Xaa is A or G or is absent
HXGXARVVMNEYQKYXXXXXXXXXIFLVSIPSLQTPA

SEQ ID NO: 11170 - protein, 38 aa, Artificial Sequence
  GFR-binding peptide
  MOD_RES (34), (35): Xaa is C or S
  MOD_RES (12), (13), (14), (15), (16): Xaa is A or G
  MOD_RES (17), (18), (19), (20): Xaa is A or G or is absent
SEVVMDNSLQEXXXXXXXXXYYLITLPELRTPVXXTPP

SEQ ID NO: 11171 - protein, 42 aa, Artificial Sequence
  GFR-binding peptide
  MOD_RES (1), (3), (37), (38): Xaa is C or S
  MOD_RES (15), (16), (17), (18), (19): Xaa is A or G
  MOD_RES (20), (21), (22), (23): Xaa is A or G or is absent
XGXARVVMNNSLQEXXXXXXXXXYYVVPLPELQTPAXXPKPV

SEQ ID NO: 11172 - protein, 33 aa, Artificial Sequence
  GFR-binding peptide
  MOD_RES (1), (3): Xaa is C or S
XKXSKVIMEYQKYIKPTKGIIFLISIPSLDQSV

SEQ ID NO: 11173 - protein, 35 aa, Artificial Sequence
  GFR-binding peptide
  MOD_RES (1), (3), (35): Xaa is C or S
XGXGEVVMENSLQEVVKDYEDYYLMTLPELETPVX

SEQ ID NO: 11174 - protein, 37 aa, Artificial Sequence
  GFR-binding peptide
  MOD_RES (1), (3), (35): Xaa is C or S
XGXSRVVMNNSLQEIVNSSDDYYLVTLPELKTPAXTP

SEQ ID NO: 11175 - protein, 42 aa, Artificial Sequence
  GFR-binding peptide
  MOD_RES (2), (4), (37), (38): Xaa is C or S
  MOD_RES (15), (16), (17), (18), (19): Xaa is A or G
  MOD_RES (20), (21), (22), (23): Xaa is A or G or is absent
SXKXSRVIMNSLQEXXXXXXXXXYYVIPLPELAQPVXXPAAS

SEQ ID NO: 11176 - protein, 34 aa, Artificial Sequence
  GFR-binding peptide
  MOD_RES (1), (1): Xaa is C or S
  MOD_RES (13), (14), (15), (16), (17): Xaa is A or G
  MOD_RES (18), (19), (20), (21): Xaa is A or G or is absent
XGEVVMDNSLQEXXXXXXXXXYYLMTLPELETPV

SEQ ID NO: 11177 - protein, 43 aa, Artificial Sequence
  GFR-binding peptide
  MOD_RES (2), (4), (38), (39): Xaa is C or S
  MOD_RES (16), (17), (18), (19), (20): Xaa is A or G
  MOD_RES (21), (22), (23), (24): Xaa is A or G or is absent
HXGXSRVVMNNSLQEXXXXXXXXXYYLVTLPELKTPAXXPKPV

SEQ ID NO: 11178 - protein, 36 aa, Artificial Sequence; identical to SEQ ID NO: 3747
  GFR-binding peptide
  MOD_RES (1), (3): Xaa is C or S
  MOD_RES (15), (16), (17), (18), (19): Xaa is A or G
  MOD_RES (20), (21), (22), (23): Xaa is A or G or is absent

SEQ ID NO: 11179 - protein, 37 aa, Artificial Sequence
  GFR-binding peptide
  MOD_RES (2), (35), (36): Xaa is C or S
  MOD_RES (13), (14), (15), (16), (17): Xaa is A or G
  MOD_RES (18), (19), (20), (21): Xaa is A or G or is absent
KXSRVIMNSLQEXXXXXXXXXYYVIPLPELAQPVXXP

SEQ ID NO: 11180 - protein, 42 aa, Artificial Sequence
  GFR-binding peptide
  MOD_RES (1), (3), (37), (38): Xaa is C or S
  MOD_RES (15), (16), (17), (18), (19): Xaa is A or G
  MOD_RES (20), (21), (22), (23): Xaa is A or G or is absent
XGXSRVVMNEYQKYXXXXXXXXXIFLVSIPSLKTPAXXPKPV

SEQ ID NO: 11181 - protein, 37 aa, Artificial Sequence; identical to SEQ ID NO: 3749
  GFR-binding peptide
  MOD_RES (2), (4), (37): Xaa is C or S
  MOD_RES (15), (16), (17), (18), (19): Xaa is A or G
  MOD_RES (20), (21), (22), (23): Xaa is A or G or is absent

SEQ ID NO: 11182 - protein, 39 aa, Artificial Sequence; identical to SEQ ID NO: 3750
  GFR-binding peptide
  MOD_RES (1), (3), (34), (35): Xaa is C or S

SEQ ID NO: 11183 - protein, 40 aa, Artificial Sequence
  GFR-binding peptide
  MOD_RES (1), (3), (37), (38): Xaa is C or S
  MOD_RES (15), (16), (17), (18), (19): Xaa is A or G
  MOD_RES (20), (21), (22), (23): Xaa is A or G or is absent
XGXGEVVMDNSLQEXXXXXXXXXYYVMPLPELETPVXXAK

SEQ ID NO: 11184 - protein, 36 aa, Artificial Sequence
  GFR-binding peptide
  MOD_RES (2), (4), (36): Xaa is C or S
RXGXGEVVMEEYQKYVVKDYEDIFLMSIPSLETPVX

SEQ ID NO: 11185 - protein, 37 aa, Artificial Sequence; identical to SEQ ID NO: 3752
  GFR-binding peptide
  MOD_RES (1), (35), (36): Xaa is C or S
  MOD_RES (13), (14), (15), (16), (17): Xaa is A or G
  MOD_RES (18), (19), (20), (21): Xaa is A or G or is absent

SEQ ID NO: 11186 - protein, 40 aa, Artificial Sequence
  GFR-binding peptide
  MOD_RES (1), (3), (37), (38): Xaa is C or S
  MOD_RES (15), (16), (17), (18), (19): Xaa is A or G
  MOD_RES (20), (21), (22), (23): Xaa is A or G or is absent
XGXGEVVMENSLQEXXXXXXXXXYYLMTLPELETPVXXAK

SEQ ID NO: 11187 - protein, 38 aa, Artificial Sequence; identical to SEQ ID NO: 3755
  GFR-binding peptide
  MOD_RES (2), (36), (37): Xaa is C or S
  MOD_RES (14), (15), (16), (17), (18): Xaa is A or G
  MOD_RES (19), (20), (21), (22): Xaa is A or G or is absent

SEQ ID NO: 11188 - protein, 37 aa, Artificial Sequence; identical to SEQ ID NO: 3756
  GFR-binding peptide
  MOD_RES (34), (35): Xaa is C or S
  MOD_RES (12), (13), (14), (15), (16): Xaa is A or G
  MOD_RES (17), (18), (19), (20): Xaa is A or G or is absent

SEQ ID NO: 11189 - protein, 38 aa, Artificial Sequence
  GFR-binding peptide
  MOD_RES (1), (3), (35), (36): Xaa is C or S
XGXARVVMNNSLQEIVNSSDDYYVVPLPELQTPAXXPK

SEQ ID NO: 11190 - protein, 37 aa, Artificial Sequence
  GFR-binding peptide
  MOD_RES (31), (32): Xaa is C or S
SKVVMNSLQEVKPTRGVYYLITLPELDQPVXXPSASA

SEQ ID NO: 11191 - protein, 38 aa, Artificial Sequence; identical to SEQ ID NO: 3758
  GFR-binding peptide
  MOD_RES (2), (4), (38): Xaa is C or S
  MOD_RES (16), (17), (18), (19), (20): Xaa is A or G
  MOD_RES (21), (22), (23), (24): Xaa is A or G or is absent

SEQ ID NO: 11192 - protein, 36 aa, Artificial Sequence; identical to SEQ ID NO: 3760
  GFR-binding peptide
  MOD_RES (2), (35), (36): Xaa is C or S
  MOD_RES (13), (14), (15), (16), (17): Xaa is A or G
  MOD_RES (18), (19), (20), (21): Xaa is A or G or is absent

SEQ ID NO: 11193 - protein, 37 aa, Artificial Sequence; identical to SEQ ID NO: 3761
  GFR-binding peptide
  MOD_RES (31), (32): Xaa is C or S

SEQ ID NO: 11194 - protein, 37 aa, Artificial Sequence; identical to SEQ ID NO: 3762
  GFR-binding peptide
  MOD_RES (34), (35): Xaa is C or S
  MOD_RES (12), (13), (14), (15), (16): Xaa is A or G
  MOD_RES (17), (18), (19), (20): Xaa is A or G or is absent

SEQ ID NO: 11195 - protein, 37 aa, Artificial Sequence
  GFR-binding peptide
  MOD_RES (1), (3), (36), (37): Xaa is C or S
  MOD_RES (14), (15), (16), (17), (18): Xaa is A or G
  MOD_RES (19), (20), (21), (22): Xaa is A or G or is absent
XKXSKVVMEYQKYXXXXXXXXXIFLISIPSLDQPVXX

SEQ ID NO: 11196 - protein, 41 aa, Artificial Sequence; identical to SEQ ID NO: 3765
  GFR-binding peptide
  MOD_RES (2), (36), (37): Xaa is C or S
  MOD_RES (14), (15), (16), (17), (18): Xaa is A or G
  MOD_RES (19), (20), (21), (22): Xaa is A or G or is absent

SEQ ID NO: 11197 - protein, 37 aa, Artificial Sequence; identical to SEQ ID NO: 3768
  GFR-binding peptide
  MOD_RES (33), (34): Xaa is C or S
  MOD_RES (11), (12), (13), (14), (15): Xaa is A or G
  MOD_RES (16), (17), (18), (19): Xaa is A or G or is absent

SEQ ID NO: 11198 - protein, 38 aa, Artificial Sequence; identical to SEQ ID NO: 3770
  GFR-binding peptide
  MOD_RES (2), (34), (35): Xaa is C or S

SEQ ID NO: 11199 - protein, 34 aa, Artificial Sequence; identical to SEQ ID NO: 3771
  GFR-binding peptide
  MOD_RES (33), (34): Xaa is C or S
  MOD_RES (11), (12), (13), (14), (15): Xaa is A or G
  MOD_RES (16), (17), (18), (19): Xaa is A or G or is absent

SEQ ID NO: 11200 - protein, 41 aa, Artificial Sequence
  GFR-binding peptide
  MOD_RES (1), (35), (36): Xaa is C or S
  MOD_RES (13), (14), (15), (16), (17): Xaa is A or G
  MOD_RES (18), (19), (20), (21): Xaa is A or G or is absent
XARVVMNNSLQEXXXXXXXXXYYVVPLPELQTPAXXPKPVT

SEQ ID NO: 11201 - protein, 33 aa, Artificial Sequence
  GFR-binding peptide
  MOD_RES (33), (33): Xaa is C or S
  MOD_RES (11), (12), (13), (14), (15): Xaa is A or G
  MOD_RES (16), (17), (18), (19): Xaa is A or G or is absent
SRVIMNSLQEXXXXXXXXXYYVIPLPELAQPVX

SEQ ID NO: 11202 - protein, 38 aa, Artificial Sequence
  GFR-binding peptide
  MOD_RES (33), (34): Xaa is C or S
  MOD_RES (11), (12), (13), (14), (15): Xaa is A or G
  MOD_RES (16), (17), (18), (19): Xaa is A or G or is absent
SKVVMEYQKYXXXXXXXXXIFLISIPSLDQPVXXPSAS

SEQ ID NO: 11203 - protein, 32 aa, Artificial Sequence
  GFR-binding peptide
  MOD_RES (31), (32): Xaa is C or S
RVVMNNSLQEIVNSSDDYYLVTLPELKTPAXX

SEQ ID NO: 11204 - protein, 42 aa, Artificial Sequence
  GFR-binding peptide
  MOD_RES (2), (4), (38): Xaa is C or S
  MOD_RES (16), (17), (18), (19), (20): Xaa is A or G
  MOD_RES (21), (22), (23), (24): Xaa is A or G or is absent
HXGXSRVVMNNSLQEXXXXXXXXXYYVVPLPELKTPAXTPKT

SEQ ID NO: 11205 - protein, 35 aa, Artificial Sequence
  GFR-binding peptide
  MOD_RES (2), (35): Xaa is C or S
  MOD_RES (13), (14), (15), (16), (17): Xaa is A or G
  MOD_RES (18), (19), (20), (21): Xaa is A or G or is absent
KXSRVIMEYQKYXXXXXXXXXIFLISIPSLAQPVX

SEQ ID NO: 11206 - protein, 37 aa, Artificial Sequence
  GFR-binding peptide
  MOD_RES (2), (36), (37): Xaa is C or S
  MOD_RES (14), (15), (16), (17), (18): Xaa is A or G
  MOD_RES (19), (20), (21), (22): Xaa is A or G or is absent
GXARVVMNEYQKYXXXXXXXXXIFLVSIPSLQTPAXX

SEQ ID NO: 11207 - protein, 36 aa, Artificial Sequence; identical to SEQ ID NO: 3777
  GFR-binding peptide
  MOD_RES (1), (35), (36): Xaa is C or S
  MOD_RES (13), (14), (15), (16), (17): Xaa is A or G
  MOD_RES (18), (19), (20), (21): Xaa is A or G or is absent

SEQ ID NO: 11208 - protein, 31 aa, Artificial Sequence; identical to SEQ ID NO: 3779
  GFR-binding peptide
  MOD_RES (1), (1): Xaa is C or S

SEQ ID NO: 11209 - protein, 39 aa, Artificial Sequence; identical to SEQ ID NO: 3781
  GFR-binding peptide
  MOD_RES (1), (3), (36), (37): Xaa is C or S
  MOD_RES (14), (15), (16), (17), (18): Xaa is A or G
  MOD_RES (19), (20), (21), (22): Xaa is A or G or is absent

SEQ ID NO: 11210 - protein, 36 aa, Artificial Sequence
  GFR-binding peptide
  MOD_RES (2), (34), (35): Xaa is C or S
GXGEVVMDNSLQEVVKENEDYYVMPLPELETPVXXA

SEQ ID NO: 11211 - protein, 38 aa, Artificial Sequence
  GFR-binding peptide
  MOD_RES (1), (32), (33): Xaa is C or S
XSRVIMNSLQEVKPKRGVYYLITLPELAQPVXXPAASA

SEQ ID NO: 11212 - protein, 35 aa, Artificial Sequence
  GFR-binding peptide
  MOD_RES (2), (4): Xaa is C or S
RXGXGEVVMDNSLQEVVKENEDYYVMPLPELETPV

SEQ ID NO: 11213 - protein, 40 aa, Artificial Sequence
  GFR-binding peptide
  MOD_RES (1), (3), (35), (36): Xaa is C or S
XGXGEVVMENSLQEVVKDYEDYYVMPLPELETPVXXAKPI

SEQ ID NO: 11214 - protein, 36 aa, Artificial Sequence; identical to SEQ ID NO: 3786
  GFR-binding peptide
  MOD_RES (1), (3): Xaa is C or S
  MOD_RES (15), (16), (17), (18), (19): Xaa is A or G
  MOD_RES (20), (21), (22), (23): Xaa is A or G or is absent

SEQ ID NO: 11215 - protein, 40 aa, Artificial Sequence
  GFR-binding peptide
  MOD_RES (1), (35), (36): Xaa is C or S
  MOD_RES (13), (14), (15), (16), (17): Xaa is A or G
  MOD_RES (18), (19), (20), (21): Xaa is A or G or is absent
XSEVVMDRYKKLXXXXXXXXXFYLISIANLRTPVXXTPPT

SEQ ID NO: 11216 - protein, 35 aa, Artificial Sequence; identical to SEQ ID NO: 3788
  GFR-binding peptide
  MOD_RES (2), (2): Xaa is C or S
  MOD_RES (14), (15), (16), (17), (18): Xaa is A or G
  MOD_RES (19), (20), (21), (22): Xaa is A or G or is absent

SEQ ID NO: 11217 - protein, 41 aa, Artificial Sequence; identical to SEQ ID NO: 3789
  GFR-binding peptide
  MOD_RES (2), (4), (36), (37): Xaa is C or S

SEQ ID NO: 11218 - protein, 33 aa, Artificial Sequence
  GFR-binding peptide
  MOD_RES (1), (32), (33): Xaa is C or S
XSKVIMEYQKYIKPTKGIIFLISIPSLDQSVXX

SEQ ID NO: 11219 - protein, 40 aa, Artificial Sequence; identical to SEQ ID NO: 3795
  GFR-binding peptide
  MOD_RES (2), (36), (37): Xaa is C or S
  MOD_RES (14), (15), (16), (17), (18): Xaa is A or G
  MOD_RES (19), (20), (21), (22): Xaa is A or G or is absent

SEQ ID NO: 11220 - protein, 37 aa, Artificial Sequence
  GFR-binding peptide
  MOD_RES (33), (34): Xaa is C or S
  MOD_RES (11), (12), (13), (14), (15): Xaa is A or G
  MOD_RES (16), (17), (18), (19): Xaa is A or G or is absent
EVVMDRYKKLXXXXXXXXXFYLISIANLRTPVXXTPP

SEQ ID NO: 11221 - protein, 36 aa, Artificial Sequence; identical to SEQ ID NO: 3797
  GFR-binding peptide
  MOD_RES (2), (4), (36): Xaa is C or S

SEQ ID NO: 11222 - protein, 35 aa, Artificial Sequence
  GFR-binding peptide
  MOD_RES (1), (32), (33): Xaa is C or S
XSKVVMNSLQEVKPTRGVYYLITLPELDQPVXXPS

SEQ ID NO: 11223 - protein, 37 aa, Artificial Sequence
  GFR-binding peptide
  MOD_RES (2), (36), (37): Xaa is C or S
  MOD_RES (14), (15), (16), (17), (18): Xaa is A or G
  MOD_RES (19), (20), (21), (22): Xaa is A or G or is absent
GXGEVVMDEYQKYXXXXXXXXXIFLMSIPSLETPVXX

SEQ ID NO: 11224 - protein, 39 aa, Artificial Sequence
  GFR-binding peptide
  MOD_RES (2), (35), (36): Xaa is C or S
  MOD_RES (13), (14), (15), (16), (17): Xaa is A or G
  MOD_RES (18), (19), (20), (21): Xaa is A or G or is absent
KXSRVIMNSLQEXXXXXXXXXYYLITLPELAQPVXXPAA

SEQ ID NO: 11225 - protein, 39 aa, Artificial Sequence; identical to SEQ ID NO: 3801
  GFR-binding peptide
  MOD_RES (33), (34): Xaa is C or S
  MOD_RES (11), (12), (13), (14), (15): Xaa is A or G
  MOD_RES (16), (17), (18), (19): Xaa is A or G or is absent

SEQ ID NO: 11226 - protein, 39 aa, Artificial Sequence
  GFR-binding peptide
  MOD_RES (2), (4), (38), (39): Xaa is C or S
  MOD_RES (16), (17), (18), (19), (20): Xaa is A or G
  MOD_RES (21), (22), (23), (24): Xaa is A or G or is absent
RXGXGEVVMENSLQEXXXXXXXXXYYLMTLPELETPVXX

SEQ ID NO: 11227 - protein, 34 aa, Artificial Sequence
  GFR-binding peptide
  MOD_RES (1), (1): Xaa is C or S
  MOD_RES (13), (14), (15), (16), (17): Xaa is A or G
  MOD_RES (18), (19), (20), (21): Xaa is A or G or is absent
XGEVVMEEYQKYXXXXXXXXXIFLMSIPSLETPV

SEQ ID NO: 11228 - protein, 35 aa, Artificial Sequence
  GFR-binding peptide
  MOD_RES (34), (35): Xaa is C or S
  MOD_RES (12), (13), (14), (15), (16): Xaa is A or G
  MOD_RES (17), (18), (19), (20): Xaa is A or G or is absent
GEVVMDNSLQEXXXXXXXXXYYVMPLPELETPVXX

SEQ ID NO: 11229 - protein, 34 aa, Artificial Sequence; identical to SEQ ID NO: 3803
  GFR-binding peptide
  MOD_RES (1), (33), (34): Xaa is C or S

SEQ ID NO: 11230 - protein, 39 aa, Artificial Sequence; identical to SEQ ID NO: 3805
  GFR-binding peptide
  MOD_RES (2), (4), (37), (38): Xaa is C or S
  MOD_RES (15), (16), (17), (18), (19): Xaa is A or G
  MOD_RES (20), (21), (22), (23): Xaa is A or G or is absent

SEQ ID NO: 11231 - protein, 39 aa, Artificial Sequence
  GFR-binding peptide
  MOD_RES (34), (35): Xaa is C or S
  MOD_RES (12), (13), (14), (15), (16): Xaa is A or G
  MOD_RES (17), (18), (19), (20): Xaa is A or G or is absent
GEVVMENSLQEXXXXXXXXXYYVMPLPELETPVXXAKPI

SEQ ID NO: 11232 - protein, 35 aa, Artificial Sequence; identical to SEQ ID NO: 3809
  GFR-binding peptide
  MOD_RES (1), (34), (35): Xaa is C or S
  MOD_RES (12), (13), (14), (15), (16): Xaa is A or G
  MOD_RES (17), (18), (19), (20): Xaa is A or G or is absent

SEQ ID NO: 11233 - protein, 36 aa, Artificial Sequence
  GFR-binding peptide
  MOD_RES (31), (32): Xaa is C or S
EVVMDNSLQEVVKENEDYYVMPLPELETPVXXAKPI

SEQ ID NO: 11234 - protein, 34 aa, Artificial Sequence
  GFR-binding peptide
  MOD_RES (1), (3): Xaa is C or S
XGXSEVVMDQYNKLVVNNASDLYLISIASLRTPV

SEQ ID NO: 11235 - protein, 42 aa, Artificial Sequence
  GFR-binding peptide
  MOD_RES (2), (4), (38), (39): Xaa is C or S
  MOD_RES (16), (17), (18), (19), (20): Xaa is A or G
  MOD_RES (21), (22), (23), (24): Xaa is A or G or is absent
RXGXSEVVMDNSLQEXXXXXXXXXYYLITLPELRTPVXXTPP

SEQ ID NO: 11236 - protein, 40 aa, Artificial Sequence
  GFR-binding peptide
  MOD_RES (34), (35): Xaa is C or S
  MOD_RES (12), (13), (14), (15), (16): Xaa is A or G
  MOD_RES (17), (18), (19), (20): Xaa is A or G or is absent
SRVVMNNSLQEXXXXXXXXXYYLVTLPELKTPAXXPKPVY

SEQ ID NO: 11237 - protein, 43 aa, Artificial Sequence
  GFR-binding peptide
  MOD_RES (2), (4), (38): Xaa is C or S
  MOD_RES (16), (17), (18), (19), (20): Xaa is A or G
  MOD_RES (21), (22), (23), (24): Xaa is A or G or is absent
HXGXSRVVMNEYQKYXXXXXXXXXIFLVSIPSLKTPAXTPKTV

SEQ ID NO: 11238 - protein, 32 aa, Artificial Sequence
  GFR-binding peptide
  MOD_RES (31), (32): Xaa is C or S
RVVMNNSLQEIVNSSDDYYVVPLPELQTPAXX

SEQ ID NO: 11239 - protein, 38 aa, Artificial Sequence; identical to SEQ ID NO: 3817
  GFR-binding peptide
  MOD_RES (1), (3), (36), (37): Xaa is C or S
  MOD_RES (14), (15), (16), (17), (18): Xaa is A or G
  MOD_RES (19), (20), (21), (22): Xaa is A or G or is absent

SEQ ID NO: 11240 - protein, 39 aa, Artificial Sequence; identical to SEQ ID NO: 3818
  GFR-binding peptide
  MOD_RES (1), (33), (34): Xaa is C or S

SEQ ID NO: 11241 - protein, 35 aa, Artificial Sequence; identical to SEQ ID NO: 3820
  GFR-binding peptide
  MOD_RES (2), (33), (34): Xaa is C or S

SEQ ID NO: 11242 - protein, 40 aa, Artificial Sequence
  GFR-binding peptide
  MOD_RES (2), (36), (37): Xaa is C or S
  MOD_RES (14), (15), (16), (17), (18): Xaa is A or G
  MOD_RES (19), (20), (21), (22): Xaa is A or G or is absent
GXSEVVMDNSLQEXXXXXXXXXYYLITLPELRTPVXXTPP

SEQ ID NO: 11243 - protein, 36 aa, Artificial Sequence; identical to SEQ ID NO: 3823
  GFR-binding peptide
  MOD_RES (2), (4), (36): Xaa is C or S

SEQ ID NO: 11244 - protein, 35 aa, Artificial Sequence; identical to SEQ ID NO: 3825
  GFR-binding peptide
  MOD_RES (31), (32): Xaa is C or S

SEQ ID NO: 11245 - protein, 37 aa, Artificial Sequence
  GFR-binding peptide
  MOD_RES (2), (34), (35): Xaa is C or S
GXGEVVMDEYQKYVVKENEDIFLMSIPSLETPVXXAK

SEQ ID NO: 11246 - protein, 40 aa, Artificial Sequence
  GFR-binding peptide
  MOD_RES (2), (34), (35): Xaa is C or S
GXSRVVMNNSLQEIVNSSDDYYVVPLPELKTPAXXPKPVY

SEQ ID NO: 11247 - protein, 36 aa, Artificial Sequence
  GFR-binding peptide
  MOD_RES (1), (32), (33): Xaa is C or S
XSRVIMEYQKYVKPKRGVIFLISIPSLAQPVXXPAA

SEQ ID NO: 11248 - protein, 32 aa, Artificial Sequence; identical to SEQ ID NO: 3829
  GFR-binding peptide
  MOD_RES (1), (1): Xaa is C or S

SEQ ID NO: 11249 - protein, 42 aa, Artificial Sequence
  GFR-binding peptide
  MOD_RES (2), (36), (37): Xaa is C or S
  MOD_RES (14), (15), (16), (17), (18): Xaa is A or G
  MOD_RES (19), (20), (21), (22): Xaa is A or G or is absent
GXGEVVMDNSLQEXXXXXXXXXYYLMTLPELETPVXXAKPIK

SEQ ID NO: 11250 - protein, 38 aa, Artificial Sequence
  GFR-binding peptide
  MOD_RES (2), (36), (37): Xaa is C or S
  MOD_RES (14), (15), (16), (17), (18): Xaa is A or G
  MOD_RES (19), (20), (21), (22): Xaa is A or G or is absent
GXGEVVMENSLQEXXXXXXXXXYYLMTLPELETPVXXA

SEQ ID NO: 11251 - protein, 33 aa, Artificial Sequence
  GFR-binding peptide
  MOD_RES (32), (33): Xaa is C or S
ARVVMNEYQKYIVNSSDDIFLVSIPSLQTPAXX

SEQ ID NO: 11252 - protein, 33 aa, Artificial Sequence
  GFR-binding peptide
  MOD_RES (32), (33): Xaa is C or S
SEVVMDNSLQEVVNNASDYYLITLPELRTPVXX

SEQ ID NO: 11253 - protein, 43 aa, Artificial Sequence; identical to SEQ ID NO: 3832
  GFR-binding peptide
  MOD_RES (1), (3), (37), (38): Xaa is C or S
  MOD_RES (15), (16), (17), (18), (19): Xaa is A or G
  MOD_RES (20), (21), (22), (23): Xaa is A or G or is absent

SEQ ID NO: 11254 - protein, 33 aa, Artificial Sequence
  GFR-binding peptide
  MOD_RES (33), (33): Xaa is C or S
  MOD_RES (11), (12), (13), (14), (15): Xaa is A or G
  MOD_RES (16), (17), (18), (19): Xaa is A or G or is absent
EVVMENSLQEXXXXXXXXXYYVMPLPELETPVX

SEQ ID NO: 11255 - protein, 40 aa, Artificial Sequence
  GFR-binding peptide
  MOD_RES (2), (4), (37), (38): Xaa is C or S
  MOD_RES (15), (16), (17), (18), (19): Xaa is A or G
  MOD_RES (20), (21), (22), (23): Xaa is A or G or is absent
SXKXSRVIMEYQKYXXXXXXXXXIFLISIPSLAQPVXXPA

SEQ ID NO: 11256 - protein, 37 aa, Artificial Sequence
  GFR-binding peptide
  MOD_RES (32), (33): Xaa is C or S
ARVVMNEYQKYIVNSSDDIFLVSIPSLQTPAXXPKPV

SEQ ID NO: 11257 - protein, 33 aa, Artificial Sequence
  GFR-binding peptide
  MOD_RES (12), (13), (14), (15), (16): Xaa is A or G
  MOD_RES (17), (18), (19), (20): Xaa is A or G or is absent
ARVVMNEYQKYXXXXXXXXXIFLVSIPSLQTPA

SEQ ID NO: 11258 - protein, 39 aa, Artificial Sequence
  GFR-binding peptide
  MOD_RES (1), (3), (35), (36): Xaa is C or S
XGXARVVMNNSLQEIVNSSDDYYVVPLPELQTPAXXPKP

SEQ ID NO: 11259 - protein, 34 aa, Artificial Sequence
  GFR-binding peptide
  MOD_RES (33), (34): Xaa is C or S
  MOD_RES (11), (12), (13), (14), (15): Xaa is A or G
  MOD_RES (16), (17), (18), (19): Xaa is A or G or is absent
EVVMDNSLQEXXXXXXXXXYYVMPLPELETPVXX

SEQ ID NO: 11260 - protein, 40 aa, Artificial Sequence; identical to SEQ ID NO: 3838
  GFR-binding peptide
  MOD_RES (1), (3), (35), (36): Xaa is C or S

SEQ ID NO: 11261 - protein, 33 aa, Artificial Sequence
  GFR-binding peptide
  MOD_RES (2), (2): Xaa is C or S
GXSEVVMDNSLQEVVNNASDYYLITLPELRTPV

SEQ ID NO: 11262 - protein, 39 aa, Artificial Sequence
  GFR-binding peptide
  MOD_RES (2), (33), (34): Xaa is C or S
KXSKVVMNSLQEVKPTRGVYYLITLPELDQPVXXPSASA

SEQ ID NO: 11263 - protein, 36 aa, Artificial Sequence
  GFR-binding peptide
  MOD_RES (1), (35), (36): Xaa is C or S
  MOD_RES (13), (14), (15), (16), (17): Xaa is A or G
  MOD_RES (18), (19), (20), (21): Xaa is A or G or is absent
XGEVVMDEYQKYXXXXXXXXXIFLMSIPSLETPVXX

SEQ ID NO: 11264 - protein, 39 aa, Artificial Sequence; identical to SEQ ID NO: 3840
  GFR-binding peptide
  MOD_RES (2), (34): Xaa is C or S

SEQ ID NO: 11265 - protein, 41 aa, Artificial Sequence
  GFR-binding peptide
  MOD_RES (1), (35): Xaa is C or S
  MOD_RES (13), (14), (15), (16), (17): Xaa is A or G
  MOD_RES (18), (19), (20), (21): Xaa is A or G or is absent
XSRVVMNNSLQEXXXXXXXXXYYVVPLPELKTPAXTPKTVH

SEQ ID NO: 11266 - protein, 40 aa, Artificial Sequence; identical to SEQ ID NO: 3845
  GFR-binding peptide
  MOD_RES (2), (34), (35): Xaa is C or S

SEQ ID NO: 11267 - protein, 34 aa, Artificial Sequence
  GFR-binding peptide
  MOD_RES (31), (32): Xaa is C or S
SRVIMEYQKYVKPKRGVIFLISIPSLAQPVXXPA

SEQ ID NO: 11268 - protein, 42 aa, Artificial Sequence
  GFR-binding peptide
  MOD_RES (2), (4), (36), (37): Xaa is C or S
RXGXGEVVMDNSLQEVVKENEDYYLMTLPELETPVXXAKPIK

SEQ ID NO: 11269 - protein, 38 aa, Artificial Sequence
  GFR-binding peptide
  MOD_RES (2), (4), (38): Xaa is C or S
  MOD_RES (16), (17), (18), (19), (20): Xaa is A or G
  MOD_RES (21), (22), (23), (24): Xaa is A or G or is absent
HXGXARVVMNEYQKYXXXXXXXXXIFLVSIPSLQTPAX

SEQ ID NO: 11270 - protein, 39 aa, Artificial Sequence
  GFR-binding peptide
  MOD_RES (2), (4), (36), (37): Xaa is C or S
RXGXGEVVMENSLQEVVKDYEDYYLMTLPELETPVXXAK

SEQ ID NO: 11271 - protein, 34 aa, Artificial Sequence; identical to SEQ ID NO: 3846
  GFR-binding peptide
  MOD_RES (2), (33), (34): Xaa is C or S

SEQ ID NO: 11272 - protein, 38 aa, Artificial Sequence
  GFR-binding peptide
  MOD_RES (2), (33), (34): Xaa is C or S
KXSKVVMNSLQEVKPTRGVYYVIPLPELDQPVXXPSAS

SEQ ID NO: 11273 - protein, 36 aa, Artificial Sequence; identical to SEQ ID NO: 3849
  GFR-binding peptide
  MOD_RES (33), (34): Xaa is C or S
  MOD_RES (11), (12), (13), (14), (15): Xaa is A or G
  MOD_RES (16), (17), (18), (19): Xaa is A or G or is absent

SEQ ID NO: 11274 - protein, 38 aa, Artificial Sequence
  GFR-binding peptide
  MOD_RES (1), (3), (35), (36): Xaa is C or S
XGXSRVVMNNSLQEIVNSSDDYYVVPLPELKTPAXXPK

SEQ ID NO: 11275 - protein, 37 aa, Artificial Sequence
  GFR-binding peptide
  MOD_RES (1), (35): Xaa is C or S
  MOD_RES (13), (14), (15), (16), (17): Xaa is A or G
  MOD_RES (18), (19), (20), (21): Xaa is A or G or is absent
XSRVVMNEYQKYXXXXXXXXXIFLVSIPSLKTPAXTP

SEQ ID NO: 11276 - protein, 35 aa, Artificial Sequence
  GFR-binding peptide
  MOD_RES (32), (33): Xaa is C or S
SRVVMNNSLQEIVNSSDDYYVVPLPELKTPAXXPK

SEQ ID NO: 11277 - protein, 34 aa, Artificial Sequence
  GFR-binding peptide
  MOD_RES (33), (34): Xaa is C or S
  MOD_RES (11), (12), (13), (14), (15): Xaa is A or G
  MOD_RES (16), (17), (18), (19): Xaa is A or G or is absent
RVVMNEYQKYXXXXXXXXXIFLVSIPSLQTPAXX

SEQ ID NO: 11278 - protein, 38 aa, Artificial Sequence
  GFR-binding peptide
  MOD_RES (2), (36), (37): Xaa is C or S
  MOD_RES (14), (15), (16), (17), (18): Xaa is A or G
  MOD_RES (19), (20), (21), (22): Xaa is A or G or is absent
GXSEVVMDRYKKLXXXXXXXXXFYLISIANLRTPVXXT

SEQ ID NO: 11279 - protein, 40 aa, Artificial Sequence
  GFR-binding peptide
  MOD_RES (1), (34), (35): Xaa is C or S
  MOD_RES (12), (13), (14), (15), (16): Xaa is A or G
  MOD_RES (17), (18), (19), (20): Xaa is A or G or is absent
XSKVIMNSLQEXXXXXXXXXYYVIPLPELDQSVXXPSASA

SEQ ID NO: 11280 - protein, 34 aa, Artificial Sequence
  GFR-binding peptide
  MOD_RES (34), (34): Xaa is C or S
  MOD_RES (12), (13), (14), (15), (16): Xaa is A or G
  MOD_RES (17), (18), (19), (20): Xaa is A or G or is absent
ARVVMNEYQKYXXXXXXXXXIFLVSIPSLQTPAX

SEQ ID NO: 11281 - protein, 35 aa, Artificial Sequence
  GFR-binding peptide
  MOD_RES (2), (34), (35): Xaa is C or S
GXGEVVMEEYQKYVVKDYEDIFLMSIPSLETPVXX

SEQ ID NO: 11282 - protein, 35 aa, Artificial Sequence
  GFR-binding peptide
  MOD_RES (31), (32): Xaa is C or S
SKVIMNSLQEIKPTKGIYYVIPLPELDQSVXXPSA

SEQ ID NO: 11283 - protein, 37 aa, Artificial Sequence
  GFR-binding peptide
  MOD_RES (34), (35): Xaa is C or S
  MOD_RES (12), (13), (14), (15), (16): Xaa is A or G
  MOD_RES (17), (18), (19), (20): Xaa is A or G or is absent
SEVVMDNSLQEXXXXXXXXXYYLITLPELRTPVXXTP

SEQ ID NO: 11284 - protein, 37 aa, Artificial Sequence
  GFR-binding peptide
  MOD_RES (1), (3), (34), (35): Xaa is C or S
XKXSKVVMEYQKYVKPTRGVIFLISIPSLDQPVXXPS

SEQ ID NO: 11285 - protein, 37 aa, Artificial Sequence
  GFR-binding peptide
  MOD_RES (33), (34): Xaa is C or S
  MOD_RES (11), (12), (13), (14), (15): Xaa is A or G
  MOD_RES (16), (17), (18), (19): Xaa is A or G or is absent
SRVIMNSLQEXXXXXXXXXYYVIPLPELAQPVXXPAA

SEQ ID NO: 11286 - protein, 37 aa, Artificial Sequence
  GFR-binding peptide
  MOD_RES (2), (4), (35), (36): Xaa is C or S
SXKXSRVIMNSLQEVKPKRGVYYVIPLPELAQPVXXP

SEQ ID NO: 11287 - protein, 36 aa, Artificial Sequence; identical to SEQ ID NO: 3855
  GFR-binding peptide
  MOD_RES (1), (3), (34), (35): Xaa is C or S

SEQ ID NO: 11288 - protein, 37 aa, Artificial Sequence
  GFR-binding peptide
  MOD_RES (2), (4), (35), (36): Xaa is C or S
SXKXSKVVMNSLQEVKPTRGVYYLITLPELDQPVXXP

SEQ ID NO: 11289 - protein, 34 aa, Artificial Sequence
  GFR-binding peptide
  MOD_RES (1), (3): Xaa is C or S
XGXSEVVMDNSLQEVVNNASDYYVIPLPELRTPV

SEQ ID NO: 11290 - protein, 34 aa, Artificial Sequence
  GFR-binding peptide
  MOD_RES (1), (1): Xaa is C or S
  MOD_RES (13), (14), (15), (16), (17): Xaa is A or G
  MOD_RES (18), (19), (20), (21): Xaa is A or G or is absent
XSEVVMDNSLQEXXXXXXXXXYYLITLPELRTPV

SEQ ID NO: 11291 - protein, 38 aa, Artificial Sequence; identical to SEQ ID NO: 3859
  GFR-binding peptide
  MOD_RES (34), (35): Xaa is C or S
  MOD_RES (12), (13), (14), (15), (16): Xaa is A or G
  MOD_RES (17), (18), (19), (20): Xaa is A or G or is absent

SEQ ID NO: 11292 - protein, 40 aa, Artificial Sequence; identical to SEQ ID NO: 3861
  GFR-binding peptide
  MOD_RES (34), (35): Xaa is C or S
  MOD_RES (12), (13), (14), (15), (16): Xaa is A or G
  MOD_RES (17), (18), (19), (20): Xaa is A or G or is absent

SEQ ID NO: 11293 - protein, 32 aa, Artificial Sequence
  GFR-binding peptide
  MOD_RES (31), (32): Xaa is C or S
EVVMDEYQKYVVNNASDIFLISIPSLRTPVXX

SEQ ID NO: 11294 - protein, 39 aa, Artificial Sequence
  GFR-binding peptide
  MOD_RES (2), (35), (36): Xaa is C or S
  MOD_RES (13), (14), (15), (16), (17): Xaa is A or G
  MOD_RES (18), (19), (20), (21): Xaa is A or G or is absent
KXSKVVMEYQKYXXXXXXXXXIFLISIPSLDQPVXXPSA

SEQ ID NO: 11295 - protein, 39 aa, Artificial Sequence
  GFR-binding peptide
  MOD_RES (1), (3), (35), (36): Xaa is C or S
XGXSEVVMDQYNKLVVNNASDLYLISIASLRTPVXXTPP

SEQ ID NO: 11296 - protein, 38 aa, Artificial Sequence; identical to SEQ ID NO: 3868
  GFR-binding peptide
  MOD_RES (1), (3), (35), (36): Xaa is C or S

SEQ ID NO: 11297 - protein, 37 aa, Artificial Sequence
  GFR-binding peptide
  MOD_RES (2), (4): Xaa is C or S
  MOD_RES (16), (17), (18), (19), (20): Xaa is A or G
  MOD_RES (21), (22), (23), (24): Xaa is A or G or is absent
RXGXSEVVMDNSLQEXXXXXXXXXYYVIPLPELRTPV

SEQ ID NO: 11298 - protein, 34 aa, Artificial Sequence
  GFR-binding peptide
  MOD_RES (33), (34): Xaa is C or S
  MOD_RES (11), (12), (13), (14), (15): Xaa is A or G
  MOD_RES (16), (17), (18), (19): Xaa is A or G or is absent
EVVMDEYQKYXXXXXXXXXIFLISIPSLRTPVXX

SEQ ID NO: 11299 - protein, 40 aa, Artificial Sequence
  GFR-binding peptide
  MOD_RES (2), (4), (36): Xaa is C or S
HXGXSRVVMNNSLQEIVNSSDDYYVVPLPELKTPAXTPKT

SEQ ID NO: 11300 - protein, 36 aa, Artificial Sequence
  GFR-binding peptide
  MOD_RES (32), (33): Xaa is C or S
SEVVMDEYQKYVVNNASDIFLISIPSLRTPVXXTPP

SEQ ID NO: 11301 - protein, 36 aa, Artificial Sequence; identical to SEQ ID NO: 3875
  GFR-binding peptide
  MOD_RES (2), (4), (36): Xaa is C or S

SEQ ID NO: 11302 - protein, 42 aa, Artificial Sequence; identical to SEQ ID NO: 3876
  GFR-binding peptide
  MOD_RES (2), (4), (37), (38): Xaa is C or S
  MOD_RES (15), (16), (17), (18), (19): Xaa is A or G
  MOD_RES (20), (21), (22), (23): Xaa is A or G or is absent

SEQ ID NO: 11303 - protein, 33 aa, Artificial Sequence; identical to SEQ ID NO: 3877
  GFR-binding peptide
  MOD_RES (32), (33): Xaa is C or S

SEQ ID NO: 11304 - protein, 38 aa, Artificial Sequence
  GFR-binding peptide
  MOD_RES (2), (4), (38): Xaa is C or S
  MOD_RES (16), (17), (18), (19), (20): Xaa is A or G
  MOD_RES (21), (22), (23), (24): Xaa is A or G or is absent
RXGXSEVVMDQYNKLXXXXXXXXXLYLISIASLRTPVX

SEQ ID NO: 11305 - protein, 35 aa, Artificial Sequence
  GFR-binding peptide
  MOD_RES (32), (33): Xaa is C or S
SEVVMDQYNKLVVNNASDLYLISIASLRTPVXXTP

SEQ ID NO: 11306 - protein, 39 aa, Artificial Sequence
  GFR-binding peptide
  MOD_RES (1), (3), (35), (36): Xaa is C or S
XGXSRVVMNNSLQEIVNSSDDYYVVPLPELKTPAXXPKP

SEQ ID NO: 11307 - protein, 39 aa, Artificial Sequence; identical to SEQ ID NO: 3883
  GFR-binding peptide
  MOD_RES (1), (3), (35), (36): Xaa is C or S

SEQ ID NO: 11308 - protein, 39 aa, Artificial Sequence
  GFR-binding peptide
  MOD_RES (2), (34), (35): Xaa is C or S
GXGEVVMDEYQKYVVKENEDIFLMSIPSLETPVXXAKPI

SEQ ID NO: 11309 - protein, 33 aa, Artificial Sequence; identical to SEQ ID NO: 3886
  GFR-binding peptide
  MOD_RES (2), (2): Xaa is C or S

SEQ ID NO: 11310 - protein, 38 aa, Artificial Sequence; identical to SEQ ID NO: 3888
  GFR-binding peptide
  MOD_RES (1), (3), (34), (35): Xaa is C or S

SEQ ID NO: 11311 - protein, 41 aa, Artificial Sequence
  GFR-binding peptide
  MOD_RES (1), (35), (36): Xaa is C or S
  MOD_RES (13), (14), (15), (16), (17): Xaa is A or G
  MOD_RES (18), (19), (20), (21): Xaa is A or G or is absent
XGEVVMDNSLQEXXXXXXXXXYYVMPLPELETPVXXAKPIK

SEQ ID NO: 11312 - protein, 37 aa, Artificial Sequence
  GFR-binding peptide
  MOD_RES (1), (3), (36), (37): Xaa is C or S
  MOD_RES (14), (15), (16), (17), (18): Xaa is A or G
  MOD_RES (19), (20), (21), (22): Xaa is A or G or is absent
XKXSKVIMEYQKYXXXXXXXXXIFLISIPSLDQSVXX

SEQ ID NO: 11313 - protein, 37 aa, Artificial Sequence
  GFR-binding peptide
  MOD_RES (1), (32), (33): Xaa is C or S
XSRVIMNSLQEVKPKRGVYYLITLPELAQPVXXPAAS

SEQ ID NO: 11314 - protein, 42 aa, Artificial Sequence
  GFR-binding peptide
  MOD_RES (2), (36): Xaa is C or S
  MOD_RES (14), (15), (16), (17), (18): Xaa is A or G
  MOD_RES (19), (20), (21), (22): Xaa is A or G or is absent
GXSRVVMNNSLQEXXXXXXXXXYYVVPLPELKTPAXTPKTVH

SEQ ID NO: 11315 - protein, 41 aa, Artificial Sequence
  GFR-binding peptide
  MOD_RES (1), (3), (35): Xaa is C or S
XGXSRVVMNNSLQEIVNSSDDYYVVPLPELKTPAXTPKTVH

SEQ ID NO: 11316 - protein, 40 aa, Artificial Sequence; identical to SEQ ID NO: 3895
  GFR-binding peptide
  MOD_RES (1), (3), (35), (36): Xaa is C or S

SEQ ID NO: 11317 - protein, 35 aa, Artificial Sequence
  GFR-binding peptide
  MOD_RES (31), (32): Xaa is C or S
RVVMNNSLQEIVNSSDDYYVVPLPELQTPAXXPKP

SEQ ID NO: 11318 - protein, 34 aa, Artificial Sequence; identical to SEQ ID NO: 3896
  GFR-binding peptide
  MOD_RES (1), (3): Xaa is C or S

SEQ ID NO: 11319 - protein, 42 aa, Artificial Sequence; identical to SEQ ID NO: 3898
  GFR-binding peptide
  MOD_RES (2), (4), (36), (37): Xaa is C or S

SEQ ID NO: 11320 - protein, 36 aa, Artificial Sequence; identical to SEQ ID NO: 3899
  GFR-binding peptide
  MOD_RES (2), (34), (35): Xaa is C or S

SEQ ID NO: 11321 - protein, 33 aa, Artificial Sequence
  GFR-binding peptide
  MOD_RES (12), (13), (14), (15), (16): Xaa is A or G
  MOD_RES (17), (18), (19), (20): Xaa is A or G or is absent
GEVVMDNSLQEXXXXXXXXXYYLMTLPELETPV

SEQ ID NO: 11322 - protein, 37 aa, Artificial Sequence; identical to SEQ ID NO: 3901
  GFR-binding peptide
  MOD_RES (2), (4), (35), (36): Xaa is C or S

SEQ ID NO: 11323 - protein, 38 aa, Artificial Sequence
  GFR-binding peptide
  MOD_RES (2), (34), (35): Xaa is C or S
GXSRVVMNNSLQEIVNSSDDYYLVTLPELKTPAXXPKP

SEQ ID NO: 11324 - protein, 30 aa, Artificial Sequence
  GFR-binding peptide
RVVMNNSLQEIVNSSDDYYLVTLPELQTPA

SEQ ID NO: 11325 - protein, 38 aa, Artificial Sequence
  GFR-binding peptide
  MOD_RES (1), (3), (36), (37): Xaa is C or S
  MOD_RES (14), (15), (16), (17), (18): Xaa is A or G
  MOD_RES (19), (20), (21), (22): Xaa is A or G or is absent
XKXSKVVMNSLQEXXXXXXXXXYYVIPLPELDQPVXXP

SEQ ID NO: 11326 - protein, 43 aa, Artificial Sequence
  GFR-binding peptide
  MOD_RES (2), (4), (38), (39): Xaa is C or S
  MOD_RES (16), (17), (18), (19), (20): Xaa is A or G
  MOD_RES (21), (22), (23), (24): Xaa is A or G or is absent
RXGXGEVVMENSLQEXXXXXXXXXYYVMPLPELETPVXXAKPI

SEQ ID NO: 11327 - protein, 37 aa, Artificial Sequence; identical to SEQ ID NO: 3907
  GFR-binding peptide
  MOD_RES (1), (3), (37): Xaa is C or S
  MOD_RES (15), (16), (17), (18), (19): Xaa is A or G
  MOD_RES (20), (21), (22), (23): Xaa is A or G or is absent

SEQ ID NO: 11328 - protein, 34 aa, Artificial Sequence; identical to SEQ ID NO: 3908
  GFR-binding peptide
  MOD_RES (32), (33): Xaa is C or S

SEQ ID NO: 11329 - protein, 35 aa, Artificial Sequence
  GFR-binding peptide
  MOD_RES (2), (34), (35): Xaa is C or S
GXSEVVMDNSLQEVVNNASDYYVIPLPELRTPVXX

SEQ ID NO: 11330 - protein, 35 aa, Artificial Sequence; identical to SEQ ID NO: 3910
  GFR-binding peptide
  MOD_RES (31), (32): Xaa is C or S

SEQ ID NO: 11331 - protein, 41 aa, Artificial Sequence; identical to SEQ ID NO: 3911
  GFR-binding peptide
  MOD_RES (2), (35), (36): Xaa is C or S
  MOD_RES (13), (14), (15), (16), (17): Xaa is A or G
  MOD_RES (18), (19), (20), (21): Xaa is A or G or is absent

SEQ ID NO: 11332 - protein, 35 aa, Artificial Sequence
  GFR-binding peptide
  MOD_RES (1), (3): Xaa is C or S
  MOD_RES (14), (15), (16), (17), (18): Xaa is A or G
  MOD_RES (19), (20), (21), (22): Xaa is A or G or is absent
XKXSRVIMNSLQEXXXXXXXXXYYVIPLPELAQPV

SEQ ID NO: 11333 - protein, 41 aa, Artificial Sequence
  GFR-binding peptide
  MOD_RES (2), (4), (38), (39): Xaa is C or S
  MOD_RES (16), (17), (18), (19), (20): Xaa is A or G
  MOD_RES (21), (22), (23), (24): Xaa is A or G or is absent
RXGXSEVVMDRYKKLXXXXXXXXXFYLISIANLRTPVXXTP

SEQ ID NO: 11334 - protein, 41 aa, Artificial Sequence
  GFR-binding peptide
  MOD_RES (2), (4), (38), (39): Xaa is C or S
  MOD_RES (16), (17), (18), (19), (20): Xaa is A or G
  MOD_RES (21), (22), (23), (24): Xaa is A or G or is absent
RXGXSEVVMDNSLQEXXXXXXXXXYYVIPLPELRTPVXXTP

SEQ ID NO: 11335 - protein, 37 aa, Artificial Sequence
  GFR-binding peptide
  MOD_RES (32), (33): Xaa is C or S
GEVVMENSLQEVVKDYEDYYVMPLPELETPVXXAKPI

SEQ ID NO: 11336 - protein, 37 aa, Artificial Sequence
  GFR-binding peptide
  MOD_RES (1), (3), (37): Xaa is C or S
  MOD_RES (15), (16), (17), (18), (19): Xaa is A or G
  MOD_RES (20), (21), (22), (23): Xaa is A or G or is absent
XGXGEVVMENSLQEXXXXXXXXXYYVMPLPELETPVX

SEQ ID NO: 11337 - protein, 39 aa, Artificial Sequence; identical to SEQ ID NO: 3918
  GFR-binding peptide
  MOD_RES (33), (34): Xaa is C or S
  MOD_RES (11), (12), (13), (14), (15): Xaa is A or G
  MOD_RES (16), (17), (18), (19): Xaa is A or G or is absent

SEQ ID NO: 11338 - protein, 31 aa, Artificial Sequence
  GFR-binding peptide
  MOD_RES (31), (31): Xaa is C or S
EVVMDEYQKYVVKENEDIFLMSIPSLETPVX

SEQ ID NO: 11339 - protein, 38 aa, Artificial Sequence
  GFR-binding peptide
  MOD_RES (34), (35): Xaa is C or S
  MOD_RES (12), (13), (14), (15), (16): Xaa is A or G
  MOD_RES (17), (18), (19), (20): Xaa is A or G or is absent
SRVVMNNSLQEXXXXXXXXXYYVVPLPELKTPAXXPKP

SEQ ID NO: 11340 - protein, 37 aa, Artificial Sequence; identical to SEQ ID NO: 3923
  GFR-binding peptide
  MOD_RES (2), (4), (36): Xaa is C or S

SEQ ID NO: 11341 - protein, 39 aa, Artificial Sequence
  GFR-binding peptide
  MOD_RES (1), (3), (37), (38): Xaa is C or S
  MOD_RES (15), (16), (17), (18), (19): Xaa is A or G
  MOD_RES (20), (21), (22), (23): Xaa is A or G or is absent
XGXGEVVMDNSLQEXXXXXXXXXYYLMTLPELETPVXXA

SEQ ID NO: 11342 - protein, 38 aa, Artificial Sequence; identical to SEQ ID NO: 3927
  GFR-binding peptide
  MOD_RES (33), (34): Xaa is C or S
  MOD_RES (11), (12), (13), (14), (15): Xaa is A or G
  MOD_RES (16), (17), (18), (19): Xaa is A or G or is absent

SEQ ID NO: 11343 - protein, 37 aa, Artificial Sequence
  GFR-binding peptide
  MOD_RES (2), (36), (37): Xaa is C or S
  MOD_RES (14), (15), (16), (17), (18): Xaa is A or G
  MOD_RES (19), (20), (21), (22): Xaa is A or G or is absent
GXSEVVMDEYQKYXXXXXXXXXIFLISIPSLRTPVXX

SEQ ID NO: 11344 - protein, 34 aa, Artificial Sequence
  GFR-binding peptide
  MOD_RES (1), (32), (33): Xaa is C or S
XSKVVMEYQKYVKPTRGVIFLISIPSLDQPVXXP

SEQ ID NO: 11345 - protein, 35 aa, Artificial Sequence; identical to SEQ ID NO: 3930
  GFR-binding peptide
  MOD_RES (1), (33), (34): Xaa is C or S

SEQ ID NO: 11346 - protein, 41 aa, Artificial Sequence
  GFR-binding peptide
  MOD_RES (2), (36), (37): Xaa is C or S
  MOD_RES (14), (15), (16), (17), (18): Xaa is A or G
  MOD_RES (19), (20), (21), (22): Xaa is A or G or is absent
GXSRVVMNNSLQEXXXXXXXXXYYVVPLPELKTPAXXPKPV

SEQ ID NO: 11347 - protein, 35 aa, Artificial Sequence; identical to SEQ ID NO: 3931
  GFR-binding peptide
  MOD_RES (33), (34): Xaa is C or S
  MOD_RES (11), (12), (13), (14), (15): Xaa is A or G
  MOD_RES (16), (17), (18), (19): Xaa is A or G or is absent

SEQ ID NO: 11348 - protein, 32 aa, Artificial Sequence
  GFR-binding peptide
  MOD_RES (32), (32): Xaa is C or S
GEVVMEEYQKYVVKDYEDIFLMSIPSLETPVX

SEQ ID NO: 11349 - protein, 35 aa, Artificial Sequence; identical to SEQ ID NO: 3933
  GFR-binding peptide
  MOD_RES (1), (3), (34), (35): Xaa is C or S

SEQ ID NO: 11350 - protein, 35 aa, Artificial Sequence
  GFR-binding peptide
  MOD_RES (32), (33): Xaa is C or S
SEVVMDRYKKLVVNNASDFYLISIANLRTPVXXTP

SEQ ID NO: 11351 - protein, 39 aa, Artificial Sequence
  GFR-binding peptide
  MOD_RES (2), (4), (36): Xaa is C or S
HXGXSRVVMNEYQKYIVNSSDDIFLVSIPSLKTPAXTPK

SEQ ID NO: 11352 - protein, 35 aa, Artificial Sequence
  GFR-binding peptide
  MOD_RES (33), (34): Xaa is C or S
  MOD_RES (11), (12), (13), (14), (15): Xaa is A or G
  MOD_RES (16), (17), (18), (19): Xaa is A or G or is absent
SKVVMEYQKYXXXXXXXXXIFLISIPSLDQPVXXP

SEQ ID NO: 11353 - protein, 37 aa, Artificial Sequence
  GFR-binding peptide
  MOD_RES (1), (32), (33): Xaa is C or S
XSRVIMNSLQEVKPKRGVYYVIPLPELAQPVXXPAAS

SEQ ID NO: 11354 - protein, 34 aa, Artificial Sequence
  GFR-binding peptide
  MOD_RES (2), (4): Xaa is C or S
SXKXSKVIMEYQKYIKPTKGIIFLISIPSLDQSV

SEQ ID NO: 11355 - protein, 38 aa, Artificial Sequence; identical to SEQ ID NO: 3941
  GFR-binding peptide
  MOD_RES (1), (33): Xaa is C or S

SEQ ID NO: 11356 - protein, 38 aa, Artificial Sequence; identical to SEQ ID NO: 3942
  GFR-binding peptide
  MOD_RES (2), (4), (37), (38): Xaa is C or S
  MOD_RES (15), (16), (17), (18), (19): Xaa is A or G
  MOD_RES (20), (21), (22), (23): Xaa is A or G or is absent

SEQ ID NO: 11357 - protein, 35 aa, Artificial Sequence; identical to SEQ ID NO: 3943
  GFR-binding peptide
  MOD_RES (1), (3), (34), (35): Xaa is C or S

SEQ ID NO: 11358 - protein, 35 aa, Artificial Sequence
  GFR-binding peptide
  MOD_RES (32), (33): Xaa is C or S
SEVVMDEYQKYVVNNASDIFLISIPSLRTPVXXTP

SEQ ID NO: 11359 - protein, 35 aa, Artificial Sequence
  GFR-binding peptide
  MOD_RES (1), (34), (35): Xaa is C or S
  MOD_RES (12), (13), (14), (15), (16): Xaa is A or G
  MOD_RES (17), (18), (19), (20): Xaa is A or G or is absent
XSKVIMNSLQEXXXXXXXXXYYVIPLPELDQSVXX

SEQ ID NO: 11360 - protein, 41 aa, Artificial Sequence; identical to SEQ ID NO: 3947
  GFR-binding peptide
  MOD_RES (1), (3), (35): Xaa is C or S

SEQ ID NO: 11361 - protein, 39 aa, Artificial Sequence; identical to SEQ ID NO: 3948
  GFR-binding peptide
  MOD_RES (1), (3), (37), (38): Xaa is C or S
  MOD_RES (15), (16), (17), (18), (19): Xaa is A or G
  MOD_RES (20), (21), (22), (23): Xaa is A or G or is absent

SEQ ID NO: 11362 - protein, 39 aa, Artificial Sequence; identical to SEQ ID NO: 3949
  GFR-binding peptide
  MOD_RES (2), (36), (37): Xaa is C or S
  MOD_RES (14), (15), (16), (17), (18): Xaa is A or G
  MOD_RES (19), (20), (21), (22): Xaa is A or G or is absent

SEQ ID NO: 11363 - protein, 34 aa, Artificial Sequence; identical to SEQ ID NO: 3950
  GFR-binding peptide
  MOD_RES (1), (3): Xaa is C or S

SEQ ID NO: 11364 - protein, 38 aa, Artificial Sequence
  GFR-binding peptide
  MOD_RES (1), (33), (34): Xaa is C or S
XGEVVMDEYQKYVVKENEDIFLMSIPSLETPVXXAKPI

SEQ ID NO: 11365 - protein, 36 aa, Artificial Sequence
  GFR-binding peptide
  MOD_RES (1), (3), (34), (35): Xaa is C or S
XKXSKVVMNSLQEVKPTRGVYYLITLPELDQPVXXP

SEQ ID NO: 11366 - protein, 40 aa, Artificial Sequence
  GFR-binding peptide
  MOD_RES (2), (4), (36), (37): Xaa is C or S
RXGXGEVVMENSLQEVVKDYEDYYVMPLPELETPVXXAKP

SEQ ID NO: 11367 - protein, 40 aa, Artificial Sequence; identical to SEQ ID NO: 3952
  GFR-binding peptide
  MOD_RES (34), (35): Xaa is C or S
  MOD_RES (12), (13), (14), (15), (16): Xaa is A or G
  MOD_RES (17), (18), (19), (20): Xaa is A or G or is absent

SEQ ID NO: 11368 - protein, 33 aa, Artificial Sequence
  GFR-binding peptide
  MOD_RES (32), (33): Xaa is C or S
GEVVMENSLQEVVKDYEDYYVMPLPELETPVXX

SEQ ID NO: 11369 - protein, 40 aa, Artificial Sequence
  GFR-binding peptide
  MOD_RES (2), (35), (36): Xaa is C or S
  MOD_RES (13), (14), (15), (16), (17): Xaa is A or G
  MOD_RES (18), (19), (20), (21): Xaa is A or G or is absent
KXSRVIMNSLQEXXXXXXXXXYYVIPLPELAQPVXXPAAS

SEQ ID NO: 11370 - protein, 38 aa, Artificial Sequence
  GFR-binding peptide
  MOD_RES (1), (33): Xaa is C or S
XSRVVMNEYQKYIVNSSDDIFLVSIPSLKTPAXTPKTV

SEQ ID NO: 11371 - protein, 38 aa, Artificial Sequence
  GFR-binding peptide
  MOD_RES (1), (3), (35), (36): Xaa is C or S
XGXSEVVMDQYNKLVVNNASDLYLISIASLRTPVXXTP

SEQ ID NO: 11372 - protein, 36 aa, Artificial Sequence
  GFR-binding peptide
  MOD_RES (2), (36): Xaa is C or S
  MOD_RES (14), (15), (16), (17), (18): Xaa is A or G
  MOD_RES (19), (20), (21), (22): Xaa is A or G or is absent
GXGEVVMENSLQEXXXXXXXXXYYVMPLPELETPVX

SEQ ID NO: 11373 - protein, 37 aa, Artificial Sequence
  GFR-binding peptide
  MOD_RES (1), (35), (36): Xaa is C or S
  MOD_RES (13), (14), (15), (16), (17): Xaa is A or G
  MOD_RES (18), (19), (20), (21): Xaa is A or G or is absent
XARVVMNNSLQEXXXXXXXXXYYLVTLPELQTPAXXP

SEQ ID NO: 11374 - protein, 39 aa, Artificial Sequence; identical to SEQ ID NO: 3955
  GFR-binding peptide
  MOD_RES (2), (4), (36), (37): Xaa is C or S

SEQ ID NO: 11375 - protein, 43 aa, Artificial Sequence; identical to SEQ ID NO: 3956
  GFR-binding peptide
  MOD_RES (2), (4), (37), (38): Xaa is C or S
  MOD_RES (15), (16), (17), (18), (19): Xaa is A or G
  MOD_RES (20), (21), (22), (23): Xaa is A or G or is absent

SEQ ID NO: 11376 - protein, 41 aa, Artificial Sequence
  GFR-binding peptide
  MOD_RES (1), (3), (37), (38): Xaa is C or S
  MOD_RES (15), (16), (17), (18), (19): Xaa is A or G
  MOD_RES (20), (21), (22), (23): Xaa is A or G or is absent
XGXGEVVMENSLQEXXXXXXXXXYYLMTLPELETPVXXAKP

SEQ ID NO: 11377 - protein, 37 aa, Artificial Sequence
  GFR-binding peptide
  MOD_RES (2), (4): Xaa is C or S
  MOD_RES (16), (17), (18), (19), (20): Xaa is A or G
  MOD_RES (21), (22), (23), (24): Xaa is A or G or is absent
RXGXSEVVMDRYKKLXXXXXXXXXFYLISIANLRTPV

SEQ ID NO: 11378 - protein, 35 aa, Artificial Sequence
  GFR-binding peptide
  MOD_RES (1), (35): Xaa is C or S
  MOD_RES (13), (14), (15), (16), (17): Xaa is A or G
  MOD_RES (18), (19), (20), (21): Xaa is A or G or is absent
XSEVVMDNSLQEXXXXXXXXXYYVIPLPELRTPVX

SEQ ID NO: 11379 - protein, 36 aa, Artificial Sequence
  GFR-binding peptide
  MOD_RES (1), (3): Xaa is C or S
  MOD_RES (15), (16), (17), (18), (19): Xaa is A or G
  MOD_RES (20), (21), (22), (23): Xaa is A or G or is absent
XGXSEVVMDEYQKYXXXXXXXXXIFLISIPSLRTPV

SEQ ID NO: 11380 - protein, 38 aa, Artificial Sequence; identical to SEQ ID NO: 3960
  GFR-binding peptide
  MOD_RES (33), (34): Xaa is C or S
  MOD_RES (11), (12), (13), (14), (15): Xaa is A or G
  MOD_RES (16), (17), (18), (19): Xaa is A or G or is absent

SEQ ID NO: 11381 - protein, 39 aa, Artificial Sequence
  GFR-binding peptide
  MOD_RES (2), (34): Xaa is C or S
GXSRVVMNNSLQEIVNSSDDYYLVTLPELKTPAXTPKTV

SEQ ID NO: 11382 - protein, 33 aa, Artificial Sequence
  GFR-binding peptide
  MOD_RES (31), (31): Xaa is C or S
RVVMNNSLQEIVNSSDDYYLVTLPELKTPAXTP

SEQ ID NO: 11383 - protein, 37 aa, Artificial Sequence; identical to SEQ ID NO: 3967
  GFR-binding peptide
  MOD_RES (2), (4), (36), (37): Xaa is C or S

SEQ ID NO: 11384 - protein, 36 aa, Artificial Sequence
  GFR-binding peptide
  MOD_RES (1), (33), (34): Xaa is C or S
XSRVVMNEYQKYIVNSSDDIFLVSIPSLKTPAXXPK

SEQ ID NO: 11385 - protein, 34 aa, Artificial Sequence; identical to SEQ ID NO: 3968
  GFR-binding peptide
  MOD_RES (1), (34): Xaa is C or S
  MOD_RES (12), (13), (14), (15), (16): Xaa is A or G
  MOD_RES (17), (18), (19), (20): Xaa is A or G or is absent

SEQ ID NO: 11386 - protein, 31 aa, Artificial Sequence
  GFR-binding peptide
  MOD_RES (31), (31): Xaa is C or S
EVVMDEYQKYVVNNASDIFLISIPSLRTPVX

SEQ ID NO: 11387 - protein, 44 aa, Artificial Sequence
  GFR-binding peptide
  MOD_RES (2), (4), (38), (39): Xaa is C or S
  MOD_RES (16), (17), (18), (19), (20): Xaa is A or G
  MOD_RES (21), (22), (23), (24): Xaa is A or G or is absent
HXGXSRVVMNNSLQEXXXXXXXXXYYLVTLPELKTPAXXPKPVY

SEQ ID NO: 11388 - protein, 41 aa, Artificial Sequence
  GFR-binding peptide
  MOD_RES (1), (3), (36), (37): Xaa is C or S
  MOD_RES (14), (15), (16), (17), (18): Xaa is A or G
  MOD_RES (19), (20), (21), (22): Xaa is A or G or is absent
XKXSKVVMNSLQEXXXXXXXXXYYLITLPELDQPVXXPSAS

SEQ ID NO: 11389 - protein, 34 aa, Artificial Sequence; identical to SEQ ID NO: 3969
  GFR-binding peptide
  MOD_RES (1), (33), (34): Xaa is C or S

SEQ ID NO: 11390 - protein, 37 aa, Artificial Sequence
  GFR-binding peptide
  MOD_RES (1), (35), (36): Xaa is C or S
  MOD_RES (13), (14), (15), (16), (17): Xaa is A or G
  MOD_RES (18), (19), (20), (21): Xaa is A or G or is absent
XSEVVMDEYQKYXXXXXXXXXIFLISIPSLRTPVXXT

SEQ ID NO: 11391 - protein, 41 aa, Artificial Sequence
  GFR-binding peptide
  MOD_RES (1), (35), (36): Xaa is C or S
  MOD_RES (13), (14), (15), (16), (17): Xaa is A or G
  MOD_RES (18), (19), (20), (21): Xaa is A or G or is absent
XSEVVMDRYKKLXXXXXXXXXFYLISIANLRTPVXXTPPTS

SEQ ID NO: 11392 - protein, 41 aa, Artificial Sequence
  GFR-binding peptide
  MOD_RES (2), (4), (38), (39): Xaa is C or S
  MOD_RES (16), (17), (18), (19), (20): Xaa is A or G
  MOD_RES (21), (22), (23), (24): Xaa is A or G or is absent
RXGXGEVVMEEYQKYXXXXXXXXXIFLMSIPSLETPVXXAK

SEQ ID NO: 11393 - protein, 39 aa, Artificial Sequence; identical to SEQ ID NO: 3972
  GFR-binding peptide
  MOD_RES (33), (34): Xaa is C or S
  MOD_RES (11), (12), (13), (14), (15): Xaa is A or G
  MOD_RES (16), (17), (18), (19): Xaa is A or G or is absent

SEQ ID NO: 11394 - protein, 39 aa, Artificial Sequence
  GFR-binding peptide
  MOD_RES (1), (3), (34), (35): Xaa is C or S
XKXSRVIMNSLQEVKPKRGVYYLITLPELAQPVXXPAAS

SEQ ID NO: 11395 - protein, 34 aa, Artificial Sequence
  GFR-binding peptide
  MOD_RES (1), (33), (34): Xaa is C or S
XSEVVMDQYNKLVVNNASDLYLISIASLRTPVXX

SEQ ID NO: 11396 - protein, 34 aa, Artificial Sequence
  GFR-binding peptide
  MOD_RES (34), (34): Xaa is C or S
  MOD_RES (12), (13), (14), (15), (16): Xaa is A or G
  MOD_RES (17), (18), (19), (20): Xaa is A or G or is absent
ARVVMNNSLQEXXXXXXXXXYYLVTLPELQTPAX

SEQ ID NO: 11397 - protein, 34 aa, Artificial Sequence; identical to SEQ ID NO: 3976
  GFR-binding peptide
  MOD_RES (31), (32): Xaa is C or S

SEQ ID NO: 11398 - protein, 36 aa, Artificial Sequence; identical to SEQ ID NO: 3978
  GFR-binding peptide
  MOD_RES (1), (3), (34), (35): Xaa is C or S

SEQ ID NO: 11399 - protein, 41 aa, Artificial Sequence; identical to SEQ ID NO: 3981
  GFR-binding peptide
  MOD_RES (1), (3), (37), (38): Xaa is C or S
  MOD_RES (15), (16), (17), (18), (19): Xaa is A or G
  MOD_RES (20), (21), (22), (23): Xaa is A or G or is absent

SEQ ID NO: 11400 - protein, 42 aa, Artificial Sequence
  GFR-binding peptide
  MOD_RES (1), (3), (36), (37): Xaa is C or S
  MOD_RES (14), (15), (16), (17), (18): Xaa is A or G
  MOD_RES (19), (20), (21), (22): Xaa is A or G or is absent
XKXSRVIMEYQKYXXXXXXXXXIFLISIPSLAQPVXXPAASA

SEQ ID NO: 11401 - protein, 39 aa, Artificial Sequence; identical to SEQ ID NO: 3982
  GFR-binding peptide
  MOD_RES (2), (35), (36): Xaa is C or S
  MOD_RES (13), (14), (15), (16), (17): Xaa is A or G
  MOD_RES (18), (19), (20), (21): Xaa is A or G or is absent

SEQ ID NO: 11402 - protein, 40 aa, Artificial Sequence
  GFR-binding peptide
  MOD_RES (1), (34), (35): Xaa is C or S
  MOD_RES (12), (13), (14), (15), (16): Xaa is A or G
  MOD_RES (17), (18), (19), (20): Xaa is A or G or is absent
XSRVIMNSLQEXXXXXXXXXYYLITLPELAQPVXXPAASA

SEQ ID NO: 11403 - protein, 38 aa, Artificial Sequence; identical to SEQ ID NO: 3983
  GFR-binding peptide
  MOD_RES (1), (35): Xaa is C or S
  MOD_RES (13), (14), (15), (16), (17): Xaa is A or G
  MOD_RES (18), (19), (20), (21): Xaa is A or G or is absent

SEQ ID NO: 11404 - protein, 38 aa, Artificial Sequence
  GFR-binding peptide
  MOD_RES (2), (4), (38): Xaa is C or S
  MOD_RES (16), (17), (18), (19), (20): Xaa is A or G
  MOD_RES (21), (22), (23), (24): Xaa is A or G or is absent
RXGXGEVVMENSLQEXXXXXXXXXYYVMPLPELETPVX

SEQ ID NO: 11405 - protein, 42 aa, Artificial Sequence
  GFR-binding peptide
  MOD_RES (2), (4), (38), (39): Xaa is C or S
  MOD_RES (16), (17), (18), (19), (20): Xaa is A or G
  MOD_RES (21), (22), (23), (24): Xaa is A or G or is absent
RXGXGEVVMENSLQEXXXXXXXXXYYLMTLPELETPVXXAKP

SEQ ID NO: 11406 - protein, 37 aa, Artificial Sequence
  GFR-binding peptide
  MOD_RES (2), (36): Xaa is C or S
  MOD_RES (14), (15), (16), (17), (18): Xaa is A or G
  MOD_RES (19), (20), (21), (22): Xaa is A or G or is absent
GXSRVVMNEYQKYXXXXXXXXXIFLVSIPSLKTPAXT

SEQ ID NO: 11407 - protein, 36 aa, Artificial Sequence; identical to SEQ ID NO: 3985
  GFR-binding peptide
  MOD_RES (1), (34), (35): Xaa is C or S
  MOD_RES (12), (13), (14), (15), (16): Xaa is A or G
  MOD_RES (17), (18), (19), (20): Xaa is A or G or is absent

SEQ ID NO: 11408 - protein, 35 aa, Artificial Sequence; identical to SEQ ID NO: 3986
  GFR-binding peptide
  MOD_RES (31), (32): Xaa is C or S

SEQ ID NO: 11409 - protein, 35 aa, Artificial Sequence
  GFR-binding peptide
  MOD_RES (2), (2): Xaa is C or S
  MOD_RES (14), (15), (16), (17), (18): Xaa is A or G
  MOD_RES (19), (20), (21), (22): Xaa is A or G or is absent
GXSRVVMNEYQKYXXXXXXXXXIFLVSIPSLKTPA

SEQ ID NO: 11410 - protein, 41 aa, Artificial Sequence
  GFR-binding peptide
  MOD_RES (2), (36), (37): Xaa is C or S
  MOD_RES (14), (15), (16), (17), (18): Xaa is A or G
  MOD_RES (19), (20), (21), (22): Xaa is A or G or is absent
GXARVVMNEYQKYXXXXXXXXXIFLVSIPSLQTPAXXPKPV

SEQ ID NO: 11411 - protein, 39 aa, Artificial Sequence
  GFR-binding peptide
  MOD_RES (1), (3), (35), (36): Xaa is C or S
XGXSEVVMDNSLQEVVNNASDYYVIPLPELRTPVXXTPP

SEQ ID NO: 11412 - protein, 41 aa, Artificial Sequence
  GFR-binding peptide
  MOD_RES (1), (3), (37), (38): Xaa is C or S
  MOD_RES (15), (16), (17), (18), (19): Xaa is A or G
  MOD_RES (20), (21), (22), (23): Xaa is A or G or is absent
XGXSEVVMDEYQKYXXXXXXXXXIFLISIPSLRTPVXXTPP

SEQ ID NO: 11413 - protein, 40 aa, Artificial Sequence
  GFR-binding peptide
  MOD_RES (2), (35), (36): Xaa is C or S
  MOD_RES (13), (14), (15), (16), (17): Xaa is A or G
  MOD_RES (18), (19), (20), (21): Xaa is A or G or is absent
KXSKVIMNSLQEXXXXXXXXXYYVIPLPELDQSVXXPSAS

SEQ ID NO: 11414 - protein, 38 aa, Artificial Sequence
  GFR-binding peptide
  MOD_RES (1), (35), (36): Xaa is C or S
  MOD_RES (13), (14), (15), (16), (17): Xaa is A or G
  MOD_RES (18), (19), (20), (21): Xaa is A or G or is absent
XGEVVMDNSLQEXXXXXXXXXYYLMTLPELETPVXXAK

SEQ ID NO: 11415 - protein, 39 aa, Artificial Sequence; identical to SEQ ID NO: 3990
  GFR-binding peptide
  MOD_RES (1), (35): Xaa is C or S
  MOD_RES (13), (14), (15), (16), (17): Xaa is A or G
  MOD_RES (18), (19), (20), (21): Xaa is A or G or is absent

SEQ ID NO: 11416 - protein, 38 aa, Artificial Sequence
  GFR-binding peptide
  MOD_RES (2), (36), (37): Xaa is C or S
  MOD_RES (14), (15), (16), (17), (18): Xaa is A or G
  MOD_RES (19), (20), (21), (22): Xaa is A or G or is absent
GXSEVVMDEYQKYXXXXXXXXXIFLISIPSLRTPVXXT

SEQ ID NO: 11417 - protein, 34 aa, Artificial Sequence
  GFR-binding peptide
  MOD_RES (32), (33): Xaa is C or S
SEVVMDNSLQEVVNNASDYYLITLPELRTPVXXT

SEQ ID NO: 11418 - protein, 37 aa, Artificial Sequence; identical to SEQ ID NO: 3997
  GFR-binding peptide
  MOD_RES (1), (3), (35), (36): Xaa is C or S

SEQ ID NO: 11419 - protein, 39 aa, Artificial Sequence
  GFR-binding peptide
  MOD_RES (34), (34): Xaa is C or S
  MOD_RES (12), (13), (14), (15), (16): Xaa is A or G
  MOD_RES (17), (18), (19), (20): Xaa is A or G or is absent
SRVVMNNSLQEXXXXXXXXXYYLVTLPELKTPAXTPKTV

SEQ ID NO: 11420 - protein, 34 aa, Artificial Sequence
  GFR-binding peptide
  MOD_RES (31), (32): Xaa is C or S
RVVMNNSLQEIVNSSDDYYLVTLPELKTPAXXPK

SEQ ID NO: 11421 - protein, 36 aa, Artificial Sequence; identical to SEQ ID NO: 4000
  GFR-binding peptide
  MOD_RES (31), (32): Xaa is C or S

SEQ ID NO: 11422 - protein, 31 aa, Artificial Sequence
  GFR-binding peptide
  MOD_RES (31), (31): Xaa is C or S
RVVMNNSLQEIVNSSDDYYLVTLPELKTPAX

SEQ ID NO: 11423 - protein, 33 aa, Artificial Sequence
  GFR-binding peptide
  MOD_RES (32), (33): Xaa is C or S
GEVVMEEYQKYVVKDYEDIFLMSIPSLETPVXX

SEQ ID NO: 11424 - protein, 39 aa, Artificial Sequence; identical to SEQ ID NO: 4003
  GFR-binding peptide
  MOD_RES (1), (3), (35), (36): Xaa is C or S

SEQ ID NO: 11425 - protein, 40 aa, Artificial Sequence; identical to SEQ ID NO: 4004
  GFR-binding peptide
  MOD_RES (1), (3), (37), (38): Xaa is C or S
  MOD_RES (15), (16), (17), (18), (19): Xaa is A or G
  MOD_RES (20), (21), (22), (23): Xaa is A or G or is absent

SEQ ID NO: 11426 - protein, 34 aa, Artificial Sequence
  GFR-binding peptide
  MOD_RES (1), (3): Xaa is C or S
XGXARVVMNNSLQEIVNSSDDYYLVTLPELQTPA

SEQ ID NO: 11427 - protein, 33 aa, Artificial Sequence
  GFR-binding peptide
  MOD_RES (2), (33): Xaa is C or S
KXSKVVMNSLQEVKPTRGVYYLITLPELDQPVX

SEQ ID NO: 11428 - protein, 38 aa, Artificial Sequence
  GFR-binding peptide
  MOD_RES (1), (3), (35), (36): Xaa is C or S
XGXSEVVMDNSLQEVVNNASDYYVIPLPELRTPVXXTP

SEQ ID NO: 11429 - protein, 38 aa, Artificial Sequence
  GFR-binding peptide
  MOD_RES (2), (36), (37): Xaa is C or S
  MOD_RES (14), (15), (16), (17), (18): Xaa is A or G
  MOD_RES (19), (20), (21), (22): Xaa is A or G or is absent
GXGEVVMDEYQKYXXXXXXXXXIFLMSIPSLETPVXXA

SEQ ID NO: 11430 - protein, 38 aa, Artificial Sequence
  GFR-binding peptide
  MOD_RES (2), (4), (38): Xaa is C or S
  MOD_RES (16), (17), (18), (19), (20): Xaa is A or G
  MOD_RES (21), (22), (23), (24): Xaa is A or G or is absent
RXGXGEVVMDNSLQEXXXXXXXXXYYLMTLPELETPVX

SEQ ID NO: 11431 - protein, 34 aa, Artificial Sequence
  GFR-binding peptide
  MOD_RES (32), (33): Xaa is C or S
SRVVMNEYQKYIVNSSDDIFLVSIPSLKTPAXXP

SEQ ID NO: 11432 - protein, 40 aa, Artificial Sequence
  GFR-binding peptide
  MOD_RES (2), (4), (36), (37): Xaa is C or S
RXGXGEVVMDEYQKYVVKENEDIFLMSIPSLETPVXXAKP

SEQ ID NO: 11433 - protein, 40 aa, Artificial Sequence
  GFR-binding peptide
  MOD_RES (2), (36), (37): Xaa is C or S
  MOD_RES (14), (15), (16), (17), (18): Xaa is A or G
  MOD_RES (19), (20), (21), (22): Xaa is A or G or is absent
GXGEVVMEEYQKYXXXXXXXXXIFLMSIPSLETPVXXAKP

SEQ ID NO: 11434 - protein, 36 aa, Artificial Sequence; identical to SEQ ID NO: 4007
  GFR-binding peptide
  MOD_RES (1), (32), (33): Xaa is C or S

SEQ ID NO: 11435 - protein, 43 aa, Artificial Sequence
  GFR-binding peptide
  MOD_RES (2), (4), (38), (39): Xaa is C or S
  MOD_RES (16), (17), (18), (19), (20): Xaa is A or G
  MOD_RES (21), (22), (23), (24): Xaa is A or G or is absent
HXGXARVVMNEYQKYXXXXXXXXXIFLVSIPSLQTPAXXPKPV

SEQ ID NO: 11436 - protein, 38 aa, Artificial Sequence
  GFR-binding peptide
  MOD_RES (2), (34), (35): Xaa is C or S
GXGEVVMDNSLQEVVKENEDYYLMTLPELETPVXXAKP

SEQ ID NO: 11437 - protein, 37 aa, Artificial Sequence
  GFR-binding peptide
  MOD_RES (1), (3), (34), (35): Xaa is C or S
XKXSKVIMEYQKYIKPTKGIIFLISIPSLDQSVXXPS

SEQ ID NO: 11438 - protein, 37 aa, Artificial Sequence
  GFR-binding peptide
  MOD_RES (2), (4): Xaa is C or S
  MOD_RES (16), (17), (18), (19), (20): Xaa is A or G
  MOD_RES (21), (22), (23), (24): Xaa is A or G or is absent
RXGXSEVVMDEYQKYXXXXXXXXXIFLISIPSLRTPV

SEQ ID NO: 11439 - protein, 36 aa, Artificial Sequence
  GFR-binding peptide
  MOD_RES (2), (4), (35), (36): Xaa is C or S
SXKXSRVIMNSLQEVKPKRGVYYVIPLPELAQPVXX

SEQ ID NO: 11440 - protein, 34 aa, Artificial Sequence; identical to SEQ ID NO: 4013
  GFR-binding peptide
  MOD_RES (2), (2): Xaa is C or S
  MOD_RES (13), (14), (15), (16), (17): Xaa is A or G
  MOD_RES (18), (19), (20), (21): Xaa is A or G or is absent

SEQ ID NO: 11441 - protein, 38 aa, Artificial Sequence; identical to SEQ ID NO: 4014
  GFR-binding peptide
  MOD_RES (1), (3), (35), (36): Xaa is C or S

SEQ ID NO: 11442 - protein, 34 aa, Artificial Sequence
  GFR-binding peptide
  MOD_RES (2), (33), (34): Xaa is C or S
KXSKVVMNSLQEVKPTRGVYYVIPLPELDQPVXX

SEQ ID NO: 11443 - protein, 37 aa, Artificial Sequence; identical to SEQ ID NO: 4016
  GFR-binding peptide
  MOD_RES (1), (32), (33): Xaa is C or S

SEQ ID NO: 11444 - protein, 39 aa, Artificial Sequence; identical to SEQ ID NO: 4017
  GFR-binding peptide
  MOD_RES (1), (35), (36): Xaa is C or S
  MOD_RES (13), (14), (15), (16), (17): Xaa is A or G
  MOD_RES (18), (19), (20), (21): Xaa is A or G or is absent

SEQ ID NO: 11445 - protein, 39 aa, Artificial Sequence
  GFR-binding peptide
  MOD_RES (2), (4), (36), (37): Xaa is C or S
RXGXSEVVMDRYKKLVVNNASDFYLISIANLRTPVXXTP

SEQ ID NO: 11446 - protein, 39 aa, Artificial Sequence
  GFR-binding peptide
  MOD_RES (2), (36), (37): Xaa is C or S
  MOD_RES (14), (15), (16), (17), (18): Xaa is A or G
  MOD_RES (19), (20), (21), (22): Xaa is A or G or is absent
GXGEVVMEEYQKYXXXXXXXXXIFLMSIPSLETPVXXAK

SEQ ID NO: 11447 - protein, 34 aa, Artificial Sequence; identical to SEQ ID NO: 4020
  GFR-binding peptide
  MOD_RES (33), (33): Xaa is C or S
  MOD_RES (11), (12), (13), (14), (15): Xaa is A or G
  MOD_RES (16), (17), (18), (19): Xaa is A or G or is absent

SEQ ID NO: 11448 - protein, 34 aa, Artificial Sequence
  GFR-binding peptide
  MOD_RES (33), (34): Xaa is C or S
  MOD_RES (11), (12), (13), (14), (15): Xaa is A or G
  MOD_RES (16), (17), (18), (19): Xaa is A or G or is absent
EVVMDQYNKLXXXXXXXXXLYLISIASLRTPVXX

SEQ ID NO: 11449 - protein, 35 aa, Artificial Sequence
  GFR-binding peptide
  MOD_RES (1), (32), (33): Xaa is C or S
XSKVVMNSLQEVKPTRGVYYVIPLPELDQPVXXPS

SEQ ID NO: 11450 - protein, 37 aa, Artificial Sequence; identical to SEQ ID NO: 4024
  GFR-binding peptide
  MOD_RES (1), (3), (35), (36): Xaa is C or S

SEQ ID NO: 11451 - protein, 37 aa, Artificial Sequence
  GFR-binding peptide
  MOD_RES (33), (33): Xaa is C or S
  MOD_RES (11), (12), (13), (14), (15): Xaa is A or G
  MOD_RES (16), (17), (18), (19): Xaa is A or G or is absent
RVVMNEYQKYXXXXXXXXXIFLVSIPSLKTPAXTPKT

SEQ ID NO: 11452 - protein, 41 aa, Artificial Sequence
  GFR-binding peptide
  MOD_RES (2), (36), (37): Xaa is C or S
  MOD_RES (14), (15), (16), (17), (18): Xaa is A or G
  MOD_RES (19), (20), (21), (22): Xaa is A or G or is absent
GXGEVVMDEYQKYXXXXXXXXXIFLMSIPSLETPVXXAKPI

SEQ ID NO: 11453 - protein, 42 aa, Artificial Sequence
  GFR-binding peptide
  MOD_RES (1), (3), (37), (38): Xaa is C or S
  MOD_RES (15), (16), (17), (18), (19): Xaa is A or G
  MOD_RES (20), (21), (22), (23): Xaa is A or G or is absent
XGXSEVVMDNSLQEXXXXXXXXXYYVIPLPELRTPVXXTPPT

SEQ ID NO: 11454 - protein, 37 aa, Artificial Sequence; identical to SEQ ID NO: 4025
  GFR-binding peptide
  MOD_RES (2), (36), (37): Xaa is C or S
  MOD_RES (14), (15), (16), (17), (18): Xaa is A or G
  MOD_RES (19), (20), (21), (22): Xaa is A or G or is absent

SEQ ID NO: 11455 - protein, 42 aa, Artificial Sequence; identical to SEQ ID NO: 4026
  GFR-binding peptide
  MOD_RES (2), (4), (36), (37): Xaa is C or S

SEQ ID NO: 11456 - protein, 34 aa, Artificial Sequence
  GFR-binding peptide
  MOD_RES (2), (34): Xaa is C or S
GXSRVVMNNSLQEIVNSSDDYYVVPLPELKTPAX

SEQ ID NO: 11457 - protein, 35 aa, Artificial Sequence
  GFR-binding peptide
  MOD_RES (31), (32): Xaa is C or S
RVVMNNSLQEIVNSSDDYYLVTLPELKTPAXXPKP

SEQ ID NO: 11458 - protein, 36 aa, Artificial Sequence
  GFR-binding peptide
  MOD_RES (1), (3), (35), (36): Xaa is C or S
XGXGEVVMENSLQEVVKDYEDYYVMPLPELETPVXX

SEQ ID NO: 11459 - protein, 32 aa, Artificial Sequence
  GFR-binding peptide
  MOD_RES (11), (12), (13), (14), (15): Xaa is A or G
  MOD_RES (16), (17), (18), (19): Xaa is A or G or is absent
SRVIMNSLQEXXXXXXXXXYYVIPLPELAQPV

SEQ ID NO: 11460 - protein, 39 aa, Artificial Sequence
  GFR-binding peptide
  MOD_RES (2), (35), (36): Xaa is C or S
  MOD_RES (13), (14), (15), (16), (17): Xaa is A or G
  MOD_RES (18), (19), (20), (21): Xaa is A or G or is absent
KXSKVIMNSLQEXXXXXXXXXYYVIPLPELDQSVXXPSA

SEQ ID NO: 11461 - protein, 34 aa, Artificial Sequence
  GFR-binding peptide
  MOD_RES (31), (32): Xaa is C or S
SRVIMNSLQEVKPKRGVYYVIPLPELAQPVXXPA

SEQ ID NO: 11462 - protein, 41 aa, Artificial Sequence; identical to SEQ ID NO: 4033
  GFR-binding peptide
  MOD_RES (1), (3), (37), (38): Xaa is C or S
  MOD_RES (15), (16), (17), (18), (19): Xaa is A or G
  MOD_RES (20), (21), (22), (23): Xaa is A or G or is absent

SEQ ID NO: 11463 - protein, 41 aa, Artificial Sequence
  GFR-binding peptide
  MOD_RES (2), (36): Xaa is C or S
  MOD_RES (14), (15), (16), (17), (18): Xaa is A or G
  MOD_RES (19), (20), (21), (22): Xaa is A or G or is absent
GXSRVVMNEYQKYXXXXXXXXXIFLVSIPSLKTPAXTPKTV

SEQ ID NO: 11464 - protein, 38 aa, Artificial Sequence
  GFR-binding peptide
  MOD_RES (2), (4), (36), (37): Xaa is C or S
RXGXSEVVMDRYKKLVVNNASDFYLISIANLRTPVXXT

SEQ ID NO: 11465 - protein, 42 aa, Artificial Sequence
  GFR-binding peptide
  MOD_RES (2), (36), (37): Xaa is C or S
  MOD_RES (14), (15), (16), (17), (18): Xaa is A or G
  MOD_RES (19), (20), (21), (22): Xaa is A or G or is absent
GXSRVVMNNSLQEXXXXXXXXXYYVVPLPELKTPAXXPKPVY

SEQ ID NO: 11466 - protein, 33 aa, Artificial Sequence
  GFR-binding peptide
  MOD_RES (1), (32), (33): Xaa is C or S
XSKVVMEYQKYVKPTRGVIFLISIPSLDQPVXX

SEQ ID NO: 11467 - protein, 37 aa, Artificial Sequence
  GFR-binding peptide
  MOD_RES (33), (34): Xaa is C or S
  MOD_RES (11), (12), (13), (14), (15): Xaa is A or G
  MOD_RES (16), (17), (18), (19): Xaa is A or G or is absent
SRVIMNSLQEXXXXXXXXXYYLITLPELAQPVXXPAA

SEQ ID NO: 11468 - protein, 43 aa, Artificial Sequence
  GFR-binding peptide
  MOD_RES (2), (4), (37), (38): Xaa is C or S
  MOD_RES (15), (16), (17), (18), (19): Xaa is A or G
  MOD_RES (20), (21), (22), (23): Xaa is A or G or is absent
SXKXSKVVMEYQKYXXXXXXXXXIFLISIPSLDQPVXXPSASA

SEQ ID NO: 11469 - protein, 36 aa, Artificial Sequence
  GFR-binding peptide
  MOD_RES (34), (35): Xaa is C or S
  MOD_RES (12), (13), (14), (15), (16): Xaa is A or G
  MOD_RES (17), (18), (19), (20): Xaa is A or G or is absent
SEVVMDQYNKLXXXXXXXXXLYLISIASLRTPVXXT

SEQ ID NO: 11470 - protein, 44 aa, Artificial Sequence
  GFR-binding peptide
  MOD_RES (2), (4), (38), (39): Xaa is C or S
  MOD_RES (16), (17), (18), (19), (20): Xaa is A or G
  MOD_RES (21), (22), (23), (24): Xaa is A or G or is absent
RXGXSEVVMDQYNKLXXXXXXXXXLYLISIASLRTPVXXTPPTS

SEQ ID NO: 11471 - protein, 37 aa, Artificial Sequence
  GFR-binding peptide
  MOD_RES (33), (34): Xaa is C or S
  MOD_RES (11), (12), (13), (14), (15): Xaa is A or G
  MOD_RES (16), (17), (18), (19): Xaa is A or G or is absent
RVVMNNSLQEXXXXXXXXXYYVVPLPELQTPAXXPKP

SEQ ID NO: 11472 - protein, 38 aa, Artificial Sequence
  GFR-binding peptide
  MOD_RES (1), (35), (36): Xaa is C or S
  MOD_RES (13), (14), (15), (16), (17): Xaa is A or G
  MOD_RES (18), (19), (20), (21): Xaa is A or G or is absent
XSRVVMNNSLQEXXXXXXXXXYYLVTLPELKTPAXXPK

SEQ ID NO: 11473 - protein, 35 aa, Artificial Sequence
  GFR-binding peptide
  MOD_RES (2), (34): Xaa is C or S
GXSRVVMNEYQKYIVNSSDDIFLVSIPSLKTPAXT

SEQ ID NO: 11474 - protein, 41 aa, Artificial Sequence
  GFR-binding peptide
  MOD_RES (2), (4), (38), (39): Xaa is C or S
  MOD_RES (16), (17), (18), (19), (20): Xaa is A or G
  MOD_RES (21), (22), (23), (24): Xaa is A or G or is absent
RXGXSEVVMDEYQKYXXXXXXXXXIFLISIPSLRTPVXXTP

SEQ ID NO: 11475 - protein, 38 aa, Artificial Sequence
  GFR-binding peptide
  MOD_RES (2), (4), (37), (38): Xaa is C or S
  MOD_RES (15), (16), (17), (18), (19): Xaa is A or G
  MOD_RES (20), (21), (22), (23): Xaa is A or G or is absent
SXKXSRVIMEYQKYXXXXXXXXXIFLISIPSLAQPVXX

SEQ ID NO: 11476 - protein, 42 aa, Artificial Sequence; identical to SEQ ID NO: 4042
  GFR-binding peptide
  MOD_RES (2), (4), (38), (39): Xaa is C or S
  MOD_RES (16), (17), (18), (19), (20): Xaa is A or G
  MOD_RES (21), (22), (23), (24): Xaa is A or G or is absent

SEQ ID NO: 11477 - protein, 40 aa, Artificial Sequence; identical to SEQ ID NO: 4047
  GFR-binding peptide
  MOD_RES (2), (4), (38), (39): Xaa is C or S
  MOD_RES (16), (17), (18), (19), (20): Xaa is A or G
  MOD_RES (21), (22), (23), (24): Xaa is A or G or is absent

SEQ ID NO: 11478 - protein, 37 aa, Artificial Sequence
  GFR-binding peptide
  MOD_RES (33), (34): Xaa is C or S
  MOD_RES (11), (12), (13), (14), (15): Xaa is A or G
  MOD_RES (16), (17), (18), (19): Xaa is A or G or is absent
EVVMEEYQKYXXXXXXXXXIFLMSIPSLETPVXXAKP

SEQ ID NO: 11479 - protein, 35 aa, Artificial Sequence
  GFR-binding peptide
  MOD_RES (32), (33): Xaa is C or S
GEVVMDNSLQEVVKENEDYYVMPLPELETPVXXAK

SEQ ID NO: 11480 - protein, 34 aa, Artificial Sequence
  GFR-binding peptide
  MOD_RES (33), (33): Xaa is C or S
  MOD_RES (11), (12), (13), (14), (15): Xaa is A or G
  MOD_RES (16), (17), (18), (19): Xaa is A or G or is absent
RVVMNEYQKYXXXXXXXXXIFLVSIPSLKTPAXT

SEQ ID NO: 11481 - protein, 40 aa, Artificial Sequence
  GFR-binding peptide
  MOD_RES (2), (4), (35), (36): Xaa is C or S
SXKXSRVIMNSLQEVKPKRGVYYLITLPELAQPVXXPAAS

SEQ ID NO: 11482 - protein, 40 aa, Artificial Sequence; identical to SEQ ID NO: 4049
  GFR-binding peptide
  MOD_RES (1), (35), (36): Xaa is C or S
  MOD_RES (13), (14), (15), (16), (17): Xaa is A or G
  MOD_RES (18), (19), (20), (21): Xaa is A or G or is absent

SEQ ID NO: 11483 - protein, 40 aa, Artificial Sequence; identical to SEQ ID NO: 4050
  GFR-binding peptide
  MOD_RES (2), (35), (36): Xaa is C or S
  MOD_RES (13), (14), (15), (16), (17): Xaa is A or G
  MOD_RES (18), (19), (20), (21): Xaa is A or G or is absent

SEQ ID NO: 11484 - protein, 41 aa, Artificial Sequence
  GFR-binding peptide
  MOD_RES (1), (3), (37), (38): Xaa is C or S
  MOD_RES (15), (16), (17), (18), (19): Xaa is A or G
  MOD_RES (20), (21), (22), (23): Xaa is A or G or is absent
XGXSRVVMNEYQKYXXXXXXXXXIFLVSIPSLKTPAXXPKP

SEQ ID NO: 11485 - protein, 36 aa, Artificial Sequence
  GFR-binding peptide
  MOD_RES (1), (34), (35): Xaa is C or S
  MOD_RES (12), (13), (14), (15), (16): Xaa is A or G
  MOD_RES (17), (18), (19), (20): Xaa is A or G or is absent
XSKVVMNSLQEXXXXXXXXXYYVIPLPELDQPVXXP

SEQ ID NO: 11486 - protein, 35 aa, Artificial Sequence; identical to SEQ ID NO: 4057
  GFR-binding peptide
  MOD_RES (1), (3): Xaa is C or S
  MOD_RES (14), (15), (16), (17), (18): Xaa is A or G
  MOD_RES (19), (20), (21), (22): Xaa is A or G or is absent

SEQ ID NO: 11487 - protein, 38 aa, Artificial Sequence; identical to SEQ ID NO: 4058
  GFR-binding peptide
  MOD_RES (2), (4), (36), (37): Xaa is C or S

SEQ ID NO: 11488 - protein, 39 aa, Artificial Sequence
  GFR-binding peptide
  MOD_RES (33), (34): Xaa is C or S
  MOD_RES (11), (12), (13), (14), (15): Xaa is A or G
  MOD_RES (16), (17), (18), (19): Xaa is A or G or is absent
SKVVMEYQKYXXXXXXXXXIFLISIPSLDQPVXXPSASA

SEQ ID NO: 11489 - protein, 36 aa, Artificial Sequence; identical to SEQ ID NO: 4059
  GFR-binding peptide
  MOD_RES (2), (4): Xaa is C or S
  MOD_RES (15), (16), (17), (18), (19): Xaa is A or G
  MOD_RES (20), (21), (22), (23): Xaa is A or G or is absent

SEQ ID NO: 11490 - protein, 35 aa, Artificial Sequence; identical to SEQ ID NO: 4060
  GFR-binding peptide
  MOD_RES (2), (34): Xaa is C or S

SEQ ID NO: 11491 - protein, 38 aa, Artificial Sequence
  GFR-binding peptide
  MOD_RES (2), (34), (35): Xaa is C or S
GXGEVVMDEYQKYVVKENEDIFLMSIPSLETPVXXAKP

SEQ ID NO: 11492 - protein, 33 aa, Artificial Sequence
  GFR-binding peptide
  MOD_RES (33), (33): Xaa is C or S
  MOD_RES (11), (12), (13), (14), (15): Xaa is A or G
  MOD_RES (16), (17), (18), (19): Xaa is A or G or is absent
EVVMENSLQEXXXXXXXXXYYLMTLPELETPVX

SEQ ID NO: 11493 - protein, 33 aa, Artificial Sequence
  GFR-binding peptide
  MOD_RES (1), (33): Xaa is C or S
XSEVVMDQYNKLVVNNASDLYLISIASLRTPVX

SEQ ID NO: 11494 - protein, 38 aa, Artificial Sequence
  GFR-binding peptide
  MOD_RES (2), (36): Xaa is C or S
  MOD_RES (14), (15), (16), (17), (18): Xaa is A or G
  MOD_RES (19), (20), (21), (22): Xaa is A or G or is absent
GXSRVVMNEYQKYXXXXXXXXXIFLVSIPSLKTPAXTP

SEQ ID NO: 11495 - protein, 34 aa, Artificial Sequence
  GFR-binding peptide
  MOD_RES (33), (34): Xaa is C or S
  MOD_RES (11), (12), (13), (14), (15): Xaa is A or G
  MOD_RES (16), (17), (18), (19): Xaa is A or G or is absent
EVVMDNSLQEXXXXXXXXXYYLMTLPELETPVXX

SEQ ID NO: 11496 - protein, 39 aa, Artificial Sequence
  GFR-binding peptide
  MOD_RES (2), (35), (36): Xaa is C or S
  MOD_RES (13), (14), (15), (16), (17): Xaa is A or G
  MOD_RES (18), (19), (20), (21): Xaa is A or G or is absent
KXSRVIMNSLQEXXXXXXXXXYYVIPLPELAQPVXXPAA

SEQ ID NO: 11497 - protein, 32 aa, Artificial Sequence; identical to SEQ ID NO: 4064
  GFR-binding peptide
  MOD_RES (2), (2): Xaa is C or S

SEQ ID NO: 11498 - protein, 33 aa, Artificial Sequence; identical to SEQ ID NO: 4065
  GFR-binding peptide
  MOD_RES (33), (33): Xaa is C or S
  MOD_RES (11), (12), (13), (14), (15): Xaa is A or G
  MOD_RES (16), (17), (18), (19): Xaa is A or G or is absent

SEQ ID NO: 11499 - protein, 41 aa, Artificial Sequence
  GFR-binding peptide
  MOD_RES (2), (4), (36), (37): Xaa is C or S
HXGXSRVVMNNSLQEIVNSSDDYYVVPLPELKTPAXXPKPV

SEQ ID NO: 11500 - protein, 36 aa, Artificial Sequence
  GFR-binding peptide
  MOD_RES (2), (35), (36): Xaa is C or S
  MOD_RES (13), (14), (15), (16), (17): Xaa is A or G
  MOD_RES (18), (19), (20), (21): Xaa is A or G or is absent
KXSRVIMNSLQEXXXXXXXXXYYLITLPELAQPVXX

SEQ ID NO: 11501 - protein, 40 aa, Artificial Sequence; identical to SEQ ID NO: 4070
  GFR-binding peptide
  MOD_RES (2), (4), (38), (39): Xaa is C or S
  MOD_RES (16), (17), (18), (19), (20): Xaa is A or G
  MOD_RES (21), (22), (23), (24): Xaa is A or G or is absent

SEQ ID NO: 11502 - protein, 40 aa, Artificial Sequence
  GFR-binding peptide
  MOD_RES (1), (3), (37), (38): Xaa is C or S
  MOD_RES (15), (16), (17), (18), (19): Xaa is A or G
  MOD_RES (20), (21), (22), (23): Xaa is A or G or is absent
XGXARVVMNNSLQEXXXXXXXXXYYLVTLPELQTPAXXPK

SEQ ID NO: 11503 - protein, 39 aa, Artificial Sequence
  GFR-binding peptide
  MOD_RES (2), (34), (35): Xaa is C or S
GXGEVVMENSLQEVVKDYEDYYVMPLPELETPVXXAKPI

SEQ ID NO: 11504 - protein, 39 aa, Artificial Sequence; identical to SEQ ID NO: 4073
  GFR-binding peptide
  MOD_RES (1), (35), (36): Xaa is C or S
  MOD_RES (13), (14), (15), (16), (17): Xaa is A or G
  MOD_RES (18), (19), (20), (21): Xaa is A or G or is absent

SEQ ID NO: 11505 - protein, 39 aa, Artificial Sequence; identical to SEQ ID NO: 4075
  GFR-binding peptide
  MOD_RES (1), (33), (34): Xaa is C or S

SEQ ID NO: 11506 - protein, 32 aa, Artificial Sequence
  GFR-binding peptide
  MOD_RES (1), (1): Xaa is C or S
XSEVVMDQYNKLVVNNASDLYLISIASLRTPV

SEQ ID NO: 11507 - protein, 43 aa, Artificial Sequence
  GFR-binding peptide
  MOD_RES (1), (3), (37), (38): Xaa is C or S
  MOD_RES (15), (16), (17), (18), (19): Xaa is A or G
  MOD_RES (20), (21), (22), (23): Xaa is A or G or is absent
XGXGEVVMENSLQEXXXXXXXXXYYLMTLPELETPVXXAKPIS

SEQ ID NO: 11508 - protein, 32 aa, Artificial Sequence
  GFR-binding peptide
  MOD_RES (31), (32): Xaa is C or S
SKVVMNSLQEVKPTRGVYYLITLPELDQPVXX

SEQ ID NO: 11509 - protein, 39 aa, Artificial Sequence
  GFR-binding peptide
  MOD_RES (34), (34): Xaa is C or S
  MOD_RES (12), (13), (14), (15), (16): Xaa is A or G
  MOD_RES (17), (18), (19), (20): Xaa is A or G or is absent
SRVVMNNSLQEXXXXXXXXXYYVVPLPELKTPAXTPKTV

SEQ ID NO: 11510 - protein, 38 aa, Artificial Sequence
  GFR-binding peptide
  MOD_RES (2), (36), (37): Xaa is C or S
  MOD_RES (14), (15), (16), (17), (18): Xaa is A or G
  MOD_RES (19), (20), (21), (22): Xaa is A or G or is absent
GXSRVVMNNSLQEXXXXXXXXXYYVVPLPELKTPAXXP

SEQ ID NO: 11511 - protein, 44 aa, Artificial Sequence
  GFR-binding peptide
  MOD_RES (2), (4), (38), (39): Xaa is C or S
  MOD_RES (16), (17), (18), (19), (20): Xaa is A or G
  MOD_RES (21), (22), (23), (24): Xaa is A or G or is absent
RXGXGEVVMENSLQEXXXXXXXXXYYLMTLPELETPVXXAKPIS

SEQ ID NO: 11512 - protein, 40 aa, Artificial Sequence; identical to SEQ ID NO: 4081
  GFR-binding peptide
  MOD_RES (2), (4), (36), (37): Xaa is C or S

SEQ ID NO: 11513 - protein, 31 aa, Artificial Sequence
  GFR-binding peptide
  MOD_RES (31), (31): Xaa is C or S
SKVVMNSLQEVKPTRGVYYLITLPELDQPVX

SEQ ID NO: 11514 - protein, 35 aa, Artificial Sequence; identical to SEQ ID NO: 4082
  GFR-binding peptide
  MOD_RES (33), (34): Xaa is C or S
  MOD_RES (11), (12), (13), (14), (15): Xaa is A or G
  MOD_RES (16), (17), (18), (19): Xaa is A or G or is absent

SEQ ID NO: 11515 - protein, 34 aa, Artificial Sequence
  GFR-binding peptide
  MOD_RES (32), (33): Xaa is C or S
GEVVMDNSLQEVVKENEDYYLMTLPELETPVXXA

SEQ ID NO: 11516 - protein, 37 aa, Artificial Sequence
  GFR-binding peptide
  MOD_RES (1), (33), (34): Xaa is C or S
XSRVVMNEYQKYIVNSSDDIFLVSIPSLKTPAXXPKP

SEQ ID NO: 11517 - protein, 36 aa, Artificial Sequence; identical to SEQ ID NO: 4086
  GFR-binding peptide
  MOD_RES (1), (3): Xaa is C or S
  MOD_RES (15), (16), (17), (18), (19): Xaa is A or G
  MOD_RES (20), (21), (22), (23): Xaa is A or G or is absent

SEQ ID NO: 11518 - protein, 38 aa, Artificial Sequence; identical to SEQ ID NO: 4087
  GFR-binding peptide
  MOD_RES (34), (35): Xaa is C or S
  MOD_RES (12), (13), (14), (15), (16): Xaa is A or G
  MOD_RES (17), (18), (19), (20): Xaa is A or G or is absent

SEQ ID NO: 11519 - protein, 30 aa, Artificial Sequence; identical to SEQ ID NO: 4088
  GFR-binding peptide

SEQ ID NO: 11520 - protein, 32 aa, Artificial Sequence
  GFR-binding peptide
  MOD_RES (11), (12), (13), (14), (15): Xaa is A or G
  MOD_RES (16), (17), (18), (19): Xaa is A or G or is absent
SRVIMNSLQEXXXXXXXXXYYLITLPELAQPV

SEQ ID NO: 11521 - protein, 40 aa, Artificial Sequence
  GFR-binding peptide
  MOD_RES (1), (3), (37): Xaa is C or S
  MOD_RES (15), (16), (17), (18), (19): Xaa is A or G
  MOD_RES (20), (21), (22), (23): Xaa is A or G or is absent
XGXSRVVMNEYQKYXXXXXXXXXIFLVSIPSLKTPAXTPK

SEQ ID NO: 11522 - protein, 38 aa, Artificial Sequence; identical to SEQ ID NO: 4089
  GFR-binding peptide
  MOD_RES (1), (3), (37), (38): Xaa is C or S
  MOD_RES (15), (16), (17), (18), (19): Xaa is A or G
  MOD_RES (20), (21), (22), (23): Xaa is A or G or is absent

SEQ ID NO: 11523 - protein, 37 aa, Artificial Sequence
  GFR-binding peptide
  MOD_RES (33), (34): Xaa is C or S
  MOD_RES (11), (12), (13), (14), (15): Xaa is A or G
  MOD_RES (16), (17), (18), (19): Xaa is A or G or is absent
RVVMNNSLQEXXXXXXXXXYYLVTLPELQTPAXXPKP

SEQ ID NO: 11524 - protein, 36 aa, Artificial Sequence; identical to SEQ ID NO: 4090
  GFR-binding peptide
  MOD_RES (33), (34): Xaa is C or S
  MOD_RES (11), (12), (13), (14), (15): Xaa is A or G
  MOD_RES (16), (17), (18), (19): Xaa is A or G or is absent

SEQ ID NO: 11525 - protein, 34 aa, Artificial Sequence
  GFR-binding peptide
  MOD_RES (34), (34): Xaa is C or S
  MOD_RES (12), (13), (14), (15), (16): Xaa is A or G
  MOD_RES (17), (18), (19), (20): Xaa is A or G or is absent
GEVVMDEYQKYXXXXXXXXXIFLMSIPSLETPVX

SEQ ID NO: 11526 - protein, 38 aa, Artificial Sequence; identical to SEQ ID NO: 4094
  GFR-binding peptide
  MOD_RES (2), (34), (35): Xaa is C or S

SEQ ID NO: 11527 - protein, 38 aa, Artificial Sequence
  GFR-binding peptide
  MOD_RES (2), (4), (38): Xaa is C or S
  MOD_RES (16), (17), (18), (19), (20): Xaa is A or G
  MOD_RES (21), (22), (23), (24): Xaa is A or G or is absent
RXGXGEVVMEEYQKYXXXXXXXXXIFLMSIPSLETPVX

SEQ ID NO: 11528 - protein, 40 aa, Artificial Sequence; identical to SEQ ID NO: 4098
  GFR-binding peptide
  MOD_RES (1), (3), (34), (35): Xaa is C or S

SEQ ID NO: 11529 - protein, 34 aa, Artificial Sequence; identical to SEQ ID NO: 4100
  GFR-binding peptide
  MOD_RES (1), (34): Xaa is C or S
  MOD_RES (12), (13), (14), (15), (16): Xaa is A or G
  MOD_RES (17), (18), (19), (20): Xaa is A or G or is absent

SEQ ID NO: 11530 - protein, 38 aa, Artificial Sequence; identical to SEQ ID NO: 4101
  GFR-binding peptide
  MOD_RES (1), (32), (33): Xaa is C or S

SEQ ID NO: 11531 - protein, 40 aa, Artificial Sequence
  GFR-binding peptide
  MOD_RES (2), (4), (38), (39): Xaa is C or S
  MOD_RES (16), (17), (18), (19), (20): Xaa is A or G
  MOD_RES (21), (22), (23), (24): Xaa is A or G or is absent
RXGXGEVVMENSLQEXXXXXXXXXYYLMTLPELETPVXXA

SEQ ID NO: 11532 - protein, 37 aa, Artificial Sequence
  GFR-binding peptide
  MOD_RES (2), (4), (37): Xaa is C or S
  MOD_RES (15), (16), (17), (18), (19): Xaa is A or G
  MOD_RES (20), (21), (22), (23): Xaa is A or G or is absent
SXKXSKVVMNSLQEXXXXXXXXXYYLITLPELDQPVX

SEQ ID NO: 11533 - protein, 39 aa, Artificial Sequence; identical to SEQ ID NO: 4104
  GFR-binding peptide
  MOD_RES (1), (3), (34), (35): Xaa is C or S

SEQ ID NO: 11534 - protein, 31 aa, Artificial Sequence
  GFR-binding peptide
SRVVMNEYQKYIVNSSDDIFLVSIPSLKTPA

SEQ ID NO: 11535 - protein, 34 aa, Artificial Sequence; identical to SEQ ID NO: 4107
  GFR-binding peptide
  MOD_RES (31), (32): Xaa is C or S

SEQ ID NO: 11536 - protein, 40 aa, Artificial Sequence
  GFR-binding peptide
  MOD_RES (2), (34), (35): Xaa is C or S
GXGEVVMDEYQKYVVKENEDIFLMSIPSLETPVXXAKPIK

SEQ ID NO: 11537 - protein, 42 aa, Artificial Sequence; identical to SEQ ID NO: 4109
  GFR-binding peptide
  MOD_RES (1), (3), (37), (38): Xaa is C or S
  MOD_RES (15), (16), (17), (18), (19): Xaa is A or G
  MOD_RES (20), (21), (22), (23): Xaa is A or G or is absent

SEQ ID NO: 11538 - protein, 41 aa, Artificial Sequence; identical to SEQ ID NO: 4111
  GFR-binding peptide
  MOD_RES (2), (36), (37): Xaa is C or S
  MOD_RES (14), (15), (16), (17), (18): Xaa is A or G
  MOD_RES (19), (20), (21), (22): Xaa is A or G or is absent

SEQ ID NO: 11539 - protein, 34 aa, Artificial Sequence
  GFR-binding peptide
  MOD_RES (1), (34): Xaa is C or S
  MOD_RES (12), (13), (14), (15), (16): Xaa is A or G
  MOD_RES (17), (18), (19), (20): Xaa is A or G or is absent
XSKVVMNSLQEXXXXXXXXXYYVIPLPELDQPVX

SEQ ID NO: 11540 - protein, 35 aa, Artificial Sequence
  GFR-binding peptide
  MOD_RES (2), (4): Xaa is C or S
RXGXSEVVMDNSLQEVVNNASDYYVIPLPELRTPV

SEQ ID NO: 11541 - protein, 40 aa, Artificial Sequence
  GFR-binding peptide
  MOD_RES (1), (3), (34), (35): Xaa is C or S
XKXSRVIMNSLQEVKPKRGVYYLITLPELAQPVXXPAASA

SEQ ID NO: 11542 - protein, 33 aa, Artificial Sequence
  GFR-binding peptide
  MOD_RES (2), (33): Xaa is C or S
KXSKVVMNSLQEVKPTRGVYYVIPLPELDQPVX

SEQ ID NO: 11543 - protein, 32 aa, Artificial Sequence
  GFR-binding peptide
  MOD_RES (2), (2): Xaa is C or S
KXSKVVMNSLQEVKPTRGVYYLITLPELDQPV

SEQ ID NO: 11544 - protein, 32 aa, Artificial Sequence
  GFR-binding peptide
  MOD_RES (32), (32): Xaa is C or S
ARVVMNEYQKYIVNSSDDIFLVSIPSLQTPAX

SEQ ID NO: 11545 - protein, 36 aa, Artificial Sequence; identical to SEQ ID NO: 4119
  GFR-binding peptide
  MOD_RES (2), (4), (35), (36): Xaa is C or S

SEQ ID NO: 11546 - protein, 36 aa, Artificial Sequence; identical to SEQ ID NO: 4120
  GFR-binding peptide
  MOD_RES (1), (33), (34): Xaa is C or S

SEQ ID NO: 11547 - protein, 34 aa, Artificial Sequence
  GFR-binding peptide
  MOD_RES (1), (32), (33): Xaa is C or S
XSRVIMNSLQEVKPKRGVYYLITLPELAQPVXXP

SEQ ID NO: 11548 - protein, 36 aa, Artificial Sequence; identical to SEQ ID NO: 4122
  GFR-binding peptide
  MOD_RES (31), (32): Xaa is C or S

SEQ ID NO: 11549 - protein, 37 aa, Artificial Sequence
  GFR-binding peptide
  MOD_RES (31), (32): Xaa is C or S
RVVMNNSLQEIVNSSDDYYLVTLPELQTPAXXPKPVT

SEQ ID NO: 11550 - protein, 37 aa, Artificial Sequence
  GFR-binding peptide
  MOD_RES (32), (33): Xaa is C or S
ARVVMNNSLQEIVNSSDDYYVVPLPELQTPAXXPKPV

SEQ ID NO: 11551 - protein, 35 aa, Artificial Sequence
  GFR-binding peptide
  MOD_RES (33), (34): Xaa is C or S
  MOD_RES (11), (12), (13), (14), (15): Xaa is A or G
  MOD_RES (16), (17), (18), (19): Xaa is A or G or is absent
EVVMDNSLQEXXXXXXXXXYYLITLPELRTPVXXT

SEQ ID NO: 11552 - protein, 39 aa, Artificial Sequence
  GFR-binding peptide
  MOD_RES (1), (35), (36): Xaa is C or S
  MOD_RES (13), (14), (15), (16), (17): Xaa is A or G
  MOD_RES (18), (19), (20), (21): Xaa is A or G or is absent
XGEVVMENSLQEXXXXXXXXXYYLMTLPELETPVXXAKP

SEQ ID NO: 11553 - protein, 35 aa, Artificial Sequence; identical to SEQ ID NO: 4126
  GFR-binding peptide
  MOD_RES (31), (32): Xaa is C or S

SEQ ID NO: 11554 - protein, 32 aa, Artificial Sequence
  GFR-binding peptide
  MOD_RES (32), (32): Xaa is C or S
GEVVMENSLQEVVKDYEDYYVMPLPELETPVX

SEQ ID NO: 11555 - protein, 31 aa, Artificial Sequence
  GFR-binding peptide
GEVVMDEYQKYVVKENEDIFLMSIPSLETPV

SEQ ID NO: 11556 - protein, 37 aa, Artificial Sequence; identical to SEQ ID NO: 4129
  GFR-binding peptide
  MOD_RES (1), (32), (33): Xaa is C or S

SEQ ID NO: 11557 - protein, 36 aa, Artificial Sequence
  GFR-binding peptide
  MOD_RES (2), (4), (35), (36): Xaa is C or S
SXKXSKVVMNSLQEVKPTRGVYYLITLPELDQPVXX

SEQ ID NO: 11558 - protein, 44 aa, Artificial Sequence
  GFR-binding peptide
  MOD_RES (2), (4), (38), (39): Xaa is C or S
  MOD_RES (16), (17), (18), (19), (20): Xaa is A or G
  MOD_RES (21), (22), (23), (24): Xaa is A or G or is absent
HXGXARVVMNNSLQEXXXXXXXXXYYLVTLPELQTPAXXPKPVT

SEQ ID NO: 11559 - protein, 37 aa, Artificial Sequence; identical to SEQ ID NO: 4134
  GFR-binding peptide
  MOD_RES (1), (33), (34): Xaa is C or S

SEQ ID NO: 11560 - protein, 41 aa, Artificial Sequence; identical to SEQ ID NO: 4135
  GFR-binding peptide
  MOD_RES (2), (4), (37), (38): Xaa is C or S
  MOD_RES (15), (16), (17), (18), (19): Xaa is A or G
  MOD_RES (20), (21), (22), (23): Xaa is A or G or is absent

SEQ ID NO: 11561 - protein, 36 aa, Artificial Sequence
  GFR-binding peptide
  MOD_RES (2), (36): Xaa is C or S
  MOD_RES (14), (15), (16), (17), (18): Xaa is A or G
  MOD_RES (19), (20), (21), (22): Xaa is A or G or is absent
GXARVVMNNSLQEXXXXXXXXXYYVVPLPELQTPAX

SEQ ID NO: 11562 - protein, 38 aa, Artificial Sequence
  GFR-binding peptide
  MOD_RES (2), (34), (35): Xaa is C or S
GXARVVMNEYQKYIVNSSDDIFLVSIPSLQTPAXXPKP

SEQ ID NO: 11563 - protein, 40 aa, Artificial Sequence; identical to SEQ ID NO: 4144
  GFR-binding peptide
  MOD_RES (1), (34), (35): Xaa is C or S
  MOD_RES (12), (13), (14), (15), (16): Xaa is A or G
  MOD_RES (17), (18), (19), (20): Xaa is A or G or is absent

SEQ ID NO: 11564 - protein, 37 aa, Artificial Sequence
  GFR-binding peptide
  MOD_RES (1), (3), (35), (36): Xaa is C or S
XGXGEVVMDNSLQEVVKENEDYYVMPLPELETPVXXA

SEQ ID NO: 11565 - protein, 34 aa, Artificial Sequence; identical to SEQ ID NO: 4147
  GFR-binding peptide
  MOD_RES (1), (1): Xaa is C or S
  MOD_RES (13), (14), (15), (16), (17): Xaa is A or G
  MOD_RES (18), (19), (20), (21): Xaa is A or G or is absent

SEQ ID NO: 11566 - protein, 32 aa, Artificial Sequence
  GFR-binding peptide
  MOD_RES (11), (12), (13), (14), (15): Xaa is A or G
  MOD_RES (16), (17), (18), (19): Xaa is A or G or is absent
SKVIMNSLQEXXXXXXXXXYYVIPLPELDQSV

SEQ ID NO: 11567 - protein, 37 aa, Artificial Sequence
  GFR-binding peptide
  MOD_RES (2), (33), (34): Xaa is C or S
KXSRVIMNSLQEVKPKRGVYYLITLPELAQPVXXPAA

SEQ ID NO: 11568 - protein, 33 aa, Artificial Sequence
  GFR-binding peptide
  MOD_RES (33), (33): Xaa is C or S
  MOD_RES (11), (12), (13), (14), (15): Xaa is A or G
  MOD_RES (16), (17), (18), (19): Xaa is A or G or is absent
SRVIMNSLQEXXXXXXXXXYYLITLPELAQPVX

SEQ ID NO: 11569 - protein, 40 aa, Artificial Sequence; identical to SEQ ID NO: 4150
  GFR-binding peptide
  MOD_RES (1), (34), (35): Xaa is C or S
  MOD_RES (12), (13), (14), (15), (16): Xaa is A or G
  MOD_RES (17), (18), (19), (20): Xaa is A or G or is absent

SEQ ID NO: 11570 - protein, 33 aa, Artificial Sequence
  GFR-binding peptide
  MOD_RES (33), (33): Xaa is C or S
  MOD_RES (11), (12), (13), (14), (15): Xaa is A or G
  MOD_RES (16), (17), (18), (19): Xaa is A or G or is absent
SKVIMNSLQEXXXXXXXXXYYVIPLPELDQSVX

SEQ ID NO: 11571 - protein, 38 aa, Artificial Sequence
  GFR-binding peptide
  MOD_RES (2), (4), (35), (36): Xaa is C or S
SXKXSRVIMNSLQEVKPKRGVYYVIPLPELAQPVXXPA

SEQ ID NO: 11572 - protein, 39 aa, Artificial Sequence
  GFR-binding peptide
  MOD_RES (34), (34): Xaa is C or S
  MOD_RES (12), (13), (14), (15), (16): Xaa is A or G
  MOD_RES (17), (18), (19), (20): Xaa is A or G or is absent
SRVVMNEYQKYXXXXXXXXXIFLVSIPSLKTPAXTPKTV

SEQ ID NO: 11573 - protein, 38 aa, Artificial Sequence; identical to SEQ ID NO: 4155
  GFR-binding peptide
  MOD_RES (2), (4), (36), (37): Xaa is C or S

SEQ ID NO: 11574 - protein, 33 aa, Artificial Sequence; identical to SEQ ID NO: 4158
  GFR-binding peptide
  MOD_RES (31), (32): Xaa is C or S

SEQ ID NO: 11575 - protein, 39 aa, Artificial Sequence; identical to SEQ ID NO: 4159
  GFR-binding peptide
  MOD_RES (2), (4), (36): Xaa is C or S

SEQ ID NO: 11576 - protein, 40 aa, Artificial Sequence
  GFR-binding peptide
  MOD_RES (2), (4), (37), (38): Xaa is C or S
  MOD_RES (15), (16), (17), (18), (19): Xaa is A or G
  MOD_RES (20), (21), (22), (23): Xaa is A or G or is absent
SXKXSKVIMNSLQEXXXXXXXXXYYVIPLPELDQSVXXPS

SEQ ID NO: 11577 - protein, 34 aa, Artificial Sequence
  GFR-binding peptide
  MOD_RES (32), (33): Xaa is C or S
SEVVMDQYNKLVVNNASDLYLISIASLRTPVXXT

SEQ ID NO: 11578 - protein, 39 aa, Artificial Sequence
  GFR-binding peptide
  MOD_RES (2), (4), (37), (38): Xaa is C or S
  MOD_RES (15), (16), (17), (18), (19): Xaa is A or G
  MOD_RES (20), (21), (22), (23): Xaa is A or G or is absent
SXKXSRVIMEYQKYXXXXXXXXXIFLISIPSLAQPVXXP

SEQ ID NO: 11579 - protein, 35 aa, Artificial Sequence
  GFR-binding peptide
  MOD_RES (33), (34): Xaa is C or S
  MOD_RES (11), (12), (13), (14), (15): Xaa is A or G
  MOD_RES (16), (17), (18), (19): Xaa is A or G or is absent
RVVMNEYQKYXXXXXXXXXIFLVSIPSLQTPAXXP

SEQ ID NO: 11580 - protein, 39 aa, Artificial Sequence; identical to SEQ ID NO: 4168
  GFR-binding peptide
  MOD_RES (2), (4), (38), (39): Xaa is C or S
  MOD_RES (16), (17), (18), (19), (20): Xaa is A or G
  MOD_RES (21), (22), (23), (24): Xaa is A or G or is absent

SEQ ID NO: 11581 - protein, 35 aa, Artificial Sequence; identical to SEQ ID NO: 4169
  GFR-binding peptide
  MOD_RES (2), (2): Xaa is C or S
  MOD_RES (14), (15), (16), (17), (18): Xaa is A or G
  MOD_RES (19), (20), (21), (22): Xaa is A or G or is absent

SEQ ID NO: 11582 - protein, 38 aa, Artificial Sequence
  GFR-binding peptide
  MOD_RES (2), (4), (36), (37): Xaa is C or S
RXGXGEVVMENSLQEVVKDYEDYYLMTLPELETPVXXA

SEQ ID NO: 11583 - protein, 37 aa, Artificial Sequence
  GFR-binding peptide
  MOD_RES (2), (33), (34): Xaa is C or S
KXSKVIMEYQKYIKPTKGIIFLISIPSLDQSVXXPSA

SEQ ID NO: 11584 - protein, 39 aa, Artificial Sequence
  GFR-binding peptide
  MOD_RES (2), (4), (36): Xaa is C or S
HXGXSRVVMNNSLQEIVNSSDDYYLVTLPELKTPAXTPK

SEQ ID NO: 11585 - protein, 40 aa, Artificial Sequence
  GFR-binding peptide
  MOD_RES (1), (3), (37), (38): Xaa is C or S
  MOD_RES (15), (16), (17), (18), (19): Xaa is A or G
  MOD_RES (20), (21), (22), (23): Xaa is A or G or is absent
XGXARVVMNNSLQEXXXXXXXXXYYVVPLPELQTPAXXPK

SEQ ID NO: 11586 - protein, 37 aa, Artificial Sequence; identical to SEQ ID NO: 4172
  GFR-binding peptide
  MOD_RES (31), (32): Xaa is C or S

SEQ ID NO: 11587 - protein, 38 aa, Artificial Sequence; identical to SEQ ID NO: 4174
  GFR-binding peptide
  MOD_RES (2), (4), (38): Xaa is C or S
  MOD_RES (16), (17), (18), (19), (20): Xaa is A or G
  MOD_RES (21), (22), (23), (24): Xaa is A or G or is absent

SEQ ID NO: 11588 - protein, 38 aa, Artificial Sequence
  GFR-binding peptide
  MOD_RES (1), (3), (36), (37): Xaa is C or S
  MOD_RES (14), (15), (16), (17), (18): Xaa is A or G
  MOD_RES (19), (20), (21), (22): Xaa is A or G or is absent
XKXSRVIMNSLQEXXXXXXXXXYYVIPLPELAQPVXXP

SEQ ID NO: 11589 - protein, 34 aa, Artificial Sequence
  GFR-binding peptide
  MOD_RES (34), (34): Xaa is C or S
  MOD_RES (12), (13), (14), (15), (16): Xaa is A or G
  MOD_RES (17), (18), (19), (20): Xaa is A or G or is absent
GEVVMDNSLQEXXXXXXXXXYYLMTLPELETPVX

SEQ ID NO: 11590 - protein, 35 aa, Artificial Sequence; identical to SEQ ID NO: 4176
  GFR-binding peptide
  MOD_RES (1), (35): Xaa is C or S
  MOD_RES (13), (14), (15), (16), (17): Xaa is A or G
  MOD_RES (18), (19), (20), (21): Xaa is A or G or is absent

SEQ ID NO: 11591 - protein, 34 aa, Artificial Sequence
  GFR-binding peptide
  MOD_RES (1), (32), (33): Xaa is C or S
XSRVIMNSLQEVKPKRGVYYVIPLPELAQPVXXP

SEQ ID NO: 11592 - protein, 38 aa, Artificial Sequence; identical to SEQ ID NO: 4178
  GFR-binding peptide
  MOD_RES (1), (3), (37): Xaa is C or S
  MOD_RES (15), (16), (17), (18), (19): Xaa is A or G
  MOD_RES (20), (21), (22), (23): Xaa is A or G or is absent

SEQ ID NO: 11593 - protein, 41 aa, Artificial Sequence
  GFR-binding peptide
  MOD_RES (2), (4), (36): Xaa is C or S
HXGXSRVVMNNSLQEIVNSSDDYYVVPLPELKTPAXTPKTV

SEQ ID NO: 11594 - protein, 36 aa, Artificial Sequence
  GFR-binding peptide
  MOD_RES (2), (4), (35), (36): Xaa is C or S
SXKXSKVVMEYQKYVKPTRGVIFLISIPSLDQPVXX

SEQ ID NO: 11595 - protein, 41 aa, Artificial Sequence; identical to SEQ ID NO: 4180
  GFR-binding peptide
  MOD_RES (1), (35), (36): Xaa is C or S
  MOD_RES (13), (14), (15), (16), (17): Xaa is A or G
  MOD_RES (18), (19), (20), (21): Xaa is A or G or is absent

SEQ ID NO: 11596 - protein, 34 aa, Artificial Sequence
  GFR-binding peptide
  MOD_RES (1), (1): Xaa is C or S
  MOD_RES (13), (14), (15), (16), (17): Xaa is A or G
  MOD_RES (18), (19), (20), (21): Xaa is A or G or is absent
XGEVVMDNSLQEXXXXXXXXXYYVMPLPELETPV

SEQ ID NO: 11597 - protein, 38 aa, Artificial Sequence; identical to SEQ ID NO: 4182
  GFR-binding peptide
  MOD_RES (2), (4), (35), (36): Xaa is C or S

SEQ ID NO: 11598 - protein, 35 aa, Artificial Sequence; identical to SEQ ID NO: 4183
  GFR-binding peptide
  MOD_RES (1), (33), (34): Xaa is C or S

SEQ ID NO: 11599 - protein, 36 aa, Artificial Sequence
  GFR-binding peptide
  MOD_RES (32), (33): Xaa is C or S
SEVVMDNSLQEVVNNASDYYVIPLPELRTPVXXTPP

SEQ ID NO: 11600 - protein, 38 aa, Artificial Sequence; identical to SEQ ID NO: 4186
  GFR-binding peptide
  MOD_RES (1), (32), (33): Xaa is C or S

SEQ ID NO: 11601 - protein, 40 aa, Artificial Sequence
  GFR-binding peptide
  MOD_RES (1), (35), (36): Xaa is C or S
  MOD_RES (13), (14), (15), (16), (17): Xaa is A or G
  MOD_RES (18), (19), (20), (21): Xaa is A or G or is absent
XGEVVMDNSLQEXXXXXXXXXYYLMTLPELETPVXXAKPI

SEQ ID NO: 11602 - protein, 33 aa, Artificial Sequence
  GFR-binding peptide
  MOD_RES (2), (2): Xaa is C or S
GXSEVVMDQYNKLVVNNASDLYLISIASLRTPV

SEQ ID NO: 11603 - protein, 34 aa, Artificial Sequence; identical to SEQ ID NO: 4189
  GFR-binding peptide
  MOD_RES (32), (33): Xaa is C or S

SEQ ID NO: 11604 - protein, 35 aa, Artificial Sequence
  GFR-binding peptide
  MOD_RES (2), (2): Xaa is C or S
  MOD_RES (14), (15), (16), (17), (18): Xaa is A or G
  MOD_RES (19), (20), (21), (22): Xaa is A or G or is absent
GXSEVVMDNSLQEXXXXXXXXXYYLITLPELRTPV

SEQ ID NO: 11605 - protein, 36 aa, Artificial Sequence
  GFR-binding peptide
  MOD_RES (1), (3), (35), (36): Xaa is C or S
XGXGEVVMDNSLQEVVKENEDYYVMPLPELETPVXX

SEQ ID NO: 11606 - protein, 34 aa, Artificial Sequence
  GFR-binding peptide
  MOD_RES (2), (34): Xaa is C or S
GXARVVMNNSLQEIVNSSDDYYVVPLPELQTPAX

SEQ ID NO: 11607 - protein, 37 aa, Artificial Sequence; identical to SEQ ID NO: 4197
  GFR-binding peptide
  MOD_RES (1), (3), (35), (36): Xaa is C or S

SEQ ID NO: 11608 - protein, 35 aa, Artificial Sequence
  GFR-binding peptide
  MOD_RES (34), (35): Xaa is C or S
  MOD_RES (12), (13), (14), (15), (16): Xaa is A or G
  MOD_RES (17), (18), (19), (20): Xaa is A or G or is absent
ARVVMNNSLQEXXXXXXXXXYYLVTLPELQTPAXX

SEQ ID NO: 11609 - protein, 37 aa, Artificial Sequence
  GFR-binding peptide
  MOD_RES (2), (4), (37): Xaa is C or S
  MOD_RES (15), (16), (17), (18), (19): Xaa is A or G
  MOD_RES (20), (21), (22), (23): Xaa is A or G or is absent
SXKXSKVVMNSLQEXXXXXXXXXYYVIPLPELDQPVX

SEQ ID NO: 11610 - protein, 35 aa, Artificial Sequence
  GFR-binding peptide
  MOD_RES (1), (35): Xaa is C or S
  MOD_RES (13), (14), (15), (16), (17): Xaa is A or G
  MOD_RES (18), (19), (20), (21): Xaa is A or G or is absent
XGEVVMDNSLQEXXXXXXXXXYYVMPLPELETPVX

SEQ ID NO: 11611 - protein, 41 aa, Artificial Sequence; identical to SEQ ID NO: 4201
  GFR-binding peptide
  MOD_RES (2), (4), (35), (36): Xaa is C or S

SEQ ID NO: 11612 - protein, 32 aa, Artificial Sequence; identical to SEQ ID NO: 4202
  GFR-binding peptide
  MOD_RES (11), (12), (13), (14), (15): Xaa is A or G
  MOD_RES (16), (17), (18), (19): Xaa is A or G or is absent

SEQ ID NO: 11613 - protein, 35 aa, Artificial Sequence
  GFR-binding peptide
  MOD_RES (33), (34): Xaa is C or S
  MOD_RES (11), (12), (13), (14), (15): Xaa is A or G
  MOD_RES (16), (17), (18), (19): Xaa is A or G or is absent
EVVMDNSLQEXXXXXXXXXYYVIPLPELRTPVXXT

SEQ ID NO: 11614 - protein, 39 aa, Artificial Sequence
  GFR-binding peptide
  MOD_RES (33), (34): Xaa is C or S
  MOD_RES (11), (12), (13), (14), (15): Xaa is A or G
  MOD_RES (16), (17), (18), (19): Xaa is A or G or is absent
EVVMDNSLQEXXXXXXXXXYYVMPLPELETPVXXAKPIK

SEQ ID NO: 11615 - protein, 39 aa, Artificial Sequence
  GFR-binding peptide
  MOD_RES (33), (34): Xaa is C or S
  MOD_RES (11), (12), (13), (14), (15): Xaa is A or G
  MOD_RES (16), (17), (18), (19): Xaa is A or G or is absent
EVVMDNSLQEXXXXXXXXXYYLMTLPELETPVXXAKPIK

SEQ ID NO: 11616 - protein, 38 aa, Artificial Sequence; identical to SEQ ID NO: 4207
  GFR-binding peptide
  MOD_RES (2), (36), (37): Xaa is C or S
  MOD_RES (14), (15), (16), (17), (18): Xaa is A or G
  MOD_RES (19), (20), (21), (22): Xaa is A or G or is absent

SEQ ID NO: 11617 - protein, 35 aa, Artificial Sequence
  GFR-binding peptide
  MOD_RES (34), (35): Xaa is C or S
  MOD_RES (12), (13), (14), (15), (16): Xaa is A or G
  MOD_RES (17), (18), (19), (20): Xaa is A or G or is absent
GEVVMDEYQKYXXXXXXXXXIFLMSIPSLETPVXX

SEQ ID NO: 11618 - protein, 39 aa, Artificial Sequence
  GFR-binding peptide
  MOD_RES (1), (3), (37), (38): Xaa is C or S
  MOD_RES (15), (16), (17), (18), (19): Xaa is A or G
  MOD_RES (20), (21), (22), (23): Xaa is A or G or is absent
XGXSEVVMDRYKKLXXXXXXXXXFYLISIANLRTPVXXT

SEQ ID NO: 11619 - protein, 32 aa, Artificial Sequence
  GFR-binding peptide
  MOD_RES (31), (32): Xaa is C or S
EVVMDNSLQEVVNNASDYYVIPLPELRTPVXX

SEQ ID NO: 11620 - protein, 38 aa, Artificial Sequence
  GFR-binding peptide
  MOD_RES (2), (35), (36): Xaa is C or S
  MOD_RES (13), (14), (15), (16), (17): Xaa is A or G
  MOD_RES (18), (19), (20), (21): Xaa is A or G or is absent
KXSRVIMNSLQEXXXXXXXXXYYLITLPELAQPVXXPA

SEQ ID NO: 11621 - protein, 35 aa, Artificial Sequence
  GFR-binding peptide
  MOD_RES (1), (3), (35): Xaa is C or S
XGXSEVVMDRYKKLVVNNASDFYLISIANLRTPVX

SEQ ID NO: 11622 - protein, 33 aa, Artificial Sequence; identical to SEQ ID NO: 4211
  GFR-binding peptide
  MOD_RES (33), (33): Xaa is C or S
  MOD_RES (11), (12), (13), (14), (15): Xaa is A or G
  MOD_RES (16), (17), (18), (19): Xaa is A or G or is absent

SEQ ID NO: 11623 - protein, 39 aa, Artificial Sequence
  GFR-binding peptide
  MOD_RES (2), (36), (37): Xaa is C or S
  MOD_RES (14), (15), (16), (17), (18): Xaa is A or G
  MOD_RES (19), (20), (21), (22): Xaa is A or G or is absent
GXSEVVMDNSLQEXXXXXXXXXYYLITLPELRTPVXXTP

SEQ ID NO: 11624 - protein, 36 aa, Artificial Sequence
  GFR-binding peptide
  MOD_RES (1), (34), (35): Xaa is C or S
  MOD_RES (12), (13), (14), (15), (16): Xaa is A or G
  MOD_RES (17), (18), (19), (20): Xaa is A or G or is absent
XSRVIMNSLQEXXXXXXXXXYYVIPLPELAQPVXXP

SEQ ID NO: 11625 - protein, 36 aa, Artificial Sequence
  GFR-binding peptide
  MOD_RES (1), (3), (36): Xaa is C or S
  MOD_RES (14), (15), (16), (17), (18): Xaa is A or G
  MOD_RES (19), (20), (21), (22): Xaa is A or G or is absent
XKXSKVVMNSLQEXXXXXXXXXYYLITLPELDQPVX

SEQ ID NO: 11626 - protein, 37 aa, Artificial Sequence; identical to SEQ ID NO: 4215
  GFR-binding peptide
  MOD_RES (1), (35), (36): Xaa is C or S
  MOD_RES (13), (14), (15), (16), (17): Xaa is A or G
  MOD_RES (18), (19), (20), (21): Xaa is A or G or is absent

SEQ ID NO: 11627 - protein, 36 aa, Artificial Sequence; identical to SEQ ID NO: 4218
  GFR-binding peptide
  MOD_RES (1), (3), (35), (36): Xaa is C or S

SEQ ID NO: 11628 - protein, 37 aa, Artificial Sequence
  GFR-binding peptide
  MOD_RES (2), (35), (36): Xaa is C or S
  MOD_RES (13), (14), (15), (16), (17): Xaa is A or G
  MOD_RES (18), (19), (20), (21): Xaa is A or G or is absent
KXSRVIMNSLQEXXXXXXXXXYYLITLPELAQPVXXP

SEQ ID NO: 11629 - protein, 31 aa, Artificial Sequence
  GFR-binding peptide
  MOD_RES (31), (31): Xaa is C or S
EVVMDNSLQEVVNNASDYYVIPLPELRTPVX

SEQ ID NO: 11630 - protein, 32 aa, Artificial Sequence; identical to SEQ ID NO: 4220
  GFR-binding peptide
  MOD_RES (1), (32): Xaa is C or S

SEQ ID NO: 11631 - protein, 40 aa, Artificial Sequence
  GFR-binding peptide
  MOD_RES (2), (36), (37): Xaa is C or S
  MOD_RES (14), (15), (16), (17), (18): Xaa is A or G
  MOD_RES (19), (20), (21), (22): Xaa is A or G or is absent
GXARVVMNEYQKYXXXXXXXXXIFLVSIPSLQTPAXXPKP

SEQ ID NO: 11632 - protein, 31 aa, Artificial Sequence; identical to SEQ ID NO: 4221
  GFR-binding peptide
  MOD_RES (1), (1): Xaa is C or S

SEQ ID NO: 11633 - protein, 37 aa, Artificial Sequence; identical to SEQ ID NO: 4223
  GFR-binding peptide
  MOD_RES (2), (36), (37): Xaa is C or S
  MOD_RES (14), (15), (16), (17), (18): Xaa is A or G
  MOD_RES (19), (20), (21), (22): Xaa is A or G or is absent

SEQ ID NO: 11634 - protein, 40 aa, Artificial Sequence
  GFR-binding peptide
  MOD_RES (2), (4), (36), (37): Xaa is C or S
RXGXSEVVMDEYQKYVVNNASDIFLISIPSLRTPVXXTPP

SEQ ID NO: 11635 - protein, 35 aa, Artificial Sequence
  GFR-binding peptide
  MOD_RES (2), (34): Xaa is C or S
GXSRVVMNNSLQEIVNSSDDYYLVTLPELKTPAXT

SEQ ID NO: 11636 - protein, 36 aa, Artificial Sequence
  GFR-binding peptide
  MOD_RES (2), (4): Xaa is C or S
  MOD_RES (15), (16), (17), (18), (19): Xaa is A or G
  MOD_RES (20), (21), (22), (23): Xaa is A or G or is absent
SXKXSRVIMEYQKYXXXXXXXXXIFLISIPSLAQPV

SEQ ID NO: 11637 - protein, 40 aa, Artificial Sequence; identical to SEQ ID NO: 4226
  GFR-binding peptide
  MOD_RES (1), (3), (34), (35): Xaa is C or S

SEQ ID NO: 11638 - protein, 42 aa, Artificial Sequence
  GFR-binding peptide
  MOD_RES (2), (4), (37), (38): Xaa is C or S
  MOD_RES (15), (16), (17), (18), (19): Xaa is A or G
  MOD_RES (20), (21), (22), (23): Xaa is A or G or is absent
SXKXSKVVMEYQKYXXXXXXXXXIFLISIPSLDQPVXXPSAS

SEQ ID NO: 11639 - protein, 38 aa, Artificial Sequence; identical to SEQ ID NO: 4227
  GFR-binding peptide
  MOD_RES (1), (34), (35): Xaa is C or S
  MOD_RES (12), (13), (14), (15), (16): Xaa is A or G
  MOD_RES (17), (18), (19), (20): Xaa is A or G or is absent

SEQ ID NO: 11640 - protein, 42 aa, Artificial Sequence
  GFR-binding peptide
  MOD_RES (2), (36), (37): Xaa is C or S
  MOD_RES (14), (15), (16), (17), (18): Xaa is A or G
  MOD_RES (19), (20), (21), (22): Xaa is A or G or is absent
GXSRVVMNNSLQEXXXXXXXXXYYLVTLPELKTPAXXPKPVY

SEQ ID NO: 11641 - protein, 36 aa, Artificial Sequence; identical to SEQ ID NO: 4228
  GFR-binding peptide
  MOD_RES (1), (33), (34): Xaa is C or S

SEQ ID NO: 11642 - protein, 40 aa, Artificial Sequence
  GFR-binding peptide
  MOD_RES (2), (4), (37), (38): Xaa is C or S
  MOD_RES (15), (16), (17), (18), (19): Xaa is A or G
  MOD_RES (20), (21), (22), (23): Xaa is A or G or is absent
SXKXSKVIMEYQKYXXXXXXXXXIFLISIPSLDQSVXXPS

SEQ ID NO: 11643 - protein, 39 aa, Artificial Sequence; identical to SEQ ID NO: 4229
  GFR-binding peptide
  MOD_RES (1), (33), (34): Xaa is C or S

SEQ ID NO: 11644 - protein, 39 aa, Artificial Sequence
  GFR-binding peptide
  MOD_RES (33), (34): Xaa is C or S
  MOD_RES (11), (12), (13), (14), (15): Xaa is A or G
  MOD_RES (16), (17), (18), (19): Xaa is A or G or is absent
EVVMEEYQKYXXXXXXXXXIFLMSIPSLETPVXXAKPIS

SEQ ID NO: 11645 - protein, 37 aa, Artificial Sequence; identical to SEQ ID NO: 4230
  GFR-binding peptide
  MOD_RES (2), (4), (35), (36): Xaa is C or S

SEQ ID NO: 11646 - protein, 36 aa, Artificial Sequence
  GFR-binding peptide
  MOD_RES (1), (3): Xaa is C or S
  MOD_RES (15), (16), (17), (18), (19): Xaa is A or G
  MOD_RES (20), (21), (22), (23): Xaa is A or G or is absent
XGXSEVVMDQYNKLXXXXXXXXXLYLISIASLRTPV

SEQ ID NO: 11647 - protein, 35 aa, Artificial Sequence
  GFR-binding peptide
  MOD_RES (2), (2): Xaa is C or S
  MOD_RES (14), (15), (16), (17), (18): Xaa is A or G
  MOD_RES (19), (20), (21), (22): Xaa is A or G or is absent
GXSRVVMNNSLQEXXXXXXXXXYYVVPLPELKTPA

SEQ ID NO: 11648 - protein, 34 aa, Artificial Sequence
  GFR-binding peptide
  MOD_RES (1), (32), (33): Xaa is C or S
XSKVIMEYQKYIKPTKGIIFLISIPSLDQSVXXP

SEQ ID NO: 11649 - protein, 35 aa, Artificial Sequence
  GFR-binding peptide
  MOD_RES (1), (3): Xaa is C or S
  MOD_RES (14), (15), (16), (17), (18): Xaa is A or G
  MOD_RES (19), (20), (21), (22): Xaa is A or G or is absent
XKXSRVIMNSLQEXXXXXXXXXYYLITLPELAQPV

SEQ ID NO: 11650 - protein, 39 aa, Artificial Sequence
  GFR-binding peptide
  MOD_RES (2), (33), (34): Xaa is C or S
KXSKVIMEYQKYIKPTKGIIFLISIPSLDQSVXXPSASA

SEQ ID NO: 11651 - protein, 42 aa, Artificial Sequence; identical to SEQ ID NO: 4234
  GFR-binding peptide
  MOD_RES (2), (4), (37), (38): Xaa is C or S
  MOD_RES (15), (16), (17), (18), (19): Xaa is A or G
  MOD_RES (20), (21), (22), (23): Xaa is A or G or is absent

SEQ ID NO: 11652 - protein, 36 aa, Artificial Sequence
  GFR-binding peptide
  MOD_RES (31), (31): Xaa is C or S
RVVMNNSLQEIVNSSDDYYVVPLPELKTPAXTPKTV

SEQ ID NO: 11653 - protein, 35 aa, Artificial Sequence
  GFR-binding peptide
  MOD_RES (2), (35): Xaa is C or S
  MOD_RES (13), (14), (15), (16), (17): Xaa is A or G
  MOD_RES (18), (19), (20), (21): Xaa is A or G or is absent
KXSRVIMNSLQEXXXXXXXXXYYVIPLPELAQPVX

SEQ ID NO: 11654 - protein, 43 aa, Artificial Sequence; identical to SEQ ID NO: 4238
  GFR-binding peptide
  MOD_RES (1), (3), (37): Xaa is C or S
  MOD_RES (15), (16), (17), (18), (19): Xaa is A or G
  MOD_RES (20), (21), (22), (23): Xaa is A or G or is absent

SEQ ID NO: 11655 - protein, 41 aa, Artificial Sequence
  GFR-binding peptide
  MOD_RES (2), (4), (37), (38): Xaa is C or S
  MOD_RES (15), (16), (17), (18), (19): Xaa is A or G
  MOD_RES (20), (21), (22), (23): Xaa is A or G or is absent
SXKXSKVIMEYQKYXXXXXXXXXIFLISIPSLDQSVXXPSA

SEQ ID NO: 11656 - protein, 44 aa, Artificial Sequence; identical to SEQ ID NO: 4243
  GFR-binding peptide
  MOD_RES (2), (4), (38), (39): Xaa is C or S
  MOD_RES (16), (17), (18), (19), (20): Xaa is A or G
  MOD_RES (21), (22), (23), (24): Xaa is A or G or is absent

SEQ ID NO: 11657 - protein, 35 aa, Artificial Sequence
  GFR-binding peptide
  MOD_RES (1), (3), (35): Xaa is C or S
XGXSEVVMDNSLQEVVNNASDYYVIPLPELRTPVX

SEQ ID NO: 11658 - protein, 34 aa, Artificial Sequence
  GFR-binding peptide
  MOD_RES (32), (33): Xaa is C or S
GEVVMENSLQEVVKDYEDYYVMPLPELETPVXXA

SEQ ID NO: 11659 - protein, 33 aa, Artificial Sequence
  GFR-binding peptide
  MOD_RES (31), (32): Xaa is C or S
EVVMEEYQKYVVKDYEDIFLMSIPSLETPVXXA

SEQ ID NO: 11660 - protein, 34 aa, Artificial Sequence
  GFR-binding peptide
  MOD_RES (1), (32), (33): Xaa is C or S
XSKVVMNSLQEVKPTRGVYYVIPLPELDQPVXXP

SEQ ID NO: 11661 - protein, 35 aa, Artificial Sequence; identical to SEQ ID NO: 4251
  GFR-binding peptide
  MOD_RES (2), (4), (35): Xaa is C or S

SEQ ID NO: 11662 - protein, 40 aa, Artificial Sequence
  GFR-binding peptide
  MOD_RES (1), (35), (36): Xaa is C or S
  MOD_RES (13), (14), (15), (16), (17): Xaa is A or G
  MOD_RES (18), (19), (20), (21): Xaa is A or G or is absent
XGEVVMDNSLQEXXXXXXXXXYYVMPLPELETPVXXAKPI

SEQ ID NO: 11663 - protein, 32 aa, Artificial Sequence
  GFR-binding peptide
  MOD_RES (1), (1): Xaa is C or S
XGEVVMDEYQKYVVKENEDIFLMSIPSLETPV

SEQ ID NO: 11664 - protein, 39 aa, Artificial Sequence
  GFR-binding peptide
  MOD_RES (2), (4), (36), (37): Xaa is C or S
RXGXGEVVMEEYQKYVVKDYEDIFLMSIPSLETPVXXAK

SEQ ID NO: 11665 - protein, 38 aa, Artificial Sequence
  GFR-binding peptide
  MOD_RES (2), (34), (35): Xaa is C or S
GXARVVMNNSLQEIVNSSDDYYVVPLPELQTPAXXPKP

SEQ ID NO: 11666 - protein, 33 aa, Artificial Sequence
  GFR-binding peptide
  MOD_RES (33), (33): Xaa is C or S
  MOD_RES (11), (12), (13), (14), (15): Xaa is A or G
  MOD_RES (16), (17), (18), (19): Xaa is A or G or is absent
SKVIMEYQKYXXXXXXXXXIFLISIPSLDQSVX

SEQ ID NO: 11667 - protein, 41 aa, Artificial Sequence; identical to SEQ ID NO: 4256
  GFR-binding peptide
  MOD_RES (2), (4), (36), (37): Xaa is C or S

SEQ ID NO: 11668 - protein, 38 aa, Artificial Sequence
  GFR-binding peptide
  MOD_RES (1), (35), (36): Xaa is C or S
  MOD_RES (13), (14), (15), (16), (17): Xaa is A or G
  MOD_RES (18), (19), (20), (21): Xaa is A or G or is absent
XGEVVMDNSLQEXXXXXXXXXYYVMPLPELETPVXXAK

SEQ ID NO: 11669 - protein, 37 aa, Artificial Sequence
  GFR-binding peptide
  MOD_RES (2), (4), (36), (37): Xaa is C or S
RXGXSEVVMDEYQKYVVNNASDIFLISIPSLRTPVXX

SEQ ID NO: 11670 - protein, 36 aa, Artificial Sequence
  GFR-binding peptide
  MOD_RES (1), (3), (34), (35): Xaa is C or S
XKXSKVIMEYQKYIKPTKGIIFLISIPSLDQSVXXP

SEQ ID NO: 11671 - protein, 43 aa, Artificial Sequence
  GFR-binding peptide
  MOD_RES (2), (4), (38), (39): Xaa is C or S
  MOD_RES (16), (17), (18), (19), (20): Xaa is A or G
  MOD_RES (21), (22), (23), (24): Xaa is A or G or is absent
RXGXGEVVMEEYQKYXXXXXXXXXIFLMSIPSLETPVXXAKPI

SEQ ID NO: 11672 - protein, 37 aa, Artificial Sequence
  GFR-binding peptide
  MOD_RES (32), (32): Xaa is C or S
SRVVMNNSLQEIVNSSDDYYVVPLPELKTPAXTPKTV

SEQ ID NO: 11673 - protein, 32 aa, Artificial Sequence
  GFR-binding peptide
  MOD_RES (32), (32): Xaa is C or S
SEVVMDEYQKYVVNNASDIFLISIPSLRTPVX

SEQ ID NO: 11674 - protein, 36 aa, Artificial Sequence
  GFR-binding peptide
  MOD_RES (1), (3), (35), (36): Xaa is C or S
XGXGEVVMEEYQKYVVKDYEDIFLMSIPSLETPVXX

SEQ ID NO: 11675 - protein, 33 aa, Artificial Sequence
  GFR-binding peptide
  MOD_RES (1), (33): Xaa is C or S
XSEVVMDRYKKLVVNNASDFYLISIANLRTPVX

SEQ ID NO: 11676 - protein, 35 aa, Artificial Sequence
  GFR-binding peptide
  MOD_RES (34), (35): Xaa is C or S
  MOD_RES (12), (13), (14), (15), (16): Xaa is A or G
  MOD_RES (17), (18), (19), (20): Xaa is A or G or is absent
ARVVMNEYQKYXXXXXXXXXIFLVSIPSLQTPAXX

SEQ ID NO: 11677 - protein, 35 aa, Artificial Sequence
  GFR-binding peptide
  MOD_RES (1), (33), (34): Xaa is C or S
XGEVVMDNSLQEVVKENEDYYLMTLPELETPVXXA

SEQ ID NO: 11678 - protein, 37 aa, Artificial Sequence; identical to SEQ ID NO: 4263
  GFR-binding peptide
  MOD_RES (34), (34): Xaa is C or S
  MOD_RES (12), (13), (14), (15), (16): Xaa is A or G
  MOD_RES (17), (18), (19), (20): Xaa is A or G or is absent

SEQ ID NO: 11679 - protein, 39 aa, Artificial Sequence
  GFR-binding peptide
  MOD_RES (2), (4), (37), (38): Xaa is C or S
  MOD_RES (15), (16), (17), (18), (19): Xaa is A or G
  MOD_RES (20), (21), (22), (23): Xaa is A or G or is absent
SXKXSKVVMEYQKYXXXXXXXXXIFLISIPSLDQPVXXP

SEQ ID NO: 11680 - protein, 37 aa, Artificial Sequence
  GFR-binding peptide
  MOD_RES (2), (4), (37): Xaa is C or S
  MOD_RES (15), (16), (17), (18), (19): Xaa is A or G
  MOD_RES (20), (21), (22), (23): Xaa is A or G or is absent
SXKXSKVVMEYQKYXXXXXXXXXIFLISIPSLDQPVX

SEQ ID NO: 11681 - protein, 36 aa, Artificial Sequence; identical to SEQ ID NO: 4265
  GFR-binding peptide
  MOD_RES (2), (33), (34): Xaa is C or S

SEQ ID NO: 11682 - protein, 40 aa, Artificial Sequence
  GFR-binding peptide
  MOD_RES (2), (4), (36), (37): Xaa is C or S
RXGXGEVVMENSLQEVVKDYEDYYLMTLPELETPVXXAKP

SEQ ID NO: 11683 - protein, 37 aa, Artificial Sequence
  GFR-binding peptide
  MOD_RES (1), (34), (35): Xaa is C or S
  MOD_RES (12), (13), (14), (15), (16): Xaa is A or G
  MOD_RES (17), (18), (19), (20): Xaa is A or G or is absent
XSKVIMNSLQEXXXXXXXXXYYVIPLPELDQSVXXPS

SEQ ID NO: 11684 - protein, 36 aa, Artificial Sequence
  GFR-binding peptide
  MOD_RES (1), (3), (35), (36): Xaa is C or S
XGXSEVVMDRYKKLVVNNASDFYLISIANLRTPVXX

SEQ ID NO: 11685 - protein, 36 aa, Artificial Sequence
  GFR-binding peptide
  MOD_RES (2), (35), (36): Xaa is C or S
  MOD_RES (13), (14), (15), (16), (17): Xaa is A or G
  MOD_RES (18), (19), (20), (21): Xaa is A or G or is absent
KXSRVIMNSLQEXXXXXXXXXYYVIPLPELAQPVXX

SEQ ID NO: 11686 - protein, 35 aa, Artificial Sequence
  GFR-binding peptide
  MOD_RES (33), (34): Xaa is C or S
  MOD_RES (11), (12), (13), (14), (15): Xaa is A or G
  MOD_RES (16), (17), (18), (19): Xaa is A or G or is absent
EVVMDRYKKLXXXXXXXXXFYLISIANLRTPVXXT

SEQ ID NO: 11687 - protein, 38 aa, Artificial Sequence
  GFR-binding peptide
  MOD_RES (2), (34), (35): Xaa is C or S
GXGEVVMENSLQEVVKDYEDYYLMTLPELETPVXXAKP

SEQ ID NO: 11688 - protein, 39 aa, Artificial Sequence
  GFR-binding peptide
  MOD_RES (2), (33), (34): Xaa is C or S
KXSKVVMNSLQEVKPTRGVYYVIPLPELDQPVXXPSASA

SEQ ID NO: 11689 - protein, 41 aa, Artificial Sequence
  GFR-binding peptide
  MOD_RES (2), (4), (38), (39): Xaa is C or S
  MOD_RES (16), (17), (18), (19), (20): Xaa is A or G
  MOD_RES (21), (22), (23), (24): Xaa is A or G or is absent
RXGXGEVVMDNSLQEXXXXXXXXXYYLMTLPELETPVXXAK

SEQ ID NO: 11690 - protein, 42 aa, Artificial Sequence; identical to SEQ ID NO: 4271
  GFR-binding peptide
  MOD_RES (1), (3), (37), (38): Xaa is C or S
  MOD_RES (15), (16), (17), (18), (19): Xaa is A or G
  MOD_RES (20), (21), (22), (23): Xaa is A or G or is absent

SEQ ID NO: 11691 - protein, 34 aa, Artificial Sequence
  GFR-binding peptide
  MOD_RES (2), (34): Xaa is C or S
GXSEVVMDEYQKYVVNNASDIFLISIPSLRTPVX

SEQ ID NO: 11692 - protein, 34 aa, Artificial Sequence; identical to SEQ ID NO: 4272
  GFR-binding peptide
  MOD_RES (1), (32), (33): Xaa is C or S

SEQ ID NO: 11693 - protein, 36 aa, Artificial Sequence
  GFR-binding peptide
  MOD_RES (2), (33), (34): Xaa is C or S
KXSKVVMNSLQEVKPTRGVYYVIPLPELDQPVXXPS

SEQ ID NO: 11694 - protein, 36 aa, Artificial Sequence
  GFR-binding peptide
  MOD_RES (1), (33), (34): Xaa is C or S
XGEVVMDNSLQEVVKENEDYYVMPLPELETPVXXAK

SEQ ID NO: 11695 - protein, 39 aa, Artificial Sequence; identical to SEQ ID NO: 4275
  GFR-binding peptide
  MOD_RES (2), (36), (37): Xaa is C or S
  MOD_RES (14), (15), (16), (17), (18): Xaa is A or G
  MOD_RES (19), (20), (21), (22): Xaa is A or G or is absent

SEQ ID NO: 11696 - protein, 34 aa, Artificial Sequence; identical to SEQ ID NO: 4277
  GFR-binding peptide
  MOD_RES (1), (1): Xaa is C or S
  MOD_RES (13), (14), (15), (16), (17): Xaa is A or G
  MOD_RES (18), (19), (20), (21): Xaa is A or G or is absent

SEQ ID NO: 11697 - protein, 39 aa, Artificial Sequence; identical to SEQ ID NO: 4278
  GFR-binding peptide
  MOD_RES (1), (33): Xaa is C or S

SEQ ID NO: 11698 - protein, 31 aa, Artificial Sequence
  GFR-binding peptide
  MOD_RES (31), (31): Xaa is C or S
EVVMDRYKKLVVNNASDFYLISIANLRTPVX

SEQ ID NO: 11699 - protein, 36 aa, Artificial Sequence
  GFR-binding peptide
  MOD_RES (2), (33), (34): Xaa is C or S
KXSKVIMEYQKYIKPTKGIIFLISIPSLDQSVXXPS

SEQ ID NO: 11700 - protein, 40 aa, Artificial Sequence; identical to SEQ ID NO: 4280
  GFR-binding peptide
  MOD_RES (34), (34): Xaa is C or S
  MOD_RES (12), (13), (14), (15), (16): Xaa is A or G
  MOD_RES (17), (18), (19), (20): Xaa is A or G or is absent

SEQ ID NO: 11701 - protein, 40 aa, Artificial Sequence
  GFR-binding peptide
  MOD_RES (2), (4), (36), (37): Xaa is C or S
HXGXARVVMNNSLQEIVNSSDDYYLVTLPELQTPAXXPKP

SEQ ID NO: 11702 - protein, 37 aa, Artificial Sequence
  GFR-binding peptide
  MOD_RES (1), (35), (36): Xaa is C or S
  MOD_RES (13), (14), (15), (16), (17): Xaa is A or G
  MOD_RES (18), (19), (20), (21): Xaa is A or G or is absent
XGEVVMDNSLQEXXXXXXXXXYYLMTLPELETPVXXA

SEQ ID NO: 11703 - protein, 39 aa, Artificial Sequence
  GFR-binding peptide
  MOD_RES (1), (3), (37), (38): Xaa is C or S
  MOD_RES (15), (16), (17), (18), (19): Xaa is A or G
  MOD_RES (20), (21), (22), (23): Xaa is A or G or is absent
XGXGEVVMENSLQEXXXXXXXXXYYLMTLPELETPVXXA

SEQ ID NO: 11704 - protein, 40 aa, Artificial Sequence
  GFR-binding peptide
  MOD_RES (1), (3), (34), (35): Xaa is C or S
XKXSRVIMNSLQEVKPKRGVYYVIPLPELAQPVXXPAASA

SEQ ID NO: 11705 - protein, 35 aa, Artificial Sequence
  GFR-binding peptide
  MOD_RES (1), (3), (35): Xaa is C or S
XGXSRVVMNNSLQEIVNSSDDYYLVTLPELKTPAX

SEQ ID NO: 11706 - protein, 33 aa, Artificial Sequence
  GFR-binding peptide
  MOD_RES (1), (32), (33): Xaa is C or S
XSRVIMNSLQEVKPKRGVYYVIPLPELAQPVXX

SEQ ID NO: 11707 - protein, 39 aa, Artificial Sequence; identical to SEQ ID NO: 4283
  GFR-binding peptide
  MOD_RES (2), (33), (34): Xaa is C or S

SEQ ID NO: 11708 - protein, 37 aa, Artificial Sequence
  GFR-binding peptide
  MOD_RES (2), (34), (35): Xaa is C or S
GXGEVVMDNSLQEVVKENEDYYVMPLPELETPVXXAK

SEQ ID NO: 11709 - protein, 35 aa, Artificial Sequence
  GFR-binding peptide
  MOD_RES (2), (34), (35): Xaa is C or S
GXARVVMNEYQKYIVNSSDDIFLVSIPSLQTPAXX

SEQ ID NO: 11710 - protein, 42 aa, Artificial Sequence
  GFR-binding peptide
  MOD_RES (2), (4), (36), (37): Xaa is C or S
HXGXARVVMNNSLQEIVNSSDDYYVVPLPELQTPAXXPKPVT

SEQ ID NO: 11711 - protein, 34 aa, Artificial Sequence
  GFR-binding peptide
  MOD_RES (1), (1): Xaa is C or S
  MOD_RES (13), (14), (15), (16), (17): Xaa is A or G
  MOD_RES (18), (19), (20), (21): Xaa is A or G or is absent
XGEVVMDEYQKYXXXXXXXXXIFLMSIPSLETPV

SEQ ID NO: 11712 - protein, 37 aa, Artificial Sequence; identical to SEQ ID NO: 4286
  GFR-binding peptide
  MOD_RES (1), (3), (37): Xaa is C or S
  MOD_RES (15), (16), (17), (18), (19): Xaa is A or G
  MOD_RES (20), (21), (22), (23): Xaa is A or G or is absent

SEQ ID NO: 11713 - protein, 40 aa, Artificial Sequence
  GFR-binding peptide
  MOD_RES (2), (4), (35), (36): Xaa is C or S
SXKXSKVIMNSLQEIKPTKGIYYVIPLPELDQSVXXPSAS

SEQ ID NO: 11714 - protein, 40 aa, Artificial Sequence
  GFR-binding peptide
  MOD_RES (1), (3), (37), (38): Xaa is C or S
  MOD_RES (15), (16), (17), (18), (19): Xaa is A or G
  MOD_RES (20), (21), (22), (23): Xaa is A or G or is absent
XGXSRVVMNEYQKYXXXXXXXXXIFLVSIPSLKTPAXXPK

SEQ ID NO: 11715 - protein, 37 aa, Artificial Sequence
  GFR-binding peptide
  MOD_RES (34), (35): Xaa is C or S
  MOD_RES (12), (13), (14), (15), (16): Xaa is A or G
  MOD_RES (17), (18), (19), (20): Xaa is A or G or is absent
SEVVMDNSLQEXXXXXXXXXYYVIPLPELRTPVXXTP

SEQ ID NO: 11716 - protein, 39 aa, Artificial Sequence
  GFR-binding peptide
  MOD_RES (2), (4), (36), (37): Xaa is C or S
HXGXARVVMNEYQKYIVNSSDDIFLVSIPSLQTPAXXPK

SEQ ID NO: 11717 - protein, 35 aa, Artificial Sequence
  GFR-binding peptide
  MOD_RES (34), (35): Xaa is C or S
  MOD_RES (12), (13), (14), (15), (16): Xaa is A or G
  MOD_RES (17), (18), (19), (20): Xaa is A or G or is absent
GEVVMDNSLQEXXXXXXXXXYYLMTLPELETPVXX

SEQ ID NO: 11718 - protein, 36 aa, Artificial Sequence
  GFR-binding peptide
  MOD_RES (1), (3), (36): Xaa is C or S
  MOD_RES (14), (15), (16), (17), (18): Xaa is A or G
  MOD_RES (19), (20), (21), (22): Xaa is A or G or is absent
XKXSRVIMNSLQEXXXXXXXXXYYLITLPELAQPVX

SEQ ID NO: 11719 - protein, 38 aa, Artificial Sequence; identical to SEQ ID NO: 4294
  GFR-binding peptide
  MOD_RES (33), (34): Xaa is C or S
  MOD_RES (11), (12), (13), (14), (15): Xaa is A or G
  MOD_RES (16), (17), (18), (19): Xaa is A or G or is absent

SEQ ID NO: 11720 - protein, 33 aa, Artificial Sequence; identical to SEQ ID NO: 4295
  GFR-binding peptide
  MOD_RES (2), (33): Xaa is C or S

SEQ ID NO: 11721 - protein, 39 aa, Artificial Sequence
  GFR-binding peptide
  MOD_RES (2), (36), (37): Xaa is C or S
  MOD_RES (14), (15), (16), (17), (18): Xaa is A or G
  MOD_RES (19), (20), (21), (22): Xaa is A or G or is absent
GXSRVVMNNSLQEXXXXXXXXXYYLVTLPELKTPAXXPK

SEQ ID NO: 11722 - protein, 39 aa, Artificial Sequence; identical to SEQ ID NO: 4297
  GFR-binding peptide
  MOD_RES (2), (4), (38), (39): Xaa is C or S
  MOD_RES (16), (17), (18), (19), (20): Xaa is A or G
  MOD_RES (21), (22), (23), (24): Xaa is A or G or is absent

SEQ ID NO: 11723 - protein, 41 aa, Artificial Sequence
  GFR-binding peptide
  MOD_RES (1), (3), (36), (37): Xaa is C or S
  MOD_RES (14), (15), (16), (17), (18): Xaa is A or G
  MOD_RES (19), (20), (21), (22): Xaa is A or G or is absent
XKXSKVIMNSLQEXXXXXXXXXYYVIPLPELDQSVXXPSAS

SEQ ID NO: 11724 - protein, 33 aa, Artificial Sequence; identical to SEQ ID NO: 4298
  GFR-binding peptide
  MOD_RES (2), (33): Xaa is C or S

SEQ ID NO: 11725 - protein, 37 aa, Artificial Sequence; identical to SEQ ID NO: 4299
  GFR-binding peptide
  MOD_RES (2), (36), (37): Xaa is C or S
  MOD_RES (14), (15), (16), (17), (18): Xaa is A or G
  MOD_RES (19), (20), (21), (22): Xaa is A or G or is absent

SEQ ID NO: 11726 - protein, 37 aa, Artificial Sequence; identical to SEQ ID NO: 4303
  GFR-binding peptide
  MOD_RES (2), (34), (35): Xaa is C or S

SEQ ID NO: 11727 - protein, 38 aa, Artificial Sequence; identical to SEQ ID NO: 4304
  GFR-binding peptide
  MOD_RES (1), (35), (36): Xaa is C or S
  MOD_RES (13), (14), (15), (16), (17): Xaa is A or G
  MOD_RES (18), (19), (20), (21): Xaa is A or G or is absent

SEQ ID NO: 11728 - protein, 39 aa, Artificial Sequence
  GFR-binding peptide
  MOD_RES (2), (34), (35): Xaa is C or S
GXSRVVMNNSLQEIVNSSDDYYLVTLPELKTPAXXPKPV

SEQ ID NO: 11729 - protein, 33 aa, Artificial Sequence
  GFR-binding peptide
  MOD_RES (12), (13), (14), (15), (16): Xaa is A or G
  MOD_RES (17), (18), (19), (20): Xaa is A or G or is absent
SEVVMDNSLQEXXXXXXXXXYYLITLPELRTPV

SEQ ID NO: 11730 - protein, 40 aa, Artificial Sequence; identical to SEQ ID NO: 4305
  GFR-binding peptide
  MOD_RES (2), (4), (36), (37): Xaa is C or S

SEQ ID NO: 11731 - protein, 36 aa, Artificial Sequence; identical to SEQ ID NO: 4306
  GFR-binding peptide
  MOD_RES (2), (4), (35), (36): Xaa is C or S

SEQ ID NO: 11732 - protein, 36 aa, Artificial Sequence
  GFR-binding peptide
  MOD_RES (1), (3), (35), (36): Xaa is C or S
XGXARVVMNNSLQEIVNSSDDYYVVPLPELQTPAXX

SEQ ID NO: 11733 - protein, 37 aa, Artificial Sequence
  GFR-binding peptide
  MOD_RES (1), (3), (37): Xaa is C or S
  MOD_RES (15), (16), (17), (18), (19): Xaa is A or G
  MOD_RES (20), (21), (22), (23): Xaa is A or G or is absent
XGXGEVVMDEYQKYXXXXXXXXXIFLMSIPSLETPVX

SEQ ID NO: 11734 - protein, 32 aa, Artificial Sequence; identical to SEQ ID NO: 4308
  GFR-binding peptide
  MOD_RES (31), (32): Xaa is C or S

SEQ ID NO: 11735 - protein, 33 aa, Artificial Sequence; identical to SEQ ID NO: 4310
  GFR-binding peptide
  MOD_RES (33), (33): Xaa is C or S
  MOD_RES (11), (12), (13), (14), (15): Xaa is A or G
  MOD_RES (16), (17), (18), (19): Xaa is A or G or is absent

SEQ ID NO: 11736 - protein, 37 aa, Artificial Sequence
  GFR-binding peptide
  MOD_RES (33), (34): Xaa is C or S
  MOD_RES (11), (12), (13), (14), (15): Xaa is A or G
  MOD_RES (16), (17), (18), (19): Xaa is A or G or is absent
EVVMDNSLQEXXXXXXXXXYYLMTLPELETPVXXAKP

SEQ ID NO: 11737 - protein, 41 aa, Artificial Sequence
  GFR-binding peptide
  MOD_RES (2), (4), (38), (39): Xaa is C or S
  MOD_RES (16), (17), (18), (19), (20): Xaa is A or G
  MOD_RES (21), (22), (23), (24): Xaa is A or G or is absent
RXGXGEVVMENSLQEXXXXXXXXXYYVMPLPELETPVXXAK

SEQ ID NO: 11738 - protein, 32 aa, Artificial Sequence; identical to SEQ ID NO: 4313
  GFR-binding peptide
  MOD_RES (1), (1): Xaa is C or S

SEQ ID NO: 11739 - protein, 41 aa, Artificial Sequence; identical to SEQ ID NO: 4314
  GFR-binding peptide
  MOD_RES (1), (3), (35), (36): Xaa is C or S

SEQ ID NO: 11740 - protein, 37 aa, Artificial Sequence
  GFR-binding peptide
  MOD_RES (1), (34), (35): Xaa is C or S
  MOD_RES (12), (13), (14), (15), (16): Xaa is A or G
  MOD_RES (17), (18), (19), (20): Xaa is A or G or is absent
XSKVVMEYQKYXXXXXXXXXIFLISIPSLDQPVXXPS

SEQ ID NO: 11741 - protein, 36 aa, Artificial Sequence
  GFR-binding peptide
  MOD_RES (2), (33), (34): Xaa is C or S
KXSKVVMEYQKYVKPTRGVIFLISIPSLDQPVXXPS

SEQ ID NO: 11742 - protein, 44 aa, Artificial Sequence
  GFR-binding peptide
  MOD_RES (2), (4), (38), (39): Xaa is C or S
  MOD_RES (16), (17), (18), (19), (20): Xaa is A or G
  MOD_RES (21), (22), (23), (24): Xaa is A or G or is absent
RXGXGEVVMDEYQKYXXXXXXXXXIFLMSIPSLETPVXXAKPIK

SEQ ID NO: 11743 - protein, 38 aa, Artificial Sequence; identical to SEQ ID NO: 4322
  GFR-binding peptide
  MOD_RES (33), (34): Xaa is C or S
  MOD_RES (11), (12), (13), (14), (15): Xaa is A or G
  MOD_RES (16), (17), (18), (19): Xaa is A or G or is absent

SEQ ID NO: 11744 - protein, 33 aa, Artificial Sequence
  GFR-binding peptide
  MOD_RES (2), (2): Xaa is C or S
GXARVVMNNSLQEIVNSSDDYYLVTLPELQTPA

SEQ ID NO: 11745 - protein, 38 aa, Artificial Sequence
  GFR-binding peptide
  MOD_RES (2), (4), (38): Xaa is C or S
  MOD_RES (16), (17), (18), (19), (20): Xaa is A or G
  MOD_RES (21), (22), (23), (24): Xaa is A or G or is absent
RXGXSEVVMDNSLQEXXXXXXXXXYYLITLPELRTPVX

SEQ ID NO: 11746 - protein, 38 aa, Artificial Sequence
  GFR-binding peptide
  MOD_RES (1), (35), (36): Xaa is C or S
  MOD_RES (13), (14), (15), (16), (17): Xaa is A or G
  MOD_RES (18), (19), (20), (21): Xaa is A or G or is absent
XARVVMNEYQKYXXXXXXXXXIFLVSIPSLQTPAXXPK

SEQ ID NO: 11747 - protein, 38 aa, Artificial Sequence; identical to SEQ ID NO: 4329
  GFR-binding peptide
  MOD_RES (1), (33), (34): Xaa is C or S

SEQ ID NO: 11748 - protein, 35 aa, Artificial Sequence; identical to SEQ ID NO: 4331
  GFR-binding peptide
  MOD_RES (34), (35): Xaa is C or S
  MOD_RES (12), (13), (14), (15), (16): Xaa is A or G
  MOD_RES (17), (18), (19), (20): Xaa is A or G or is absent

SEQ ID NO: 11749 - protein, 36 aa, Artificial Sequence; identical to SEQ ID NO: 4332
  GFR-binding peptide
  MOD_RES (2), (36): Xaa is C or S
  MOD_RES (14), (15), (16), (17), (18): Xaa is A or G
  MOD_RES (19), (20), (21), (22): Xaa is A or G or is absent

SEQ ID NO: 11750 - protein, 38 aa, Artificial Sequence
  GFR-binding peptide
  MOD_RES (33), (34): Xaa is C or S
  MOD_RES (11), (12), (13), (14), (15): Xaa is A or G
  MOD_RES (16), (17), (18), (19): Xaa is A or G or is absent
SRVIMEYQKYXXXXXXXXXIFLISIPSLAQPVXXPAAS

SEQ ID NO: 11751 - protein, 33 aa, Artificial Sequence; identical to SEQ ID NO: 4335
  GFR-binding peptide
  MOD_RES (1), (1): Xaa is C or S
  MOD_RES (12), (13), (14), (15), (16): Xaa is A or G
  MOD_RES (17), (18), (19), (20): Xaa is A or G or is absent

SEQ ID NO: 11752 - protein, 37 aa, Artificial Sequence
  GFR-binding peptide
  MOD_RES (2), (34), (35): Xaa is C or S
GXARVVMNEYQKYIVNSSDDIFLVSIPSLQTPAXXPK

SEQ ID NO: 11753 - protein, 35 aa, Artificial Sequence; identical to SEQ ID NO: 4337
  GFR-binding peptide
  MOD_RES (2), (2): Xaa is C or S
  MOD_RES (14), (15), (16), (17), (18): Xaa is A or G
  MOD_RES (19), (20), (21), (22): Xaa is A or G or is absent

SEQ ID NO: 11754 - protein, 34 aa, Artificial Sequence; identical to SEQ ID NO: 4338
  GFR-binding peptide
  MOD_RES (1), (34): Xaa is C or S
  MOD_RES (12), (13), (14), (15), (16): Xaa is A or G
  MOD_RES (17), (18), (19), (20): Xaa is A or G or is absent

SEQ ID NO: 11755 - protein, 40 aa, Artificial Sequence
  GFR-binding peptide
  MOD_RES (2), (35), (36): Xaa is C or S
  MOD_RES (13), (14), (15), (16), (17): Xaa is A or G
  MOD_RES (18), (19), (20), (21): Xaa is A or G or is absent
KXSRVIMEYQKYXXXXXXXXXIFLISIPSLAQPVXXPAAS

SEQ ID NO: 11756 - protein, 37 aa, Artificial Sequence
  GFR-binding peptide
  MOD_RES (1), (35), (36): Xaa is C or S
  MOD_RES (13), (14), (15), (16), (17): Xaa is A or G
  MOD_RES (18), (19), (20), (21): Xaa is A or G or is absent
XGEVVMENSLQEXXXXXXXXXYYVMPLPELETPVXXA

SEQ ID NO: 11757 - protein, 42 aa, Artificial Sequence
  GFR-binding peptide
  MOD_RES (1), (3), (36), (37): Xaa is C or S
  MOD_RES (14), (15), (16), (17), (18): Xaa is A or G
  MOD_RES (19), (20), (21), (22): Xaa is A or G or is absent
XKXSRVIMNSLQEXXXXXXXXXYYLITLPELAQPVXXPAASA

SEQ ID NO: 11758 - protein, 43 aa, Artificial Sequence
  GFR-binding peptide
  MOD_RES (2), (4), (37), (38): Xaa is C or S
  MOD_RES (15), (16), (17), (18), (19): Xaa is A or G
  MOD_RES (20), (21), (22), (23): Xaa is A or G or is absent
SXKXSRVIMNSLQEXXXXXXXXXYYLITLPELAQPVXXPAASA

SEQ ID NO: 11759 - protein, 32 aa, Artificial Sequence; identical to SEQ ID NO: 4346
  GFR-binding peptide
  MOD_RES (11), (12), (13), (14), (15): Xaa is A or G
  MOD_RES (16), (17), (18), (19): Xaa is A or G or is absent

SEQ ID NO: 11760 - protein, 38 aa, Artificial Sequence
  GFR-binding peptide
  MOD_RES (2), (36), (37): Xaa is C or S
  MOD_RES (14), (15), (16), (17), (18): Xaa is A or G
  MOD_RES (19), (20), (21), (22): Xaa is A or G or is absent
GXGEVVMENSLQEXXXXXXXXXYYVMPLPELETPVXXA

SEQ ID NO: 11761 - protein, 32 aa, Artificial Sequence
  GFR-binding peptide
  MOD_RES (31), (32): Xaa is C or S
RVVMNNSLQEIVNSSDDYYVVPLPELKTPAXX

SEQ ID NO: 11762 - protein, 39 aa, Artificial Sequence; identical to SEQ ID NO: 4349
  GFR-binding peptide
  MOD_RES (1), (3), (37), (38): Xaa is C or S
  MOD_RES (15), (16), (17), (18), (19): Xaa is A or G
  MOD_RES (20), (21), (22), (23): Xaa is A or G or is absent

SEQ ID NO: 11763 - protein, 33 aa, Artificial Sequence; identical to SEQ ID NO: 4350
  GFR-binding peptide
  MOD_RES (33), (33): Xaa is C or S
  MOD_RES (11), (12), (13), (14), (15): Xaa is A or G
  MOD_RES (16), (17), (18), (19): Xaa is A or G or is absent

SEQ ID NO: 11764 - protein, 36 aa, Artificial Sequence
  GFR-binding peptide
  MOD_RES (2), (34), (35): Xaa is C or S
GXARVVMNNSLQEIVNSSDDYYLVTLPELQTPAXXP

SEQ ID NO: 11765 - protein, 34 aa, Artificial Sequence; identical to SEQ ID NO: 4351
  GFR-binding peptide
  MOD_RES (1), (32), (33): Xaa is C or S

SEQ ID NO: 11766 - protein, 37 aa, Artificial Sequence
  GFR-binding peptide
  MOD_RES (1), (35), (36): Xaa is C or S
  MOD_RES (13), (14), (15), (16), (17): Xaa is A or G
  MOD_RES (18), (19), (20), (21): Xaa is A or G or is absent
XSEVVMDNSLQEXXXXXXXXXYYVIPLPELRTPVXXT

SEQ ID NO: 11767 - protein, 34 aa, Artificial Sequence
  GFR-binding peptide
  MOD_RES (1), (3): Xaa is C or S
XGXGEVVMDNSLQEVVKENEDYYVMPLPELETPV

SEQ ID NO: 11768 - protein, 39 aa, Artificial Sequence
  GFR-binding peptide
  MOD_RES (1), (3), (36), (37): Xaa is C or S
  MOD_RES (14), (15), (16), (17), (18): Xaa is A or G
  MOD_RES (19), (20), (21), (22): Xaa is A or G or is absent
XKXSKVVMNSLQEXXXXXXXXXYYVIPLPELDQPVXXPS

SEQ ID NO: 11769 - protein, 37 aa, Artificial Sequence
  GFR-binding peptide
  MOD_RES (31), (32): Xaa is C or S
EVVMENSLQEVVKDYEDYYVMPLPELETPVXXAKPIS

SEQ ID NO: 11770 - protein, 36 aa, Artificial Sequence
  GFR-binding peptide
  MOD_RES (1), (3): Xaa is C or S
  MOD_RES (15), (16), (17), (18), (19): Xaa is A or G
  MOD_RES (20), (21), (22), (23): Xaa is A or G or is absent
XGXARVVMNEYQKYXXXXXXXXXIFLVSIPSLQTPA

SEQ ID NO: 11771 - protein, 36 aa, Artificial Sequence; identical to SEQ ID NO: 4355
  GFR-binding peptide
  MOD_RES (31), (32): Xaa is C or S

SEQ ID NO: 11772 - protein, 33 aa, Artificial Sequence
  GFR-binding peptide
  MOD_RES (31), (32): Xaa is C or S
SKVIMNSLQEIKPTKGIYYVIPLPELDQSVXXP

SEQ ID NO: 11773 - protein, 41 aa, Artificial Sequence
  GFR-binding peptide
  MOD_RES (2), (36), (37): Xaa is C or S
  MOD_RES (14), (15), (16), (17), (18): Xaa is A or G
  MOD_RES (19), (20), (21), (22): Xaa is A or G or is absent
GXGEVVMEEYQKYXXXXXXXXXIFLMSIPSLETPVXXAKPI

SEQ ID NO: 11774 - protein, 37 aa, Artificial Sequence; identical to SEQ ID NO: 4357
  GFR-binding peptide
  MOD_RES (2), (4): Xaa is C or S
  MOD_RES (16), (17), (18), (19), (20): Xaa is A or G
  MOD_RES (21), (22), (23), (24): Xaa is A or G or is absent

SEQ ID NO: 11775 - protein, 36 aa, Artificial Sequence; identical to SEQ ID NO: 4358
  GFR-binding peptide
  MOD_RES (2), (36): Xaa is C or S
  MOD_RES (14), (15), (16), (17), (18): Xaa is A or G
  MOD_RES (19), (20), (21), (22): Xaa is A or G or is absent

SEQ ID NO: 11776 - protein, 38 aa, Artificial Sequence
  GFR-binding peptide
  MOD_RES (2), (4), (35), (36): Xaa is C or S
SXKXSKVIMNSLQEIKPTKGIYYVIPLPELDQSVXXPS

SEQ ID NO: 11777 - protein, 42 aa, Artificial Sequence; identical to SEQ ID NO: 4359
  GFR-binding peptide
  MOD_RES (2), (4), (38), (39): Xaa is C or S
  MOD_RES (16), (17), (18), (19), (20): Xaa is A or G
  MOD_RES (21), (22), (23), (24): Xaa is A or G or is absent

SEQ ID NO: 11778 - protein, 42 aa, Artificial Sequence; identical to SEQ ID NO: 4360
  GFR-binding peptide
  MOD_RES (2), (36), (37): Xaa is C or S
  MOD_RES (14), (15), (16), (17), (18): Xaa is A or G
  MOD_RES (19), (20), (21), (22): Xaa is A or G or is absent

SEQ ID NO: 11779 - protein, 40 aa, Artificial Sequence
  GFR-binding peptide
  MOD_RES (34), (35): Xaa is C or S
  MOD_RES (12), (13), (14), (15), (16): Xaa is A or G
  MOD_RES (17), (18), (19), (20): Xaa is A or G or is absent
GEVVMEEYQKYXXXXXXXXXIFLMSIPSLETPVXXAKPIS

SEQ ID NO: 11780 - protein, 34 aa, Artificial Sequence; identical to SEQ ID NO: 4364
  GFR-binding peptide
  MOD_RES (1), (1): Xaa is C or S
  MOD_RES (13), (14), (15), (16), (17): Xaa is A or G
  MOD_RES (18), (19), (20), (21): Xaa is A or G or is absent

SEQ ID NO: 11781 - protein, 38 aa, Artificial Sequence
  GFR-binding peptide
  MOD_RES (34), (35): Xaa is C or S
  MOD_RES (12), (13), (14), (15), (16): Xaa is A or G
  MOD_RES (17), (18), (19), (20): Xaa is A or G or is absent
ARVVMNEYQKYXXXXXXXXXIFLVSIPSLQTPAXXPKP

SEQ ID NO: 11782 - protein, 32 aa, Artificial Sequence
  GFR-binding peptide
  MOD_RES (11), (12), (13), (14), (15): Xaa is A or G
  MOD_RES (16), (17), (18), (19): Xaa is A or G or is absent
RVVMNNSLQEXXXXXXXXXYYLVTLPELQTPA

SEQ ID NO: 11783 - protein, 34 aa, Artificial Sequence
  GFR-binding peptide
  MOD_RES (31), (32): Xaa is C or S
EVVMENSLQEVVKDYEDYYLMTLPELETPVXXAK

SEQ ID NO: 11784 - protein, 39 aa, Artificial Sequence; identical to SEQ ID NO: 4365
  GFR-binding peptide
  MOD_RES (1), (35), (36): Xaa is C or S
  MOD_RES (13), (14), (15), (16), (17): Xaa is A or G
  MOD_RES (18), (19), (20), (21): Xaa is A or G or is absent

SEQ ID NO: 11785 - protein, 36 aa, Artificial Sequence
  GFR-binding peptide
  MOD_RES (1), (3), (36): Xaa is C or S
  MOD_RES (14), (15), (16), (17), (18): Xaa is A or G
  MOD_RES (19), (20), (21), (22): Xaa is A or G or is absent
XKXSKVVMNSLQEXXXXXXXXXYYVIPLPELDQPVX

SEQ ID NO: 11786 - protein, 32 aa, Artificial Sequence
  GFR-binding peptide
  MOD_RES (1), (32): Xaa is C or S
XSKVVMNSLQEVKPTRGVYYLITLPELDQPVX

SEQ ID NO: 11787 - protein, 39 aa, Artificial Sequence
  GFR-binding peptide
  MOD_RES (1), (35), (36): Xaa is C or S
  MOD_RES (13), (14), (15), (16), (17): Xaa is A or G
  MOD_RES (18), (19), (20), (21): Xaa is A or G or is absent
XSRVVMNEYQKYXXXXXXXXXIFLVSIPSLKTPAXXPKP

SEQ ID NO: 11788 - protein, 36 aa, Artificial Sequence
  GFR-binding peptide
  MOD_RES (31), (32): Xaa is C or S
SKVVMNSLQEVKPTRGVYYVIPLPELDQPVXXPSAS

SEQ ID NO: 11789 - protein, 37 aa, Artificial Sequence
  GFR-binding peptide
  MOD_RES (2), (34), (35): Xaa is C or S
GXSEVVMDNSLQEVVNNASDYYLITLPELRTPVXXTP

SEQ ID NO: 11790 - protein, 35 aa, Artificial Sequence; identical to SEQ ID NO: 4369
  GFR-binding peptide
  MOD_RES (33), (34): Xaa is C or S
  MOD_RES (11), (12), (13), (14), (15): Xaa is A or G
  MOD_RES (16), (17), (18), (19): Xaa is A or G or is absent

SEQ ID NO: 11791 - protein, 41 aa, Artificial Sequence
  GFR-binding peptide
  MOD_RES (1), (3), (37), (38): Xaa is C or S
  MOD_RES (15), (16), (17), (18), (19): Xaa is A or G
  MOD_RES (20), (21), (22), (23): Xaa is A or G or is absent
XGXARVVMNNSLQEXXXXXXXXXYYLVTLPELQTPAXXPKP

SEQ ID NO: 11792 - protein, 34 aa, Artificial Sequence
  GFR-binding peptide
  MOD_RES (1), (3): Xaa is C or S
XGXGEVVMDEYQKYVVKENEDIFLMSIPSLETPV

SEQ ID NO: 11793 - protein, 37 aa, Artificial Sequence
  GFR-binding peptide
  MOD_RES (31), (32): Xaa is C or S
SRVIMNSLQEVKPKRGVYYVIPLPELAQPVXXPAASA

SEQ ID NO: 11794 - protein, 40 aa, Artificial Sequence
  GFR-binding peptide
  MOD_RES (2), (4), (38), (39): Xaa is C or S
  MOD_RES (16), (17), (18), (19), (20): Xaa is A or G
  MOD_RES (21), (22), (23), (24): Xaa is A or G or is absent
RXGXSEVVMDQYNKLXXXXXXXXXLYLISIASLRTPVXXT

SEQ ID NO: 11795 - protein, 37 aa, Artificial Sequence
  GFR-binding peptide
  MOD_RES (1), (3), (36), (37): Xaa is C or S
  MOD_RES (14), (15), (16), (17), (18): Xaa is A or G
  MOD_RES (19), (20), (21), (22): Xaa is A or G or is absent
XKXSRVIMNSLQEXXXXXXXXXYYLITLPELAQPVXX

SEQ ID NO: 11796 - protein, 40 aa, Artificial Sequence
  GFR-binding peptide
  MOD_RES (2), (4), (38), (39): Xaa is C or S
  MOD_RES (16), (17), (18), (19), (20): Xaa is A or G
  MOD_RES (21), (22), (23), (24): Xaa is A or G or is absent
HXGXARVVMNNSLQEXXXXXXXXXYYVVPLPELQTPAXXP

SEQ ID NO: 11797 - protein, 35 aa, Artificial Sequence
  GFR-binding peptide
  MOD_RES (31), (31): Xaa is C or S
RVVMNEYQKYIVNSSDDIFLVSIPSLKTPAXTPKT

SEQ ID NO: 11798 - protein, 39 aa, Artificial Sequence; identical to SEQ ID NO: 4370
  GFR-binding peptide
  MOD_RES (2), (36): Xaa is C or S
  MOD_RES (14), (15), (16), (17), (18): Xaa is A or G
  MOD_RES (19), (20), (21), (22): Xaa is A or G or is absent

SEQ ID NO: 11799 - protein, 39 aa, Artificial Sequence; identical to SEQ ID NO: 4371
  GFR-binding peptide
  MOD_RES (34), (35): Xaa is C or S
  MOD_RES (12), (13), (14), (15), (16): Xaa is A or G
  MOD_RES (17), (18), (19), (20): Xaa is A or G or is absent

SEQ ID NO: 11800 - protein, 35 aa, Artificial Sequence
  GFR-binding peptide
  MOD_RES (2), (4): Xaa is C or S
RXGXSEVVMDRYKKLVVNNASDFYLISIANLRTPV

SEQ ID NO: 11801 - protein, 36 aa, Artificial Sequence; identical to SEQ ID NO: 4373
  GFR-binding peptide
  MOD_RES (2), (34): Xaa is C or S

SEQ ID NO: 11802 - protein, 44 aa, Artificial Sequence
  GFR-binding peptide
  MOD_RES (2), (4), (38), (39): Xaa is C or S
  MOD_RES (16), (17), (18), (19), (20): Xaa is A or G
  MOD_RES (21), (22), (23), (24): Xaa is A or G or is absent
RXGXGEVVMEEYQKYXXXXXXXXXIFLMSIPSLETPVXXAKPIS

SEQ ID NO: 11803 - protein, 34 aa, Artificial Sequence
  GFR-binding peptide
  MOD_RES (32), (33): Xaa is C or S
SEVVMDEYQKYVVNNASDIFLISIPSLRTPVXXT

SEQ ID NO: 11804 - protein, 40 aa, Artificial Sequence; identical to SEQ ID NO: 4376
  GFR-binding peptide
  MOD_RES (2), (34), (35): Xaa is C or S

SEQ ID NO: 11805 - protein, 38 aa, Artificial Sequence
  GFR-binding peptide
  MOD_RES (34), (35): Xaa is C or S
  MOD_RES (12), (13), (14), (15), (16): Xaa is A or G
  MOD_RES (17), (18), (19), (20): Xaa is A or G or is absent
SEVVMDRYKKLXXXXXXXXXFYLISIANLRTPVXXTPP

SEQ ID NO: 11806 - protein, 43 aa, Artificial Sequence
  GFR-binding peptide
  MOD_RES (2), (4), (38), (39): Xaa is C or S
  MOD_RES (16), (17), (18), (19), (20): Xaa is A or G
  MOD_RES (21), (22), (23), (24): Xaa is A or G or is absent
HXGXARVVMNNSLQEXXXXXXXXXYYVVPLPELQTPAXXPKPV

SEQ ID NO: 11807 - protein, 37 aa, Artificial Sequence; identical to SEQ ID NO: 4380
  GFR-binding peptide
  MOD_RES (2), (34), (35): Xaa is C or S

SEQ ID NO: 11808 - protein, 37 aa, Artificial Sequence
  GFR-binding peptide
  MOD_RES (34), (35): Xaa is C or S
  MOD_RES (12), (13), (14), (15), (16): Xaa is A or G
  MOD_RES (17), (18), (19), (20): Xaa is A or G or is absent
GEVVMDEYQKYXXXXXXXXXIFLMSIPSLETPVXXAK

SEQ ID NO: 11809 - protein, 35 aa, Artificial Sequence; identical to SEQ ID NO: 4381
  GFR-binding peptide
  MOD_RES (1), (3): Xaa is C or S
  MOD_RES (14), (15), (16), (17), (18): Xaa is A or G
  MOD_RES (19), (20), (21), (22): Xaa is A or G or is absent

SEQ ID NO: 11810 - protein, 36 aa, Artificial Sequence
  GFR-binding peptide
  MOD_RES (1), (35), (36): Xaa is C or S
  MOD_RES (13), (14), (15), (16), (17): Xaa is A or G
  MOD_RES (18), (19), (20), (21): Xaa is A or G or is absent
XARVVMNNSLQEXXXXXXXXXYYVVPLPELQTPAXX

SEQ ID NO: 11811 - protein, 36 aa, Artificial Sequence
  GFR-binding peptide
  MOD_RES (2), (4), (36): Xaa is C or S
RXGXSEVVMDEYQKYVVNNASDIFLISIPSLRTPVX

SEQ ID NO: 11812 - protein, 36 aa, Artificial Sequence; identical to SEQ ID NO: 4386
  GFR-binding peptide
  MOD_RES (2), (4): Xaa is C or S
  MOD_RES (15), (16), (17), (18), (19): Xaa is A or G
  MOD_RES (20), (21), (22), (23): Xaa is A or G or is absent

SEQ ID NO: 11813 - protein, 42 aa, Artificial Sequence; identical to SEQ ID NO: 4387
  GFR-binding peptide
  MOD_RES (2), (4), (38): Xaa is C or S
  MOD_RES (16), (17), (18), (19), (20): Xaa is A or G
  MOD_RES (21), (22), (23), (24): Xaa is A or G or is absent

SEQ ID NO: 11814 - protein, 34 aa, Artificial Sequence
  GFR-binding peptide
  MOD_RES (1), (34): Xaa is C or S
  MOD_RES (12), (13), (14), (15), (16): Xaa is A or G
  MOD_RES (17), (18), (19), (20): Xaa is A or G or is absent
XSRVIMEYQKYXXXXXXXXXIFLISIPSLAQPVX

SEQ ID NO: 11815 - protein, 44 aa, Artificial Sequence
  GFR-binding peptide
  MOD_RES (2), (4), (38): Xaa is C or S
  MOD_RES (16), (17), (18), (19), (20): Xaa is A or G
  MOD_RES (21), (22), (23), (24): Xaa is A or G or is absent
HXGXSRVVMNNSLQEXXXXXXXXXYYVVPLPELKTPAXTPKTVH

SEQ ID NO: 11816 - protein, 39 aa, Artificial Sequence
  GFR-binding peptide
  MOD_RES (2), (33), (34): Xaa is C or S
KXSKVIMNSLQEIKPTKGIYYVIPLPELDQSVXXPSASA

SEQ ID NO: 11817 - protein, 42 aa, Artificial Sequence; identical to SEQ ID NO: 4388
  GFR-binding peptide
  MOD_RES (2), (4), (38), (39): Xaa is C or S
  MOD_RES (16), (17), (18), (19), (20): Xaa is A or G
  MOD_RES (21), (22), (23), (24): Xaa is A or G or is absent

SEQ ID NO: 11818 - protein, 37 aa, Artificial Sequence
  GFR-binding peptide
  MOD_RES (2), (33), (34): Xaa is C or S
KXSRVIMEYQKYVKPKRGVIFLISIPSLAQPVXXPAA

SEQ ID NO: 11819 - protein, 36 aa, Artificial Sequence
  GFR-binding peptide
  MOD_RES (34), (35): Xaa is C or S
  MOD_RES (12), (13), (14), (15), (16): Xaa is A or G
  MOD_RES (17), (18), (19), (20): Xaa is A or G or is absent
SEVVMDRYKKLXXXXXXXXXFYLISIANLRTPVXXT

SEQ ID NO: 11820 - protein, 33 aa, Artificial Sequence; identical to SEQ ID NO: 4390
  GFR-binding peptide
  MOD_RES (1), (3): Xaa is C or S

SEQ ID NO: 11821 - protein, 37 aa, Artificial Sequence
  GFR-binding peptide
  MOD_RES (33), (34): Xaa is C or S
  MOD_RES (11), (12), (13), (14), (15): Xaa is A or G
  MOD_RES (16), (17), (18), (19): Xaa is A or G or is absent
EVVMDQYNKLXXXXXXXXXLYLISIASLRTPVXXTPP

SEQ ID NO: 11822 - protein, 38 aa, Artificial Sequence; identical to SEQ ID NO: 4394
  GFR-binding peptide
  MOD_RES (33), (34): Xaa is C or S
  MOD_RES (11), (12), (13), (14), (15): Xaa is A or G
  MOD_RES (16), (17), (18), (19): Xaa is A or G or is absent

SEQ ID NO: 11823 - protein, 40 aa, Artificial Sequence
  GFR-binding peptide
  MOD_RES (2), (36), (37): Xaa is C or S
  MOD_RES (14), (15), (16), (17), (18): Xaa is A or G
  MOD_RES (19), (20), (21), (22): Xaa is A or G or is absent
GXGEVVMDNSLQEXXXXXXXXXYYVMPLPELETPVXXAKP

SEQ ID NO: 11824 - protein, 38 aa, Artificial Sequence
  GFR-binding peptide
  MOD_RES (2), (35), (36): Xaa is C or S
  MOD_RES (13), (14), (15), (16), (17): Xaa is A or G
  MOD_RES (18), (19), (20), (21): Xaa is A or G or is absent
KXSKVVMNSLQEXXXXXXXXXYYLITLPELDQPVXXPS

SEQ ID NO: 11825 - protein, 39 aa, Artificial Sequence; identical to SEQ ID NO: 4397
  GFR-binding peptide
  MOD_RES (33), (34): Xaa is C or S
  MOD_RES (11), (12), (13), (14), (15): Xaa is A or G
  MOD_RES (16), (17), (18), (19): Xaa is A or G or is absent

SEQ ID NO: 11826 - protein, 35 aa, Artificial Sequence
  GFR-binding peptide
  MOD_RES (34), (35): Xaa is C or S
  MOD_RES (12), (13), (14), (15), (16): Xaa is A or G
  MOD_RES (17), (18), (19), (20): Xaa is A or G or is absent
SRVVMNEYQKYXXXXXXXXXIFLVSIPSLKTPAXX

SEQ ID NO: 11827 - protein, 35 aa, Artificial Sequence
  GFR-binding peptide
  MOD_RES (32), (33): Xaa is C or S
SRVVMNNSLQEIVNSSDDYYLVTLPELKTPAXXPK

SEQ ID NO: 11828 - protein, 36 aa, Artificial Sequence
  GFR-binding peptide
  MOD_RES (31), (32): Xaa is C or S
SRVIMNSLQEVKPKRGVYYLITLPELAQPVXXPAAS

SEQ ID NO: 11829 - protein, 35 aa, Artificial Sequence; identical to SEQ ID NO: 4403
  GFR-binding peptide
  MOD_RES (2), (34), (35): Xaa is C or S

SEQ ID NO: 11830 - protein, 38 aa, Artificial Sequence
  GFR-binding peptide
  MOD_RES (32), (33): Xaa is C or S
SEVVMDNSLQEVVNNASDYYLITLPELRTPVXXTPPTS

SEQ ID NO: 11831 - protein, 40 aa, Artificial Sequence; identical to SEQ ID NO: 4406
  GFR-binding peptide
  MOD_RES (2), (4), (36), (37): Xaa is C or S

SEQ ID NO: 11832 - protein, 34 aa, Artificial Sequence; identical to SEQ ID NO: 4409
  GFR-binding peptide
  MOD_RES (2), (34): Xaa is C or S

SEQ ID NO: 11833 - protein, 41 aa, Artificial Sequence
  GFR-binding peptide
  MOD_RES (2), (36), (37): Xaa is C or S
  MOD_RES (14), (15), (16), (17), (18): Xaa is A or G
  MOD_RES (19), (20), (21), (22): Xaa is A or G or is absent
GXGEVVMENSLQEXXXXXXXXXYYLMTLPELETPVXXAKPI

SEQ ID NO: 11834 - protein, 32 aa, Artificial Sequence
  GFR-binding peptide
  MOD_RES (1), (1): Xaa is C or S
XGEVVMDNSLQEVVKENEDYYVMPLPELETPV

SEQ ID NO: 11835 - protein, 35 aa, Artificial Sequence; identical to SEQ ID NO: 4412
  GFR-binding peptide
  MOD_RES (2), (33), (34): Xaa is C or S

SEQ ID NO: 11836 - protein, 35 aa, Artificial Sequence; identical to SEQ ID NO: 4414
  GFR-binding peptide
  MOD_RES (1), (3), (34), (35): Xaa is C or S

SEQ ID NO: 11837 - protein, 32 aa, Artificial Sequence
  GFR-binding peptide
  MOD_RES (32), (32): Xaa is C or S
ARVVMNNSLQEIVNSSDDYYVVPLPELQTPAX

SEQ ID NO: 11838 - protein, 38 aa, Artificial Sequence
  GFR-binding peptide
  MOD_RES (33), (34): Xaa is C or S
  MOD_RES (11), (12), (13), (14), (15): Xaa is A or G
  MOD_RES (16), (17), (18), (19): Xaa is A or G or is absent
RVVMNEYQKYXXXXXXXXXIFLVSIPSLKTPAXXPKPV

SEQ ID NO: 11839 - protein, 39 aa, Artificial Sequence
  GFR-binding peptide
  MOD_RES (2), (4), (36), (37): Xaa is C or S
HXGXSRVVMNNSLQEIVNSSDDYYVVPLPELKTPAXXPK

SEQ ID NO: 11840 - protein, 33 aa, Artificial Sequence; identical to SEQ ID NO: 4417
  GFR-binding peptide
  MOD_RES (31), (32): Xaa is C or S

SEQ ID NO: 11841 - protein, 36 aa, Artificial Sequence; identical to SEQ ID NO: 4418
  GFR-binding peptide
  MOD_RES (2), (35), (36): Xaa is C or S
  MOD_RES (13), (14), (15), (16), (17): Xaa is A or G
  MOD_RES (18), (19), (20), (21): Xaa is A or G or is absent

SEQ ID NO: 11842 - protein, 33 aa, Artificial Sequence; identical to SEQ ID NO: 4419
  GFR-binding peptide
  MOD_RES (31), (32): Xaa is C or S

SEQ ID NO: 11843 - protein, 38 aa, Artificial Sequence
  GFR-binding peptide
  MOD_RES (2), (4), (36), (37): Xaa is C or S
HXGXSRVVMNEYQKYIVNSSDDIFLVSIPSLKTPAXXP

SEQ ID NO: 11844 - protein, 40 aa, Artificial Sequence; identical to SEQ ID NO: 4422
  GFR-binding peptide
  MOD_RES (2), (36): Xaa is C or S
  MOD_RES (14), (15), (16), (17), (18): Xaa is A or G
  MOD_RES (19), (20), (21), (22): Xaa is A or G or is absent

SEQ ID NO: 11845 - protein, 40 aa, Artificial Sequence
  GFR-binding peptide
  MOD_RES (2), (4), (36), (37): Xaa is C or S
RXGXSEVVMDQYNKLVVNNASDLYLISIASLRTPVXXTPP

SEQ ID NO: 11846 - protein, 42 aa, Artificial Sequence
  GFR-binding peptide
  MOD_RES (2), (36), (37): Xaa is C or S
  MOD_RES (14), (15), (16), (17), (18): Xaa is A or G
  MOD_RES (19), (20), (21), (22): Xaa is A or G or is absent
GXSRVVMNEYQKYXXXXXXXXXIFLVSIPSLKTPAXXPKPVY

SEQ ID NO: 11847 - protein, 43 aa, Artificial Sequence
  GFR-binding peptide
  MOD_RES (1), (3), (37), (38): Xaa is C or S
  MOD_RES (15), (16), (17), (18), (19): Xaa is A or G
  MOD_RES (20), (21), (22), (23): Xaa is A or G or is absent
XGXGEVVMENSLQEXXXXXXXXXYYVMPLPELETPVXXAKPIS

SEQ ID NO: 11848 - protein, 34 aa, Artificial Sequence
  GFR-binding peptide
  MOD_RES (1), (3): Xaa is C or S
XGXGEVVMENSLQEVVKDYEDYYLMTLPELETPV

SEQ ID NO: 11849 - protein, 34 aa, Artificial Sequence
  GFR-binding peptide
  MOD_RES (1), (32), (33): Xaa is C or S
XSRVIMEYQKYVKPKRGVIFLISIPSLAQPVXXP

SEQ ID NO: 11850 - protein, 33 aa, Artificial Sequence; identical to SEQ ID NO: 4426
  GFR-binding peptide
  MOD_RES (31), (32): Xaa is C or S

SEQ ID NO: 11851 - protein, 41 aa, Artificial Sequence; identical to SEQ ID NO: 4427
  GFR-binding peptide
  MOD_RES (2), (36), (37): Xaa is C or S
  MOD_RES (14), (15), (16), (17), (18): Xaa is A or G
  MOD_RES (19), (20), (21), (22): Xaa is A or G or is absent

SEQ ID NO: 11852 - protein, 36 aa, Artificial Sequence
  GFR-binding peptide
  MOD_RES (1), (3), (34), (35): Xaa is C or S
XKXSKVVMNSLQEVKPTRGVYYVIPLPELDQPVXXP

SEQ ID NO: 11853 - protein, 38 aa, Artificial Sequence; identical to SEQ ID NO: 4428
  GFR-binding peptide
  MOD_RES (2), (33), (34): Xaa is C or S

SEQ ID NO: 11854 - protein, 36 aa, Artificial Sequence; identical to SEQ ID NO: 4429
  GFR-binding peptide
  MOD_RES (1), (34), (35): Xaa is C or S
  MOD_RES (12), (13), (14), (15), (16): Xaa is A or G
  MOD_RES (17), (18), (19), (20): Xaa is A or G or is absent

SEQ ID NO: 11855 - protein, 42 aa, Artificial Sequence
  GFR-binding peptide
  MOD_RES (2), (4), (36), (37): Xaa is C or S
HXGXARVVMNNSLQEIVNSSDDYYLVTLPELQTPAXXPKPVT

SEQ ID NO: 11856 - protein, 33 aa, Artificial Sequence
  GFR-binding peptide
  MOD_RES (33), (33): Xaa is C or S
  MOD_RES (11), (12), (13), (14), (15): Xaa is A or G
  MOD_RES (16), (17), (18), (19): Xaa is A or G or is absent
EVVMDEYQKYXXXXXXXXXIFLMSIPSLETPVX

SEQ ID NO: 11857 - protein, 36 aa, Artificial Sequence
  GFR-binding peptide
  MOD_RES (1), (35), (36): Xaa is C or S
  MOD_RES (13), (14), (15), (16), (17): Xaa is A or G
  MOD_RES (18), (19), (20), (21): Xaa is A or G or is absent
XGEVVMEEYQKYXXXXXXXXXIFLMSIPSLETPVXX

SEQ ID NO: 11858 - protein, 36 aa, Artificial Sequence; identical to SEQ ID NO: 4430
  GFR-binding peptide
  MOD_RES (33), (34): Xaa is C or S
  MOD_RES (11), (12), (13), (14), (15): Xaa is A or G
  MOD_RES (16), (17), (18), (19): Xaa is A or G or is absent

SEQ ID NO: 11859 - protein, 34 aa, Artificial Sequence; identical to SEQ ID NO: 4432
  GFR-binding peptide
  MOD_RES (2), (2): Xaa is C or S
  MOD_RES (13), (14), (15), (16), (17): Xaa is A or G
  MOD_RES (18), (19), (20), (21): Xaa is A or G or is absent

SEQ ID NO: 11860 - protein, 37 aa, Artificial Sequence
  GFR-binding peptide
  MOD_RES (31), (31): Xaa is C or S
RVVMNEYQKYIVNSSDDIFLVSIPSLKTPAXTPKTVH

SEQ ID NO: 11861 - protein, 38 aa, Artificial Sequence
  GFR-binding peptide
  MOD_RES (2), (4), (36), (37): Xaa is C or S
RXGXGEVVMDNSLQEVVKENEDYYVMPLPELETPVXXA

SEQ ID NO: 11862 - protein, 38 aa, Artificial Sequence
  GFR-binding peptide
  MOD_RES (32), (33): Xaa is C or S
GEVVMDEYQKYVVKENEDIFLMSIPSLETPVXXAKPIK

SEQ ID NO: 11863 - protein, 33 aa, Artificial Sequence; identical to SEQ ID NO: 4435
  GFR-binding peptide
  MOD_RES (1), (32), (33): Xaa is C or S

SEQ ID NO: 11864 - protein, 31 aa, Artificial Sequence
  GFR-binding peptide
ARVVMNEYQKYIVNSSDDIFLVSIPSLQTPA

SEQ ID NO: 11865 - protein, 35 aa, Artificial Sequence
  GFR-binding peptide
  MOD_RES (33), (34): Xaa is C or S
  MOD_RES (11), (12), (13), (14), (15): Xaa is A or G
  MOD_RES (16), (17), (18), (19): Xaa is A or G or is absent
EVVMENSLQEXXXXXXXXXYYVMPLPELETPVXXA

SEQ ID NO: 11866 - protein, 36 aa, Artificial Sequence
  GFR-binding peptide
  MOD_RES (1), (33), (34): Xaa is C or S
XGEVVMDEYQKYVVKENEDIFLMSIPSLETPVXXAK

SEQ ID NO: 11867 - protein, 40 aa, Artificial Sequence
  GFR-binding peptide
  MOD_RES (2), (4), (38), (39): Xaa is C or S
  MOD_RES (16), (17), (18), (19), (20): Xaa is A or G
  MOD_RES (21), (22), (23), (24): Xaa is A or G or is absent
RXGXSEVVMDNSLQEXXXXXXXXXYYLITLPELRTPVXXT

SEQ ID NO: 11868 - protein, 35 aa, Artificial Sequence
  GFR-binding peptide
  MOD_RES (33), (34): Xaa is C or S
  MOD_RES (11), (12), (13), (14), (15): Xaa is A or G
  MOD_RES (16), (17), (18), (19): Xaa is A or G or is absent
SRVIMNSLQEXXXXXXXXXYYVIPLPELAQPVXXP

SEQ ID NO: 11869 - protein, 34 aa, Artificial Sequence
  GFR-binding peptide
  MOD_RES (34), (34): Xaa is C or S
  MOD_RES (12), (13), (14), (15), (16): Xaa is A or G
  MOD_RES (17), (18), (19), (20): Xaa is A or G or is absent
GEVVMEEYQKYXXXXXXXXXIFLMSIPSLETPVX

SEQ ID NO: 11870 - protein, 35 aa, Artificial Sequence
  GFR-binding peptide
  MOD_RES (33), (34): Xaa is C or S
  MOD_RES (11), (12), (13), (14), (15): Xaa is A or G
  MOD_RES (16), (17), (18), (19): Xaa is A or G or is absent
SRVIMNSLQEXXXXXXXXXYYLITLPELAQPVXXP

SEQ ID NO: 11871 - protein, 32 aa, Artificial Sequence; identical to SEQ ID NO: 4443
  GFR-binding peptide
  MOD_RES (2), (2): Xaa is C or S

SEQ ID NO: 11872 - protein, 38 aa, Artificial Sequence; identical to SEQ ID NO: 4446
  GFR-binding peptide
  MOD_RES (34), (35): Xaa is C or S
  MOD_RES (12), (13), (14), (15), (16): Xaa is A or G
  MOD_RES (17), (18), (19), (20): Xaa is A or G or is absent

SEQ ID NO: 11873 - protein, 41 aa, Artificial Sequence
  GFR-binding peptide
  MOD_RES (1), (3), (36), (37): Xaa is C or S
  MOD_RES (14), (15), (16), (17), (18): Xaa is A or G
  MOD_RES (19), (20), (21), (22): Xaa is A or G or is absent
XKXSRVIMNSLQEXXXXXXXXXYYVIPLPELAQPVXXPAAS

SEQ ID NO: 11874 - protein, 38 aa, Artificial Sequence; identical to SEQ ID NO: 4448
  GFR-binding peptide
  MOD_RES (2), (34), (35): Xaa is C or S

SEQ ID NO: 11875 - protein, 36 aa, Artificial Sequence
  GFR-binding peptide
  MOD_RES (1), (3), (35): Xaa is C or S
XGXSRVVMNNSLQEIVNSSDDYYVVPLPELKTPAXT

SEQ ID NO: 11876 - protein, 39 aa, Artificial Sequence; identical to SEQ ID NO: 4450
  GFR-binding peptide
  MOD_RES (2), (4), (35), (36): Xaa is C or S

SEQ ID NO: 11877 - protein, 33 aa, Artificial Sequence
  GFR-binding peptide
  MOD_RES (1), (1): Xaa is C or S
  MOD_RES (12), (13), (14), (15), (16): Xaa is A or G
  MOD_RES (17), (18), (19), (20): Xaa is A or G or is absent
XSKVVMNSLQEXXXXXXXXXYYLITLPELDQPV

SEQ ID NO: 11878 - protein, 36 aa, Artificial Sequence
  GFR-binding peptide
  MOD_RES (34), (35): Xaa is C or S
  MOD_RES (12), (13), (14), (15), (16): Xaa is A or G
  MOD_RES (17), (18), (19), (20): Xaa is A or G or is absent
SRVVMNNSLQEXXXXXXXXXYYLVTLPELKTPAXXP

SEQ ID NO: 11879 - protein, 32 aa, Artificial Sequence; identical to SEQ ID NO: 4453
  GFR-binding peptide
  MOD_RES (11), (12), (13), (14), (15): Xaa is A or G
  MOD_RES (16), (17), (18), (19): Xaa is A or G or is absent

SEQ ID NO: 11880 - protein, 37 aa, Artificial Sequence
  GFR-binding peptide
  MOD_RES (2), (4), (36), (37): Xaa is C or S
RXGXSEVVMDQYNKLVVNNASDLYLISIASLRTPVXX

SEQ ID NO: 11881 - protein, 43 aa, Artificial Sequence; identical to SEQ ID NO: 4454
  GFR-binding peptide
  MOD_RES (2), (4), (37), (38): Xaa is C or S
  MOD_RES (15), (16), (17), (18), (19): Xaa is A or G
  MOD_RES (20), (21), (22), (23): Xaa is A or G or is absent

SEQ ID NO: 11882 - protein, 31 aa, Artificial Sequence
  GFR-binding peptide
  MOD_RES (31), (31): Xaa is C or S
SRVIMEYQKYVKPKRGVIFLISIPSLAQPVX

SEQ ID NO: 11883 - protein, 38 aa, Artificial Sequence
  GFR-binding peptide
  MOD_RES (34), (35): Xaa is C or S
  MOD_RES (12), (13), (14), (15), (16): Xaa is A or G
  MOD_RES (17), (18), (19), (20): Xaa is A or G or is absent
SEVVMDEYQKYXXXXXXXXXIFLISIPSLRTPVXXTPP

SEQ ID NO: 11884 - protein, 39 aa, Artificial Sequence; identical to SEQ ID NO: 4457
  GFR-binding peptide
  MOD_RES (2), (34), (35): Xaa is C or S

SEQ ID NO: 11885 - protein, 41 aa, Artificial Sequence; identical to SEQ ID NO: 4458
  GFR-binding peptide
  MOD_RES (2), (36), (37): Xaa is C or S
  MOD_RES (14), (15), (16), (17), (18): Xaa is A or G
  MOD_RES (19), (20), (21), (22): Xaa is A or G or is absent

SEQ ID NO: 11886 - protein, 36 aa, Artificial Sequence; identical to SEQ ID NO: 4459
  GFR-binding peptide
  MOD_RES (2), (4): Xaa is C or S
  MOD_RES (15), (16), (17), (18), (19): Xaa is A or G
  MOD_RES (20), (21), (22), (23): Xaa is A or G or is absent

SEQ ID NO: 11887 - protein, 37 aa, Artificial Sequence
  GFR-binding peptide
  MOD_RES (2), (4), (35), (36): Xaa is C or S
SXKXSRVIMNSLQEVKPKRGVYYLITLPELAQPVXXP

SEQ ID NO: 11888 - protein, 37 aa, Artificial Sequence
  GFR-binding peptide
  MOD_RES (2), (34), (35): Xaa is C or S
GXARVVMNNSLQEIVNSSDDYYVVPLPELQTPAXXPK

SEQ ID NO: 11889 - protein, 30 aa, Artificial Sequence
  GFR-binding peptide
EVVMDQYNKLVVNNASDLYLISIASLRTPV

SEQ ID NO: 11890 - protein, 37 aa, Artificial Sequence
  GFR-binding peptide
  MOD_RES (33), (34): Xaa is C or S
  MOD_RES (11), (12), (13), (14), (15): Xaa is A or G
  MOD_RES (16), (17), (18), (19): Xaa is A or G or is absent
EVVMDEYQKYXXXXXXXXXIFLISIPSLRTPVXXTPP

SEQ ID NO: 11891 - protein, 36 aa, Artificial Sequence
  GFR-binding peptide
  MOD_RES (1), (3), (35), (36): Xaa is C or S
XGXSEVVMDNSLQEVVNNASDYYLITLPELRTPVXX

SEQ ID NO: 11892 - protein, 36 aa, Artificial Sequence
  GFR-binding peptide
  MOD_RES (34), (34): Xaa is C or S
  MOD_RES (12), (13), (14), (15), (16): Xaa is A or G
  MOD_RES (17), (18), (19), (20): Xaa is A or G or is absent
SRVVMNNSLQEXXXXXXXXXYYVVPLPELKTPAXTP

SEQ ID NO: 11893 - protein, 37 aa, Artificial Sequence
  GFR-binding peptide
  MOD_RES (2), (34), (35): Xaa is C or S
GXGEVVMENSLQEVVKDYEDYYLMTLPELETPVXXAK

SEQ ID NO: 11894 - protein, 34 aa, Artificial Sequence; identical to SEQ ID NO: 4461
  GFR-binding peptide
  MOD_RES (1), (3), (34): Xaa is C or S

SEQ ID NO: 11895 - protein, 38 aa, Artificial Sequence
  GFR-binding peptide
  MOD_RES (1), (3), (36), (37): Xaa is C or S
  MOD_RES (14), (15), (16), (17), (18): Xaa is A or G
  MOD_RES (19), (20), (21), (22): Xaa is A or G or is absent
XKXSKVVMEYQKYXXXXXXXXXIFLISIPSLDQPVXXP

SEQ ID NO: 11896 - protein, 37 aa, Artificial Sequence
  GFR-binding peptide
  MOD_RES (2), (4): Xaa is C or S
  MOD_RES (16), (17), (18), (19), (20): Xaa is A or G
  MOD_RES (21), (22), (23), (24): Xaa is A or G or is absent
HXGXSRVVMNEYQKYXXXXXXXXXIFLVSIPSLKTPA

SEQ ID NO: 11897 - protein, 40 aa, Artificial Sequence; identical to SEQ ID NO: 4463
  GFR-binding peptide
  MOD_RES (2), (4), (37), (38): Xaa is C or S
  MOD_RES (15), (16), (17), (18), (19): Xaa is A or G
  MOD_RES (20), (21), (22), (23): Xaa is A or G or is absent

SEQ ID NO: 11898 - protein, 38 aa, Artificial Sequence
  GFR-binding peptide
  MOD_RES (1), (32), (33): Xaa is C or S
XSKVIMNSLQEIKPTKGIYYVIPLPELDQSVXXPSASA

SEQ ID NO: 11899 - protein, 41 aa, Artificial Sequence
  GFR-binding peptide
  MOD_RES (2), (4), (37), (38): Xaa is C or S
  MOD_RES (15), (16), (17), (18), (19): Xaa is A or G
  MOD_RES (20), (21), (22), (23): Xaa is A or G or is absent
SXKXSKVVMNSLQEXXXXXXXXXYYVIPLPELDQPVXXPSA

SEQ ID NO: 11900 - protein, 34 aa, Artificial Sequence; identical to SEQ ID NO: 4466
  GFR-binding peptide
  MOD_RES (31), (32): Xaa is C or S

SEQ ID NO: 11901 - protein, 31 aa, Artificial Sequence
  GFR-binding peptide
  MOD_RES (31), (31): Xaa is C or S
RVVMNNSLQEIVNSSDDYYVVPLPELQTPAX

SEQ ID NO: 11902 - protein, 44 aa, Artificial Sequence; identical to SEQ ID NO: 4467
  GFR-binding peptide
  MOD_RES (2), (4), (38), (39): Xaa is C or S
  MOD_RES (16), (17), (18), (19), (20): Xaa is A or G
  MOD_RES (21), (22), (23), (24): Xaa is A or G or is absent

SEQ ID NO: 11903 - protein, 35 aa, Artificial Sequence
  GFR-binding peptide
  MOD_RES (2), (4), (35): Xaa is C or S
SXKXSKVVMNSLQEVKPTRGVYYLITLPELDQPVX

SEQ ID NO: 11904 - protein, 38 aa, Artificial Sequence
  GFR-binding peptide
  MOD_RES (32), (33): Xaa is C or S
SRVVMNNSLQEIVNSSDDYYVVPLPELKTPAXXPKPVY

SEQ ID NO: 11905 - protein, 38 aa, Artificial Sequence; identical to SEQ ID NO: 4470
  GFR-binding peptide
  MOD_RES (2), (35), (36): Xaa is C or S
  MOD_RES (13), (14), (15), (16), (17): Xaa is A or G
  MOD_RES (18), (19), (20), (21): Xaa is A or G or is absent

SEQ ID NO: 11906 - protein, 37 aa, Artificial Sequence; identical to SEQ ID NO: 4472
  GFR-binding peptide
  MOD_RES (2), (34), (35): Xaa is C or S

SEQ ID NO: 11907 - protein, 43 aa, Artificial Sequence
  GFR-binding peptide
  MOD_RES (1), (3), (37), (38): Xaa is C or S
  MOD_RES (15), (16), (17), (18), (19): Xaa is A or G
  MOD_RES (20), (21), (22), (23): Xaa is A or G or is absent
XGXSEVVMDNSLQEXXXXXXXXXYYVIPLPELRTPVXXTPPTS

SEQ ID NO: 11908 - protein, 36 aa, Artificial Sequence
  GFR-binding peptide
  MOD_RES (1), (33), (34): Xaa is C or S
XSRVVMNNSLQEIVNSSDDYYVVPLPELKTPAXXPK

SEQ ID NO: 11909 - protein, 41 aa, Artificial Sequence
  GFR-binding peptide
  MOD_RES (2), (35), (36): Xaa is C or S
  MOD_RES (13), (14), (15), (16), (17): Xaa is A or G
  MOD_RES (18), (19), (20), (21): Xaa is A or G or is absent
KXSRVIMEYQKYXXXXXXXXXIFLISIPSLAQPVXXPAASA

SEQ ID NO: 11910 - protein, 37 aa, Artificial Sequence
  GFR-binding peptide
  MOD_RES (33), (34): Xaa is C or S
  MOD_RES (11), (12), (13), (14), (15): Xaa is A or G
  MOD_RES (16), (17), (18), (19): Xaa is A or G or is absent
EVVMDNSLQEXXXXXXXXXYYVMPLPELETPVXXAKP

SEQ ID NO: 11911 - protein, 34 aa, Artificial Sequence; identical to SEQ ID NO: 4479
  GFR-binding peptide
  MOD_RES (33), (34): Xaa is C or S
  MOD_RES (11), (12), (13), (14), (15): Xaa is A or G
  MOD_RES (16), (17), (18), (19): Xaa is A or G or is absent

SEQ ID NO: 11912 - protein, 39 aa, Artificial Sequence
  GFR-binding peptide
  MOD_RES (34), (35): Xaa is C or S
  MOD_RES (12), (13), (14), (15), (16): Xaa is A or G
  MOD_RES (17), (18), (19), (20): Xaa is A or G or is absent
SRVVMNNSLQEXXXXXXXXXYYVVPLPELKTPAXXPKPV

SEQ ID NO: 11913 - protein, 38 aa, Artificial Sequence
  GFR-binding peptide
  MOD_RES (1), (3), (35), (36): Xaa is C or S
XGXSEVVMDRYKKLVVNNASDFYLISIANLRTPVXXTP

SEQ ID NO: 11914 - protein, 35 aa, Artificial Sequence
  GFR-binding peptide
  MOD_RES (2), (33), (34): Xaa is C or S
KXSKVIMEYQKYIKPTKGIIFLISIPSLDQSVXXP

SEQ ID NO: 11915 - protein, 39 aa, Artificial Sequence; identical to SEQ ID NO: 4483
  GFR-binding peptide
  MOD_RES (1), (34), (35): Xaa is C or S
  MOD_RES (12), (13), (14), (15), (16): Xaa is A or G
  MOD_RES (17), (18), (19), (20): Xaa is A or G or is absent

SEQ ID NO: 11916 - protein, 36 aa, Artificial Sequence
  GFR-binding peptide
  MOD_RES (2), (4), (36): Xaa is C or S
RXGXSEVVMDRYKKLVVNNASDFYLISIANLRTPVX

SEQ ID NO: 11917 - protein, 34 aa, Artificial Sequence; identical to SEQ ID NO: 4486
  GFR-binding peptide
  MOD_RES (2), (33), (34): Xaa is C or S

SEQ ID NO: 11918 - protein, 35 aa, Artificial Sequence
  GFR-binding peptide
  MOD_RES (1), (33), (34): Xaa is C or S
XSRVVMNNSLQEIVNSSDDYYLVTLPELKTPAXXP

SEQ ID NO: 11919 - protein, 36 aa, Artificial Sequence
  GFR-binding peptide
  MOD_RES (2), (4): Xaa is C or S
  MOD_RES (15), (16), (17), (18), (19): Xaa is A or G
  MOD_RES (20), (21), (22), (23): Xaa is A or G or is absent
SXKXSRVIMNSLQEXXXXXXXXXYYLITLPELAQPV

SEQ ID NO: 11920 - protein, 33 aa, Artificial Sequence
  GFR-binding peptide
  MOD_RES (12), (13), (14), (15), (16): Xaa is A or G
  MOD_RES (17), (18), (19), (20): Xaa is A or G or is absent
GEVVMDEYQKYXXXXXXXXXIFLMSIPSLETPV

SEQ ID NO: 11921 - protein, 39 aa, Artificial Sequence
  GFR-binding peptide
  MOD_RES (2), (4), (38): Xaa is C or S
  MOD_RES (16), (17), (18), (19), (20): Xaa is A or G
  MOD_RES (21), (22), (23), (24): Xaa is A or G or is absent
HXGXSRVVMNEYQKYXXXXXXXXXIFLVSIPSLKTPAXT

SEQ ID NO: 11922 - protein, 41 aa, Artificial Sequence; identical to SEQ ID NO: 4488
  GFR-binding peptide
  MOD_RES (1), (3), (35), (36): Xaa is C or S

SEQ ID NO: 11923 - protein, 33 aa, Artificial Sequence; identical to SEQ ID NO: 4489
  GFR-binding peptide
  MOD_RES (32), (33): Xaa is C or S

SEQ ID NO: 11924 - protein, 34 aa, Artificial Sequence
  GFR-binding peptide
  MOD_RES (34), (34): Xaa is C or S
  MOD_RES (12), (13), (14), (15), (16): Xaa is A or G
  MOD_RES (17), (18), (19), (20): Xaa is A or G or is absent
SRVVMNEYQKYXXXXXXXXXIFLVSIPSLKTPAX

SEQ ID NO: 11925 - protein, 38 aa, Artificial Sequence; identical to SEQ ID NO: 4490
  GFR-binding peptide
  MOD_RES (1), (32), (33): Xaa is C or S

SEQ ID NO: 11926 - protein, 33 aa, Artificial Sequence
  GFR-binding peptide
  MOD_RES (32), (33): Xaa is C or S
SRVVMNNSLQEIVNSSDDYYVVPLPELKTPAXX

SEQ ID NO: 11927 - protein, 35 aa, Artificial Sequence
  GFR-binding peptide
  MOD_RES (1), (34), (35): Xaa is C or S
  MOD_RES (12), (13), (14), (15), (16): Xaa is A or G
  MOD_RES (17), (18), (19), (20): Xaa is A or G or is absent
XSKVVMNSLQEXXXXXXXXXYYVIPLPELDQPVXX

SEQ ID NO: 11928 - protein, 38 aa, Artificial Sequence; identical to SEQ ID NO: 4492
  GFR-binding peptide
  MOD_RES (1), (3), (34), (35): Xaa is C or S

SEQ ID NO: 11929 - protein, 37 aa, Artificial Sequence
  GFR-binding peptide
  MOD_RES (33), (34): Xaa is C or S
  MOD_RES (11), (12), (13), (14), (15): Xaa is A or G
  MOD_RES (16), (17), (18), (19): Xaa is A or G or is absent
RVVMNNSLQEXXXXXXXXXYYLVTLPELKTPAXXPKP

SEQ ID NO: 11930 - protein, 35 aa, Artificial Sequence
  GFR-binding peptide
  MOD_RES (1), (3): Xaa is C or S
  MOD_RES (14), (15), (16), (17), (18): Xaa is A or G
  MOD_RES (19), (20), (21), (22): Xaa is A or G or is absent
XKXSKVVMNSLQEXXXXXXXXXYYVIPLPELDQPV

SEQ ID NO: 11931 - protein, 36 aa, Artificial Sequence; identical to SEQ ID NO: 4495
  GFR-binding peptide
  MOD_RES (1), (34), (35): Xaa is C or S
  MOD_RES (12), (13), (14), (15), (16): Xaa is A or G
  MOD_RES (17), (18), (19), (20): Xaa is A or G or is absent

SEQ ID NO: 11932 - protein, 36 aa, Artificial Sequence
  GFR-binding peptide
  MOD_RES (2), (33), (34): Xaa is C or S
KXSKVIMNSLQEIKPTKGIYYVIPLPELDQSVXXPS

SEQ ID NO: 11933 - protein, 40 aa, Artificial Sequence; identical to SEQ ID NO: 4498
  GFR-binding peptide
  MOD_RES (2), (35), (36): Xaa is C or S
  MOD_RES (13), (14), (15), (16), (17): Xaa is A or G
  MOD_RES (18), (19), (20), (21): Xaa is A or G or is absent

SEQ ID NO: 11934 - protein, 36 aa, Artificial Sequence
  GFR-binding peptide
  MOD_RES (32), (33): Xaa is C or S
GEVVMDNSLQEVVKENEDYYLMTLPELETPVXXAKP

SEQ ID NO: 11935 - protein, 36 aa, Artificial Sequence
  GFR-binding peptide
  MOD_RES (2), (36): Xaa is C or S
  MOD_RES (14), (15), (16), (17), (18): Xaa is A or G
  MOD_RES (19), (20), (21), (22): Xaa is A or G or is absent
GXSEVVMDQYNKLXXXXXXXXXLYLISIASLRTPVX

SEQ ID NO: 11936 - protein, 38 aa, Artificial Sequence
  GFR-binding peptide
  MOD_RES (2), (36), (37): Xaa is C or S
  MOD_RES (14), (15), (16), (17), (18): Xaa is A or G
  MOD_RES (19), (20), (21), (22): Xaa is A or G or is absent
GXARVVMNEYQKYXXXXXXXXXIFLVSIPSLQTPAXXP

SEQ ID NO: 11937 - protein, 37 aa, Artificial Sequence; identical to SEQ ID NO: 4499
  GFR-binding peptide
  MOD_RES (2), (34), (35): Xaa is C or S

SEQ ID NO: 11938 - protein, 34 aa, Artificial Sequence; identical to SEQ ID NO: 4501
  GFR-binding peptide
  MOD_RES (2), (2): Xaa is C or S
  MOD_RES (13), (14), (15), (16), (17): Xaa is A or G
  MOD_RES (18), (19), (20), (21): Xaa is A or G or is absent

SEQ ID NO: 11939 - protein, 40 aa, Artificial Sequence; identical to SEQ ID NO: 4502
  GFR-binding peptide
  MOD_RES (2), (36), (37): Xaa is C or S
  MOD_RES (14), (15), (16), (17), (18): Xaa is A or G
  MOD_RES (19), (20), (21), (22): Xaa is A or G or is absent

SEQ ID NO: 11940 - protein, 34 aa, Artificial Sequence
  GFR-binding peptide
  MOD_RES (33), (34): Xaa is C or S
  MOD_RES (11), (12), (13), (14), (15): Xaa is A or G
  MOD_RES (16), (17), (18), (19): Xaa is A or G or is absent
SKVVMEYQKYXXXXXXXXXIFLISIPSLDQPVXX

SEQ ID NO: 11941 - protein, 32 aa, Artificial Sequence
  GFR-binding peptide
  MOD_RES (11), (12), (13), (14), (15): Xaa is A or G
  MOD_RES (16), (17), (18), (19): Xaa is A or G or is absent
RVVMNNSLQEXXXXXXXXXYYLVTLPELKTPA

SEQ ID NO: 11942 - protein, 34 aa, Artificial Sequence
  GFR-binding peptide
  MOD_RES (1), (33), (34): Xaa is C or S
XGEVVMENSLQEVVKDYEDYYVMPLPELETPVXX

SEQ ID NO: 11943 - protein, 41 aa, Artificial Sequence
  GFR-binding peptide
  MOD_RES (2), (4), (36), (37): Xaa is C or S
RXGXGEVVMEEYQKYVVKDYEDIFLMSIPSLETPVXXAKPI

SEQ ID NO: 11944 - protein, 37 aa, Artificial Sequence; identical to SEQ ID NO: 4505
  GFR-binding peptide
  MOD_RES (2), (4), (35), (36): Xaa is C or S

SEQ ID NO: 11945 - protein, 42 aa, Artificial Sequence
  GFR-binding peptide
  MOD_RES (1), (3), (36), (37): Xaa is C or S
  MOD_RES (14), (15), (16), (17), (18): Xaa is A or G
  MOD_RES (19), (20), (21), (22): Xaa is A or G or is absent
XKXSKVIMNSLQEXXXXXXXXXYYVIPLPELDQSVXXPSASA

SEQ ID NO: 11946 - protein, 37 aa, Artificial Sequence
  GFR-binding peptide
  MOD_RES (2), (4), (36), (37): Xaa is C or S
RXGXSEVVMDRYKKLVVNNASDFYLISIANLRTPVXX

SEQ ID NO: 11947 - protein, 36 aa, Artificial Sequence; identical to SEQ ID NO: 4509
  GFR-binding peptide
  MOD_RES (1), (35): Xaa is C or S
  MOD_RES (13), (14), (15), (16), (17): Xaa is A or G
  MOD_RES (18), (19), (20), (21): Xaa is A or G or is absent

SEQ ID NO: 11948 - protein, 36 aa, Artificial Sequence
  GFR-binding peptide
  MOD_RES (32), (33): Xaa is C or S
GEVVMDNSLQEVVKENEDYYVMPLPELETPVXXAKP

SEQ ID NO: 11949 - protein, 42 aa, Artificial Sequence
  GFR-binding peptide
  MOD_RES (2), (4), (37), (38): Xaa is C or S
  MOD_RES (15), (16), (17), (18), (19): Xaa is A or G
  MOD_RES (20), (21), (22), (23): Xaa is A or G or is absent
SXKXSRVIMNSLQEXXXXXXXXXYYLITLPELAQPVXXPAAS

SEQ ID NO: 11950 - protein, 41 aa, Artificial Sequence
  GFR-binding peptide
  MOD_RES (1), (3), (37), (38): Xaa is C or S
  MOD_RES (15), (16), (17), (18), (19): Xaa is A or G
  MOD_RES (20), (21), (22), (23): Xaa is A or G or is absent
XGXSRVVMNNSLQEXXXXXXXXXYYVVPLPELKTPAXXPKP

SEQ ID NO: 11951 - protein, 35 aa, Artificial Sequence; identical to SEQ ID NO: 4513
  GFR-binding peptide
  MOD_RES (34), (35): Xaa is C or S
  MOD_RES (12), (13), (14), (15), (16): Xaa is A or G
  MOD_RES (17), (18), (19), (20): Xaa is A or G or is absent

SEQ ID NO: 11952 - protein, 38 aa, Artificial Sequence
  GFR-binding peptide
  MOD_RES (32), (33): Xaa is C or S
GEVVMDNSLQEVVKENEDYYLMTLPELETPVXXAKPIK

SEQ ID NO: 11953 - protein, 39 aa, Artificial Sequence; identical to SEQ ID NO: 4514
  GFR-binding peptide
  MOD_RES (2), (36), (37): Xaa is C or S
  MOD_RES (14), (15), (16), (17), (18): Xaa is A or G
  MOD_RES (19), (20), (21), (22): Xaa is A or G or is absent

SEQ ID NO: 11954 - protein, 32 aa, Artificial Sequence
  GFR-binding peptide
  MOD_RES (32), (32): Xaa is C or S
ARVVMNNSLQEIVNSSDDYYLVTLPELQTPAX

SEQ ID NO: 11955 - protein, 39 aa, Artificial Sequence
  GFR-binding peptide
  MOD_RES (1), (35), (36): Xaa is C or S
  MOD_RES (13), (14), (15), (16), (17): Xaa is A or G
  MOD_RES (18), (19), (20), (21): Xaa is A or G or is absent
XARVVMNNSLQEXXXXXXXXXYYVVPLPELQTPAXXPKP

SEQ ID NO: 11956 - protein, 38 aa, Artificial Sequence
  GFR-binding peptide
  MOD_RES (2), (4), (36): Xaa is C or S
HXGXSRVVMNNSLQEIVNSSDDYYVVPLPELKTPAXTP

SEQ ID NO: 11957 - protein, 41 aa, Artificial Sequence
  GFR-binding peptide
  MOD_RES (1), (35), (36): Xaa is C or S
  MOD_RES (13), (14), (15), (16), (17): Xaa is A or G
  MOD_RES (18), (19), (20), (21): Xaa is A or G or is absent
XSRVVMNNSLQEXXXXXXXXXYYVVPLPELKTPAXXPKPVY

SEQ ID NO: 11958 - protein, 42 aa, Artificial Sequence
  GFR-binding peptide
  MOD_RES (2), (4), (38): Xaa is C or S
  MOD_RES (16), (17), (18), (19), (20): Xaa is A or G
  MOD_RES (21), (22), (23), (24): Xaa is A or G or is absent
HXGXSRVVMNNSLQEXXXXXXXXXYYLVTLPELKTPAXTPKT

SEQ ID NO: 11959 - protein, 40 aa, Artificial Sequence
  GFR-binding peptide
  MOD_RES (1), (34), (35): Xaa is C or S
  MOD_RES (12), (13), (14), (15), (16): Xaa is A or G
  MOD_RES (17), (18), (19), (20): Xaa is A or G or is absent
XSRVIMNSLQEXXXXXXXXXYYVIPLPELAQPVXXPAASA

SEQ ID NO: 11960 - protein, 39 aa, Artificial Sequence
  GFR-binding peptide
  MOD_RES (1), (3), (37): Xaa is C or S
  MOD_RES (15), (16), (17), (18), (19): Xaa is A or G
  MOD_RES (20), (21), (22), (23): Xaa is A or G or is absent
XGXSRVVMNEYQKYXXXXXXXXXIFLVSIPSLKTPAXTP

SEQ ID NO: 11961 - protein, 36 aa, Artificial Sequence
  GFR-binding peptide
  MOD_RES (31), (32): Xaa is C or S
EVVMDQYNKLVVNNASDLYLISIASLRTPVXXTPPT

SEQ ID NO: 11962 - protein, 39 aa, Artificial Sequence
  GFR-binding peptide
  MOD_RES (2), (4), (38), (39): Xaa is C or S
  MOD_RES (16), (17), (18), (19), (20): Xaa is A or G
  MOD_RES (21), (22), (23), (24): Xaa is A or G or is absent
RXGXSEVVMDQYNKLXXXXXXXXXLYLISIASLRTPVXX

SEQ ID NO: 11963 - protein, 36 aa, Artificial Sequence; identical to SEQ ID NO: 4522
  GFR-binding peptide
  MOD_RES (1), (33): Xaa is C or S

SEQ ID NO: 11964 - protein, 42 aa, Artificial Sequence
  GFR-binding peptide
  MOD_RES (1), (3), (36), (37): Xaa is C or S
  MOD_RES (14), (15), (16), (17), (18): Xaa is A or G
  MOD_RES (19), (20), (21), (22): Xaa is A or G or is absent
XKXSRVIMNSLQEXXXXXXXXXYYVIPLPELAQPVXXPAASA

SEQ ID NO: 11965 - protein, 35 aa, Artificial Sequence; identical to SEQ ID NO: 4523
  GFR-binding peptide
  MOD_RES (33), (34): Xaa is C or S
  MOD_RES (11), (12), (13), (14), (15): Xaa is A or G
  MOD_RES (16), (17), (18), (19): Xaa is A or G or is absent

SEQ ID NO: 11966 - protein, 38 aa, Artificial Sequence
  GFR-binding peptide
  MOD_RES (1), (35), (36): Xaa is C or S
  MOD_RES (13), (14), (15), (16), (17): Xaa is A or G
  MOD_RES (18), (19), (20), (21): Xaa is A or G or is absent
XSEVVMDNSLQEXXXXXXXXXYYVIPLPELRTPVXXTP

SEQ ID NO: 11967 - protein, 40 aa, Artificial Sequence
  GFR-binding peptide
  MOD_RES (1), (3), (34), (35): Xaa is C or S
XKXSRVIMEYQKYVKPKRGVIFLISIPSLAQPVXXPAASA

SEQ ID NO: 11968 - protein, 31 aa, Artificial Sequence
  GFR-binding peptide
SEVVMDQYNKLVVNNASDLYLISIASLRTPV

SEQ ID NO: 11969 - protein, 34 aa, Artificial Sequence; identical to SEQ ID NO: 4529
  GFR-binding peptide
  MOD_RES (2), (4): Xaa is C or S

SEQ ID NO: 11970 - protein, 33 aa, Artificial Sequence
  GFR-binding peptide
  MOD_RES (2), (33): Xaa is C or S
KXSKVIMNSLQEIKPTKGIYYVIPLPELDQSVX

SEQ ID NO: 11971 - protein, 37 aa, Artificial Sequence; identical to SEQ ID NO: 4531
  GFR-binding peptide
  MOD_RES (33), (33): Xaa is C or S
  MOD_RES (11), (12), (13), (14), (15): Xaa is A or G
  MOD_RES (16), (17), (18), (19): Xaa is A or G or is absent

SEQ ID NO: 11972 - protein, 37 aa, Artificial Sequence
  GFR-binding peptide
  MOD_RES (34), (35): Xaa is C or S
  MOD_RES (12), (13), (14), (15), (16): Xaa is A or G
  MOD_RES (17), (18), (19), (20): Xaa is A or G or is absent
ARVVMNNSLQEXXXXXXXXXYYVVPLPELQTPAXXPK

SEQ ID NO: 11973 - protein, 36 aa, Artificial Sequence
  GFR-binding peptide
  MOD_RES (1), (3), (35): Xaa is C or S
XGXSRVVMNEYQKYIVNSSDDIFLVSIPSLKTPAXT

SEQ ID NO: 11974 - protein, 36 aa, Artificial Sequence; identical to SEQ ID NO: 4534
  GFR-binding peptide
  MOD_RES (32), (33): Xaa is C or S

SEQ ID NO: 11975 - protein, 39 aa, Artificial Sequence
  GFR-binding peptide
  MOD_RES (2), (36), (37): Xaa is C or S
  MOD_RES (14), (15), (16), (17), (18): Xaa is A or G
  MOD_RES (19), (20), (21), (22): Xaa is A or G or is absent
GXSRVVMNEYQKYXXXXXXXXXIFLVSIPSLKTPAXXPK

SEQ ID NO: 11976 - protein, 38 aa, Artificial Sequence
  GFR-binding peptide
  MOD_RES (1), (3), (35), (36): Xaa is C or S
XGXGEVVMENSLQEVVKDYEDYYVMPLPELETPVXXAK

SEQ ID NO: 11977 - protein, 34 aa, Artificial Sequence; identical to SEQ ID NO: 4538
  GFR-binding peptide
  MOD_RES (2), (33), (34): Xaa is C or S

SEQ ID NO: 11978 - protein, 38 aa, Artificial Sequence; identical to SEQ ID NO: 4542
  GFR-binding peptide
  MOD_RES (2), (34): Xaa is C or S

SEQ ID NO: 11979 - protein, 32 aa, Artificial Sequence
  GFR-binding peptide
  MOD_RES (31), (32): Xaa is C or S
RVVMNEYQKYIVNSSDDIFLVSIPSLQTPAXX

SEQ ID NO: 11980 - protein, 39 aa, Artificial Sequence; identical to SEQ ID NO: 4545
  GFR-binding peptide
  MOD_RES (2), (4), (36), (37): Xaa is C or S

SEQ ID NO: 11981 - protein, 36 aa, Artificial Sequence; identical to SEQ ID NO: 4546
  GFR-binding peptide
  MOD_RES (2), (4), (36): Xaa is C or S

SEQ ID NO: 11982 - protein, 38 aa, Artificial Sequence
  GFR-binding peptide
  MOD_RES (2), (4), (35), (36): Xaa is C or S
SXKXSKVIMEYQKYIKPTKGIIFLISIPSLDQSVXXPS

SEQ ID NO: 11983 - protein, 38 aa, Artificial Sequence
  GFR-binding peptide
  MOD_RES (32), (33): Xaa is C or S
SEVVMDNSLQEVVNNASDYYVIPLPELRTPVXXTPPTS

SEQ ID NO: 11984 - protein, 35 aa, Artificial Sequence
  GFR-binding peptide
  MOD_RES (2), (33), (34): Xaa is C or S
KXSKVVMNSLQEVKPTRGVYYVIPLPELDQPVXXP

SEQ ID NO: 11985 - protein, 41 aa, Artificial Sequence; identical to SEQ ID NO: 4549
  GFR-binding peptide
  MOD_RES (1), (35): Xaa is C or S
  MOD_RES (13), (14), (15), (16), (17): Xaa is A or G
  MOD_RES (18), (19), (20), (21): Xaa is A or G or is absent

SEQ ID NO: 11986 - protein, 40 aa, Artificial Sequence; identical to SEQ ID NO: 4553
  GFR-binding peptide
  MOD_RES (34), (35): Xaa is C or S
  MOD_RES (12), (13), (14), (15), (16): Xaa is A or G
  MOD_RES (17), (18), (19), (20): Xaa is A or G or is absent

SEQ ID NO: 11987 - protein, 39 aa, Artificial Sequence
  GFR-binding peptide
  MOD_RES (1), (3), (36), (37): Xaa is C or S
  MOD_RES (14), (15), (16), (17), (18): Xaa is A or G
  MOD_RES (19), (20), (21), (22): Xaa is A or G or is absent
XKXSKVVMNSLQEXXXXXXXXXYYLITLPELDQPVXXPS

SEQ ID NO: 11988 - protein, 37 aa, Artificial Sequence
  GFR-binding peptide
  MOD_RES (2), (33), (34): Xaa is C or S
KXSRVIMNSLQEVKPKRGVYYVIPLPELAQPVXXPAA

SEQ ID NO: 11989 - protein, 33 aa, Artificial Sequence; identical to SEQ ID NO: 4554
  GFR-binding peptide
  MOD_RES (33), (33): Xaa is C or S
  MOD_RES (11), (12), (13), (14), (15): Xaa is A or G
  MOD_RES (16), (17), (18), (19): Xaa is A or G or is absent

SEQ ID NO: 11990 - protein, 37 aa, Artificial Sequence
  GFR-binding peptide
  MOD_RES (32), (32): Xaa is C or S
SRVVMNNSLQEIVNSSDDYYLVTLPELKTPAXTPKTV

SEQ ID NO: 11991 - protein, 36 aa, Artificial Sequence; identical to SEQ ID NO: 4556
  GFR-binding peptide
  MOD_RES (1), (33), (34): Xaa is C or S

SEQ ID NO: 11992 - protein, 35 aa, Artificial Sequence; identical to SEQ ID NO: 4558
  GFR-binding peptide
  MOD_RES (2), (2): Xaa is C or S
  MOD_RES (14), (15), (16), (17), (18): Xaa is A or G
  MOD_RES (19), (20), (21), (22): Xaa is A or G or is absent

SEQ ID NO: 11993 - protein, 35 aa, Artificial Sequence
  GFR-binding peptide
  MOD_RES (31), (32): Xaa is C or S
SKVIMEYQKYIKPTKGIIFLISIPSLDQSVXXPSA

SEQ ID NO: 11994 - protein, 32 aa, Artificial Sequence
  GFR-binding peptide
  MOD_RES (31), (32): Xaa is C or S
SRVIMNSLQEVKPKRGVYYVIPLPELAQPVXX

SEQ ID NO: 11995 - protein, 41 aa, Artificial Sequence
  GFR-binding peptide
  MOD_RES (2), (4), (36), (37): Xaa is C or S
RXGXGEVVMENSLQEVVKDYEDYYLMTLPELETPVXXAKPI

SEQ ID NO: 11996 - protein, 37 aa, Artificial Sequence
  GFR-binding peptide
  MOD_RES (34), (35): Xaa is C or S
  MOD_RES (12), (13), (14), (15), (16): Xaa is A or G
  MOD_RES (17), (18), (19), (20): Xaa is A or G or is absent
SRVVMNNSLQEXXXXXXXXXYYVVPLPELKTPAXXPK

SEQ ID NO: 11997 - protein, 35 aa, Artificial Sequence
  GFR-binding peptide
  MOD_RES (2), (4), (35): Xaa is C or S
SXKXSRVIMNSLQEVKPKRGVYYVIPLPELAQPVX

SEQ ID NO: 11998 - protein, 36 aa, Artificial Sequence
  GFR-binding peptide
  MOD_RES (1), (33), (34): Xaa is C or S
XSEVVMDEYQKYVVNNASDIFLISIPSLRTPVXXTP

SEQ ID NO: 11999 - protein, 38 aa, Artificial Sequence; identical to SEQ ID NO: 4566
  GFR-binding peptide
  MOD_RES (1), (3), (36), (37): Xaa is C or S
  MOD_RES (14), (15), (16), (17), (18): Xaa is A or G
  MOD_RES (19), (20), (21), (22): Xaa is A or G or is absent

SEQ ID NO: 12000 - protein, 40 aa, Artificial Sequence
  GFR-binding peptide
  MOD_RES (2), (34), (35): Xaa is C or S
GXGEVVMENSLQEVVKDYEDYYLMTLPELETPVXXAKPIS

SEQ ID NO: 12001 - protein, 35 aa, Artificial Sequence
  GFR-binding peptide
  MOD_RES (2), (2): Xaa is C or S
  MOD_RES (14), (15), (16), (17), (18): Xaa is A or G
  MOD_RES (19), (20), (21), (22): Xaa is A or G or is absent
GXGEVVMDNSLQEXXXXXXXXXYYVMPLPELETPV

SEQ ID NO: 12002 - protein, 32 aa, Artificial Sequence
  GFR-binding peptide
  MOD_RES (11), (12), (13), (14), (15): Xaa is A or G
  MOD_RES (16), (17), (18), (19): Xaa is A or G or is absent
EVVMDNSLQEXXXXXXXXXYYLITLPELRTPV

SEQ ID NO: 12003 - protein, 39 aa, Artificial Sequence; identical to SEQ ID NO: 4570
  GFR-binding peptide
  MOD_RES (1), (3), (35), (36): Xaa is C or S

SEQ ID NO: 12004 - protein, 40 aa, Artificial Sequence
  GFR-binding peptide
  MOD_RES (2), (34), (35): Xaa is C or S
GXARVVMNNSLQEIVNSSDDYYLVTLPELQTPAXXPKPVT

SEQ ID NO: 12005 - protein, 33 aa, Artificial Sequence
  GFR-binding peptide
  MOD_RES (32), (33): Xaa is C or S
SRVVMNNSLQEIVNSSDDYYLVTLPELKTPAXX

SEQ ID NO: 12006 - protein, 35 aa, Artificial Sequence
  GFR-binding peptide
  MOD_RES (2), (2): Xaa is C or S
  MOD_RES (14), (15), (16), (17), (18): Xaa is A or G
  MOD_RES (19), (20), (21), (22): Xaa is A or G or is absent
GXSEVVMDQYNKLXXXXXXXXXLYLISIASLRTPV

SEQ ID NO: 12007 - protein, 40 aa, Artificial Sequence; identical to SEQ ID NO: 4578
  GFR-binding peptide
  MOD_RES (1), (3), (36), (37): Xaa is C or S
  MOD_RES (14), (15), (16), (17), (18): Xaa is A or G
  MOD_RES (19), (20), (21), (22): Xaa is A or G or is absent

SEQ ID NO: 12008 - protein, 35 aa, Artificial Sequence
  GFR-binding peptide
  MOD_RES (1), (35): Xaa is C or S
  MOD_RES (13), (14), (15), (16), (17): Xaa is A or G
  MOD_RES (18), (19), (20), (21): Xaa is A or G or is absent
XARVVMNNSLQEXXXXXXXXXYYVVPLPELQTPAX

SEQ ID NO: 12009 - protein, 39 aa, Artificial Sequence
  GFR-binding peptide
  MOD_RES (2), (33), (34): Xaa is C or S
KXSKVVMEYQKYVKPTRGVIFLISIPSLDQPVXXPSASA

SEQ ID NO: 12010 - protein, 41 aa, Artificial Sequence
  GFR-binding peptide
  MOD_RES (2), (36), (37): Xaa is C or S
  MOD_RES (14), (15), (16), (17), (18): Xaa is A or G
  MOD_RES (19), (20), (21), (22): Xaa is A or G or is absent
GXSRVVMNNSLQEXXXXXXXXXYYLVTLPELKTPAXXPKPV

SEQ ID NO: 12011 - protein, 37 aa, Artificial Sequence; identical to SEQ ID NO: 4583
  GFR-binding peptide
  MOD_RES (2), (35), (36): Xaa is C or S
  MOD_RES (13), (14), (15), (16), (17): Xaa is A or G
  MOD_RES (18), (19), (20), (21): Xaa is A or G or is absent

SEQ ID NO: 12012 - protein, 35 aa, Artificial Sequence
  GFR-binding peptide
  MOD_RES (1), (35): Xaa is C or S
  MOD_RES (13), (14), (15), (16), (17): Xaa is A or G
  MOD_RES (18), (19), (20), (21): Xaa is A or G or is absent
XGEVVMEEYQKYXXXXXXXXXIFLMSIPSLETPVX

SEQ ID NO: 12013 - protein, 31 aa, Artificial Sequence; identical to SEQ ID NO: 4585
  GFR-binding peptide

SEQ ID NO: 12014 - protein, 35 aa, Artificial Sequence; identical to SEQ ID NO: 4588
  GFR-binding peptide
  MOD_RES (2), (35): Xaa is C or S
  MOD_RES (13), (14), (15), (16), (17): Xaa is A or G
  MOD_RES (18), (19), (20), (21): Xaa is A or G or is absent

SEQ ID NO: 12015 - protein, 39 aa, Artificial Sequence
  GFR-binding peptide
  MOD_RES (1), (3), (37), (38): Xaa is C or S
  MOD_RES (15), (16), (17), (18), (19): Xaa is A or G
  MOD_RES (20), (21), (22), (23): Xaa is A or G or is absent
XGXSRVVMNEYQKYXXXXXXXXXIFLVSIPSLKTPAXXP

SEQ ID NO: 12016 - protein, 39 aa, Artificial Sequence
  GFR-binding peptide
  MOD_RES (33), (34): Xaa is C or S
  MOD_RES (11), (12), (13), (14), (15): Xaa is A or G
  MOD_RES (16), (17), (18), (19): Xaa is A or G or is absent
SKVVMNSLQEXXXXXXXXXYYVIPLPELDQPVXXPSASA

SEQ ID NO: 12017 - protein, 35 aa, Artificial Sequence
  GFR-binding peptide
  MOD_RES (32), (33): Xaa is C or S
GEVVMDEYQKYVVKENEDIFLMSIPSLETPVXXAK

SEQ ID NO: 12018 - protein, 42 aa, Artificial Sequence
  GFR-binding peptide
  MOD_RES (2), (36), (37): Xaa is C or S
  MOD_RES (14), (15), (16), (17), (18): Xaa is A or G
  MOD_RES (19), (20), (21), (22): Xaa is A or G or is absent
GXSEVVMDNSLQEXXXXXXXXXYYLITLPELRTPVXXTPPTS

SEQ ID NO: 12019 - protein, 36 aa, Artificial Sequence
  GFR-binding peptide
  MOD_RES (2), (4), (36): Xaa is C or S
RXGXSEVVMDNSLQEVVNNASDYYLITLPELRTPVX

SEQ ID NO: 12020 - protein, 37 aa, Artificial Sequence; identical to SEQ ID NO: 4589
  GFR-binding peptide
  MOD_RES (1), (35), (36): Xaa is C or S
  MOD_RES (13), (14), (15), (16), (17): Xaa is A or G
  MOD_RES (18), (19), (20), (21): Xaa is A or G or is absent

SEQ ID NO: 12021 - protein, 33 aa, Artificial Sequence; identical to SEQ ID NO: 4591
  GFR-binding peptide
  MOD_RES (31), (31): Xaa is C or S

SEQ ID NO: 12022 - protein, 33 aa, Artificial Sequence; identical to SEQ ID NO: 4592
  GFR-binding peptide
  MOD_RES (1), (32), (33): Xaa is C or S

SEQ ID NO: 12023 - protein, 37 aa, Artificial Sequence
  GFR-binding peptide
  MOD_RES (1), (3), (35), (36): Xaa is C or S
XGXSEVVMDQYNKLVVNNASDLYLISIASLRTPVXXT

SEQ ID NO: 12024 - protein, 41 aa, Artificial Sequence; identical to SEQ ID NO: 4595
  GFR-binding peptide
  MOD_RES (1), (35), (36): Xaa is C or S
  MOD_RES (13), (14), (15), (16), (17): Xaa is A or G
  MOD_RES (18), (19), (20), (21): Xaa is A or G or is absent

SEQ ID NO: 12025 - protein, 36 aa, Artificial Sequence; identical to SEQ ID NO: 4596
  GFR-binding peptide
  MOD_RES (1), (33), (34): Xaa is C or S

SEQ ID NO: 12026 - protein, 38 aa, Artificial Sequence
  GFR-binding peptide
  MOD_RES (1), (3), (37), (38): Xaa is C or S
  MOD_RES (15), (16), (17), (18), (19): Xaa is A or G
  MOD_RES (20), (21), (22), (23): Xaa is A or G or is absent
XGXSEVVMDQYNKLXXXXXXXXXLYLISIASLRTPVXX

SEQ ID NO: 12027 - protein, 38 aa, Artificial Sequence; identical to SEQ ID NO: 4600
  GFR-binding peptide
  MOD_RES (2), (4), (36), (37): Xaa is C or S

SEQ ID NO: 12028 - protein, 34 aa, Artificial Sequence; identical to SEQ ID NO: 4601
  GFR-binding peptide
  MOD_RES (1), (3), (34): Xaa is C or S

SEQ ID NO: 12029 - protein, 35 aa, Artificial Sequence
  GFR-binding peptide
  MOD_RES (32), (32): Xaa is C or S
SRVVMNNSLQEIVNSSDDYYVVPLPELKTPAXTPK

SEQ ID NO: 12030 - protein, 39 aa, Artificial Sequence
  GFR-binding peptide
  MOD_RES (1), (3), (36), (37): Xaa is C or S
  MOD_RES (14), (15), (16), (17), (18): Xaa is A or G
  MOD_RES (19), (20), (21), (22): Xaa is A or G or is absent
XKXSKVIMEYQKYXXXXXXXXXIFLISIPSLDQSVXXPS

SEQ ID NO: 12031 - protein, 36 aa, Artificial Sequence
  GFR-binding peptide
  MOD_RES (2), (4), (36): Xaa is C or S
RXGXSEVVMDQYNKLVVNNASDLYLISIASLRTPVX

SEQ ID NO: 12032 - protein, 36 aa, Artificial Sequence
  GFR-binding peptide
  MOD_RES (1), (32), (33): Xaa is C or S
XSRVIMNSLQEVKPKRGVYYVIPLPELAQPVXXPAA

SEQ ID NO: 12033 - protein, 33 aa, Artificial Sequence
  GFR-binding peptide
  MOD_RES (1), (33): Xaa is C or S
XSEVVMDEYQKYVVNNASDIFLISIPSLRTPVX

SEQ ID NO: 12034 - protein, 39 aa, Artificial Sequence; identical to SEQ ID NO: 4606
  GFR-binding peptide
  MOD_RES (2), (34), (35): Xaa is C or S

SEQ ID NO: 12035 - protein, 41 aa, Artificial Sequence
  GFR-binding peptide
  MOD_RES (2), (35), (36): Xaa is C or S
  MOD_RES (13), (14), (15), (16), (17): Xaa is A or G
  MOD_RES (18), (19), (20), (21): Xaa is A or G or is absent
KXSKVIMEYQKYXXXXXXXXXIFLISIPSLDQSVXXPSASA

SEQ ID NO: 12036 - protein, 37 aa, Artificial Sequence
  GFR-binding peptide
  MOD_RES (2), (4), (37): Xaa is C or S
  MOD_RES (15), (16), (17), (18), (19): Xaa is A or G
  MOD_RES (20), (21), (22), (23): Xaa is A or G or is absent
SXKXSRVIMEYQKYXXXXXXXXXIFLISIPSLAQPVX

SEQ ID NO: 12037 - protein, 33 aa, Artificial Sequence
  GFR-binding peptide
  MOD_RES (33), (33): Xaa is C or S
  MOD_RES (11), (12), (13), (14), (15): Xaa is A or G
  MOD_RES (16), (17), (18), (19): Xaa is A or G or is absent
EVVMDRYKKLXXXXXXXXXFYLISIANLRTPVX

SEQ ID NO: 12038 - protein, 36 aa, Artificial Sequence; identical to SEQ ID NO: 4614
  GFR-binding peptide
  MOD_RES (1), (3), (35), (36): Xaa is C or S

SEQ ID NO: 12039 - protein, 36 aa, Artificial Sequence
  GFR-binding peptide
  MOD_RES (2), (34): Xaa is C or S
GXSRVVMNNSLQEIVNSSDDYYVVPLPELKTPAXTP

SEQ ID NO: 12040 - protein, 37 aa, Artificial Sequence
  GFR-binding peptide
  MOD_RES (1), (3), (34), (35): Xaa is C or S
XKXSKVVMNSLQEVKPTRGVYYLITLPELDQPVXXPS

SEQ ID NO: 12041 - protein, 39 aa, Artificial Sequence
  GFR-binding peptide
  MOD_RES (1), (3), (35): Xaa is C or S
XGXSRVVMNNSLQEIVNSSDDYYLVTLPELKTPAXTPKT

SEQ ID NO: 12042 - protein, 34 aa, Artificial Sequence
  GFR-binding peptide
  MOD_RES (31), (32): Xaa is C or S
EVVMDNSLQEVVKENEDYYLMTLPELETPVXXAK

SEQ ID NO: 12043 - protein, 32 aa, Artificial Sequence
  GFR-binding peptide
  MOD_RES (11), (12), (13), (14), (15): Xaa is A or G
  MOD_RES (16), (17), (18), (19): Xaa is A or G or is absent
SKVVMEYQKYXXXXXXXXXIFLISIPSLDQPV

SEQ ID NO: 12044 - protein, 37 aa, Artificial Sequence; identical to SEQ ID NO: 4624
  GFR-binding peptide
  MOD_RES (1), (3), (35): Xaa is C or S

SEQ ID NO: 12045 - protein, 36 aa, Artificial Sequence; identical to SEQ ID NO: 4625
  GFR-binding peptide
  MOD_RES (1), (32), (33): Xaa is C or S

SEQ ID NO: 12046 - protein, 35 aa, Artificial Sequence
  GFR-binding peptide
  MOD_RES (2), (4): Xaa is C or S
RXGXSEVVMDEYQKYVVNNASDIFLISIPSLRTPV

SEQ ID NO: 12047 - protein, 33 aa, Artificial Sequence; identical to SEQ ID NO: 4627
  GFR-binding peptide
  MOD_RES (1), (3): Xaa is C or S

SEQ ID NO: 12048 - protein, 37 aa, Artificial Sequence
  GFR-binding peptide
  MOD_RES (33), (34): Xaa is C or S
  MOD_RES (11), (12), (13), (14), (15): Xaa is A or G
  MOD_RES (16), (17), (18), (19): Xaa is A or G or is absent
RVVMNNSLQEXXXXXXXXXYYVVPLPELKTPAXXPKP

SEQ ID NO: 12049 - protein, 42 aa, Artificial Sequence
  GFR-binding peptide
  MOD_RES (2), (36), (37): Xaa is C or S
  MOD_RES (14), (15), (16), (17), (18): Xaa is A or G
  MOD_RES (19), (20), (21), (22): Xaa is A or G or is absent
GXGEVVMENSLQEXXXXXXXXXYYVMPLPELETPVXXAKPIS

SEQ ID NO: 12050 - protein, 37 aa, Artificial Sequence; identical to SEQ ID NO: 4629
  GFR-binding peptide
  MOD_RES (2), (34), (35): Xaa is C or S

SEQ ID NO: 12051 - protein, 39 aa, Artificial Sequence; identical to SEQ ID NO: 4630
  GFR-binding peptide
  MOD_RES (1), (34), (35): Xaa is C or S
  MOD_RES (12), (13), (14), (15), (16): Xaa is A or G
  MOD_RES (17), (18), (19), (20): Xaa is A or G or is absent

SEQ ID NO: 12052 - protein, 33 aa, Artificial Sequence
  GFR-binding peptide
  MOD_RES (1), (32), (33): Xaa is C or S
XSRVIMNSLQEVKPKRGVYYLITLPELAQPVXX

SEQ ID NO: 12053 - protein, 33 aa, Artificial Sequence
  GFR-binding peptide
  MOD_RES (31), (32): Xaa is C or S
SRVIMNSLQEVKPKRGVYYLITLPELAQPVXXP

SEQ ID NO: 12054 - protein, 42 aa, Artificial Sequence; identical to SEQ ID NO: 4632
  GFR-binding peptide
  MOD_RES (1), (3), (37), (38): Xaa is C or S
  MOD_RES (15), (16), (17), (18), (19): Xaa is A or G
  MOD_RES (20), (21), (22), (23): Xaa is A or G or is absent

SEQ ID NO: 12055 - protein, 42 aa, Artificial Sequence
  GFR-binding peptide
  MOD_RES (2), (36), (37): Xaa is C or S
  MOD_RES (14), (15), (16), (17), (18): Xaa is A or G
  MOD_RES (19), (20), (21), (22): Xaa is A or G or is absent
GXSEVVMDEYQKYXXXXXXXXXIFLISIPSLRTPVXXTPPTS

SEQ ID NO: 12056 - protein, 38 aa, Artificial Sequence; identical to SEQ ID NO: 4633
  GFR-binding peptide
  MOD_RES (2), (4), (36), (37): Xaa is C or S

SEQ ID NO: 12057 - protein, 38 aa, Artificial Sequence
  GFR-binding peptide
  MOD_RES (2), (35), (36): Xaa is C or S
  MOD_RES (13), (14), (15), (16), (17): Xaa is A or G
  MOD_RES (18), (19), (20), (21): Xaa is A or G or is absent
KXSRVIMNSLQEXXXXXXXXXYYVIPLPELAQPVXXPA

SEQ ID NO: 12058 - protein, 40 aa, Artificial Sequence
  GFR-binding peptide
  MOD_RES (1), (3), (35): Xaa is C or S
XGXSRVVMNEYQKYIVNSSDDIFLVSIPSLKTPAXTPKTV

SEQ ID NO: 12059 - protein, 38 aa, Artificial Sequence
  GFR-binding peptide
  MOD_RES (1), (33), (34): Xaa is C or S
XSRVVMNNSLQEIVNSSDDYYVVPLPELKTPAXXPKPV

SEQ ID NO: 12060 - protein, 39 aa, Artificial Sequence; identical to SEQ ID NO: 4637
  GFR-binding peptide
  MOD_RES (2), (4), (36), (37): Xaa is C or S

SEQ ID NO: 12061 - protein, 37 aa, Artificial Sequence
  GFR-binding peptide
  MOD_RES (1), (3), (36), (37): Xaa is C or S
  MOD_RES (14), (15), (16), (17), (18): Xaa is A or G
  MOD_RES (19), (20), (21), (22): Xaa is A or G or is absent
XKXSKVVMNSLQEXXXXXXXXXYYVIPLPELDQPVXX

SEQ ID NO: 12062 - protein, 36 aa, Artificial Sequence
  GFR-binding peptide
  MOD_RES (32), (33): Xaa is C or S
GEVVMENSLQEVVKDYEDYYLMTLPELETPVXXAKP

SEQ ID NO: 12063 - protein, 38 aa, Artificial Sequence
  GFR-binding peptide
  MOD_RES (34), (35): Xaa is C or S
  MOD_RES (12), (13), (14), (15), (16): Xaa is A or G
  MOD_RES (17), (18), (19), (20): Xaa is A or G or is absent
SRVVMNEYQKYXXXXXXXXXIFLVSIPSLKTPAXXPKP

SEQ ID NO: 12064 - protein, 34 aa, Artificial Sequence
  GFR-binding peptide
  MOD_RES (1), (32), (33): Xaa is C or S
XSKVVMNSLQEVKPTRGVYYLITLPELDQPVXXP

SEQ ID NO: 12065 - protein, 40 aa, Artificial Sequence
  GFR-binding peptide
  MOD_RES (34), (34): Xaa is C or S
  MOD_RES (12), (13), (14), (15), (16): Xaa is A or G
  MOD_RES (17), (18), (19), (20): Xaa is A or G or is absent
SRVVMNNSLQEXXXXXXXXXYYVVPLPELKTPAXTPKTVH

SEQ ID NO: 12066 - protein, 38 aa, Artificial Sequence
  GFR-binding peptide
  MOD_RES (2), (34), (35): Xaa is C or S
GXSEVVMDNSLQEVVNNASDYYLITLPELRTPVXXTPP

SEQ ID NO: 12067 - protein, 38 aa, Artificial Sequence; identical to SEQ ID NO: 4641
  GFR-binding peptide
  MOD_RES (1), (3), (34), (35): Xaa is C or S

SEQ ID NO: 12068 - protein, 34 aa, Artificial Sequence
  GFR-binding peptide
  MOD_RES (2), (2): Xaa is C or S
  MOD_RES (13), (14), (15), (16), (17): Xaa is A or G
  MOD_RES (18), (19), (20), (21): Xaa is A or G or is absent
KXSKVVMNSLQEXXXXXXXXXYYLITLPELDQPV

SEQ ID NO: 12069 - protein, 39 aa, Artificial Sequence
  GFR-binding peptide
  MOD_RES (1), (34), (35): Xaa is C or S
  MOD_RES (12), (13), (14), (15), (16): Xaa is A or G
  MOD_RES (17), (18), (19), (20): Xaa is A or G or is absent
XSKVVMNSLQEXXXXXXXXXYYLITLPELDQPVXXPSAS

SEQ ID NO: 12070 - protein, 39 aa, Artificial Sequence
  GFR-binding peptide
  MOD_RES (1), (3), (34), (35): Xaa is C or S
XKXSRVIMNSLQEVKPKRGVYYVIPLPELAQPVXXPAAS

SEQ ID NO: 12071 - protein, 39 aa, Artificial Sequence; identical to SEQ ID NO: 4643
  GFR-binding peptide
  MOD_RES (2), (35), (36): Xaa is C or S
  MOD_RES (13), (14), (15), (16), (17): Xaa is A or G
  MOD_RES (18), (19), (20), (21): Xaa is A or G or is absent

SEQ ID NO: 12072 - protein, 33 aa, Artificial Sequence
  GFR-binding peptide
  MOD_RES (2), (33): Xaa is C or S
KXSRVIMNSLQEVKPKRGVYYLITLPELAQPVX

SEQ ID NO: 12073 - protein, 38 aa, Artificial Sequence
  GFR-binding peptide
  MOD_RES (2), (36), (37): Xaa is C or S
  MOD_RES (14), (15), (16), (17), (18): Xaa is A or G
  MOD_RES (19), (20), (21), (22): Xaa is A or G or is absent
GXARVVMNNSLQEXXXXXXXXXYYLVTLPELQTPAXXP

SEQ ID NO: 12074 - protein, 38 aa, Artificial Sequence; identical to SEQ ID NO: 4645
  GFR-binding peptide
  MOD_RES (1), (34), (35): Xaa is C or S
  MOD_RES (12), (13), (14), (15), (16): Xaa is A or G
  MOD_RES (17), (18), (19), (20): Xaa is A or G or is absent

SEQ ID NO: 12075 - protein, 30 aa, Artificial Sequence
  GFR-binding peptide
EVVMDEYQKYVVKENEDIFLMSIPSLETPV

SEQ ID NO: 12076 - protein, 39 aa, Artificial Sequence
  GFR-binding peptide
  MOD_RES (1), (3), (34), (35): Xaa is C or S
XKXSRVIMEYQKYVKPKRGVIFLISIPSLAQPVXXPAAS

SEQ ID NO: 12077 - protein, 34 aa, Artificial Sequence
  GFR-binding peptide
  MOD_RES (1), (1): Xaa is C or S
  MOD_RES (13), (14), (15), (16), (17): Xaa is A or G
  MOD_RES (18), (19), (20), (21): Xaa is A or G or is absent
XSRVVMNNSLQEXXXXXXXXXYYLVTLPELKTPA

SEQ ID NO: 12078 - protein, 41 aa, Artificial Sequence
  GFR-binding peptide
  MOD_RES (2), (4), (36), (37): Xaa is C or S
HXGXARVVMNNSLQEIVNSSDDYYVVPLPELQTPAXXPKPV

SEQ ID NO: 12079 - protein, 40 aa, Artificial Sequence
  GFR-binding peptide
  MOD_RES (1), (3), (37), (38): Xaa is C or S
  MOD_RES (15), (16), (17), (18), (19): Xaa is A or G
  MOD_RES (20), (21), (22), (23): Xaa is A or G or is absent
XGXSEVVMDQYNKLXXXXXXXXXLYLISIASLRTPVXXTP

SEQ ID NO: 12080 - protein, 40 aa, Artificial Sequence
  GFR-binding peptide
  MOD_RES (34), (35): Xaa is C or S
  MOD_RES (12), (13), (14), (15), (16): Xaa is A or G
  MOD_RES (17), (18), (19), (20): Xaa is A or G or is absent
SEVVMDNSLQEXXXXXXXXXYYLITLPELRTPVXXTPPTS

SEQ ID NO: 12081 - protein, 36 aa, Artificial Sequence
  GFR-binding peptide
  MOD_RES (34), (35): Xaa is C or S
  MOD_RES (12), (13), (14), (15), (16): Xaa is A or G
  MOD_RES (17), (18), (19), (20): Xaa is A or G or is absent
ARVVMNNSLQEXXXXXXXXXYYLVTLPELQTPAXXP

SEQ ID NO: 12082 - protein, 38 aa, Artificial Sequence; identical to SEQ ID NO: 4649
  GFR-binding peptide
  MOD_RES (1), (3), (34), (35): Xaa is C or S

SEQ ID NO: 12083 - protein, 36 aa, Artificial Sequence
  GFR-binding peptide
  MOD_RES (1), (3), (35), (36): Xaa is C or S
XGXARVVMNEYQKYIVNSSDDIFLVSIPSLQTPAXX

SEQ ID NO: 12084 - protein, 36 aa, Artificial Sequence
  GFR-binding peptide
  MOD_RES (31), (32): Xaa is C or S
EVVMENSLQEVVKDYEDYYVMPLPELETPVXXAKPI

SEQ ID NO: 12085 - protein, 35 aa, Artificial Sequence; identical to SEQ ID NO: 4652
  GFR-binding peptide
  MOD_RES (33), (34): Xaa is C or S
  MOD_RES (11), (12), (13), (14), (15): Xaa is A or G
  MOD_RES (16), (17), (18), (19): Xaa is A or G or is absent

SEQ ID NO: 12086 - protein, 36 aa, Artificial Sequence
  GFR-binding peptide
  MOD_RES (31), (32): Xaa is C or S
EVVMENSLQEVVKDYEDYYLMTLPELETPVXXAKPI

SEQ ID NO: 12087 - protein, 37 aa, Artificial Sequence
  GFR-binding peptide
  MOD_RES (2), (4): Xaa is C or S
  MOD_RES (16), (17), (18), (19), (20): Xaa is A or G
  MOD_RES (21), (22), (23), (24): Xaa is A or G or is absent
RXGXSEVVMDNSLQEXXXXXXXXXYYLITLPELRTPV

SEQ ID NO: 12088 - protein, 34 aa, Artificial Sequence
  GFR-binding peptide
  MOD_RES (2), (34): Xaa is C or S
GXSEVVMDNSLQEVVNNASDYYVIPLPELRTPVX

SEQ ID NO: 12089 - protein, 34 aa, Artificial Sequence; identical to SEQ ID NO: 4658
  GFR-binding peptide
  MOD_RES (34), (34): Xaa is C or S
  MOD_RES (12), (13), (14), (15), (16): Xaa is A or G
  MOD_RES (17), (18), (19), (20): Xaa is A or G or is absent

SEQ ID NO: 12090 - protein, 34 aa, Artificial Sequence
  GFR-binding peptide
  MOD_RES (2), (34): Xaa is C or S
GXGEVVMDNSLQEVVKENEDYYLMTLPELETPVX

SEQ ID NO: 12091 - protein, 36 aa, Artificial Sequence
  GFR-binding peptide
  MOD_RES (1), (32), (33): Xaa is C or S
XSKVVMEYQKYVKPTRGVIFLISIPSLDQPVXXPSA

SEQ ID NO: 12092 - protein, 31 aa, Artificial Sequence; identical to SEQ ID NO: 4662
  GFR-binding peptide

SEQ ID NO: 12093 - protein, 41 aa, Artificial Sequence
  GFR-binding peptide
  MOD_RES (1), (35), (36): Xaa is C or S
  MOD_RES (13), (14), (15), (16), (17): Xaa is A or G
  MOD_RES (18), (19), (20), (21): Xaa is A or G or is absent
XSEVVMDNSLQEXXXXXXXXXYYVIPLPELRTPVXXTPPTS

SEQ ID NO: 12094 - protein, 35 aa, Artificial Sequence; identical to SEQ ID NO: 4663
  GFR-binding peptide
  MOD_RES (33), (34): Xaa is C or S
  MOD_RES (11), (12), (13), (14), (15): Xaa is A or G
  MOD_RES (16), (17), (18), (19): Xaa is A or G or is absent

SEQ ID NO: 12095 - protein, 40 aa, Artificial Sequence
  GFR-binding peptide
  MOD_RES (2), (4), (38), (39): Xaa is C or S
  MOD_RES (16), (17), (18), (19), (20): Xaa is A or G
  MOD_RES (21), (22), (23), (24): Xaa is A or G or is absent
HXGXARVVMNNSLQEXXXXXXXXXYYLVTLPELQTPAXXP

SEQ ID NO: 12096 - protein, 35 aa, Artificial Sequence
  GFR-binding peptide
  MOD_RES (2), (4), (35): Xaa is C or S
SXKXSRVIMEYQKYVKPKRGVIFLISIPSLAQPVX

SEQ ID NO: 12097 - protein, 40 aa, Artificial Sequence; identical to SEQ ID NO: 4666
  GFR-binding peptide
  MOD_RES (1), (3), (35), (36): Xaa is C or S

SEQ ID NO: 12098 - protein, 39 aa, Artificial Sequence
  GFR-binding peptide
  MOD_RES (1), (3), (36), (37): Xaa is C or S
  MOD_RES (14), (15), (16), (17), (18): Xaa is A or G
  MOD_RES (19), (20), (21), (22): Xaa is A or G or is absent
XKXSRVIMEYQKYXXXXXXXXXIFLISIPSLAQPVXXPA

SEQ ID NO: 12099 - protein, 38 aa, Artificial Sequence; identical to SEQ ID NO: 4667
  GFR-binding peptide
  MOD_RES (33), (34): Xaa is C or S
  MOD_RES (11), (12), (13), (14), (15): Xaa is A or G
  MOD_RES (16), (17), (18), (19): Xaa is A or G or is absent

SEQ ID NO: 12100 - protein, 34 aa, Artificial Sequence
  GFR-binding peptide
  MOD_RES (31), (32): Xaa is C or S
EVVMDNSLQEVVKENEDYYVMPLPELETPVXXAK

SEQ ID NO: 12101 - protein, 37 aa, Artificial Sequence
  GFR-binding peptide
  MOD_RES (33), (34): Xaa is C or S
  MOD_RES (11), (12), (13), (14), (15): Xaa is A or G
  MOD_RES (16), (17), (18), (19): Xaa is A or G or is absent
SKVIMNSLQEXXXXXXXXXYYVIPLPELDQSVXXPSA

SEQ ID NO: 12102 - protein, 33 aa, Artificial Sequence; identical to SEQ ID NO: 4674
  GFR-binding peptide
  MOD_RES (1), (1): Xaa is C or S
  MOD_RES (12), (13), (14), (15), (16): Xaa is A or G
  MOD_RES (17), (18), (19), (20): Xaa is A or G or is absent

SEQ ID NO: 12103 - protein, 38 aa, Artificial Sequence
  GFR-binding peptide
  MOD_RES (2), (35), (36): Xaa is C or S
  MOD_RES (13), (14), (15), (16), (17): Xaa is A or G
  MOD_RES (18), (19), (20), (21): Xaa is A or G or is absent
KXSKVIMNSLQEXXXXXXXXXYYVIPLPELDQSVXXPS

SEQ ID NO: 12104 - protein, 36 aa, Artificial Sequence
  GFR-binding peptide
  MOD_RES (1), (35), (36): Xaa is C or S
  MOD_RES (13), (14), (15), (16), (17): Xaa is A or G
  MOD_RES (18), (19), (20), (21): Xaa is A or G or is absent
XSEVVMDQYNKLXXXXXXXXXLYLISIASLRTPVXX

SEQ ID NO: 12105 - protein, 39 aa, Artificial Sequence
  GFR-binding peptide
  MOD_RES (2), (34), (35): Xaa is C or S
GXARVVMNNSLQEIVNSSDDYYVVPLPELQTPAXXPKPV

SEQ ID NO: 12106 - protein, 35 aa, Artificial Sequence
  GFR-binding peptide
  MOD_RES (2), (34), (35): Xaa is C or S
GXSEVVMDQYNKLVVNNASDLYLISIASLRTPVXX

SEQ ID NO: 12107 - protein, 40 aa, Artificial Sequence
  GFR-binding peptide
  MOD_RES (1), (35): Xaa is C or S
  MOD_RES (13), (14), (15), (16), (17): Xaa is A or G
  MOD_RES (18), (19), (20), (21): Xaa is A or G or is absent
XSRVVMNNSLQEXXXXXXXXXYYVVPLPELKTPAXTPKTV

SEQ ID NO: 12108 - protein, 34 aa, Artificial Sequence
  GFR-binding peptide
  MOD_RES (2), (33), (34): Xaa is C or S
KXSRVIMNSLQEVKPKRGVYYLITLPELAQPVXX

SEQ ID NO: 12109 - protein, 36 aa, Artificial Sequence; identical to SEQ ID NO: 4682
  GFR-binding peptide
  MOD_RES (2), (33), (34): Xaa is C or S

SEQ ID NO: 12110 - protein, 32 aa, Artificial Sequence; identical to SEQ ID NO: 4685
  GFR-binding peptide
  MOD_RES (1), (32): Xaa is C or S

SEQ ID NO: 12111 - protein, 39 aa, Artificial Sequence
  GFR-binding peptide
  MOD_RES (34), (35): Xaa is C or S
  MOD_RES (12), (13), (14), (15), (16): Xaa is A or G
  MOD_RES (17), (18), (19), (20): Xaa is A or G or is absent
ARVVMNNSLQEXXXXXXXXXYYVVPLPELQTPAXXPKPV

SEQ ID NO: 12112 - protein, 36 aa, Artificial Sequence; identical to SEQ ID NO: 4686
  GFR-binding peptide
  MOD_RES (2), (35), (36): Xaa is C or S
  MOD_RES (13), (14), (15), (16), (17): Xaa is A or G
  MOD_RES (18), (19), (20), (21): Xaa is A or G or is absent

SEQ ID NO: 12113 - protein, 34 aa, Artificial Sequence
  GFR-binding peptide
  MOD_RES (31), (32): Xaa is C or S
EVVMDNSLQEVVNNASDYYVIPLPELRTPVXXTP

SEQ ID NO: 12114 - protein, 33 aa, Artificial Sequence
  GFR-binding peptide
  MOD_RES (32), (33): Xaa is C or S
SEVVMDNSLQEVVNNASDYYVIPLPELRTPVXX

SEQ ID NO: 12115 - protein, 39 aa, Artificial Sequence
  GFR-binding peptide
  MOD_RES (2), (35), (36): Xaa is C or S
  MOD_RES (13), (14), (15), (16), (17): Xaa is A or G
  MOD_RES (18), (19), (20), (21): Xaa is A or G or is absent
KXSKVVMNSLQEXXXXXXXXXYYLITLPELDQPVXXPSA

SEQ ID NO: 12116 - protein, 37 aa, Artificial Sequence
  GFR-binding peptide
  MOD_RES (1), (3), (37): Xaa is C or S
  MOD_RES (15), (16), (17), (18), (19): Xaa is A or G
  MOD_RES (20), (21), (22), (23): Xaa is A or G or is absent
XGXSRVVMNNSLQEXXXXXXXXXYYVVPLPELKTPAX

SEQ ID NO: 12117 - protein, 32 aa, Artificial Sequence; identical to SEQ ID NO: 4688
  GFR-binding peptide
  MOD_RES (31), (32): Xaa is C or S

SEQ ID NO: 12118 - protein, 37 aa, Artificial Sequence
  GFR-binding peptide
  MOD_RES (1), (3), (37): Xaa is C or S
  MOD_RES (15), (16), (17), (18), (19): Xaa is A or G
  MOD_RES (20), (21), (22), (23): Xaa is A or G or is absent
XGXSEVVMDRYKKLXXXXXXXXXFYLISIANLRTPVX

SEQ ID NO: 12119 - protein, 38 aa, Artificial Sequence; identical to SEQ ID NO: 4689
  GFR-binding peptide
  MOD_RES (1), (33), (34): Xaa is C or S

SEQ ID NO: 12120 - protein, 36 aa, Artificial Sequence; identical to SEQ ID NO: 4691
  GFR-binding peptide
  MOD_RES (1), (35), (36): Xaa is C or S
  MOD_RES (13), (14), (15), (16), (17): Xaa is A or G
  MOD_RES (18), (19), (20), (21): Xaa is A or G or is absent

SEQ ID NO: 12121 - protein, 33 aa, Artificial Sequence
  GFR-binding peptide
  MOD_RES (2), (33): Xaa is C or S
KXSKVVMEYQKYVKPTRGVIFLISIPSLDQPVX

SEQ ID NO: 12122 - protein, 36 aa, Artificial Sequence
  GFR-binding peptide
  MOD_RES (1), (3): Xaa is C or S
  MOD_RES (15), (16), (17), (18), (19): Xaa is A or G
  MOD_RES (20), (21), (22), (23): Xaa is A or G or is absent
XGXSEVVMDNSLQEXXXXXXXXXYYVIPLPELRTPV

SEQ ID NO: 12123 - protein, 38 aa, Artificial Sequence
  GFR-binding peptide
  MOD_RES (2), (4), (36): Xaa is C or S
HXGXSRVVMNNSLQEIVNSSDDYYLVTLPELKTPAXTP

SEQ ID NO: 12124 - protein, 35 aa, Artificial Sequence
  GFR-binding peptide
  MOD_RES (32), (32): Xaa is C or S
SRVVMNNSLQEIVNSSDDYYLVTLPELKTPAXTPK

SEQ ID NO: 12125 - protein, 36 aa, Artificial Sequence; identical to SEQ ID NO: 4696
  GFR-binding peptide
  MOD_RES (1), (34), (35): Xaa is C or S
  MOD_RES (12), (13), (14), (15), (16): Xaa is A or G
  MOD_RES (17), (18), (19), (20): Xaa is A or G or is absent

SEQ ID NO: 12126 - protein, 35 aa, Artificial Sequence
  GFR-binding peptide
  MOD_RES (1), (3), (35): Xaa is C or S
XGXGEVVMDNSLQEVVKENEDYYVMPLPELETPVX

SEQ ID NO: 12127 - protein, 33 aa, Artificial Sequence; identical to SEQ ID NO: 4697
  GFR-binding peptide
  MOD_RES (33), (33): Xaa is C or S
  MOD_RES (11), (12), (13), (14), (15): Xaa is A or G
  MOD_RES (16), (17), (18), (19): Xaa is A or G or is absent

SEQ ID NO: 12128 - protein, 34 aa, Artificial Sequence; identical to SEQ ID NO: 4699
  GFR-binding peptide
  MOD_RES (2), (33), (34): Xaa is C or S

SEQ ID NO: 12129 - protein, 37 aa, Artificial Sequence; identical to SEQ ID NO: 4700
  GFR-binding peptide
  MOD_RES (2), (36), (37): Xaa is C or S
  MOD_RES (14), (15), (16), (17), (18): Xaa is A or G
  MOD_RES (19), (20), (21), (22): Xaa is A or G or is absent

SEQ ID NO: 12130 - protein, 38 aa, Artificial Sequence
  GFR-binding peptide
  MOD_RES (2), (33), (34): Xaa is C or S
KXSKVIMEYQKYIKPTKGIIFLISIPSLDQSVXXPSAS

SEQ ID NO: 12131 - protein, 38 aa, Artificial Sequence; identical to SEQ ID NO: 4701
  GFR-binding peptide
  MOD_RES (1), (33), (34): Xaa is C or S

SEQ ID NO: 12132 - protein, 37 aa, Artificial Sequence
  GFR-binding peptide
  MOD_RES (2), (35), (36): Xaa is C or S
  MOD_RES (13), (14), (15), (16), (17): Xaa is A or G
  MOD_RES (18), (19), (20), (21): Xaa is A or G or is absent
KXSKVIMNSLQEXXXXXXXXXYYVIPLPELDQSVXXP

SEQ ID NO: 12133 - protein, 36 aa, Artificial Sequence; identical to SEQ ID NO: 4702
  GFR-binding peptide
  MOD_RES (1), (33), (34): Xaa is C or S

SEQ ID NO: 12134 - protein, 43 aa, Artificial Sequence; identical to SEQ ID NO: 4703
  GFR-binding peptide
  MOD_RES (1), (3), (37), (38): Xaa is C or S
  MOD_RES (15), (16), (17), (18), (19): Xaa is A or G
  MOD_RES (20), (21), (22), (23): Xaa is A or G or is absent

SEQ ID NO: 12135 - protein, 34 aa, Artificial Sequence
  GFR-binding peptide
  MOD_RES (33), (34): Xaa is C or S
  MOD_RES (11), (12), (13), (14), (15): Xaa is A or G
  MOD_RES (16), (17), (18), (19): Xaa is A or G or is absent
EVVMDNSLQEXXXXXXXXXYYLITLPELRTPVXX

SEQ ID NO: 12136 - protein, 38 aa, Artificial Sequence
  GFR-binding peptide
  MOD_RES (2), (33), (34): Xaa is C or S
KXSRVIMNSLQEVKPKRGVYYVIPLPELAQPVXXPAAS

SEQ ID NO: 12137 - protein, 31 aa, Artificial Sequence; identical to SEQ ID NO: 4704
  GFR-binding peptide
  MOD_RES (31), (31): Xaa is C or S

SEQ ID NO: 12138 - protein, 34 aa, Artificial Sequence; identical to SEQ ID NO: 4705
  GFR-binding peptide
  MOD_RES (2), (34): Xaa is C or S

SEQ ID NO: 12139 - protein, 36 aa, Artificial Sequence; identical to SEQ ID NO: 4708
  GFR-binding peptide
  MOD_RES (1), (35), (36): Xaa is C or S
  MOD_RES (13), (14), (15), (16), (17): Xaa is A or G
  MOD_RES (18), (19), (20), (21): Xaa is A or G or is absent

SEQ ID NO: 12140 - protein, 35 aa, Artificial Sequence; identical to SEQ ID NO: 4710
  GFR-binding peptide
  MOD_RES (1), (3), (34), (35): Xaa is C or S

SEQ ID NO: 12141 - protein, 38 aa, Artificial Sequence; identical to SEQ ID NO: 4711
  GFR-binding peptide
  MOD_RES (2), (4), (35), (36): Xaa is C or S

SEQ ID NO: 12142 - protein, 37 aa, Artificial Sequence
  GFR-binding peptide
  MOD_RES (1), (3), (35), (36): Xaa is C or S
XGXSRVVMNEYQKYIVNSSDDIFLVSIPSLKTPAXXP

SEQ ID NO: 12143 - protein, 43 aa, Artificial Sequence
  GFR-binding peptide
  MOD_RES (1), (3), (37): Xaa is C or S
  MOD_RES (15), (16), (17), (18), (19): Xaa is A or G
  MOD_RES (20), (21), (22), (23): Xaa is A or G or is absent
XGXSRVVMNNSLQEXXXXXXXXXYYVVPLPELKTPAXTPKTVH

SEQ ID NO: 12144 - protein, 44 aa, Artificial Sequence; identical to SEQ ID NO: 4717
  GFR-binding peptide
  MOD_RES (2), (4), (38): Xaa is C or S
  MOD_RES (16), (17), (18), (19), (20): Xaa is A or G
  MOD_RES (21), (22), (23), (24): Xaa is A or G or is absent

SEQ ID NO: 12145 - protein, 36 aa, Artificial Sequence
  GFR-binding peptide
  MOD_RES (33), (34): Xaa is C or S
  MOD_RES (11), (12), (13), (14), (15): Xaa is A or G
  MOD_RES (16), (17), (18), (19): Xaa is A or G or is absent
SKVIMNSLQEXXXXXXXXXYYVIPLPELDQSVXXPS

SEQ ID NO: 12146 - protein, 41 aa, Artificial Sequence
  GFR-binding peptide
  MOD_RES (2), (36), (37): Xaa is C or S
  MOD_RES (14), (15), (16), (17), (18): Xaa is A or G
  MOD_RES (19), (20), (21), (22): Xaa is A or G or is absent
GXARVVMNNSLQEXXXXXXXXXYYVVPLPELQTPAXXPKPV

SEQ ID NO: 12147 - protein, 36 aa, Artificial Sequence; identical to SEQ ID NO: 4719
  GFR-binding peptide
  MOD_RES (1), (3), (35), (36): Xaa is C or S

SEQ ID NO: 12148 - protein, 38 aa, Artificial Sequence
  GFR-binding peptide
  MOD_RES (2), (36), (37): Xaa is C or S
  MOD_RES (14), (15), (16), (17), (18): Xaa is A or G
  MOD_RES (19), (20), (21), (22): Xaa is A or G or is absent
GXSRVVMNEYQKYXXXXXXXXXIFLVSIPSLKTPAXXP

SEQ ID NO: 12149 - protein, 35 aa, Artificial Sequence
  GFR-binding peptide
  MOD_RES (1), (35): Xaa is C or S
  MOD_RES (13), (14), (15), (16), (17): Xaa is A or G
  MOD_RES (18), (19), (20), (21): Xaa is A or G or is absent
XSRVVMNNSLQEXXXXXXXXXYYLVTLPELKTPAX

SEQ ID NO: 12150 - protein, 41 aa, Artificial Sequence; identical to SEQ ID NO: 4720
  GFR-binding peptide
  MOD_RES (1), (3), (37), (38): Xaa is C or S
  MOD_RES (15), (16), (17), (18), (19): Xaa is A or G
  MOD_RES (20), (21), (22), (23): Xaa is A or G or is absent

SEQ ID NO: 12151 - protein, 38 aa, Artificial Sequence; identical to SEQ ID NO: 4722
  GFR-binding peptide
  MOD_RES (2), (4), (38): Xaa is C or S
  MOD_RES (16), (17), (18), (19), (20): Xaa is A or G
  MOD_RES (21), (22), (23), (24): Xaa is A or G or is absent

SEQ ID NO: 12152 - protein, 37 aa, Artificial Sequence; identical to SEQ ID NO: 4723
  GFR-binding peptide
  MOD_RES (1), (32), (33): Xaa is C or S

SEQ ID NO: 12153 - protein, 37 aa, Artificial Sequence
  GFR-binding peptide
  MOD_RES (1), (32), (33): Xaa is C or S
XSKVVMEYQKYVKPTRGVIFLISIPSLDQPVXXPSAS

SEQ ID NO: 12154 - protein, 37 aa, Artificial Sequence
  GFR-binding peptide
  MOD_RES (31), (32): Xaa is C or S
EVVMENSLQEVVKDYEDYYLMTLPELETPVXXAKPIS

SEQ ID NO: 12155 - protein, 35 aa, Artificial Sequence
  GFR-binding peptide
  MOD_RES (31), (32): Xaa is C or S
SKVVMNSLQEVKPTRGVYYLITLPELDQPVXXPSA

SEQ ID NO: 12156 - protein, 41 aa, Artificial Sequence; identical to SEQ ID NO: 4727
  GFR-binding peptide
  MOD_RES (2), (4), (38), (39): Xaa is C or S
  MOD_RES (16), (17), (18), (19), (20): Xaa is A or G
  MOD_RES (21), (22), (23), (24): Xaa is A or G or is absent

SEQ ID NO: 12157 - protein, 37 aa, Artificial Sequence
  GFR-binding peptide
  MOD_RES (33), (34): Xaa is C or S
  MOD_RES (11), (12), (13), (14), (15): Xaa is A or G
  MOD_RES (16), (17), (18), (19): Xaa is A or G or is absent
RVVMNEYQKYXXXXXXXXXIFLVSIPSLQTPAXXPKP

SEQ ID NO: 12158 - protein, 38 aa, Artificial Sequence
  GFR-binding peptide
  MOD_RES (1), (3), (35), (36): Xaa is C or S
XGXGEVVMEEYQKYVVKDYEDIFLMSIPSLETPVXXAK

SEQ ID NO: 12159 - protein, 37 aa, Artificial Sequence; identical to SEQ ID NO: 4731
  GFR-binding peptide
  MOD_RES (32), (33): Xaa is C or S

SEQ ID NO: 12160 - protein, 38 aa, Artificial Sequence; identical to SEQ ID NO: 4733
  GFR-binding peptide
  MOD_RES (2), (4), (37), (38): Xaa is C or S
  MOD_RES (15), (16), (17), (18), (19): Xaa is A or G
  MOD_RES (20), (21), (22), (23): Xaa is A or G or is absent

SEQ ID NO: 12161 - protein, 38 aa, Artificial Sequence
  GFR-binding peptide
  MOD_RES (32), (33): Xaa is C or S
SEVVMDEYQKYVVNNASDIFLISIPSLRTPVXXTPPTS

SEQ ID NO: 12162 - protein, 35 aa, Artificial Sequence
  GFR-binding peptide
  MOD_RES (34), (34): Xaa is C or S
  MOD_RES (12), (13), (14), (15), (16): Xaa is A or G
  MOD_RES (17), (18), (19), (20): Xaa is A or G or is absent
SRVVMNEYQKYXXXXXXXXXIFLVSIPSLKTPAXT

SEQ ID NO: 12163 - protein, 40 aa, Artificial Sequence
  GFR-binding peptide
  MOD_RES (34), (35): Xaa is C or S
  MOD_RES (12), (13), (14), (15), (16): Xaa is A or G
  MOD_RES (17), (18), (19), (20): Xaa is A or G or is absent
GEVVMDEYQKYXXXXXXXXXIFLMSIPSLETPVXXAKPIK

SEQ ID NO: 12164 - protein, 41 aa, Artificial Sequence
  GFR-binding peptide
  MOD_RES (1), (3), (37), (38): Xaa is C or S
  MOD_RES (15), (16), (17), (18), (19): Xaa is A or G
  MOD_RES (20), (21), (22), (23): Xaa is A or G or is absent
XGXGEVVMDNSLQEXXXXXXXXXYYLMTLPELETPVXXAKP

SEQ ID NO: 12165 - protein, 32 aa, Artificial Sequence; identical to SEQ ID NO: 4735
  GFR-binding peptide
  MOD_RES (31), (32): Xaa is C or S

SEQ ID NO: 12166 - protein, 34 aa, Artificial Sequence; identical to SEQ ID NO: 4737
  GFR-binding peptide
  MOD_RES (1), (3): Xaa is C or S

SEQ ID NO: 12167 - protein, 36 aa, Artificial Sequence
  GFR-binding peptide
  MOD_RES (32), (33): Xaa is C or S
SRVVMNNSLQEIVNSSDDYYVVPLPELKTPAXXPKP

SEQ ID NO: 12168 - protein, 34 aa, Artificial Sequence; identical to SEQ ID NO: 4738
  GFR-binding peptide
  MOD_RES (34), (34): Xaa is C or S
  MOD_RES (12), (13), (14), (15), (16): Xaa is A or G
  MOD_RES (17), (18), (19), (20): Xaa is A or G or is absent

SEQ ID NO: 12169 - protein, 38 aa, Artificial Sequence
  GFR-binding peptide
  MOD_RES (1), (35), (36): Xaa is C or S
  MOD_RES (13), (14), (15), (16), (17): Xaa is A or G
  MOD_RES (18), (19), (20), (21): Xaa is A or G or is absent
XSEVVMDRYKKLXXXXXXXXXFYLISIANLRTPVXXTP

SEQ ID NO: 12170 - protein, 36 aa, Artificial Sequence
  GFR-binding peptide
  MOD_RES (1), (33), (34): Xaa is C or S
XSEVVMDNSLQEVVNNASDYYVIPLPELRTPVXXTP

SEQ ID NO: 12171 - protein, 39 aa, Artificial Sequence; identical to SEQ ID NO: 4744
  GFR-binding peptide
  MOD_RES (2), (34), (35): Xaa is C or S

SEQ ID NO: 12172 - protein, 38 aa, Artificial Sequence
  GFR-binding peptide
  MOD_RES (2), (36), (37): Xaa is C or S
  MOD_RES (14), (15), (16), (17), (18): Xaa is A or G
  MOD_RES (19), (20), (21), (22): Xaa is A or G or is absent
GXGEVVMDNSLQEXXXXXXXXXYYVMPLPELETPVXXA

SEQ ID NO: 12173 - protein, 38 aa, Artificial Sequence
  GFR-binding peptide
  MOD_RES (1), (33), (34): Xaa is C or S
XARVVMNEYQKYIVNSSDDIFLVSIPSLQTPAXXPKPV

SEQ ID NO: 12174 - protein, 39 aa, Artificial Sequence
  GFR-binding peptide
  MOD_RES (2), (36), (37): Xaa is C or S
  MOD_RES (14), (15), (16), (17), (18): Xaa is A or G
  MOD_RES (19), (20), (21), (22): Xaa is A or G or is absent
GXGEVVMENSLQEXXXXXXXXXYYVMPLPELETPVXXAK

SEQ ID NO: 12175 - protein, 39 aa, Artificial Sequence
  GFR-binding peptide
  MOD_RES (34), (35): Xaa is C or S
  MOD_RES (12), (13), (14), (15), (16): Xaa is A or G
  MOD_RES (17), (18), (19), (20): Xaa is A or G or is absent
SEVVMDNSLQEXXXXXXXXXYYVIPLPELRTPVXXTPPT

SEQ ID NO: 12176 - protein, 41 aa, Artificial Sequence
  GFR-binding peptide
  MOD_RES (2), (35), (36): Xaa is C or S
  MOD_RES (13), (14), (15), (16), (17): Xaa is A or G
  MOD_RES (18), (19), (20), (21): Xaa is A or G or is absent
KXSRVIMNSLQEXXXXXXXXXYYLITLPELAQPVXXPAASA

SEQ ID NO: 12177 - protein, 35 aa, Artificial Sequence
  GFR-binding peptide
  MOD_RES (1), (34), (35): Xaa is C or S
  MOD_RES (12), (13), (14), (15), (16): Xaa is A or G
  MOD_RES (17), (18), (19), (20): Xaa is A or G or is absent
XSRVIMEYQKYXXXXXXXXXIFLISIPSLAQPVXX

SEQ ID NO: 12178 - protein, 40 aa, Artificial Sequence
  GFR-binding peptide
  MOD_RES (1), (35), (36): Xaa is C or S
  MOD_RES (13), (14), (15), (16), (17): Xaa is A or G
  MOD_RES (18), (19), (20), (21): Xaa is A or G or is absent
XSEVVMDQYNKLXXXXXXXXXLYLISIASLRTPVXXTPPT

SEQ ID NO: 12179 - protein, 32 aa, Artificial Sequence
  GFR-binding peptide
  MOD_RES (1), (1): Xaa is C or S
XARVVMNNSLQEIVNSSDDYYVVPLPELQTPA

SEQ ID NO: 12180 - protein, 33 aa, Artificial Sequence; identical to SEQ ID NO: 4745
  GFR-binding peptide
  MOD_RES (32), (33): Xaa is C or S

SEQ ID NO: 12181 - protein, 40 aa, Artificial Sequence
  GFR-binding peptide
  MOD_RES (2), (4), (38), (39): Xaa is C or S
  MOD_RES (16), (17), (18), (19), (20): Xaa is A or G
  MOD_RES (21), (22), (23), (24): Xaa is A or G or is absent
RXGXSEVVMDNSLQEXXXXXXXXXYYVIPLPELRTPVXXT

SEQ ID NO: 12182 - protein, 41 aa, Artificial Sequence
  GFR-binding peptide
  MOD_RES (1), (35), (36): Xaa is C or S
  MOD_RES (13), (14), (15), (16), (17): Xaa is A or G
  MOD_RES (18), (19), (20), (21): Xaa is A or G or is absent
XGEVVMENSLQEXXXXXXXXXYYVMPLPELETPVXXAKPIS

SEQ ID NO: 12183 - protein, 33 aa, Artificial Sequence
  GFR-binding peptide
  MOD_RES (31), (32): Xaa is C or S
EVVMDEYQKYVVKENEDIFLMSIPSLETPVXXA

SEQ ID NO: 12184 - protein, 39 aa, Artificial Sequence
  GFR-binding peptide
  MOD_RES (33), (34): Xaa is C or S
  MOD_RES (11), (12), (13), (14), (15): Xaa is A or G
  MOD_RES (16), (17), (18), (19): Xaa is A or G or is absent
SKVVMNSLQEXXXXXXXXXYYLITLPELDQPVXXPSASA

SEQ ID NO: 12185 - protein, 39 aa, Artificial Sequence
  GFR-binding peptide
  MOD_RES (2), (4), (36), (37): Xaa is C or S
HXGXARVVMNNSLQEIVNSSDDYYLVTLPELQTPAXXPK

SEQ ID NO: 12186 - protein, 34 aa, Artificial Sequence
  GFR-binding peptide
  MOD_RES (31), (32): Xaa is C or S
EVVMDNSLQEVVNNASDYYLITLPELRTPVXXTP

SEQ ID NO: 12187 - protein, 36 aa, Artificial Sequence
  GFR-binding peptide
  MOD_RES (1), (33), (34): Xaa is C or S
XARVVMNNSLQEIVNSSDDYYVVPLPELQTPAXXPK

SEQ ID NO: 12188 - protein, 35 aa, Artificial Sequence
  GFR-binding peptide
  MOD_RES (2), (4): Xaa is C or S
RXGXGEVVMEEYQKYVVKDYEDIFLMSIPSLETPV

SEQ ID NO: 12189 - protein, 32 aa, Artificial Sequence
  GFR-binding peptide
  MOD_RES (31), (32): Xaa is C or S
SKVVMEYQKYVKPTRGVIFLISIPSLDQPVXX

SEQ ID NO: 12190 - protein, 39 aa, Artificial Sequence; identical to SEQ ID NO: 4751
  GFR-binding peptide
  MOD_RES (1), (3), (37), (38): Xaa is C or S
  MOD_RES (15), (16), (17), (18), (19): Xaa is A or G
  MOD_RES (20), (21), (22), (23): Xaa is A or G or is absent

SEQ ID NO: 12191 - protein, 37 aa, Artificial Sequence; identical to SEQ ID NO: 4752
  GFR-binding peptide
  MOD_RES (31), (32): Xaa is C or S

SEQ ID NO: 12192 - protein, 35 aa, Artificial Sequence; identical to SEQ ID NO: 4754
  GFR-binding peptide
  MOD_RES (1), (3), (35): Xaa is C or S

SEQ ID NO: 12193 - protein, 31 aa, Artificial Sequence
  GFR-binding peptide
  MOD_RES (1), (1): Xaa is C or S
XSRVIMNSLQEVKPKRGVYYVIPLPELAQPV

SEQ ID NO: 12194 - protein, 34 aa, Artificial Sequence
  GFR-binding peptide
  MOD_RES (1), (33), (34): Xaa is C or S
XGEVVMDEYQKYVVKENEDIFLMSIPSLETPVXX

SEQ ID NO: 12195 - protein, 31 aa, Artificial Sequence
  GFR-binding peptide
  MOD_RES (31), (31): Xaa is C or S
SKVVMNSLQEVKPTRGVYYVIPLPELDQPVX

SEQ ID NO: 12196 - protein, 33 aa, Artificial Sequence; identical to SEQ ID NO: 4755
  GFR-binding peptide
  MOD_RES (31), (32): Xaa is C or S

SEQ ID NO: 12197 - protein, 34 aa, Artificial Sequence
  GFR-binding peptide
  MOD_RES (31), (31): Xaa is C or S
RVVMNEYQKYIVNSSDDIFLVSIPSLKTPAXTPK

SEQ ID NO: 12198 - protein, 35 aa, Artificial Sequence
  GFR-binding peptide
  MOD_RES (1), (33), (34): Xaa is C or S
XARVVMNNSLQEIVNSSDDYYLVTLPELQTPAXXP

SEQ ID NO: 12199 - protein, 38 aa, Artificial Sequence
  GFR-binding peptide
  MOD_RES (2), (36), (37): Xaa is C or S
  MOD_RES (14), (15), (16), (17), (18): Xaa is A or G
  MOD_RES (19), (20), (21), (22): Xaa is A or G or is absent
GXSEVVMDNSLQEXXXXXXXXXYYVIPLPELRTPVXXT

SEQ ID NO: 12200 - protein, 37 aa, Artificial Sequence; identical to SEQ ID NO: 4757
  GFR-binding peptide
  MOD_RES (1), (3), (35), (36): Xaa is C or S

SEQ ID NO: 12201 - protein, 34 aa, Artificial Sequence; identical to SEQ ID NO: 4758
  GFR-binding peptide
  MOD_RES (1), (3): Xaa is C or S

SEQ ID NO: 12202 - protein, 39 aa, Artificial Sequence
  GFR-binding peptide
  MOD_RES (1), (3), (35), (36): Xaa is C or S
XGXGEVVMDNSLQEVVKENEDYYVMPLPELETPVXXAKP

SEQ ID NO: 12203 - protein, 32 aa, Artificial Sequence; identical to SEQ ID NO: 4760
  GFR-binding peptide
  MOD_RES (32), (32): Xaa is C or S

SEQ ID NO: 12204 - protein, 37 aa, Artificial Sequence
  GFR-binding peptide
  MOD_RES (33), (34): Xaa is C or S
  MOD_RES (11), (12), (13), (14), (15): Xaa is A or G
  MOD_RES (16), (17), (18), (19): Xaa is A or G or is absent
SKVIMEYQKYXXXXXXXXXIFLISIPSLDQSVXXPSA

SEQ ID NO: 12205 - protein, 34 aa, Artificial Sequence; identical to SEQ ID NO: 4761
  GFR-binding peptide
  MOD_RES (31), (32): Xaa is C or S

SEQ ID NO: 12206 - protein, 40 aa, Artificial Sequence
  GFR-binding peptide
  MOD_RES (2), (4), (38), (39): Xaa is C or S
  MOD_RES (16), (17), (18), (19), (20): Xaa is A or G
  MOD_RES (21), (22), (23), (24): Xaa is A or G or is absent
RXGXGEVVMEEYQKYXXXXXXXXXIFLMSIPSLETPVXXA

SEQ ID NO: 12207 - protein, 40 aa, Artificial Sequence
  GFR-binding peptide
  MOD_RES (34), (35): Xaa is C or S
  MOD_RES (12), (13), (14), (15), (16): Xaa is A or G
  MOD_RES (17), (18), (19), (20): Xaa is A or G or is absent
ARVVMNNSLQEXXXXXXXXXYYVVPLPELQTPAXXPKPVT

SEQ ID NO: 12208 - protein, 38 aa, Artificial Sequence
  GFR-binding peptide
  MOD_RES (1), (3), (37): Xaa is C or S
  MOD_RES (15), (16), (17), (18), (19): Xaa is A or G
  MOD_RES (20), (21), (22), (23): Xaa is A or G or is absent
XGXSRVVMNNSLQEXXXXXXXXXYYVVPLPELKTPAXT

SEQ ID NO: 12209 - protein, 33 aa, Artificial Sequence; identical to SEQ ID NO: 4770
  GFR-binding peptide
  MOD_RES (1), (3): Xaa is C or S

SEQ ID NO: 12210 - protein, 40 aa, Artificial Sequence; identical to SEQ ID NO: 4771
  GFR-binding peptide
  MOD_RES (1), (3), (37), (38): Xaa is C or S
  MOD_RES (15), (16), (17), (18), (19): Xaa is A or G
  MOD_RES (20), (21), (22), (23): Xaa is A or G or is absent

SEQ ID NO: 12211 - protein, 37 aa, Artificial Sequence
  GFR-binding peptide
  MOD_RES (2), (4), (36), (37): Xaa is C or S
RXGXSEVVMDNSLQEVVNNASDYYLITLPELRTPVXX

SEQ ID NO: 12212 - protein, 39 aa, Artificial Sequence; identical to SEQ ID NO: 4773
  GFR-binding peptide
  MOD_RES (1), (3), (34), (35): Xaa is C or S

SEQ ID NO: 12213 - protein, 37 aa, Artificial Sequence
  GFR-binding peptide
  MOD_RES (2), (34), (35): Xaa is C or S
GXSEVVMDRYKKLVVNNASDFYLISIANLRTPVXXTP

SEQ ID NO: 12214 - protein, 40 aa, Artificial Sequence; identical to SEQ ID NO: 4777
  GFR-binding peptide
  MOD_RES (2), (4), (35), (36): Xaa is C or S

SEQ ID NO: 12215 - protein, 36 aa, Artificial Sequence
  GFR-binding peptide
  MOD_RES (1), (32), (33): Xaa is C or S
XSRVIMNSLQEVKPKRGVYYLITLPELAQPVXXPAA

SEQ ID NO: 12216 - protein, 39 aa, Artificial Sequence; identical to SEQ ID NO: 4779
  GFR-binding peptide
  MOD_RES (1), (3), (35), (36): Xaa is C or S

SEQ ID NO: 12217 - protein, 33 aa, Artificial Sequence; identical to SEQ ID NO: 4783
  GFR-binding peptide
  MOD_RES (31), (32): Xaa is C or S

SEQ ID NO: 12218 - protein, 36 aa, Artificial Sequence
  GFR-binding peptide
  MOD_RES (2), (35), (36): Xaa is C or S
  MOD_RES (13), (14), (15), (16), (17): Xaa is A or G
  MOD_RES (18), (19), (20), (21): Xaa is A or G or is absent
KXSKVIMEYQKYXXXXXXXXXIFLISIPSLDQSVXX

SEQ ID NO: 12219 - protein, 34 aa, Artificial Sequence
  GFR-binding peptide
  MOD_RES (2), (2): Xaa is C or S
  MOD_RES (13), (14), (15), (16), (17): Xaa is A or G
  MOD_RES (18), (19), (20), (21): Xaa is A or G or is absent
KXSKVVMEYQKYXXXXXXXXXIFLISIPSLDQPV

SEQ ID NO: 12220 - protein, 36 aa, Artificial Sequence
  GFR-binding peptide
  MOD_RES (32), (33): Xaa is C or S
GEVVMENSLQEVVKDYEDYYVMPLPELETPVXXAKP

SEQ ID NO: 12221 - protein, 34 aa, Artificial Sequence
  GFR-binding peptide
  MOD_RES (31), (32): Xaa is C or S
EVVMENSLQEVVKDYEDYYVMPLPELETPVXXAK

SEQ ID NO: 12222 - protein, 35 aa, Artificial Sequence
  GFR-binding peptide
  MOD_RES (2), (35): Xaa is C or S
  MOD_RES (13), (14), (15), (16), (17): Xaa is A or G
  MOD_RES (18), (19), (20), (21): Xaa is A or G or is absent
KXSKVIMEYQKYXXXXXXXXXIFLISIPSLDQSVX

SEQ ID NO: 12223 - protein, 35 aa, Artificial Sequence; identical to SEQ ID NO: 4789
  GFR-binding peptide
  MOD_RES (1), (35): Xaa is C or S
  MOD_RES (13), (14), (15), (16), (17): Xaa is A or G
  MOD_RES (18), (19), (20), (21): Xaa is A or G or is absent

SEQ ID NO: 12224 - protein, 34 aa, Artificial Sequence
  GFR-binding peptide
  MOD_RES (31), (32): Xaa is C or S
EVVMDRYKKLVVNNASDFYLISIANLRTPVXXTP

SEQ ID NO: 12225 - protein, 39 aa, Artificial Sequence
  GFR-binding peptide
  MOD_RES (2), (4), (38), (39): Xaa is C or S
  MOD_RES (16), (17), (18), (19), (20): Xaa is A or G
  MOD_RES (21), (22), (23), (24): Xaa is A or G or is absent
RXGXSEVVMDNSLQEXXXXXXXXXYYLITLPELRTPVXX

SEQ ID NO: 12226 - protein, 38 aa, Artificial Sequence; identical to SEQ ID NO: 4795
  GFR-binding peptide
  MOD_RES (2), (4), (38): Xaa is C or S
  MOD_RES (16), (17), (18), (19), (20): Xaa is A or G
  MOD_RES (21), (22), (23), (24): Xaa is A or G or is absent

SEQ ID NO: 12227 - protein, 38 aa, Artificial Sequence; identical to SEQ ID NO: 4796
  GFR-binding peptide
  MOD_RES (2), (33), (34): Xaa is C or S

SEQ ID NO: 12228 - protein, 33 aa, Artificial Sequence
  GFR-binding peptide
  MOD_RES (1), (33): Xaa is C or S
XGEVVMENSLQEVVKDYEDYYVMPLPELETPVX

SEQ ID NO: 12229 - protein, 43 aa, Artificial Sequence
  GFR-binding peptide
  MOD_RES (2), (4), (37), (38): Xaa is C or S
  MOD_RES (15), (16), (17), (18), (19): Xaa is A or G
  MOD_RES (20), (21), (22), (23): Xaa is A or G or is absent
SXKXSKVIMNSLQEXXXXXXXXXYYLITLPELDQSVXXPSASA

SEQ ID NO: 12230 - protein, 36 aa, Artificial Sequence
  GFR-binding peptide
  MOD_RES (1), (33), (34): Xaa is C or S
XGEVVMENSLQEVVKDYEDYYVMPLPELETPVXXAK

SEQ ID NO: 12231 - protein, 34 aa, Artificial Sequence
  GFR-binding peptide
  MOD_RES (31), (32): Xaa is C or S
RVVMNNSLQEIVNSSDDYYVVPLPELKTPAXXPK

SEQ ID NO: 12232 - protein, 36 aa, Artificial Sequence; identical to SEQ ID NO: 4799
  GFR-binding peptide
  MOD_RES (31), (32): Xaa is C or S

SEQ ID NO: 12233 - protein, 36 aa, Artificial Sequence
  GFR-binding peptide
  MOD_RES (31), (32): Xaa is C or S
RVVMNNSLQEIVNSSDDYYVVPLPELKTPAXXPKPV

SEQ ID NO: 12234 - protein, 39 aa, Artificial Sequence
  GFR-binding peptide
  MOD_RES (2), (4), (38), (39): Xaa is C or S
  MOD_RES (16), (17), (18), (19), (20): Xaa is A or G
  MOD_RES (21), (22), (23), (24): Xaa is A or G or is absent
RXGXGEVVMDEYQKYXXXXXXXXXIFLMSIPSLETPVXX

SEQ ID NO: 12235 - protein, 34 aa, Artificial Sequence; identical to SEQ ID NO: 4805
  GFR-binding peptide
  MOD_RES (31), (32): Xaa is C or S

SEQ ID NO: 12236 - protein, 36 aa, Artificial Sequence
  GFR-binding peptide
  MOD_RES (2), (34), (35): Xaa is C or S
GXGEVVMDNSLQEVVKENEDYYLMTLPELETPVXXA

SEQ ID NO: 12237 - protein, 40 aa, Artificial Sequence
  GFR-binding peptide
  MOD_RES (1), (35), (36): Xaa is C or S
  MOD_RES (13), (14), (15), (16), (17): Xaa is A or G
  MOD_RES (18), (19), (20), (21): Xaa is A or G or is absent
XSRVVMNNSLQEXXXXXXXXXYYVVPLPELKTPAXXPKPV

SEQ ID NO: 12238 - protein, 40 aa, Artificial Sequence
  GFR-binding peptide
  MOD_RES (2), (36), (37): Xaa is C or S
  MOD_RES (14), (15), (16), (17), (18): Xaa is A or G
  MOD_RES (19), (20), (21), (22): Xaa is A or G or is absent
GXGEVVMENSLQEXXXXXXXXXYYVMPLPELETPVXXAKP

SEQ ID NO: 12239 - protein, 38 aa, Artificial Sequence
  GFR-binding peptide
  MOD_RES (1), (3), (36), (37): Xaa is C or S
  MOD_RES (14), (15), (16), (17), (18): Xaa is A or G
  MOD_RES (19), (20), (21), (22): Xaa is A or G or is absent
XKXSKVIMNSLQEXXXXXXXXXYYVIPLPELDQSVXXP

SEQ ID NO: 12240 - protein, 39 aa, Artificial Sequence
  GFR-binding peptide
  MOD_RES (1), (33), (34): Xaa is C or S
XSEVVMDNSLQEVVNNASDYYVIPLPELRTPVXXTPPTS

SEQ ID NO: 12241 - protein, 35 aa, Artificial Sequence
  GFR-binding peptide
  MOD_RES (34), (35): Xaa is C or S
  MOD_RES (12), (13), (14), (15), (16): Xaa is A or G
  MOD_RES (17), (18), (19), (20): Xaa is A or G or is absent
SEVVMDNSLQEXXXXXXXXXYYLITLPELRTPVXX

SEQ ID NO: 12242 - protein, 39 aa, Artificial Sequence
  GFR-binding peptide
  MOD_RES (2), (4), (35), (36): Xaa is C or S
SXKXSKVVMNSLQEVKPTRGVYYVIPLPELDQPVXXPSA

SEQ ID NO: 12243 - protein, 39 aa, Artificial Sequence
  GFR-binding peptide
  MOD_RES (1), (33), (34): Xaa is C or S
XSRVVMNEYQKYIVNSSDDIFLVSIPSLKTPAXXPKPVY

SEQ ID NO: 12244 - protein, 44 aa, Artificial Sequence
  GFR-binding peptide
  MOD_RES (2), (4), (38), (39): Xaa is C or S
  MOD_RES (16), (17), (18), (19), (20): Xaa is A or G
  MOD_RES (21), (22), (23), (24): Xaa is A or G or is absent
RXGXSEVVMDNSLQEXXXXXXXXXYYLITLPELRTPVXXTPPTS

SEQ ID NO: 12245 - protein, 38 aa, Artificial Sequence
  GFR-binding peptide
  MOD_RES (1), (3), (34), (35): Xaa is C or S
XKXSKVVMNSLQEVKPTRGVYYLITLPELDQPVXXPSA

SEQ ID NO: 12246 - protein, 37 aa, Artificial Sequence
  GFR-binding peptide
  MOD_RES (1), (3), (36), (37): Xaa is C or S
  MOD_RES (14), (15), (16), (17), (18): Xaa is A or G
  MOD_RES (19), (20), (21), (22): Xaa is A or G or is absent
XKXSRVIMNSLQEXXXXXXXXXYYVIPLPELAQPVXX

SEQ ID NO: 12247 - protein, 37 aa, Artificial Sequence
  GFR-binding peptide
  MOD_RES (2), (34), (35): Xaa is C or S
GXSRVVMNNSLQEIVNSSDDYYVVPLPELKTPAXXPK

SEQ ID NO: 12248 - protein, 37 aa, Artificial Sequence
  GFR-binding peptide
  MOD_RES (31), (32): Xaa is C or S
SKVIMNSLQEIKPTKGIYYVIPLPELDQSVXXPSASA

SEQ ID NO: 12249 - protein, 37 aa, Artificial Sequence; identical to SEQ ID NO: 4814
  GFR-binding peptide
  MOD_RES (31), (32): Xaa is C or S

SEQ ID NO: 12250 - protein, 38 aa, Artificial Sequence
  GFR-binding peptide
  MOD_RES (34), (35): Xaa is C or S
  MOD_RES (12), (13), (14), (15), (16): Xaa is A or G
  MOD_RES (17), (18), (19), (20): Xaa is A or G or is absent
GEVVMEEYQKYXXXXXXXXXIFLMSIPSLETPVXXAKP

SEQ ID NO: 12251 - protein, 32 aa, Artificial Sequence
  GFR-binding peptide
  MOD_RES (32), (32): Xaa is C or S
SEVVMDNSLQEVVNNASDYYLITLPELRTPVX

SEQ ID NO: 12252 - protein, 39 aa, Artificial Sequence
  GFR-binding peptide
  MOD_RES (1), (3), (35), (36): Xaa is C or S
XGXGEVVMENSLQEVVKDYEDYYLMTLPELETPVXXAKP

SEQ ID NO: 12253 - protein, 36 aa, Artificial Sequence; identical to SEQ ID NO: 4818
  GFR-binding peptide
  MOD_RES (33), (34): Xaa is C or S
  MOD_RES (11), (12), (13), (14), (15): Xaa is A or G
  MOD_RES (16), (17), (18), (19): Xaa is A or G or is absent

SEQ ID NO: 12254 - protein, 37 aa, Artificial Sequence; identical to SEQ ID NO: 4819
  GFR-binding peptide
  MOD_RES (33), (34): Xaa is C or S
  MOD_RES (11), (12), (13), (14), (15): Xaa is A or G
  MOD_RES (16), (17), (18), (19): Xaa is A or G or is absent

SEQ ID NO: 12255 - protein, 41 aa, Artificial Sequence
  GFR-binding peptide
  MOD_RES (2), (36), (37): Xaa is C or S
  MOD_RES (14), (15), (16), (17), (18): Xaa is A or G
  MOD_RES (19), (20), (21), (22): Xaa is A or G or is absent
GXSRVVMNEYQKYXXXXXXXXXIFLVSIPSLKTPAXXPKPV

SEQ ID NO: 12256 - protein, 37 aa, Artificial Sequence; identical to SEQ ID NO: 4825
  GFR-binding peptide
  MOD_RES (32), (33): Xaa is C or S

SEQ ID NO: 12257 - protein, 33 aa, Artificial Sequence; identical to SEQ ID NO: 4827
  GFR-binding peptide
  MOD_RES (1), (32), (33): Xaa is C or S

SEQ ID NO: 12258 - protein, 36 aa, Artificial Sequence; identical to SEQ ID NO: 4829
  GFR-binding peptide
  MOD_RES (2), (34), (35): Xaa is C or S

SEQ ID NO: 12259 - protein, 42 aa, Artificial Sequence
  GFR-binding peptide
  MOD_RES (2), (4), (36), (37): Xaa is C or S
RXGXSEVVMDQYNKLVVNNASDLYLISIASLRTPVXXTPPTS

SEQ ID NO: 12260 - protein, 33 aa, Artificial Sequence; identical to SEQ ID NO: 4831
  GFR-binding peptide
  MOD_RES (2), (33): Xaa is C or S

SEQ ID NO: 12261 - protein, 35 aa, Artificial Sequence
  GFR-binding peptide
  MOD_RES (1), (35): Xaa is C or S
  MOD_RES (13), (14), (15), (16), (17): Xaa is A or G
  MOD_RES (18), (19), (20), (21): Xaa is A or G or is absent
XSEVVMDQYNKLXXXXXXXXXLYLISIASLRTPVX

SEQ ID NO: 12262 - protein, 37 aa, Artificial Sequence; identical to SEQ ID NO: 4832
  GFR-binding peptide
  MOD_RES (32), (33): Xaa is C or S

SEQ ID NO: 12263 - protein, 32 aa, Artificial Sequence
  GFR-binding peptide
  MOD_RES (1), (1): Xaa is C or S
XGEVVMEEYQKYVVKDYEDIFLMSIPSLETPV

SEQ ID NO: 12264 - protein, 38 aa, Artificial Sequence
  GFR-binding peptide
  MOD_RES (2), (4), (36), (37): Xaa is C or S
RXGXSEVVMDQYNKLVVNNASDLYLISIASLRTPVXXT

SEQ ID NO: 12265 - protein, 39 aa, Artificial Sequence
  GFR-binding peptide
  MOD_RES (2), (4), (38), (39): Xaa is C or S
  MOD_RES (16), (17), (18), (19), (20): Xaa is A or G
  MOD_RES (21), (22), (23), (24): Xaa is A or G or is absent
HXGXARVVMNNSLQEXXXXXXXXXYYVVPLPELQTPAXX

SEQ ID NO: 12266 - protein, 41 aa, Artificial Sequence
  GFR-binding peptide
  MOD_RES (1), (3), (37), (38): Xaa is C or S
  MOD_RES (15), (16), (17), (18), (19): Xaa is A or G
  MOD_RES (20), (21), (22), (23): Xaa is A or G or is absent
XGXSEVVMDNSLQEXXXXXXXXXYYLITLPELRTPVXXTPP

SEQ ID NO: 12267 - protein, 38 aa, Artificial Sequence; identical to SEQ ID NO: 4837
  GFR-binding peptide
  MOD_RES (2), (4), (37), (38): Xaa is C or S
  MOD_RES (15), (16), (17), (18), (19): Xaa is A or G
  MOD_RES (20), (21), (22), (23): Xaa is A or G or is absent

SEQ ID NO: 12268 - protein, 39 aa, Artificial Sequence; identical to SEQ ID NO: 4838
  GFR-binding peptide
  MOD_RES (1), (33), (34): Xaa is C or S

SEQ ID NO: 12269 - protein, 36 aa, Artificial Sequence; identical to SEQ ID NO: 4839
  GFR-binding peptide
  MOD_RES (31), (32): Xaa is C or S

SEQ ID NO: 12270 - protein, 43 aa, Artificial Sequence
  GFR-binding peptide
  MOD_RES (1), (3), (37), (38): Xaa is C or S
  MOD_RES (15), (16), (17), (18), (19): Xaa is A or G
  MOD_RES (20), (21), (22), (23): Xaa is A or G or is absent
XGXARVVMNNSLQEXXXXXXXXXYYVVPLPELQTPAXXPKPVT

SEQ ID NO: 12271 - protein, 34 aa, Artificial Sequence
  GFR-binding peptide
  MOD_RES (33), (34): Xaa is C or S
  MOD_RES (11), (12), (13), (14), (15): Xaa is A or G
  MOD_RES (16), (17), (18), (19): Xaa is A or G or is absent
SKVVMNSLQEXXXXXXXXXYYVIPLPELDQPVXX

SEQ ID NO: 12272 - protein, 37 aa, Artificial Sequence; identical to SEQ ID NO: 4841
  GFR-binding peptide
  MOD_RES (31), (32): Xaa is C or S

SEQ ID NO: 12273 - protein, 35 aa, Artificial Sequence
  GFR-binding peptide
  MOD_RES (2), (34), (35): Xaa is C or S
GXSRVVMNNSLQEIVNSSDDYYVVPLPELKTPAXX

SEQ ID NO: 12274 - protein, 37 aa, Artificial Sequence; identical to SEQ ID NO: 4844
  GFR-binding peptide
  MOD_RES (33), (34): Xaa is C or S
  MOD_RES (11), (12), (13), (14), (15): Xaa is A or G
  MOD_RES (16), (17), (18), (19): Xaa is A or G or is absent

SEQ ID NO: 12275 - protein, 33 aa, Artificial Sequence
  GFR-binding peptide
  MOD_RES (33), (33): Xaa is C or S
  MOD_RES (11), (12), (13), (14), (15): Xaa is A or G
  MOD_RES (16), (17), (18), (19): Xaa is A or G or is absent
EVVMDQYNKLXXXXXXXXXLYLISIASLRTPVX

SEQ ID NO: 12276 - protein, 33 aa, Artificial Sequence
  GFR-binding peptide
  MOD_RES (32), (32): Xaa is C or S
SRVVMNNSLQEIVNSSDDYYVVPLPELKTPAXT

SEQ ID NO: 12277 - protein, 37 aa, Artificial Sequence
  GFR-binding peptide
  MOD_RES (1), (3), (36), (37): Xaa is C or S
  MOD_RES (14), (15), (16), (17), (18): Xaa is A or G
  MOD_RES (19), (20), (21), (22): Xaa is A or G or is absent
XKXSKVVMNSLQEXXXXXXXXXYYLITLPELDQPVXX

SEQ ID NO: 12278 - protein, 39 aa, Artificial Sequence; identical to SEQ ID NO: 4849
  GFR-binding peptide
  MOD_RES (2), (4), (35), (36): Xaa is C or S

SEQ ID NO: 12279 - protein, 39 aa, Artificial Sequence
  GFR-binding peptide
  MOD_RES (2), (33), (34): Xaa is C or S
KXSRVIMNSLQEVKPKRGVYYLITLPELAQPVXXPAASA

SEQ ID NO: 12280 - protein, 34 aa, Artificial Sequence
  GFR-binding peptide
  MOD_RES (2), (4): Xaa is C or S
SXKXSRVIMEYQKYVKPKRGVIFLISIPSLAQPV

SEQ ID NO: 12281 - protein, 39 aa, Artificial Sequence
  GFR-binding peptide
  MOD_RES (2), (4), (36), (37): Xaa is C or S
RXGXSEVVMDQYNKLVVNNASDLYLISIASLRTPVXXTP

SEQ ID NO: 12282 - protein, 32 aa, Artificial Sequence; identical to SEQ ID NO: 4852
  GFR-binding peptide
  MOD_RES (32), (32): Xaa is C or S

SEQ ID NO: 12283 - protein, 37 aa, Artificial Sequence; identical to SEQ ID NO: 4854
  GFR-binding peptide
  MOD_RES (1), (3), (35), (36): Xaa is C or S

SEQ ID NO: 12284 - protein, 38 aa, Artificial Sequence; identical to SEQ ID NO: 4855
  GFR-binding peptide
  MOD_RES (1), (33), (34): Xaa is C or S

SEQ ID NO: 12285 - protein, 35 aa, Artificial Sequence
  GFR-binding peptide
  MOD_RES (31), (32): Xaa is C or S
EVVMDEYQKYVVNNASDIFLISIPSLRTPVXXTPP

SEQ ID NO: 12286 - protein, 39 aa, Artificial Sequence
  GFR-binding peptide
  MOD_RES (1), (3), (37), (38): Xaa is C or S
  MOD_RES (15), (16), (17), (18), (19): Xaa is A or G
  MOD_RES (20), (21), (22), (23): Xaa is A or G or is absent
XGXARVVMNNSLQEXXXXXXXXXYYVVPLPELQTPAXXP

SEQ ID NO: 12287 - protein, 37 aa, Artificial Sequence; identical to SEQ ID NO: 4858
  GFR-binding peptide
  MOD_RES (33), (34): Xaa is C or S
  MOD_RES (11), (12), (13), (14), (15): Xaa is A or G
  MOD_RES (16), (17), (18), (19): Xaa is A or G or is absent

SEQ ID NO: 12288 - protein, 41 aa, Artificial Sequence; identical to SEQ ID NO: 4860
  GFR-binding peptide
  MOD_RES (1), (35), (36): Xaa is C or S
  MOD_RES (13), (14), (15), (16), (17): Xaa is A or G
  MOD_RES (18), (19), (20), (21): Xaa is A or G or is absent

SEQ ID NO: 12289 - protein, 36 aa, Artificial Sequence
  GFR-binding peptide
  MOD_RES (1), (3), (34), (35): Xaa is C or S
XKXSRVIMNSLQEVKPKRGVYYLITLPELAQPVXXP

SEQ ID NO: 12290 - protein, 41 aa, Artificial Sequence; identical to SEQ ID NO: 4861
  GFR-binding peptide
  MOD_RES (2), (4), (38), (39): Xaa is C or S
  MOD_RES (16), (17), (18), (19), (20): Xaa is A or G
  MOD_RES (21), (22), (23), (24): Xaa is A or G or is absent

SEQ ID NO: 12291 - protein, 32 aa, Artificial Sequence; identical to SEQ ID NO: 4862
  GFR-binding peptide
  MOD_RES (32), (32): Xaa is C or S

SEQ ID NO: 12292 - protein, 40 aa, Artificial Sequence; identical to SEQ ID NO: 4864
  GFR-binding peptide
  MOD_RES (2), (35), (36): Xaa is C or S
  MOD_RES (13), (14), (15), (16), (17): Xaa is A or G
  MOD_RES (18), (19), (20), (21): Xaa is A or G or is absent

SEQ ID NO: 12293 - protein, 36 aa, Artificial Sequence; identical to SEQ ID NO: 4865
  GFR-binding peptide
  MOD_RES (1), (3), (34), (35): Xaa is C or S

SEQ ID NO: 12294 - protein, 37 aa, Artificial Sequence; identical to SEQ ID NO: 4867
  GFR-binding peptide
  MOD_RES (2), (4): Xaa is C or S
  MOD_RES (16), (17), (18), (19), (20): Xaa is A or G
  MOD_RES (21), (22), (23), (24): Xaa is A or G or is absent

SEQ ID NO: 12295 - protein, 36 aa, Artificial Sequence; identical to SEQ ID NO: 4868
  GFR-binding peptide
  MOD_RES (1), (3), (34), (35): Xaa is C or S

SEQ ID NO: 12296 - protein, 40 aa, Artificial Sequence; identical to SEQ ID NO: 4870
  GFR-binding peptide
  MOD_RES (2), (34), (35): Xaa is C or S

SEQ ID NO: 12297 - protein, 39 aa, Artificial Sequence; identical to SEQ ID NO: 4871
  GFR-binding peptide
  MOD_RES (2), (4), (36), (37): Xaa is C or S

SEQ ID NO: 12298 - protein, 34 aa, Artificial Sequence
  GFR-binding peptide
  MOD_RES (2), (2): Xaa is C or S
  MOD_RES (13), (14), (15), (16), (17): Xaa is A or G
  MOD_RES (18), (19), (20), (21): Xaa is A or G or is absent
KXSKVIMNSLQEXXXXXXXXXYYVIPLPELDQSV

SEQ ID NO: 12299 - protein, 38 aa, Artificial Sequence
  GFR-binding peptide
  MOD_RES (1), (33), (34): Xaa is C or S
XARVVMNNSLQEIVNSSDDYYVVPLPELQTPAXXPKPV

SEQ ID NO: 12300 - protein, 38 aa, Artificial Sequence
  GFR-binding peptide
  MOD_RES (2), (4), (37), (38): Xaa is C or S
  MOD_RES (15), (16), (17), (18), (19): Xaa is A or G
  MOD_RES (20), (21), (22), (23): Xaa is A or G or is absent
SXKXSRVIMNSLQEXXXXXXXXXYYLITLPELAQPVXX

SEQ ID NO: 12301 - protein, 37 aa, Artificial Sequence
  GFR-binding peptide
  MOD_RES (1), (33), (34): Xaa is C or S
XSEVVMDNSLQEVVNNASDYYLITLPELRTPVXXTPP

SEQ ID NO: 12302 - protein, 35 aa, Artificial Sequence
  GFR-binding peptide
  MOD_RES (1), (32), (33): Xaa is C or S
XSRVIMNSLQEVKPKRGVYYLITLPELAQPVXXPA

SEQ ID NO: 12303 - protein, 35 aa, Artificial Sequence
  GFR-binding peptide
  MOD_RES (31), (32): Xaa is C or S
EVVMDEYQKYVVKENEDIFLMSIPSLETPVXXAKP

SEQ ID NO: 12304 - protein, 32 aa, Artificial Sequence
  GFR-binding peptide
  MOD_RES (1), (32): Xaa is C or S
XSKVVMNSLQEVKPTRGVYYVIPLPELDQPVX

SEQ ID NO: 12305 - protein, 36 aa, Artificial Sequence
  GFR-binding peptide
  MOD_RES (1), (3), (34), (35): Xaa is C or S
XKXSKVIMNSLQEIKPTKGIYYVIPLPELDQSVXXP

SEQ ID NO: 12306 - protein, 35 aa, Artificial Sequence; identical to SEQ ID NO: 4875
  GFR-binding peptide
  MOD_RES (1), (3): Xaa is C or S
  MOD_RES (14), (15), (16), (17), (18): Xaa is A or G
  MOD_RES (19), (20), (21), (22): Xaa is A or G or is absent

SEQ ID NO: 12307 - protein, 31 aa, Artificial Sequence
  GFR-binding peptide
  MOD_RES (1), (1): Xaa is C or S
XSKVIMNSLQEIKPTKGIYYVIPLPELDQSV

SEQ ID NO: 12308 - protein, 37 aa, Artificial Sequence
  GFR-binding peptide
  MOD_RES (1), (3), (35), (36): Xaa is C or S
XGXARVVMNEYQKYIVNSSDDIFLVSIPSLQTPAXXP

SEQ ID NO: 12309 - protein, 40 aa, Artificial Sequence
  GFR-binding peptide
  MOD_RES (2), (4), (36), (37): Xaa is C or S
HXGXARVVMNNSLQEIVNSSDDYYVVPLPELQTPAXXPKP

SEQ ID NO: 12310 - protein, 41 aa, Artificial Sequence
  GFR-binding peptide
  MOD_RES (2), (4), (36), (37): Xaa is C or S
HXGXARVVMNNSLQEIVNSSDDYYLVTLPELQTPAXXPKPV

SEQ ID NO: 12311 - protein, 41 aa, Artificial Sequence; identical to SEQ ID NO: 4876
  GFR-binding peptide
  MOD_RES (1), (3), (35), (36): Xaa is C or S

SEQ ID NO: 12312 - protein, 37 aa, Artificial Sequence; identical to SEQ ID NO: 4879
  GFR-binding peptide
  MOD_RES (1), (32), (33): Xaa is C or S

SEQ ID NO: 12313 - protein, 37 aa, Artificial Sequence; identical to SEQ ID NO: 4880
  GFR-binding peptide
  MOD_RES (2), (4), (35), (36): Xaa is C or S

SEQ ID NO: 12314 - protein, 31 aa, Artificial Sequence; identical to SEQ ID NO: 4881
  GFR-binding peptide
  MOD_RES (31), (31): Xaa is C or S

SEQ ID NO: 12315 - protein, 41 aa, Artificial Sequence
  GFR-binding peptide
  MOD_RES (2), (4), (38), (39): Xaa is C or S
  MOD_RES (16), (17), (18), (19), (20): Xaa is A or G
  MOD_RES (21), (22), (23), (24): Xaa is A or G or is absent
HXGXARVVMNEYQKYXXXXXXXXXIFLVSIPSLQTPAXXPK

SEQ ID NO: 12316 - protein, 41 aa, Artificial Sequence
  GFR-binding peptide
  MOD_RES (1), (3), (36), (37): Xaa is C or S
  MOD_RES (14), (15), (16), (17), (18): Xaa is A or G
  MOD_RES (19), (20), (21), (22): Xaa is A or G or is absent
XKXSKVVMEYQKYXXXXXXXXXIFLISIPSLDQPVXXPSAS

SEQ ID NO: 12317 - protein, 35 aa, Artificial Sequence
  GFR-binding peptide
  MOD_RES (32), (33): Xaa is C or S
SRVVMNEYQKYIVNSSDDIFLVSIPSLKTPAXXPK

SEQ ID NO: 12318 - protein, 37 aa, Artificial Sequence
  GFR-binding peptide
  MOD_RES (2), (36), (37): Xaa is C or S
  MOD_RES (14), (15), (16), (17), (18): Xaa is A or G
  MOD_RES (19), (20), (21), (22): Xaa is A or G or is absent
GXGEVVMDNSLQEXXXXXXXXXYYLMTLPELETPVXX

SEQ ID NO: 12319 - protein, 39 aa, Artificial Sequence; identical to SEQ ID NO: 4885
  GFR-binding peptide
  MOD_RES (2), (4), (36), (37): Xaa is C or S

SEQ ID NO: 12320 - protein, 35 aa, Artificial Sequence
  GFR-binding peptide
  MOD_RES (1), (32), (33): Xaa is C or S
XSRVIMNSLQEVKPKRGVYYVIPLPELAQPVXXPA

SEQ ID NO: 12321 - protein, 40 aa, Artificial Sequence
  GFR-binding peptide
  MOD_RES (2), (4), (36), (37): Xaa is C or S
HXGXSRVVMNNSLQEIVNSSDDYYVVPLPELKTPAXXPKP

SEQ ID NO: 12322 - protein, 34 aa, Artificial Sequence; identical to SEQ ID NO: 4886
  GFR-binding peptide
  MOD_RES (2), (34): Xaa is C or S

SEQ ID NO: 12323 - protein, 35 aa, Artificial Sequence; identical to SEQ ID NO: 4888
  GFR-binding peptide
  MOD_RES (1), (35): Xaa is C or S
  MOD_RES (13), (14), (15), (16), (17): Xaa is A or G
  MOD_RES (18), (19), (20), (21): Xaa is A or G or is absent

SEQ ID NO: 12324 - protein, 38 aa, Artificial Sequence
  GFR-binding peptide
  MOD_RES (2), (4), (36), (37): Xaa is C or S
RXGXGEVVMDEYQKYVVKENEDIFLMSIPSLETPVXXA

SEQ ID NO: 12325 - protein, 40 aa, Artificial Sequence
  GFR-binding peptide
  MOD_RES (1), (34), (35): Xaa is C or S
  MOD_RES (12), (13), (14), (15), (16): Xaa is A or G
  MOD_RES (17), (18), (19), (20): Xaa is A or G or is absent
XSKVVMNSLQEXXXXXXXXXYYVIPLPELDQPVXXPSASA

SEQ ID NO: 12326 - protein, 39 aa, Artificial Sequence
  GFR-binding peptide
  MOD_RES (33), (34): Xaa is C or S
  MOD_RES (11), (12), (13), (14), (15): Xaa is A or G
  MOD_RES (16), (17), (18), (19): Xaa is A or G or is absent
RVVMNEYQKYXXXXXXXXXIFLVSIPSLQTPAXXPKPVT

SEQ ID NO: 12327 - protein, 42 aa, Artificial Sequence; identical to SEQ ID NO: 4890
  GFR-binding peptide
  MOD_RES (1), (3), (36), (37): Xaa is C or S
  MOD_RES (14), (15), (16), (17), (18): Xaa is A or G
  MOD_RES (19), (20), (21), (22): Xaa is A or G or is absent

SEQ ID NO: 12328 - protein, 41 aa, Artificial Sequence; identical to SEQ ID NO: 4891
  GFR-binding peptide
  MOD_RES (1), (3), (36), (37): Xaa is C or S
  MOD_RES (14), (15), (16), (17), (18): Xaa is A or G
  MOD_RES (19), (20), (21), (22): Xaa is A or G or is absent

SEQ ID NO: 12329 - protein, 37 aa, Artificial Sequence
  GFR-binding peptide
  MOD_RES (1), (35), (36): Xaa is C or S
  MOD_RES (13), (14), (15), (16), (17): Xaa is A or G
  MOD_RES (18), (19), (20), (21): Xaa is A or G or is absent
XGEVVMENSLQEXXXXXXXXXYYLMTLPELETPVXXA

SEQ ID NO: 12330 - protein, 41 aa, Artificial Sequence; identical to SEQ ID NO: 4893
  GFR-binding peptide
  MOD_RES (1), (3), (37), (38): Xaa is C or S
  MOD_RES (15), (16), (17), (18), (19): Xaa is A or G
  MOD_RES (20), (21), (22), (23): Xaa is A or G or is absent

SEQ ID NO: 12331 - protein, 36 aa, Artificial Sequence
  GFR-binding peptide
  MOD_RES (1), (33), (34): Xaa is C or S
XGEVVMEEYQKYVVKDYEDIFLMSIPSLETPVXXAK

SEQ ID NO: 12332 - protein, 37 aa, Artificial Sequence
  GFR-binding peptide
  MOD_RES (34), (34): Xaa is C or S
  MOD_RES (12), (13), (14), (15), (16): Xaa is A or G
  MOD_RES (17), (18), (19), (20): Xaa is A or G or is absent
SRVVMNNSLQEXXXXXXXXXYYVVPLPELKTPAXTPK

SEQ ID NO: 12333 - protein, 37 aa, Artificial Sequence; identical to SEQ ID NO: 4895
  GFR-binding peptide
  MOD_RES (1), (3), (34), (35): Xaa is C or S

SEQ ID NO: 12334 - protein, 40 aa, Artificial Sequence
  GFR-binding peptide
  MOD_RES (2), (4), (36), (37): Xaa is C or S
RXGXGEVVMEEYQKYVVKDYEDIFLMSIPSLETPVXXAKP

SEQ ID NO: 12335 - protein, 36 aa, Artificial Sequence
  GFR-binding peptide
  MOD_RES (31), (32): Xaa is C or S
SRVIMNSLQEVKPKRGVYYVIPLPELAQPVXXPAAS

SEQ ID NO: 12336 - protein, 35 aa, Artificial Sequence
  GFR-binding peptide
  MOD_RES (2), (34), (35): Xaa is C or S
GXARVVMNNSLQEIVNSSDDYYVVPLPELQTPAXX

SEQ ID NO: 12337 - protein, 39 aa, Artificial Sequence; identical to SEQ ID NO: 4897
  GFR-binding peptide
  MOD_RES (2), (4), (37), (38): Xaa is C or S
  MOD_RES (15), (16), (17), (18), (19): Xaa is A or G
  MOD_RES (20), (21), (22), (23): Xaa is A or G or is absent

SEQ ID NO: 12338 - protein, 35 aa, Artificial Sequence; identical to SEQ ID NO: 4899
  GFR-binding peptide
  MOD_RES (2), (35): Xaa is C or S
  MOD_RES (13), (14), (15), (16), (17): Xaa is A or G
  MOD_RES (18), (19), (20), (21): Xaa is A or G or is absent

SEQ ID NO: 12339 - protein, 39 aa, Artificial Sequence
  GFR-binding peptide
  MOD_RES (1), (3), (35), (36): Xaa is C or S
XGXGEVVMDEYQKYVVKENEDIFLMSIPSLETPVXXAKP

SEQ ID NO: 12340 - protein, 35 aa, Artificial Sequence
  GFR-binding peptide
  MOD_RES (33), (34): Xaa is C or S
  MOD_RES (11), (12), (13), (14), (15): Xaa is A or G
  MOD_RES (16), (17), (18), (19): Xaa is A or G or is absent
EVVMDQYNKLXXXXXXXXXLYLISIASLRTPVXXT

SEQ ID NO: 12341 - protein, 37 aa, Artificial Sequence
  GFR-binding peptide
  MOD_RES (32), (33): Xaa is C or S
SEVVMDNSLQEVVNNASDYYVIPLPELRTPVXXTPPT

SEQ ID NO: 12342 - protein, 35 aa, Artificial Sequence
  GFR-binding peptide
  MOD_RES (34), (35): Xaa is C or S
  MOD_RES (12), (13), (14), (15), (16): Xaa is A or G
  MOD_RES (17), (18), (19), (20): Xaa is A or G or is absent
GEVVMEEYQKYXXXXXXXXXIFLMSIPSLETPVXX

SEQ ID NO: 12343 - protein, 41 aa, Artificial Sequence
  GFR-binding peptide
  MOD_RES (2), (36), (37): Xaa is C or S
  MOD_RES (14), (15), (16), (17), (18): Xaa is A or G
  MOD_RES (19), (20), (21), (22): Xaa is A or G or is absent
GXSEVVMDNSLQEXXXXXXXXXYYVIPLPELRTPVXXTPPT

SEQ ID NO: 12344 - protein, 37 aa, Artificial Sequence
  GFR-binding peptide
  MOD_RES (2), (36), (37): Xaa is C or S
  MOD_RES (14), (15), (16), (17), (18): Xaa is A or G
  MOD_RES (19), (20), (21), (22): Xaa is A or G or is absent
GXSRVVMNEYQKYXXXXXXXXXIFLVSIPSLKTPAXX

SEQ ID NO: 12345 - protein, 42 aa, Artificial Sequence; identical to SEQ ID NO: 4906
  GFR-binding peptide
  MOD_RES (1), (3), (36), (37): Xaa is C or S
  MOD_RES (14), (15), (16), (17), (18): Xaa is A or G
  MOD_RES (19), (20), (21), (22): Xaa is A or G or is absent

SEQ ID NO: 12346 - protein, 34 aa, Artificial Sequence
  GFR-binding peptide
  MOD_RES (34), (34): Xaa is C or S
  MOD_RES (12), (13), (14), (15), (16): Xaa is A or G
  MOD_RES (17), (18), (19), (20): Xaa is A or G or is absent
SRVVMNNSLQEXXXXXXXXXYYLVTLPELKTPAX

SEQ ID NO: 12347 - protein, 32 aa, Artificial Sequence
  GFR-binding peptide
  MOD_RES (31), (32): Xaa is C or S
EVVMENSLQEVVKDYEDYYVMPLPELETPVXX

SEQ ID NO: 12348 - protein, 32 aa, Artificial Sequence
  GFR-binding peptide
  MOD_RES (2), (2): Xaa is C or S
KXSRVIMNSLQEVKPKRGVYYLITLPELAQPV

SEQ ID NO: 12349 - protein, 36 aa, Artificial Sequence
  GFR-binding peptide
  MOD_RES (1), (3), (34), (35): Xaa is C or S
XKXSKVVMEYQKYVKPTRGVIFLISIPSLDQPVXXP

SEQ ID NO: 12350 - protein, 37 aa, Artificial Sequence
  GFR-binding peptide
  MOD_RES (34), (35): Xaa is C or S
  MOD_RES (12), (13), (14), (15), (16): Xaa is A or G
  MOD_RES (17), (18), (19), (20): Xaa is A or G or is absent
SEVVMDQYNKLXXXXXXXXXLYLISIASLRTPVXXTP

SEQ ID NO: 12351 - protein, 39 aa, Artificial Sequence
  GFR-binding peptide
  MOD_RES (1), (33), (34): Xaa is C or S
XARVVMNNSLQEIVNSSDDYYVVPLPELQTPAXXPKPVT

SEQ ID NO: 12352 - protein, 36 aa, Artificial Sequence
  GFR-binding peptide
  MOD_RES (2), (36): Xaa is C or S
  MOD_RES (14), (15), (16), (17), (18): Xaa is A or G
  MOD_RES (19), (20), (21), (22): Xaa is A or G or is absent
GXSEVVMDNSLQEXXXXXXXXXYYLITLPELRTPVX

SEQ ID NO: 12353 - protein, 40 aa, Artificial Sequence
  GFR-binding peptide
  MOD_RES (2), (4), (35), (36): Xaa is C or S
SXKXSKVIMEYQKYIKPTKGIIFLISIPSLDQSVXXPSAS

SEQ ID NO: 12354 - protein, 34 aa, Artificial Sequence; identical to SEQ ID NO: 4913
  GFR-binding peptide
  MOD_RES (1), (3), (34): Xaa is C or S

SEQ ID NO: 12355 - protein, 39 aa, Artificial Sequence
  GFR-binding peptide
  MOD_RES (2), (4), (35), (36): Xaa is C or S
SXKXSKVVMEYQKYVKPTRGVIFLISIPSLDQPVXXPSA

SEQ ID NO: 12356 - protein, 39 aa, Artificial Sequence; identical to SEQ ID NO: 4915
  GFR-binding peptide
  MOD_RES (2), (33), (34): Xaa is C or S

SEQ ID NO: 12357 - protein, 38 aa, Artificial Sequence; identical to SEQ ID NO: 4918
  GFR-binding peptide
  MOD_RES (2), (35), (36): Xaa is C or S
  MOD_RES (13), (14), (15), (16), (17): Xaa is A or G
  MOD_RES (18), (19), (20), (21): Xaa is A or G or is absent

SEQ ID NO: 12358 - protein, 36 aa, Artificial Sequence
  GFR-binding peptide
  MOD_RES (33), (34): Xaa is C or S
  MOD_RES (11), (12), (13), (14), (15): Xaa is A or G
  MOD_RES (16), (17), (18), (19): Xaa is A or G or is absent
SKVIMEYQKYXXXXXXXXXIFLISIPSLDQSVXXPS

SEQ ID NO: 12359 - protein, 38 aa, Artificial Sequence
  GFR-binding peptide
  MOD_RES (2), (4), (38): Xaa is C or S
  MOD_RES (16), (17), (18), (19), (20): Xaa is A or G
  MOD_RES (21), (22), (23), (24): Xaa is A or G or is absent
HXGXSRVVMNEYQKYXXXXXXXXXIFLVSIPSLKTPAX

SEQ ID NO: 12360 - protein, 35 aa, Artificial Sequence
  GFR-binding peptide
  MOD_RES (1), (3): Xaa is C or S
  MOD_RES (14), (15), (16), (17), (18): Xaa is A or G
  MOD_RES (19), (20), (21), (22): Xaa is A or G or is absent
XKXSKVIMEYQKYXXXXXXXXXIFLISIPSLDQSV

SEQ ID NO: 12361 - protein, 38 aa, Artificial Sequence
  GFR-binding peptide
  MOD_RES (1), (35), (36): Xaa is C or S
  MOD_RES (13), (14), (15), (16), (17): Xaa is A or G
  MOD_RES (18), (19), (20), (21): Xaa is A or G or is absent
XGEVVMENSLQEXXXXXXXXXYYVMPLPELETPVXXAK

SEQ ID NO: 12362 - protein, 39 aa, Artificial Sequence; identical to SEQ ID NO: 4920
  GFR-binding peptide
  MOD_RES (2), (4), (38), (39): Xaa is C or S
  MOD_RES (16), (17), (18), (19), (20): Xaa is A or G
  MOD_RES (21), (22), (23), (24): Xaa is A or G or is absent

SEQ ID NO: 12363 - protein, 36 aa, Artificial Sequence
  GFR-binding peptide
  MOD_RES (2), (35), (36): Xaa is C or S
  MOD_RES (13), (14), (15), (16), (17): Xaa is A or G
  MOD_RES (18), (19), (20), (21): Xaa is A or G or is absent
KXSKVVMNSLQEXXXXXXXXXYYLITLPELDQPVXX

SEQ ID NO: 12364 - protein, 44 aa, Artificial Sequence
  GFR-binding peptide
  MOD_RES (2), (4), (38), (39): Xaa is C or S
  MOD_RES (16), (17), (18), (19), (20): Xaa is A or G
  MOD_RES (21), (22), (23), (24): Xaa is A or G or is absent
HXGXARVVMNNSLQEXXXXXXXXXYYVVPLPELQTPAXXPKPVT

SEQ ID NO: 12365 - protein, 36 aa, Artificial Sequence
  GFR-binding peptide
  MOD_RES (1), (35), (36): Xaa is C or S
  MOD_RES (13), (14), (15), (16), (17): Xaa is A or G
  MOD_RES (18), (19), (20), (21): Xaa is A or G or is absent
XSRVVMNNSLQEXXXXXXXXXYYLVTLPELKTPAXX

SEQ ID NO: 12366 - protein, 32 aa, Artificial Sequence; identical to SEQ ID NO: 4933
  GFR-binding peptide
  MOD_RES (1), (1): Xaa is C or S

SEQ ID NO: 12367 - protein, 37 aa, Artificial Sequence
  GFR-binding peptide
  MOD_RES (31), (32): Xaa is C or S
EVVMDNSLQEVVNNASDYYLITLPELRTPVXXTPPTS

SEQ ID NO: 12368 - protein, 36 aa, Artificial Sequence; identical to SEQ ID NO: 4935
  GFR-binding peptide
  MOD_RES (1), (3): Xaa is C or S
  MOD_RES (15), (16), (17), (18), (19): Xaa is A or G
  MOD_RES (20), (21), (22), (23): Xaa is A or G or is absent

SEQ ID NO: 12369 - protein, 38 aa, Artificial Sequence; identical to SEQ ID NO: 4936
  GFR-binding peptide
  MOD_RES (1), (3), (35), (36): Xaa is C or S

SEQ ID NO: 12370 - protein, 37 aa, Artificial Sequence; identical to SEQ ID NO: 4938
  GFR-binding peptide
  MOD_RES (2), (4), (37): Xaa is C or S
  MOD_RES (15), (16), (17), (18), (19): Xaa is A or G
  MOD_RES (20), (21), (22), (23): Xaa is A or G or is absent

SEQ ID NO: 12371 - protein, 37 aa, Artificial Sequence; identical to SEQ ID NO: 4943
  GFR-binding peptide
  MOD_RES (32), (33): Xaa is C or S

SEQ ID NO: 12372 - protein, 36 aa, Artificial Sequence; identical to SEQ ID NO: 4944
  GFR-binding peptide
  MOD_RES (1), (33), (34): Xaa is C or S

SEQ ID NO: 12373 - protein, 37 aa, Artificial Sequence
  GFR-binding peptide
  MOD_RES (2), (36), (37): Xaa is C or S
  MOD_RES (14), (15), (16), (17), (18): Xaa is A or G
  MOD_RES (19), (20), (21), (22): Xaa is A or G or is absent
GXARVVMNNSLQEXXXXXXXXXYYLVTLPELQTPAXX

SEQ ID NO: 12374 - protein, 35 aa, Artificial Sequence
  GFR-binding peptide
  MOD_RES (33), (34): Xaa is C or S
  MOD_RES (11), (12), (13), (14), (15): Xaa is A or G
  MOD_RES (16), (17), (18), (19): Xaa is A or G or is absent
EVVMENSLQEXXXXXXXXXYYLMTLPELETPVXXA

SEQ ID NO: 12375 - protein, 38 aa, Artificial Sequence
  GFR-binding peptide
  MOD_RES (2), (4), (36), (37): Xaa is C or S
RXGXSEVVMDNSLQEVVNNASDYYLITLPELRTPVXXT

SEQ ID NO: 12376 - protein, 38 aa, Artificial Sequence
  GFR-binding peptide
  MOD_RES (1), (3), (37), (38): Xaa is C or S
  MOD_RES (15), (16), (17), (18), (19): Xaa is A or G
  MOD_RES (20), (21), (22), (23): Xaa is A or G or is absent
XGXGEVVMEEYQKYXXXXXXXXXIFLMSIPSLETPVXX

SEQ ID NO: 12377 - protein, 35 aa, Artificial Sequence
  GFR-binding peptide
  MOD_RES (1), (33), (34): Xaa is C or S
XSEVVMDNSLQEVVNNASDYYLITLPELRTPVXXT

SEQ ID NO: 12378 - protein, 34 aa, Artificial Sequence
  GFR-binding peptide
  MOD_RES (2), (34): Xaa is C or S
GXSEVVMDQYNKLVVNNASDLYLISIASLRTPVX

SEQ ID NO: 12379 - protein, 41 aa, Artificial Sequence
  GFR-binding peptide
  MOD_RES (1), (35), (36): Xaa is C or S
  MOD_RES (13), (14), (15), (16), (17): Xaa is A or G
  MOD_RES (18), (19), (20), (21): Xaa is A or G or is absent
XSEVVMDNSLQEXXXXXXXXXYYLITLPELRTPVXXTPPTS

SEQ ID NO: 12380 - protein, 34 aa, Artificial Sequence
  GFR-binding peptide
  MOD_RES (32), (33): Xaa is C or S
GEVVMDNSLQEVVKENEDYYVMPLPELETPVXXA

SEQ ID NO: 12381 - protein, 40 aa, Artificial Sequence
  GFR-binding peptide
  MOD_RES (1), (3), (36), (37): Xaa is C or S
  MOD_RES (14), (15), (16), (17), (18): Xaa is A or G
  MOD_RES (19), (20), (21), (22): Xaa is A or G or is absent
XKXSKVVMNSLQEXXXXXXXXXYYVIPLPELDQPVXXPSA

SEQ ID NO: 12382 - protein, 37 aa, Artificial Sequence
  GFR-binding peptide
  MOD_RES (2), (4), (36), (37): Xaa is C or S
RXGXSEVVMDNSLQEVVNNASDYYVIPLPELRTPVXX

SEQ ID NO: 12383 - protein, 36 aa, Artificial Sequence
  GFR-binding peptide
  MOD_RES (1), (35), (36): Xaa is C or S
  MOD_RES (13), (14), (15), (16), (17): Xaa is A or G
  MOD_RES (18), (19), (20), (21): Xaa is A or G or is absent
XSRVVMNEYQKYXXXXXXXXXIFLVSIPSLKTPAXX

SEQ ID NO: 12384 - protein, 35 aa, Artificial Sequence; identical to SEQ ID NO: 4954
  GFR-binding peptide
  MOD_RES (1), (33): Xaa is C or S

SEQ ID NO: 12385 - protein, 37 aa, Artificial Sequence
  GFR-binding peptide
  MOD_RES (1), (35), (36): Xaa is C or S
  MOD_RES (13), (14), (15), (16), (17): Xaa is A or G
  MOD_RES (18), (19), (20), (21): Xaa is A or G or is absent
XGEVVMDNSLQEXXXXXXXXXYYVMPLPELETPVXXA

SEQ ID NO: 12386 - protein, 37 aa, Artificial Sequence
  GFR-binding peptide
  MOD_RES (2), (4): Xaa is C or S
  MOD_RES (16), (17), (18), (19), (20): Xaa is A or G
  MOD_RES (21), (22), (23), (24): Xaa is A or G or is absent
RXGXSEVVMDQYNKLXXXXXXXXXLYLISIASLRTPV

SEQ ID NO: 12387 - protein, 40 aa, Artificial Sequence
  GFR-binding peptide
  MOD_RES (2), (36), (37): Xaa is C or S
  MOD_RES (14), (15), (16), (17), (18): Xaa is A or G
  MOD_RES (19), (20), (21), (22): Xaa is A or G or is absent
GXSEVVMDRYKKLXXXXXXXXXFYLISIANLRTPVXXTPP

SEQ ID NO: 12388 - protein, 30 aa, Artificial Sequence
  GFR-binding peptide
RVVMNNSLQEIVNSSDDYYVVPLPELQTPA

SEQ ID NO: 12389 - protein, 31 aa, Artificial Sequence
  GFR-binding peptide
  MOD_RES (1), (1): Xaa is C or S
XSRVIMNSLQEVKPKRGVYYLITLPELAQPV

SEQ ID NO: 12390 - protein, 36 aa, Artificial Sequence; identical to SEQ ID NO: 4957
  GFR-binding peptide
  MOD_RES (33), (34): Xaa is C or S
  MOD_RES (11), (12), (13), (14), (15): Xaa is A or G
  MOD_RES (16), (17), (18), (19): Xaa is A or G or is absent

SEQ ID NO: 12391 - protein, 35 aa, Artificial Sequence; identical to SEQ ID NO: 4959
  GFR-binding peptide
  MOD_RES (1), (32), (33): Xaa is C or S

SEQ ID NO: 12392 - protein, 35 aa, Artificial Sequence
  GFR-binding peptide
  MOD_RES (1), (3), (35): Xaa is C or S
XGXSEVVMDEYQKYVVNNASDIFLISIPSLRTPVX

SEQ ID NO: 12393 - protein, 39 aa, Artificial Sequence; identical to SEQ ID NO: 4960
  GFR-binding peptide
  MOD_RES (33), (34): Xaa is C or S
  MOD_RES (11), (12), (13), (14), (15): Xaa is A or G
  MOD_RES (16), (17), (18), (19): Xaa is A or G or is absent

SEQ ID NO: 12394 - protein, 35 aa, Artificial Sequence
  GFR-binding peptide
  MOD_RES (2), (34), (35): Xaa is C or S
GXGEVVMDNSLQEVVKENEDYYLMTLPELETPVXX

SEQ ID NO: 12395 - protein, 35 aa, Artificial Sequence
  GFR-binding peptide
  MOD_RES (2), (34), (35): Xaa is C or S
GXSEVVMDRYKKLVVNNASDFYLISIANLRTPVXX

SEQ ID NO: 12396 - protein, 39 aa, Artificial Sequence
  GFR-binding peptide
  MOD_RES (1), (33): Xaa is C or S
XSRVVMNNSLQEIVNSSDDYYLVTLPELKTPAXTPKTVH

SEQ ID NO: 12397 - protein, 38 aa, Artificial Sequence; identical to SEQ ID NO: 4964
  GFR-binding peptide
  MOD_RES (34), (35): Xaa is C or S
  MOD_RES (12), (13), (14), (15), (16): Xaa is A or G
  MOD_RES (17), (18), (19), (20): Xaa is A or G or is absent

SEQ ID NO: 12398 - protein, 30 aa, Artificial Sequence; identical to SEQ ID NO: 4966
  GFR-binding peptide

SEQ ID NO: 12399 - protein, 33 aa, Artificial Sequence; identical to SEQ ID NO: 4967
  GFR-binding peptide
  MOD_RES (1), (32), (33): Xaa is C or S

SEQ ID NO: 12400 - protein, 34 aa, Artificial Sequence
  GFR-binding peptide
  MOD_RES (2), (33), (34): Xaa is C or S
KXSKVIMEYQKYIKPTKGIIFLISIPSLDQSVXX

SEQ ID NO: 12401 - protein, 33 aa, Artificial Sequence
  GFR-binding peptide
  MOD_RES (33), (33): Xaa is C or S
  MOD_RES (11), (12), (13), (14), (15): Xaa is A or G
  MOD_RES (16), (17), (18), (19): Xaa is A or G or is absent
RVVMNEYQKYXXXXXXXXXIFLVSIPSLKTPAX

SEQ ID NO: 12402 - protein, 32 aa, Artificial Sequence
  GFR-binding peptide
  MOD_RES (1), (1): Xaa is C or S
XGEVVMENSLQEVVKDYEDYYVMPLPELETPV

SEQ ID NO: 12403 - protein, 34 aa, Artificial Sequence; identical to SEQ ID NO: 4969
  GFR-binding peptide
  MOD_RES (34), (34): Xaa is C or S
  MOD_RES (12), (13), (14), (15), (16): Xaa is A or G
  MOD_RES (17), (18), (19), (20): Xaa is A or G or is absent

SEQ ID NO: 12404 - protein, 38 aa, Artificial Sequence; identical to SEQ ID NO: 4970
  GFR-binding peptide
  MOD_RES (34), (35): Xaa is C or S
  MOD_RES (12), (13), (14), (15), (16): Xaa is A or G
  MOD_RES (17), (18), (19), (20): Xaa is A or G or is absent

SEQ ID NO: 12405 - protein, 38 aa, Artificial Sequence
  GFR-binding peptide
  MOD_RES (1), (34), (35): Xaa is C or S
  MOD_RES (12), (13), (14), (15), (16): Xaa is A or G
  MOD_RES (17), (18), (19), (20): Xaa is A or G or is absent
XSKVVMNSLQEXXXXXXXXXYYVIPLPELDQPVXXPSA

SEQ ID NO: 12406 - protein, 34 aa, Artificial Sequence
  GFR-binding peptide
  MOD_RES (1), (33), (34): Xaa is C or S
XARVVMNEYQKYIVNSSDDIFLVSIPSLQTPAXX

SEQ ID NO: 12407 - protein, 41 aa, Artificial Sequence
  GFR-binding peptide
  MOD_RES (2), (36): Xaa is C or S
  MOD_RES (14), (15), (16), (17), (18): Xaa is A or G
  MOD_RES (19), (20), (21), (22): Xaa is A or G or is absent
GXSRVVMNNSLQEXXXXXXXXXYYLVTLPELKTPAXTPKTV

SEQ ID NO: 12408 - protein, 33 aa, Artificial Sequence
  GFR-binding peptide
  MOD_RES (1), (1): Xaa is C or S
  MOD_RES (12), (13), (14), (15), (16): Xaa is A or G
  MOD_RES (17), (18), (19), (20): Xaa is A or G or is absent
XSRVIMNSLQEXXXXXXXXXYYVIPLPELAQPV

SEQ ID NO: 12409 - protein, 35 aa, Artificial Sequence; identical to SEQ ID NO: 4974
  GFR-binding peptide
  MOD_RES (2), (4): Xaa is C or S

SEQ ID NO: 12410 - protein, 38 aa, Artificial Sequence; identical to SEQ ID NO: 4977
  GFR-binding peptide
  MOD_RES (2), (36), (37): Xaa is C or S
  MOD_RES (14), (15), (16), (17), (18): Xaa is A or G
  MOD_RES (19), (20), (21), (22): Xaa is A or G or is absent

SEQ ID NO: 12411 - protein, 36 aa, Artificial Sequence
  GFR-binding peptide
  MOD_RES (34), (35): Xaa is C or S
  MOD_RES (12), (13), (14), (15), (16): Xaa is A or G
  MOD_RES (17), (18), (19), (20): Xaa is A or G or is absent
GEVVMDNSLQEXXXXXXXXXYYVMPLPELETPVXXA

SEQ ID NO: 12412 - protein, 38 aa, Artificial Sequence; identical to SEQ ID NO: 4980
  GFR-binding peptide
  MOD_RES (32), (33): Xaa is C or S

SEQ ID NO: 12413 - protein, 37 aa, Artificial Sequence
  GFR-binding peptide
  MOD_RES (1), (3), (35), (36): Xaa is C or S
XGXSRVVMNNSLQEIVNSSDDYYVVPLPELKTPAXXP

SEQ ID NO: 12414 - protein, 34 aa, Artificial Sequence
  GFR-binding peptide
  MOD_RES (1), (34): Xaa is C or S
  MOD_RES (12), (13), (14), (15), (16): Xaa is A or G
  MOD_RES (17), (18), (19), (20): Xaa is A or G or is absent
XSRVIMNSLQEXXXXXXXXXYYLITLPELAQPVX

SEQ ID NO: 12415 - protein, 34 aa, Artificial Sequence
  GFR-binding peptide
  MOD_RES (33), (34): Xaa is C or S
  MOD_RES (11), (12), (13), (14), (15): Xaa is A or G
  MOD_RES (16), (17), (18), (19): Xaa is A or G or is absent
RVVMNNSLQEXXXXXXXXXYYLVTLPELQTPAXX

SEQ ID NO: 12416 - protein, 43 aa, Artificial Sequence
  GFR-binding peptide
  MOD_RES (1), (3), (37), (38): Xaa is C or S
  MOD_RES (15), (16), (17), (18), (19): Xaa is A or G
  MOD_RES (20), (21), (22), (23): Xaa is A or G or is absent
XGXSEVVMDQYNKLXXXXXXXXXLYLISIASLRTPVXXTPPTS

SEQ ID NO: 12417 - protein, 34 aa, Artificial Sequence
  GFR-binding peptide
  MOD_RES (1), (33): Xaa is C or S
XSRVVMNEYQKYIVNSSDDIFLVSIPSLKTPAXT

SEQ ID NO: 12418 - protein, 36 aa, Artificial Sequence
  GFR-binding peptide
  MOD_RES (2), (36): Xaa is C or S
  MOD_RES (14), (15), (16), (17), (18): Xaa is A or G
  MOD_RES (19), (20), (21), (22): Xaa is A or G or is absent
GXGEVVMEEYQKYXXXXXXXXXIFLMSIPSLETPVX

SEQ ID NO: 12419 - protein, 37 aa, Artificial Sequence
  GFR-binding peptide
  MOD_RES (1), (35), (36): Xaa is C or S
  MOD_RES (13), (14), (15), (16), (17): Xaa is A or G
  MOD_RES (18), (19), (20), (21): Xaa is A or G or is absent
XGEVVMDEYQKYXXXXXXXXXIFLMSIPSLETPVXXA

SEQ ID NO: 12420 - protein, 38 aa, Artificial Sequence; identical to SEQ ID NO: 4984
  GFR-binding peptide
  MOD_RES (2), (36), (37): Xaa is C or S
  MOD_RES (14), (15), (16), (17), (18): Xaa is A or G
  MOD_RES (19), (20), (21), (22): Xaa is A or G or is absent

SEQ ID NO: 12421 - protein, 38 aa, Artificial Sequence; identical to SEQ ID NO: 4985
  GFR-binding peptide
  MOD_RES (2), (4), (35), (36): Xaa is C or S

SEQ ID NO: 12422 - protein, 37 aa, Artificial Sequence
  GFR-binding peptide
  MOD_RES (34), (35): Xaa is C or S
  MOD_RES (12), (13), (14), (15), (16): Xaa is A or G
  MOD_RES (17), (18), (19), (20): Xaa is A or G or is absent
GEVVMENSLQEXXXXXXXXXYYVMPLPELETPVXXAK

SEQ ID NO: 12423 - protein, 38 aa, Artificial Sequence
  GFR-binding peptide
  MOD_RES (1), (3), (37), (38): Xaa is C or S
  MOD_RES (15), (16), (17), (18), (19): Xaa is A or G
  MOD_RES (20), (21), (22), (23): Xaa is A or G or is absent
XGXARVVMNEYQKYXXXXXXXXXIFLVSIPSLQTPAXX

SEQ ID NO: 12424 - protein, 39 aa, Artificial Sequence
  GFR-binding peptide
  MOD_RES (1), (35), (36): Xaa is C or S
  MOD_RES (13), (14), (15), (16), (17): Xaa is A or G
  MOD_RES (18), (19), (20), (21): Xaa is A or G or is absent
XSEVVMDQYNKLXXXXXXXXXLYLISIASLRTPVXXTPP

SEQ ID NO: 12425 - protein, 36 aa, Artificial Sequence
  GFR-binding peptide
  MOD_RES (1), (3): Xaa is C or S
  MOD_RES (15), (16), (17), (18), (19): Xaa is A or G
  MOD_RES (20), (21), (22), (23): Xaa is A or G or is absent
XGXSEVVMDNSLQEXXXXXXXXXYYLITLPELRTPV

SEQ ID NO: 12426 - protein, 32 aa, Artificial Sequence
  GFR-binding peptide
  MOD_RES (31), (32): Xaa is C or S
EVVMDNSLQEVVNNASDYYLITLPELRTPVXX

SEQ ID NO: 12427 - protein, 34 aa, Artificial Sequence
  GFR-binding peptide
  MOD_RES (1), (1): Xaa is C or S
  MOD_RES (13), (14), (15), (16), (17): Xaa is A or G
  MOD_RES (18), (19), (20), (21): Xaa is A or G or is absent
XSEVVMDQYNKLXXXXXXXXXLYLISIASLRTPV

SEQ ID NO: 12428 - protein, 36 aa, Artificial Sequence
  GFR-binding peptide
  MOD_RES (1), (34), (35): Xaa is C or S
  MOD_RES (12), (13), (14), (15), (16): Xaa is A or G
  MOD_RES (17), (18), (19), (20): Xaa is A or G or is absent
XSKVVMNSLQEXXXXXXXXXYYLITLPELDQPVXXP

SEQ ID NO: 12429 - protein, 41 aa, Artificial Sequence
  GFR-binding peptide
  MOD_RES (2), (36), (37): Xaa is C or S
  MOD_RES (14), (15), (16), (17), (18): Xaa is A or G
  MOD_RES (19), (20), (21), (22): Xaa is A or G or is absent
GXGEVVMDNSLQEXXXXXXXXXYYLMTLPELETPVXXAKPI

SEQ ID NO: 12430 - protein, 39 aa, Artificial Sequence
  GFR-binding peptide
  MOD_RES (2), (36), (37): Xaa is C or S
  MOD_RES (14), (15), (16), (17), (18): Xaa is A or G
  MOD_RES (19), (20), (21), (22): Xaa is A or G or is absent
GXSEVVMDRYKKLXXXXXXXXXFYLISIANLRTPVXXTP

SEQ ID NO: 12431 - protein, 38 aa, Artificial Sequence
  GFR-binding peptide
  MOD_RES (2), (4), (38): Xaa is C or S
  MOD_RES (16), (17), (18), (19), (20): Xaa is A or G
  MOD_RES (21), (22), (23), (24): Xaa is A or G or is absent
RXGXSEVVMDNSLQEXXXXXXXXXYYVIPLPELRTPVX

SEQ ID NO: 12432 - protein, 38 aa, Artificial Sequence
  GFR-binding peptide
  MOD_RES (1), (3), (35), (36): Xaa is C or S
XGXGEVVMDNSLQEVVKENEDYYLMTLPELETPVXXAK

SEQ ID NO: 12433 - protein, 39 aa, Artificial Sequence
  GFR-binding peptide
  MOD_RES (1), (3), (35), (36): Xaa is C or S
XGXSEVVMDRYKKLVVNNASDFYLISIANLRTPVXXTPP

SEQ ID NO: 12434 - protein, 38 aa, Artificial Sequence; identical to SEQ ID NO: 4991
  GFR-binding peptide
  MOD_RES (2), (33), (34): Xaa is C or S

SEQ ID NO: 12435 - protein, 34 aa, Artificial Sequence; identical to SEQ ID NO: 4992
  GFR-binding peptide
  MOD_RES (31), (32): Xaa is C or S

SEQ ID NO: 12436 - protein, 36 aa, Artificial Sequence
  GFR-binding peptide
  MOD_RES (34), (35): Xaa is C or S
  MOD_RES (12), (13), (14), (15), (16): Xaa is A or G
  MOD_RES (17), (18), (19), (20): Xaa is A or G or is absent
SEVVMDEYQKYXXXXXXXXXIFLISIPSLRTPVXXT

SEQ ID NO: 12437 - protein, 32 aa, Artificial Sequence
  GFR-binding peptide
  MOD_RES (32), (32): Xaa is C or S
SRVVMNNSLQEIVNSSDDYYLVTLPELKTPAX

SEQ ID NO: 12438 - protein, 40 aa, Artificial Sequence
  GFR-binding peptide
  MOD_RES (2), (34), (35): Xaa is C or S
GXSRVVMNEYQKYIVNSSDDIFLVSIPSLKTPAXXPKPVY

SEQ ID NO: 12439 - protein, 41 aa, Artificial Sequence
  GFR-binding peptide
  MOD_RES (2), (4), (38), (39): Xaa is C or S
  MOD_RES (16), (17), (18), (19), (20): Xaa is A or G
  MOD_RES (21), (22), (23), (24): Xaa is A or G or is absent
RXGXGEVVMENSLQEXXXXXXXXXYYLMTLPELETPVXXAK

SEQ ID NO: 12440 - protein, 36 aa, Artificial Sequence
  GFR-binding peptide
  MOD_RES (1), (34), (35): Xaa is C or S
  MOD_RES (12), (13), (14), (15), (16): Xaa is A or G
  MOD_RES (17), (18), (19), (20): Xaa is A or G or is absent
XSKVIMNSLQEXXXXXXXXXYYVIPLPELDQSVXXP

SEQ ID NO: 12441 - protein, 35 aa, Artificial Sequence; identical to SEQ ID NO: 5000
  GFR-binding peptide
  MOD_RES (2), (34), (35): Xaa is C or S

SEQ ID NO: 12442 - protein, 34 aa, Artificial Sequence
  GFR-binding peptide
  MOD_RES (1), (1): Xaa is C or S
  MOD_RES (13), (14), (15), (16), (17): Xaa is A or G
  MOD_RES (18), (19), (20), (21): Xaa is A or G or is absent
XSRVVMNNSLQEXXXXXXXXXYYVVPLPELKTPA

SEQ ID NO: 12443 - protein, 37 aa, Artificial Sequence; identical to SEQ ID NO: 5006
  GFR-binding peptide
  MOD_RES (1), (3), (34), (35): Xaa is C or S

SEQ ID NO: 12444 - protein, 34 aa, Artificial Sequence
  GFR-binding peptide
  MOD_RES (33), (34): Xaa is C or S
  MOD_RES (11), (12), (13), (14), (15): Xaa is A or G
  MOD_RES (16), (17), (18), (19): Xaa is A or G or is absent
EVVMDNSLQEXXXXXXXXXYYVIPLPELRTPVXX

SEQ ID NO: 12445 - protein, 33 aa, Artificial Sequence
  GFR-binding peptide
  MOD_RES (31), (32): Xaa is C or S
SKVVMNSLQEVKPTRGVYYVIPLPELDQPVXXP

SEQ ID NO: 12446 - protein, 37 aa, Artificial Sequence; identical to SEQ ID NO: 5009
  GFR-binding peptide
  MOD_RES (1), (3), (36), (37): Xaa is C or S
  MOD_RES (14), (15), (16), (17), (18): Xaa is A or G
  MOD_RES (19), (20), (21), (22): Xaa is A or G or is absent

SEQ ID NO: 12447 - protein, 37 aa, Artificial Sequence
  GFR-binding peptide
  MOD_RES (1), (35), (36): Xaa is C or S
  MOD_RES (13), (14), (15), (16), (17): Xaa is A or G
  MOD_RES (18), (19), (20), (21): Xaa is A or G or is absent
XSRVVMNNSLQEXXXXXXXXXYYVVPLPELKTPAXXP

SEQ ID NO: 12448 - protein, 35 aa, Artificial Sequence; identical to SEQ ID NO: 5010
  GFR-binding peptide
  MOD_RES (1), (33), (34): Xaa is C or S

SEQ ID NO: 12449 - protein, 34 aa, Artificial Sequence; identical to SEQ ID NO: 5011
  GFR-binding peptide
  MOD_RES (1), (34): Xaa is C or S
  MOD_RES (12), (13), (14), (15), (16): Xaa is A or G
  MOD_RES (17), (18), (19), (20): Xaa is A or G or is absent

SEQ ID NO: 12450 - protein, 37 aa, Artificial Sequence
  GFR-binding peptide
  MOD_RES (1), (3), (35), (36): Xaa is C or S
XGXARVVMNNSLQEIVNSSDDYYVVPLPELQTPAXXP

SEQ ID NO: 12451 - protein, 39 aa, Artificial Sequence
  GFR-binding peptide
  MOD_RES (2), (34), (35): Xaa is C or S
GXSEVVMDNSLQEVVNNASDYYLITLPELRTPVXXTPPT

SEQ ID NO: 12452 - protein, 37 aa, Artificial Sequence
  GFR-binding peptide
  MOD_RES (2), (35), (36): Xaa is C or S
  MOD_RES (13), (14), (15), (16), (17): Xaa is A or G
  MOD_RES (18), (19), (20), (21): Xaa is A or G or is absent
KXSKVVMNSLQEXXXXXXXXXYYVIPLPELDQPVXXP

SEQ ID NO: 12453 - protein, 43 aa, Artificial Sequence; identical to SEQ ID NO: 5020
  GFR-binding peptide
  MOD_RES (2), (4), (38), (39): Xaa is C or S
  MOD_RES (16), (17), (18), (19), (20): Xaa is A or G
  MOD_RES (21), (22), (23), (24): Xaa is A or G or is absent

SEQ ID NO: 12454 - protein, 38 aa, Artificial Sequence
  GFR-binding peptide
  MOD_RES (2), (4), (36), (37): Xaa is C or S
RXGXGEVVMDNSLQEVVKENEDYYLMTLPELETPVXXA

SEQ ID NO: 12455 - protein, 35 aa, Artificial Sequence
  GFR-binding peptide
  MOD_RES (2), (2): Xaa is C or S
  MOD_RES (14), (15), (16), (17), (18): Xaa is A or G
  MOD_RES (19), (20), (21), (22): Xaa is A or G or is absent
GXGEVVMENSLQEXXXXXXXXXYYLMTLPELETPV

SEQ ID NO: 12456 - protein, 34 aa, Artificial Sequence
  GFR-binding peptide
  MOD_RES (1), (1): Xaa is C or S
  MOD_RES (13), (14), (15), (16), (17): Xaa is A or G
  MOD_RES (18), (19), (20), (21): Xaa is A or G or is absent
XSRVVMNEYQKYXXXXXXXXXIFLVSIPSLKTPA

SEQ ID NO: 12457 - protein, 36 aa, Artificial Sequence; identical to SEQ ID NO: 5025
  GFR-binding peptide
  MOD_RES (2), (35), (36): Xaa is C or S
  MOD_RES (13), (14), (15), (16), (17): Xaa is A or G
  MOD_RES (18), (19), (20), (21): Xaa is A or G or is absent

SEQ ID NO: 12458 - protein, 39 aa, Artificial Sequence
  GFR-binding peptide
  MOD_RES (1), (34), (35): Xaa is C or S
  MOD_RES (12), (13), (14), (15), (16): Xaa is A or G
  MOD_RES (17), (18), (19), (20): Xaa is A or G or is absent
XSKVIMEYQKYXXXXXXXXXIFLISIPSLDQSVXXPSAS

SEQ ID NO: 12459 - protein, 40 aa, Artificial Sequence
  GFR-binding peptide
  MOD_RES (2), (4), (38), (39): Xaa is C or S
  MOD_RES (16), (17), (18), (19), (20): Xaa is A or G
  MOD_RES (21), (22), (23), (24): Xaa is A or G or is absent
HXGXSRVVMNNSLQEXXXXXXXXXYYVVPLPELKTPAXXP

SEQ ID NO: 12460 - protein, 37 aa, Artificial Sequence
  GFR-binding peptide
  MOD_RES (1), (3), (37): Xaa is C or S
  MOD_RES (15), (16), (17), (18), (19): Xaa is A or G
  MOD_RES (20), (21), (22), (23): Xaa is A or G or is absent
XGXGEVVMEEYQKYXXXXXXXXXIFLMSIPSLETPVX

SEQ ID NO: 12461 - protein, 32 aa, Artificial Sequence; identical to SEQ ID NO: 5029
  GFR-binding peptide
  MOD_RES (32), (32): Xaa is C or S

SEQ ID NO: 12462 - protein, 36 aa, Artificial Sequence; identical to SEQ ID NO: 5030
  GFR-binding peptide
  MOD_RES (33), (34): Xaa is C or S
  MOD_RES (11), (12), (13), (14), (15): Xaa is A or G
  MOD_RES (16), (17), (18), (19): Xaa is A or G or is absent

SEQ ID NO: 12463 - protein, 38 aa, Artificial Sequence
  GFR-binding peptide
  MOD_RES (2), (34): Xaa is C or S
GXSRVVMNNSLQEIVNSSDDYYVVPLPELKTPAXTPKT

SEQ ID NO: 12464 - protein, 32 aa, Artificial Sequence; identical to SEQ ID NO: 5034
  GFR-binding peptide
  MOD_RES (32), (32): Xaa is C or S

SEQ ID NO: 12465 - protein, 41 aa, Artificial Sequence; identical to SEQ ID NO: 5035
  GFR-binding peptide
  MOD_RES (2), (4), (38), (39): Xaa is C or S
  MOD_RES (16), (17), (18), (19), (20): Xaa is A or G
  MOD_RES (21), (22), (23), (24): Xaa is A or G or is absent

SEQ ID NO: 12466 - protein, 33 aa, Artificial Sequence
  GFR-binding peptide
  MOD_RES (33), (33): Xaa is C or S
  MOD_RES (11), (12), (13), (14), (15): Xaa is A or G
  MOD_RES (16), (17), (18), (19): Xaa is A or G or is absent
RVVMNEYQKYXXXXXXXXXIFLVSIPSLQTPAX

SEQ ID NO: 12467 - protein, 33 aa, Artificial Sequence
  GFR-binding peptide
  MOD_RES (2), (2): Xaa is C or S
GXGEVVMEEYQKYVVKDYEDIFLMSIPSLETPV

SEQ ID NO: 12468 - protein, 32 aa, Artificial Sequence
  GFR-binding peptide
  MOD_RES (1), (1): Xaa is C or S
XARVVMNEYQKYIVNSSDDIFLVSIPSLQTPA

SEQ ID NO: 12469 - protein, 38 aa, Artificial Sequence
  GFR-binding peptide
  MOD_RES (33), (34): Xaa is C or S
  MOD_RES (11), (12), (13), (14), (15): Xaa is A or G
  MOD_RES (16), (17), (18), (19): Xaa is A or G or is absent
RVVMNEYQKYXXXXXXXXXIFLVSIPSLQTPAXXPKPV

SEQ ID NO: 12470 - protein, 38 aa, Artificial Sequence
  GFR-binding peptide
  MOD_RES (2), (34), (35): Xaa is C or S
GXGEVVMDNSLQEVVKENEDYYVMPLPELETPVXXAKP

SEQ ID NO: 12471 - protein, 38 aa, Artificial Sequence
  GFR-binding peptide
  MOD_RES (2), (36): Xaa is C or S
  MOD_RES (14), (15), (16), (17), (18): Xaa is A or G
  MOD_RES (19), (20), (21), (22): Xaa is A or G or is absent
GXSRVVMNNSLQEXXXXXXXXXYYLVTLPELKTPAXTP

SEQ ID NO: 12472 - protein, 35 aa, Artificial Sequence
  GFR-binding peptide
  MOD_RES (1), (33): Xaa is C or S
XSRVVMNNSLQEIVNSSDDYYVVPLPELKTPAXTP

SEQ ID NO: 12473 - protein, 33 aa, Artificial Sequence
  GFR-binding peptide
  MOD_RES (31), (32): Xaa is C or S
RVVMNEYQKYIVNSSDDIFLVSIPSLKTPAXXP

SEQ ID NO: 12474 - protein, 37 aa, Artificial Sequence; identical to SEQ ID NO: 5044
  GFR-binding peptide
  MOD_RES (32), (33): Xaa is C or S

SEQ ID NO: 12475 - protein, 32 aa, Artificial Sequence
  GFR-binding peptide
  MOD_RES (11), (12), (13), (14), (15): Xaa is A or G
  MOD_RES (16), (17), (18), (19): Xaa is A or G or is absent
EVVMDNSLQEXXXXXXXXXYYLMTLPELETPV

SEQ ID NO: 12476 - protein, 38 aa, Artificial Sequence
  GFR-binding peptide
  MOD_RES (32), (32): Xaa is C or S
SRVVMNNSLQEIVNSSDDYYVVPLPELKTPAXTPKTVH

SEQ ID NO: 12477 - protein, 40 aa, Artificial Sequence
  GFR-binding peptide
  MOD_RES (1), (3), (35), (36): Xaa is C or S
XGXSEVVMDNSLQEVVNNASDYYLITLPELRTPVXXTPPT

SEQ ID NO: 12478 - protein, 35 aa, Artificial Sequence
  GFR-binding peptide
  MOD_RES (32), (33): Xaa is C or S
ARVVMNNSLQEIVNSSDDYYLVTLPELQTPAXXPK

SEQ ID NO: 12479 - protein, 35 aa, Artificial Sequence
  GFR-binding peptide
  MOD_RES (2), (35): Xaa is C or S
  MOD_RES (13), (14), (15), (16), (17): Xaa is A or G
  MOD_RES (18), (19), (20), (21): Xaa is A or G or is absent
KXSKVVMEYQKYXXXXXXXXXIFLISIPSLDQPVX

SEQ ID NO: 12480 - protein, 35 aa, Artificial Sequence
  GFR-binding peptide
  MOD_RES (1), (35): Xaa is C or S
  MOD_RES (13), (14), (15), (16), (17): Xaa is A or G
  MOD_RES (18), (19), (20), (21): Xaa is A or G or is absent
XSRVVMNEYQKYXXXXXXXXXIFLVSIPSLKTPAX

SEQ ID NO: 12481 - protein, 35 aa, Artificial Sequence
  GFR-binding peptide
  MOD_RES (31), (32): Xaa is C or S
SRVIMNSLQEVKPKRGVYYLITLPELAQPVXXPAA

SEQ ID NO: 12482 - protein, 40 aa, Artificial Sequence; identical to SEQ ID NO: 5053
  GFR-binding peptide
  MOD_RES (2), (34), (35): Xaa is C or S

SEQ ID NO: 12483 - protein, 35 aa, Artificial Sequence
  GFR-binding peptide
  MOD_RES (2), (33), (34): Xaa is C or S
KXSKVIMNSLQEIKPTKGIYYVIPLPELDQSVXXP

SEQ ID NO: 12484 - protein, 42 aa, Artificial Sequence; identical to SEQ ID NO: 5055
  GFR-binding peptide
  MOD_RES (2), (36), (37): Xaa is C or S
  MOD_RES (14), (15), (16), (17), (18): Xaa is A or G
  MOD_RES (19), (20), (21), (22): Xaa is A or G or is absent

SEQ ID NO: 12485 - protein, 35 aa, Artificial Sequence; identical to SEQ ID NO: 5056
  GFR-binding peptide
  MOD_RES (1), (3), (35): Xaa is C or S

SEQ ID NO: 12486 - protein, 44 aa, Artificial Sequence
  GFR-binding peptide
  MOD_RES (2), (4), (38): Xaa is C or S
  MOD_RES (16), (17), (18), (19), (20): Xaa is A or G
  MOD_RES (21), (22), (23), (24): Xaa is A or G or is absent
HXGXSRVVMNNSLQEXXXXXXXXXYYLVTLPELKTPAXTPKTVH

SEQ ID NO: 12487 - protein, 39 aa, Artificial Sequence; identical to SEQ ID NO: 5057
  GFR-binding peptide
  MOD_RES (34), (35): Xaa is C or S
  MOD_RES (12), (13), (14), (15), (16): Xaa is A or G
  MOD_RES (17), (18), (19), (20): Xaa is A or G or is absent

SEQ ID NO: 12488 - protein, 40 aa, Artificial Sequence
  GFR-binding peptide
  MOD_RES (2), (4), (36), (37): Xaa is C or S
RXGXSEVVMDRYKKLVVNNASDFYLISIANLRTPVXXTPP

SEQ ID NO: 12489 - protein, 41 aa, Artificial Sequence; identical to SEQ ID NO: 5059
  GFR-binding peptide
  MOD_RES (1), (3), (36), (37): Xaa is C or S
  MOD_RES (14), (15), (16), (17), (18): Xaa is A or G
  MOD_RES (19), (20), (21), (22): Xaa is A or G or is absent

SEQ ID NO: 12490 - protein, 36 aa, Artificial Sequence
  GFR-binding peptide
  MOD_RES (32), (33): Xaa is C or S
SEVVMDNSLQEVVNNASDYYLITLPELRTPVXXTPP

SEQ ID NO: 12491 - protein, 36 aa, Artificial Sequence; identical to SEQ ID NO: 5060
  GFR-binding peptide
  MOD_RES (31), (32): Xaa is C or S

SEQ ID NO: 12492 - protein, 42 aa, Artificial Sequence
  GFR-binding peptide
  MOD_RES (2), (4), (38), (39): Xaa is C or S
  MOD_RES (16), (17), (18), (19), (20): Xaa is A or G
  MOD_RES (21), (22), (23), (24): Xaa is A or G or is absent
RXGXSEVVMDNSLQEXXXXXXXXXYYVIPLPELRTPVXXTPP

SEQ ID NO: 12493 - protein, 36 aa, Artificial Sequence
  GFR-binding peptide
  MOD_RES (2), (35), (36): Xaa is C or S
  MOD_RES (13), (14), (15), (16), (17): Xaa is A or G
  MOD_RES (18), (19), (20), (21): Xaa is A or G or is absent
KXSKVVMEYQKYXXXXXXXXXIFLISIPSLDQPVXX

SEQ ID NO: 12494 - protein, 35 aa, Artificial Sequence
  GFR-binding peptide
  MOD_RES (2), (33), (34): Xaa is C or S
KXSRVIMNSLQEVKPKRGVYYLITLPELAQPVXXP

SEQ ID NO: 12495 - protein, 36 aa, Artificial Sequence
  GFR-binding peptide
  MOD_RES (32), (33): Xaa is C or S
GEVVMDEYQKYVVKENEDIFLMSIPSLETPVXXAKP

SEQ ID NO: 12496 - protein, 36 aa, Artificial Sequence
  GFR-binding peptide
  MOD_RES (31), (31): Xaa is C or S
RVVMNNSLQEIVNSSDDYYLVTLPELKTPAXTPKTV

SEQ ID NO: 12497 - protein, 38 aa, Artificial Sequence
  GFR-binding peptide
  MOD_RES (1), (3), (37), (38): Xaa is C or S
  MOD_RES (15), (16), (17), (18), (19): Xaa is A or G
  MOD_RES (20), (21), (22), (23): Xaa is A or G or is absent
XGXSEVVMDNSLQEXXXXXXXXXYYVIPLPELRTPVXX

SEQ ID NO: 12498 - protein, 31 aa, Artificial Sequence
  GFR-binding peptide
  MOD_RES (31), (31): Xaa is C or S
RVVMNEYQKYIVNSSDDIFLVSIPSLKTPAX

SEQ ID NO: 12499 - protein, 38 aa, Artificial Sequence; identical to SEQ ID NO: 5067
  GFR-binding peptide
  MOD_RES (2), (36), (37): Xaa is C or S
  MOD_RES (14), (15), (16), (17), (18): Xaa is A or G
  MOD_RES (19), (20), (21), (22): Xaa is A or G or is absent

SEQ ID NO: 12500 - protein, 37 aa, Artificial Sequence
  GFR-binding peptide
  MOD_RES (31), (32): Xaa is C or S
SKVVMNSLQEVKPTRGVYYVIPLPELDQPVXXPSASA

SEQ ID NO: 12501 - protein, 42 aa, Artificial Sequence
  GFR-binding peptide
  MOD_RES (2), (36), (37): Xaa is C or S
  MOD_RES (14), (15), (16), (17), (18): Xaa is A or G
  MOD_RES (19), (20), (21), (22): Xaa is A or G or is absent
GXARVVMNNSLQEXXXXXXXXXYYLVTLPELQTPAXXPKPVT

SEQ ID NO: 12502 - protein, 34 aa, Artificial Sequence
  GFR-binding peptide
  MOD_RES (1), (33), (34): Xaa is C or S
XSEVVMDRYKKLVVNNASDFYLISIANLRTPVXX

SEQ ID NO: 12503 - protein, 35 aa, Artificial Sequence
  GFR-binding peptide
  MOD_RES (33), (34): Xaa is C or S
  MOD_RES (11), (12), (13), (14), (15): Xaa is A or G
  MOD_RES (16), (17), (18), (19): Xaa is A or G or is absent
SKVVMNSLQEXXXXXXXXXYYVIPLPELDQPVXXP

SEQ ID NO: 12504 - protein, 33 aa, Artificial Sequence
  GFR-binding peptide
  MOD_RES (1), (33): Xaa is C or S
XGEVVMDEYQKYVVKENEDIFLMSIPSLETPVX

SEQ ID NO: 12505 - protein, 35 aa, Artificial Sequence; identical to SEQ ID NO: 5074
  GFR-binding peptide
  MOD_RES (1), (3), (34), (35): Xaa is C or S

SEQ ID NO: 12506 - protein, 39 aa, Artificial Sequence
  GFR-binding peptide
  MOD_RES (2), (36), (37): Xaa is C or S
  MOD_RES (14), (15), (16), (17), (18): Xaa is A or G
  MOD_RES (19), (20), (21), (22): Xaa is A or G or is absent
GXARVVMNNSLQEXXXXXXXXXYYLVTLPELQTPAXXPK

SEQ ID NO: 12507 - protein, 32 aa, Artificial Sequence
  GFR-binding peptide
  MOD_RES (1), (32): Xaa is C or S
XSKVVMEYQKYVKPTRGVIFLISIPSLDQPVX

SEQ ID NO: 12508 - protein, 41 aa, Artificial Sequence
  GFR-binding peptide
  MOD_RES (1), (3), (36), (37): Xaa is C or S
  MOD_RES (14), (15), (16), (17), (18): Xaa is A or G
  MOD_RES (19), (20), (21), (22): Xaa is A or G or is absent
XKXSRVIMNSLQEXXXXXXXXXYYLITLPELAQPVXXPAAS

SEQ ID NO: 12509 - protein, 35 aa, Artificial Sequence
  GFR-binding peptide
  MOD_RES (33), (33): Xaa is C or S
  MOD_RES (11), (12), (13), (14), (15): Xaa is A or G
  MOD_RES (16), (17), (18), (19): Xaa is A or G or is absent
RVVMNNSLQEXXXXXXXXXYYVVPLPELKTPAXTP

SEQ ID NO: 12510 - protein, 40 aa, Artificial Sequence
  GFR-binding peptide
  MOD_RES (2), (36), (37): Xaa is C or S
  MOD_RES (14), (15), (16), (17), (18): Xaa is A or G
  MOD_RES (19), (20), (21), (22): Xaa is A or G or is absent
GXARVVMNNSLQEXXXXXXXXXYYLVTLPELQTPAXXPKP

SEQ ID NO: 12511 - protein, 37 aa, Artificial Sequence
  GFR-binding peptide
  MOD_RES (1), (33), (34): Xaa is C or S
XARVVMNEYQKYIVNSSDDIFLVSIPSLQTPAXXPKP

SEQ ID NO: 12512 - protein, 39 aa, Artificial Sequence
  GFR-binding peptide
  MOD_RES (2), (34), (35): Xaa is C or S
GXGEVVMEEYQKYVVKDYEDIFLMSIPSLETPVXXAKPI

SEQ ID NO: 12513 - protein, 33 aa, Artificial Sequence
  GFR-binding peptide
  MOD_RES (33), (33): Xaa is C or S
  MOD_RES (11), (12), (13), (14), (15): Xaa is A or G
  MOD_RES (16), (17), (18), (19): Xaa is A or G or is absent
EVVMDNSLQEXXXXXXXXXYYVMPLPELETPVX

SEQ ID NO: 12514 - protein, 35 aa, Artificial Sequence; identical to SEQ ID NO: 5079
  GFR-binding peptide
  MOD_RES (32), (33): Xaa is C or S

SEQ ID NO: 12515 - protein, 36 aa, Artificial Sequence
  GFR-binding peptide
  MOD_RES (31), (32): Xaa is C or S
SKVIMNSLQEIKPTKGIYYVIPLPELDQSVXXPSAS

SEQ ID NO: 12516 - protein, 37 aa, Artificial Sequence
  GFR-binding peptide
  MOD_RES (31), (32): Xaa is C or S
EVVMDEYQKYVVKENEDIFLMSIPSLETPVXXAKPIK

SEQ ID NO: 12517 - protein, 39 aa, Artificial Sequence
  GFR-binding peptide
  MOD_RES (1), (3), (37), (38): Xaa is C or S
  MOD_RES (15), (16), (17), (18), (19): Xaa is A or G
  MOD_RES (20), (21), (22), (23): Xaa is A or G or is absent
XGXSEVVMDNSLQEXXXXXXXXXYYLITLPELRTPVXXT

SEQ ID NO: 12518 - protein, 35 aa, Artificial Sequence; identical to SEQ ID NO: 5088
  GFR-binding peptide
  MOD_RES (32), (33): Xaa is C or S

SEQ ID NO: 12519 - protein, 38 aa, Artificial Sequence; identical to SEQ ID NO: 5091
  GFR-binding peptide
  MOD_RES (2), (4), (36), (37): Xaa is C or S

SEQ ID NO: 12520 - protein, 34 aa, Artificial Sequence
  GFR-binding peptide
  MOD_RES (2), (34): Xaa is C or S
GXSRVVMNEYQKYIVNSSDDIFLVSIPSLKTPAX

SEQ ID NO: 12521 - protein, 39 aa, Artificial Sequence
  GFR-binding peptide
  MOD_RES (1), (35): Xaa is C or S
  MOD_RES (13), (14), (15), (16), (17): Xaa is A or G
  MOD_RES (18), (19), (20), (21): Xaa is A or G or is absent
XSRVVMNNSLQEXXXXXXXXXYYVVPLPELKTPAXTPKT

SEQ ID NO: 12522 - protein, 38 aa, Artificial Sequence
  GFR-binding peptide
  MOD_RES (1), (34), (35): Xaa is C or S
  MOD_RES (12), (13), (14), (15), (16): Xaa is A or G
  MOD_RES (17), (18), (19), (20): Xaa is A or G or is absent
XSRVIMNSLQEXXXXXXXXXYYVIPLPELAQPVXXPAA

SEQ ID NO: 12523 - protein, 36 aa, Artificial Sequence
  GFR-binding peptide
  MOD_RES (32), (33): Xaa is C or S
SEVVMDQYNKLVVNNASDLYLISIASLRTPVXXTPP

SEQ ID NO: 12524 - protein, 36 aa, Artificial Sequence
  GFR-binding peptide
  MOD_RES (32), (33): Xaa is C or S
GEVVMEEYQKYVVKDYEDIFLMSIPSLETPVXXAKP

SEQ ID NO: 12525 - protein, 42 aa, Artificial Sequence
  GFR-binding peptide
  MOD_RES (1), (3), (36), (37): Xaa is C or S
  MOD_RES (14), (15), (16), (17), (18): Xaa is A or G
  MOD_RES (19), (20), (21), (22): Xaa is A or G or is absent
XKXSKVVMEYQKYXXXXXXXXXIFLISIPSLDQPVXXPSASA

SEQ ID NO: 12526 - protein, 33 aa, Artificial Sequence; identical to SEQ ID NO: 5097
  GFR-binding peptide
  MOD_RES (2), (2): Xaa is C or S

SEQ ID NO: 12527 - protein, 36 aa, Artificial Sequence; identical to SEQ ID NO: 5098
  GFR-binding peptide
  MOD_RES (1), (32), (33): Xaa is C or S

SEQ ID NO: 12528 - protein, 35 aa, Artificial Sequence
  GFR-binding peptide
  MOD_RES (2), (2): Xaa is C or S
  MOD_RES (14), (15), (16), (17), (18): Xaa is A or G
  MOD_RES (19), (20), (21), (22): Xaa is A or G or is absent
GXGEVVMENSLQEXXXXXXXXXYYVMPLPELETPV

SEQ ID NO: 12529 - protein, 37 aa, Artificial Sequence
  GFR-binding peptide
  MOD_RES (33), (34): Xaa is C or S
  MOD_RES (11), (12), (13), (14), (15): Xaa is A or G
  MOD_RES (16), (17), (18), (19): Xaa is A or G or is absent
RVVMNEYQKYXXXXXXXXXIFLVSIPSLKTPAXXPKP

SEQ ID NO: 12530 - protein, 36 aa, Artificial Sequence
  GFR-binding peptide
  MOD_RES (1), (3): Xaa is C or S
  MOD_RES (15), (16), (17), (18), (19): Xaa is A or G
  MOD_RES (20), (21), (22), (23): Xaa is A or G or is absent
XGXSRVVMNNSLQEXXXXXXXXXYYLVTLPELKTPA

SEQ ID NO: 12531 - protein, 38 aa, Artificial Sequence
  GFR-binding peptide
  MOD_RES (2), (4), (36), (37): Xaa is C or S
RXGXSEVVMDEYQKYVVNNASDIFLISIPSLRTPVXXT

SEQ ID NO: 12532 - protein, 38 aa, Artificial Sequence; identical to SEQ ID NO: 5102
  GFR-binding peptide
  MOD_RES (1), (35), (36): Xaa is C or S
  MOD_RES (13), (14), (15), (16), (17): Xaa is A or G
  MOD_RES (18), (19), (20), (21): Xaa is A or G or is absent

SEQ ID NO: 12533 - protein, 37 aa, Artificial Sequence
  GFR-binding peptide
  MOD_RES (1), (3), (37): Xaa is C or S
  MOD_RES (15), (16), (17), (18), (19): Xaa is A or G
  MOD_RES (20), (21), (22), (23): Xaa is A or G or is absent
XGXSRVVMNEYQKYXXXXXXXXXIFLVSIPSLKTPAX

SEQ ID NO: 12534 - protein, 38 aa, Artificial Sequence; identical to SEQ ID NO: 5103
  GFR-binding peptide
  MOD_RES (33), (34): Xaa is C or S
  MOD_RES (11), (12), (13), (14), (15): Xaa is A or G
  MOD_RES (16), (17), (18), (19): Xaa is A or G or is absent

SEQ ID NO: 12535 - protein, 35 aa, Artificial Sequence; identical to SEQ ID NO: 5104
  GFR-binding peptide
  MOD_RES (31), (31): Xaa is C or S

SEQ ID NO: 12536 - protein, 30 aa, Artificial Sequence; identical to SEQ ID NO: 5105
  GFR-binding peptide

SEQ ID NO: 12537 - protein, 31 aa, Artificial Sequence
  GFR-binding peptide
  MOD_RES (31), (31): Xaa is C or S
EVVMDNSLQEVVNNASDYYLITLPELRTPVX

SEQ ID NO: 12538 - protein, 34 aa, Artificial Sequence
  GFR-binding peptide
  MOD_RES (31), (32): Xaa is C or S
RVVMNEYQKYIVNSSDDIFLVSIPSLQTPAXXPK

SEQ ID NO: 12539 - protein, 39 aa, Artificial Sequence; identical to SEQ ID NO: 5106
  GFR-binding peptide
  MOD_RES (2), (34), (35): Xaa is C or S

SEQ ID NO: 12540 - protein, 40 aa, Artificial Sequence
  GFR-binding peptide
  MOD_RES (1), (3), (35), (36): Xaa is C or S
XGXSEVVMDQYNKLVVNNASDLYLISIASLRTPVXXTPPT

SEQ ID NO: 12541 - protein, 34 aa, Artificial Sequence
  GFR-binding peptide
  MOD_RES (2), (34): Xaa is C or S
GXARVVMNEYQKYIVNSSDDIFLVSIPSLQTPAX

SEQ ID NO: 12542 - protein, 36 aa, Artificial Sequence; identical to SEQ ID NO: 5114
  GFR-binding peptide
  MOD_RES (31), (32): Xaa is C or S

SEQ ID NO: 12543 - protein, 33 aa, Artificial Sequence
  GFR-binding peptide
  MOD_RES (1), (33): Xaa is C or S
XSRVVMNNSLQEIVNSSDDYYLVTLPELKTPAX

SEQ ID NO: 12544 - protein, 35 aa, Artificial Sequence; identical to SEQ ID NO: 5116
  GFR-binding peptide
  MOD_RES (32), (33): Xaa is C or S

SEQ ID NO: 12545 - protein, 32 aa, Artificial Sequence; identical to SEQ ID NO: 5117
  GFR-binding peptide
  MOD_RES (31), (32): Xaa is C or S

SEQ ID NO: 12546 - protein, 43 aa, Artificial Sequence
  GFR-binding peptide
  MOD_RES (2), (4), (38), (39): Xaa is C or S
  MOD_RES (16), (17), (18), (19), (20): Xaa is A or G
  MOD_RES (21), (22), (23), (24): Xaa is A or G or is absent
RXGXSEVVMDQYNKLXXXXXXXXXLYLISIASLRTPVXXTPPT

SEQ ID NO: 12547 - protein, 39 aa, Artificial Sequence
  GFR-binding peptide
  MOD_RES (2), (34), (35): Xaa is C or S
GXSEVVMDRYKKLVVNNASDFYLISIANLRTPVXXTPPT

SEQ ID NO: 12548 - protein, 39 aa, Artificial Sequence
  GFR-binding peptide
  MOD_RES (2), (4), (36), (37): Xaa is C or S
RXGXSEVVMDEYQKYVVNNASDIFLISIPSLRTPVXXTP

SEQ ID NO: 12549 - protein, 35 aa, Artificial Sequence
  GFR-binding peptide
  MOD_RES (33), (34): Xaa is C or S
  MOD_RES (11), (12), (13), (14), (15): Xaa is A or G
  MOD_RES (16), (17), (18), (19): Xaa is A or G or is absent
SKVVMNSLQEXXXXXXXXXYYLITLPELDQPVXXP

SEQ ID NO: 12550 - protein, 38 aa, Artificial Sequence
  GFR-binding peptide
  MOD_RES (2), (34), (35): Xaa is C or S
GXSRVVMNNSLQEIVNSSDDYYVVPLPELKTPAXXPKP

SEQ ID NO: 12551 - protein, 43 aa, Artificial Sequence
  GFR-binding peptide
  MOD_RES (2), (4), (38), (39): Xaa is C or S
  MOD_RES (16), (17), (18), (19), (20): Xaa is A or G
  MOD_RES (21), (22), (23), (24): Xaa is A or G or is absent
HXGXSRVVMNEYQKYXXXXXXXXXIFLVSIPSLKTPAXXPKPV

SEQ ID NO: 12552 - protein, 34 aa, Artificial Sequence
  GFR-binding peptide
  MOD_RES (2), (2): Xaa is C or S
  MOD_RES (13), (14), (15), (16), (17): Xaa is A or G
  MOD_RES (18), (19), (20), (21): Xaa is A or G or is absent
KXSKVVMNSLQEXXXXXXXXXYYVIPLPELDQPV

SEQ ID NO: 12553 - protein, 35 aa, Artificial Sequence
  GFR-binding peptide
  MOD_RES (33), (33): Xaa is C or S
  MOD_RES (11), (12), (13), (14), (15): Xaa is A or G
  MOD_RES (16), (17), (18), (19): Xaa is A or G or is absent
RVVMNNSLQEXXXXXXXXXYYLVTLPELKTPAXTP

SEQ ID NO: 12554 - protein, 44 aa, Artificial Sequence
  GFR-binding peptide
  MOD_RES (2), (4), (38), (39): Xaa is C or S
  MOD_RES (16), (17), (18), (19), (20): Xaa is A or G
  MOD_RES (21), (22), (23), (24): Xaa is A or G or is absent
HXGXSRVVMNNSLQEXXXXXXXXXYYVVPLPELKTPAXXPKPVY

SEQ ID NO: 12555 - protein, 31 aa, Artificial Sequence
  GFR-binding peptide
  MOD_RES (1), (1): Xaa is C or S
XSKVVMEYQKYVKPTRGVIFLISIPSLDQPV

SEQ ID NO: 12556 - protein, 36 aa, Artificial Sequence; identical to SEQ ID NO: 5122
  GFR-binding peptide
  MOD_RES (33), (34): Xaa is C or S
  MOD_RES (11), (12), (13), (14), (15): Xaa is A or G
  MOD_RES (16), (17), (18), (19): Xaa is A or G or is absent

SEQ ID NO: 12557 - protein, 39 aa, Artificial Sequence
  GFR-binding peptide
  MOD_RES (1), (35), (36): Xaa is C or S
  MOD_RES (13), (14), (15), (16), (17): Xaa is A or G
  MOD_RES (18), (19), (20), (21): Xaa is A or G or is absent
XARVVMNNSLQEXXXXXXXXXYYLVTLPELQTPAXXPKP

SEQ ID NO: 12558 - protein, 35 aa, Artificial Sequence
  GFR-binding peptide
  MOD_RES (1), (3), (35): Xaa is C or S
XGXARVVMNNSLQEIVNSSDDYYLVTLPELQTPAX

SEQ ID NO: 12559 - protein, 34 aa, Artificial Sequence; identical to SEQ ID NO: 5124
  GFR-binding peptide
  MOD_RES (33), (34): Xaa is C or S
  MOD_RES (11), (12), (13), (14), (15): Xaa is A or G
  MOD_RES (16), (17), (18), (19): Xaa is A or G or is absent

SEQ ID NO: 12560 - protein, 38 aa, Artificial Sequence
  GFR-binding peptide
  MOD_RES (1), (3), (37), (38): Xaa is C or S
  MOD_RES (15), (16), (17), (18), (19): Xaa is A or G
  MOD_RES (20), (21), (22), (23): Xaa is A or G or is absent
XGXSEVVMDNSLQEXXXXXXXXXYYLITLPELRTPVXX

SEQ ID NO: 12561 - protein, 38 aa, Artificial Sequence
  GFR-binding peptide
  MOD_RES (1), (33), (34): Xaa is C or S
XGEVVMENSLQEVVKDYEDYYLMTLPELETPVXXAKPI

SEQ ID NO: 12562 - protein, 40 aa, Artificial Sequence
  GFR-binding peptide
  MOD_RES (1), (35): Xaa is C or S
  MOD_RES (13), (14), (15), (16), (17): Xaa is A or G
  MOD_RES (18), (19), (20), (21): Xaa is A or G or is absent
XSRVVMNNSLQEXXXXXXXXXYYLVTLPELKTPAXTPKTV

SEQ ID NO: 12563 - protein, 37 aa, Artificial Sequence
  GFR-binding peptide
  MOD_RES (2), (4), (36), (37): Xaa is C or S
RXGXGEVVMDNSLQEVVKENEDYYVMPLPELETPVXX

SEQ ID NO: 12564 - protein, 34 aa, Artificial Sequence
  GFR-binding peptide
  MOD_RES (2), (2): Xaa is C or S
  MOD_RES (13), (14), (15), (16), (17): Xaa is A or G
  MOD_RES (18), (19), (20), (21): Xaa is A or G or is absent
KXSKVIMEYQKYXXXXXXXXXIFLISIPSLDQSV

SEQ ID NO: 12565 - protein, 32 aa, Artificial Sequence
  GFR-binding peptide
  MOD_RES (1), (32): Xaa is C or S
XSKVIMEYQKYIKPTKGIIFLISIPSLDQSVX

SEQ ID NO: 12566 - protein, 44 aa, Artificial Sequence; identical to SEQ ID NO: 5130
  GFR-binding peptide
  MOD_RES (2), (4), (38), (39): Xaa is C or S
  MOD_RES (16), (17), (18), (19), (20): Xaa is A or G
  MOD_RES (21), (22), (23), (24): Xaa is A or G or is absent

SEQ ID NO: 12567 - protein, 42 aa, Artificial Sequence; identical to SEQ ID NO: 5131
  GFR-binding peptide
  MOD_RES (2), (4), (37), (38): Xaa is C or S
  MOD_RES (15), (16), (17), (18), (19): Xaa is A or G
  MOD_RES (20), (21), (22), (23): Xaa is A or G or is absent

SEQ ID NO: 12568 - protein, 37 aa, Artificial Sequence; identical to SEQ ID NO: 5132
  GFR-binding peptide
  MOD_RES (32), (33): Xaa is C or S

SEQ ID NO: 12569 - protein, 37 aa, Artificial Sequence; identical to SEQ ID NO: 5133
  GFR-binding peptide
  MOD_RES (32), (33): Xaa is C or S

SEQ ID NO: 12570 - protein, 40 aa, Artificial Sequence; identical to SEQ ID NO: 5134
  GFR-binding peptide
  MOD_RES (34), (35): Xaa is C or S
  MOD_RES (12), (13), (14), (15), (16): Xaa is A or G
  MOD_RES (17), (18), (19), (20): Xaa is A or G or is absent

SEQ ID NO: 12571 - protein, 39 aa, Artificial Sequence
  GFR-binding peptide
  MOD_RES (2), (36), (37): Xaa is C or S
  MOD_RES (14), (15), (16), (17), (18): Xaa is A or G
  MOD_RES (19), (20), (21), (22): Xaa is A or G or is absent
GXARVVMNNSLQEXXXXXXXXXYYVVPLPELQTPAXXPK

SEQ ID NO: 12572 - protein, 43 aa, Artificial Sequence; identical to SEQ ID NO: 5136
  GFR-binding peptide
  MOD_RES (1), (3), (37), (38): Xaa is C or S
  MOD_RES (15), (16), (17), (18), (19): Xaa is A or G
  MOD_RES (20), (21), (22), (23): Xaa is A or G or is absent

SEQ ID NO: 12573 - protein, 32 aa, Artificial Sequence; identical to SEQ ID NO: 5137
  GFR-binding peptide
  MOD_RES (11), (12), (13), (14), (15): Xaa is A or G
  MOD_RES (16), (17), (18), (19): Xaa is A or G or is absent

SEQ ID NO: 12574 - protein, 42 aa, Artificial Sequence
  GFR-binding peptide
  MOD_RES (2), (4), (38), (39): Xaa is C or S
  MOD_RES (16), (17), (18), (19), (20): Xaa is A or G
  MOD_RES (21), (22), (23), (24): Xaa is A or G or is absent
HXGXSRVVMNEYQKYXXXXXXXXXIFLVSIPSLKTPAXXPKP

SEQ ID NO: 12575 - protein, 39 aa, Artificial Sequence
  GFR-binding peptide
  MOD_RES (1), (33), (34): Xaa is C or S
XSEVVMDQYNKLVVNNASDLYLISIASLRTPVXXTPPTS

SEQ ID NO: 12576 - protein, 38 aa, Artificial Sequence; identical to SEQ ID NO: 5139
  GFR-binding peptide
  MOD_RES (2), (34), (35): Xaa is C or S

SEQ ID NO: 12577 - protein, 33 aa, Artificial Sequence; identical to SEQ ID NO: 5140
  GFR-binding peptide
  MOD_RES (12), (13), (14), (15), (16): Xaa is A or G
  MOD_RES (17), (18), (19), (20): Xaa is A or G or is absent

SEQ ID NO: 12578 - protein, 40 aa, Artificial Sequence; identical to SEQ ID NO: 5142
  GFR-binding peptide
  MOD_RES (2), (4), (38), (39): Xaa is C or S
  MOD_RES (16), (17), (18), (19), (20): Xaa is A or G
  MOD_RES (21), (22), (23), (24): Xaa is A or G or is absent

SEQ ID NO: 12579 - protein, 36 aa, Artificial Sequence
  GFR-binding peptide
  MOD_RES (1), (3), (36): Xaa is C or S
  MOD_RES (14), (15), (16), (17), (18): Xaa is A or G
  MOD_RES (19), (20), (21), (22): Xaa is A or G or is absent
XKXSKVIMEYQKYXXXXXXXXXIFLISIPSLDQSVX

SEQ ID NO: 12580 - protein, 35 aa, Artificial Sequence
  GFR-binding peptide
  MOD_RES (1), (33), (34): Xaa is C or S
XGEVVMENSLQEVVKDYEDYYLMTLPELETPVXXA

SEQ ID NO: 12581 - protein, 34 aa, Artificial Sequence
  GFR-binding peptide
  MOD_RES (1), (33), (34): Xaa is C or S
XGEVVMEEYQKYVVKDYEDIFLMSIPSLETPVXX

SEQ ID NO: 12582 - protein, 33 aa, Artificial Sequence
  GFR-binding peptide
  MOD_RES (33), (33): Xaa is C or S
  MOD_RES (11), (12), (13), (14), (15): Xaa is A or G
  MOD_RES (16), (17), (18), (19): Xaa is A or G or is absent
EVVMDEYQKYXXXXXXXXXIFLISIPSLRTPVX

SEQ ID NO: 12583 - protein, 40 aa, Artificial Sequence
  GFR-binding peptide
  MOD_RES (2), (4), (38), (39): Xaa is C or S
  MOD_RES (16), (17), (18), (19), (20): Xaa is A or G
  MOD_RES (21), (22), (23), (24): Xaa is A or G or is absent
HXGXSRVVMNEYQKYXXXXXXXXXIFLVSIPSLKTPAXXP

SEQ ID NO: 12584 - protein, 37 aa, Artificial Sequence; identical to SEQ ID NO: 5143
  GFR-binding peptide
  MOD_RES (31), (32): Xaa is C or S

SEQ ID NO: 12585 - protein, 41 aa, Artificial Sequence
  GFR-binding peptide
  MOD_RES (1), (3), (37): Xaa is C or S
  MOD_RES (15), (16), (17), (18), (19): Xaa is A or G
  MOD_RES (20), (21), (22), (23): Xaa is A or G or is absent
XGXSRVVMNEYQKYXXXXXXXXXIFLVSIPSLKTPAXTPKT

SEQ ID NO: 12586 - protein, 31 aa, Artificial Sequence
  GFR-binding peptide
  MOD_RES (31), (31): Xaa is C or S
EVVMEEYQKYVVKDYEDIFLMSIPSLETPVX

SEQ ID NO: 12587 - protein, 40 aa, Artificial Sequence
  GFR-binding peptide
  MOD_RES (1), (3), (37), (38): Xaa is C or S
  MOD_RES (15), (16), (17), (18), (19): Xaa is A or G
  MOD_RES (20), (21), (22), (23): Xaa is A or G or is absent
XGXSEVVMDRYKKLXXXXXXXXXFYLISIANLRTPVXXTP

SEQ ID NO: 12588 - protein, 38 aa, Artificial Sequence
  GFR-binding peptide
  MOD_RES (1), (33), (34): Xaa is C or S
XGEVVMDNSLQEVVKENEDYYLMTLPELETPVXXAKPI

SEQ ID NO: 12589 - protein, 39 aa, Artificial Sequence; identical to SEQ ID NO: 5147
  GFR-binding peptide
  MOD_RES (1), (33), (34): Xaa is C or S

SEQ ID NO: 12590 - protein, 36 aa, Artificial Sequence; identical to SEQ ID NO: 5148
  GFR-binding peptide
  MOD_RES (2), (4), (35), (36): Xaa is C or S

SEQ ID NO: 12591 - protein, 37 aa, Artificial Sequence; identical to SEQ ID NO: 5149
  GFR-binding peptide
  MOD_RES (34), (35): Xaa is C or S
  MOD_RES (12), (13), (14), (15), (16): Xaa is A or G
  MOD_RES (17), (18), (19), (20): Xaa is A or G or is absent

SEQ ID NO: 12592 - protein, 41 aa, Artificial Sequence; identical to SEQ ID NO: 5150
  GFR-binding peptide
  MOD_RES (1), (3), (37), (38): Xaa is C or S
  MOD_RES (15), (16), (17), (18), (19): Xaa is A or G
  MOD_RES (20), (21), (22), (23): Xaa is A or G or is absent

SEQ ID NO: 12593 - protein, 41 aa, Artificial Sequence; identical to SEQ ID NO: 5151
  GFR-binding peptide
  MOD_RES (2), (36), (37): Xaa is C or S
  MOD_RES (14), (15), (16), (17), (18): Xaa is A or G
  MOD_RES (19), (20), (21), (22): Xaa is A or G or is absent

SEQ ID NO: 12594 - protein, 31 aa, Artificial Sequence; identical to SEQ ID NO: 5152
  GFR-binding peptide
  MOD_RES (31), (31): Xaa is C or S

SEQ ID NO: 12595 - protein, 38 aa, Artificial Sequence
  GFR-binding peptide
  MOD_RES (34), (35): Xaa is C or S
  MOD_RES (12), (13), (14), (15), (16): Xaa is A or G
  MOD_RES (17), (18), (19), (20): Xaa is A or G or is absent
GEVVMENSLQEXXXXXXXXXYYLMTLPELETPVXXAKP

SEQ ID NO: 12596 - protein, 33 aa, Artificial Sequence
  GFR-binding peptide
  MOD_RES (31), (32): Xaa is C or S
EVVMDRYKKLVVNNASDFYLISIANLRTPVXXT

SEQ ID NO: 12597 - protein, 35 aa, Artificial Sequence
  GFR-binding peptide
  MOD_RES (2), (33), (34): Xaa is C or S
KXSKVVMEYQKYVKPTRGVIFLISIPSLDQPVXXP

SEQ ID NO: 12598 - protein, 38 aa, Artificial Sequence
  GFR-binding peptide
  MOD_RES (1), (3), (35): Xaa is C or S
XGXSRVVMNNSLQEIVNSSDDYYLVTLPELKTPAXTPK

SEQ ID NO: 12599 - protein, 36 aa, Artificial Sequence; identical to SEQ ID NO: 5154
  GFR-binding peptide
  MOD_RES (2), (34), (35): Xaa is C or S

SEQ ID NO: 12600 - protein, 38 aa, Artificial Sequence; identical to SEQ ID NO: 5157
  GFR-binding peptide
  MOD_RES (2), (4), (36), (37): Xaa is C or S

SEQ ID NO: 12601 - protein, 34 aa, Artificial Sequence; identical to SEQ ID NO: 5159
  GFR-binding peptide
  MOD_RES (2), (34): Xaa is C or S

SEQ ID NO: 12602 - protein, 39 aa, Artificial Sequence
  GFR-binding peptide
  MOD_RES (2), (36), (37): Xaa is C or S
  MOD_RES (14), (15), (16), (17), (18): Xaa is A or G
  MOD_RES (19), (20), (21), (22): Xaa is A or G or is absent
GXSEVVMDEYQKYXXXXXXXXXIFLISIPSLRTPVXXTP

SEQ ID NO: 12603 - protein, 42 aa, Artificial Sequence; identical to SEQ ID NO: 5160
  GFR-binding peptide
  MOD_RES (2), (36): Xaa is C or S
  MOD_RES (14), (15), (16), (17), (18): Xaa is A or G
  MOD_RES (19), (20), (21), (22): Xaa is A or G or is absent

SEQ ID NO: 12604 - protein, 39 aa, Artificial Sequence
  GFR-binding peptide
  MOD_RES (34), (35): Xaa is C or S
  MOD_RES (12), (13), (14), (15), (16): Xaa is A or G
  MOD_RES (17), (18), (19), (20): Xaa is A or G or is absent
GEVVMDNSLQEXXXXXXXXXYYVMPLPELETPVXXAKPI

SEQ ID NO: 12605 - protein, 38 aa, Artificial Sequence; identical to SEQ ID NO: 5164
  GFR-binding peptide
  MOD_RES (33), (34): Xaa is C or S
  MOD_RES (11), (12), (13), (14), (15): Xaa is A or G
  MOD_RES (16), (17), (18), (19): Xaa is A or G or is absent

SEQ ID NO: 12606 - protein, 43 aa, Artificial Sequence; identical to SEQ ID NO: 5165
  GFR-binding peptide
  MOD_RES (2), (4), (38): Xaa is C or S
  MOD_RES (16), (17), (18), (19), (20): Xaa is A or G
  MOD_RES (21), (22), (23), (24): Xaa is A or G or is absent

SEQ ID NO: 12607 - protein, 35 aa, Artificial Sequence
  GFR-binding peptide
  MOD_RES (32), (33): Xaa is C or S
GEVVMDNSLQEVVKENEDYYLMTLPELETPVXXAK

SEQ ID NO: 12608 - protein, 39 aa, Artificial Sequence
  GFR-binding peptide
  MOD_RES (33), (34): Xaa is C or S
  MOD_RES (11), (12), (13), (14), (15): Xaa is A or G
  MOD_RES (16), (17), (18), (19): Xaa is A or G or is absent
SRVIMNSLQEXXXXXXXXXYYVIPLPELAQPVXXPAASA

SEQ ID NO: 12609 - protein, 36 aa, Artificial Sequence
  GFR-binding peptide
  MOD_RES (2), (33), (34): Xaa is C or S
KXSRVIMNSLQEVKPKRGVYYLITLPELAQPVXXPA

SEQ ID NO: 12610 - protein, 40 aa, Artificial Sequence
  GFR-binding peptide
  MOD_RES (1), (35), (36): Xaa is C or S
  MOD_RES (13), (14), (15), (16), (17): Xaa is A or G
  MOD_RES (18), (19), (20), (21): Xaa is A or G or is absent
XGEVVMENSLQEXXXXXXXXXYYVMPLPELETPVXXAKPI

SEQ ID NO: 12611 - protein, 41 aa, Artificial Sequence; identical to SEQ ID NO: 5167
  GFR-binding peptide
  MOD_RES (2), (4), (38), (39): Xaa is C or S
  MOD_RES (16), (17), (18), (19), (20): Xaa is A or G
  MOD_RES (21), (22), (23), (24): Xaa is A or G or is absent

SEQ ID NO: 12612 - protein, 37 aa, Artificial Sequence; identical to SEQ ID NO: 5168
  GFR-binding peptide
  MOD_RES (34), (35): Xaa is C or S
  MOD_RES (12), (13), (14), (15), (16): Xaa is A or G
  MOD_RES (17), (18), (19), (20): Xaa is A or G or is absent

SEQ ID NO: 12613 - protein, 34 aa, Artificial Sequence
  GFR-binding peptide
  MOD_RES (33), (34): Xaa is C or S
  MOD_RES (11), (12), (13), (14), (15): Xaa is A or G
  MOD_RES (16), (17), (18), (19): Xaa is A or G or is absent
RVVMNNSLQEXXXXXXXXXYYVVPLPELQTPAXX

SEQ ID NO: 12614 - protein, 32 aa, Artificial Sequence; identical to SEQ ID NO: 5171
  GFR-binding peptide
  MOD_RES (31), (32): Xaa is C or S

SEQ ID NO: 12615 - protein, 33 aa, Artificial Sequence
  GFR-binding peptide
  MOD_RES (1), (33): Xaa is C or S
XGEVVMEEYQKYVVKDYEDIFLMSIPSLETPVX

SEQ ID NO: 12616 - protein, 30 aa, Artificial Sequence; identical to SEQ ID NO: 5173
  GFR-binding peptide

SEQ ID NO: 12617 - protein, 36 aa, Artificial Sequence
  GFR-binding peptide
  MOD_RES (1), (33), (34): Xaa is C or S
XARVVMNEYQKYIVNSSDDIFLVSIPSLQTPAXXPK

SEQ ID NO: 12618 - protein, 33 aa, Artificial Sequence
  GFR-binding peptide
  MOD_RES (2), (33): Xaa is C or S
KXSKVIMEYQKYIKPTKGIIFLISIPSLDQSVX

SEQ ID NO: 12619 - protein, 34 aa, Artificial Sequence; identical to SEQ ID NO: 5177
  GFR-binding peptide
  MOD_RES (33), (34): Xaa is C or S
  MOD_RES (11), (12), (13), (14), (15): Xaa is A or G
  MOD_RES (16), (17), (18), (19): Xaa is A or G or is absent

SEQ ID NO: 12620 - protein, 40 aa, Artificial Sequence
  GFR-binding peptide
  MOD_RES (2), (4), (38), (39): Xaa is C or S
  MOD_RES (16), (17), (18), (19), (20): Xaa is A or G
  MOD_RES (21), (22), (23), (24): Xaa is A or G or is absent
RXGXGEVVMDEYQKYXXXXXXXXXIFLMSIPSLETPVXXA

SEQ ID NO: 12621 - protein, 34 aa, Artificial Sequence
  GFR-binding peptide
  MOD_RES (32), (33): Xaa is C or S
SEVVMDNSLQEVVNNASDYYVIPLPELRTPVXXT

SEQ ID NO: 12622 - protein, 33 aa, Artificial Sequence; identical to SEQ ID NO: 5180
  GFR-binding peptide
  MOD_RES (12), (13), (14), (15), (16): Xaa is A or G
  MOD_RES (17), (18), (19), (20): Xaa is A or G or is absent

SEQ ID NO: 12623 - protein, 35 aa, Artificial Sequence
  GFR-binding peptide
  MOD_RES (31), (32): Xaa is C or S
RVVMNEYQKYIVNSSDDIFLVSIPSLKTPAXXPKP

SEQ ID NO: 12624 - protein, 35 aa, Artificial Sequence; identical to SEQ ID NO: 5183
  GFR-binding peptide
  MOD_RES (1), (35): Xaa is C or S
  MOD_RES (13), (14), (15), (16), (17): Xaa is A or G
  MOD_RES (18), (19), (20), (21): Xaa is A or G or is absent

SEQ ID NO: 12625 - protein, 36 aa, Artificial Sequence; identical to SEQ ID NO: 5185
  GFR-binding peptide
  MOD_RES (2), (33), (34): Xaa is C or S

SEQ ID NO: 12626 - protein, 39 aa, Artificial Sequence
  GFR-binding peptide
  MOD_RES (1), (3), (37), (38): Xaa is C or S
  MOD_RES (15), (16), (17), (18), (19): Xaa is A or G
  MOD_RES (20), (21), (22), (23): Xaa is A or G or is absent
XGXSRVVMNNSLQEXXXXXXXXXYYVVPLPELKTPAXXP

SEQ ID NO: 12627 - protein, 33 aa, Artificial Sequence
  GFR-binding peptide
  MOD_RES (12), (13), (14), (15), (16): Xaa is A or G
  MOD_RES (17), (18), (19), (20): Xaa is A or G or is absent
GEVVMEEYQKYXXXXXXXXXIFLMSIPSLETPV

SEQ ID NO: 12628 - protein, 40 aa, Artificial Sequence; identical to SEQ ID NO: 5190
  GFR-binding peptide
  MOD_RES (1), (3), (37), (38): Xaa is C or S
  MOD_RES (15), (16), (17), (18), (19): Xaa is A or G
  MOD_RES (20), (21), (22), (23): Xaa is A or G or is absent

SEQ ID NO: 12629 - protein, 42 aa, Artificial Sequence
  GFR-binding peptide
  MOD_RES (2), (4), (38), (39): Xaa is C or S
  MOD_RES (16), (17), (18), (19), (20): Xaa is A or G
  MOD_RES (21), (22), (23), (24): Xaa is A or G or is absent
RXGXGEVVMDEYQKYXXXXXXXXXIFLMSIPSLETPVXXAKP

SEQ ID NO: 12630 - protein, 33 aa, Artificial Sequence; identical to SEQ ID NO: 5193
  GFR-binding peptide
  MOD_RES (33), (33): Xaa is C or S
  MOD_RES (11), (12), (13), (14), (15): Xaa is A or G
  MOD_RES (16), (17), (18), (19): Xaa is A or G or is absent

SEQ ID NO: 12631 - protein, 38 aa, Artificial Sequence
  GFR-binding peptide
  MOD_RES (33), (34): Xaa is C or S
  MOD_RES (11), (12), (13), (14), (15): Xaa is A or G
  MOD_RES (16), (17), (18), (19): Xaa is A or G or is absent
SRVIMNSLQEXXXXXXXXXYYVIPLPELAQPVXXPAAS

SEQ ID NO: 12632 - protein, 35 aa, Artificial Sequence; identical to SEQ ID NO: 5195
  GFR-binding peptide
  MOD_RES (1), (32), (33): Xaa is C or S

SEQ ID NO: 12633 - protein, 39 aa, Artificial Sequence
  GFR-binding peptide
  MOD_RES (33), (34): Xaa is C or S
  MOD_RES (11), (12), (13), (14), (15): Xaa is A or G
  MOD_RES (16), (17), (18), (19): Xaa is A or G or is absent
SRVIMNSLQEXXXXXXXXXYYLITLPELAQPVXXPAASA

SEQ ID NO: 12634 - protein, 41 aa, Artificial Sequence
  GFR-binding peptide
  MOD_RES (1), (3), (35), (36): Xaa is C or S
XGXGEVVMDEYQKYVVKENEDIFLMSIPSLETPVXXAKPIK

SEQ ID NO: 12635 - protein, 39 aa, Artificial Sequence
  GFR-binding peptide
  MOD_RES (2), (4), (36), (37): Xaa is C or S
HXGXSRVVMNEYQKYIVNSSDDIFLVSIPSLKTPAXXPK

SEQ ID NO: 12636 - protein, 39 aa, Artificial Sequence
  GFR-binding peptide
  MOD_RES (1), (33), (34): Xaa is C or S
XGEVVMDNSLQEVVKENEDYYLMTLPELETPVXXAKPIK

SEQ ID NO: 12637 - protein, 35 aa, Artificial Sequence; identical to SEQ ID NO: 5202
  GFR-binding peptide
  MOD_RES (1), (35): Xaa is C or S
  MOD_RES (13), (14), (15), (16), (17): Xaa is A or G
  MOD_RES (18), (19), (20), (21): Xaa is A or G or is absent

SEQ ID NO: 12638 - protein, 43 aa, Artificial Sequence
  GFR-binding peptide
  MOD_RES (1), (3), (37), (38): Xaa is C or S
  MOD_RES (15), (16), (17), (18), (19): Xaa is A or G
  MOD_RES (20), (21), (22), (23): Xaa is A or G or is absent
XGXSRVVMNNSLQEXXXXXXXXXYYVVPLPELKTPAXXPKPVY

SEQ ID NO: 12639 - protein, 35 aa, Artificial Sequence; identical to SEQ ID NO: 5208
  GFR-binding peptide
  MOD_RES (1), (34), (35): Xaa is C or S
  MOD_RES (12), (13), (14), (15), (16): Xaa is A or G
  MOD_RES (17), (18), (19), (20): Xaa is A or G or is absent

SEQ ID NO: 12640 - protein, 34 aa, Artificial Sequence
  GFR-binding peptide
  MOD_RES (2), (4): Xaa is C or S
SXKXSKVVMEYQKYVKPTRGVIFLISIPSLDQPV

SEQ ID NO: 12641 - protein, 35 aa, Artificial Sequence
  GFR-binding peptide
  MOD_RES (1), (35): Xaa is C or S
  MOD_RES (13), (14), (15), (16), (17): Xaa is A or G
  MOD_RES (18), (19), (20), (21): Xaa is A or G or is absent
XSEVVMDEYQKYXXXXXXXXXIFLISIPSLRTPVX

SEQ ID NO: 12642 - protein, 43 aa, Artificial Sequence
  GFR-binding peptide
  MOD_RES (2), (4), (38), (39): Xaa is C or S
  MOD_RES (16), (17), (18), (19), (20): Xaa is A or G
  MOD_RES (21), (22), (23), (24): Xaa is A or G or is absent
RXGXSEVVMDNSLQEXXXXXXXXXYYVIPLPELRTPVXXTPPT

SEQ ID NO: 12643 - protein, 33 aa, Artificial Sequence
  GFR-binding peptide
  MOD_RES (1), (1): Xaa is C or S
  MOD_RES (12), (13), (14), (15), (16): Xaa is A or G
  MOD_RES (17), (18), (19), (20): Xaa is A or G or is absent
XSKVIMEYQKYXXXXXXXXXIFLISIPSLDQSV

SEQ ID NO: 12644 - protein, 40 aa, Artificial Sequence
  GFR-binding peptide
  MOD_RES (2), (4), (36), (37): Xaa is C or S
HXGXSRVVMNNSLQEIVNSSDDYYLVTLPELKTPAXXPKP

SEQ ID NO: 12645 - protein, 37 aa, Artificial Sequence
  GFR-binding peptide
  MOD_RES (1), (33), (34): Xaa is C or S
XGEVVMEEYQKYVVKDYEDIFLMSIPSLETPVXXAKP

SEQ ID NO: 12646 - protein, 35 aa, Artificial Sequence
  GFR-binding peptide
  MOD_RES (2), (35): Xaa is C or S
  MOD_RES (13), (14), (15), (16), (17): Xaa is A or G
  MOD_RES (18), (19), (20), (21): Xaa is A or G or is absent
KXSKVIMNSLQEXXXXXXXXXYYVIPLPELDQSVX

SEQ ID NO: 12647 - protein, 34 aa, Artificial Sequence
  GFR-binding peptide
  MOD_RES (1), (33), (34): Xaa is C or S
XSRVVMNEYQKYIVNSSDDIFLVSIPSLKTPAXX

SEQ ID NO: 12648 - protein, 40 aa, Artificial Sequence
  GFR-binding peptide
  MOD_RES (2), (4), (38), (39): Xaa is C or S
  MOD_RES (16), (17), (18), (19), (20): Xaa is A or G
  MOD_RES (21), (22), (23), (24): Xaa is A or G or is absent
HXGXSRVVMNNSLQEXXXXXXXXXYYLVTLPELKTPAXXP

SEQ ID NO: 12649 - protein, 40 aa, Artificial Sequence
  GFR-binding peptide
  MOD_RES (1), (3), (37): Xaa is C or S
  MOD_RES (15), (16), (17), (18), (19): Xaa is A or G
  MOD_RES (20), (21), (22), (23): Xaa is A or G or is absent
XGXSRVVMNNSLQEXXXXXXXXXYYLVTLPELKTPAXTPK

SEQ ID NO: 12650 - protein, 34 aa, Artificial Sequence; identical to SEQ ID NO: 5213
  GFR-binding peptide
  MOD_RES (1), (3): Xaa is C or S

SEQ ID NO: 12651 - protein, 32 aa, Artificial Sequence; identical to SEQ ID NO: 5214
  GFR-binding peptide
  MOD_RES (31), (32): Xaa is C or S

SEQ ID NO: 12652 - protein, 34 aa, Artificial Sequence
  GFR-binding peptide
  MOD_RES (33), (34): Xaa is C or S
  MOD_RES (11), (12), (13), (14), (15): Xaa is A or G
  MOD_RES (16), (17), (18), (19): Xaa is A or G or is absent
RVVMNNSLQEXXXXXXXXXYYVVPLPELKTPAXX

SEQ ID NO: 12653 - protein, 33 aa, Artificial Sequence
  GFR-binding peptide
  MOD_RES (33), (33): Xaa is C or S
  MOD_RES (11), (12), (13), (14), (15): Xaa is A or G
  MOD_RES (16), (17), (18), (19): Xaa is A or G or is absent
SKVVMNSLQEXXXXXXXXXYYLITLPELDQPVX

SEQ ID NO: 12654 - protein, 37 aa, Artificial Sequence
  GFR-binding peptide
  MOD_RES (1), (35), (36): Xaa is C or S
  MOD_RES (13), (14), (15), (16), (17): Xaa is A or G
  MOD_RES (18), (19), (20), (21): Xaa is A or G or is absent
XSRVVMNNSLQEXXXXXXXXXYYLVTLPELKTPAXXP

SEQ ID NO: 12655 - protein, 37 aa, Artificial Sequence; identical to SEQ ID NO: 5217
  GFR-binding peptide
  MOD_RES (1), (3), (36), (37): Xaa is C or S
  MOD_RES (14), (15), (16), (17), (18): Xaa is A or G
  MOD_RES (19), (20), (21), (22): Xaa is A or G or is absent

SEQ ID NO: 12656 - protein, 36 aa, Artificial Sequence
  GFR-binding peptide
  MOD_RES (1), (32), (33): Xaa is C or S
XSKVVMNSLQEVKPTRGVYYVIPLPELDQPVXXPSA

SEQ ID NO: 12657 - protein, 40 aa, Artificial Sequence; identical to SEQ ID NO: 5220
  GFR-binding peptide
  MOD_RES (2), (4), (35), (36): Xaa is C or S

SEQ ID NO: 12658 - protein, 37 aa, Artificial Sequence
  GFR-binding peptide
  MOD_RES (2), (36): Xaa is C or S
  MOD_RES (14), (15), (16), (17), (18): Xaa is A or G
  MOD_RES (19), (20), (21), (22): Xaa is A or G or is absent
GXSRVVMNNSLQEXXXXXXXXXYYVVPLPELKTPAXT

SEQ ID NO: 12659 - protein, 32 aa, Artificial Sequence
  GFR-binding peptide
  MOD_RES (31), (32): Xaa is C or S
SKVIMEYQKYIKPTKGIIFLISIPSLDQSVXX

SEQ ID NO: 12660 - protein, 37 aa, Artificial Sequence; identical to SEQ ID NO: 5223
  GFR-binding peptide
  MOD_RES (31), (32): Xaa is C or S

SEQ ID NO: 12661 - protein, 37 aa, Artificial Sequence
  GFR-binding peptide
  MOD_RES (2), (35), (36): Xaa is C or S
  MOD_RES (13), (14), (15), (16), (17): Xaa is A or G
  MOD_RES (18), (19), (20), (21): Xaa is A or G or is absent
KXSRVIMEYQKYXXXXXXXXXIFLISIPSLAQPVXXP

SEQ ID NO: 12662 - protein, 32 aa, Artificial Sequence
  GFR-binding peptide
  MOD_RES (11), (12), (13), (14), (15): Xaa is A or G
  MOD_RES (16), (17), (18), (19): Xaa is A or G or is absent
SKVVMNSLQEXXXXXXXXXYYVIPLPELDQPV

SEQ ID NO: 12663 - protein, 41 aa, Artificial Sequence; identical to SEQ ID NO: 5226
  GFR-binding peptide
  MOD_RES (2), (4), (35), (36): Xaa is C or S

SEQ ID NO: 12664 - protein, 35 aa, Artificial Sequence; identical to SEQ ID NO: 5229
  GFR-binding peptide
  MOD_RES (33), (34): Xaa is C or S
  MOD_RES (11), (12), (13), (14), (15): Xaa is A or G
  MOD_RES (16), (17), (18), (19): Xaa is A or G or is absent

SEQ ID NO: 12665 - protein, 39 aa, Artificial Sequence; identical to SEQ ID NO: 5230
  GFR-binding peptide
  MOD_RES (2), (4), (38), (39): Xaa is C or S
  MOD_RES (16), (17), (18), (19), (20): Xaa is A or G
  MOD_RES (21), (22), (23), (24): Xaa is A or G or is absent

SEQ ID NO: 12666 - protein, 36 aa, Artificial Sequence
  GFR-binding peptide
  MOD_RES (34), (35): Xaa is C or S
  MOD_RES (12), (13), (14), (15), (16): Xaa is A or G
  MOD_RES (17), (18), (19), (20): Xaa is A or G or is absent
SEVVMDNSLQEXXXXXXXXXYYLITLPELRTPVXXT

SEQ ID NO: 12667 - protein, 31 aa, Artificial Sequence
  GFR-binding peptide
ARVVMNNSLQEIVNSSDDYYVVPLPELQTPA

SEQ ID NO: 12668 - protein, 34 aa, Artificial Sequence
  GFR-binding peptide
  MOD_RES (1), (3): Xaa is C or S
XGXSRVVMNNSLQEIVNSSDDYYVVPLPELKTPA

SEQ ID NO: 12669 - protein, 37 aa, Artificial Sequence
  GFR-binding peptide
  MOD_RES (1), (3), (35), (36): Xaa is C or S
XGXSEVVMDRYKKLVVNNASDFYLISIANLRTPVXXT

SEQ ID NO: 12670 - protein, 36 aa, Artificial Sequence; identical to SEQ ID NO: 5234
  GFR-binding peptide
  MOD_RES (1), (32), (33): Xaa is C or S

SEQ ID NO: 12671 - protein, 31 aa, Artificial Sequence; identical to SEQ ID NO: 5237
  GFR-binding peptide
  MOD_RES (31), (31): Xaa is C or S

SEQ ID NO: 12672 - protein, 38 aa, Artificial Sequence
  GFR-binding peptide
  MOD_RES (32), (32): Xaa is C or S
SRVVMNEYQKYIVNSSDDIFLVSIPSLKTPAXTPKTVH

SEQ ID NO: 12673 - protein, 40 aa, Artificial Sequence
  GFR-binding peptide
  MOD_RES (2), (4), (37), (38): Xaa is C or S
  MOD_RES (15), (16), (17), (18), (19): Xaa is A or G
  MOD_RES (20), (21), (22), (23): Xaa is A or G or is absent
SXKXSKVVMNSLQEXXXXXXXXXYYLITLPELDQPVXXPS

SEQ ID NO: 12674 - protein, 42 aa, Artificial Sequence; identical to SEQ ID NO: 5239
  GFR-binding peptide
  MOD_RES (2), (4), (37), (38): Xaa is C or S
  MOD_RES (15), (16), (17), (18), (19): Xaa is A or G
  MOD_RES (20), (21), (22), (23): Xaa is A or G or is absent

SEQ ID NO: 12675 - protein, 39 aa, Artificial Sequence
  GFR-binding peptide
  MOD_RES (33), (34): Xaa is C or S
  MOD_RES (11), (12), (13), (14), (15): Xaa is A or G
  MOD_RES (16), (17), (18), (19): Xaa is A or G or is absent
RVVMNNSLQEXXXXXXXXXYYLVTLPELKTPAXXPKPVY

SEQ ID NO: 12676 - protein, 41 aa, Artificial Sequence; identical to SEQ ID NO: 5241
  GFR-binding peptide
  MOD_RES (2), (35), (36): Xaa is C or S
  MOD_RES (13), (14), (15), (16), (17): Xaa is A or G
  MOD_RES (18), (19), (20), (21): Xaa is A or G or is absent

SEQ ID NO: 12677 - protein, 41 aa, Artificial Sequence; identical to SEQ ID NO: 5242
  GFR-binding peptide
  MOD_RES (2), (35), (36): Xaa is C or S
  MOD_RES (13), (14), (15), (16), (17): Xaa is A or G
  MOD_RES (18), (19), (20), (21): Xaa is A or G or is absent

SEQ ID NO: 12678 - protein, 39 aa, Artificial Sequence; identical to SEQ ID NO: 5244
  GFR-binding peptide
  MOD_RES (1), (3), (37), (38): Xaa is C or S
  MOD_RES (15), (16), (17), (18), (19): Xaa is A or G
  MOD_RES (20), (21), (22), (23): Xaa is A or G or is absent

SEQ ID NO: 12679 - protein, 35 aa, Artificial Sequence; identical to SEQ ID NO: 5245
  GFR-binding peptide
  MOD_RES (2), (4): Xaa is C or S

SEQ ID NO: 12680 - protein, 36 aa, Artificial Sequence
  GFR-binding peptide
  MOD_RES (1), (3): Xaa is C or S
  MOD_RES (15), (16), (17), (18), (19): Xaa is A or G
  MOD_RES (20), (21), (22), (23): Xaa is A or G or is absent
XGXSEVVMDRYKKLXXXXXXXXXFYLISIANLRTPV

SEQ ID NO: 12681 - protein, 41 aa, Artificial Sequence
  GFR-binding peptide
  MOD_RES (2), (4), (38), (39): Xaa is C or S
  MOD_RES (16), (17), (18), (19), (20): Xaa is A or G
  MOD_RES (21), (22), (23), (24): Xaa is A or G or is absent
RXGXSEVVMDNSLQEXXXXXXXXXYYLITLPELRTPVXXTP

SEQ ID NO: 12682 - protein, 33 aa, Artificial Sequence
  GFR-binding peptide
  MOD_RES (2), (2): Xaa is C or S
GXSEVVMDRYKKLVVNNASDFYLISIANLRTPV

SEQ ID NO: 12683 - protein, 38 aa, Artificial Sequence
  GFR-binding peptide
  MOD_RES (34), (35): Xaa is C or S
  MOD_RES (12), (13), (14), (15), (16): Xaa is A or G
  MOD_RES (17), (18), (19), (20): Xaa is A or G or is absent
GEVVMDNSLQEXXXXXXXXXYYLMTLPELETPVXXAKP

SEQ ID NO: 12684 - protein, 38 aa, Artificial Sequence; identical to SEQ ID NO: 5250
  GFR-binding peptide
  MOD_RES (1), (3), (35), (36): Xaa is C or S

SEQ ID NO: 12685 - protein, 33 aa, Artificial Sequence
  GFR-binding peptide
  MOD_RES (1), (33): Xaa is C or S
XGEVVMDNSLQEVVKENEDYYVMPLPELETPVX

SEQ ID NO: 12686 - protein, 33 aa, Artificial Sequence; identical to SEQ ID NO: 5255
  GFR-binding peptide
  MOD_RES (33), (33): Xaa is C or S
  MOD_RES (11), (12), (13), (14), (15): Xaa is A or G
  MOD_RES (16), (17), (18), (19): Xaa is A or G or is absent

SEQ ID NO: 12687 - protein, 40 aa, Artificial Sequence; identical to SEQ ID NO: 5256
  GFR-binding peptide
  MOD_RES (1), (3), (35), (36): Xaa is C or S

SEQ ID NO: 12688 - protein, 33 aa, Artificial Sequence
  GFR-binding peptide
  MOD_RES (1), (3): Xaa is C or S
XKXSKVVMNSLQEVKPTRGVYYVIPLPELDQPV

SEQ ID NO: 12689 - protein, 39 aa, Artificial Sequence; identical to SEQ ID NO: 5257
  GFR-binding peptide
  MOD_RES (2), (33), (34): Xaa is C or S

SEQ ID NO: 12690 - protein, 33 aa, Artificial Sequence
  GFR-binding peptide
  MOD_RES (31), (32): Xaa is C or S
SKVVMNSLQEVKPTRGVYYLITLPELDQPVXXP

SEQ ID NO: 12691 - protein, 40 aa, Artificial Sequence; identical to SEQ ID NO: 5258
  GFR-binding peptide
  MOD_RES (2), (36), (37): Xaa is C or S
  MOD_RES (14), (15), (16), (17), (18): Xaa is A or G
  MOD_RES (19), (20), (21), (22): Xaa is A or G or is absent

SEQ ID NO: 12692 - protein, 42 aa, Artificial Sequence
  GFR-binding peptide
  MOD_RES (2), (36), (37): Xaa is C or S
  MOD_RES (14), (15), (16), (17), (18): Xaa is A or G
  MOD_RES (19), (20), (21), (22): Xaa is A or G or is absent
GXSEVVMDQYNKLXXXXXXXXXLYLISIASLRTPVXXTPPTS

SEQ ID NO: 12693 - protein, 33 aa, Artificial Sequence
  GFR-binding peptide
  MOD_RES (31), (32): Xaa is C or S
RVVMNNSLQEIVNSSDDYYVVPLPELKTPAXXP

SEQ ID NO: 12694 - protein, 34 aa, Artificial Sequence
  GFR-binding peptide
  MOD_RES (33), (34): Xaa is C or S
  MOD_RES (11), (12), (13), (14), (15): Xaa is A or G
  MOD_RES (16), (17), (18), (19): Xaa is A or G or is absent
SKVVMNSLQEXXXXXXXXXYYLITLPELDQPVXX

SEQ ID NO: 12695 - protein, 43 aa, Artificial Sequence
  GFR-binding peptide
  MOD_RES (2), (4), (38), (39): Xaa is C or S
  MOD_RES (16), (17), (18), (19), (20): Xaa is A or G
  MOD_RES (21), (22), (23), (24): Xaa is A or G or is absent
RXGXGEVVMDNSLQEXXXXXXXXXYYVMPLPELETPVXXAKPI

SEQ ID NO: 12696 - protein, 39 aa, Artificial Sequence; identical to SEQ ID NO: 5265
  GFR-binding peptide
  MOD_RES (1), (3), (36), (37): Xaa is C or S
  MOD_RES (14), (15), (16), (17), (18): Xaa is A or G
  MOD_RES (19), (20), (21), (22): Xaa is A or G or is absent

SEQ ID NO: 12697 - protein, 33 aa, Artificial Sequence
  GFR-binding peptide
  MOD_RES (2), (2): Xaa is C or S
GXGEVVMDEYQKYVVKENEDIFLMSIPSLETPV

SEQ ID NO: 12698 - protein, 39 aa, Artificial Sequence
  GFR-binding peptide
  MOD_RES (1), (35), (36): Xaa is C or S
  MOD_RES (13), (14), (15), (16), (17): Xaa is A or G
  MOD_RES (18), (19), (20), (21): Xaa is A or G or is absent
XSRVVMNNSLQEXXXXXXXXXYYLVTLPELKTPAXXPKP

SEQ ID NO: 12699 - protein, 38 aa, Artificial Sequence
  GFR-binding peptide
  MOD_RES (2), (4), (38): Xaa is C or S
  MOD_RES (16), (17), (18), (19), (20): Xaa is A or G
  MOD_RES (21), (22), (23), (24): Xaa is A or G or is absent
RXGXGEVVMENSLQEXXXXXXXXXYYLMTLPELETPVX

SEQ ID NO: 12700 - protein, 35 aa, Artificial Sequence; identical to SEQ ID NO: 5267
  GFR-binding peptide
  MOD_RES (2), (4), (35): Xaa is C or S

SEQ ID NO: 12701 - protein, 36 aa, Artificial Sequence
  GFR-binding peptide
  MOD_RES (32), (33): Xaa is C or S
SRVVMNNSLQEIVNSSDDYYLVTLPELKTPAXXPKP

SEQ ID NO: 12702 - protein, 40 aa, Artificial Sequence; identical to SEQ ID NO: 5268
  GFR-binding peptide
  MOD_RES (34), (35): Xaa is C or S
  MOD_RES (12), (13), (14), (15), (16): Xaa is A or G
  MOD_RES (17), (18), (19), (20): Xaa is A or G or is absent

SEQ ID NO: 12703 - protein, 40 aa, Artificial Sequence
  GFR-binding peptide
  MOD_RES (2), (34), (35): Xaa is C or S
GXSEVVMDEYQKYVVNNASDIFLISIPSLRTPVXXTPPTS

SEQ ID NO: 12704 - protein, 35 aa, Artificial Sequence
  GFR-binding peptide
  MOD_RES (1), (33): Xaa is C or S
XSRVVMNNSLQEIVNSSDDYYLVTLPELKTPAXTP

SEQ ID NO: 12705 - protein, 39 aa, Artificial Sequence; identical to SEQ ID NO: 5274
  GFR-binding peptide
  MOD_RES (2), (4), (38), (39): Xaa is C or S
  MOD_RES (16), (17), (18), (19), (20): Xaa is A or G
  MOD_RES (21), (22), (23), (24): Xaa is A or G or is absent

SEQ ID NO: 12706 - protein, 42 aa, Artificial Sequence
  GFR-binding peptide
  MOD_RES (2), (4), (36), (37): Xaa is C or S
RXGXGEVVMENSLQEVVKDYEDYYLMTLPELETPVXXAKPIS

SEQ ID NO: 12707 - protein, 41 aa, Artificial Sequence
  GFR-binding peptide
  MOD_RES (1), (3), (35), (36): Xaa is C or S
XGXSEVVMDEYQKYVVNNASDIFLISIPSLRTPVXXTPPTS

SEQ ID NO: 12708 - protein, 38 aa, Artificial Sequence
  GFR-binding peptide
  MOD_RES (32), (33): Xaa is C or S
SRVVMNEYQKYIVNSSDDIFLVSIPSLKTPAXXPKPVY

SEQ ID NO: 12709 - protein, 38 aa, Artificial Sequence
  GFR-binding peptide
  MOD_RES (2), (4), (38): Xaa is C or S
  MOD_RES (16), (17), (18), (19), (20): Xaa is A or G
  MOD_RES (21), (22), (23), (24): Xaa is A or G or is absent
RXGXGEVVMDEYQKYXXXXXXXXXIFLMSIPSLETPVX

SEQ ID NO: 12710 - protein, 32 aa, Artificial Sequence
  GFR-binding peptide
  MOD_RES (11), (12), (13), (14), (15): Xaa is A or G
  MOD_RES (16), (17), (18), (19): Xaa is A or G or is absent
RVVMNEYQKYXXXXXXXXXIFLVSIPSLQTPA

SEQ ID NO: 12711 - protein, 38 aa, Artificial Sequence; identical to SEQ ID NO: 5276
  GFR-binding peptide
  MOD_RES (32), (33): Xaa is C or S

SEQ ID NO: 12712 - protein, 36 aa, Artificial Sequence; identical to SEQ ID NO: 5282
  GFR-binding peptide
  MOD_RES (34), (35): Xaa is C or S
  MOD_RES (12), (13), (14), (15), (16): Xaa is A or G
  MOD_RES (17), (18), (19), (20): Xaa is A or G or is absent

SEQ ID NO: 12713 - protein, 35 aa, Artificial Sequence; identical to SEQ ID NO: 5283
  GFR-binding peptide
  MOD_RES (1), (33), (34): Xaa is C or S

SEQ ID NO: 12714 - protein, 39 aa, Artificial Sequence
  GFR-binding peptide
  MOD_RES (2), (4), (36), (37): Xaa is C or S
RXGXGEVVMDNSLQEVVKENEDYYVMPLPELETPVXXAK

SEQ ID NO: 12715 - protein, 34 aa, Artificial Sequence
  GFR-binding peptide
  MOD_RES (1), (33), (34): Xaa is C or S
XSEVVMDNSLQEVVNNASDYYLITLPELRTPVXX

SEQ ID NO: 12716 - protein, 42 aa, Artificial Sequence; identical to SEQ ID NO: 5288
  GFR-binding peptide
  MOD_RES (2), (4), (36), (37): Xaa is C or S

SEQ ID NO: 12717 - protein, 35 aa, Artificial Sequence; identical to SEQ ID NO: 5290
  GFR-binding peptide
  MOD_RES (1), (3), (35): Xaa is C or S

SEQ ID NO: 12718 - protein, 40 aa, Artificial Sequence; identical to SEQ ID NO: 5292
  GFR-binding peptide
  MOD_RES (2), (4), (37), (38): Xaa is C or S
  MOD_RES (15), (16), (17), (18), (19): Xaa is A or G
  MOD_RES (20), (21), (22), (23): Xaa is A or G or is absent

SEQ ID NO: 12719 - protein, 39 aa, Artificial Sequence; identical to SEQ ID NO: 5293
  GFR-binding peptide
  MOD_RES (2), (33), (34): Xaa is C or S

SEQ ID NO: 12720 - protein, 35 aa, Artificial Sequence
  GFR-binding peptide
  MOD_RES (33), (34): Xaa is C or S
  MOD_RES (11), (12), (13), (14), (15): Xaa is A or G
  MOD_RES (16), (17), (18), (19): Xaa is A or G or is absent
SRVIMEYQKYXXXXXXXXXIFLISIPSLAQPVXXP

SEQ ID NO: 12721 - protein, 38 aa, Artificial Sequence
  GFR-binding peptide
  MOD_RES (1), (32), (33): Xaa is C or S
XSKVVMNSLQEVKPTRGVYYVIPLPELDQPVXXPSASA

SEQ ID NO: 12722 - protein, 34 aa, Artificial Sequence; identical to SEQ ID NO: 5297
  GFR-binding peptide
  MOD_RES (1), (3): Xaa is C or S

SEQ ID NO: 12723 - protein, 35 aa, Artificial Sequence; identical to SEQ ID NO: 5301
  GFR-binding peptide
  MOD_RES (2), (4): Xaa is C or S

SEQ ID NO: 12724 - protein, 43 aa, Artificial Sequence
  GFR-binding peptide
  MOD_RES (1), (3), (37), (38): Xaa is C or S
  MOD_RES (15), (16), (17), (18), (19): Xaa is A or G
  MOD_RES (20), (21), (22), (23): Xaa is A or G or is absent
XGXSEVVMDEYQKYXXXXXXXXXIFLISIPSLRTPVXXTPPTS

SEQ ID NO: 12725 - protein, 36 aa, Artificial Sequence; identical to SEQ ID NO: 5304
  GFR-binding peptide
  MOD_RES (31), (32): Xaa is C or S

SEQ ID NO: 12726 - protein, 40 aa, Artificial Sequence
  GFR-binding peptide
  MOD_RES (2), (4), (36): Xaa is C or S
HXGXSRVVMNNSLQEIVNSSDDYYLVTLPELKTPAXTPKT

SEQ ID NO: 12727 - protein, 41 aa, Artificial Sequence
  GFR-binding peptide
  MOD_RES (2), (4), (37), (38): Xaa is C or S
  MOD_RES (15), (16), (17), (18), (19): Xaa is A or G
  MOD_RES (20), (21), (22), (23): Xaa is A or G or is absent
SXKXSKVVMNSLQEXXXXXXXXXYYLITLPELDQPVXXPSA

SEQ ID NO: 12728 - protein, 34 aa, Artificial Sequence
  GFR-binding peptide
  MOD_RES (2), (4): Xaa is C or S
SXKXSKVVMNSLQEVKPTRGVYYLITLPELDQPV

SEQ ID NO: 12729 - protein, 30 aa, Artificial Sequence
  GFR-binding peptide
RVVMNEYQKYIVNSSDDIFLVSIPSLQTPA

SEQ ID NO: 12730 - protein, 41 aa, Artificial Sequence; identical to SEQ ID NO: 5305
  GFR-binding peptide
  MOD_RES (2), (4), (37), (38): Xaa is C or S
  MOD_RES (15), (16), (17), (18), (19): Xaa is A or G
  MOD_RES (20), (21), (22), (23): Xaa is A or G or is absent

SEQ ID NO: 12731 - protein, 37 aa, Artificial Sequence
  GFR-binding peptide
  MOD_RES (31), (32): Xaa is C or S
RVVMNEYQKYIVNSSDDIFLVSIPSLQTPAXXPKPVT

SEQ ID NO: 12732 - protein, 39 aa, Artificial Sequence
  GFR-binding peptide
  MOD_RES (2), (36): Xaa is C or S
  MOD_RES (14), (15), (16), (17), (18): Xaa is A or G
  MOD_RES (19), (20), (21), (22): Xaa is A or G or is absent
GXSRVVMNEYQKYXXXXXXXXXIFLVSIPSLKTPAXTPK

SEQ ID NO: 12733 - protein, 41 aa, Artificial Sequence
  GFR-binding peptide
  MOD_RES (1), (3), (35), (36): Xaa is C or S
XGXSRVVMNNSLQEIVNSSDDYYLVTLPELKTPAXXPKPVY

SEQ ID NO: 12734 - protein, 34 aa, Artificial Sequence
  GFR-binding peptide
  MOD_RES (2), (34): Xaa is C or S
GXGEVVMDEYQKYVVKENEDIFLMSIPSLETPVX

SEQ ID NO: 12735 - protein, 36 aa, Artificial Sequence
  GFR-binding peptide
  MOD_RES (33), (34): Xaa is C or S
  MOD_RES (11), (12), (13), (14), (15): Xaa is A or G
  MOD_RES (16), (17), (18), (19): Xaa is A or G or is absent
SRVIMEYQKYXXXXXXXXXIFLISIPSLAQPVXXPA

SEQ ID NO: 12736 - protein, 42 aa, Artificial Sequence; identical to SEQ ID NO: 5312
  GFR-binding peptide
  MOD_RES (2), (36), (37): Xaa is C or S
  MOD_RES (14), (15), (16), (17), (18): Xaa is A or G
  MOD_RES (19), (20), (21), (22): Xaa is A or G or is absent

SEQ ID NO: 12737 - protein, 38 aa, Artificial Sequence; identical to SEQ ID NO: 5313
  GFR-binding peptide
  MOD_RES (1), (33), (34): Xaa is C or S

SEQ ID NO: 12738 - protein, 41 aa, Artificial Sequence
  GFR-binding peptide
  MOD_RES (1), (3), (35), (36): Xaa is C or S
XGXSRVVMNEYQKYIVNSSDDIFLVSIPSLKTPAXXPKPVY

SEQ ID NO: 12739 - protein, 32 aa, Artificial Sequence; identical to SEQ ID NO: 5314
  GFR-binding peptide
  MOD_RES (2), (2): Xaa is C or S

SEQ ID NO: 12740 - protein, 38 aa, Artificial Sequence
  GFR-binding peptide
  MOD_RES (1), (3), (36), (37): Xaa is C or S
  MOD_RES (14), (15), (16), (17), (18): Xaa is A or G
  MOD_RES (19), (20), (21), (22): Xaa is A or G or is absent
XKXSRVIMNSLQEXXXXXXXXXYYLITLPELAQPVXXP

SEQ ID NO: 12741 - protein, 37 aa, Artificial Sequence
  GFR-binding peptide
  MOD_RES (2), (4), (37): Xaa is C or S
  MOD_RES (15), (16), (17), (18), (19): Xaa is A or G
  MOD_RES (20), (21), (22), (23): Xaa is A or G or is absent
SXKXSRVIMNSLQEXXXXXXXXXYYVIPLPELAQPVX

SEQ ID NO: 12742 - protein, 42 aa, Artificial Sequence
  GFR-binding peptide
  MOD_RES (2), (4), (38), (39): Xaa is C or S
  MOD_RES (16), (17), (18), (19), (20): Xaa is A or G
  MOD_RES (21), (22), (23), (24): Xaa is A or G or is absent
RXGXGEVVMEEYQKYXXXXXXXXXIFLMSIPSLETPVXXAKP

SEQ ID NO: 12743 - protein, 36 aa, Artificial Sequence
  GFR-binding peptide
  MOD_RES (1), (3): Xaa is C or S
  MOD_RES (15), (16), (17), (18), (19): Xaa is A or G
  MOD_RES (20), (21), (22), (23): Xaa is A or G or is absent
XGXSRVVMNEYQKYXXXXXXXXXIFLVSIPSLKTPA

SEQ ID NO: 12744 - protein, 36 aa, Artificial Sequence
  GFR-binding peptide
  MOD_RES (33), (34): Xaa is C or S
  MOD_RES (11), (12), (13), (14), (15): Xaa is A or G
  MOD_RES (16), (17), (18), (19): Xaa is A or G or is absent
EVVMDRYKKLXXXXXXXXXFYLISIANLRTPVXXTP

SEQ ID NO: 12745 - protein, 33 aa, Artificial Sequence
  GFR-binding peptide
  MOD_RES (31), (32): Xaa is C or S
SRVIMEYQKYVKPKRGVIFLISIPSLAQPVXXP

SEQ ID NO: 12746 - protein, 30 aa, Artificial Sequence
  GFR-binding peptide
EVVMDRYKKLVVNNASDFYLISIANLRTPV

SEQ ID NO: 12747 - protein, 39 aa, Artificial Sequence
  GFR-binding peptide
  MOD_RES (1), (3), (34), (35): Xaa is C or S
XKXSKVIMNSLQEIKPTKGIYYVIPLPELDQSVXXPSAS

SEQ ID NO: 12748 - protein, 35 aa, Artificial Sequence; identical to SEQ ID NO: 5320
  GFR-binding peptide
  MOD_RES (33), (33): Xaa is C or S
  MOD_RES (11), (12), (13), (14), (15): Xaa is A or G
  MOD_RES (16), (17), (18), (19): Xaa is A or G or is absent

SEQ ID NO: 12749 - protein, 39 aa, Artificial Sequence
  GFR-binding peptide
  MOD_RES (2), (4), (37), (38): Xaa is C or S
  MOD_RES (15), (16), (17), (18), (19): Xaa is A or G
  MOD_RES (20), (21), (22), (23): Xaa is A or G or is absent
SXKXSRVIMNSLQEXXXXXXXXXYYVIPLPELAQPVXXP

SEQ ID NO: 12750 - protein, 41 aa, Artificial Sequence; identical to SEQ ID NO: 5324
  GFR-binding peptide
  MOD_RES (2), (36), (37): Xaa is C or S
  MOD_RES (14), (15), (16), (17), (18): Xaa is A or G
  MOD_RES (19), (20), (21), (22): Xaa is A or G or is absent

SEQ ID NO: 12751 - protein, 38 aa, Artificial Sequence
  GFR-binding peptide
  MOD_RES (1), (35), (36): Xaa is C or S
  MOD_RES (13), (14), (15), (16), (17): Xaa is A or G
  MOD_RES (18), (19), (20), (21): Xaa is A or G or is absent
XARVVMNNSLQEXXXXXXXXXYYLVTLPELQTPAXXPK

SEQ ID NO: 12752 - protein, 38 aa, Artificial Sequence
  GFR-binding peptide
  MOD_RES (1), (35): Xaa is C or S
  MOD_RES (13), (14), (15), (16), (17): Xaa is A or G
  MOD_RES (18), (19), (20), (21): Xaa is A or G or is absent
XSRVVMNEYQKYXXXXXXXXXIFLVSIPSLKTPAXTPK

SEQ ID NO: 12753 - protein, 35 aa, Artificial Sequence
  GFR-binding peptide
  MOD_RES (1), (3), (34), (35): Xaa is C or S
XKXSRVIMNSLQEVKPKRGVYYVIPLPELAQPVXX

SEQ ID NO: 12754 - protein, 35 aa, Artificial Sequence; identical to SEQ ID NO: 5328
  GFR-binding peptide
  MOD_RES (2), (35): Xaa is C or S
  MOD_RES (13), (14), (15), (16), (17): Xaa is A or G
  MOD_RES (18), (19), (20), (21): Xaa is A or G or is absent

SEQ ID NO: 12755 - protein, 36 aa, Artificial Sequence
  GFR-binding peptide
  MOD_RES (2), (36): Xaa is C or S
  MOD_RES (14), (15), (16), (17), (18): Xaa is A or G
  MOD_RES (19), (20), (21), (22): Xaa is A or G or is absent
GXGEVVMDEYQKYXXXXXXXXXIFLMSIPSLETPVX

SEQ ID NO: 12756 - protein, 33 aa, Artificial Sequence; identical to SEQ ID NO: 5330
  GFR-binding peptide
  MOD_RES (1), (33): Xaa is C or S

SEQ ID NO: 12757 - protein, 41 aa, Artificial Sequence
  GFR-binding peptide
  MOD_RES (1), (3), (35), (36): Xaa is C or S
XGXSEVVMDNSLQEVVNNASDYYLITLPELRTPVXXTPPTS

SEQ ID NO: 12758 - protein, 34 aa, Artificial Sequence
  GFR-binding peptide
  MOD_RES (2), (2): Xaa is C or S
  MOD_RES (13), (14), (15), (16), (17): Xaa is A or G
  MOD_RES (18), (19), (20), (21): Xaa is A or G or is absent
KXSRVIMNSLQEXXXXXXXXXYYLITLPELAQPV

SEQ ID NO: 12759 - protein, 36 aa, Artificial Sequence; identical to SEQ ID NO: 5334
  GFR-binding peptide
  MOD_RES (34), (35): Xaa is C or S
  MOD_RES (12), (13), (14), (15), (16): Xaa is A or G
  MOD_RES (17), (18), (19), (20): Xaa is A or G or is absent

SEQ ID NO: 12760 - protein, 37 aa, Artificial Sequence
  GFR-binding peptide
  MOD_RES (31), (32): Xaa is C or S
EVVMDNSLQEVVKENEDYYVMPLPELETPVXXAKPIK

SEQ ID NO: 12761 - protein, 33 aa, Artificial Sequence
  GFR-binding peptide
  MOD_RES (32), (33): Xaa is C or S
GEVVMDNSLQEVVKENEDYYLMTLPELETPVXX

SEQ ID NO: 12762 - protein, 38 aa, Artificial Sequence
  GFR-binding peptide
  MOD_RES (34), (34): Xaa is C or S
  MOD_RES (12), (13), (14), (15), (16): Xaa is A or G
  MOD_RES (17), (18), (19), (20): Xaa is A or G or is absent
SRVVMNNSLQEXXXXXXXXXYYLVTLPELKTPAXTPKT

SEQ ID NO: 12763 - protein, 31 aa, Artificial Sequence; identical to SEQ ID NO: 5336
  GFR-binding peptide
  MOD_RES (31), (31): Xaa is C or S

SEQ ID NO: 12764 - protein, 35 aa, Artificial Sequence
  GFR-binding peptide
  MOD_RES (1), (3), (34), (35): Xaa is C or S
XKXSKVVMEYQKYVKPTRGVIFLISIPSLDQPVXX

SEQ ID NO: 12765 - protein, 36 aa, Artificial Sequence
  GFR-binding peptide
  MOD_RES (2), (36): Xaa is C or S
  MOD_RES (14), (15), (16), (17), (18): Xaa is A or G
  MOD_RES (19), (20), (21), (22): Xaa is A or G or is absent
GXSRVVMNEYQKYXXXXXXXXXIFLVSIPSLKTPAX

SEQ ID NO: 12766 - protein, 38 aa, Artificial Sequence; identical to SEQ ID NO: 5338
  GFR-binding peptide
  MOD_RES (1), (3), (35), (36): Xaa is C or S

SEQ ID NO: 12767 - protein, 35 aa, Artificial Sequence; identical to SEQ ID NO: 5339
  GFR-binding peptide
  MOD_RES (2), (34), (35): Xaa is C or S

SEQ ID NO: 12768 - protein, 42 aa, Artificial Sequence; identical to SEQ ID NO: 5340
  GFR-binding peptide
  MOD_RES (1), (3), (37), (38): Xaa is C or S
  MOD_RES (15), (16), (17), (18), (19): Xaa is A or G
  MOD_RES (20), (21), (22), (23): Xaa is A or G or is absent

SEQ ID NO: 12769 - protein, 39 aa, Artificial Sequence; identical to SEQ ID NO: 5343
  GFR-binding peptide
  MOD_RES (2), (4), (38), (39): Xaa is C or S
  MOD_RES (16), (17), (18), (19), (20): Xaa is A or G
  MOD_RES (21), (22), (23), (24): Xaa is A or G or is absent

SEQ ID NO: 12770 - protein, 42 aa, Artificial Sequence
  GFR-binding peptide
  MOD_RES (2), (4), (38), (39): Xaa is C or S
  MOD_RES (16), (17), (18), (19), (20): Xaa is A or G
  MOD_RES (21), (22), (23), (24): Xaa is A or G or is absent
RXGXSEVVMDRYKKLXXXXXXXXXFYLISIANLRTPVXXTPP

SEQ ID NO: 12771 - protein, 41 aa, Artificial Sequence
  GFR-binding peptide
  MOD_RES (1), (35), (36): Xaa is C or S
  MOD_RES (13), (14), (15), (16), (17): Xaa is A or G
  MOD_RES (18), (19), (20), (21): Xaa is A or G or is absent
XSRVVMNNSLQEXXXXXXXXXYYLVTLPELKTPAXXPKPVY

SEQ ID NO: 12772 - protein, 35 aa, Artificial Sequence
  GFR-binding peptide
  MOD_RES (2), (33), (34): Xaa is C or S
KXSRVIMEYQKYVKPKRGVIFLISIPSLAQPVXXP

SEQ ID NO: 12773 - protein, 31 aa, Artificial Sequence
  GFR-binding peptide
SEVVMDRYKKLVVNNASDFYLISIANLRTPV

SEQ ID NO: 12774 - protein, 36 aa, Artificial Sequence
  GFR-binding peptide
  MOD_RES (2), (4), (35), (36): Xaa is C or S
SXKXSKVVMNSLQEVKPTRGVYYVIPLPELDQPVXX

SEQ ID NO: 12775 - protein, 32 aa, Artificial Sequence; identical to SEQ ID NO: 5347
  GFR-binding peptide
  MOD_RES (31), (32): Xaa is C or S

SEQ ID NO: 12776 - protein, 34 aa, Artificial Sequence
  GFR-binding peptide
  MOD_RES (1), (34): Xaa is C or S
  MOD_RES (12), (13), (14), (15), (16): Xaa is A or G
  MOD_RES (17), (18), (19), (20): Xaa is A or G or is absent
XSKVVMEYQKYXXXXXXXXXIFLISIPSLDQPVX

SEQ ID NO: 12777 - protein, 44 aa, Artificial Sequence; identical to SEQ ID NO: 5349
  GFR-binding peptide
  MOD_RES (2), (4), (38), (39): Xaa is C or S
  MOD_RES (16), (17), (18), (19), (20): Xaa is A or G
  MOD_RES (21), (22), (23), (24): Xaa is A or G or is absent

SEQ ID NO: 12778 - protein, 34 aa, Artificial Sequence; identical to SEQ ID NO: 5350
  GFR-binding peptide
  MOD_RES (1), (3), (34): Xaa is C or S

SEQ ID NO: 12779 - protein, 33 aa, Artificial Sequence
  GFR-binding peptide
  MOD_RES (1), (33): Xaa is C or S
XARVVMNNSLQEIVNSSDDYYLVTLPELQTPAX

SEQ ID NO: 12780 - protein, 39 aa, Artificial Sequence
  GFR-binding peptide
  MOD_RES (1), (33): Xaa is C or S
XSRVVMNNSLQEIVNSSDDYYVVPLPELKTPAXTPKTVH

SEQ ID NO: 12781 - protein, 39 aa, Artificial Sequence; identical to SEQ ID NO: 5352
  GFR-binding peptide
  MOD_RES (33), (33): Xaa is C or S
  MOD_RES (11), (12), (13), (14), (15): Xaa is A or G
  MOD_RES (16), (17), (18), (19): Xaa is A or G or is absent

SEQ ID NO: 12782 - protein, 39 aa, Artificial Sequence
  GFR-binding peptide
  MOD_RES (1), (35), (36): Xaa is C or S
  MOD_RES (13), (14), (15), (16), (17): Xaa is A or G
  MOD_RES (18), (19), (20), (21): Xaa is A or G or is absent
XARVVMNEYQKYXXXXXXXXXIFLVSIPSLQTPAXXPKP

SEQ ID NO: 12783 - protein, 37 aa, Artificial Sequence; identical to SEQ ID NO: 5354
  GFR-binding peptide
  MOD_RES (31), (32): Xaa is C or S

SEQ ID NO: 12784 - protein, 40 aa, Artificial Sequence; identical to SEQ ID NO: 5355
  GFR-binding peptide
  MOD_RES (1), (35), (36): Xaa is C or S
  MOD_RES (13), (14), (15), (16), (17): Xaa is A or G
  MOD_RES (18), (19), (20), (21): Xaa is A or G or is absent

SEQ ID NO: 12785 - protein, 41 aa, Artificial Sequence; identical to SEQ ID NO: 5357
  GFR-binding peptide
  MOD_RES (1), (3), (35), (36): Xaa is C or S

SEQ ID NO: 12786 - protein, 39 aa, Artificial Sequence
  GFR-binding peptide
  MOD_RES (34), (35): Xaa is C or S
  MOD_RES (12), (13), (14), (15), (16): Xaa is A or G
  MOD_RES (17), (18), (19), (20): Xaa is A or G or is absent
GEVVMDEYQKYXXXXXXXXXIFLMSIPSLETPVXXAKPI

SEQ ID NO: 12787 - protein, 36 aa, Artificial Sequence
  GFR-binding peptide
  MOD_RES (31), (32): Xaa is C or S
RVVMNNSLQEIVNSSDDYYLVTLPELKTPAXXPKPV

SEQ ID NO: 12788 - protein, 37 aa, Artificial Sequence
  GFR-binding peptide
  MOD_RES (32), (33): Xaa is C or S
SEVVMDNSLQEVVNNASDYYLITLPELRTPVXXTPPT

SEQ ID NO: 12789 - protein, 39 aa, Artificial Sequence
  GFR-binding peptide
  MOD_RES (34), (35): Xaa is C or S
  MOD_RES (12), (13), (14), (15), (16): Xaa is A or G
  MOD_RES (17), (18), (19), (20): Xaa is A or G or is absent
SEVVMDQYNKLXXXXXXXXXLYLISIASLRTPVXXTPPT

SEQ ID NO: 12790 - protein, 38 aa, Artificial Sequence
  GFR-binding peptide
  MOD_RES (32), (33): Xaa is C or S
GEVVMENSLQEVVKDYEDYYLMTLPELETPVXXAKPIS

SEQ ID NO: 12791 - protein, 37 aa, Artificial Sequence
  GFR-binding peptide
  MOD_RES (2), (34), (35): Xaa is C or S
GXSEVVMDNSLQEVVNNASDYYVIPLPELRTPVXXTP

SEQ ID NO: 12792 - protein, 37 aa, Artificial Sequence
  GFR-binding peptide
  MOD_RES (1), (33), (34): Xaa is C or S
XSRVVMNNSLQEIVNSSDDYYLVTLPELKTPAXXPKP

SEQ ID NO: 12793 - protein, 34 aa, Artificial Sequence; identical to SEQ ID NO: 5360
  GFR-binding peptide
  MOD_RES (1), (3): Xaa is C or S

SEQ ID NO: 12794 - protein, 40 aa, Artificial Sequence
  GFR-binding peptide
  MOD_RES (2), (4), (35), (36): Xaa is C or S
SXKXSKVVMNSLQEVKPTRGVYYLITLPELDQPVXXPSAS

SEQ ID NO: 12795 - protein, 43 aa, Artificial Sequence
  GFR-binding peptide
  MOD_RES (1), (3), (37), (38): Xaa is C or S
  MOD_RES (15), (16), (17), (18), (19): Xaa is A or G
  MOD_RES (20), (21), (22), (23): Xaa is A or G or is absent
XGXGEVVMEEYQKYXXXXXXXXXIFLMSIPSLETPVXXAKPIS

SEQ ID NO: 12796 - protein, 37 aa, Artificial Sequence
  GFR-binding peptide
  MOD_RES (1), (3), (34), (35): Xaa is C or S
XKXSKVIMNSLQEIKPTKGIYYVIPLPELDQSVXXPS

SEQ ID NO: 12797 - protein, 38 aa, Artificial Sequence
  GFR-binding peptide
  MOD_RES (2), (4), (37), (38): Xaa is C or S
  MOD_RES (15), (16), (17), (18), (19): Xaa is A or G
  MOD_RES (20), (21), (22), (23): Xaa is A or G or is absent
SXKXSKVVMNSLQEXXXXXXXXXYYLITLPELDQPVXX

SEQ ID NO: 12798 - protein, 41 aa, Artificial Sequence
  GFR-binding peptide
  MOD_RES (2), (4), (38), (39): Xaa is C or S
  MOD_RES (16), (17), (18), (19), (20): Xaa is A or G
  MOD_RES (21), (22), (23), (24): Xaa is A or G or is absent
HXGXSRVVMNNSLQEXXXXXXXXXYYVVPLPELKTPAXXPK

SEQ ID NO: 12799 - protein, 33 aa, Artificial Sequence
  GFR-binding peptide
  MOD_RES (12), (13), (14), (15), (16): Xaa is A or G
  MOD_RES (17), (18), (19), (20): Xaa is A or G or is absent
GEVVMENSLQEXXXXXXXXXYYVMPLPELETPV

SEQ ID NO: 12800 - protein, 44 aa, Artificial Sequence
  GFR-binding peptide
  MOD_RES (2), (4), (38), (39): Xaa is C or S
  MOD_RES (16), (17), (18), (19), (20): Xaa is A or G
  MOD_RES (21), (22), (23), (24): Xaa is A or G or is absent
RXGXSEVVMDNSLQEXXXXXXXXXYYVIPLPELRTPVXXTPPTS

SEQ ID NO: 12801 - protein, 39 aa, Artificial Sequence
  GFR-binding peptide
  MOD_RES (34), (35): Xaa is C or S
  MOD_RES (12), (13), (14), (15), (16): Xaa is A or G
  MOD_RES (17), (18), (19), (20): Xaa is A or G or is absent
SEVVMDRYKKLXXXXXXXXXFYLISIANLRTPVXXTPPT

SEQ ID NO: 12802 - protein, 33 aa, Artificial Sequence; identical to SEQ ID NO: 5368
  GFR-binding peptide
  MOD_RES (31), (32): Xaa is C or S

SEQ ID NO: 12803 - protein, 39 aa, Artificial Sequence
  GFR-binding peptide
  MOD_RES (2), (4), (36): Xaa is C or S
HXGXSRVVMNNSLQEIVNSSDDYYVVPLPELKTPAXTPK

SEQ ID NO: 12804 - protein, 36 aa, Artificial Sequence; identical to SEQ ID NO: 5374
  GFR-binding peptide
  MOD_RES (1), (3), (35): Xaa is C or S

SEQ ID NO: 12805 - protein, 41 aa, Artificial Sequence
  GFR-binding peptide
  MOD_RES (2), (4), (37), (38): Xaa is C or S
  MOD_RES (15), (16), (17), (18), (19): Xaa is A or G
  MOD_RES (20), (21), (22), (23): Xaa is A or G or is absent
SXKXSKVVMEYQKYXXXXXXXXXIFLISIPSLDQPVXXPSA

SEQ ID NO: 12806 - protein, 36 aa, Artificial Sequence
  GFR-binding peptide
  MOD_RES (31), (32): Xaa is C or S
RVVMNNSLQEIVNSSDDYYVVPLPELQTPAXXPKPV

SEQ ID NO: 12807 - protein, 35 aa, Artificial Sequence
  GFR-binding peptide
  MOD_RES (34), (35): Xaa is C or S
  MOD_RES (12), (13), (14), (15), (16): Xaa is A or G
  MOD_RES (17), (18), (19), (20): Xaa is A or G or is absent
SRVVMNNSLQEXXXXXXXXXYYLVTLPELKTPAXX

SEQ ID NO: 12808 - protein, 36 aa, Artificial Sequence; identical to SEQ ID NO: 5376
  GFR-binding peptide
  MOD_RES (1), (3), (36): Xaa is C or S
  MOD_RES (14), (15), (16), (17), (18): Xaa is A or G
  MOD_RES (19), (20), (21), (22): Xaa is A or G or is absent

SEQ ID NO: 12809 - protein, 39 aa, Artificial Sequence
  GFR-binding peptide
  MOD_RES (2), (4), (35), (36): Xaa is C or S
SXKXSKVIMEYQKYIKPTKGIIFLISIPSLDQSVXXPSA

SEQ ID NO: 12810 - protein, 36 aa, Artificial Sequence; identical to SEQ ID NO: 5378
  GFR-binding peptide
  MOD_RES (2), (4): Xaa is C or S
  MOD_RES (15), (16), (17), (18), (19): Xaa is A or G
  MOD_RES (20), (21), (22), (23): Xaa is A or G or is absent

SEQ ID NO: 12811 - protein, 35 aa, Artificial Sequence
  GFR-binding peptide
  MOD_RES (34), (35): Xaa is C or S
  MOD_RES (12), (13), (14), (15), (16): Xaa is A or G
  MOD_RES (17), (18), (19), (20): Xaa is A or G or is absent
SEVVMDQYNKLXXXXXXXXXLYLISIASLRTPVXX

SEQ ID NO: 12812 - protein, 39 aa, Artificial Sequence; identical to SEQ ID NO: 5379
  GFR-binding peptide
  MOD_RES (1), (3), (36), (37): Xaa is C or S
  MOD_RES (14), (15), (16), (17), (18): Xaa is A or G
  MOD_RES (19), (20), (21), (22): Xaa is A or G or is absent

SEQ ID NO: 12813 - protein, 40 aa, Artificial Sequence
  GFR-binding peptide
  MOD_RES (1), (3), (37), (38): Xaa is C or S
  MOD_RES (15), (16), (17), (18), (19): Xaa is A or G
  MOD_RES (20), (21), (22), (23): Xaa is A or G or is absent
XGXSRVVMNNSLQEXXXXXXXXXYYVVPLPELKTPAXXPK

SEQ ID NO: 12814 - protein, 32 aa, Artificial Sequence
  GFR-binding peptide
  MOD_RES (31), (32): Xaa is C or S
EVVMENSLQEVVKDYEDYYLMTLPELETPVXX

SEQ ID NO: 12815 - protein, 39 aa, Artificial Sequence
  GFR-binding peptide
  MOD_RES (2), (4), (38), (39): Xaa is C or S
  MOD_RES (16), (17), (18), (19), (20): Xaa is A or G
  MOD_RES (21), (22), (23), (24): Xaa is A or G or is absent
RXGXGEVVMEEYQKYXXXXXXXXXIFLMSIPSLETPVXX

SEQ ID NO: 12816 - protein, 39 aa, Artificial Sequence; identical to SEQ ID NO: 5381
  GFR-binding peptide
  MOD_RES (1), (3), (37): Xaa is C or S
  MOD_RES (15), (16), (17), (18), (19): Xaa is A or G
  MOD_RES (20), (21), (22), (23): Xaa is A or G or is absent

SEQ ID NO: 12817 - protein, 39 aa, Artificial Sequence
  GFR-binding peptide
  MOD_RES (2), (4), (36), (37): Xaa is C or S
RXGXGEVVMENSLQEVVKDYEDYYVMPLPELETPVXXAK

SEQ ID NO: 12818 - protein, 41 aa, Artificial Sequence; identical to SEQ ID NO: 5382
  GFR-binding peptide
  MOD_RES (2), (4), (36): Xaa is C or S

SEQ ID NO: 12819 - protein, 37 aa, Artificial Sequence; identical to SEQ ID NO: 5383
  GFR-binding peptide
  MOD_RES (2), (34), (35): Xaa is C or S

SEQ ID NO: 12820 - protein, 35 aa, Artificial Sequence
  GFR-binding peptide
  MOD_RES (2), (4): Xaa is C or S
RXGXGEVVMENSLQEVVKDYEDYYLMTLPELETPV

SEQ ID NO: 12821 - protein, 39 aa, Artificial Sequence; identical to SEQ ID NO: 5384
  GFR-binding peptide
  MOD_RES (2), (34), (35): Xaa is C or S

SEQ ID NO: 12822 - protein, 38 aa, Artificial Sequence
  GFR-binding peptide
  MOD_RES (1), (34), (35): Xaa is C or S
  MOD_RES (12), (13), (14), (15), (16): Xaa is A or G
  MOD_RES (17), (18), (19), (20): Xaa is A or G or is absent
XSRVIMNSLQEXXXXXXXXXYYLITLPELAQPVXXPAA

SEQ ID NO: 12823 - protein, 36 aa, Artificial Sequence
  GFR-binding peptide
  MOD_RES (2), (36): Xaa is C or S
  MOD_RES (14), (15), (16), (17), (18): Xaa is A or G
  MOD_RES (19), (20), (21), (22): Xaa is A or G or is absent
GXGEVVMDNSLQEXXXXXXXXXYYLMTLPELETPVX

SEQ ID NO: 12824 - protein, 40 aa, Artificial Sequence; identical to SEQ ID NO: 5390
  GFR-binding peptide
  MOD_RES (2), (4), (35), (36): Xaa is C or S

SEQ ID NO: 12825 - protein, 43 aa, Artificial Sequence; identical to SEQ ID NO: 5393
  GFR-binding peptide
  MOD_RES (2), (4), (38), (39): Xaa is C or S
  MOD_RES (16), (17), (18), (19), (20): Xaa is A or G
  MOD_RES (21), (22), (23), (24): Xaa is A or G or is absent

SEQ ID NO: 12826 - protein, 40 aa, Artificial Sequence; identical to SEQ ID NO: 5394
  GFR-binding peptide
  MOD_RES (34), (35): Xaa is C or S
  MOD_RES (12), (13), (14), (15), (16): Xaa is A or G
  MOD_RES (17), (18), (19), (20): Xaa is A or G or is absent

SEQ ID NO: 12827 - protein, 35 aa, Artificial Sequence; identical to SEQ ID NO: 5395
  GFR-binding peptide
  MOD_RES (31), (32): Xaa is C or S

SEQ ID NO: 12828 - protein, 42 aa, Artificial Sequence; identical to SEQ ID NO: 5396
  GFR-binding peptide
  MOD_RES (2), (36), (37): Xaa is C or S
  MOD_RES (14), (15), (16), (17), (18): Xaa is A or G
  MOD_RES (19), (20), (21), (22): Xaa is A or G or is absent

SEQ ID NO: 12829 - protein, 36 aa, Artificial Sequence
  GFR-binding peptide
  MOD_RES (2), (33), (34): Xaa is C or S
KXSRVIMNSLQEVKPKRGVYYVIPLPELAQPVXXPA

SEQ ID NO: 12830 - protein, 42 aa, Artificial Sequence
  GFR-binding peptide
  MOD_RES (2), (4), (36), (37): Xaa is C or S
RXGXSEVVMDRYKKLVVNNASDFYLISIANLRTPVXXTPPTS

SEQ ID NO: 12831 - protein, 36 aa, Artificial Sequence
  GFR-binding peptide
  MOD_RES (2), (4), (36): Xaa is C or S
HXGXARVVMNNSLQEIVNSSDDYYVVPLPELQTPAX

SEQ ID NO: 12832 - protein, 36 aa, Artificial Sequence; identical to SEQ ID NO: 5401
  GFR-binding peptide
  MOD_RES (31), (32): Xaa is C or S

SEQ ID NO: 12833 - protein, 37 aa, Artificial Sequence
  GFR-binding peptide
  MOD_RES (1), (32), (33): Xaa is C or S
XSKVIMNSLQEIKPTKGIYYVIPLPELDQSVXXPSAS

SEQ ID NO: 12834 - protein, 31 aa, Artificial Sequence
  GFR-binding peptide
  MOD_RES (31), (31): Xaa is C or S
SKVIMNSLQEIKPTKGIYYVIPLPELDQSVX

SEQ ID NO: 12835 - protein, 37 aa, Artificial Sequence
  GFR-binding peptide
  MOD_RES (2), (36), (37): Xaa is C or S
  MOD_RES (14), (15), (16), (17), (18): Xaa is A or G
  MOD_RES (19), (20), (21), (22): Xaa is A or G or is absent
GXGEVVMENSLQEXXXXXXXXXYYVMPLPELETPVXX

SEQ ID NO: 12836 - protein, 39 aa, Artificial Sequence
  GFR-binding peptide
  MOD_RES (2), (34), (35): Xaa is C or S
GXSEVVMDQYNKLVVNNASDLYLISIASLRTPVXXTPPT

SEQ ID NO: 12837 - protein, 38 aa, Artificial Sequence
  GFR-binding peptide
  MOD_RES (33), (34): Xaa is C or S
  MOD_RES (11), (12), (13), (14), (15): Xaa is A or G
  MOD_RES (16), (17), (18), (19): Xaa is A or G or is absent
RVVMNNSLQEXXXXXXXXXYYVVPLPELQTPAXXPKPV

SEQ ID NO: 12838 - protein, 35 aa, Artificial Sequence
  GFR-binding peptide
  MOD_RES (2), (4): Xaa is C or S
RXGXGEVVMDNSLQEVVKENEDYYLMTLPELETPV

SEQ ID NO: 12839 - protein, 36 aa, Artificial Sequence
  GFR-binding peptide
  MOD_RES (1), (35): Xaa is C or S
  MOD_RES (13), (14), (15), (16), (17): Xaa is A or G
  MOD_RES (18), (19), (20), (21): Xaa is A or G or is absent
XSRVVMNEYQKYXXXXXXXXXIFLVSIPSLKTPAXT

SEQ ID NO: 12840 - protein, 32 aa, Artificial Sequence
  GFR-binding peptide
  MOD_RES (31), (32): Xaa is C or S
SKVIMNSLQEIKPTKGIYYVIPLPELDQSVXX

SEQ ID NO: 12841 - protein, 31 aa, Artificial Sequence
  GFR-binding peptide
SEVVMDEYQKYVVNNASDIFLISIPSLRTPV

SEQ ID NO: 12842 - protein, 39 aa, Artificial Sequence; identical to SEQ ID NO: 5411
  GFR-binding peptide
  MOD_RES (1), (3), (36), (37): Xaa is C or S
  MOD_RES (14), (15), (16), (17), (18): Xaa is A or G
  MOD_RES (19), (20), (21), (22): Xaa is A or G or is absent

SEQ ID NO: 12843 - protein, 38 aa, Artificial Sequence; identical to SEQ ID NO: 5412
  GFR-binding peptide
  MOD_RES (2), (35), (36): Xaa is C or S
  MOD_RES (13), (14), (15), (16), (17): Xaa is A or G
  MOD_RES (18), (19), (20), (21): Xaa is A or G or is absent

SEQ ID NO: 12844 - protein, 32 aa, Artificial Sequence
  GFR-binding peptide
  MOD_RES (1), (1): Xaa is C or S
XSEVVMDNSLQEVVNNASDYYVIPLPELRTPV

SEQ ID NO: 12845 - protein, 35 aa, Artificial Sequence
  GFR-binding peptide
  MOD_RES (33), (33): Xaa is C or S
  MOD_RES (11), (12), (13), (14), (15): Xaa is A or G
  MOD_RES (16), (17), (18), (19): Xaa is A or G or is absent
RVVMNEYQKYXXXXXXXXXIFLVSIPSLKTPAXTP

SEQ ID NO: 12846 - protein, 35 aa, Artificial Sequence; identical to SEQ ID NO: 5413
  GFR-binding peptide
  MOD_RES (1), (35): Xaa is C or S
  MOD_RES (13), (14), (15), (16), (17): Xaa is A or G
  MOD_RES (18), (19), (20), (21): Xaa is A or G or is absent

SEQ ID NO: 12847 - protein, 39 aa, Artificial Sequence
  GFR-binding peptide
  MOD_RES (1), (3), (35), (36): Xaa is C or S
XGXARVVMNNSLQEIVNSSDDYYLVTLPELQTPAXXPKP

SEQ ID NO: 12848 - protein, 36 aa, Artificial Sequence; identical to SEQ ID NO: 5414
  GFR-binding peptide
  MOD_RES (1), (33), (34): Xaa is C or S

SEQ ID NO: 12849 - protein, 36 aa, Artificial Sequence
  GFR-binding peptide
  MOD_RES (32), (32): Xaa is C or S
SRVVMNNSLQEIVNSSDDYYLVTLPELKTPAXTPKT

SEQ ID NO: 12850 - protein, 37 aa, Artificial Sequence; identical to SEQ ID NO: 5417
  GFR-binding peptide
  MOD_RES (2), (4), (36), (37): Xaa is C or S

SEQ ID NO: 12851 - protein, 36 aa, Artificial Sequence; identical to SEQ ID NO: 5421
  GFR-binding peptide
  MOD_RES (2), (36): Xaa is C or S
  MOD_RES (14), (15), (16), (17), (18): Xaa is A or G
  MOD_RES (19), (20), (21), (22): Xaa is A or G or is absent

SEQ ID NO: 12852 - protein, 36 aa, Artificial Sequence; identical to SEQ ID NO: 5427
  GFR-binding peptide
  MOD_RES (33), (34): Xaa is C or S
  MOD_RES (11), (12), (13), (14), (15): Xaa is A or G
  MOD_RES (16), (17), (18), (19): Xaa is A or G or is absent

SEQ ID NO: 12853 - protein, 34 aa, Artificial Sequence
  GFR-binding peptide
  MOD_RES (1), (33): Xaa is C or S
XSRVVMNNSLQEIVNSSDDYYVVPLPELKTPAXT

SEQ ID NO: 12854 - protein, 35 aa, Artificial Sequence
  GFR-binding peptide
  MOD_RES (31), (32): Xaa is C or S
EVVMENSLQEVVKDYEDYYVMPLPELETPVXXAKP

SEQ ID NO: 12855 - protein, 38 aa, Artificial Sequence; identical to SEQ ID NO: 5435
  GFR-binding peptide
  MOD_RES (1), (33), (34): Xaa is C or S

SEQ ID NO: 12856 - protein, 40 aa, Artificial Sequence
  GFR-binding peptide
  MOD_RES (2), (4), (38): Xaa is C or S
  MOD_RES (16), (17), (18), (19), (20): Xaa is A or G
  MOD_RES (21), (22), (23), (24): Xaa is A or G or is absent
HXGXSRVVMNEYQKYXXXXXXXXXIFLVSIPSLKTPAXTP

SEQ ID NO: 12857 - protein, 36 aa, Artificial Sequence; identical to SEQ ID NO: 5442
  GFR-binding peptide
  MOD_RES (1), (35), (36): Xaa is C or S
  MOD_RES (13), (14), (15), (16), (17): Xaa is A or G
  MOD_RES (18), (19), (20), (21): Xaa is A or G or is absent

SEQ ID NO: 12858 - protein, 33 aa, Artificial Sequence
  GFR-binding peptide
  MOD_RES (12), (13), (14), (15), (16): Xaa is A or G
  MOD_RES (17), (18), (19), (20): Xaa is A or G or is absent
SRVVMNNSLQEXXXXXXXXXYYVVPLPELKTPA

SEQ ID NO: 12859 - protein, 43 aa, Artificial Sequence
  GFR-binding peptide
  MOD_RES (1), (3), (37), (38): Xaa is C or S
  MOD_RES (15), (16), (17), (18), (19): Xaa is A or G
  MOD_RES (20), (21), (22), (23): Xaa is A or G or is absent
XGXARVVMNEYQKYXXXXXXXXXIFLVSIPSLQTPAXXPKPVT

SEQ ID NO: 12860 - protein, 32 aa, Artificial Sequence; identical to SEQ ID NO: 5443
  GFR-binding peptide
  MOD_RES (31), (32): Xaa is C or S

SEQ ID NO: 12861 - protein, 37 aa, Artificial Sequence
  GFR-binding peptide
  MOD_RES (2), (4), (35), (36): Xaa is C or S
SXKXSKVIMEYQKYIKPTKGIIFLISIPSLDQSVXXP

SEQ ID NO: 12862 - protein, 38 aa, Artificial Sequence; identical to SEQ ID NO: 5444
  GFR-binding peptide
  MOD_RES (2), (4), (38): Xaa is C or S
  MOD_RES (16), (17), (18), (19), (20): Xaa is A or G
  MOD_RES (21), (22), (23), (24): Xaa is A or G or is absent

SEQ ID NO: 12863 - protein, 33 aa, Artificial Sequence; identical to SEQ ID NO: 5445
  GFR-binding peptide
  MOD_RES (31), (32): Xaa is C or S

SEQ ID NO: 12864 - protein, 39 aa, Artificial Sequence
  GFR-binding peptide
  MOD_RES (1), (3), (35), (36): Xaa is C or S
XGXARVVMNEYQKYIVNSSDDIFLVSIPSLQTPAXXPKP

SEQ ID NO: 12865 - protein, 39 aa, Artificial Sequence
  GFR-binding peptide
  MOD_RES (1), (3), (37), (38): Xaa is C or S
  MOD_RES (15), (16), (17), (18), (19): Xaa is A or G
  MOD_RES (20), (21), (22), (23): Xaa is A or G or is absent
XGXGEVVMENSLQEXXXXXXXXXYYVMPLPELETPVXXA

SEQ ID NO: 12866 - protein, 37 aa, Artificial Sequence
  GFR-binding peptide
  MOD_RES (1), (35), (36): Xaa is C or S
  MOD_RES (13), (14), (15), (16), (17): Xaa is A or G
  MOD_RES (18), (19), (20), (21): Xaa is A or G or is absent
XSEVVMDQYNKLXXXXXXXXXLYLISIASLRTPVXXT

SEQ ID NO: 12867 - protein, 35 aa, Artificial Sequence; identical to SEQ ID NO: 5448
  GFR-binding peptide
  MOD_RES (1), (3): Xaa is C or S
  MOD_RES (14), (15), (16), (17), (18): Xaa is A or G
  MOD_RES (19), (20), (21), (22): Xaa is A or G or is absent

SEQ ID NO: 12868 - protein, 33 aa, Artificial Sequence
  GFR-binding peptide
  MOD_RES (12), (13), (14), (15), (16): Xaa is A or G
  MOD_RES (17), (18), (19), (20): Xaa is A or G or is absent
SEVVMDRYKKLXXXXXXXXXFYLISIANLRTPV

SEQ ID NO: 12869 - protein, 33 aa, Artificial Sequence; identical to SEQ ID NO: 5451
  GFR-binding peptide
  MOD_RES (12), (13), (14), (15), (16): Xaa is A or G
  MOD_RES (17), (18), (19), (20): Xaa is A or G or is absent

SEQ ID NO: 12870 - protein, 36 aa, Artificial Sequence; identical to SEQ ID NO: 5454
  GFR-binding peptide
  MOD_RES (32), (33): Xaa is C or S

SEQ ID NO: 12871 - protein, 34 aa, Artificial Sequence; identical to SEQ ID NO: 5455
  GFR-binding peptide
  MOD_RES (31), (32): Xaa is C or S

SEQ ID NO: 12872 - protein, 31 aa, Artificial Sequence
  GFR-binding peptide
  MOD_RES (31), (31): Xaa is C or S
SKVVMEYQKYVKPTRGVIFLISIPSLDQPVX

SEQ ID NO: 12873 - protein, 41 aa, Artificial Sequence; identical to SEQ ID NO: 5456
  GFR-binding peptide
  MOD_RES (1), (3), (37), (38): Xaa is C or S
  MOD_RES (15), (16), (17), (18), (19): Xaa is A or G
  MOD_RES (20), (21), (22), (23): Xaa is A or G or is absent

SEQ ID NO: 12874 - protein, 31 aa, Artificial Sequence; identical to SEQ ID NO: 5457
  GFR-binding peptide
  MOD_RES (1), (1): Xaa is C or S

SEQ ID NO: 12875 - protein, 40 aa, Artificial Sequence; identical to SEQ ID NO: 5459
  GFR-binding peptide
  MOD_RES (2), (35), (36): Xaa is C or S
  MOD_RES (13), (14), (15), (16), (17): Xaa is A or G
  MOD_RES (18), (19), (20), (21): Xaa is A or G or is absent

SEQ ID NO: 12876 - protein, 39 aa, Artificial Sequence
  GFR-binding peptide
  MOD_RES (2), (4), (35), (36): Xaa is C or S
SXKXSRVIMNSLQEVKPKRGVYYVIPLPELAQPVXXPAA

SEQ ID NO: 12877 - protein, 36 aa, Artificial Sequence
  GFR-binding peptide
  MOD_RES (1), (3): Xaa is C or S
  MOD_RES (15), (16), (17), (18), (19): Xaa is A or G
  MOD_RES (20), (21), (22), (23): Xaa is A or G or is absent
XGXGEVVMENSLQEXXXXXXXXXYYLMTLPELETPV

SEQ ID NO: 12878 - protein, 36 aa, Artificial Sequence
  GFR-binding peptide
  MOD_RES (31), (32): Xaa is C or S
RVVMNNSLQEIVNSSDDYYLVTLPELQTPAXXPKPV

SEQ ID NO: 12879 - protein, 33 aa, Artificial Sequence
  GFR-binding peptide
  MOD_RES (12), (13), (14), (15), (16): Xaa is A or G
  MOD_RES (17), (18), (19), (20): Xaa is A or G or is absent
SEVVMDQYNKLXXXXXXXXXLYLISIASLRTPV

SEQ ID NO: 12880 - protein, 36 aa, Artificial Sequence; identical to SEQ ID NO: 5463
  GFR-binding peptide
  MOD_RES (1), (3): Xaa is C or S
  MOD_RES (15), (16), (17), (18), (19): Xaa is A or G
  MOD_RES (20), (21), (22), (23): Xaa is A or G or is absent

SEQ ID NO: 12881 - protein, 33 aa, Artificial Sequence
  GFR-binding peptide
  MOD_RES (32), (32): Xaa is C or S
SRVVMNNSLQEIVNSSDDYYLVTLPELKTPAXT

SEQ ID NO: 12882 - protein, 36 aa, Artificial Sequence
  GFR-binding peptide
  MOD_RES (1), (33): Xaa is C or S
XSRVVMNNSLQEIVNSSDDYYVVPLPELKTPAXTPK

SEQ ID NO: 12883 - protein, 37 aa, Artificial Sequence
  GFR-binding peptide
  MOD_RES (2), (36), (37): Xaa is C or S
  MOD_RES (14), (15), (16), (17), (18): Xaa is A or G
  MOD_RES (19), (20), (21), (22): Xaa is A or G or is absent
GXSEVVMDNSLQEXXXXXXXXXYYLITLPELRTPVXX

SEQ ID NO: 12884 - protein, 37 aa, Artificial Sequence
  GFR-binding peptide
  MOD_RES (32), (33): Xaa is C or S
SEVVMDEYQKYVVNNASDIFLISIPSLRTPVXXTPPT

SEQ ID NO: 12885 - protein, 40 aa, Artificial Sequence
  GFR-binding peptide
  MOD_RES (34), (35): Xaa is C or S
  MOD_RES (12), (13), (14), (15), (16): Xaa is A or G
  MOD_RES (17), (18), (19), (20): Xaa is A or G or is absent
SEVVMDRYKKLXXXXXXXXXFYLISIANLRTPVXXTPPTS

SEQ ID NO: 12886 - protein, 37 aa, Artificial Sequence; identical to SEQ ID NO: 5474
  GFR-binding peptide
  MOD_RES (2), (33), (34): Xaa is C or S

SEQ ID NO: 12887 - protein, 38 aa, Artificial Sequence
  GFR-binding peptide
  MOD_RES (2), (34): Xaa is C or S
GXSRVVMNNSLQEIVNSSDDYYLVTLPELKTPAXTPKT

SEQ ID NO: 12888 - protein, 44 aa, Artificial Sequence; identical to SEQ ID NO: 5477
  GFR-binding peptide
  MOD_RES (2), (4), (38), (39): Xaa is C or S
  MOD_RES (16), (17), (18), (19), (20): Xaa is A or G
  MOD_RES (21), (22), (23), (24): Xaa is A or G or is absent

SEQ ID NO: 12889 - protein, 38 aa, Artificial Sequence; identical to SEQ ID NO: 5479
  GFR-binding peptide
  MOD_RES (1), (33), (34): Xaa is C or S

SEQ ID NO: 12890 - protein, 37 aa, Artificial Sequence; identical to SEQ ID NO: 5480
  GFR-binding peptide
  MOD_RES (1), (34), (35): Xaa is C or S
  MOD_RES (12), (13), (14), (15), (16): Xaa is A or G
  MOD_RES (17), (18), (19), (20): Xaa is A or G or is absent

SEQ ID NO: 12891 - protein, 33 aa, Artificial Sequence
  GFR-binding peptide
  MOD_RES (31), (32): Xaa is C or S
RVVMNEYQKYIVNSSDDIFLVSIPSLQTPAXXP

SEQ ID NO: 12892 - protein, 36 aa, Artificial Sequence
  GFR-binding peptide
  MOD_RES (2), (36): Xaa is C or S
  MOD_RES (14), (15), (16), (17), (18): Xaa is A or G
  MOD_RES (19), (20), (21), (22): Xaa is A or G or is absent
GXSEVVMDEYQKYXXXXXXXXXIFLISIPSLRTPVX

SEQ ID NO: 12893 - protein, 40 aa, Artificial Sequence
  GFR-binding peptide
  MOD_RES (1), (3), (35), (36): Xaa is C or S
XGXGEVVMENSLQEVVKDYEDYYLMTLPELETPVXXAKPI

SEQ ID NO: 12894 - protein, 39 aa, Artificial Sequence; identical to SEQ ID NO: 5484
  GFR-binding peptide
  MOD_RES (2), (35), (36): Xaa is C or S
  MOD_RES (13), (14), (15), (16), (17): Xaa is A or G
  MOD_RES (18), (19), (20), (21): Xaa is A or G or is absent

SEQ ID NO: 12895 - protein, 32 aa, Artificial Sequence
  GFR-binding peptide
  MOD_RES (32), (32): Xaa is C or S
GEVVMDEYQKYVVKENEDIFLMSIPSLETPVX

SEQ ID NO: 12896 - protein, 33 aa, Artificial Sequence
  GFR-binding peptide
  MOD_RES (12), (13), (14), (15), (16): Xaa is A or G
  MOD_RES (17), (18), (19), (20): Xaa is A or G or is absent
SRVVMNNSLQEXXXXXXXXXYYLVTLPELKTPA

SEQ ID NO: 12897 - protein, 43 aa, Artificial Sequence; identical to SEQ ID NO: 5487
  GFR-binding peptide
  MOD_RES (2), (4), (38), (39): Xaa is C or S
  MOD_RES (16), (17), (18), (19), (20): Xaa is A or G
  MOD_RES (21), (22), (23), (24): Xaa is A or G or is absent

SEQ ID NO: 12898 - protein, 32 aa, Artificial Sequence; identical to SEQ ID NO: 5492
  GFR-binding peptide
  MOD_RES (31), (32): Xaa is C or S

SEQ ID NO: 12899 - protein, 39 aa, Artificial Sequence
  GFR-binding peptide
  MOD_RES (1), (34), (35): Xaa is C or S
  MOD_RES (12), (13), (14), (15), (16): Xaa is A or G
  MOD_RES (17), (18), (19), (20): Xaa is A or G or is absent
XSKVIMNSLQEXXXXXXXXXYYVIPLPELDQSVXXPSAS

SEQ ID NO: 12900 - protein, 40 aa, Artificial Sequence; identical to SEQ ID NO: 5494
  GFR-binding peptide
  MOD_RES (2), (4), (38): Xaa is C or S
  MOD_RES (16), (17), (18), (19), (20): Xaa is A or G
  MOD_RES (21), (22), (23), (24): Xaa is A or G or is absent

SEQ ID NO: 12901 - protein, 35 aa, Artificial Sequence
  GFR-binding peptide
  MOD_RES (1), (32), (33): Xaa is C or S
XSKVIMEYQKYIKPTKGIIFLISIPSLDQSVXXPS

SEQ ID NO: 12902 - protein, 38 aa, Artificial Sequence
  GFR-binding peptide
  MOD_RES (1), (3), (34), (35): Xaa is C or S
XKXSKVVMNSLQEVKPTRGVYYVIPLPELDQPVXXPSA

SEQ ID NO: 12903 - protein, 35 aa, Artificial Sequence; identical to SEQ ID NO: 5498
  GFR-binding peptide
  MOD_RES (2), (2): Xaa is C or S
  MOD_RES (14), (15), (16), (17), (18): Xaa is A or G
  MOD_RES (19), (20), (21), (22): Xaa is A or G or is absent

SEQ ID NO: 12904 - protein, 35 aa, Artificial Sequence
  GFR-binding peptide
  MOD_RES (32), (33): Xaa is C or S
ARVVMNEYQKYIVNSSDDIFLVSIPSLQTPAXXPK

SEQ ID NO: 12905 - protein, 40 aa, Artificial Sequence
  GFR-binding peptide
  MOD_RES (2), (35), (36): Xaa is C or S
  MOD_RES (13), (14), (15), (16), (17): Xaa is A or G
  MOD_RES (18), (19), (20), (21): Xaa is A or G or is absent
KXSKVIMEYQKYXXXXXXXXXIFLISIPSLDQSVXXPSAS

SEQ ID NO: 12906 - protein, 34 aa, Artificial Sequence; identical to SEQ ID NO: 5499
  GFR-binding peptide
  MOD_RES (2), (2): Xaa is C or S
  MOD_RES (13), (14), (15), (16), (17): Xaa is A or G
  MOD_RES (18), (19), (20), (21): Xaa is A or G or is absent

SEQ ID NO: 12907 - protein, 37 aa, Artificial Sequence
  GFR-binding peptide
  MOD_RES (1), (33), (34): Xaa is C or S
XSRVVMNNSLQEIVNSSDDYYVVPLPELKTPAXXPKP

SEQ ID NO: 12908 - protein, 39 aa, Artificial Sequence; identical to SEQ ID NO: 5501
  GFR-binding peptide
  MOD_RES (1), (35), (36): Xaa is C or S
  MOD_RES (13), (14), (15), (16), (17): Xaa is A or G
  MOD_RES (18), (19), (20), (21): Xaa is A or G or is absent

SEQ ID NO: 12909 - protein, 40 aa, Artificial Sequence
  GFR-binding peptide
  MOD_RES (1), (3), (37), (38): Xaa is C or S
  MOD_RES (15), (16), (17), (18), (19): Xaa is A or G
  MOD_RES (20), (21), (22), (23): Xaa is A or G or is absent
XGXARVVMNEYQKYXXXXXXXXXIFLVSIPSLQTPAXXPK

SEQ ID NO: 12910 - protein, 36 aa, Artificial Sequence
  GFR-binding peptide
  MOD_RES (34), (35): Xaa is C or S
  MOD_RES (12), (13), (14), (15), (16): Xaa is A or G
  MOD_RES (17), (18), (19), (20): Xaa is A or G or is absent
GEVVMENSLQEXXXXXXXXXYYLMTLPELETPVXXA

SEQ ID NO: 12911 - protein, 35 aa, Artificial Sequence
  GFR-binding peptide
  MOD_RES (1), (33): Xaa is C or S
XSRVVMNEYQKYIVNSSDDIFLVSIPSLKTPAXTP

SEQ ID NO: 12912 - protein, 35 aa, Artificial Sequence
  GFR-binding peptide
  MOD_RES (2), (2): Xaa is C or S
  MOD_RES (14), (15), (16), (17), (18): Xaa is A or G
  MOD_RES (19), (20), (21), (22): Xaa is A or G or is absent
GXARVVMNNSLQEXXXXXXXXXYYVVPLPELQTPA

SEQ ID NO: 12913 - protein, 35 aa, Artificial Sequence; identical to SEQ ID NO: 5503
  GFR-binding peptide
  MOD_RES (2), (2): Xaa is C or S
  MOD_RES (14), (15), (16), (17), (18): Xaa is A or G
  MOD_RES (19), (20), (21), (22): Xaa is A or G or is absent

SEQ ID NO: 12914 - protein, 42 aa, Artificial Sequence
  GFR-binding peptide
  MOD_RES (2), (36): Xaa is C or S
  MOD_RES (14), (15), (16), (17), (18): Xaa is A or G
  MOD_RES (19), (20), (21), (22): Xaa is A or G or is absent
GXSRVVMNNSLQEXXXXXXXXXYYLVTLPELKTPAXTPKTVH

SEQ ID NO: 12915 - protein, 40 aa, Artificial Sequence
  GFR-binding peptide
  MOD_RES (1), (3), (35), (36): Xaa is C or S
XGXGEVVMEEYQKYVVKDYEDIFLMSIPSLETPVXXAKPI

SEQ ID NO: 12916 - protein, 38 aa, Artificial Sequence
  GFR-binding peptide
  MOD_RES (32), (33): Xaa is C or S
GEVVMENSLQEVVKDYEDYYVMPLPELETPVXXAKPIS

SEQ ID NO: 12917 - protein, 39 aa, Artificial Sequence
  GFR-binding peptide
  MOD_RES (33), (34): Xaa is C or S
  MOD_RES (11), (12), (13), (14), (15): Xaa is A or G
  MOD_RES (16), (17), (18), (19): Xaa is A or G or is absent
RVVMNNSLQEXXXXXXXXXYYVVPLPELKTPAXXPKPVY

SEQ ID NO: 12918 - protein, 40 aa, Artificial Sequence
  GFR-binding peptide
  MOD_RES (1), (35), (36): Xaa is C or S
  MOD_RES (13), (14), (15), (16), (17): Xaa is A or G
  MOD_RES (18), (19), (20), (21): Xaa is A or G or is absent
XGEVVMENSLQEXXXXXXXXXYYLMTLPELETPVXXAKPI

SEQ ID NO: 12919 - protein, 40 aa, Artificial Sequence; identical to SEQ ID NO: 5507
  GFR-binding peptide
  MOD_RES (1), (3), (36), (37): Xaa is C or S
  MOD_RES (14), (15), (16), (17), (18): Xaa is A or G
  MOD_RES (19), (20), (21), (22): Xaa is A or G or is absent

SEQ ID NO: 12920 - protein, 34 aa, Artificial Sequence
  GFR-binding peptide
  MOD_RES (34), (34): Xaa is C or S
  MOD_RES (12), (13), (14), (15), (16): Xaa is A or G
  MOD_RES (17), (18), (19), (20): Xaa is A or G or is absent
SEVVMDNSLQEXXXXXXXXXYYVIPLPELRTPVX

SEQ ID NO: 12921 - protein, 36 aa, Artificial Sequence; identical to SEQ ID NO: 5508
  GFR-binding peptide
  MOD_RES (2), (36): Xaa is C or S
  MOD_RES (14), (15), (16), (17), (18): Xaa is A or G
  MOD_RES (19), (20), (21), (22): Xaa is A or G or is absent

SEQ ID NO: 12922 - protein, 40 aa, Artificial Sequence
  GFR-binding peptide
  MOD_RES (34), (35): Xaa is C or S
  MOD_RES (12), (13), (14), (15), (16): Xaa is A or G
  MOD_RES (17), (18), (19), (20): Xaa is A or G or is absent
SEVVMDQYNKLXXXXXXXXXLYLISIASLRTPVXXTPPTS

SEQ ID NO: 12923 - protein, 37 aa, Artificial Sequence
  GFR-binding peptide
  MOD_RES (1), (33), (34): Xaa is C or S
XGEVVMENSLQEVVKDYEDYYLMTLPELETPVXXAKP

SEQ ID NO: 12924 - protein, 31 aa, Artificial Sequence
  GFR-binding peptide
SEVVMDNSLQEVVNNASDYYLITLPELRTPV

SEQ ID NO: 12925 - protein, 41 aa, Artificial Sequence; identical to SEQ ID NO: 5511
  GFR-binding peptide
  MOD_RES (1), (35), (36): Xaa is C or S
  MOD_RES (13), (14), (15), (16), (17): Xaa is A or G
  MOD_RES (18), (19), (20), (21): Xaa is A or G or is absent

SEQ ID NO: 12926 - protein, 38 aa, Artificial Sequence
  GFR-binding peptide
  MOD_RES (1), (33), (34): Xaa is C or S
XGEVVMDNSLQEVVKENEDYYVMPLPELETPVXXAKPI

SEQ ID NO: 12927 - protein, 42 aa, Artificial Sequence
  GFR-binding peptide
  MOD_RES (2), (4), (36), (37): Xaa is C or S
HXGXARVVMNEYQKYIVNSSDDIFLVSIPSLQTPAXXPKPVT

SEQ ID NO: 12928 - protein, 35 aa, Artificial Sequence
  GFR-binding peptide
  MOD_RES (31), (32): Xaa is C or S
SRVIMEYQKYVKPKRGVIFLISIPSLAQPVXXPAA

SEQ ID NO: 12929 - protein, 33 aa, Artificial Sequence
  GFR-binding peptide
  MOD_RES (31), (32): Xaa is C or S
EVVMDNSLQEVVNNASDYYVIPLPELRTPVXXT

SEQ ID NO: 12930 - protein, 36 aa, Artificial Sequence
  GFR-binding peptide
  MOD_RES (2), (34), (35): Xaa is C or S
GXSEVVMDNSLQEVVNNASDYYVIPLPELRTPVXXT

SEQ ID NO: 12931 - protein, 38 aa, Artificial Sequence
  GFR-binding peptide
  MOD_RES (1), (34), (35): Xaa is C or S
  MOD_RES (12), (13), (14), (15), (16): Xaa is A or G
  MOD_RES (17), (18), (19), (20): Xaa is A or G or is absent
XSKVIMNSLQEXXXXXXXXXYYVIPLPELDQSVXXPSA

SEQ ID NO: 12932 - protein, 35 aa, Artificial Sequence; identical to SEQ ID NO: 5519
  GFR-binding peptide
  MOD_RES (31), (32): Xaa is C or S

SEQ ID NO: 12933 - protein, 37 aa, Artificial Sequence; identical to SEQ ID NO: 5520
  GFR-binding peptide
  MOD_RES (1), (35), (36): Xaa is C or S
  MOD_RES (13), (14), (15), (16), (17): Xaa is A or G
  MOD_RES (18), (19), (20), (21): Xaa is A or G or is absent

SEQ ID NO: 12934 - protein, 34 aa, Artificial Sequence
  GFR-binding peptide
  MOD_RES (34), (34): Xaa is C or S
  MOD_RES (12), (13), (14), (15), (16): Xaa is A or G
  MOD_RES (17), (18), (19), (20): Xaa is A or G or is absent
SEVVMDNSLQEXXXXXXXXXYYLITLPELRTPVX

SEQ ID NO: 12935 - protein, 35 aa, Artificial Sequence
  GFR-binding peptide
  MOD_RES (34), (35): Xaa is C or S
  MOD_RES (12), (13), (14), (15), (16): Xaa is A or G
  MOD_RES (17), (18), (19), (20): Xaa is A or G or is absent
SEVVMDNSLQEXXXXXXXXXYYVIPLPELRTPVXX

SEQ ID NO: 12936 - protein, 36 aa, Artificial Sequence
  GFR-binding peptide
  MOD_RES (2), (34), (35): Xaa is C or S
GXGEVVMENSLQEVVKDYEDYYLMTLPELETPVXXA

SEQ ID NO: 12937 - protein, 36 aa, Artificial Sequence
  GFR-binding peptide
  MOD_RES (33), (34): Xaa is C or S
  MOD_RES (11), (12), (13), (14), (15): Xaa is A or G
  MOD_RES (16), (17), (18), (19): Xaa is A or G or is absent
EVVMEEYQKYXXXXXXXXXIFLMSIPSLETPVXXAK

SEQ ID NO: 12938 - protein, 36 aa, Artificial Sequence
  GFR-binding peptide
  MOD_RES (32), (32): Xaa is C or S
SRVVMNEYQKYIVNSSDDIFLVSIPSLKTPAXTPKT

SEQ ID NO: 12939 - protein, 40 aa, Artificial Sequence
  GFR-binding peptide
  MOD_RES (2), (4), (35), (36): Xaa is C or S
SXKXSKVVMEYQKYVKPTRGVIFLISIPSLDQPVXXPSAS

SEQ ID NO: 12940 - protein, 40 aa, Artificial Sequence
  GFR-binding peptide
  MOD_RES (2), (34), (35): Xaa is C or S
GXSEVVMDNSLQEVVNNASDYYVIPLPELRTPVXXTPPTS

SEQ ID NO: 12941 - protein, 34 aa, Artificial Sequence
  GFR-binding peptide
  MOD_RES (33), (34): Xaa is C or S
  MOD_RES (11), (12), (13), (14), (15): Xaa is A or G
  MOD_RES (16), (17), (18), (19): Xaa is A or G or is absent
RVVMNNSLQEXXXXXXXXXYYLVTLPELKTPAXX

SEQ ID NO: 12942 - protein, 34 aa, Artificial Sequence
  GFR-binding peptide
  MOD_RES (32), (33): Xaa is C or S
ARVVMNEYQKYIVNSSDDIFLVSIPSLQTPAXXP

SEQ ID NO: 12943 - protein, 38 aa, Artificial Sequence
  GFR-binding peptide
  MOD_RES (2), (34), (35): Xaa is C or S
GXSEVVMDRYKKLVVNNASDFYLISIANLRTPVXXTPP

SEQ ID NO: 12944 - protein, 37 aa, Artificial Sequence
  GFR-binding peptide
  MOD_RES (2), (4), (36), (37): Xaa is C or S
RXGXGEVVMDEYQKYVVKENEDIFLMSIPSLETPVXX

SEQ ID NO: 12945 - protein, 31 aa, Artificial Sequence
  GFR-binding peptide
GEVVMENSLQEVVKDYEDYYVMPLPELETPV

SEQ ID NO: 12946 - protein, 43 aa, Artificial Sequence
  GFR-binding peptide
  MOD_RES (2), (4), (37), (38): Xaa is C or S
  MOD_RES (15), (16), (17), (18), (19): Xaa is A or G
  MOD_RES (20), (21), (22), (23): Xaa is A or G or is absent
SXKXSKVVMNSLQEXXXXXXXXXYYVIPLPELDQPVXXPSASA

SEQ ID NO: 12947 - protein, 39 aa, Artificial Sequence
  GFR-binding peptide
  MOD_RES (33), (34): Xaa is C or S
  MOD_RES (11), (12), (13), (14), (15): Xaa is A or G
  MOD_RES (16), (17), (18), (19): Xaa is A or G or is absent
EVVMENSLQEXXXXXXXXXYYVMPLPELETPVXXAKPIS

SEQ ID NO: 12948 - protein, 39 aa, Artificial Sequence
  GFR-binding peptide
  MOD_RES (33), (34): Xaa is C or S
  MOD_RES (11), (12), (13), (14), (15): Xaa is A or G
  MOD_RES (16), (17), (18), (19): Xaa is A or G or is absent
SRVIMEYQKYXXXXXXXXXIFLISIPSLAQPVXXPAASA

SEQ ID NO: 12949 - protein, 38 aa, Artificial Sequence; identical to SEQ ID NO: 5532
  GFR-binding peptide
  MOD_RES (33), (34): Xaa is C or S
  MOD_RES (11), (12), (13), (14), (15): Xaa is A or G
  MOD_RES (16), (17), (18), (19): Xaa is A or G or is absent

SEQ ID NO: 12950 - protein, 39 aa, Artificial Sequence; identical to SEQ ID NO: 5534
  GFR-binding peptide
  MOD_RES (2), (36), (37): Xaa is C or S
  MOD_RES (14), (15), (16), (17), (18): Xaa is A or G
  MOD_RES (19), (20), (21), (22): Xaa is A or G or is absent

SEQ ID NO: 12951 - protein, 38 aa, Artificial Sequence; identical to SEQ ID NO: 5536
  GFR-binding peptide
  MOD_RES (2), (36), (37): Xaa is C or S
  MOD_RES (14), (15), (16), (17), (18): Xaa is A or G
  MOD_RES (19), (20), (21), (22): Xaa is A or G or is absent

SEQ ID NO: 12952 - protein, 34 aa, Artificial Sequence
  GFR-binding peptide
  MOD_RES (31), (32): Xaa is C or S
EVVMDQYNKLVVNNASDLYLISIASLRTPVXXTP

SEQ ID NO: 12953 - protein, 37 aa, Artificial Sequence
  GFR-binding peptide
  MOD_RES (32), (33): Xaa is C or S
GEVVMDEYQKYVVKENEDIFLMSIPSLETPVXXAKPI

SEQ ID NO: 12954 - protein, 31 aa, Artificial Sequence
  GFR-binding peptide
  MOD_RES (31), (31): Xaa is C or S
EVVMDNSLQEVVKENEDYYLMTLPELETPVX

SEQ ID NO: 12955 - protein, 38 aa, Artificial Sequence
  GFR-binding peptide
  MOD_RES (1), (3), (37), (38): Xaa is C or S
  MOD_RES (15), (16), (17), (18), (19): Xaa is A or G
  MOD_RES (20), (21), (22), (23): Xaa is A or G or is absent
XGXGEVVMDNSLQEXXXXXXXXXYYLMTLPELETPVXX

SEQ ID NO: 12956 - protein, 36 aa, Artificial Sequence
  GFR-binding peptide
  MOD_RES (1), (3), (35), (36): Xaa is C or S
XGXSRVVMNNSLQEIVNSSDDYYLVTLPELKTPAXX

SEQ ID NO: 12957 - protein, 41 aa, Artificial Sequence
  GFR-binding peptide
  MOD_RES (1), (3), (37): Xaa is C or S
  MOD_RES (15), (16), (17), (18), (19): Xaa is A or G
  MOD_RES (20), (21), (22), (23): Xaa is A or G or is absent
XGXSRVVMNNSLQEXXXXXXXXXYYLVTLPELKTPAXTPKT

SEQ ID NO: 12958 - protein, 34 aa, Artificial Sequence
  GFR-binding peptide
  MOD_RES (2), (4): Xaa is C or S
SXKXSRVIMNSLQEVKPKRGVYYVIPLPELAQPV

SEQ ID NO: 12959 - protein, 40 aa, Artificial Sequence; identical to SEQ ID NO: 5544
  GFR-binding peptide
  MOD_RES (1), (3), (37), (38): Xaa is C or S
  MOD_RES (15), (16), (17), (18), (19): Xaa is A or G
  MOD_RES (20), (21), (22), (23): Xaa is A or G or is absent

SEQ ID NO: 12960 - protein, 31 aa, Artificial Sequence; identical to SEQ ID NO: 5546
  GFR-binding peptide

SEQ ID NO: 12961 - protein, 36 aa, Artificial Sequence; identical to SEQ ID NO: 5547
  GFR-binding peptide
  MOD_RES (1), (3), (36): Xaa is C or S
  MOD_RES (14), (15), (16), (17), (18): Xaa is A or G
  MOD_RES (19), (20), (21), (22): Xaa is A or G or is absent

SEQ ID NO: 12962 - protein, 34 aa, Artificial Sequence; identical to SEQ ID NO: 5551
  GFR-binding peptide
  MOD_RES (2), (4): Xaa is C or S

SEQ ID NO: 12963 - protein, 42 aa, Artificial Sequence
  GFR-binding peptide
  MOD_RES (1), (3), (37), (38): Xaa is C or S
  MOD_RES (15), (16), (17), (18), (19): Xaa is A or G
  MOD_RES (20), (21), (22), (23): Xaa is A or G or is absent
XGXSEVVMDEYQKYXXXXXXXXXIFLISIPSLRTPVXXTPPT

SEQ ID NO: 12964 - protein, 34 aa, Artificial Sequence
  GFR-binding peptide
  MOD_RES (1), (32), (33): Xaa is C or S
XSKVIMNSLQEIKPTKGIYYVIPLPELDQSVXXP

SEQ ID NO: 12965 - protein, 38 aa, Artificial Sequence
  GFR-binding peptide
  MOD_RES (2), (35), (36): Xaa is C or S
  MOD_RES (13), (14), (15), (16), (17): Xaa is A or G
  MOD_RES (18), (19), (20), (21): Xaa is A or G or is absent
KXSKVIMEYQKYXXXXXXXXXIFLISIPSLDQSVXXPS

SEQ ID NO: 12966 - protein, 37 aa, Artificial Sequence
  GFR-binding peptide
  MOD_RES (31), (32): Xaa is C or S
SKVIMEYQKYIKPTKGIIFLISIPSLDQSVXXPSASA

SEQ ID NO: 12967 - protein, 33 aa, Artificial Sequence
  GFR-binding peptide
  MOD_RES (33), (33): Xaa is C or S
  MOD_RES (11), (12), (13), (14), (15): Xaa is A or G
  MOD_RES (16), (17), (18), (19): Xaa is A or G or is absent
EVVMDNSLQEXXXXXXXXXYYVIPLPELRTPVX

SEQ ID NO: 12968 - protein, 39 aa, Artificial Sequence
  GFR-binding peptide
  MOD_RES (1), (34), (35): Xaa is C or S
  MOD_RES (12), (13), (14), (15), (16): Xaa is A or G
  MOD_RES (17), (18), (19), (20): Xaa is A or G or is absent
XSKVVMNSLQEXXXXXXXXXYYVIPLPELDQPVXXPSAS

SEQ ID NO: 12969 - protein, 36 aa, Artificial Sequence
  GFR-binding peptide
  MOD_RES (2), (36): Xaa is C or S
  MOD_RES (14), (15), (16), (17), (18): Xaa is A or G
  MOD_RES (19), (20), (21), (22): Xaa is A or G or is absent
GXSRVVMNNSLQEXXXXXXXXXYYVVPLPELKTPAX

SEQ ID NO: 12970 - protein, 35 aa, Artificial Sequence
  GFR-binding peptide
  MOD_RES (33), (34): Xaa is C or S
  MOD_RES (11), (12), (13), (14), (15): Xaa is A or G
  MOD_RES (16), (17), (18), (19): Xaa is A or G or is absent
RVVMNEYQKYXXXXXXXXXIFLVSIPSLKTPAXXP

SEQ ID NO: 12971 - protein, 33 aa, Artificial Sequence
  GFR-binding peptide
  MOD_RES (31), (32): Xaa is C or S
SRVIMNSLQEVKPKRGVYYVIPLPELAQPVXXP

SEQ ID NO: 12972 - protein, 37 aa, Artificial Sequence
  GFR-binding peptide
  MOD_RES (2), (4), (36), (37): Xaa is C or S
RXGXGEVVMDNSLQEVVKENEDYYLMTLPELETPVXX

SEQ ID NO: 12973 - protein, 36 aa, Artificial Sequence; identical to SEQ ID NO: 5562
  GFR-binding peptide
  MOD_RES (31), (32): Xaa is C or S

SEQ ID NO: 12974 - protein, 36 aa, Artificial Sequence; identical to SEQ ID NO: 5563
  GFR-binding peptide
  MOD_RES (2), (36): Xaa is C or S
  MOD_RES (14), (15), (16), (17), (18): Xaa is A or G
  MOD_RES (19), (20), (21), (22): Xaa is A or G or is absent

SEQ ID NO: 12975 - protein, 36 aa, Artificial Sequence
  GFR-binding peptide
  MOD_RES (1), (3), (35), (36): Xaa is C or S
XGXSRVVMNEYQKYIVNSSDDIFLVSIPSLKTPAXX

SEQ ID NO: 12976 - protein, 37 aa, Artificial Sequence
  GFR-binding peptide
  MOD_RES (2), (36), (37): Xaa is C or S
  MOD_RES (14), (15), (16), (17), (18): Xaa is A or G
  MOD_RES (19), (20), (21), (22): Xaa is A or G or is absent
GXARVVMNNSLQEXXXXXXXXXYYVVPLPELQTPAXX

SEQ ID NO: 12977 - protein, 38 aa, Artificial Sequence
  GFR-binding peptide
  MOD_RES (2), (33), (34): Xaa is C or S
KXSRVIMEYQKYVKPKRGVIFLISIPSLAQPVXXPAAS

SEQ ID NO: 12978 - protein, 38 aa, Artificial Sequence
  GFR-binding peptide
  MOD_RES (1), (33), (34): Xaa is C or S
XARVVMNNSLQEIVNSSDDYYLVTLPELQTPAXXPKPV

SEQ ID NO: 12979 - protein, 36 aa, Artificial Sequence; identical to SEQ ID NO: 5568
  GFR-binding peptide
  MOD_RES (34), (35): Xaa is C or S
  MOD_RES (12), (13), (14), (15), (16): Xaa is A or G
  MOD_RES (17), (18), (19), (20): Xaa is A or G or is absent

SEQ ID NO: 12980 - protein, 39 aa, Artificial Sequence
  GFR-binding peptide
  MOD_RES (2), (4), (37), (38): Xaa is C or S
  MOD_RES (15), (16), (17), (18), (19): Xaa is A or G
  MOD_RES (20), (21), (22), (23): Xaa is A or G or is absent
SXKXSKVVMNSLQEXXXXXXXXXYYVIPLPELDQPVXXP

SEQ ID NO: 12981 - protein, 34 aa, Artificial Sequence
  GFR-binding peptide
  MOD_RES (2), (34): Xaa is C or S
GXGEVVMENSLQEVVKDYEDYYVMPLPELETPVX

SEQ ID NO: 12982 - protein, 37 aa, Artificial Sequence
  GFR-binding peptide
  MOD_RES (1), (32), (33): Xaa is C or S
XSRVIMEYQKYVKPKRGVIFLISIPSLAQPVXXPAAS

SEQ ID NO: 12983 - protein, 38 aa, Artificial Sequence; identical to SEQ ID NO: 5570
  GFR-binding peptide
  MOD_RES (33), (33): Xaa is C or S
  MOD_RES (11), (12), (13), (14), (15): Xaa is A or G
  MOD_RES (16), (17), (18), (19): Xaa is A or G or is absent

SEQ ID NO: 12984 - protein, 35 aa, Artificial Sequence; identical to SEQ ID NO: 5572
  GFR-binding peptide
  MOD_RES (2), (33), (34): Xaa is C or S

SEQ ID NO: 12985 - protein, 36 aa, Artificial Sequence
  GFR-binding peptide
  MOD_RES (34), (35): Xaa is C or S
  MOD_RES (12), (13), (14), (15), (16): Xaa is A or G
  MOD_RES (17), (18), (19), (20): Xaa is A or G or is absent
GEVVMEEYQKYXXXXXXXXXIFLMSIPSLETPVXXA

SEQ ID NO: 12986 - protein, 36 aa, Artificial Sequence; identical to SEQ ID NO: 5573
  GFR-binding peptide
  MOD_RES (34), (35): Xaa is C or S
  MOD_RES (12), (13), (14), (15), (16): Xaa is A or G
  MOD_RES (17), (18), (19), (20): Xaa is A or G or is absent

SEQ ID NO: 12987 - protein, 42 aa, Artificial Sequence; identical to SEQ ID NO: 5575
  GFR-binding peptide
  MOD_RES (1), (3), (37), (38): Xaa is C or S
  MOD_RES (15), (16), (17), (18), (19): Xaa is A or G
  MOD_RES (20), (21), (22), (23): Xaa is A or G or is absent

SEQ ID NO: 12988 - protein, 34 aa, Artificial Sequence
  GFR-binding peptide
  MOD_RES (33), (34): Xaa is C or S
  MOD_RES (11), (12), (13), (14), (15): Xaa is A or G
  MOD_RES (16), (17), (18), (19): Xaa is A or G or is absent
EVVMEEYQKYXXXXXXXXXIFLMSIPSLETPVXX

SEQ ID NO: 12989 - protein, 38 aa, Artificial Sequence; identical to SEQ ID NO: 5578
  GFR-binding peptide
  MOD_RES (1), (3), (37), (38): Xaa is C or S
  MOD_RES (15), (16), (17), (18), (19): Xaa is A or G
  MOD_RES (20), (21), (22), (23): Xaa is A or G or is absent

SEQ ID NO: 12990 - protein, 34 aa, Artificial Sequence
  GFR-binding peptide
  MOD_RES (31), (32): Xaa is C or S
SKVIMEYQKYIKPTKGIIFLISIPSLDQSVXXPS

SEQ ID NO: 12991 - protein, 36 aa, Artificial Sequence
  GFR-binding peptide
  MOD_RES (34), (35): Xaa is C or S
  MOD_RES (12), (13), (14), (15), (16): Xaa is A or G
  MOD_RES (17), (18), (19), (20): Xaa is A or G or is absent
GEVVMENSLQEXXXXXXXXXYYVMPLPELETPVXXA

SEQ ID NO: 12992 - protein, 36 aa, Artificial Sequence
  GFR-binding peptide
  MOD_RES (1), (3): Xaa is C or S
  MOD_RES (15), (16), (17), (18), (19): Xaa is A or G
  MOD_RES (20), (21), (22), (23): Xaa is A or G or is absent
XGXGEVVMEEYQKYXXXXXXXXXIFLMSIPSLETPV

SEQ ID NO: 12993 - protein, 39 aa, Artificial Sequence
  GFR-binding peptide
  MOD_RES (2), (36), (37): Xaa is C or S
  MOD_RES (14), (15), (16), (17), (18): Xaa is A or G
  MOD_RES (19), (20), (21), (22): Xaa is A or G or is absent
GXGEVVMDNSLQEXXXXXXXXXYYLMTLPELETPVXXAK

SEQ ID NO: 12994 - protein, 43 aa, Artificial Sequence
  GFR-binding peptide
  MOD_RES (2), (4), (38): Xaa is C or S
  MOD_RES (16), (17), (18), (19), (20): Xaa is A or G
  MOD_RES (21), (22), (23), (24): Xaa is A or G or is absent
HXGXSRVVMNNSLQEXXXXXXXXXYYLVTLPELKTPAXTPKTV

SEQ ID NO: 12995 - protein, 31 aa, Artificial Sequence; identical to SEQ ID NO: 5582
  GFR-binding peptide

SEQ ID NO: 12996 - protein, 40 aa, Artificial Sequence
  GFR-binding peptide
  MOD_RES (1), (35), (36): Xaa is C or S
  MOD_RES (13), (14), (15), (16), (17): Xaa is A or G
  MOD_RES (18), (19), (20), (21): Xaa is A or G or is absent
XSEVVMDNSLQEXXXXXXXXXYYLITLPELRTPVXXTPPT

SEQ ID NO: 12997 - protein, 35 aa, Artificial Sequence; identical to SEQ ID NO: 5584
  GFR-binding peptide
  MOD_RES (33), (34): Xaa is C or S
  MOD_RES (11), (12), (13), (14), (15): Xaa is A or G
  MOD_RES (16), (17), (18), (19): Xaa is A or G or is absent

SEQ ID NO: 12998 - protein, 37 aa, Artificial Sequence; identical to SEQ ID NO: 5586
  GFR-binding peptide
  MOD_RES (2), (35), (36): Xaa is C or S
  MOD_RES (13), (14), (15), (16), (17): Xaa is A or G
  MOD_RES (18), (19), (20), (21): Xaa is A or G or is absent

SEQ ID NO: 12999 - protein, 40 aa, Artificial Sequence
  GFR-binding peptide
  MOD_RES (2), (36), (37): Xaa is C or S
  MOD_RES (14), (15), (16), (17), (18): Xaa is A or G
  MOD_RES (19), (20), (21), (22): Xaa is A or G or is absent
GXSRVVMNEYQKYXXXXXXXXXIFLVSIPSLKTPAXXPKP

SEQ ID NO: 13000 - protein, 39 aa, Artificial Sequence
  GFR-binding peptide
  MOD_RES (2), (34), (35): Xaa is C or S
GXARVVMNNSLQEIVNSSDDYYLVTLPELQTPAXXPKPV

SEQ ID NO: 13001 - protein, 38 aa, Artificial Sequence
  GFR-binding peptide
  MOD_RES (34), (35): Xaa is C or S
  MOD_RES (12), (13), (14), (15), (16): Xaa is A or G
  MOD_RES (17), (18), (19), (20): Xaa is A or G or is absent
GEVVMDNSLQEXXXXXXXXXYYVMPLPELETPVXXAKP

SEQ ID NO: 13002 - protein, 37 aa, Artificial Sequence; identical to SEQ ID NO: 5589
  GFR-binding peptide
  MOD_RES (1), (3), (36), (37): Xaa is C or S
  MOD_RES (14), (15), (16), (17), (18): Xaa is A or G
  MOD_RES (19), (20), (21), (22): Xaa is A or G or is absent

SEQ ID NO: 13003 - protein, 38 aa, Artificial Sequence
  GFR-binding peptide
  MOD_RES (2), (34), (35): Xaa is C or S
GXSEVVMDNSLQEVVNNASDYYVIPLPELRTPVXXTPP

SEQ ID NO: 13004 - protein, 39 aa, Artificial Sequence; identical to SEQ ID NO: 5593
  GFR-binding peptide
  MOD_RES (1), (3), (37), (38): Xaa is C or S
  MOD_RES (15), (16), (17), (18), (19): Xaa is A or G
  MOD_RES (20), (21), (22), (23): Xaa is A or G or is absent

SEQ ID NO: 13005 - protein, 40 aa, Artificial Sequence
  GFR-binding peptide
  MOD_RES (1), (35): Xaa is C or S
  MOD_RES (13), (14), (15), (16), (17): Xaa is A or G
  MOD_RES (18), (19), (20), (21): Xaa is A or G or is absent
XSRVVMNEYQKYXXXXXXXXXIFLVSIPSLKTPAXTPKTV

SEQ ID NO: 13006 - protein, 38 aa, Artificial Sequence
  GFR-binding peptide
  MOD_RES (1), (3), (37), (38): Xaa is C or S
  MOD_RES (15), (16), (17), (18), (19): Xaa is A or G
  MOD_RES (20), (21), (22), (23): Xaa is A or G or is absent
XGXGEVVMENSLQEXXXXXXXXXYYLMTLPELETPVXX

SEQ ID NO: 13007 - protein, 34 aa, Artificial Sequence; identical to SEQ ID NO: 5595
  GFR-binding peptide
  MOD_RES (1), (33), (34): Xaa is C or S

SEQ ID NO: 13008 - protein, 37 aa, Artificial Sequence; identical to SEQ ID NO: 5596
  GFR-binding peptide
  MOD_RES (1), (34), (35): Xaa is C or S
  MOD_RES (12), (13), (14), (15), (16): Xaa is A or G
  MOD_RES (17), (18), (19), (20): Xaa is A or G or is absent

SEQ ID NO: 13009 - protein, 34 aa, Artificial Sequence
  GFR-binding peptide
  MOD_RES (2), (34): Xaa is C or S
GXSEVVMDRYKKLVVNNASDFYLISIANLRTPVX

SEQ ID NO: 13010 - protein, 37 aa, Artificial Sequence
  GFR-binding peptide
  MOD_RES (1), (35), (36): Xaa is C or S
  MOD_RES (13), (14), (15), (16), (17): Xaa is A or G
  MOD_RES (18), (19), (20), (21): Xaa is A or G or is absent
XARVVMNEYQKYXXXXXXXXXIFLVSIPSLQTPAXXP

SEQ ID NO: 13011 - protein, 37 aa, Artificial Sequence
  GFR-binding peptide
  MOD_RES (1), (3), (37): Xaa is C or S
  MOD_RES (15), (16), (17), (18), (19): Xaa is A or G
  MOD_RES (20), (21), (22), (23): Xaa is A or G or is absent
XGXSEVVMDNSLQEXXXXXXXXXYYLITLPELRTPVX

SEQ ID NO: 13012 - protein, 35 aa, Artificial Sequence
  GFR-binding peptide
  MOD_RES (2), (35): Xaa is C or S
  MOD_RES (13), (14), (15), (16), (17): Xaa is A or G
  MOD_RES (18), (19), (20), (21): Xaa is A or G or is absent
KXSKVVMNSLQEXXXXXXXXXYYLITLPELDQPVX

SEQ ID NO: 13013 - protein, 35 aa, Artificial Sequence
  GFR-binding peptide
  MOD_RES (32), (33): Xaa is C or S
GEVVMEEYQKYVVKDYEDIFLMSIPSLETPVXXAK

SEQ ID NO: 13014 - protein, 39 aa, Artificial Sequence
  GFR-binding peptide
  MOD_RES (33), (34): Xaa is C or S
  MOD_RES (11), (12), (13), (14), (15): Xaa is A or G
  MOD_RES (16), (17), (18), (19): Xaa is A or G or is absent
EVVMENSLQEXXXXXXXXXYYLMTLPELETPVXXAKPIS

SEQ ID NO: 13015 - protein, 41 aa, Artificial Sequence
  GFR-binding peptide
  MOD_RES (1), (3), (37), (38): Xaa is C or S
  MOD_RES (15), (16), (17), (18), (19): Xaa is A or G
  MOD_RES (20), (21), (22), (23): Xaa is A or G or is absent
XGXGEVVMEEYQKYXXXXXXXXXIFLMSIPSLETPVXXAKP

SEQ ID NO: 13016 - protein, 39 aa, Artificial Sequence; identical to SEQ ID NO: 5604
  GFR-binding peptide
  MOD_RES (33), (34): Xaa is C or S
  MOD_RES (11), (12), (13), (14), (15): Xaa is A or G
  MOD_RES (16), (17), (18), (19): Xaa is A or G or is absent

SEQ ID NO: 13017 - protein, 35 aa, Artificial Sequence
  GFR-binding peptide
  MOD_RES (1), (35): Xaa is C or S
  MOD_RES (13), (14), (15), (16), (17): Xaa is A or G
  MOD_RES (18), (19), (20), (21): Xaa is A or G or is absent
XGEVVMENSLQEXXXXXXXXXYYVMPLPELETPVX

SEQ ID NO: 13018 - protein, 42 aa, Artificial Sequence
  GFR-binding peptide
  MOD_RES (2), (36): Xaa is C or S
  MOD_RES (14), (15), (16), (17), (18): Xaa is A or G
  MOD_RES (19), (20), (21), (22): Xaa is A or G or is absent
GXSRVVMNEYQKYXXXXXXXXXIFLVSIPSLKTPAXTPKTVH

SEQ ID NO: 13019 - protein, 36 aa, Artificial Sequence; identical to SEQ ID NO: 5605
  GFR-binding peptide
  MOD_RES (1), (3), (36): Xaa is C or S
  MOD_RES (14), (15), (16), (17), (18): Xaa is A or G
  MOD_RES (19), (20), (21), (22): Xaa is A or G or is absent

SEQ ID NO: 13020 - protein, 34 aa, Artificial Sequence
  GFR-binding peptide
  MOD_RES (1), (33), (34): Xaa is C or S
XARVVMNNSLQEIVNSSDDYYVVPLPELQTPAXX

SEQ ID NO: 13021 - protein, 33 aa, Artificial Sequence
  GFR-binding peptide
  MOD_RES (31), (32): Xaa is C or S
EVVMDEYQKYVVNNASDIFLISIPSLRTPVXXT

SEQ ID NO: 13022 - protein, 36 aa, Artificial Sequence; identical to SEQ ID NO: 5606
  GFR-binding peptide
  MOD_RES (34), (35): Xaa is C or S
  MOD_RES (12), (13), (14), (15), (16): Xaa is A or G
  MOD_RES (17), (18), (19), (20): Xaa is A or G or is absent

SEQ ID NO: 13023 - protein, 39 aa, Artificial Sequence
  GFR-binding peptide
  MOD_RES (1), (3), (37), (38): Xaa is C or S
  MOD_RES (15), (16), (17), (18), (19): Xaa is A or G
  MOD_RES (20), (21), (22), (23): Xaa is A or G or is absent
XGXSEVVMDQYNKLXXXXXXXXXLYLISIASLRTPVXXT

SEQ ID NO: 13024 - protein, 38 aa, Artificial Sequence; identical to SEQ ID NO: 5607
  GFR-binding peptide
  MOD_RES (2), (33), (34): Xaa is C or S

SEQ ID NO: 13025 - protein, 36 aa, Artificial Sequence; identical to SEQ ID NO: 5609
  GFR-binding peptide
  MOD_RES (2), (4), (36): Xaa is C or S

SEQ ID NO: 13026 - protein, 43 aa, Artificial Sequence
  GFR-binding peptide
  MOD_RES (1), (3), (37), (38): Xaa is C or S
  MOD_RES (15), (16), (17), (18), (19): Xaa is A or G
  MOD_RES (20), (21), (22), (23): Xaa is A or G or is absent
XGXARVVMNNSLQEXXXXXXXXXYYLVTLPELQTPAXXPKPVT

SEQ ID NO: 13027 - protein, 37 aa, Artificial Sequence; identical to SEQ ID NO: 5610
  GFR-binding peptide
  MOD_RES (2), (33), (34): Xaa is C or S

SEQ ID NO: 13028 - protein, 41 aa, Artificial Sequence
  GFR-binding peptide
  MOD_RES (1), (3), (37), (38): Xaa is C or S
  MOD_RES (15), (16), (17), (18), (19): Xaa is A or G
  MOD_RES (20), (21), (22), (23): Xaa is A or G or is absent
XGXGEVVMDEYQKYXXXXXXXXXIFLMSIPSLETPVXXAKP

SEQ ID NO: 13029 - protein, 34 aa, Artificial Sequence; identical to SEQ ID NO: 5613
  GFR-binding peptide
  MOD_RES (31), (32): Xaa is C or S

SEQ ID NO: 13030 - protein, 41 aa, Artificial Sequence
  GFR-binding peptide
  MOD_RES (1), (3), (35), (36): Xaa is C or S
XGXGEVVMDNSLQEVVKENEDYYLMTLPELETPVXXAKPIK

SEQ ID NO: 13031 - protein, 37 aa, Artificial Sequence; identical to SEQ ID NO: 5614
  GFR-binding peptide
  MOD_RES (31), (32): Xaa is C or S

SEQ ID NO: 13032 - protein, 34 aa, Artificial Sequence; identical to SEQ ID NO: 5615
  GFR-binding peptide
  MOD_RES (1), (1): Xaa is C or S
  MOD_RES (13), (14), (15), (16), (17): Xaa is A or G
  MOD_RES (18), (19), (20), (21): Xaa is A or G or is absent

SEQ ID NO: 13033 - protein, 40 aa, Artificial Sequence; identical to SEQ ID NO: 5617
  GFR-binding peptide
  MOD_RES (2), (4), (36), (37): Xaa is C or S

SEQ ID NO: 13034 - protein, 37 aa, Artificial Sequence; identical to SEQ ID NO: 5618
  GFR-binding peptide
  MOD_RES (33), (34): Xaa is C or S
  MOD_RES (11), (12), (13), (14), (15): Xaa is A or G
  MOD_RES (16), (17), (18), (19): Xaa is A or G or is absent

SEQ ID NO: 13035 - protein, 32 aa, Artificial Sequence
  GFR-binding peptide
  MOD_RES (31), (32): Xaa is C or S
SRVIMNSLQEVKPKRGVYYLITLPELAQPVXX

SEQ ID NO: 13036 - protein, 38 aa, Artificial Sequence
  GFR-binding peptide
  MOD_RES (1), (33): Xaa is C or S
XSRVVMNNSLQEIVNSSDDYYLVTLPELKTPAXTPKTV

SEQ ID NO: 13037 - protein, 35 aa, Artificial Sequence
  GFR-binding peptide
  MOD_RES (1), (33), (34): Xaa is C or S
XSEVVMDQYNKLVVNNASDLYLISIASLRTPVXXT

SEQ ID NO: 13038 - protein, 36 aa, Artificial Sequence
  GFR-binding peptide
  MOD_RES (31), (32): Xaa is C or S
RVVMNEYQKYIVNSSDDIFLVSIPSLQTPAXXPKPV

SEQ ID NO: 13039 - protein, 40 aa, Artificial Sequence
  GFR-binding peptide
  MOD_RES (2), (36), (37): Xaa is C or S
  MOD_RES (14), (15), (16), (17), (18): Xaa is A or G
  MOD_RES (19), (20), (21), (22): Xaa is A or G or is absent
GXSRVVMNNSLQEXXXXXXXXXYYLVTLPELKTPAXXPKP

SEQ ID NO: 13040 - protein, 38 aa, Artificial Sequence
  GFR-binding peptide
  MOD_RES (2), (4), (36), (37): Xaa is C or S
RXGXSEVVMDNSLQEVVNNASDYYVIPLPELRTPVXXT

SEQ ID NO: 13041 - protein, 36 aa, Artificial Sequence; identical to SEQ ID NO: 5626
  GFR-binding peptide
  MOD_RES (34), (35): Xaa is C or S
  MOD_RES (12), (13), (14), (15), (16): Xaa is A or G
  MOD_RES (17), (18), (19), (20): Xaa is A or G or is absent

SEQ ID NO: 13042 - protein, 41 aa, Artificial Sequence; identical to SEQ ID NO: 5629
  GFR-binding peptide
  MOD_RES (2), (4), (35), (36): Xaa is C or S

SEQ ID NO: 13043 - protein, 36 aa, Artificial Sequence
  GFR-binding peptide
  MOD_RES (1), (33), (34): Xaa is C or S
XGEVVMENSLQEVVKDYEDYYLMTLPELETPVXXAK

SEQ ID NO: 13044 - protein, 30 aa, Artificial Sequence
  GFR-binding peptide
RVVMNNSLQEIVNSSDDYYVVPLPELKTPA

SEQ ID NO: 13045 - protein, 33 aa, Artificial Sequence
  GFR-binding peptide
  MOD_RES (12), (13), (14), (15), (16): Xaa is A or G
  MOD_RES (17), (18), (19), (20): Xaa is A or G or is absent
SRVVMNEYQKYXXXXXXXXXIFLVSIPSLKTPA

SEQ ID NO: 13046 - protein, 44 aa, Artificial Sequence
  GFR-binding peptide
  MOD_RES (2), (4), (38), (39): Xaa is C or S
  MOD_RES (16), (17), (18), (19), (20): Xaa is A or G
  MOD_RES (21), (22), (23), (24): Xaa is A or G or is absent
RXGXGEVVMDNSLQEXXXXXXXXXYYVMPLPELETPVXXAKPIK

SEQ ID NO: 13047 - protein, 36 aa, Artificial Sequence
  GFR-binding peptide
  MOD_RES (2), (35), (36): Xaa is C or S
  MOD_RES (13), (14), (15), (16), (17): Xaa is A or G
  MOD_RES (18), (19), (20), (21): Xaa is A or G or is absent
KXSRVIMEYQKYXXXXXXXXXIFLISIPSLAQPVXX

SEQ ID NO: 13048 - protein, 39 aa, Artificial Sequence; identical to SEQ ID NO: 5632
  GFR-binding peptide
  MOD_RES (2), (4), (35), (36): Xaa is C or S

SEQ ID NO: 13049 - protein, 37 aa, Artificial Sequence; identical to SEQ ID NO: 5633
  GFR-binding peptide
  MOD_RES (2), (36), (37): Xaa is C or S
  MOD_RES (14), (15), (16), (17), (18): Xaa is A or G
  MOD_RES (19), (20), (21), (22): Xaa is A or G or is absent

SEQ ID NO: 13050 - protein, 42 aa, Artificial Sequence; identical to SEQ ID NO: 5634
  GFR-binding peptide
  MOD_RES (2), (36), (37): Xaa is C or S
  MOD_RES (14), (15), (16), (17), (18): Xaa is A or G
  MOD_RES (19), (20), (21), (22): Xaa is A or G or is absent

SEQ ID NO: 13051 - protein, 40 aa, Artificial Sequence
  GFR-binding peptide
  MOD_RES (2), (35), (36): Xaa is C or S
  MOD_RES (13), (14), (15), (16), (17): Xaa is A or G
  MOD_RES (18), (19), (20), (21): Xaa is A or G or is absent
KXSKVVMNSLQEXXXXXXXXXYYVIPLPELDQPVXXPSAS

SEQ ID NO: 13052 - protein, 37 aa, Artificial Sequence
  GFR-binding peptide
  MOD_RES (2), (4), (36), (37): Xaa is C or S
HXGXSRVVMNEYQKYIVNSSDDIFLVSIPSLKTPAXX

SEQ ID NO: 13053 - protein, 33 aa, Artificial Sequence
  GFR-binding peptide
  MOD_RES (1), (33): Xaa is C or S
XARVVMNNSLQEIVNSSDDYYVVPLPELQTPAX

SEQ ID NO: 13054 - protein, 36 aa, Artificial Sequence
  GFR-binding peptide
  MOD_RES (1), (3), (35), (36): Xaa is C or S
XGXSEVVMDNSLQEVVNNASDYYVIPLPELRTPVXX

SEQ ID NO: 13055 - protein, 38 aa, Artificial Sequence
  GFR-binding peptide
  MOD_RES (1), (32), (33): Xaa is C or S
XSRVIMEYQKYVKPKRGVIFLISIPSLAQPVXXPAASA

SEQ ID NO: 13056 - protein, 33 aa, Artificial Sequence
  GFR-binding peptide
  MOD_RES (1), (3): Xaa is C or S
XKXSKVIMNSLQEIKPTKGIYYVIPLPELDQSV

SEQ ID NO: 13057 - protein, 33 aa, Artificial Sequence; identical to SEQ ID NO: 5637
  GFR-binding peptide
  MOD_RES (2), (2): Xaa is C or S

SEQ ID NO: 13058 - protein, 31 aa, Artificial Sequence
  GFR-binding peptide
GEVVMENSLQEVVKDYEDYYLMTLPELETPV

SEQ ID NO: 13059 - protein, 37 aa, Artificial Sequence; identical to SEQ ID NO: 5638
  GFR-binding peptide
  MOD_RES (33), (34): Xaa is C or S
  MOD_RES (11), (12), (13), (14), (15): Xaa is A or G
  MOD_RES (16), (17), (18), (19): Xaa is A or G or is absent

SEQ ID NO: 13060 - protein, 34 aa, Artificial Sequence
  GFR-binding peptide
  MOD_RES (1), (1): Xaa is C or S
  MOD_RES (13), (14), (15), (16), (17): Xaa is A or G
  MOD_RES (18), (19), (20), (21): Xaa is A or G or is absent
XGEVVMENSLQEXXXXXXXXXYYVMPLPELETPV

SEQ ID NO: 13061 - protein, 37 aa, Artificial Sequence
  GFR-binding peptide
  MOD_RES (2), (4), (35), (36): Xaa is C or S
SXKXSKVVMNSLQEVKPTRGVYYVIPLPELDQPVXXP

SEQ ID NO: 13062 - protein, 41 aa, Artificial Sequence
  GFR-binding peptide
  MOD_RES (1), (3), (37): Xaa is C or S
  MOD_RES (15), (16), (17), (18), (19): Xaa is A or G
  MOD_RES (20), (21), (22), (23): Xaa is A or G or is absent
XGXSRVVMNNSLQEXXXXXXXXXYYVVPLPELKTPAXTPKT

SEQ ID NO: 13063 - protein, 36 aa, Artificial Sequence
  GFR-binding peptide
  MOD_RES (1), (34), (35): Xaa is C or S
  MOD_RES (12), (13), (14), (15), (16): Xaa is A or G
  MOD_RES (17), (18), (19), (20): Xaa is A or G or is absent
XSKVVMEYQKYXXXXXXXXXIFLISIPSLDQPVXXP

SEQ ID NO: 13064 - protein, 35 aa, Artificial Sequence
  GFR-binding peptide
  MOD_RES (31), (32): Xaa is C or S
EVVMEEYQKYVVKDYEDIFLMSIPSLETPVXXAKP

SEQ ID NO: 13065 - protein, 40 aa, Artificial Sequence
  GFR-binding peptide
  MOD_RES (2), (4), (36), (37): Xaa is C or S
RXGXSEVVMDNSLQEVVNNASDYYVIPLPELRTPVXXTPP

SEQ ID NO: 13066 - protein, 40 aa, Artificial Sequence; identical to SEQ ID NO: 5640
  GFR-binding peptide
  MOD_RES (1), (3), (35), (36): Xaa is C or S

SEQ ID NO: 13067 - protein, 33 aa, Artificial Sequence
  GFR-binding peptide
  MOD_RES (1), (1): Xaa is C or S
  MOD_RES (12), (13), (14), (15), (16): Xaa is A or G
  MOD_RES (17), (18), (19), (20): Xaa is A or G or is absent
XSKVVMEYQKYXXXXXXXXXIFLISIPSLDQPV

SEQ ID NO: 13068 - protein, 35 aa, Artificial Sequence
  GFR-binding peptide
  MOD_RES (34), (35): Xaa is C or S
  MOD_RES (12), (13), (14), (15), (16): Xaa is A or G
  MOD_RES (17), (18), (19), (20): Xaa is A or G or is absent
SEVVMDEYQKYXXXXXXXXXIFLISIPSLRTPVXX

SEQ ID NO: 13069 - protein, 34 aa, Artificial Sequence
  GFR-binding peptide
  MOD_RES (1), (1): Xaa is C or S
  MOD_RES (13), (14), (15), (16), (17): Xaa is A or G
  MOD_RES (18), (19), (20), (21): Xaa is A or G or is absent
XSEVVMDRYKKLXXXXXXXXXFYLISIANLRTPV

SEQ ID NO: 13070 - protein, 34 aa, Artificial Sequence
  GFR-binding peptide
  MOD_RES (1), (1): Xaa is C or S
  MOD_RES (13), (14), (15), (16), (17): Xaa is A or G
  MOD_RES (18), (19), (20), (21): Xaa is A or G or is absent
XARVVMNNSLQEXXXXXXXXXYYVVPLPELQTPA

SEQ ID NO: 13071 - protein, 37 aa, Artificial Sequence
  GFR-binding peptide
  MOD_RES (2), (33), (34): Xaa is C or S
KXSKVIMNSLQEIKPTKGIYYVIPLPELDQSVXXPSA

SEQ ID NO: 13072 - protein, 31 aa, Artificial Sequence
  GFR-binding peptide
  MOD_RES (31), (31): Xaa is C or S
SKVIMEYQKYIKPTKGIIFLISIPSLDQSVX

SEQ ID NO: 13073 - protein, 42 aa, Artificial Sequence; identical to SEQ ID NO: 5644
  GFR-binding peptide
  MOD_RES (2), (4), (38), (39): Xaa is C or S
  MOD_RES (16), (17), (18), (19), (20): Xaa is A or G
  MOD_RES (21), (22), (23), (24): Xaa is A or G or is absent

SEQ ID NO: 13074 - protein, 39 aa, Artificial Sequence; identical to SEQ ID NO: 5645
  GFR-binding peptide
  MOD_RES (33), (34): Xaa is C or S
  MOD_RES (11), (12), (13), (14), (15): Xaa is A or G
  MOD_RES (16), (17), (18), (19): Xaa is A or G or is absent

SEQ ID NO: 13075 - protein, 44 aa, Artificial Sequence; identical to SEQ ID NO: 5647
  GFR-binding peptide
  MOD_RES (2), (4), (38), (39): Xaa is C or S
  MOD_RES (16), (17), (18), (19), (20): Xaa is A or G
  MOD_RES (21), (22), (23), (24): Xaa is A or G or is absent

SEQ ID NO: 13076 - protein, 35 aa, Artificial Sequence
  GFR-binding peptide
  MOD_RES (2), (4): Xaa is C or S
HXGXSRVVMNEYQKYIVNSSDDIFLVSIPSLKTPA

SEQ ID NO: 13077 - protein, 34 aa, Artificial Sequence
  GFR-binding peptide
  MOD_RES (32), (33): Xaa is C or S
GEVVMEEYQKYVVKDYEDIFLMSIPSLETPVXXA

SEQ ID NO: 13078 - protein, 40 aa, Artificial Sequence
  GFR-binding peptide
  MOD_RES (1), (3), (35), (36): Xaa is C or S
XGXGEVVMDEYQKYVVKENEDIFLMSIPSLETPVXXAKPI

SEQ ID NO: 13079 - protein, 38 aa, Artificial Sequence
  GFR-binding peptide
  MOD_RES (1), (35), (36): Xaa is C or S
  MOD_RES (13), (14), (15), (16), (17): Xaa is A or G
  MOD_RES (18), (19), (20), (21): Xaa is A or G or is absent
XSRVVMNEYQKYXXXXXXXXXIFLVSIPSLKTPAXXPK

SEQ ID NO: 13080 - protein, 40 aa, Artificial Sequence
  GFR-binding peptide
  MOD_RES (1), (3), (35), (36): Xaa is C or S
XGXGEVVMDNSLQEVVKENEDYYLMTLPELETPVXXAKPI

SEQ ID NO: 13081 - protein, 41 aa, Artificial Sequence; identical to SEQ ID NO: 5652
  GFR-binding peptide
  MOD_RES (1), (3), (37), (38): Xaa is C or S
  MOD_RES (15), (16), (17), (18), (19): Xaa is A or G
  MOD_RES (20), (21), (22), (23): Xaa is A or G or is absent

SEQ ID NO: 13082 - protein, 34 aa, Artificial Sequence
  GFR-binding peptide
  MOD_RES (2), (33), (34): Xaa is C or S
KXSKVVMEYQKYVKPTRGVIFLISIPSLDQPVXX

SEQ ID NO: 13083 - protein, 42 aa, Artificial Sequence; identical to SEQ ID NO: 5655
  GFR-binding peptide
  MOD_RES (1), (3), (36), (37): Xaa is C or S
  MOD_RES (14), (15), (16), (17), (18): Xaa is A or G
  MOD_RES (19), (20), (21), (22): Xaa is A or G or is absent

SEQ ID NO: 13084 - protein, 39 aa, Artificial Sequence
  GFR-binding peptide
  MOD_RES (33), (33): Xaa is C or S
  MOD_RES (11), (12), (13), (14), (15): Xaa is A or G
  MOD_RES (16), (17), (18), (19): Xaa is A or G or is absent
RVVMNEYQKYXXXXXXXXXIFLVSIPSLKTPAXTPKTVH

SEQ ID NO: 13085 - protein, 36 aa, Artificial Sequence
  GFR-binding peptide
  MOD_RES (1), (35), (36): Xaa is C or S
  MOD_RES (13), (14), (15), (16), (17): Xaa is A or G
  MOD_RES (18), (19), (20), (21): Xaa is A or G or is absent
XSEVVMDNSLQEXXXXXXXXXYYVIPLPELRTPVXX

SEQ ID NO: 13086 - protein, 37 aa, Artificial Sequence
  GFR-binding peptide
  MOD_RES (1), (34), (35): Xaa is C or S
  MOD_RES (12), (13), (14), (15), (16): Xaa is A or G
  MOD_RES (17), (18), (19), (20): Xaa is A or G or is absent
XSRVIMEYQKYXXXXXXXXXIFLISIPSLAQPVXXPA

SEQ ID NO: 13087 - protein, 43 aa, Artificial Sequence; identical to SEQ ID NO: 5656
  GFR-binding peptide
  MOD_RES (2), (4), (37), (38): Xaa is C or S
  MOD_RES (15), (16), (17), (18), (19): Xaa is A or G
  MOD_RES (20), (21), (22), (23): Xaa is A or G or is absent

SEQ ID NO: 13088 - protein, 33 aa, Artificial Sequence; identical to SEQ ID NO: 5657
  GFR-binding peptide
  MOD_RES (1), (3): Xaa is C or S

SEQ ID NO: 13089 - protein, 37 aa, Artificial Sequence
  GFR-binding peptide
  MOD_RES (1), (35): Xaa is C or S
  MOD_RES (13), (14), (15), (16), (17): Xaa is A or G
  MOD_RES (18), (19), (20), (21): Xaa is A or G or is absent
XSRVVMNNSLQEXXXXXXXXXYYLVTLPELKTPAXTP

SEQ ID NO: 13090 - protein, 40 aa, Artificial Sequence; identical to SEQ ID NO: 5658
  GFR-binding peptide
  MOD_RES (1), (35): Xaa is C or S
  MOD_RES (13), (14), (15), (16), (17): Xaa is A or G
  MOD_RES (18), (19), (20), (21): Xaa is A or G or is absent

SEQ ID NO: 13091 - protein, 38 aa, Artificial Sequence
  GFR-binding peptide
  MOD_RES (33), (34): Xaa is C or S
  MOD_RES (11), (12), (13), (14), (15): Xaa is A or G
  MOD_RES (16), (17), (18), (19): Xaa is A or G or is absent
EVVMDNSLQEXXXXXXXXXYYLMTLPELETPVXXAKPI

SEQ ID NO: 13092 - protein, 37 aa, Artificial Sequence
  GFR-binding peptide
  MOD_RES (32), (33): Xaa is C or S
SRVVMNEYQKYIVNSSDDIFLVSIPSLKTPAXXPKPV

SEQ ID NO: 13093 - protein, 34 aa, Artificial Sequence
  GFR-binding peptide
  MOD_RES (1), (33), (34): Xaa is C or S
XGEVVMDNSLQEVVKENEDYYVMPLPELETPVXX

SEQ ID NO: 13094 - protein, 41 aa, Artificial Sequence
  GFR-binding peptide
  MOD_RES (2), (4), (36): Xaa is C or S
HXGXSRVVMNEYQKYIVNSSDDIFLVSIPSLKTPAXTPKTV

SEQ ID NO: 13095 - protein, 39 aa, Artificial Sequence
  GFR-binding peptide
  MOD_RES (2), (34), (35): Xaa is C or S
GXARVVMNEYQKYIVNSSDDIFLVSIPSLQTPAXXPKPV

SEQ ID NO: 13096 - protein, 40 aa, Artificial Sequence; identical to SEQ ID NO: 5659
  GFR-binding peptide
  MOD_RES (2), (4), (36), (37): Xaa is C or S

SEQ ID NO: 13097 - protein, 41 aa, Artificial Sequence
  GFR-binding peptide
  MOD_RES (1), (35), (36): Xaa is C or S
  MOD_RES (13), (14), (15), (16), (17): Xaa is A or G
  MOD_RES (18), (19), (20), (21): Xaa is A or G or is absent
XARVVMNEYQKYXXXXXXXXXIFLVSIPSLQTPAXXPKPVT

SEQ ID NO: 13098 - protein, 39 aa, Artificial Sequence
  GFR-binding peptide
  MOD_RES (2), (34), (35): Xaa is C or S
GXSRVVMNNSLQEIVNSSDDYYVVPLPELKTPAXXPKPV

SEQ ID NO: 13099 - protein, 38 aa, Artificial Sequence
  GFR-binding peptide
  MOD_RES (2), (4), (36), (37): Xaa is C or S
HXGXSRVVMNNSLQEIVNSSDDYYLVTLPELKTPAXXP

SEQ ID NO: 13100 - protein, 39 aa, Artificial Sequence; identical to SEQ ID NO: 5663
  GFR-binding peptide
  MOD_RES (1), (3), (35): Xaa is C or S

SEQ ID NO: 13101 - protein, 38 aa, Artificial Sequence
  GFR-binding peptide
  MOD_RES (1), (3), (37), (38): Xaa is C or S
  MOD_RES (15), (16), (17), (18), (19): Xaa is A or G
  MOD_RES (20), (21), (22), (23): Xaa is A or G or is absent
XGXSRVVMNEYQKYXXXXXXXXXIFLVSIPSLKTPAXX

SEQ ID NO: 13102 - protein, 38 aa, Artificial Sequence
  GFR-binding peptide
  MOD_RES (33), (34): Xaa is C or S
  MOD_RES (11), (12), (13), (14), (15): Xaa is A or G
  MOD_RES (16), (17), (18), (19): Xaa is A or G or is absent
EVVMDNSLQEXXXXXXXXXYYVMPLPELETPVXXAKPI

SEQ ID NO: 13103 - protein, 33 aa, Artificial Sequence; identical to SEQ ID NO: 5667
  GFR-binding peptide
  MOD_RES (2), (2): Xaa is C or S

SEQ ID NO: 13104 - protein, 36 aa, Artificial Sequence
  GFR-binding peptide
  MOD_RES (31), (32): Xaa is C or S
EVVMDNSLQEVVNNASDYYVIPLPELRTPVXXTPPT

SEQ ID NO: 13105 - protein, 34 aa, Artificial Sequence
  GFR-binding peptide
  MOD_RES (34), (34): Xaa is C or S
  MOD_RES (12), (13), (14), (15), (16): Xaa is A or G
  MOD_RES (17), (18), (19), (20): Xaa is A or G or is absent
SEVVMDEYQKYXXXXXXXXXIFLISIPSLRTPVX

SEQ ID NO: 13106 - protein, 34 aa, Artificial Sequence
  GFR-binding peptide
  MOD_RES (33), (34): Xaa is C or S
  MOD_RES (11), (12), (13), (14), (15): Xaa is A or G
  MOD_RES (16), (17), (18), (19): Xaa is A or G or is absent
SRVIMEYQKYXXXXXXXXXIFLISIPSLAQPVXX

SEQ ID NO: 13107 - protein, 40 aa, Artificial Sequence
  GFR-binding peptide
  MOD_RES (1), (3), (36), (37): Xaa is C or S
  MOD_RES (14), (15), (16), (17), (18): Xaa is A or G
  MOD_RES (19), (20), (21), (22): Xaa is A or G or is absent
XKXSKVVMNSLQEXXXXXXXXXYYLITLPELDQPVXXPSA

SEQ ID NO: 13108 - protein, 36 aa, Artificial Sequence; identical to SEQ ID NO: 5670
  GFR-binding peptide
  MOD_RES (33), (34): Xaa is C or S
  MOD_RES (11), (12), (13), (14), (15): Xaa is A or G
  MOD_RES (16), (17), (18), (19): Xaa is A or G or is absent

SEQ ID NO: 13109 - protein, 36 aa, Artificial Sequence
  GFR-binding peptide
  MOD_RES (1), (3), (35), (36): Xaa is C or S
XGXSEVVMDQYNKLVVNNASDLYLISIASLRTPVXX

SEQ ID NO: 13110 - protein, 37 aa, Artificial Sequence
  GFR-binding peptide
  MOD_RES (2), (4): Xaa is C or S
  MOD_RES (16), (17), (18), (19), (20): Xaa is A or G
  MOD_RES (21), (22), (23), (24): Xaa is A or G or is absent
RXGXGEVVMDEYQKYXXXXXXXXXIFLMSIPSLETPV

SEQ ID NO: 13111 - protein, 37 aa, Artificial Sequence; identical to SEQ ID NO: 5671
  GFR-binding peptide
  MOD_RES (1), (34), (35): Xaa is C or S
  MOD_RES (12), (13), (14), (15), (16): Xaa is A or G
  MOD_RES (17), (18), (19), (20): Xaa is A or G or is absent

SEQ ID NO: 13112 - protein, 39 aa, Artificial Sequence
  GFR-binding peptide
  MOD_RES (2), (36): Xaa is C or S
  MOD_RES (14), (15), (16), (17), (18): Xaa is A or G
  MOD_RES (19), (20), (21), (22): Xaa is A or G or is absent
GXSRVVMNNSLQEXXXXXXXXXYYVVPLPELKTPAXTPK

SEQ ID NO: 13113 - protein, 31 aa, Artificial Sequence; identical to SEQ ID NO: 5672
  GFR-binding peptide
  MOD_RES (31), (31): Xaa is C or S

SEQ ID NO: 13114 - protein, 41 aa, Artificial Sequence
  GFR-binding peptide
  MOD_RES (1), (3), (37), (38): Xaa is C or S
  MOD_RES (15), (16), (17), (18), (19): Xaa is A or G
  MOD_RES (20), (21), (22), (23): Xaa is A or G or is absent
XGXSRVVMNNSLQEXXXXXXXXXYYLVTLPELKTPAXXPKP

SEQ ID NO: 13115 - protein, 33 aa, Artificial Sequence; identical to SEQ ID NO: 5677
  GFR-binding peptide
  MOD_RES (2), (33): Xaa is C or S

SEQ ID NO: 13116 - protein, 40 aa, Artificial Sequence; identical to SEQ ID NO: 5678
  GFR-binding peptide
  MOD_RES (1), (35), (36): Xaa is C or S
  MOD_RES (13), (14), (15), (16), (17): Xaa is A or G
  MOD_RES (18), (19), (20), (21): Xaa is A or G or is absent

SEQ ID NO: 13117 - protein, 35 aa, Artificial Sequence
  GFR-binding peptide
  MOD_RES (2), (4): Xaa is C or S
RXGXGEVVMDEYQKYVVKENEDIFLMSIPSLETPV

SEQ ID NO: 13118 - protein, 41 aa, Artificial Sequence
  GFR-binding peptide
  MOD_RES (1), (35): Xaa is C or S
  MOD_RES (13), (14), (15), (16), (17): Xaa is A or G
  MOD_RES (18), (19), (20), (21): Xaa is A or G or is absent
XSRVVMNEYQKYXXXXXXXXXIFLVSIPSLKTPAXTPKTVH

SEQ ID NO: 13119 - protein, 35 aa, Artificial Sequence; identical to SEQ ID NO: 5679
  GFR-binding peptide
  MOD_RES (1), (3), (35): Xaa is C or S

SEQ ID NO: 13120 - protein, 37 aa, Artificial Sequence; identical to SEQ ID NO: 5682
  GFR-binding peptide
  MOD_RES (1), (3), (36), (37): Xaa is C or S
  MOD_RES (14), (15), (16), (17), (18): Xaa is A or G
  MOD_RES (19), (20), (21), (22): Xaa is A or G or is absent

SEQ ID NO: 13121 - protein, 35 aa, Artificial Sequence
  GFR-binding peptide
  MOD_RES (1), (3): Xaa is C or S
  MOD_RES (14), (15), (16), (17), (18): Xaa is A or G
  MOD_RES (19), (20), (21), (22): Xaa is A or G or is absent
XKXSKVVMNSLQEXXXXXXXXXYYLITLPELDQPV

SEQ ID NO: 13122 - protein, 37 aa, Artificial Sequence; identical to SEQ ID NO: 5683
  GFR-binding peptide
  MOD_RES (2), (34), (35): Xaa is C or S

SEQ ID NO: 13123 - protein, 35 aa, Artificial Sequence
  GFR-binding peptide
  MOD_RES (33), (34): Xaa is C or S
  MOD_RES (11), (12), (13), (14), (15): Xaa is A or G
  MOD_RES (16), (17), (18), (19): Xaa is A or G or is absent
RVVMNNSLQEXXXXXXXXXYYVVPLPELKTPAXXP

SEQ ID NO: 13124 - protein, 32 aa, Artificial Sequence
  GFR-binding peptide
  MOD_RES (1), (1): Xaa is C or S
XSEVVMDNSLQEVVNNASDYYLITLPELRTPV

SEQ ID NO: 13125 - protein, 36 aa, Artificial Sequence; identical to SEQ ID NO: 5685
  GFR-binding peptide
  MOD_RES (1), (3): Xaa is C or S
  MOD_RES (15), (16), (17), (18), (19): Xaa is A or G
  MOD_RES (20), (21), (22), (23): Xaa is A or G or is absent

SEQ ID NO: 13126 - protein, 33 aa, Artificial Sequence; identical to SEQ ID NO: 5687
  GFR-binding peptide
  MOD_RES (12), (13), (14), (15), (16): Xaa is A or G
  MOD_RES (17), (18), (19), (20): Xaa is A or G or is absent

SEQ ID NO: 13127 - protein, 35 aa, Artificial Sequence; identical to SEQ ID NO: 5688
  GFR-binding peptide
  MOD_RES (1), (32), (33): Xaa is C or S

SEQ ID NO: 13128 - protein, 38 aa, Artificial Sequence
  GFR-binding peptide
  MOD_RES (33), (34): Xaa is C or S
  MOD_RES (11), (12), (13), (14), (15): Xaa is A or G
  MOD_RES (16), (17), (18), (19): Xaa is A or G or is absent
EVVMDNSLQEXXXXXXXXXYYVIPLPELRTPVXXTPPT

SEQ ID NO: 13129 - protein, 39 aa, Artificial Sequence
  GFR-binding peptide
  MOD_RES (34), (35): Xaa is C or S
  MOD_RES (12), (13), (14), (15), (16): Xaa is A or G
  MOD_RES (17), (18), (19), (20): Xaa is A or G or is absent
SRVVMNEYQKYXXXXXXXXXIFLVSIPSLKTPAXXPKPV

SEQ ID NO: 13130 - protein, 43 aa, Artificial Sequence; identical to SEQ ID NO: 5690
  GFR-binding peptide
  MOD_RES (1), (3), (37), (38): Xaa is C or S
  MOD_RES (15), (16), (17), (18), (19): Xaa is A or G
  MOD_RES (20), (21), (22), (23): Xaa is A or G or is absent

SEQ ID NO: 13131 - protein, 35 aa, Artificial Sequence; identical to SEQ ID NO: 5691
  GFR-binding peptide
  MOD_RES (2), (33), (34): Xaa is C or S

SEQ ID NO: 13132 - protein, 37 aa, Artificial Sequence
  GFR-binding peptide
  MOD_RES (31), (32): Xaa is C or S
EVVMDRYKKLVVNNASDFYLISIANLRTPVXXTPPTS

SEQ ID NO: 13133 - protein, 36 aa, Artificial Sequence; identical to SEQ ID NO: 5693
  GFR-binding peptide
  MOD_RES (34), (35): Xaa is C or S
  MOD_RES (12), (13), (14), (15), (16): Xaa is A or G
  MOD_RES (17), (18), (19), (20): Xaa is A or G or is absent

SEQ ID NO: 13134 - protein, 35 aa, Artificial Sequence
  GFR-binding peptide
  MOD_RES (1), (35): Xaa is C or S
  MOD_RES (13), (14), (15), (16), (17): Xaa is A or G
  MOD_RES (18), (19), (20), (21): Xaa is A or G or is absent
XGEVVMDEYQKYXXXXXXXXXIFLMSIPSLETPVX

SEQ ID NO: 13135 - protein, 33 aa, Artificial Sequence
  GFR-binding peptide
  MOD_RES (33), (33): Xaa is C or S
  MOD_RES (11), (12), (13), (14), (15): Xaa is A or G
  MOD_RES (16), (17), (18), (19): Xaa is A or G or is absent
RVVMNNSLQEXXXXXXXXXYYVVPLPELQTPAX

SEQ ID NO: 13136 - protein, 30 aa, Artificial Sequence; identical to SEQ ID NO: 5696
  GFR-binding peptide

SEQ ID NO: 13137 - protein, 33 aa, Artificial Sequence; identical to SEQ ID NO: 5699
  GFR-binding peptide
  MOD_RES (12), (13), (14), (15), (16): Xaa is A or G
  MOD_RES (17), (18), (19), (20): Xaa is A or G or is absent

SEQ ID NO: 13138 - protein, 31 aa, Artificial Sequence; identical to SEQ ID NO: 5701
  GFR-binding peptide

SEQ ID NO: 13139 - protein, 38 aa, Artificial Sequence
  GFR-binding peptide
  MOD_RES (2), (36), (37): Xaa is C or S
  MOD_RES (14), (15), (16), (17), (18): Xaa is A or G
  MOD_RES (19), (20), (21), (22): Xaa is A or G or is absent
GXARVVMNNSLQEXXXXXXXXXYYVVPLPELQTPAXXP

SEQ ID NO: 13140 - protein, 41 aa, Artificial Sequence
  GFR-binding peptide
  MOD_RES (1), (3), (35), (36): Xaa is C or S
XGXARVVMNNSLQEIVNSSDDYYVVPLPELQTPAXXPKPVT

SEQ ID NO: 13141 - protein, 40 aa, Artificial Sequence
  GFR-binding peptide
  MOD_RES (1), (35), (36): Xaa is C or S
  MOD_RES (13), (14), (15), (16), (17): Xaa is A or G
  MOD_RES (18), (19), (20), (21): Xaa is A or G or is absent
XARVVMNNSLQEXXXXXXXXXYYLVTLPELQTPAXXPKPV

SEQ ID NO: 13142 - protein, 40 aa, Artificial Sequence
  GFR-binding peptide
  MOD_RES (1), (3), (35), (36): Xaa is C or S
XGXSRVVMNEYQKYIVNSSDDIFLVSIPSLKTPAXXPKPV

SEQ ID NO: 13143 - protein, 39 aa, Artificial Sequence
  GFR-binding peptide
  MOD_RES (2), (4), (36), (37): Xaa is C or S
HXGXSRVVMNNSLQEIVNSSDDYYLVTLPELKTPAXXPK

SEQ ID NO: 13144 - protein, 37 aa, Artificial Sequence; identical to SEQ ID NO: 5705
  GFR-binding peptide
  MOD_RES (2), (4): Xaa is C or S
  MOD_RES (16), (17), (18), (19), (20): Xaa is A or G
  MOD_RES (21), (22), (23), (24): Xaa is A or G or is absent

SEQ ID NO: 13145 - protein, 35 aa, Artificial Sequence; identical to SEQ ID NO: 5708
  GFR-binding peptide
  MOD_RES (2), (4): Xaa is C or S

SEQ ID NO: 13146 - protein, 35 aa, Artificial Sequence; identical to SEQ ID NO: 5709
  GFR-binding peptide
  MOD_RES (1), (35): Xaa is C or S
  MOD_RES (13), (14), (15), (16), (17): Xaa is A or G
  MOD_RES (18), (19), (20), (21): Xaa is A or G or is absent

SEQ ID NO: 13147 - protein, 33 aa, Artificial Sequence
  GFR-binding peptide
  MOD_RES (31), (32): Xaa is C or S
RVVMNNSLQEIVNSSDDYYVVPLPELQTPAXXP

SEQ ID NO: 13148 - protein, 39 aa, Artificial Sequence; identical to SEQ ID NO: 5712
  GFR-binding peptide
  MOD_RES (2), (34), (35): Xaa is C or S

SEQ ID NO: 13149 - protein, 36 aa, Artificial Sequence; identical to SEQ ID NO: 5714
  GFR-binding peptide
  MOD_RES (33), (34): Xaa is C or S
  MOD_RES (11), (12), (13), (14), (15): Xaa is A or G
  MOD_RES (16), (17), (18), (19): Xaa is A or G or is absent

SEQ ID NO: 13150 - protein, 40 aa, Artificial Sequence
  GFR-binding peptide
  MOD_RES (1), (3), (35), (36): Xaa is C or S
XGXARVVMNNSLQEIVNSSDDYYLVTLPELQTPAXXPKPV

SEQ ID NO: 13151 - protein, 39 aa, Artificial Sequence
  GFR-binding peptide
  MOD_RES (1), (33), (34): Xaa is C or S
XSRVVMNNSLQEIVNSSDDYYVVPLPELKTPAXXPKPVY

SEQ ID NO: 13152 - protein, 39 aa, Artificial Sequence
  GFR-binding peptide
  MOD_RES (2), (34), (35): Xaa is C or S
GXSRVVMNEYQKYIVNSSDDIFLVSIPSLKTPAXXPKPV

SEQ ID NO: 13153 - protein, 39 aa, Artificial Sequence
  GFR-binding peptide
  MOD_RES (1), (3), (35), (36): Xaa is C or S
XGXSEVVMDEYQKYVVNNASDIFLISIPSLRTPVXXTPP

SEQ ID NO: 13154 - protein, 35 aa, Artificial Sequence; identical to SEQ ID NO: 5719
  GFR-binding peptide
  MOD_RES (31), (32): Xaa is C or S

SEQ ID NO: 13155 - protein, 36 aa, Artificial Sequence
  GFR-binding peptide
  MOD_RES (2), (4), (35), (36): Xaa is C or S
SXKXSRVIMNSLQEVKPKRGVYYLITLPELAQPVXX

SEQ ID NO: 13156 - protein, 38 aa, Artificial Sequence; identical to SEQ ID NO: 5721
  GFR-binding peptide
  MOD_RES (1), (35), (36): Xaa is C or S
  MOD_RES (13), (14), (15), (16), (17): Xaa is A or G
  MOD_RES (18), (19), (20), (21): Xaa is A or G or is absent

SEQ ID NO: 13157 - protein, 36 aa, Artificial Sequence
  GFR-binding peptide
  MOD_RES (2), (4), (36): Xaa is C or S
RXGXGEVVMDNSLQEVVKENEDYYVMPLPELETPVX

SEQ ID NO: 13158 - protein, 38 aa, Artificial Sequence; identical to SEQ ID NO: 5724
  GFR-binding peptide
  MOD_RES (2), (33), (34): Xaa is C or S

SEQ ID NO: 13159 - protein, 42 aa, Artificial Sequence
  GFR-binding peptide
  MOD_RES (2), (4), (38), (39): Xaa is C or S
  MOD_RES (16), (17), (18), (19), (20): Xaa is A or G
  MOD_RES (21), (22), (23), (24): Xaa is A or G or is absent
HXGXARVVMNNSLQEXXXXXXXXXYYVVPLPELQTPAXXPKP

SEQ ID NO: 13160 - protein, 36 aa, Artificial Sequence
  GFR-binding peptide
  MOD_RES (2), (4), (35), (36): Xaa is C or S
SXKXSKVIMEYQKYIKPTKGIIFLISIPSLDQSVXX

SEQ ID NO: 13161 - protein, 40 aa, Artificial Sequence; identical to SEQ ID NO: 5726
  GFR-binding peptide
  MOD_RES (2), (4), (38), (39): Xaa is C or S
  MOD_RES (16), (17), (18), (19), (20): Xaa is A or G
  MOD_RES (21), (22), (23), (24): Xaa is A or G or is absent

SEQ ID NO: 13162 - protein, 38 aa, Artificial Sequence
  GFR-binding peptide
  MOD_RES (1), (3), (35), (36): Xaa is C or S
XGXSEVVMDNSLQEVVNNASDYYLITLPELRTPVXXTP

SEQ ID NO: 13163 - protein, 38 aa, Artificial Sequence
  GFR-binding peptide
  MOD_RES (33), (34): Xaa is C or S
  MOD_RES (11), (12), (13), (14), (15): Xaa is A or G
  MOD_RES (16), (17), (18), (19): Xaa is A or G or is absent
RVVMNNSLQEXXXXXXXXXYYLVTLPELQTPAXXPKPV

SEQ ID NO: 13164 - protein, 39 aa, Artificial Sequence
  GFR-binding peptide
  MOD_RES (1), (3), (35), (36): Xaa is C or S
XGXSEVVMDNSLQEVVNNASDYYLITLPELRTPVXXTPP

SEQ ID NO: 13165 - protein, 40 aa, Artificial Sequence
  GFR-binding peptide
  MOD_RES (2), (4), (38), (39): Xaa is C or S
  MOD_RES (16), (17), (18), (19), (20): Xaa is A or G
  MOD_RES (21), (22), (23), (24): Xaa is A or G or is absent
HXGXARVVMNEYQKYXXXXXXXXXIFLVSIPSLQTPAXXP

SEQ ID NO: 13166 - protein, 44 aa, Artificial Sequence
  GFR-binding peptide
  MOD_RES (2), (4), (38): Xaa is C or S
  MOD_RES (16), (17), (18), (19), (20): Xaa is A or G
  MOD_RES (21), (22), (23), (24): Xaa is A or G or is absent
HXGXSRVVMNEYQKYXXXXXXXXXIFLVSIPSLKTPAXTPKTVH

SEQ ID NO: 13167 - protein, 33 aa, Artificial Sequence
  GFR-binding peptide
  MOD_RES (2), (2): Xaa is C or S
GXGEVVMDNSLQEVVKENEDYYLMTLPELETPV

SEQ ID NO: 13168 - protein, 39 aa, Artificial Sequence; identical to SEQ ID NO: 5733
  GFR-binding peptide
  MOD_RES (2), (4), (35), (36): Xaa is C or S

SEQ ID NO: 13169 - protein, 41 aa, Artificial Sequence
  GFR-binding peptide
  MOD_RES (2), (4), (38), (39): Xaa is C or S
  MOD_RES (16), (17), (18), (19), (20): Xaa is A or G
  MOD_RES (21), (22), (23), (24): Xaa is A or G or is absent
HXGXSRVVMNEYQKYXXXXXXXXXIFLVSIPSLKTPAXXPK

SEQ ID NO: 13170 - protein, 38 aa, Artificial Sequence; identical to SEQ ID NO: 5734
  GFR-binding peptide
  MOD_RES (2), (4), (36), (37): Xaa is C or S

SEQ ID NO: 13171 - protein, 42 aa, Artificial Sequence
  GFR-binding peptide
  MOD_RES (2), (4), (38), (39): Xaa is C or S
  MOD_RES (16), (17), (18), (19), (20): Xaa is A or G
  MOD_RES (21), (22), (23), (24): Xaa is A or G or is absent
RXGXGEVVMDNSLQEXXXXXXXXXYYLMTLPELETPVXXAKP

SEQ ID NO: 13172 - protein, 40 aa, Artificial Sequence
  GFR-binding peptide
  MOD_RES (1), (35), (36): Xaa is C or S
  MOD_RES (13), (14), (15), (16), (17): Xaa is A or G
  MOD_RES (18), (19), (20), (21): Xaa is A or G or is absent
XGEVVMDEYQKYXXXXXXXXXIFLMSIPSLETPVXXAKPI

SEQ ID NO: 13173 - protein, 36 aa, Artificial Sequence
  GFR-binding peptide
  MOD_RES (2), (4): Xaa is C or S
  MOD_RES (15), (16), (17), (18), (19): Xaa is A or G
  MOD_RES (20), (21), (22), (23): Xaa is A or G or is absent
SXKXSKVVMNSLQEXXXXXXXXXYYLITLPELDQPV

SEQ ID NO: 13174 - protein, 33 aa, Artificial Sequence
  GFR-binding peptide
  MOD_RES (32), (33): Xaa is C or S
GEVVMDEYQKYVVKENEDIFLMSIPSLETPVXX

SEQ ID NO: 13175 - protein, 33 aa, Artificial Sequence
  GFR-binding peptide
  MOD_RES (1), (32), (33): Xaa is C or S
XSKVVMNSLQEVKPTRGVYYVIPLPELDQPVXX

SEQ ID NO: 13176 - protein, 35 aa, Artificial Sequence
  GFR-binding peptide
  MOD_RES (1), (32), (33): Xaa is C or S
XSKVVMEYQKYVKPTRGVIFLISIPSLDQPVXXPS

SEQ ID NO: 13177 - protein, 41 aa, Artificial Sequence
  GFR-binding peptide
  MOD_RES (2), (4), (36), (37): Xaa is C or S
RXGXGEVVMENSLQEVVKDYEDYYVMPLPELETPVXXAKPI

SEQ ID NO: 13178 - protein, 37 aa, Artificial Sequence; identical to SEQ ID NO: 5739
  GFR-binding peptide
  MOD_RES (2), (4), (37): Xaa is C or S
  MOD_RES (15), (16), (17), (18), (19): Xaa is A or G
  MOD_RES (20), (21), (22), (23): Xaa is A or G or is absent

SEQ ID NO: 13179 - protein, 35 aa, Artificial Sequence; identical to SEQ ID NO: 5742
  GFR-binding peptide
  MOD_RES (2), (4): Xaa is C or S

SEQ ID NO: 13180 - protein, 37 aa, Artificial Sequence; identical to SEQ ID NO: 5743
  GFR-binding peptide
  MOD_RES (1), (34), (35): Xaa is C or S
  MOD_RES (12), (13), (14), (15), (16): Xaa is A or G
  MOD_RES (17), (18), (19), (20): Xaa is A or G or is absent

SEQ ID NO: 13181 - protein, 42 aa, Artificial Sequence; identical to SEQ ID NO: 5745
  GFR-binding peptide
  MOD_RES (2), (4), (37), (38): Xaa is C or S
  MOD_RES (15), (16), (17), (18), (19): Xaa is A or G
  MOD_RES (20), (21), (22), (23): Xaa is A or G or is absent

SEQ ID NO: 13182 - protein, 32 aa, Artificial Sequence
  GFR-binding peptide
  MOD_RES (11), (12), (13), (14), (15): Xaa is A or G
  MOD_RES (16), (17), (18), (19): Xaa is A or G or is absent
EVVMDNSLQEXXXXXXXXXYYVIPLPELRTPV

SEQ ID NO: 13183 - protein, 38 aa, Artificial Sequence
  GFR-binding peptide
  MOD_RES (34), (34): Xaa is C or S
  MOD_RES (12), (13), (14), (15), (16): Xaa is A or G
  MOD_RES (17), (18), (19), (20): Xaa is A or G or is absent
SRVVMNEYQKYXXXXXXXXXIFLVSIPSLKTPAXTPKT

SEQ ID NO: 13184 - protein, 32 aa, Artificial Sequence; identical to SEQ ID NO: 5746
  GFR-binding peptide
  MOD_RES (11), (12), (13), (14), (15): Xaa is A or G
  MOD_RES (16), (17), (18), (19): Xaa is A or G or is absent

SEQ ID NO: 13185 - protein, 32 aa, Artificial Sequence
  GFR-binding peptide
  MOD_RES (31), (32): Xaa is C or S
EVVMDQYNKLVVNNASDLYLISIASLRTPVXX

SEQ ID NO: 13186 - protein, 40 aa, Artificial Sequence
  GFR-binding peptide
  MOD_RES (2), (36): Xaa is C or S
  MOD_RES (14), (15), (16), (17), (18): Xaa is A or G
  MOD_RES (19), (20), (21), (22): Xaa is A or G or is absent
GXSRVVMNNSLQEXXXXXXXXXYYVVPLPELKTPAXTPKT

SEQ ID NO: 13187 - protein, 39 aa, Artificial Sequence; identical to SEQ ID NO: 5750
  GFR-binding peptide
  MOD_RES (1), (35), (36): Xaa is C or S
  MOD_RES (13), (14), (15), (16), (17): Xaa is A or G
  MOD_RES (18), (19), (20), (21): Xaa is A or G or is absent

SEQ ID NO: 13188 - protein, 38 aa, Artificial Sequence; identical to SEQ ID NO: 5753
  GFR-binding peptide
  MOD_RES (2), (4), (37), (38): Xaa is C or S
  MOD_RES (15), (16), (17), (18), (19): Xaa is A or G
  MOD_RES (20), (21), (22), (23): Xaa is A or G or is absent

SEQ ID NO: 13189 - protein, 40 aa, Artificial Sequence
  GFR-binding peptide
  MOD_RES (1), (3), (35), (36): Xaa is C or S
XGXARVVMNEYQKYIVNSSDDIFLVSIPSLQTPAXXPKPV

SEQ ID NO: 13190 - protein, 35 aa, Artificial Sequence
  GFR-binding peptide
  MOD_RES (33), (34): Xaa is C or S
  MOD_RES (11), (12), (13), (14), (15): Xaa is A or G
  MOD_RES (16), (17), (18), (19): Xaa is A or G or is absent
SKVIMEYQKYXXXXXXXXXIFLISIPSLDQSVXXP

SEQ ID NO: 13191 - protein, 33 aa, Artificial Sequence
  GFR-binding peptide
  MOD_RES (31), (32): Xaa is C or S
RVVMNNSLQEIVNSSDDYYLVTLPELKTPAXXP

SEQ ID NO: 13192 - protein, 39 aa, Artificial Sequence
  GFR-binding peptide
  MOD_RES (1), (33), (34): Xaa is C or S
XARVVMNEYQKYIVNSSDDIFLVSIPSLQTPAXXPKPVT

SEQ ID NO: 13193 - protein, 38 aa, Artificial Sequence; identical to SEQ ID NO: 5762
  GFR-binding peptide
  MOD_RES (33), (34): Xaa is C or S
  MOD_RES (11), (12), (13), (14), (15): Xaa is A or G
  MOD_RES (16), (17), (18), (19): Xaa is A or G or is absent

SEQ ID NO: 13194 - protein, 39 aa, Artificial Sequence
  GFR-binding peptide
  MOD_RES (33), (34): Xaa is C or S
  MOD_RES (11), (12), (13), (14), (15): Xaa is A or G
  MOD_RES (16), (17), (18), (19): Xaa is A or G or is absent
RVVMNNSLQEXXXXXXXXXYYLVTLPELQTPAXXPKPVT

SEQ ID NO: 13195 - protein, 34 aa, Artificial Sequence; identical to SEQ ID NO: 5763
  GFR-binding peptide
  MOD_RES (33), (34): Xaa is C or S
  MOD_RES (11), (12), (13), (14), (15): Xaa is A or G
  MOD_RES (16), (17), (18), (19): Xaa is A or G or is absent

SEQ ID NO: 13196 - protein, 33 aa, Artificial Sequence
  GFR-binding peptide
  MOD_RES (1), (33): Xaa is C or S
XSRVVMNEYQKYIVNSSDDIFLVSIPSLKTPAX

SEQ ID NO: 13197 - protein, 39 aa, Artificial Sequence; identical to SEQ ID NO: 5765
  GFR-binding peptide
  MOD_RES (1), (35), (36): Xaa is C or S
  MOD_RES (13), (14), (15), (16), (17): Xaa is A or G
  MOD_RES (18), (19), (20), (21): Xaa is A or G or is absent

SEQ ID NO: 13198 - protein, 37 aa, Artificial Sequence
  GFR-binding peptide
  MOD_RES (1), (3), (35), (36): Xaa is C or S
XGXGEVVMDNSLQEVVKENEDYYLMTLPELETPVXXA

SEQ ID NO: 13199 - protein, 35 aa, Artificial Sequence
  GFR-binding peptide
  MOD_RES (2), (2): Xaa is C or S
  MOD_RES (14), (15), (16), (17), (18): Xaa is A or G
  MOD_RES (19), (20), (21), (22): Xaa is A or G or is absent
GXARVVMNEYQKYXXXXXXXXXIFLVSIPSLQTPA

SEQ ID NO: 13200 - protein, 38 aa, Artificial Sequence; identical to SEQ ID NO: 5766
  GFR-binding peptide
  MOD_RES (1), (34), (35): Xaa is C or S
  MOD_RES (12), (13), (14), (15), (16): Xaa is A or G
  MOD_RES (17), (18), (19), (20): Xaa is A or G or is absent

SEQ ID NO: 13201 - protein, 39 aa, Artificial Sequence
  GFR-binding peptide
  MOD_RES (1), (34), (35): Xaa is C or S
  MOD_RES (12), (13), (14), (15), (16): Xaa is A or G
  MOD_RES (17), (18), (19), (20): Xaa is A or G or is absent
XSRVIMNSLQEXXXXXXXXXYYLITLPELAQPVXXPAAS

SEQ ID NO: 13202 - protein, 40 aa, Artificial Sequence
  GFR-binding peptide
  MOD_RES (2), (4), (36), (37): Xaa is C or S
HXGXARVVMNEYQKYIVNSSDDIFLVSIPSLQTPAXXPKP

SEQ ID NO: 13203 - protein, 38 aa, Artificial Sequence
  GFR-binding peptide
  MOD_RES (1), (35), (36): Xaa is C or S
  MOD_RES (13), (14), (15), (16), (17): Xaa is A or G
  MOD_RES (18), (19), (20), (21): Xaa is A or G or is absent
XSEVVMDQYNKLXXXXXXXXXLYLISIASLRTPVXXTP

SEQ ID NO: 13204 - protein, 35 aa, Artificial Sequence
  GFR-binding peptide
  MOD_RES (32), (33): Xaa is C or S
GEVVMENSLQEVVKDYEDYYVMPLPELETPVXXAK

SEQ ID NO: 13205 - protein, 34 aa, Artificial Sequence; identical to SEQ ID NO: 5769
  GFR-binding peptide
  MOD_RES (1), (33), (34): Xaa is C or S

SEQ ID NO: 13206 - protein, 33 aa, Artificial Sequence
  GFR-binding peptide
  MOD_RES (2), (2): Xaa is C or S
GXSRVVMNNSLQEIVNSSDDYYLVTLPELKTPA

SEQ ID NO: 13207 - protein, 35 aa, Artificial Sequence
  GFR-binding peptide
  MOD_RES (33), (34): Xaa is C or S
  MOD_RES (11), (12), (13), (14), (15): Xaa is A or G
  MOD_RES (16), (17), (18), (19): Xaa is A or G or is absent
EVVMDEYQKYXXXXXXXXXIFLMSIPSLETPVXXA

SEQ ID NO: 13208 - protein, 41 aa, Artificial Sequence
  GFR-binding peptide
  MOD_RES (2), (4), (36), (37): Xaa is C or S
RXGXSEVVMDQYNKLVVNNASDLYLISIASLRTPVXXTPPT

SEQ ID NO: 13209 - protein, 42 aa, Artificial Sequence
  GFR-binding peptide
  MOD_RES (2), (4), (36), (37): Xaa is C or S
RXGXGEVVMEEYQKYVVKDYEDIFLMSIPSLETPVXXAKPIS

SEQ ID NO: 13210 - protein, 37 aa, Artificial Sequence; identical to SEQ ID NO: 5771
  GFR-binding peptide
  MOD_RES (2), (33), (34): Xaa is C or S

SEQ ID NO: 13211 - protein, 38 aa, Artificial Sequence
  GFR-binding peptide
  MOD_RES (33), (34): Xaa is C or S
  MOD_RES (11), (12), (13), (14), (15): Xaa is A or G
  MOD_RES (16), (17), (18), (19): Xaa is A or G or is absent
SKVIMNSLQEXXXXXXXXXYYVIPLPELDQSVXXPSAS

SEQ ID NO: 13212 - protein, 37 aa, Artificial Sequence
  GFR-binding peptide
  MOD_RES (1), (35), (36): Xaa is C or S
  MOD_RES (13), (14), (15), (16), (17): Xaa is A or G
  MOD_RES (18), (19), (20), (21): Xaa is A or G or is absent
XSEVVMDNSLQEXXXXXXXXXYYLITLPELRTPVXXT

SEQ ID NO: 13213 - protein, 40 aa, Artificial Sequence
  GFR-binding peptide
  MOD_RES (2), (34), (35): Xaa is C or S
GXSEVVMDQYNKLVVNNASDLYLISIASLRTPVXXTPPTS

SEQ ID NO: 13214 - protein, 43 aa, Artificial Sequence
  GFR-binding peptide
  MOD_RES (1), (3), (37), (38): Xaa is C or S
  MOD_RES (15), (16), (17), (18), (19): Xaa is A or G
  MOD_RES (20), (21), (22), (23): Xaa is A or G or is absent
XGXGEVVMDEYQKYXXXXXXXXXIFLMSIPSLETPVXXAKPIK

SEQ ID NO: 13215 - protein, 36 aa, Artificial Sequence
  GFR-binding peptide
  MOD_RES (33), (34): Xaa is C or S
  MOD_RES (11), (12), (13), (14), (15): Xaa is A or G
  MOD_RES (16), (17), (18), (19): Xaa is A or G or is absent
EVVMDEYQKYXXXXXXXXXIFLMSIPSLETPVXXAK

SEQ ID NO: 13216 - protein, 32 aa, Artificial Sequence; identical to SEQ ID NO: 5783
  GFR-binding peptide
  MOD_RES (1), (32): Xaa is C or S

SEQ ID NO: 13217 - protein, 38 aa, Artificial Sequence; identical to SEQ ID NO: 5784
  GFR-binding peptide
  MOD_RES (32), (33): Xaa is C or S

SEQ ID NO: 13218 - protein, 40 aa, Artificial Sequence; identical to SEQ ID NO: 5787
  GFR-binding peptide
  MOD_RES (1), (3), (35): Xaa is C or S

SEQ ID NO: 13219 - protein, 33 aa, Artificial Sequence
  GFR-binding peptide
  MOD_RES (33), (33): Xaa is C or S
  MOD_RES (11), (12), (13), (14), (15): Xaa is A or G
  MOD_RES (16), (17), (18), (19): Xaa is A or G or is absent
EVVMDNSLQEXXXXXXXXXYYLITLPELRTPVX

SEQ ID NO: 13220 - protein, 36 aa, Artificial Sequence; identical to SEQ ID NO: 5788
  GFR-binding peptide
  MOD_RES (34), (35): Xaa is C or S
  MOD_RES (12), (13), (14), (15), (16): Xaa is A or G
  MOD_RES (17), (18), (19), (20): Xaa is A or G or is absent

SEQ ID NO: 13221 - protein, 32 aa, Artificial Sequence
  GFR-binding peptide
  MOD_RES (1), (1): Xaa is C or S
XSRVVMNEYQKYIVNSSDDIFLVSIPSLKTPA

SEQ ID NO: 13222 - protein, 43 aa, Artificial Sequence
  GFR-binding peptide
  MOD_RES (2), (4), (38), (39): Xaa is C or S
  MOD_RES (16), (17), (18), (19), (20): Xaa is A or G
  MOD_RES (21), (22), (23), (24): Xaa is A or G or is absent
HXGXARVVMNNSLQEXXXXXXXXXYYLVTLPELQTPAXXPKPV

SEQ ID NO: 13223 - protein, 37 aa, Artificial Sequence
  GFR-binding peptide
  MOD_RES (1), (3), (35): Xaa is C or S
XGXSRVVMNNSLQEIVNSSDDYYVVPLPELKTPAXTP

SEQ ID NO: 13224 - protein, 34 aa, Artificial Sequence
  GFR-binding peptide
  MOD_RES (1), (33), (34): Xaa is C or S
XARVVMNNSLQEIVNSSDDYYLVTLPELQTPAXX

SEQ ID NO: 13225 - protein, 39 aa, Artificial Sequence
  GFR-binding peptide
  MOD_RES (1), (34), (35): Xaa is C or S
  MOD_RES (12), (13), (14), (15), (16): Xaa is A or G
  MOD_RES (17), (18), (19), (20): Xaa is A or G or is absent
XSRVIMEYQKYXXXXXXXXXIFLISIPSLAQPVXXPAAS

SEQ ID NO: 13226 - protein, 41 aa, Artificial Sequence
  GFR-binding peptide
  MOD_RES (1), (3), (35): Xaa is C or S
XGXSRVVMNEYQKYIVNSSDDIFLVSIPSLKTPAXTPKTVH

SEQ ID NO: 13227 - protein, 37 aa, Artificial Sequence
  GFR-binding peptide
  MOD_RES (2), (36), (37): Xaa is C or S
  MOD_RES (14), (15), (16), (17), (18): Xaa is A or G
  MOD_RES (19), (20), (21), (22): Xaa is A or G or is absent
GXSRVVMNNSLQEXXXXXXXXXYYLVTLPELKTPAXX

SEQ ID NO: 13228 - protein, 42 aa, Artificial Sequence; identical to SEQ ID NO: 5798
  GFR-binding peptide
  MOD_RES (2), (4), (36), (37): Xaa is C or S

SEQ ID NO: 13229 - protein, 32 aa, Artificial Sequence; identical to SEQ ID NO: 5799
  GFR-binding peptide
  MOD_RES (1), (32): Xaa is C or S

SEQ ID NO: 13230 - protein, 40 aa, Artificial Sequence
  GFR-binding peptide
  MOD_RES (1), (34), (35): Xaa is C or S
  MOD_RES (12), (13), (14), (15), (16): Xaa is A or G
  MOD_RES (17), (18), (19), (20): Xaa is A or G or is absent
XSKVIMEYQKYXXXXXXXXXIFLISIPSLDQSVXXPSASA

SEQ ID NO: 13231 - protein, 38 aa, Artificial Sequence; identical to SEQ ID NO: 5801
  GFR-binding peptide
  MOD_RES (2), (4), (38): Xaa is C or S
  MOD_RES (16), (17), (18), (19), (20): Xaa is A or G
  MOD_RES (21), (22), (23), (24): Xaa is A or G or is absent

SEQ ID NO: 13232 - protein, 31 aa, Artificial Sequence
  GFR-binding peptide
ARVVMNNSLQEIVNSSDDYYLVTLPELQTPA

SEQ ID NO: 13233 - protein, 38 aa, Artificial Sequence
  GFR-binding peptide
  MOD_RES (32), (33): Xaa is C or S
SRVVMNNSLQEIVNSSDDYYLVTLPELKTPAXXPKPVY

SEQ ID NO: 13234 - protein, 39 aa, Artificial Sequence
  GFR-binding peptide
  MOD_RES (1), (35), (36): Xaa is C or S
  MOD_RES (13), (14), (15), (16), (17): Xaa is A or G
  MOD_RES (18), (19), (20), (21): Xaa is A or G or is absent
XSRVVMNNSLQEXXXXXXXXXYYVVPLPELKTPAXXPKP

SEQ ID NO: 13235 - protein, 38 aa, Artificial Sequence; identical to SEQ ID NO: 5803
  GFR-binding peptide
  MOD_RES (2), (4), (37), (38): Xaa is C or S
  MOD_RES (15), (16), (17), (18), (19): Xaa is A or G
  MOD_RES (20), (21), (22), (23): Xaa is A or G or is absent

SEQ ID NO: 13236 - protein, 36 aa, Artificial Sequence; identical to SEQ ID NO: 5804
  GFR-binding peptide
  MOD_RES (1), (35), (36): Xaa is C or S
  MOD_RES (13), (14), (15), (16), (17): Xaa is A or G
  MOD_RES (18), (19), (20), (21): Xaa is A or G or is absent

SEQ ID NO: 13237 - protein, 38 aa, Artificial Sequence
  GFR-binding peptide
  MOD_RES (2), (35), (36): Xaa is C or S
  MOD_RES (13), (14), (15), (16), (17): Xaa is A or G
  MOD_RES (18), (19), (20), (21): Xaa is A or G or is absent
KXSKVVMNSLQEXXXXXXXXXYYVIPLPELDQPVXXPS

SEQ ID NO: 13238 - protein, 41 aa, Artificial Sequence
  GFR-binding peptide
  MOD_RES (1), (3), (35), (36): Xaa is C or S
XGXSEVVMDRYKKLVVNNASDFYLISIANLRTPVXXTPPTS

SEQ ID NO: 13239 - protein, 43 aa, Artificial Sequence
  GFR-binding peptide
  MOD_RES (2), (4), (38), (39): Xaa is C or S
  MOD_RES (16), (17), (18), (19), (20): Xaa is A or G
  MOD_RES (21), (22), (23), (24): Xaa is A or G or is absent
RXGXSEVVMDEYQKYXXXXXXXXXIFLISIPSLRTPVXXTPPT

SEQ ID NO: 13240 - protein, 31 aa, Artificial Sequence; identical to SEQ ID NO: 5810
  GFR-binding peptide
  MOD_RES (1), (1): Xaa is C or S

SEQ ID NO: 13241 - protein, 34 aa, Artificial Sequence; identical to SEQ ID NO: 5813
  GFR-binding peptide
  MOD_RES (2), (4): Xaa is C or S

SEQ ID NO: 13242 - protein, 37 aa, Artificial Sequence
  GFR-binding peptide
  MOD_RES (2), (4), (36), (37): Xaa is C or S
HXGXARVVMNEYQKYIVNSSDDIFLVSIPSLQTPAXX

SEQ ID NO: 13243 - protein, 30 aa, Artificial Sequence; identical to SEQ ID NO: 5814
  GFR-binding peptide

SEQ ID NO: 13244 - protein, 36 aa, Artificial Sequence
  GFR-binding peptide
  MOD_RES (2), (33), (34): Xaa is C or S
KXSKVVMNSLQEVKPTRGVYYLITLPELDQPVXXPS

SEQ ID NO: 13245 - protein, 35 aa, Artificial Sequence
  GFR-binding peptide
  MOD_RES (2), (2): Xaa is C or S
  MOD_RES (14), (15), (16), (17), (18): Xaa is A or G
  MOD_RES (19), (20), (21), (22): Xaa is A or G or is absent
GXSEVVMDNSLQEXXXXXXXXXYYVIPLPELRTPV

SEQ ID NO: 13246 - protein, 41 aa, Artificial Sequence; identical to SEQ ID NO: 5815
  GFR-binding peptide
  MOD_RES (2), (4), (38), (39): Xaa is C or S
  MOD_RES (16), (17), (18), (19), (20): Xaa is A or G
  MOD_RES (21), (22), (23), (24): Xaa is A or G or is absent

SEQ ID NO: 13247 - protein, 36 aa, Artificial Sequence
  GFR-binding peptide
  MOD_RES (2), (34), (35): Xaa is C or S
GXGEVVMEEYQKYVVKDYEDIFLMSIPSLETPVXXA

SEQ ID NO: 13248 - protein, 38 aa, Artificial Sequence; identical to SEQ ID NO: 5816
  GFR-binding peptide
  MOD_RES (2), (33), (34): Xaa is C or S

SEQ ID NO: 13249 - protein, 35 aa, Artificial Sequence
  GFR-binding peptide
  MOD_RES (2), (4): Xaa is C or S
RXGXSEVVMDQYNKLVVNNASDLYLISIASLRTPV

SEQ ID NO: 13250 - protein, 38 aa, Artificial Sequence; identical to SEQ ID NO: 5818
  GFR-binding peptide
  MOD_RES (1), (3), (34), (35): Xaa is C or S

SEQ ID NO: 13251 - protein, 39 aa, Artificial Sequence; identical to SEQ ID NO: 5820
  GFR-binding peptide
  MOD_RES (2), (36), (37): Xaa is C or S
  MOD_RES (14), (15), (16), (17), (18): Xaa is A or G
  MOD_RES (19), (20), (21), (22): Xaa is A or G or is absent

SEQ ID NO: 13252 - protein, 37 aa, Artificial Sequence
  GFR-binding peptide
  MOD_RES (34), (35): Xaa is C or S
  MOD_RES (12), (13), (14), (15), (16): Xaa is A or G
  MOD_RES (17), (18), (19), (20): Xaa is A or G or is absent
ARVVMNEYQKYXXXXXXXXXIFLVSIPSLQTPAXXPK

SEQ ID NO: 13253 - protein, 35 aa, Artificial Sequence; identical to SEQ ID NO: 5822
  GFR-binding peptide
  MOD_RES (1), (32), (33): Xaa is C or S

SEQ ID NO: 13254 - protein, 39 aa, Artificial Sequence; identical to SEQ ID NO: 5823
  GFR-binding peptide
  MOD_RES (34), (35): Xaa is C or S
  MOD_RES (12), (13), (14), (15), (16): Xaa is A or G
  MOD_RES (17), (18), (19), (20): Xaa is A or G or is absent

SEQ ID NO: 13255 - protein, 31 aa, Artificial Sequence
  GFR-binding peptide
  MOD_RES (31), (31): Xaa is C or S
EVVMENSLQEVVKDYEDYYLMTLPELETPVX

SEQ ID NO: 13256 - protein, 42 aa, Artificial Sequence
  GFR-binding peptide
  MOD_RES (1), (3), (37), (38): Xaa is C or S
  MOD_RES (15), (16), (17), (18), (19): Xaa is A or G
  MOD_RES (20), (21), (22), (23): Xaa is A or G or is absent
XGXSRVVMNNSLQEXXXXXXXXXYYVVPLPELKTPAXXPKPV

SEQ ID NO: 13257 - protein, 33 aa, Artificial Sequence
  GFR-binding peptide
  MOD_RES (2), (2): Xaa is C or S
GXARVVMNEYQKYIVNSSDDIFLVSIPSLQTPA

SEQ ID NO: 13258 - protein, 38 aa, Artificial Sequence
  GFR-binding peptide
  MOD_RES (2), (4), (35), (36): Xaa is C or S
SXKXSKVVMNSLQEVKPTRGVYYVIPLPELDQPVXXPS

SEQ ID NO: 13259 - protein, 34 aa, Artificial Sequence; identical to SEQ ID NO: 5826
  GFR-binding peptide
  MOD_RES (32), (33): Xaa is C or S

SEQ ID NO: 13260 - protein, 34 aa, Artificial Sequence
  GFR-binding peptide
  MOD_RES (34), (34): Xaa is C or S
  MOD_RES (12), (13), (14), (15), (16): Xaa is A or G
  MOD_RES (17), (18), (19), (20): Xaa is A or G or is absent
SEVVMDQYNKLXXXXXXXXXLYLISIASLRTPVX

SEQ ID NO: 13261 - protein, 38 aa, Artificial Sequence
  GFR-binding peptide
  MOD_RES (2), (33), (34): Xaa is C or S
KXSKVVMEYQKYVKPTRGVIFLISIPSLDQPVXXPSAS

SEQ ID NO: 13262 - protein, 41 aa, Artificial Sequence
  GFR-binding peptide
  MOD_RES (2), (4), (36), (37): Xaa is C or S
HXGXSRVVMNNSLQEIVNSSDDYYLVTLPELKTPAXXPKPV

SEQ ID NO: 13263 - protein, 36 aa, Artificial Sequence
  GFR-binding peptide
  MOD_RES (2), (4), (36): Xaa is C or S
RXGXSEVVMDNSLQEVVNNASDYYVIPLPELRTPVX

SEQ ID NO: 13264 - protein, 36 aa, Artificial Sequence
  GFR-binding peptide
  MOD_RES (33), (34): Xaa is C or S
  MOD_RES (11), (12), (13), (14), (15): Xaa is A or G
  MOD_RES (16), (17), (18), (19): Xaa is A or G or is absent
RVVMNEYQKYXXXXXXXXXIFLVSIPSLKTPAXXPK

SEQ ID NO: 13265 - protein, 39 aa, Artificial Sequence
  GFR-binding peptide
  MOD_RES (1), (35), (36): Xaa is C or S
  MOD_RES (13), (14), (15), (16), (17): Xaa is A or G
  MOD_RES (18), (19), (20), (21): Xaa is A or G or is absent
XSEVVMDEYQKYXXXXXXXXXIFLISIPSLRTPVXXTPP

SEQ ID NO: 13266 - protein, 33 aa, Artificial Sequence; identical to SEQ ID NO: 5834
  GFR-binding peptide
  MOD_RES (2), (2): Xaa is C or S

SEQ ID NO: 13267 - protein, 35 aa, Artificial Sequence
  GFR-binding peptide
  MOD_RES (1), (34), (35): Xaa is C or S
  MOD_RES (12), (13), (14), (15), (16): Xaa is A or G
  MOD_RES (17), (18), (19), (20): Xaa is A or G or is absent
XSRVIMNSLQEXXXXXXXXXYYLITLPELAQPVXX

SEQ ID NO: 13268 - protein, 37 aa, Artificial Sequence; identical to SEQ ID NO: 5836
  GFR-binding peptide
  MOD_RES (2), (35), (36): Xaa is C or S
  MOD_RES (13), (14), (15), (16), (17): Xaa is A or G
  MOD_RES (18), (19), (20), (21): Xaa is A or G or is absent

SEQ ID NO: 13269 - protein, 34 aa, Artificial Sequence
  GFR-binding peptide
  MOD_RES (31), (32): Xaa is C or S
SKVIMNSLQEIKPTKGIYYVIPLPELDQSVXXPS

SEQ ID NO: 13270 - protein, 34 aa, Artificial Sequence
  GFR-binding peptide
  MOD_RES (34), (34): Xaa is C or S
  MOD_RES (12), (13), (14), (15), (16): Xaa is A or G
  MOD_RES (17), (18), (19), (20): Xaa is A or G or is absent
SEVVMDRYKKLXXXXXXXXXFYLISIANLRTPVX

SEQ ID NO: 13271 - protein, 33 aa, Artificial Sequence
  GFR-binding peptide
  MOD_RES (1), (33): Xaa is C or S
XSEVVMDNSLQEVVNNASDYYLITLPELRTPVX

SEQ ID NO: 13272 - protein, 34 aa, Artificial Sequence; identical to SEQ ID NO: 5839
  GFR-binding peptide
  MOD_RES (31), (32): Xaa is C or S

SEQ ID NO: 13273 - protein, 41 aa, Artificial Sequence; identical to SEQ ID NO: 5840
  GFR-binding peptide
  MOD_RES (1), (3), (36), (37): Xaa is C or S
  MOD_RES (14), (15), (16), (17), (18): Xaa is A or G
  MOD_RES (19), (20), (21), (22): Xaa is A or G or is absent

SEQ ID NO: 13274 - protein, 36 aa, Artificial Sequence; identical to SEQ ID NO: 5841
  GFR-binding peptide
  MOD_RES (2), (33), (34): Xaa is C or S

SEQ ID NO: 13275 - protein, 39 aa, Artificial Sequence
  GFR-binding peptide
  MOD_RES (1), (33), (34): Xaa is C or S
XSEVVMDRYKKLVVNNASDFYLISIANLRTPVXXTPPTS

SEQ ID NO: 13276 - protein, 35 aa, Artificial Sequence
  GFR-binding peptide
  MOD_RES (33), (34): Xaa is C or S
  MOD_RES (11), (12), (13), (14), (15): Xaa is A or G
  MOD_RES (16), (17), (18), (19): Xaa is A or G or is absent
EVVMDNSLQEXXXXXXXXXYYLMTLPELETPVXXA

SEQ ID NO: 13277 - protein, 40 aa, Artificial Sequence
  GFR-binding peptide
  MOD_RES (1), (3), (35): Xaa is C or S
XGXSRVVMNNSLQEIVNSSDDYYVVPLPELKTPAXTPKTV

SEQ ID NO: 13278 - protein, 39 aa, Artificial Sequence; identical to SEQ ID NO: 5847
  GFR-binding peptide
  MOD_RES (33), (34): Xaa is C or S
  MOD_RES (11), (12), (13), (14), (15): Xaa is A or G
  MOD_RES (16), (17), (18), (19): Xaa is A or G or is absent

SEQ ID NO: 13279 - protein, 35 aa, Artificial Sequence; identical to SEQ ID NO: 5848
  GFR-binding peptide
  MOD_RES (2), (33), (34): Xaa is C or S

SEQ ID NO: 13280 - protein, 39 aa, Artificial Sequence
  GFR-binding peptide
  MOD_RES (1), (35), (36): Xaa is C or S
  MOD_RES (13), (14), (15), (16), (17): Xaa is A or G
  MOD_RES (18), (19), (20), (21): Xaa is A or G or is absent
XGEVVMEEYQKYXXXXXXXXXIFLMSIPSLETPVXXAKP

SEQ ID NO: 13281 - protein, 34 aa, Artificial Sequence
  GFR-binding peptide
  MOD_RES (2), (34): Xaa is C or S
GXGEVVMENSLQEVVKDYEDYYLMTLPELETPVX

SEQ ID NO: 13282 - protein, 37 aa, Artificial Sequence
  GFR-binding peptide
  MOD_RES (1), (34), (35): Xaa is C or S
  MOD_RES (12), (13), (14), (15), (16): Xaa is A or G
  MOD_RES (17), (18), (19), (20): Xaa is A or G or is absent
XSRVIMNSLQEXXXXXXXXXYYLITLPELAQPVXXPA

SEQ ID NO: 13283 - protein, 42 aa, Artificial Sequence
  GFR-binding peptide
  MOD_RES (1), (3), (37), (38): Xaa is C or S
  MOD_RES (15), (16), (17), (18), (19): Xaa is A or G
  MOD_RES (20), (21), (22), (23): Xaa is A or G or is absent
XGXSRVVMNNSLQEXXXXXXXXXYYLVTLPELKTPAXXPKPV

SEQ ID NO: 13284 - protein, 40 aa, Artificial Sequence
  GFR-binding peptide
  MOD_RES (2), (4), (36): Xaa is C or S
HXGXSRVVMNEYQKYIVNSSDDIFLVSIPSLKTPAXTPKT

SEQ ID NO: 13285 - protein, 38 aa, Artificial Sequence
  GFR-binding peptide
  MOD_RES (1), (35), (36): Xaa is C or S
  MOD_RES (13), (14), (15), (16), (17): Xaa is A or G
  MOD_RES (18), (19), (20), (21): Xaa is A or G or is absent
XSEVVMDNSLQEXXXXXXXXXYYLITLPELRTPVXXTP

SEQ ID NO: 13286 - protein, 30 aa, Artificial Sequence
  GFR-binding peptide
RVVMNEYQKYIVNSSDDIFLVSIPSLKTPA

SEQ ID NO: 13287 - protein, 37 aa, Artificial Sequence
  GFR-binding peptide
  MOD_RES (33), (34): Xaa is C or S
  MOD_RES (11), (12), (13), (14), (15): Xaa is A or G
  MOD_RES (16), (17), (18), (19): Xaa is A or G or is absent
SKVVMNSLQEXXXXXXXXXYYLITLPELDQPVXXPSA

SEQ ID NO: 13288 - protein, 35 aa, Artificial Sequence
  GFR-binding peptide
  MOD_RES (2), (4): Xaa is C or S
RXGXSEVVMDNSLQEVVNNASDYYLITLPELRTPV

SEQ ID NO: 13289 - protein, 41 aa, Artificial Sequence; identical to SEQ ID NO: 5860
  GFR-binding peptide
  MOD_RES (2), (4), (38), (39): Xaa is C or S
  MOD_RES (16), (17), (18), (19), (20): Xaa is A or G
  MOD_RES (21), (22), (23), (24): Xaa is A or G or is absent

SEQ ID NO: 13290 - protein, 36 aa, Artificial Sequence; identical to SEQ ID NO: 5863
  GFR-binding peptide
  MOD_RES (32), (32): Xaa is C or S

SEQ ID NO: 13291 - protein, 34 aa, Artificial Sequence
  GFR-binding peptide
  MOD_RES (1), (3): Xaa is C or S
XGXSEVVMDNSLQEVVNNASDYYLITLPELRTPV

SEQ ID NO: 13292 - protein, 36 aa, Artificial Sequence
  GFR-binding peptide
  MOD_RES (1), (35), (36): Xaa is C or S
  MOD_RES (13), (14), (15), (16), (17): Xaa is A or G
  MOD_RES (18), (19), (20), (21): Xaa is A or G or is absent
XGEVVMDNSLQEXXXXXXXXXYYLMTLPELETPVXX

SEQ ID NO: 13293 - protein, 34 aa, Artificial Sequence; identical to SEQ ID NO: 5865
  GFR-binding peptide
  MOD_RES (32), (33): Xaa is C or S

SEQ ID NO: 13294 - protein, 31 aa, Artificial Sequence; identical to SEQ ID NO: 5867
  GFR-binding peptide

SEQ ID NO: 13295 - protein, 40 aa, Artificial Sequence; identical to SEQ ID NO: 5868
  GFR-binding peptide
  MOD_RES (2), (4), (38), (39): Xaa is C or S
  MOD_RES (16), (17), (18), (19), (20): Xaa is A or G
  MOD_RES (21), (22), (23), (24): Xaa is A or G or is absent

SEQ ID NO: 13296 - protein, 39 aa, Artificial Sequence
  GFR-binding peptide
  MOD_RES (1), (3), (37): Xaa is C or S
  MOD_RES (15), (16), (17), (18), (19): Xaa is A or G
  MOD_RES (20), (21), (22), (23): Xaa is A or G or is absent
XGXSRVVMNNSLQEXXXXXXXXXYYVVPLPELKTPAXTP

SEQ ID NO: 13297 - protein, 37 aa, Artificial Sequence
  GFR-binding peptide
  MOD_RES (34), (35): Xaa is C or S
  MOD_RES (12), (13), (14), (15), (16): Xaa is A or G
  MOD_RES (17), (18), (19), (20): Xaa is A or G or is absent
GEVVMDNSLQEXXXXXXXXXYYLMTLPELETPVXXAK

SEQ ID NO: 13298 - protein, 40 aa, Artificial Sequence; identical to SEQ ID NO: 5869
  GFR-binding peptide
  MOD_RES (1), (3), (37), (38): Xaa is C or S
  MOD_RES (15), (16), (17), (18), (19): Xaa is A or G
  MOD_RES (20), (21), (22), (23): Xaa is A or G or is absent

SEQ ID NO: 13299 - protein, 38 aa, Artificial Sequence
  GFR-binding peptide
  MOD_RES (2), (34): Xaa is C or S
GXSRVVMNEYQKYIVNSSDDIFLVSIPSLKTPAXTPKT

SEQ ID NO: 13300 - protein, 37 aa, Artificial Sequence; identical to SEQ ID NO: 5871
  GFR-binding peptide
  MOD_RES (1), (33), (34): Xaa is C or S

SEQ ID NO: 13301 - protein, 34 aa, Artificial Sequence; identical to SEQ ID NO: 5874
  GFR-binding peptide
  MOD_RES (33), (34): Xaa is C or S
  MOD_RES (11), (12), (13), (14), (15): Xaa is A or G
  MOD_RES (16), (17), (18), (19): Xaa is A or G or is absent

SEQ ID NO: 13302 - protein, 34 aa, Artificial Sequence
  GFR-binding peptide
  MOD_RES (31), (32): Xaa is C or S
SKVVMEYQKYVKPTRGVIFLISIPSLDQPVXXPS

SEQ ID NO: 13303 - protein, 36 aa, Artificial Sequence
  GFR-binding peptide
  MOD_RES (1), (32), (33): Xaa is C or S
XSKVVMNSLQEVKPTRGVYYLITLPELDQPVXXPSA

SEQ ID NO: 13304 - protein, 34 aa, Artificial Sequence; identical to SEQ ID NO: 5878
  GFR-binding peptide
  MOD_RES (1), (1): Xaa is C or S
  MOD_RES (13), (14), (15), (16), (17): Xaa is A or G
  MOD_RES (18), (19), (20), (21): Xaa is A or G or is absent

SEQ ID NO: 13305 - protein, 36 aa, Artificial Sequence; identical to SEQ ID NO: 5880
  GFR-binding peptide
  MOD_RES (33), (34): Xaa is C or S
  MOD_RES (11), (12), (13), (14), (15): Xaa is A or G
  MOD_RES (16), (17), (18), (19): Xaa is A or G or is absent

SEQ ID NO: 13306 - protein, 43 aa, Artificial Sequence; identical to SEQ ID NO: 5882
  GFR-binding peptide
  MOD_RES (2), (4), (37), (38): Xaa is C or S
  MOD_RES (15), (16), (17), (18), (19): Xaa is A or G
  MOD_RES (20), (21), (22), (23): Xaa is A or G or is absent

SEQ ID NO: 13307 - protein, 35 aa, Artificial Sequence
  GFR-binding peptide
  MOD_RES (33), (34): Xaa is C or S
  MOD_RES (11), (12), (13), (14), (15): Xaa is A or G
  MOD_RES (16), (17), (18), (19): Xaa is A or G or is absent
EVVMDNSLQEXXXXXXXXXYYVMPLPELETPVXXA

SEQ ID NO: 13308 - protein, 41 aa, Artificial Sequence; identical to SEQ ID NO: 5883
  GFR-binding peptide
  MOD_RES (2), (4), (35), (36): Xaa is C or S

SEQ ID NO: 13309 - protein, 35 aa, Artificial Sequence; identical to SEQ ID NO: 5884
  GFR-binding peptide
  MOD_RES (31), (32): Xaa is C or S

SEQ ID NO: 13310 - protein, 41 aa, Artificial Sequence
  GFR-binding peptide
  MOD_RES (1), (3), (35): Xaa is C or S
XGXSRVVMNNSLQEIVNSSDDYYLVTLPELKTPAXTPKTVH

SEQ ID NO: 13311 - protein, 37 aa, Artificial Sequence
  GFR-binding peptide
  MOD_RES (1), (3), (37): Xaa is C or S
  MOD_RES (15), (16), (17), (18), (19): Xaa is A or G
  MOD_RES (20), (21), (22), (23): Xaa is A or G or is absent
XGXARVVMNNSLQEXXXXXXXXXYYVVPLPELQTPAX

SEQ ID NO: 13312 - protein, 38 aa, Artificial Sequence
  GFR-binding peptide
  MOD_RES (1), (35), (36): Xaa is C or S
  MOD_RES (13), (14), (15), (16), (17): Xaa is A or G
  MOD_RES (18), (19), (20), (21): Xaa is A or G or is absent
XARVVMNNSLQEXXXXXXXXXYYVVPLPELQTPAXXPK

SEQ ID NO: 13313 - protein, 35 aa, Artificial Sequence; identical to SEQ ID NO: 5885
  GFR-binding peptide
  MOD_RES (2), (34), (35): Xaa is C or S

SEQ ID NO: 13314 - protein, 38 aa, Artificial Sequence
  GFR-binding peptide
  MOD_RES (1), (3), (35), (36): Xaa is C or S
XGXSEVVMDEYQKYVVNNASDIFLISIPSLRTPVXXTP

SEQ ID NO: 13315 - protein, 34 aa, Artificial Sequence
  GFR-binding peptide
  MOD_RES (2), (2): Xaa is C or S
  MOD_RES (13), (14), (15), (16), (17): Xaa is A or G
  MOD_RES (18), (19), (20), (21): Xaa is A or G or is absent
KXSRVIMNSLQEXXXXXXXXXYYVIPLPELAQPV

SEQ ID NO: 13316 - protein, 39 aa, Artificial Sequence; identical to SEQ ID NO: 5888
  GFR-binding peptide
  MOD_RES (1), (34), (35): Xaa is C or S
  MOD_RES (12), (13), (14), (15), (16): Xaa is A or G
  MOD_RES (17), (18), (19), (20): Xaa is A or G or is absent

SEQ ID NO: 13317 - protein, 41 aa, Artificial Sequence
  GFR-binding peptide
  MOD_RES (1), (3), (37), (38): Xaa is C or S
  MOD_RES (15), (16), (17), (18), (19): Xaa is A or G
  MOD_RES (20), (21), (22), (23): Xaa is A or G or is absent
XGXSEVVMDRYKKLXXXXXXXXXFYLISIANLRTPVXXTPP

SEQ ID NO: 13318 - protein, 32 aa, Artificial Sequence
  GFR-binding peptide
  MOD_RES (32), (32): Xaa is C or S
SRVVMNEYQKYIVNSSDDIFLVSIPSLKTPAX

SEQ ID NO: 13319 - protein, 33 aa, Artificial Sequence; identical to SEQ ID NO: 5894
  GFR-binding peptide
  MOD_RES (1), (1): Xaa is C or S
  MOD_RES (12), (13), (14), (15), (16): Xaa is A or G
  MOD_RES (17), (18), (19), (20): Xaa is A or G or is absent

SEQ ID NO: 13320 - protein, 40 aa, Artificial Sequence
  GFR-binding peptide
  MOD_RES (1), (3), (35), (36): Xaa is C or S
XGXSRVVMNNSLQEIVNSSDDYYLVTLPELKTPAXXPKPV

SEQ ID NO: 13321 - protein, 38 aa, Artificial Sequence
  GFR-binding peptide
  MOD_RES (2), (36), (37): Xaa is C or S
  MOD_RES (14), (15), (16), (17), (18): Xaa is A or G
  MOD_RES (19), (20), (21), (22): Xaa is A or G or is absent
GXSEVVMDQYNKLXXXXXXXXXLYLISIASLRTPVXXT

SEQ ID NO: 13322 - protein, 38 aa, Artificial Sequence
  GFR-binding peptide
  MOD_RES (34), (35): Xaa is C or S
  MOD_RES (12), (13), (14), (15), (16): Xaa is A or G
  MOD_RES (17), (18), (19), (20): Xaa is A or G or is absent
ARVVMNNSLQEXXXXXXXXXYYLVTLPELQTPAXXPKP

SEQ ID NO: 13323 - protein, 35 aa, Artificial Sequence
  GFR-binding peptide
  MOD_RES (2), (4): Xaa is C or S
HXGXSRVVMNNSLQEIVNSSDDYYLVTLPELKTPA

SEQ ID NO: 13324 - protein, 36 aa, Artificial Sequence; identical to SEQ ID NO: 5899
  GFR-binding peptide
  MOD_RES (1), (3): Xaa is C or S
  MOD_RES (15), (16), (17), (18), (19): Xaa is A or G
  MOD_RES (20), (21), (22), (23): Xaa is A or G or is absent

SEQ ID NO: 13325 - protein, 42 aa, Artificial Sequence; identical to SEQ ID NO: 5901
  GFR-binding peptide
  MOD_RES (2), (4), (38), (39): Xaa is C or S
  MOD_RES (16), (17), (18), (19), (20): Xaa is A or G
  MOD_RES (21), (22), (23), (24): Xaa is A or G or is absent

SEQ ID NO: 13326 - protein, 33 aa, Artificial Sequence
  GFR-binding peptide
  MOD_RES (1), (33): Xaa is C or S
XGEVVMDNSLQEVVKENEDYYLMTLPELETPVX

SEQ ID NO: 13327 - protein, 32 aa, Artificial Sequence; identical to SEQ ID NO: 5902
  GFR-binding peptide
  MOD_RES (2), (2): Xaa is C or S

SEQ ID NO: 13328 - protein, 34 aa, Artificial Sequence
  GFR-binding peptide
  MOD_RES (32), (33): Xaa is C or S
ARVVMNNSLQEIVNSSDDYYLVTLPELQTPAXXP

SEQ ID NO: 13329 - protein, 36 aa, Artificial Sequence
  GFR-binding peptide
  MOD_RES (1), (3): Xaa is C or S
  MOD_RES (15), (16), (17), (18), (19): Xaa is A or G
  MOD_RES (20), (21), (22), (23): Xaa is A or G or is absent
XGXGEVVMDNSLQEXXXXXXXXXYYLMTLPELETPV

SEQ ID NO: 13330 - protein, 39 aa, Artificial Sequence; identical to SEQ ID NO: 5904
  GFR-binding peptide
  MOD_RES (2), (4), (37), (38): Xaa is C or S
  MOD_RES (15), (16), (17), (18), (19): Xaa is A or G
  MOD_RES (20), (21), (22), (23): Xaa is A or G or is absent

SEQ ID NO: 13331 - protein, 38 aa, Artificial Sequence; identical to SEQ ID NO: 5905
  GFR-binding peptide
  MOD_RES (1), (35), (36): Xaa is C or S
  MOD_RES (13), (14), (15), (16), (17): Xaa is A or G
  MOD_RES (18), (19), (20), (21): Xaa is A or G or is absent

SEQ ID NO: 13332 - protein, 33 aa, Artificial Sequence
  GFR-binding peptide
  MOD_RES (12), (13), (14), (15), (16): Xaa is A or G
  MOD_RES (17), (18), (19), (20): Xaa is A or G or is absent
SEVVMDEYQKYXXXXXXXXXIFLISIPSLRTPV

SEQ ID NO: 13333 - protein, 39 aa, Artificial Sequence; identical to SEQ ID NO: 5907
  GFR-binding peptide
  MOD_RES (2), (4), (36), (37): Xaa is C or S

SEQ ID NO: 13334 - protein, 38 aa, Artificial Sequence; identical to SEQ ID NO: 5909
  GFR-binding peptide
  MOD_RES (2), (36): Xaa is C or S
  MOD_RES (14), (15), (16), (17), (18): Xaa is A or G
  MOD_RES (19), (20), (21), (22): Xaa is A or G or is absent

SEQ ID NO: 13335 - protein, 35 aa, Artificial Sequence
  GFR-binding peptide
  MOD_RES (32), (33): Xaa is C or S
ARVVMNNSLQEIVNSSDDYYVVPLPELQTPAXXPK

SEQ ID NO: 13336 - protein, 39 aa, Artificial Sequence
  GFR-binding peptide
  MOD_RES (33), (34): Xaa is C or S
  MOD_RES (11), (12), (13), (14), (15): Xaa is A or G
  MOD_RES (16), (17), (18), (19): Xaa is A or G or is absent
SKVIMEYQKYXXXXXXXXXIFLISIPSLDQSVXXPSASA

SEQ ID NO: 13337 - protein, 40 aa, Artificial Sequence; identical to SEQ ID NO: 5912
  GFR-binding peptide
  MOD_RES (2), (4), (38), (39): Xaa is C or S
  MOD_RES (16), (17), (18), (19), (20): Xaa is A or G
  MOD_RES (21), (22), (23), (24): Xaa is A or G or is absent

SEQ ID NO: 13338 - protein, 36 aa, Artificial Sequence
  GFR-binding peptide
  MOD_RES (31), (32): Xaa is C or S
EVVMDEYQKYVVNNASDIFLISIPSLRTPVXXTPPT

SEQ ID NO: 13339 - protein, 38 aa, Artificial Sequence; identical to SEQ ID NO: 5916
  GFR-binding peptide
  MOD_RES (32), (33): Xaa is C or S

SEQ ID NO: 13340 - protein, 39 aa, Artificial Sequence; identical to SEQ ID NO: 5917
  GFR-binding peptide
  MOD_RES (34), (35): Xaa is C or S
  MOD_RES (12), (13), (14), (15), (16): Xaa is A or G
  MOD_RES (17), (18), (19), (20): Xaa is A or G or is absent

SEQ ID NO: 13341 - protein, 34 aa, Artificial Sequence
  GFR-binding peptide
  MOD_RES (1), (3): Xaa is C or S
XGXSEVVMDEYQKYVVNNASDIFLISIPSLRTPV

SEQ ID NO: 13342 - protein, 37 aa, Artificial Sequence
  GFR-binding peptide
  MOD_RES (2), (4), (35), (36): Xaa is C or S
SXKXSRVIMEYQKYVKPKRGVIFLISIPSLAQPVXXP

SEQ ID NO: 13343 - protein, 38 aa, Artificial Sequence
  GFR-binding peptide
  MOD_RES (33), (34): Xaa is C or S
  MOD_RES (11), (12), (13), (14), (15): Xaa is A or G
  MOD_RES (16), (17), (18), (19): Xaa is A or G or is absent
SKVIMEYQKYXXXXXXXXXIFLISIPSLDQSVXXPSAS

SEQ ID NO: 13344 - protein, 33 aa, Artificial Sequence
  GFR-binding peptide
  MOD_RES (32), (33): Xaa is C or S
GEVVMDNSLQEVVKENEDYYVMPLPELETPVXX

SEQ ID NO: 13345 - protein, 40 aa, Artificial Sequence; identical to SEQ ID NO: 5918
  GFR-binding peptide
  MOD_RES (2), (4), (35), (36): Xaa is C or S

SEQ ID NO: 13346 - protein, 37 aa, Artificial Sequence; identical to SEQ ID NO: 5919
  GFR-binding peptide
  MOD_RES (2), (34): Xaa is C or S

SEQ ID NO: 13347 - protein, 40 aa, Artificial Sequence; identical to SEQ ID NO: 5921
  GFR-binding peptide
  MOD_RES (2), (36), (37): Xaa is C or S
  MOD_RES (14), (15), (16), (17), (18): Xaa is A or G
  MOD_RES (19), (20), (21), (22): Xaa is A or G or is absent

SEQ ID NO: 13348 - protein, 38 aa, Artificial Sequence
  GFR-binding peptide
  MOD_RES (32), (33): Xaa is C or S
GEVVMEEYQKYVVKDYEDIFLMSIPSLETPVXXAKPIS

SEQ ID NO: 13349 - protein, 37 aa, Artificial Sequence
  GFR-binding peptide
  MOD_RES (31), (32): Xaa is C or S
RVVMNEYQKYIVNSSDDIFLVSIPSLKTPAXXPKPVY

SEQ ID NO: 13350 - protein, 41 aa, Artificial Sequence
  GFR-binding peptide
  MOD_RES (2), (4), (38), (39): Xaa is C or S
  MOD_RES (16), (17), (18), (19), (20): Xaa is A or G
  MOD_RES (21), (22), (23), (24): Xaa is A or G or is absent
RXGXGEVVMDNSLQEXXXXXXXXXYYVMPLPELETPVXXAK

SEQ ID NO: 13351 - protein, 39 aa, Artificial Sequence; identical to SEQ ID NO: 5926
  GFR-binding peptide
  MOD_RES (2), (33), (34): Xaa is C or S

SEQ ID NO: 13352 - protein, 36 aa, Artificial Sequence
  GFR-binding peptide
  MOD_RES (33), (33): Xaa is C or S
  MOD_RES (11), (12), (13), (14), (15): Xaa is A or G
  MOD_RES (16), (17), (18), (19): Xaa is A or G or is absent
RVVMNNSLQEXXXXXXXXXYYLVTLPELKTPAXTPK

SEQ ID NO: 13353 - protein, 37 aa, Artificial Sequence
  GFR-binding peptide
  MOD_RES (1), (33): Xaa is C or S
XSRVVMNEYQKYIVNSSDDIFLVSIPSLKTPAXTPKT

SEQ ID NO: 13354 - protein, 41 aa, Artificial Sequence; identical to SEQ ID NO: 5929
  GFR-binding peptide
  MOD_RES (2), (4), (37), (38): Xaa is C or S
  MOD_RES (15), (16), (17), (18), (19): Xaa is A or G
  MOD_RES (20), (21), (22), (23): Xaa is A or G or is absent

SEQ ID NO: 13355 - protein, 35 aa, Artificial Sequence
  GFR-binding peptide
  MOD_RES (31), (31): Xaa is C or S
RVVMNNSLQEIVNSSDDYYLVTLPELKTPAXTPKT

SEQ ID NO: 13356 - protein, 36 aa, Artificial Sequence
  GFR-binding peptide
  MOD_RES (1), (33), (34): Xaa is C or S
XSEVVMDRYKKLVVNNASDFYLISIANLRTPVXXTP

SEQ ID NO: 13357 - protein, 41 aa, Artificial Sequence; identical to SEQ ID NO: 5932
  GFR-binding peptide
  MOD_RES (2), (4), (36), (37): Xaa is C or S

SEQ ID NO: 13358 - protein, 38 aa, Artificial Sequence
  GFR-binding peptide
  MOD_RES (2), (4), (38): Xaa is C or S
  MOD_RES (16), (17), (18), (19), (20): Xaa is A or G
  MOD_RES (21), (22), (23), (24): Xaa is A or G or is absent
HXGXARVVMNNSLQEXXXXXXXXXYYLVTLPELQTPAX

SEQ ID NO: 13359 - protein, 42 aa, Artificial Sequence
  GFR-binding peptide
  MOD_RES (1), (3), (37): Xaa is C or S
  MOD_RES (15), (16), (17), (18), (19): Xaa is A or G
  MOD_RES (20), (21), (22), (23): Xaa is A or G or is absent
XGXSRVVMNEYQKYXXXXXXXXXIFLVSIPSLKTPAXTPKTV

SEQ ID NO: 13360 - protein, 40 aa, Artificial Sequence
  GFR-binding peptide
  MOD_RES (2), (36), (37): Xaa is C or S
  MOD_RES (14), (15), (16), (17), (18): Xaa is A or G
  MOD_RES (19), (20), (21), (22): Xaa is A or G or is absent
GXSEVVMDNSLQEXXXXXXXXXYYVIPLPELRTPVXXTPP

SEQ ID NO: 13361 - protein, 39 aa, Artificial Sequence
  GFR-binding peptide
  MOD_RES (2), (34), (35): Xaa is C or S
GXSEVVMDNSLQEVVNNASDYYVIPLPELRTPVXXTPPT

SEQ ID NO: 13362 - protein, 35 aa, Artificial Sequence
  GFR-binding peptide
  MOD_RES (2), (34), (35): Xaa is C or S
GXSRVVMNEYQKYIVNSSDDIFLVSIPSLKTPAXX

SEQ ID NO: 13363 - protein, 34 aa, Artificial Sequence
  GFR-binding peptide
  MOD_RES (1), (1): Xaa is C or S
  MOD_RES (13), (14), (15), (16), (17): Xaa is A or G
  MOD_RES (18), (19), (20), (21): Xaa is A or G or is absent
XARVVMNNSLQEXXXXXXXXXYYLVTLPELQTPA

SEQ ID NO: 13364 - protein, 34 aa, Artificial Sequence; identical to SEQ ID NO: 5940
  GFR-binding peptide
  MOD_RES (1), (3), (34): Xaa is C or S

SEQ ID NO: 13365 - protein, 33 aa, Artificial Sequence; identical to SEQ ID NO: 5941
  GFR-binding peptide
  MOD_RES (12), (13), (14), (15), (16): Xaa is A or G
  MOD_RES (17), (18), (19), (20): Xaa is A or G or is absent

SEQ ID NO: 13366 - protein, 36 aa, Artificial Sequence
  GFR-binding peptide
  MOD_RES (1), (3): Xaa is C or S
  MOD_RES (15), (16), (17), (18), (19): Xaa is A or G
  MOD_RES (20), (21), (22), (23): Xaa is A or G or is absent
XGXGEVVMDNSLQEXXXXXXXXXYYVMPLPELETPV

SEQ ID NO: 13367 - protein, 37 aa, Artificial Sequence
  GFR-binding peptide
  MOD_RES (32), (33): Xaa is C or S
SEVVMDQYNKLVVNNASDLYLISIASLRTPVXXTPPT

SEQ ID NO: 13368 - protein, 37 aa, Artificial Sequence
  GFR-binding peptide
  MOD_RES (31), (32): Xaa is C or S
EVVMDNSLQEVVKENEDYYLMTLPELETPVXXAKPIK

SEQ ID NO: 13369 - protein, 40 aa, Artificial Sequence; identical to SEQ ID NO: 5943
  GFR-binding peptide
  MOD_RES (2), (35), (36): Xaa is C or S
  MOD_RES (13), (14), (15), (16), (17): Xaa is A or G
  MOD_RES (18), (19), (20), (21): Xaa is A or G or is absent

SEQ ID NO: 13370 - protein, 33 aa, Artificial Sequence
  GFR-binding peptide
  MOD_RES (1), (33): Xaa is C or S
XSEVVMDNSLQEVVNNASDYYVIPLPELRTPVX

SEQ ID NO: 13371 - protein, 33 aa, Artificial Sequence
  GFR-binding peptide
  MOD_RES (1), (32), (33): Xaa is C or S
XSKVIMNSLQEIKPTKGIYYVIPLPELDQSVXX

SEQ ID NO: 13372 - protein, 43 aa, Artificial Sequence
  GFR-binding peptide
  MOD_RES (2), (4), (38), (39): Xaa is C or S
  MOD_RES (16), (17), (18), (19), (20): Xaa is A or G
  MOD_RES (21), (22), (23), (24): Xaa is A or G or is absent
RXGXSEVVMDRYKKLXXXXXXXXXFYLISIANLRTPVXXTPPT

SEQ ID NO: 13373 - protein, 41 aa, Artificial Sequence
  GFR-binding peptide
  MOD_RES (1), (3), (35), (36): Xaa is C or S
XGXGEVVMENSLQEVVKDYEDYYVMPLPELETPVXXAKPIS

SEQ ID NO: 13374 - protein, 40 aa, Artificial Sequence
  GFR-binding peptide
  MOD_RES (2), (4), (37), (38): Xaa is C or S
  MOD_RES (15), (16), (17), (18), (19): Xaa is A or G
  MOD_RES (20), (21), (22), (23): Xaa is A or G or is absent
SXKXSKVVMNSLQEXXXXXXXXXYYVIPLPELDQPVXXPS

SEQ ID NO: 13375 - protein, 34 aa, Artificial Sequence
  GFR-binding peptide
  MOD_RES (1), (3), (34): Xaa is C or S
XKXSKVVMNSLQEVKPTRGVYYLITLPELDQPVX

SEQ ID NO: 13376 - protein, 36 aa, Artificial Sequence
  GFR-binding peptide
  MOD_RES (1), (3), (35), (36): Xaa is C or S
XGXGEVVMDNSLQEVVKENEDYYLMTLPELETPVXX

SEQ ID NO: 13377 - protein, 36 aa, Artificial Sequence; identical to SEQ ID NO: 5956
  GFR-binding peptide
  MOD_RES (2), (4): Xaa is C or S
  MOD_RES (15), (16), (17), (18), (19): Xaa is A or G
  MOD_RES (20), (21), (22), (23): Xaa is A or G or is absent

SEQ ID NO: 13378 - protein, 31 aa, Artificial Sequence
  GFR-binding peptide
  MOD_RES (31), (31): Xaa is C or S
EVVMDQYNKLVVNNASDLYLISIASLRTPVX

SEQ ID NO: 13379 - protein, 35 aa, Artificial Sequence
  GFR-binding peptide
  MOD_RES (1), (34), (35): Xaa is C or S
  MOD_RES (12), (13), (14), (15), (16): Xaa is A or G
  MOD_RES (17), (18), (19), (20): Xaa is A or G or is absent
XSKVIMEYQKYXXXXXXXXXIFLISIPSLDQSVXX

SEQ ID NO: 13380 - protein, 35 aa, Artificial Sequence
  GFR-binding peptide
  MOD_RES (1), (34), (35): Xaa is C or S
  MOD_RES (12), (13), (14), (15), (16): Xaa is A or G
  MOD_RES (17), (18), (19), (20): Xaa is A or G or is absent
XSKVVMNSLQEXXXXXXXXXYYLITLPELDQPVXX

SEQ ID NO: 13381 - protein, 33 aa, Artificial Sequence; identical to SEQ ID NO: 5957
  GFR-binding peptide
  MOD_RES (33), (33): Xaa is C or S
  MOD_RES (11), (12), (13), (14), (15): Xaa is A or G
  MOD_RES (16), (17), (18), (19): Xaa is A or G or is absent

SEQ ID NO: 13382 - protein, 38 aa, Artificial Sequence
  GFR-binding peptide
  MOD_RES (1), (33), (34): Xaa is C or S
XSEVVMDRYKKLVVNNASDFYLISIANLRTPVXXTPPT

SEQ ID NO: 13383 - protein, 38 aa, Artificial Sequence
  GFR-binding peptide
  MOD_RES (1), (3), (35), (36): Xaa is C or S
XGXARVVMNEYQKYIVNSSDDIFLVSIPSLQTPAXXPK

SEQ ID NO: 13384 - protein, 38 aa, Artificial Sequence
  GFR-binding peptide
  MOD_RES (1), (33): Xaa is C or S
XSRVVMNNSLQEIVNSSDDYYVVPLPELKTPAXTPKTV

SEQ ID NO: 13385 - protein, 34 aa, Artificial Sequence
  GFR-binding peptide
  MOD_RES (1), (1): Xaa is C or S
  MOD_RES (13), (14), (15), (16), (17): Xaa is A or G
  MOD_RES (18), (19), (20), (21): Xaa is A or G or is absent
XGEVVMENSLQEXXXXXXXXXYYLMTLPELETPV

SEQ ID NO: 13386 - protein, 36 aa, Artificial Sequence
  GFR-binding peptide
  MOD_RES (33), (34): Xaa is C or S
  MOD_RES (11), (12), (13), (14), (15): Xaa is A or G
  MOD_RES (16), (17), (18), (19): Xaa is A or G or is absent
SRVIMNSLQEXXXXXXXXXYYVIPLPELAQPVXXPA

SEQ ID NO: 13387 - protein, 40 aa, Artificial Sequence
  GFR-binding peptide
  MOD_RES (1), (3), (37), (38): Xaa is C or S
  MOD_RES (15), (16), (17), (18), (19): Xaa is A or G
  MOD_RES (20), (21), (22), (23): Xaa is A or G or is absent
XGXSRVVMNNSLQEXXXXXXXXXYYLVTLPELKTPAXXPK

SEQ ID NO: 13388 - protein, 41 aa, Artificial Sequence; identical to SEQ ID NO: 5962
  GFR-binding peptide
  MOD_RES (2), (4), (38), (39): Xaa is C or S
  MOD_RES (16), (17), (18), (19), (20): Xaa is A or G
  MOD_RES (21), (22), (23), (24): Xaa is A or G or is absent

SEQ ID NO: 13389 - protein, 38 aa, Artificial Sequence; identical to SEQ ID NO: 5964
  GFR-binding peptide
  MOD_RES (2), (34), (35): Xaa is C or S

SEQ ID NO: 13390 - protein, 37 aa, Artificial Sequence
  GFR-binding peptide
  MOD_RES (32), (33): Xaa is C or S
SRVVMNNSLQEIVNSSDDYYVVPLPELKTPAXXPKPV

SEQ ID NO: 13391 - protein, 41 aa, Artificial Sequence; identical to SEQ ID NO: 5967
  GFR-binding peptide
  MOD_RES (1), (35), (36): Xaa is C or S
  MOD_RES (13), (14), (15), (16), (17): Xaa is A or G
  MOD_RES (18), (19), (20), (21): Xaa is A or G or is absent

SEQ ID NO: 13392 - protein, 37 aa, Artificial Sequence; identical to SEQ ID NO: 5968
  GFR-binding peptide
  MOD_RES (33), (34): Xaa is C or S
  MOD_RES (11), (12), (13), (14), (15): Xaa is A or G
  MOD_RES (16), (17), (18), (19): Xaa is A or G or is absent

SEQ ID NO: 13393 - protein, 32 aa, Artificial Sequence
  GFR-binding peptide
  MOD_RES (11), (12), (13), (14), (15): Xaa is A or G
  MOD_RES (16), (17), (18), (19): Xaa is A or G or is absent
RVVMNNSLQEXXXXXXXXXYYVVPLPELQTPA

SEQ ID NO: 13394 - protein, 34 aa, Artificial Sequence; identical to SEQ ID NO: 5969
  GFR-binding peptide
  MOD_RES (2), (34): Xaa is C or S

SEQ ID NO: 13395 - protein, 35 aa, Artificial Sequence; identical to SEQ ID NO: 5974
  GFR-binding peptide
  MOD_RES (2), (34), (35): Xaa is C or S

SEQ ID NO: 13396 - protein, 43 aa, Artificial Sequence
  GFR-binding peptide
  MOD_RES (1), (3), (37), (38): Xaa is C or S
  MOD_RES (15), (16), (17), (18), (19): Xaa is A or G
  MOD_RES (20), (21), (22), (23): Xaa is A or G or is absent
XGXSRVVMNNSLQEXXXXXXXXXYYLVTLPELKTPAXXPKPVY

SEQ ID NO: 13397 - protein, 36 aa, Artificial Sequence; identical to SEQ ID NO: 5979
  GFR-binding peptide
  MOD_RES (1), (3), (36): Xaa is C or S
  MOD_RES (14), (15), (16), (17), (18): Xaa is A or G
  MOD_RES (19), (20), (21), (22): Xaa is A or G or is absent

SEQ ID NO: 13398 - protein, 32 aa, Artificial Sequence; identical to SEQ ID NO: 5983
  GFR-binding peptide
  MOD_RES (11), (12), (13), (14), (15): Xaa is A or G
  MOD_RES (16), (17), (18), (19): Xaa is A or G or is absent

SEQ ID NO: 13399 - protein, 39 aa, Artificial Sequence
  GFR-binding peptide
  MOD_RES (1), (35), (36): Xaa is C or S
  MOD_RES (13), (14), (15), (16), (17): Xaa is A or G
  MOD_RES (18), (19), (20), (21): Xaa is A or G or is absent
XGEVVMDNSLQEXXXXXXXXXYYVMPLPELETPVXXAKP

SEQ ID NO: 13400 - protein, 38 aa, Artificial Sequence
  GFR-binding peptide
  MOD_RES (2), (4), (35), (36): Xaa is C or S
SXKXSRVIMNSLQEVKPKRGVYYLITLPELAQPVXXPA

SEQ ID NO: 13401 - protein, 36 aa, Artificial Sequence; identical to SEQ ID NO: 5984
  GFR-binding peptide
  MOD_RES (31), (31): Xaa is C or S

SEQ ID NO: 13402 - protein, 42 aa, Artificial Sequence; identical to SEQ ID NO: 5986
  GFR-binding peptide
  MOD_RES (1), (3), (36), (37): Xaa is C or S
  MOD_RES (14), (15), (16), (17), (18): Xaa is A or G
  MOD_RES (19), (20), (21), (22): Xaa is A or G or is absent

SEQ ID NO: 13403 - protein, 40 aa, Artificial Sequence; identical to SEQ ID NO: 5989
  GFR-binding peptide
  MOD_RES (1), (34), (35): Xaa is C or S
  MOD_RES (12), (13), (14), (15), (16): Xaa is A or G
  MOD_RES (17), (18), (19), (20): Xaa is A or G or is absent

SEQ ID NO: 13404 - protein, 38 aa, Artificial Sequence
  GFR-binding peptide
  MOD_RES (1), (3), (36), (37): Xaa is C or S
  MOD_RES (14), (15), (16), (17), (18): Xaa is A or G
  MOD_RES (19), (20), (21), (22): Xaa is A or G or is absent
XKXSRVIMEYQKYXXXXXXXXXIFLISIPSLAQPVXXP

SEQ ID NO: 13405 - protein, 35 aa, Artificial Sequence; identical to SEQ ID NO: 5992
  GFR-binding peptide
  MOD_RES (31), (32): Xaa is C or S

SEQ ID NO: 13406 - protein, 33 aa, Artificial Sequence
  GFR-binding peptide
  MOD_RES (33), (33): Xaa is C or S
  MOD_RES (11), (12), (13), (14), (15): Xaa is A or G
  MOD_RES (16), (17), (18), (19): Xaa is A or G or is absent
RVVMNNSLQEXXXXXXXXXYYLVTLPELQTPAX

SEQ ID NO: 13407 - protein, 37 aa, Artificial Sequence
  GFR-binding peptide
  MOD_RES (1), (3), (35), (36): Xaa is C or S
XGXGEVVMEEYQKYVVKDYEDIFLMSIPSLETPVXXA

SEQ ID NO: 13408 - protein, 41 aa, Artificial Sequence
  GFR-binding peptide
  MOD_RES (2), (36), (37): Xaa is C or S
  MOD_RES (14), (15), (16), (17), (18): Xaa is A or G
  MOD_RES (19), (20), (21), (22): Xaa is A or G or is absent
GXSEVVMDEYQKYXXXXXXXXXIFLISIPSLRTPVXXTPPT

SEQ ID NO: 13409 - protein, 37 aa, Artificial Sequence
  GFR-binding peptide
  MOD_RES (1), (3), (35), (36): Xaa is C or S
XGXGEVVMENSLQEVVKDYEDYYLMTLPELETPVXXA

SEQ ID NO: 13410 - protein, 33 aa, Artificial Sequence
  GFR-binding peptide
  MOD_RES (2), (2): Xaa is C or S
GXGEVVMENSLQEVVKDYEDYYVMPLPELETPV

SEQ ID NO: 13411 - protein, 41 aa, Artificial Sequence
  GFR-binding peptide
  MOD_RES (2), (4), (36), (37): Xaa is C or S
RXGXSEVVMDEYQKYVVNNASDIFLISIPSLRTPVXXTPPT

SEQ ID NO: 13412 - protein, 32 aa, Artificial Sequence
  GFR-binding peptide
  MOD_RES (11), (12), (13), (14), (15): Xaa is A or G
  MOD_RES (16), (17), (18), (19): Xaa is A or G or is absent
SKVVMNSLQEXXXXXXXXXYYLITLPELDQPV

SEQ ID NO: 13413 - protein, 37 aa, Artificial Sequence
  GFR-binding peptide
  MOD_RES (2), (36), (37): Xaa is C or S
  MOD_RES (14), (15), (16), (17), (18): Xaa is A or G
  MOD_RES (19), (20), (21), (22): Xaa is A or G or is absent
GXSEVVMDQYNKLXXXXXXXXXLYLISIASLRTPVXX

SEQ ID NO: 13414 - protein, 42 aa, Artificial Sequence; identical to SEQ ID NO: 6005
  GFR-binding peptide
  MOD_RES (2), (36), (37): Xaa is C or S
  MOD_RES (14), (15), (16), (17), (18): Xaa is A or G
  MOD_RES (19), (20), (21), (22): Xaa is A or G or is absent

SEQ ID NO: 13415 - protein, 37 aa, Artificial Sequence
  GFR-binding peptide
  MOD_RES (2), (34): Xaa is C or S
GXSRVVMNNSLQEIVNSSDDYYLVTLPELKTPAXTPK

SEQ ID NO: 13416 - protein, 36 aa, Artificial Sequence
  GFR-binding peptide
  MOD_RES (34), (35): Xaa is C or S
  MOD_RES (12), (13), (14), (15), (16): Xaa is A or G
  MOD_RES (17), (18), (19), (20): Xaa is A or G or is absent
SRVVMNEYQKYXXXXXXXXXIFLVSIPSLKTPAXXP

SEQ ID NO: 13417 - protein, 35 aa, Artificial Sequence
  GFR-binding peptide
  MOD_RES (34), (35): Xaa is C or S
  MOD_RES (12), (13), (14), (15), (16): Xaa is A or G
  MOD_RES (17), (18), (19), (20): Xaa is A or G or is absent
SEVVMDRYKKLXXXXXXXXXFYLISIANLRTPVXX

SEQ ID NO: 13418 - protein, 35 aa, Artificial Sequence; identical to SEQ ID NO: 6008
  GFR-binding peptide
  MOD_RES (1), (3), (35): Xaa is C or S

SEQ ID NO: 13419 - protein, 38 aa, Artificial Sequence
  GFR-binding peptide
  MOD_RES (1), (33), (34): Xaa is C or S
XSRVVMNEYQKYIVNSSDDIFLVSIPSLKTPAXXPKPV

SEQ ID NO: 13420 - protein, 40 aa, Artificial Sequence; identical to SEQ ID NO: 6014
  GFR-binding peptide
  MOD_RES (1), (3), (36), (37): Xaa is C or S
  MOD_RES (14), (15), (16), (17), (18): Xaa is A or G
  MOD_RES (19), (20), (21), (22): Xaa is A or G or is absent

SEQ ID NO: 13421 - protein, 42 aa, Artificial Sequence
  GFR-binding peptide
  MOD_RES (2), (4), (36): Xaa is C or S
HXGXSRVVMNNSLQEIVNSSDDYYVVPLPELKTPAXTPKTVH

SEQ ID NO: 13422 - protein, 39 aa, Artificial Sequence
  GFR-binding peptide
  MOD_RES (2), (4), (38), (39): Xaa is C or S
  MOD_RES (16), (17), (18), (19), (20): Xaa is A or G
  MOD_RES (21), (22), (23), (24): Xaa is A or G or is absent
HXGXSRVVMNNSLQEXXXXXXXXXYYVVPLPELKTPAXX

SEQ ID NO: 13423 - protein, 41 aa, Artificial Sequence
  GFR-binding peptide
  MOD_RES (1), (35), (36): Xaa is C or S
  MOD_RES (13), (14), (15), (16), (17): Xaa is A or G
  MOD_RES (18), (19), (20), (21): Xaa is A or G or is absent
XGEVVMENSLQEXXXXXXXXXYYLMTLPELETPVXXAKPIS

SEQ ID NO: 13424 - protein, 37 aa, Artificial Sequence; identical to SEQ ID NO: 6016
  GFR-binding peptide
  MOD_RES (1), (35), (36): Xaa is C or S
  MOD_RES (13), (14), (15), (16), (17): Xaa is A or G
  MOD_RES (18), (19), (20), (21): Xaa is A or G or is absent

SEQ ID NO: 13425 - protein, 38 aa, Artificial Sequence
  GFR-binding peptide
  MOD_RES (33), (34): Xaa is C or S
  MOD_RES (11), (12), (13), (14), (15): Xaa is A or G
  MOD_RES (16), (17), (18), (19): Xaa is A or G or is absent
EVVMDNSLQEXXXXXXXXXYYLITLPELRTPVXXTPPT

SEQ ID NO: 13426 - protein, 39 aa, Artificial Sequence
  GFR-binding peptide
  MOD_RES (1), (35), (36): Xaa is C or S
  MOD_RES (13), (14), (15), (16), (17): Xaa is A or G
  MOD_RES (18), (19), (20), (21): Xaa is A or G or is absent
XSEVVMDRYKKLXXXXXXXXXFYLISIANLRTPVXXTPP

SEQ ID NO: 13427 - protein, 39 aa, Artificial Sequence
  GFR-binding peptide
  MOD_RES (1), (3), (35), (36): Xaa is C or S
XGXSRVVMNEYQKYIVNSSDDIFLVSIPSLKTPAXXPKP

SEQ ID NO: 13428 - protein, 37 aa, Artificial Sequence
  GFR-binding peptide
  MOD_RES (31), (32): Xaa is C or S
EVVMDQYNKLVVNNASDLYLISIASLRTPVXXTPPTS

SEQ ID NO: 13429 - protein, 38 aa, Artificial Sequence
  GFR-binding peptide
  MOD_RES (1), (3), (35), (36): Xaa is C or S
XGXARVVMNNSLQEIVNSSDDYYLVTLPELQTPAXXPK

SEQ ID NO: 13430 - protein, 42 aa, Artificial Sequence
  GFR-binding peptide
  MOD_RES (2), (4), (38), (39): Xaa is C or S
  MOD_RES (16), (17), (18), (19), (20): Xaa is A or G
  MOD_RES (21), (22), (23), (24): Xaa is A or G or is absent
RXGXSEVVMDQYNKLXXXXXXXXXLYLISIASLRTPVXXTPP

SEQ ID NO: 13431 - protein, 33 aa, Artificial Sequence
  GFR-binding peptide
  MOD_RES (33), (33): Xaa is C or S
  MOD_RES (11), (12), (13), (14), (15): Xaa is A or G
  MOD_RES (16), (17), (18), (19): Xaa is A or G or is absent
SKVVMNSLQEXXXXXXXXXYYVIPLPELDQPVX

SEQ ID NO: 13432 - protein, 37 aa, Artificial Sequence
  GFR-binding peptide
  MOD_RES (1), (3), (35), (36): Xaa is C or S
XGXGEVVMDEYQKYVVKENEDIFLMSIPSLETPVXXA

SEQ ID NO: 13433 - protein, 41 aa, Artificial Sequence
  GFR-binding peptide
  MOD_RES (2), (4), (38): Xaa is C or S
  MOD_RES (16), (17), (18), (19), (20): Xaa is A or G
  MOD_RES (21), (22), (23), (24): Xaa is A or G or is absent
HXGXSRVVMNNSLQEXXXXXXXXXYYVVPLPELKTPAXTPK

SEQ ID NO: 13434 - protein, 32 aa, Artificial Sequence; identical to SEQ ID NO: 6028
  GFR-binding peptide
  MOD_RES (1), (32): Xaa is C or S

SEQ ID NO: 13435 - protein, 36 aa, Artificial Sequence
  GFR-binding peptide
  MOD_RES (1), (3), (35), (36): Xaa is C or S
XGXGEVVMDEYQKYVVKENEDIFLMSIPSLETPVXX

SEQ ID NO: 13436 - protein, 34 aa, Artificial Sequence; identical to SEQ ID NO: 6031
  GFR-binding peptide
  MOD_RES (34), (34): Xaa is C or S
  MOD_RES (12), (13), (14), (15), (16): Xaa is A or G
  MOD_RES (17), (18), (19), (20): Xaa is A or G or is absent

SEQ ID NO: 13437 - protein, 36 aa, Artificial Sequence
  GFR-binding peptide
  MOD_RES (1), (33): Xaa is C or S
XSRVVMNNSLQEIVNSSDDYYLVTLPELKTPAXTPK

SEQ ID NO: 13438 - protein, 36 aa, Artificial Sequence; identical to SEQ ID NO: 6034
  GFR-binding peptide
  MOD_RES (32), (33): Xaa is C or S

SEQ ID NO: 13439 - protein, 34 aa, Artificial Sequence; identical to SEQ ID NO: 6035
  GFR-binding peptide
  MOD_RES (32), (33): Xaa is C or S

SEQ ID NO: 13440 - protein, 39 aa, Artificial Sequence
  GFR-binding peptide
  MOD_RES (2), (36), (37): Xaa is C or S
  MOD_RES (14), (15), (16), (17), (18): Xaa is A or G
  MOD_RES (19), (20), (21), (22): Xaa is A or G or is absent
GXSEVVMDNSLQEXXXXXXXXXYYVIPLPELRTPVXXTP

SEQ ID NO: 13441 - protein, 36 aa, Artificial Sequence
  GFR-binding peptide
  MOD_RES (2), (36): Xaa is C or S
  MOD_RES (14), (15), (16), (17), (18): Xaa is A or G
  MOD_RES (19), (20), (21), (22): Xaa is A or G or is absent
GXGEVVMENSLQEXXXXXXXXXYYLMTLPELETPVX

SEQ ID NO: 13442 - protein, 37 aa, Artificial Sequence
  GFR-binding peptide
  MOD_RES (31), (32): Xaa is C or S
SRVIMNSLQEVKPKRGVYYLITLPELAQPVXXPAASA

SEQ ID NO: 13443 - protein, 39 aa, Artificial Sequence; identical to SEQ ID NO: 6040
  GFR-binding peptide
  MOD_RES (1), (3), (37), (38): Xaa is C or S
  MOD_RES (15), (16), (17), (18), (19): Xaa is A or G
  MOD_RES (20), (21), (22), (23): Xaa is A or G or is absent

SEQ ID NO: 13444 - protein, 36 aa, Artificial Sequence
  GFR-binding peptide
  MOD_RES (31), (32): Xaa is C or S
SKVVMNSLQEVKPTRGVYYLITLPELDQPVXXPSAS

SEQ ID NO: 13445 - protein, 41 aa, Artificial Sequence; identical to SEQ ID NO: 6043
  GFR-binding peptide
  MOD_RES (2), (4), (36), (37): Xaa is C or S

SEQ ID NO: 13446 - protein, 32 aa, Artificial Sequence; identical to SEQ ID NO: 6044
  GFR-binding peptide
  MOD_RES (2), (2): Xaa is C or S

SEQ ID NO: 13447 - protein, 42 aa, Artificial Sequence; identical to SEQ ID NO: 6046
  GFR-binding peptide
  MOD_RES (1), (3), (36), (37): Xaa is C or S
  MOD_RES (14), (15), (16), (17), (18): Xaa is A or G
  MOD_RES (19), (20), (21), (22): Xaa is A or G or is absent

SEQ ID NO: 13448 - protein, 37 aa, Artificial Sequence
  GFR-binding peptide
  MOD_RES (1), (33), (34): Xaa is C or S
XSEVVMDRYKKLVVNNASDFYLISIANLRTPVXXTPP

SEQ ID NO: 13449 - protein, 41 aa, Artificial Sequence
  GFR-binding peptide
  MOD_RES (2), (4), (37), (38): Xaa is C or S
  MOD_RES (15), (16), (17), (18), (19): Xaa is A or G
  MOD_RES (20), (21), (22), (23): Xaa is A or G or is absent
SXKXSRVIMNSLQEXXXXXXXXXYYLITLPELAQPVXXPAA

SEQ ID NO: 13450 - protein, 37 aa, Artificial Sequence
  GFR-binding peptide
  MOD_RES (1), (3), (34), (35): Xaa is C or S
XKXSKVVMNSLQEVKPTRGVYYVIPLPELDQPVXXPS

SEQ ID NO: 13451 - protein, 34 aa, Artificial Sequence
  GFR-binding peptide
  MOD_RES (2), (4): Xaa is C or S
SXKXSKVIMNSLQEIKPTKGIYYVIPLPELDQSV

SEQ ID NO: 13452 - protein, 41 aa, Artificial Sequence; identical to SEQ ID NO: 6049
  GFR-binding peptide
  MOD_RES (1), (35), (36): Xaa is C or S
  MOD_RES (13), (14), (15), (16), (17): Xaa is A or G
  MOD_RES (18), (19), (20), (21): Xaa is A or G or is absent

SEQ ID NO: 13453 - protein, 37 aa, Artificial Sequence; identical to SEQ ID NO: 6050
  GFR-binding peptide
  MOD_RES (2), (4), (36), (37): Xaa is C or S

SEQ ID NO: 13454 - protein, 42 aa, Artificial Sequence
  GFR-binding peptide
  MOD_RES (1), (3), (37), (38): Xaa is C or S
  MOD_RES (15), (16), (17), (18), (19): Xaa is A or G
  MOD_RES (20), (21), (22), (23): Xaa is A or G or is absent
XGXGEVVMDEYQKYXXXXXXXXXIFLMSIPSLETPVXXAKPI

SEQ ID NO: 13455 - protein, 37 aa, Artificial Sequence
  GFR-binding peptide
  MOD_RES (1), (3), (37): Xaa is C or S
  MOD_RES (15), (16), (17), (18), (19): Xaa is A or G
  MOD_RES (20), (21), (22), (23): Xaa is A or G or is absent
XGXARVVMNNSLQEXXXXXXXXXYYLVTLPELQTPAX

SEQ ID NO: 13456 - protein, 33 aa, Artificial Sequence
  GFR-binding peptide
  MOD_RES (1), (1): Xaa is C or S
  MOD_RES (12), (13), (14), (15), (16): Xaa is A or G
  MOD_RES (17), (18), (19), (20): Xaa is A or G or is absent
XSRVIMNSLQEXXXXXXXXXYYLITLPELAQPV

SEQ ID NO: 13457 - protein, 40 aa, Artificial Sequence
  GFR-binding peptide
  MOD_RES (1), (3), (37), (38): Xaa is C or S
  MOD_RES (15), (16), (17), (18), (19): Xaa is A or G
  MOD_RES (20), (21), (22), (23): Xaa is A or G or is absent
XGXGEVVMDEYQKYXXXXXXXXXIFLMSIPSLETPVXXAK

SEQ ID NO: 13458 - protein, 41 aa, Artificial Sequence
  GFR-binding peptide
  MOD_RES (2), (4), (38), (39): Xaa is C or S
  MOD_RES (16), (17), (18), (19), (20): Xaa is A or G
  MOD_RES (21), (22), (23), (24): Xaa is A or G or is absent
RXGXGEVVMDEYQKYXXXXXXXXXIFLMSIPSLETPVXXAK

SEQ ID NO: 13459 - protein, 35 aa, Artificial Sequence
  GFR-binding peptide
  MOD_RES (1), (35): Xaa is C or S
  MOD_RES (13), (14), (15), (16), (17): Xaa is A or G
  MOD_RES (18), (19), (20), (21): Xaa is A or G or is absent
XGEVVMENSLQEXXXXXXXXXYYLMTLPELETPVX

SEQ ID NO: 13460 - protein, 36 aa, Artificial Sequence; identical to SEQ ID NO: 6055
  GFR-binding peptide
  MOD_RES (1), (33), (34): Xaa is C or S

SEQ ID NO: 13461 - protein, 35 aa, Artificial Sequence
  GFR-binding peptide
  MOD_RES (2), (34), (35): Xaa is C or S
GXGEVVMDNSLQEVVKENEDYYVMPLPELETPVXX

SEQ ID NO: 13462 - protein, 35 aa, Artificial Sequence
  GFR-binding peptide
  MOD_RES (2), (35): Xaa is C or S
  MOD_RES (13), (14), (15), (16), (17): Xaa is A or G
  MOD_RES (18), (19), (20), (21): Xaa is A or G or is absent
KXSRVIMNSLQEXXXXXXXXXYYLITLPELAQPVX

SEQ ID NO: 13463 - protein, 35 aa, Artificial Sequence
  GFR-binding peptide
  MOD_RES (1), (35): Xaa is C or S
  MOD_RES (13), (14), (15), (16), (17): Xaa is A or G
  MOD_RES (18), (19), (20), (21): Xaa is A or G or is absent
XARVVMNNSLQEXXXXXXXXXYYLVTLPELQTPAX

SEQ ID NO: 13464 - protein, 43 aa, Artificial Sequence; identical to SEQ ID NO: 6061
  GFR-binding peptide
  MOD_RES (1), (3), (37), (38): Xaa is C or S
  MOD_RES (15), (16), (17), (18), (19): Xaa is A or G
  MOD_RES (20), (21), (22), (23): Xaa is A or G or is absent

SEQ ID NO: 13465 - protein, 43 aa, Artificial Sequence; identical to SEQ ID NO: 6063
  GFR-binding peptide
  MOD_RES (2), (4), (38), (39): Xaa is C or S
  MOD_RES (16), (17), (18), (19), (20): Xaa is A or G
  MOD_RES (21), (22), (23), (24): Xaa is A or G or is absent

SEQ ID NO: 13466 - protein, 34 aa, Artificial Sequence
  GFR-binding peptide
  MOD_RES (32), (33): Xaa is C or S
GEVVMENSLQEVVKDYEDYYLMTLPELETPVXXA

SEQ ID NO: 13467 - protein, 42 aa, Artificial Sequence
  GFR-binding peptide
  MOD_RES (1), (3), (37), (38): Xaa is C or S
  MOD_RES (15), (16), (17), (18), (19): Xaa is A or G
  MOD_RES (20), (21), (22), (23): Xaa is A or G or is absent
XGXARVVMNEYQKYXXXXXXXXXIFLVSIPSLQTPAXXPKPV

SEQ ID NO: 13468 - protein, 31 aa, Artificial Sequence
  GFR-binding peptide
GEVVMEEYQKYVVKDYEDIFLMSIPSLETPV

SEQ ID NO: 13469 - protein, 37 aa, Artificial Sequence; identical to SEQ ID NO: 6068
  GFR-binding peptide
  MOD_RES (2), (4): Xaa is C or S
  MOD_RES (16), (17), (18), (19), (20): Xaa is A or G
  MOD_RES (21), (22), (23), (24): Xaa is A or G or is absent

SEQ ID NO: 13470 - protein, 39 aa, Artificial Sequence; identical to SEQ ID NO: 6071
  GFR-binding peptide
  MOD_RES (2), (4), (37), (38): Xaa is C or S
  MOD_RES (15), (16), (17), (18), (19): Xaa is A or G
  MOD_RES (20), (21), (22), (23): Xaa is A or G or is absent

SEQ ID NO: 13471 - protein, 43 aa, Artificial Sequence
  GFR-binding peptide
  MOD_RES (1), (3), (37): Xaa is C or S
  MOD_RES (15), (16), (17), (18), (19): Xaa is A or G
  MOD_RES (20), (21), (22), (23): Xaa is A or G or is absent
XGXSRVVMNEYQKYXXXXXXXXXIFLVSIPSLKTPAXTPKTVH

SEQ ID NO: 13472 - protein, 38 aa, Artificial Sequence
  GFR-binding peptide
  MOD_RES (1), (3), (36), (37): Xaa is C or S
  MOD_RES (14), (15), (16), (17), (18): Xaa is A or G
  MOD_RES (19), (20), (21), (22): Xaa is A or G or is absent
XKXSKVVMNSLQEXXXXXXXXXYYLITLPELDQPVXXP

SEQ ID NO: 13473 - protein, 35 aa, Artificial Sequence; identical to SEQ ID NO: 6074
  GFR-binding peptide
  MOD_RES (33), (34): Xaa is C or S
  MOD_RES (11), (12), (13), (14), (15): Xaa is A or G
  MOD_RES (16), (17), (18), (19): Xaa is A or G or is absent

SEQ ID NO: 13474 - protein, 37 aa, Artificial Sequence
  GFR-binding peptide
  MOD_RES (33), (34): Xaa is C or S
  MOD_RES (11), (12), (13), (14), (15): Xaa is A or G
  MOD_RES (16), (17), (18), (19): Xaa is A or G or is absent
EVVMDNSLQEXXXXXXXXXYYLITLPELRTPVXXTPP

SEQ ID NO: 13475 - protein, 36 aa, Artificial Sequence; identical to SEQ ID NO: 6075
  GFR-binding peptide
  MOD_RES (34), (34): Xaa is C or S
  MOD_RES (12), (13), (14), (15), (16): Xaa is A or G
  MOD_RES (17), (18), (19), (20): Xaa is A or G or is absent

SEQ ID NO: 13476 - protein, 40 aa, Artificial Sequence
  GFR-binding peptide
  MOD_RES (1), (3), (37), (38): Xaa is C or S
  MOD_RES (15), (16), (17), (18), (19): Xaa is A or G
  MOD_RES (20), (21), (22), (23): Xaa is A or G or is absent
XGXSEVVMDNSLQEXXXXXXXXXYYLITLPELRTPVXXTP

SEQ ID NO: 13477 - protein, 33 aa, Artificial Sequence
  GFR-binding peptide
  MOD_RES (1), (3): Xaa is C or S
XKXSKVVMNSLQEVKPTRGVYYLITLPELDQPV

SEQ ID NO: 13478 - protein, 33 aa, Artificial Sequence
  GFR-binding peptide
  MOD_RES (12), (13), (14), (15), (16): Xaa is A or G
  MOD_RES (17), (18), (19), (20): Xaa is A or G or is absent
SEVVMDNSLQEXXXXXXXXXYYVIPLPELRTPV

SEQ ID NO: 13479 - protein, 38 aa, Artificial Sequence
  GFR-binding peptide
  MOD_RES (32), (32): Xaa is C or S
SRVVMNNSLQEIVNSSDDYYLVTLPELKTPAXTPKTVH

SEQ ID NO: 13480 - protein, 35 aa, Artificial Sequence
  GFR-binding peptide
  MOD_RES (2), (34), (35): Xaa is C or S
GXARVVMNNSLQEIVNSSDDYYLVTLPELQTPAXX

SEQ ID NO: 13481 - protein, 32 aa, Artificial Sequence
  GFR-binding peptide
  MOD_RES (32), (32): Xaa is C or S
SRVVMNNSLQEIVNSSDDYYVVPLPELKTPAX

SEQ ID NO: 13482 - protein, 36 aa, Artificial Sequence
  GFR-binding peptide
  MOD_RES (1), (3), (36): Xaa is C or S
  MOD_RES (14), (15), (16), (17), (18): Xaa is A or G
  MOD_RES (19), (20), (21), (22): Xaa is A or G or is absent
XKXSRVIMNSLQEXXXXXXXXXYYVIPLPELAQPVX

SEQ ID NO: 13483 - protein, 39 aa, Artificial Sequence
  GFR-binding peptide
  MOD_RES (2), (35), (36): Xaa is C or S
  MOD_RES (13), (14), (15), (16), (17): Xaa is A or G
  MOD_RES (18), (19), (20), (21): Xaa is A or G or is absent
KXSKVVMNSLQEXXXXXXXXXYYVIPLPELDQPVXXPSA

SEQ ID NO: 13484 - protein, 36 aa, Artificial Sequence; identical to SEQ ID NO: 6078
  GFR-binding peptide
  MOD_RES (31), (32): Xaa is C or S

SEQ ID NO: 13485 - protein, 39 aa, Artificial Sequence
  GFR-binding peptide
  MOD_RES (33), (34): Xaa is C or S
  MOD_RES (11), (12), (13), (14), (15): Xaa is A or G
  MOD_RES (16), (17), (18), (19): Xaa is A or G or is absent
RVVMNNSLQEXXXXXXXXXYYVVPLPELQTPAXXPKPVT

SEQ ID NO: 13486 - protein, 38 aa, Artificial Sequence; identical to SEQ ID NO: 6079
  GFR-binding peptide
  MOD_RES (2), (34), (35): Xaa is C or S

SEQ ID NO: 13487 - protein, 38 aa, Artificial Sequence
  GFR-binding peptide
  MOD_RES (1), (3), (37), (38): Xaa is C or S
  MOD_RES (15), (16), (17), (18), (19): Xaa is A or G
  MOD_RES (20), (21), (22), (23): Xaa is A or G or is absent
XGXSEVVMDRYKKLXXXXXXXXXFYLISIANLRTPVXX

SEQ ID NO: 13488 - protein, 34 aa, Artificial Sequence; identical to SEQ ID NO: 6080
  GFR-binding peptide
  MOD_RES (2), (33), (34): Xaa is C or S

SEQ ID NO: 13489 - protein, 39 aa, Artificial Sequence
  GFR-binding peptide
  MOD_RES (1), (33), (34): Xaa is C or S
XSRVVMNNSLQEIVNSSDDYYLVTLPELKTPAXXPKPVY

SEQ ID NO: 13490 - protein, 40 aa, Artificial Sequence; identical to SEQ ID NO: 6082
  GFR-binding peptide
  MOD_RES (2), (4), (36): Xaa is C or S

SEQ ID NO: 13491 - protein, 34 aa, Artificial Sequence
  GFR-binding peptide
  MOD_RES (1), (1): Xaa is C or S
  MOD_RES (13), (14), (15), (16), (17): Xaa is A or G
  MOD_RES (18), (19), (20), (21): Xaa is A or G or is absent
XSEVVMDEYQKYXXXXXXXXXIFLISIPSLRTPV

SEQ ID NO: 13492 - protein, 42 aa, Artificial Sequence
  GFR-binding peptide
  MOD_RES (2), (36), (37): Xaa is C or S
  MOD_RES (14), (15), (16), (17), (18): Xaa is A or G
  MOD_RES (19), (20), (21), (22): Xaa is A or G or is absent
GXGEVVMDNSLQEXXXXXXXXXYYVMPLPELETPVXXAKPIK

SEQ ID NO: 13493 - protein, 40 aa, Artificial Sequence
  GFR-binding peptide
  MOD_RES (1), (34), (35): Xaa is C or S
  MOD_RES (12), (13), (14), (15), (16): Xaa is A or G
  MOD_RES (17), (18), (19), (20): Xaa is A or G or is absent
XSKVVMNSLQEXXXXXXXXXYYLITLPELDQPVXXPSASA

SEQ ID NO: 13494 - protein, 41 aa, Artificial Sequence; identical to SEQ ID NO: 6085
  GFR-binding peptide
  MOD_RES (2), (35), (36): Xaa is C or S
  MOD_RES (13), (14), (15), (16), (17): Xaa is A or G
  MOD_RES (18), (19), (20), (21): Xaa is A or G or is absent

SEQ ID NO: 13495 - protein, 34 aa, Artificial Sequence
  GFR-binding peptide
  MOD_RES (1), (33), (34): Xaa is C or S
XSEVVMDNSLQEVVNNASDYYVIPLPELRTPVXX

SEQ ID NO: 13496 - protein, 37 aa, Artificial Sequence; identical to SEQ ID NO: 6086
  GFR-binding peptide
  MOD_RES (33), (34): Xaa is C or S
  MOD_RES (11), (12), (13), (14), (15): Xaa is A or G
  MOD_RES (16), (17), (18), (19): Xaa is A or G or is absent

SEQ ID NO: 13497 - protein, 35 aa, Artificial Sequence; identical to SEQ ID NO: 6087
  GFR-binding peptide
  MOD_RES (1), (34), (35): Xaa is C or S
  MOD_RES (12), (13), (14), (15), (16): Xaa is A or G
  MOD_RES (17), (18), (19), (20): Xaa is A or G or is absent

SEQ ID NO: 13498 - protein, 38 aa, Artificial Sequence
  GFR-binding peptide
  MOD_RES (2), (4), (35), (36): Xaa is C or S
SXKXSRVIMEYQKYVKPKRGVIFLISIPSLAQPVXXPA

SEQ ID NO: 13499 - protein, 40 aa, Artificial Sequence
  GFR-binding peptide
  MOD_RES (1), (35), (36): Xaa is C or S
  MOD_RES (13), (14), (15), (16), (17): Xaa is A or G
  MOD_RES (18), (19), (20), (21): Xaa is A or G or is absent
XSEVVMDNSLQEXXXXXXXXXYYVIPLPELRTPVXXTPPT

SEQ ID NO: 13500 - protein, 37 aa, Artificial Sequence
  GFR-binding peptide
  MOD_RES (1), (3), (36), (37): Xaa is C or S
  MOD_RES (14), (15), (16), (17), (18): Xaa is A or G
  MOD_RES (19), (20), (21), (22): Xaa is A or G or is absent
XKXSKVIMNSLQEXXXXXXXXXYYVIPLPELDQSVXX

SEQ ID NO: 13501 - protein, 39 aa, Artificial Sequence
  GFR-binding peptide
  MOD_RES (1), (33), (34): Xaa is C or S
XGEVVMEEYQKYVVKDYEDIFLMSIPSLETPVXXAKPIS

SEQ ID NO: 13502 - protein, 36 aa, Artificial Sequence
  GFR-binding peptide
  MOD_RES (1), (3), (35), (36): Xaa is C or S
XGXGEVVMENSLQEVVKDYEDYYLMTLPELETPVXX

SEQ ID NO: 13503 - protein, 36 aa, Artificial Sequence
  GFR-binding peptide
  MOD_RES (33), (34): Xaa is C or S
  MOD_RES (11), (12), (13), (14), (15): Xaa is A or G
  MOD_RES (16), (17), (18), (19): Xaa is A or G or is absent
EVVMENSLQEXXXXXXXXXYYVMPLPELETPVXXAK

SEQ ID NO: 13504 - protein, 35 aa, Artificial Sequence
  GFR-binding peptide
  MOD_RES (1), (33), (34): Xaa is C or S
XSEVVMDEYQKYVVNNASDIFLISIPSLRTPVXXT

SEQ ID NO: 13505 - protein, 42 aa, Artificial Sequence
  GFR-binding peptide
  MOD_RES (2), (4), (37), (38): Xaa is C or S
  MOD_RES (15), (16), (17), (18), (19): Xaa is A or G
  MOD_RES (20), (21), (22), (23): Xaa is A or G or is absent
SXKXSRVIMEYQKYXXXXXXXXXIFLISIPSLAQPVXXPAAS

SEQ ID NO: 13506 - protein, 30 aa, Artificial Sequence; identical to SEQ ID NO: 6091
  GFR-binding peptide

SEQ ID NO: 13507 - protein, 31 aa, Artificial Sequence; identical to SEQ ID NO: 6093
  GFR-binding peptide
  MOD_RES (31), (31): Xaa is C or S

SEQ ID NO: 13508 - protein, 39 aa, Artificial Sequence
  GFR-binding peptide
  MOD_RES (2), (35), (36): Xaa is C or S
  MOD_RES (13), (14), (15), (16), (17): Xaa is A or G
  MOD_RES (18), (19), (20), (21): Xaa is A or G or is absent
KXSKVIMEYQKYXXXXXXXXXIFLISIPSLDQSVXXPSA

SEQ ID NO: 13509 - protein, 37 aa, Artificial Sequence
  GFR-binding peptide
  MOD_RES (32), (33): Xaa is C or S
SEVVMDRYKKLVVNNASDFYLISIANLRTPVXXTPPT

SEQ ID NO: 13510 - protein, 34 aa, Artificial Sequence
  GFR-binding peptide
  MOD_RES (1), (3): Xaa is C or S
XGXARVVMNNSLQEIVNSSDDYYVVPLPELQTPA

SEQ ID NO: 13511 - protein, 42 aa, Artificial Sequence
  GFR-binding peptide
  MOD_RES (2), (4), (38), (39): Xaa is C or S
  MOD_RES (16), (17), (18), (19), (20): Xaa is A or G
  MOD_RES (21), (22), (23), (24): Xaa is A or G or is absent
HXGXARVVMNEYQKYXXXXXXXXXIFLVSIPSLQTPAXXPKP

SEQ ID NO: 13512 - protein, 37 aa, Artificial Sequence
  GFR-binding peptide
  MOD_RES (2), (4), (36): Xaa is C or S
HXGXSRVVMNNSLQEIVNSSDDYYVVPLPELKTPAXT

SEQ ID NO: 13513 - protein, 40 aa, Artificial Sequence
  GFR-binding peptide
  MOD_RES (1), (3), (37), (38): Xaa is C or S
  MOD_RES (15), (16), (17), (18), (19): Xaa is A or G
  MOD_RES (20), (21), (22), (23): Xaa is A or G or is absent
XGXSEVVMDNSLQEXXXXXXXXXYYVIPLPELRTPVXXTP

SEQ ID NO: 13514 - protein, 33 aa, Artificial Sequence
  GFR-binding peptide
  MOD_RES (1), (32), (33): Xaa is C or S
XSKVVMNSLQEVKPTRGVYYLITLPELDQPVXX

SEQ ID NO: 13515 - protein, 37 aa, Artificial Sequence
  GFR-binding peptide
  MOD_RES (2), (34): Xaa is C or S
GXSRVVMNEYQKYIVNSSDDIFLVSIPSLKTPAXTPK

SEQ ID NO: 13516 - protein, 33 aa, Artificial Sequence; identical to SEQ ID NO: 6105
  GFR-binding peptide
  MOD_RES (1), (3): Xaa is C or S

SEQ ID NO: 13517 - protein, 39 aa, Artificial Sequence
  GFR-binding peptide
  MOD_RES (2), (33), (34): Xaa is C or S
KXSRVIMEYQKYVKPKRGVIFLISIPSLAQPVXXPAASA

SEQ ID NO: 13518 - protein, 39 aa, Artificial Sequence; identical to SEQ ID NO: 6107
  GFR-binding peptide
  MOD_RES (33), (34): Xaa is C or S
  MOD_RES (11), (12), (13), (14), (15): Xaa is A or G
  MOD_RES (16), (17), (18), (19): Xaa is A or G or is absent

SEQ ID NO: 13519 - protein, 35 aa, Artificial Sequence; identical to SEQ ID NO: 6108
  GFR-binding peptide
  MOD_RES (1), (3), (35): Xaa is C or S

SEQ ID NO: 13520 - protein, 40 aa, Artificial Sequence; identical to SEQ ID NO: 6109
  GFR-binding peptide
  MOD_RES (2), (35), (36): Xaa is C or S
  MOD_RES (13), (14), (15), (16), (17): Xaa is A or G
  MOD_RES (18), (19), (20), (21): Xaa is A or G or is absent

SEQ ID NO: 13521 - protein, 43 aa, Artificial Sequence
  GFR-binding peptide
  MOD_RES (2), (4), (37), (38): Xaa is C or S
  MOD_RES (15), (16), (17), (18), (19): Xaa is A or G
  MOD_RES (20), (21), (22), (23): Xaa is A or G or is absent
SXKXSKVIMEYQKYXXXXXXXXXIFLISIPSLDQSVXXPSASA

SEQ ID NO: 13522 - protein, 35 aa, Artificial Sequence
  GFR-binding peptide
  MOD_RES (2), (2): Xaa is C or S
  MOD_RES (14), (15), (16), (17), (18): Xaa is A or G
  MOD_RES (19), (20), (21), (22): Xaa is A or G or is absent
GXGEVVMEEYQKYXXXXXXXXXIFLMSIPSLETPV

SEQ ID NO: 13523 - protein, 37 aa, Artificial Sequence
  GFR-binding peptide
  MOD_RES (1), (3), (37): Xaa is C or S
  MOD_RES (15), (16), (17), (18), (19): Xaa is A or G
  MOD_RES (20), (21), (22), (23): Xaa is A or G or is absent
XGXSEVVMDQYNKLXXXXXXXXXLYLISIASLRTPVX

SEQ ID NO: 13524 - protein, 35 aa, Artificial Sequence
  GFR-binding peptide
  MOD_RES (31), (32): Xaa is C or S
SRVIMNSLQEVKPKRGVYYVIPLPELAQPVXXPAA

SEQ ID NO: 13525 - protein, 35 aa, Artificial Sequence; identical to SEQ ID NO: 6113
  GFR-binding peptide
  MOD_RES (31), (32): Xaa is C or S

SEQ ID NO: 13526 - protein, 37 aa, Artificial Sequence
  GFR-binding peptide
  MOD_RES (2), (4), (36), (37): Xaa is C or S
HXGXARVVMNNSLQEIVNSSDDYYLVTLPELQTPAXX

SEQ ID NO: 13527 - protein, 34 aa, Artificial Sequence
  GFR-binding peptide
  MOD_RES (33), (34): Xaa is C or S
  MOD_RES (11), (12), (13), (14), (15): Xaa is A or G
  MOD_RES (16), (17), (18), (19): Xaa is A or G or is absent
RVVMNEYQKYXXXXXXXXXIFLVSIPSLKTPAXX

SEQ ID NO: 13528 - protein, 34 aa, Artificial Sequence; identical to SEQ ID NO: 6120
  GFR-binding peptide
  MOD_RES (32), (33): Xaa is C or S

SEQ ID NO: 13529 - protein, 35 aa, Artificial Sequence
  GFR-binding peptide
  MOD_RES (2), (34), (35): Xaa is C or S
GXSRVVMNNSLQEIVNSSDDYYLVTLPELKTPAXX

SEQ ID NO: 13530 - protein, 38 aa, Artificial Sequence
  GFR-binding peptide
  MOD_RES (1), (3), (35), (36): Xaa is C or S
XGXSRVVMNEYQKYIVNSSDDIFLVSIPSLKTPAXXPK

SEQ ID NO: 13531 - protein, 35 aa, Artificial Sequence; identical to SEQ ID NO: 6122
  GFR-binding peptide
  MOD_RES (2), (35): Xaa is C or S
  MOD_RES (13), (14), (15), (16), (17): Xaa is A or G
  MOD_RES (18), (19), (20), (21): Xaa is A or G or is absent

SEQ ID NO: 13532 - protein, 36 aa, Artificial Sequence
  GFR-binding peptide
  MOD_RES (33), (33): Xaa is C or S
  MOD_RES (11), (12), (13), (14), (15): Xaa is A or G
  MOD_RES (16), (17), (18), (19): Xaa is A or G or is absent
RVVMNNSLQEXXXXXXXXXYYVVPLPELKTPAXTPK

SEQ ID NO: 13533 - protein, 37 aa, Artificial Sequence; identical to SEQ ID NO: 6123
  GFR-binding peptide
  MOD_RES (1), (33), (34): Xaa is C or S

SEQ ID NO: 13534 - protein, 42 aa, Artificial Sequence
  GFR-binding peptide
  MOD_RES (2), (36), (37): Xaa is C or S
  MOD_RES (14), (15), (16), (17), (18): Xaa is A or G
  MOD_RES (19), (20), (21), (22): Xaa is A or G or is absent
GXARVVMNEYQKYXXXXXXXXXIFLVSIPSLQTPAXXPKPVT

SEQ ID NO: 13535 - protein, 34 aa, Artificial Sequence; identical to SEQ ID NO: 6127
  GFR-binding peptide
  MOD_RES (33), (34): Xaa is C or S
  MOD_RES (11), (12), (13), (14), (15): Xaa is A or G
  MOD_RES (16), (17), (18), (19): Xaa is A or G or is absent

SEQ ID NO: 13536 - protein, 30 aa, Artificial Sequence; identical to SEQ ID NO: 6132
  GFR-binding peptide

SEQ ID NO: 13537 - protein, 40 aa, Artificial Sequence; identical to SEQ ID NO: 6134
  GFR-binding peptide
  MOD_RES (2), (34), (35): Xaa is C or S

SEQ ID NO: 13538 - protein, 36 aa, Artificial Sequence
  GFR-binding peptide
  MOD_RES (34), (35): Xaa is C or S
  MOD_RES (12), (13), (14), (15), (16): Xaa is A or G
  MOD_RES (17), (18), (19), (20): Xaa is A or G or is absent
SRVVMNNSLQEXXXXXXXXXYYVVPLPELKTPAXXP

SEQ ID NO: 13539 - protein, 43 aa, Artificial Sequence
  GFR-binding peptide
  MOD_RES (2), (4), (38), (39): Xaa is C or S
  MOD_RES (16), (17), (18), (19), (20): Xaa is A or G
  MOD_RES (21), (22), (23), (24): Xaa is A or G or is absent
RXGXGEVVMDEYQKYXXXXXXXXXIFLMSIPSLETPVXXAKPI

SEQ ID NO: 13540 - protein, 37 aa, Artificial Sequence; identical to SEQ ID NO: 6136
  GFR-binding peptide
  MOD_RES (1), (3), (34), (35): Xaa is C or S

SEQ ID NO: 13541 - protein, 37 aa, Artificial Sequence
  GFR-binding peptide
  MOD_RES (1), (35): Xaa is C or S
  MOD_RES (13), (14), (15), (16), (17): Xaa is A or G
  MOD_RES (18), (19), (20), (21): Xaa is A or G or is absent
XSRVVMNNSLQEXXXXXXXXXYYVVPLPELKTPAXTP

SEQ ID NO: 13542 - protein, 41 aa, Artificial Sequence
  GFR-binding peptide
  MOD_RES (2), (4), (37), (38): Xaa is C or S
  MOD_RES (15), (16), (17), (18), (19): Xaa is A or G
  MOD_RES (20), (21), (22), (23): Xaa is A or G or is absent
SXKXSRVIMNSLQEXXXXXXXXXYYVIPLPELAQPVXXPAA

SEQ ID NO: 13543 - protein, 40 aa, Artificial Sequence; identical to SEQ ID NO: 6138
  GFR-binding peptide
  MOD_RES (1), (35), (36): Xaa is C or S
  MOD_RES (13), (14), (15), (16), (17): Xaa is A or G
  MOD_RES (18), (19), (20), (21): Xaa is A or G or is absent

SEQ ID NO: 13544 - protein, 36 aa, Artificial Sequence
  GFR-binding peptide
  MOD_RES (1), (35), (36): Xaa is C or S
  MOD_RES (13), (14), (15), (16), (17): Xaa is A or G
  MOD_RES (18), (19), (20), (21): Xaa is A or G or is absent
XSEVVMDNSLQEXXXXXXXXXYYLITLPELRTPVXX

SEQ ID NO: 13545 - protein, 37 aa, Artificial Sequence
  GFR-binding peptide
  MOD_RES (33), (34): Xaa is C or S
  MOD_RES (11), (12), (13), (14), (15): Xaa is A or G
  MOD_RES (16), (17), (18), (19): Xaa is A or G or is absent
EVVMDNSLQEXXXXXXXXXYYVIPLPELRTPVXXTPP

SEQ ID NO: 13546 - protein, 36 aa, Artificial Sequence
  GFR-binding peptide
  MOD_RES (33), (34): Xaa is C or S
  MOD_RES (11), (12), (13), (14), (15): Xaa is A or G
  MOD_RES (16), (17), (18), (19): Xaa is A or G or is absent
EVVMENSLQEXXXXXXXXXYYLMTLPELETPVXXAK

SEQ ID NO: 13547 - protein, 40 aa, Artificial Sequence; identical to SEQ ID NO: 6144
  GFR-binding peptide
  MOD_RES (1), (3), (36), (37): Xaa is C or S
  MOD_RES (14), (15), (16), (17), (18): Xaa is A or G
  MOD_RES (19), (20), (21), (22): Xaa is A or G or is absent

SEQ ID NO: 13548 - protein, 39 aa, Artificial Sequence
  GFR-binding peptide
  MOD_RES (2), (35), (36): Xaa is C or S
  MOD_RES (13), (14), (15), (16), (17): Xaa is A or G
  MOD_RES (18), (19), (20), (21): Xaa is A or G or is absent
KXSRVIMEYQKYXXXXXXXXXIFLISIPSLAQPVXXPAA

SEQ ID NO: 13549 - protein, 37 aa, Artificial Sequence; identical to SEQ ID NO: 6148
  GFR-binding peptide
  MOD_RES (2), (4): Xaa is C or S
  MOD_RES (16), (17), (18), (19), (20): Xaa is A or G
  MOD_RES (21), (22), (23), (24): Xaa is A or G or is absent

SEQ ID NO: 13550 - protein, 39 aa, Artificial Sequence
  GFR-binding peptide
  MOD_RES (1), (33), (34): Xaa is C or S
XGEVVMDNSLQEVVKENEDYYVMPLPELETPVXXAKPIK

SEQ ID NO: 13551 - protein, 34 aa, Artificial Sequence; identical to SEQ ID NO: 6149
  GFR-binding peptide
  MOD_RES (34), (34): Xaa is C or S
  MOD_RES (12), (13), (14), (15), (16): Xaa is A or G
  MOD_RES (17), (18), (19), (20): Xaa is A or G or is absent

SEQ ID NO: 13552 - protein, 36 aa, Artificial Sequence
  GFR-binding peptide
  MOD_RES (2), (4), (35), (36): Xaa is C or S
SXKXSRVIMEYQKYVKPKRGVIFLISIPSLAQPVXX

SEQ ID NO: 13553 - protein, 40 aa, Artificial Sequence; identical to SEQ ID NO: 6151
  GFR-binding peptide
  MOD_RES (2), (36), (37): Xaa is C or S
  MOD_RES (14), (15), (16), (17), (18): Xaa is A or G
  MOD_RES (19), (20), (21), (22): Xaa is A or G or is absent

SEQ ID NO: 13554 - protein, 35 aa, Artificial Sequence; identical to SEQ ID NO: 6157
  GFR-binding peptide
  MOD_RES (2), (34), (35): Xaa is C or S

SEQ ID NO: 13555 - protein, 38 aa, Artificial Sequence
  GFR-binding peptide
  MOD_RES (2), (36), (37): Xaa is C or S
  MOD_RES (14), (15), (16), (17), (18): Xaa is A or G
  MOD_RES (19), (20), (21), (22): Xaa is A or G or is absent
GXSRVVMNNSLQEXXXXXXXXXYYLVTLPELKTPAXXP

SEQ ID NO: 13556 - protein, 39 aa, Artificial Sequence; identical to SEQ ID NO: 6158
  GFR-binding peptide
  MOD_RES (2), (4), (36), (37): Xaa is C or S

SEQ ID NO: 13557 - protein, 38 aa, Artificial Sequence; identical to SEQ ID NO: 6159
  GFR-binding peptide
  MOD_RES (2), (4), (38): Xaa is C or S
  MOD_RES (16), (17), (18), (19), (20): Xaa is A or G
  MOD_RES (21), (22), (23), (24): Xaa is A or G or is absent

SEQ ID NO: 13558 - protein, 32 aa, Artificial Sequence
  GFR-binding peptide
  MOD_RES (32), (32): Xaa is C or S
GEVVMDNSLQEVVKENEDYYVMPLPELETPVX

SEQ ID NO: 13559 - protein, 41 aa, Artificial Sequence
  GFR-binding peptide
  MOD_RES (2), (4), (38): Xaa is C or S
  MOD_RES (16), (17), (18), (19), (20): Xaa is A or G
  MOD_RES (21), (22), (23), (24): Xaa is A or G or is absent
HXGXSRVVMNEYQKYXXXXXXXXXIFLVSIPSLKTPAXTPK

SEQ ID NO: 13560 - protein, 41 aa, Artificial Sequence
  GFR-binding peptide
  MOD_RES (2), (36), (37): Xaa is C or S
  MOD_RES (14), (15), (16), (17), (18): Xaa is A or G
  MOD_RES (19), (20), (21), (22): Xaa is A or G or is absent
GXSEVVMDRYKKLXXXXXXXXXFYLISIANLRTPVXXTPPT

SEQ ID NO: 13561 - protein, 33 aa, Artificial Sequence
  GFR-binding peptide
  MOD_RES (32), (33): Xaa is C or S
SRVVMNEYQKYIVNSSDDIFLVSIPSLKTPAXX

SEQ ID NO: 13562 - protein, 34 aa, Artificial Sequence
  GFR-binding peptide
  MOD_RES (31), (32): Xaa is C or S
SKVVMNSLQEVKPTRGVYYVIPLPELDQPVXXPS

SEQ ID NO: 13563 - protein, 37 aa, Artificial Sequence
  GFR-binding peptide
  MOD_RES (2), (4), (36), (37): Xaa is C or S
RXGXGEVVMENSLQEVVKDYEDYYVMPLPELETPVXX

SEQ ID NO: 13564 - protein, 38 aa, Artificial Sequence; identical to SEQ ID NO: 6167
  GFR-binding peptide
  MOD_RES (2), (34), (35): Xaa is C or S

SEQ ID NO: 13565 - protein, 37 aa, Artificial Sequence; identical to SEQ ID NO: 6168
  GFR-binding peptide
  MOD_RES (1), (3), (34), (35): Xaa is C or S

SEQ ID NO: 13566 - protein, 35 aa, Artificial Sequence; identical to SEQ ID NO: 6171
  GFR-binding peptide
  MOD_RES (34), (35): Xaa is C or S
  MOD_RES (12), (13), (14), (15), (16): Xaa is A or G
  MOD_RES (17), (18), (19), (20): Xaa is A or G or is absent

SEQ ID NO: 13567 - protein, 39 aa, Artificial Sequence
  GFR-binding peptide
  MOD_RES (2), (4), (38), (39): Xaa is C or S
  MOD_RES (16), (17), (18), (19), (20): Xaa is A or G
  MOD_RES (21), (22), (23), (24): Xaa is A or G or is absent
HXGXSRVVMNEYQKYXXXXXXXXXIFLVSIPSLKTPAXX

SEQ ID NO: 13568 - protein, 35 aa, Artificial Sequence; identical to SEQ ID NO: 6174
  GFR-binding peptide
  MOD_RES (2), (4), (35): Xaa is C or S

SEQ ID NO: 13569 - protein, 38 aa, Artificial Sequence
  GFR-binding peptide
  MOD_RES (34), (34): Xaa is C or S
  MOD_RES (12), (13), (14), (15), (16): Xaa is A or G
  MOD_RES (17), (18), (19), (20): Xaa is A or G or is absent
SRVVMNNSLQEXXXXXXXXXYYVVPLPELKTPAXTPKT

SEQ ID NO: 13570 - protein, 38 aa, Artificial Sequence
  GFR-binding peptide
  MOD_RES (1), (3), (35), (36): Xaa is C or S
XGXSRVVMNNSLQEIVNSSDDYYLVTLPELKTPAXXPK

SEQ ID NO: 13571 - protein, 33 aa, Artificial Sequence; identical to SEQ ID NO: 6179
  GFR-binding peptide
  MOD_RES (31), (32): Xaa is C or S

SEQ ID NO: 13572 - protein, 33 aa, Artificial Sequence; identical to SEQ ID NO: 6180
  GFR-binding peptide
  MOD_RES (2), (33): Xaa is C or S

SEQ ID NO: 13573 - protein, 38 aa, Artificial Sequence; identical to SEQ ID NO: 6181
  GFR-binding peptide
  MOD_RES (6), (7): Xaa is C or S

SEQ ID NO: 13574 - protein, 43 aa, Artificial Sequence; identical to SEQ ID NO: 6182
  GFR-binding peptide
  MOD_RES (5), (6), (40), (42): Xaa is C or S
  MOD_RES (20), (21), (22), (23), (24): Xaa is A or G
  MOD_RES (25), (26), (27), (28): Xaa is A or G or is absent

SEQ ID NO: 13575 - protein, 35 aa, Artificial Sequence; identical to SEQ ID NO: 6183
  GFR-binding peptide
  MOD_RES (32), (34): Xaa is C or S

SEQ ID NO: 13576 - protein, 36 aa, Artificial Sequence
  GFR-binding peptide
  MOD_RES (1), (33), (35): Xaa is C or S
XAPTKLEPLPVVYYDDSSNVIEQLSNNMVVRSXGXH

SEQ ID NO: 13577 - protein, 40 aa, Artificial Sequence; identical to SEQ ID NO: 6187
  GFR-binding peptide
  MOD_RES (4), (5), (38), (40): Xaa is C or S
  MOD_RES (19), (20), (21), (22), (23): Xaa is A or G
  MOD_RES (24), (25), (26), (27): Xaa is A or G or is absent

SEQ ID NO: 13578 - protein, 33 aa, Artificial Sequence; identical to SEQ ID NO: 6189
  GFR-binding peptide
  MOD_RES (32), (32): Xaa is C or S

SEQ ID NO: 13579 - protein, 38 aa, Artificial Sequence; identical to SEQ ID NO: 6191
  GFR-binding peptide
  MOD_RES (1), (2), (36), (38): Xaa is C or S
  MOD_RES (16), (17), (18), (19), (20): Xaa is A or G
  MOD_RES (21), (22), (23), (24): Xaa is A or G or is absent

SEQ ID NO: 13580 - protein, 35 aa, Artificial Sequence
  GFR-binding peptide
  MOD_RES (2), (3), (35): Xaa is C or S
AXXVPTELEPLPMVYYDEYDKVVEQLSNEMVVEGX

SEQ ID NO: 13581 - protein, 34 aa, Artificial Sequence
  GFR-binding peptide
  MOD_RES (1), (33): Xaa is C or S
XAPTQLEPLTVLYYDDSSNVIEQLSNNMVVRAXG

SEQ ID NO: 13582 - protein, 40 aa, Artificial Sequence
  GFR-binding peptide
  MOD_RES (6), (7), (39): Xaa is C or S
KIPKAXXVPTELEPLPMVYYDENEKVVEQLSNDMVVEGXG

SEQ ID NO: 13583 - protein, 38 aa, Artificial Sequence; identical to SEQ ID NO: 6195
  GFR-binding peptide
  MOD_RES (4), (5), (36), (38): Xaa is C or S

SEQ ID NO: 13584 - protein, 39 aa, Artificial Sequence
  GFR-binding peptide
  MOD_RES (2), (3), (37), (39): Xaa is C or S
  MOD_RES (17), (18), (19), (20), (21): Xaa is A or G
  MOD_RES (22), (23), (24), (25): Xaa is A or G or is absent
TXXVPTRLSPISILFIXXXXXXXXXYKQYEDMVVESXGX

SEQ ID NO: 13585 - protein, 35 aa, Artificial Sequence
  GFR-binding peptide
  MOD_RES (2), (3), (35): Xaa is C or S
PXXAPTKLSPISVLFIDDSSNVIYKQYENMVVRSX

SEQ ID NO: 13586 - protein, 36 aa, Artificial Sequence
  GFR-binding peptide
  MOD_RES (1), (2), (36): Xaa is C or S
  MOD_RES (16), (17), (18), (19), (20): Xaa is A or G
  MOD_RES (21), (22), (23), (24): Xaa is A or G or is absent
XXVPTELEPLPMVYYXXXXXXXXXEQLSNDMVVEGX

SEQ ID NO: 13587 - protein, 41 aa, Artificial Sequence
  GFR-binding peptide
  MOD_RES (4), (5), (39), (41): Xaa is C or S
  MOD_RES (19), (20), (21), (22), (23): Xaa is A or G
  MOD_RES (24), (25), (26), (27): Xaa is A or G or is absent
PKAXXVPTELEPLPMVYYXXXXXXXXXEQLSNEMVVEGXGX

SEQ ID NO: 13588 - protein, 35 aa, Artificial Sequence; identical to SEQ ID NO: 6199
  GFR-binding peptide
  MOD_RES (4), (5): Xaa is C or S

SEQ ID NO: 13589 - protein, 42 aa, Artificial Sequence
  GFR-binding peptide
  MOD_RES (6), (7), (40), (42): Xaa is C or S
  MOD_RES (21), (22), (23), (24), (25): Xaa is A or G
  MOD_RES (26), (27), (28), (29): Xaa is A or G or is absent
ASASPXXVPQDLEPLTILYYXXXXXXXXXEQLSNMVVKSXKX

SEQ ID NO: 13590 - protein, 35 aa, Artificial Sequence
  GFR-binding peptide
  MOD_RES (2), (3), (35): Xaa is C or S
TXXVPTRLEPLPIVYYDSANNVVEQLSNDMVVESX

SEQ ID NO: 13591 - protein, 35 aa, Artificial Sequence
  GFR-binding peptide
  MOD_RES (1), (2), (34): Xaa is C or S
XXVPTELEPLPMVYYDEYDKVVEQLSNEMVVEGXG

SEQ ID NO: 13592 - protein, 32 aa, Artificial Sequence; identical to SEQ ID NO: 6206
  GFR-binding peptide
  MOD_RES (14), (15), (16), (17), (18): Xaa is A or G
  MOD_RES (19), (20), (21), (22): Xaa is A or G or is absent

SEQ ID NO: 13593 - protein, 38 aa, Artificial Sequence; identical to SEQ ID NO: 6207
  GFR-binding peptide
  MOD_RES (3), (4), (38): Xaa is C or S
  MOD_RES (18), (19), (20), (21), (22): Xaa is A or G
  MOD_RES (23), (24), (25), (26): Xaa is A or G or is absent

SEQ ID NO: 13594 - protein, 33 aa, Artificial Sequence
  GFR-binding peptide
  MOD_RES (14), (15), (16), (17), (18): Xaa is A or G
  MOD_RES (19), (20), (21), (22): Xaa is A or G or is absent
VPTELEPLPMVYYXXXXXXXXXEQLSNDMVVEG

SEQ ID NO: 13595 - protein, 39 aa, Artificial Sequence; identical to SEQ ID NO: 6208
  GFR-binding peptide
  MOD_RES (4), (5), (37), (39): Xaa is C or S

SEQ ID NO: 13596 - protein, 35 aa, Artificial Sequence; identical to SEQ ID NO: 6209
  GFR-binding peptide
  MOD_RES (3), (4), (35): Xaa is C or S

SEQ ID NO: 13597 - protein, 40 aa, Artificial Sequence; identical to SEQ ID NO: 6211
  GFR-binding peptide
  MOD_RES (4), (5), (38), (40): Xaa is C or S
  MOD_RES (19), (20), (21), (22), (23): Xaa is A or G
  MOD_RES (24), (25), (26), (27): Xaa is A or G or is absent

SEQ ID NO: 13598 - protein, 39 aa, Artificial Sequence
  GFR-binding peptide
  MOD_RES (3), (37), (39): Xaa is C or S
  MOD_RES (17), (18), (19), (20), (21): Xaa is A or G
  MOD_RES (22), (23), (24), (25): Xaa is A or G or is absent
PTXAPTKLEPLTVLYYXXXXXXXXXEQLSNNMVVRSXGX

SEQ ID NO: 13599 - protein, 34 aa, Artificial Sequence; identical to SEQ ID NO: 6213
  GFR-binding peptide
  MOD_RES (33), (33): Xaa is C or S
  MOD_RES (14), (15), (16), (17), (18): Xaa is A or G
  MOD_RES (19), (20), (21), (22): Xaa is A or G or is absent

SEQ ID NO: 13600 - protein, 37 aa, Artificial Sequence
  GFR-binding peptide
  MOD_RES (3), (4), (37): Xaa is C or S
  MOD_RES (18), (19), (20), (21), (22): Xaa is A or G
  MOD_RES (23), (24), (25), (26): Xaa is A or G or is absent
SPXXVSQDLSPISILFIXXXXXXXXXYKQYEMIVKSX

SEQ ID NO: 13601 - protein, 36 aa, Artificial Sequence
  GFR-binding peptide
  MOD_RES (1), (35): Xaa is C or S
  MOD_RES (15), (16), (17), (18), (19): Xaa is A or G
  MOD_RES (20), (21), (22), (23): Xaa is A or G or is absent
XVPTRLNAISILYFXXXXXXXXXLKKYRDMVVESXG

SEQ ID NO: 13602 - protein, 37 aa, Artificial Sequence
  GFR-binding peptide
  MOD_RES (5), (6): Xaa is C or S
IPKAXXVPTELEPLTMLYYDEYDKVVEQLSNEMVVEG

SEQ ID NO: 13603 - protein, 37 aa, Artificial Sequence; identical to SEQ ID NO: 6218
  GFR-binding peptide
  MOD_RES (6), (7): Xaa is C or S

SEQ ID NO: 13604 - protein, 44 aa, Artificial Sequence; identical to SEQ ID NO: 6219
  GFR-binding peptide
  MOD_RES (6), (7), (41), (43): Xaa is C or S
  MOD_RES (21), (22), (23), (24), (25): Xaa is A or G
  MOD_RES (26), (27), (28), (29): Xaa is A or G or is absent

SEQ ID NO: 13605 - protein, 36 aa, Artificial Sequence
  GFR-binding peptide
  MOD_RES (3), (4): Xaa is C or S
  MOD_RES (18), (19), (20), (21), (22): Xaa is A or G
  MOD_RES (23), (24), (25), (26): Xaa is A or G or is absent
APXXVPQALEPLTILYYXXXXXXXXXEQLSNMIVRS

SEQ ID NO: 13606 - protein, 35 aa, Artificial Sequence
  GFR-binding peptide
  MOD_RES (4), (5): Xaa is C or S
PPTXXVPTRLEPLTILYYDSANNVVEQLSNDMVVE

SEQ ID NO: 13607 - protein, 41 aa, Artificial Sequence
  GFR-binding peptide
  MOD_RES (5), (6), (39), (41): Xaa is C or S
  MOD_RES (20), (21), (22), (23), (24): Xaa is A or G
  MOD_RES (25), (26), (27), (28): Xaa is A or G or is absent
SASPXXVPQDLEPLPIVYYXXXXXXXXXEQLSNMVVKSXKX

SEQ ID NO: 13608 - protein, 38 aa, Artificial Sequence; identical to SEQ ID NO: 6224
  GFR-binding peptide
  MOD_RES (7), (7): Xaa is C or S

SEQ ID NO: 13609 - protein, 39 aa, Artificial Sequence
  GFR-binding peptide
  MOD_RES (3), (4), (37), (39): Xaa is C or S
  MOD_RES (18), (19), (20), (21), (22): Xaa is A or G
  MOD_RES (23), (24), (25), (26): Xaa is A or G or is absent
SPXXVSQDLEPLPIVYYXXXXXXXXXEQLSNMIVKSXKX

SEQ ID NO: 13610 - protein, 33 aa, Artificial Sequence
  GFR-binding peptide
  MOD_RES (32), (32): Xaa is C or S
APTKLSPISVLFIDDSSNVIYKQYENMVVRSXG

SEQ ID NO: 13611 - protein, 37 aa, Artificial Sequence
  GFR-binding peptide
  MOD_RES (4), (5), (37): Xaa is C or S
PPTXXVPTRLEPLPIVYYDSANNVVEQLSNDMVVESX

SEQ ID NO: 13612 - protein, 41 aa, Artificial Sequence
  GFR-binding peptide
  MOD_RES (6), (7), (39), (41): Xaa is C or S
STPPTXXVPTRLSAISILYLDSANNVVLKNYQDMVVESXGX

SEQ ID NO: 13613 - protein, 35 aa, Artificial Sequence; identical to SEQ ID NO: 6238
  GFR-binding peptide
  MOD_RES (1), (32), (34): Xaa is C or S

SEQ ID NO: 13614 - protein, 36 aa, Artificial Sequence
  GFR-binding peptide
  MOD_RES (34), (36): Xaa is C or S
  MOD_RES (14), (15), (16), (17), (18): Xaa is A or G
  MOD_RES (19), (20), (21), (22): Xaa is A or G or is absent
VPTELEPLPMVYYXXXXXXXXXEQLSNEMVVEGXGX

SEQ ID NO: 13615 - protein, 38 aa, Artificial Sequence
  GFR-binding peptide
  MOD_RES (1), (35), (37): Xaa is C or S
  MOD_RES (15), (16), (17), (18), (19): Xaa is A or G
  MOD_RES (20), (21), (22), (23): Xaa is A or G or is absent
XAPTKLEPLTVLYYXXXXXXXXXEQLSNNMVVRSXGXH

SEQ ID NO: 13616 - protein, 40 aa, Artificial Sequence
  GFR-binding peptide
  MOD_RES (6), (7), (38), (40): Xaa is C or S
ASASPXXVPQDLSPISILFIVGRTPKVYKQYEMVVKSXKX

SEQ ID NO: 13617 - protein, 39 aa, Artificial Sequence; identical to SEQ ID NO: 6241
  GFR-binding peptide
  MOD_RES (4), (5), (38): Xaa is C or S
  MOD_RES (19), (20), (21), (22), (23): Xaa is A or G
  MOD_RES (24), (25), (26), (27): Xaa is A or G or is absent

SEQ ID NO: 13618 - protein, 35 aa, Artificial Sequence
  GFR-binding peptide
  MOD_RES (32), (34): Xaa is C or S
APTKLEPLPVVYYDDSSNVIEQLSNNMVVRSXGXH

SEQ ID NO: 13619 - protein, 39 aa, Artificial Sequence; identical to SEQ ID NO: 6243
  GFR-binding peptide
  MOD_RES (3), (4), (38): Xaa is C or S
  MOD_RES (18), (19), (20), (21), (22): Xaa is A or G
  MOD_RES (23), (24), (25), (26): Xaa is A or G or is absent

SEQ ID NO: 13620 - protein, 34 aa, Artificial Sequence
  GFR-binding peptide
  MOD_RES (34), (34): Xaa is C or S
  MOD_RES (14), (15), (16), (17), (18): Xaa is A or G
  MOD_RES (19), (20), (21), (22): Xaa is A or G or is absent
APTQLSPISVLFIXXXXXXXXXYKQYENMVVRAX

SEQ ID NO: 13621 - protein, 38 aa, Artificial Sequence
  GFR-binding peptide
  MOD_RES (5), (6): Xaa is C or S
  MOD_RES (20), (21), (22), (23), (24): Xaa is A or G
  MOD_RES (25), (26), (27), (28): Xaa is A or G or is absent
IPKAXXVPTELEPLTMLYYXXXXXXXXXEQLSNEMVVE

SEQ ID NO: 13622 - protein, 31 aa, Artificial Sequence
  GFR-binding peptide
APTKLEPLPVVYYDDSSNVIEQLSNNMVVRS

SEQ ID NO: 13623 - protein, 40 aa, Artificial Sequence
  GFR-binding peptide
  MOD_RES (4), (5), (39): Xaa is C or S
  MOD_RES (19), (20), (21), (22), (23): Xaa is A or G
  MOD_RES (24), (25), (26), (27): Xaa is A or G or is absent
PKAXXVPTELSPISMLFIXXXXXXXXXYKQYEDMVVEGXG

SEQ ID NO: 13624 - protein, 37 aa, Artificial Sequence; identical to SEQ ID NO: 6245
  GFR-binding peptide
  MOD_RES (4), (5), (37): Xaa is C or S

SEQ ID NO: 13625 - protein, 32 aa, Artificial Sequence
  GFR-binding peptide
  MOD_RES (32), (32): Xaa is C or S
APTQLEPLTVLYYDDSSNVIEQLSNNMVVRAX

SEQ ID NO: 13626 - protein, 41 aa, Artificial Sequence
  GFR-binding peptide
  MOD_RES (3), (4), (38), (40): Xaa is C or S
  MOD_RES (18), (19), (20), (21), (22): Xaa is A or G
  MOD_RES (23), (24), (25), (26): Xaa is A or G or is absent
KPXXAPTQLEPLPVVYYXXXXXXXXXEQLSNNMVVRAXGXH

SEQ ID NO: 13627 - protein, 35 aa, Artificial Sequence
  GFR-binding peptide
  MOD_RES (4), (5): Xaa is C or S
PKAXXVPTELEPLTMLYYDENEKVVEQLSNDMVVE

SEQ ID NO: 13628 - protein, 41 aa, Artificial Sequence; identical to SEQ ID NO: 6248
  GFR-binding peptide
  MOD_RES (5), (39), (41): Xaa is C or S
  MOD_RES (19), (20), (21), (22), (23): Xaa is A or G
  MOD_RES (24), (25), (26), (27): Xaa is A or G or is absent

SEQ ID NO: 13629 - protein, 42 aa, Artificial Sequence
  GFR-binding peptide
  MOD_RES (5), (6), (39), (41): Xaa is C or S
  MOD_RES (20), (21), (22), (23), (24): Xaa is A or G
  MOD_RES (25), (26), (27), (28): Xaa is A or G or is absent
SASPXXVSQDLEPLPIVYYXXXXXXXXXEQLSNMIVKSXKXS

SEQ ID NO: 13630 - protein, 36 aa, Artificial Sequence
  GFR-binding peptide
  MOD_RES (1), (34), (36): Xaa is C or S
  MOD_RES (15), (16), (17), (18), (19): Xaa is A or G
  MOD_RES (20), (21), (22), (23): Xaa is A or G or is absent
XVPQALSPISILFIXXXXXXXXXYKQYEMIVRSXKX

SEQ ID NO: 13631 - protein, 34 aa, Artificial Sequence; identical to SEQ ID NO: 6249
  GFR-binding peptide
  MOD_RES (3), (4): Xaa is C or S

SEQ ID NO: 13632 - protein, 37 aa, Artificial Sequence
  GFR-binding peptide
  MOD_RES (1), (35), (37): Xaa is C or S
  MOD_RES (15), (16), (17), (18), (19): Xaa is A or G
  MOD_RES (20), (21), (22), (23): Xaa is A or G or is absent
XVPTRLEPLPIVYYXXXXXXXXXEQLSNDMVVESXGX

SEQ ID NO: 13633 - protein, 36 aa, Artificial Sequence
  GFR-binding peptide
  MOD_RES (3), (4), (36): Xaa is C or S
PTXXVPTRLEPLTILYYDSANNVVEQLSNDMVVESX

SEQ ID NO: 13634 - protein, 37 aa, Artificial Sequence
  GFR-binding peptide
  MOD_RES (1), (2), (36): Xaa is C or S
  MOD_RES (16), (17), (18), (19), (20): Xaa is A or G
  MOD_RES (21), (22), (23), (24): Xaa is A or G or is absent
XXAPTKLEPLPVVYYXXXXXXXXXEQLSNNMVVRSXG

SEQ ID NO: 13635 - protein, 38 aa, Artificial Sequence; identical to SEQ ID NO: 6254
  GFR-binding peptide
  MOD_RES (4), (5): Xaa is C or S
  MOD_RES (19), (20), (21), (22), (23): Xaa is A or G
  MOD_RES (24), (25), (26), (27): Xaa is A or G or is absent

SEQ ID NO: 13636 - protein, 39 aa, Artificial Sequence
  GFR-binding peptide
  MOD_RES (2), (36), (38): Xaa is C or S
  MOD_RES (16), (17), (18), (19), (20): Xaa is A or G
  MOD_RES (21), (22), (23), (24): Xaa is A or G or is absent
TXAPTKLEPLTVLYYXXXXXXXXXEQLSNNMVVRSXGXH

SEQ ID NO: 13637 - protein, 34 aa, Artificial Sequence; identical to SEQ ID NO: 6259
  GFR-binding peptide
  MOD_RES (1), (34): Xaa is C or S
  MOD_RES (15), (16), (17), (18), (19): Xaa is A or G
  MOD_RES (20), (21), (22), (23): Xaa is A or G or is absent

SEQ ID NO: 13638 - protein, 43 aa, Artificial Sequence; identical to SEQ ID NO: 6260
  GFR-binding peptide
  MOD_RES (5), (6), (40), (42): Xaa is C or S
  MOD_RES (20), (21), (22), (23), (24): Xaa is A or G
  MOD_RES (25), (26), (27), (28): Xaa is A or G or is absent

SEQ ID NO: 13639 - protein, 37 aa, Artificial Sequence
  GFR-binding peptide
  MOD_RES (34), (36): Xaa is C or S
  MOD_RES (14), (15), (16), (17), (18): Xaa is A or G
  MOD_RES (19), (20), (21), (22): Xaa is A or G or is absent
APTKLEPLTVLYYXXXXXXXXXEQLSNNMVVRSXGXH

SEQ ID NO: 13640 - protein, 33 aa, Artificial Sequence; identical to SEQ ID NO: 6261
  GFR-binding peptide
  MOD_RES (1), (1): Xaa is C or S
  MOD_RES (15), (16), (17), (18), (19): Xaa is A or G
  MOD_RES (20), (21), (22), (23): Xaa is A or G or is absent

SEQ ID NO: 13641 - protein, 38 aa, Artificial Sequence; identical to SEQ ID NO: 6262
  GFR-binding peptide
  MOD_RES (4), (5), (38): Xaa is C or S
  MOD_RES (19), (20), (21), (22), (23): Xaa is A or G
  MOD_RES (24), (25), (26), (27): Xaa is A or G or is absent

SEQ ID NO: 13642 - protein, 41 aa, Artificial Sequence
  GFR-binding peptide
  MOD_RES (5), (6), (38), (40): Xaa is C or S
IPKAXXVPTELSPISMLFIDENEKVVYKQYEDMVVEGXGXR

SEQ ID NO: 13643 - protein, 37 aa, Artificial Sequence; identical to SEQ ID NO: 6263
  GFR-binding peptide
  MOD_RES (1), (35), (37): Xaa is C or S
  MOD_RES (15), (16), (17), (18), (19): Xaa is A or G
  MOD_RES (20), (21), (22), (23): Xaa is A or G or is absent

SEQ ID NO: 13644 - protein, 34 aa, Artificial Sequence; identical to SEQ ID NO: 6265
  GFR-binding peptide
  MOD_RES (1), (2), (34): Xaa is C or S

SEQ ID NO: 13645 - protein, 39 aa, Artificial Sequence; identical to SEQ ID NO: 6266
  GFR-binding peptide
  MOD_RES (6), (7): Xaa is C or S
  MOD_RES (21), (22), (23), (24), (25): Xaa is A or G
  MOD_RES (26), (27), (28), (29): Xaa is A or G or is absent

SEQ ID NO: 13646 - protein, 40 aa, Artificial Sequence
  GFR-binding peptide
  MOD_RES (5), (6), (40): Xaa is C or S
  MOD_RES (20), (21), (22), (23), (24): Xaa is A or G
  MOD_RES (25), (26), (27), (28): Xaa is A or G or is absent
IPKAXXVPTELSPISMLFIXXXXXXXXXYKQYEEMVVEGX

SEQ ID NO: 13647 - protein, 41 aa, Artificial Sequence; identical to SEQ ID NO: 6267
  GFR-binding peptide
  MOD_RES (4), (5), (38), (40): Xaa is C or S
  MOD_RES (19), (20), (21), (22), (23): Xaa is A or G
  MOD_RES (24), (25), (26), (27): Xaa is A or G or is absent

SEQ ID NO: 13648 - protein, 32 aa, Artificial Sequence
  GFR-binding peptide
  MOD_RES (1), (2): Xaa is C or S
XXAPTKLSPISVLFIDDSSNVIYKQYENMVVR

SEQ ID NO: 13649 - protein, 35 aa, Artificial Sequence; identical to SEQ ID NO: 6270
  GFR-binding peptide
  MOD_RES (1), (2): Xaa is C or S
  MOD_RES (16), (17), (18), (19), (20): Xaa is A or G
  MOD_RES (21), (22), (23), (24): Xaa is A or G or is absent

SEQ ID NO: 13650 - protein, 40 aa, Artificial Sequence
  GFR-binding peptide
  MOD_RES (5), (6), (37), (39): Xaa is C or S
SAAPXXVPQALSPISILFIVGRKPKVYKQYEMIVRSXKXS

SEQ ID NO: 13651 - protein, 42 aa, Artificial Sequence
  GFR-binding peptide
  MOD_RES (5), (39), (41): Xaa is C or S
  MOD_RES (19), (20), (21), (22), (23): Xaa is A or G
  MOD_RES (24), (25), (26), (27): Xaa is A or G or is absent
TKPTXAPTKLSPISVLFIXXXXXXXXXYKQYENMVVRSXGXH

SEQ ID NO: 13652 - protein, 36 aa, Artificial Sequence
  GFR-binding peptide
  MOD_RES (2), (3), (36): Xaa is C or S
  MOD_RES (17), (18), (19), (20), (21): Xaa is A or G
  MOD_RES (22), (23), (24), (25): Xaa is A or G or is absent
PXXVPQALSPISILFIXXXXXXXXXYKQYEMIVRSX

SEQ ID NO: 13653 - protein, 32 aa, Artificial Sequence
  GFR-binding peptide
  MOD_RES (1), (1): Xaa is C or S
XVPTELEPLTMLYYDEYDKVVEQLSNEMVVEG

SEQ ID NO: 13654 - protein, 39 aa, Artificial Sequence
  GFR-binding peptide
  MOD_RES (4), (5), (37), (39): Xaa is C or S
PKPXXAPTKLEPLTVLYYDDSSNVIEQLSNNMVVRSXGX

SEQ ID NO: 13655 - protein, 42 aa, Artificial Sequence; identical to SEQ ID NO: 6280
  GFR-binding peptide
  MOD_RES (4), (5), (39), (41): Xaa is C or S
  MOD_RES (19), (20), (21), (22), (23): Xaa is A or G
  MOD_RES (24), (25), (26), (27): Xaa is A or G or is absent

SEQ ID NO: 13656 - protein, 38 aa, Artificial Sequence; identical to SEQ ID NO: 6283
  GFR-binding peptide
  MOD_RES (1), (2), (36), (38): Xaa is C or S
  MOD_RES (16), (17), (18), (19), (20): Xaa is A or G
  MOD_RES (21), (22), (23), (24): Xaa is A or G or is absent

SEQ ID NO: 13657 - protein, 38 aa, Artificial Sequence
  GFR-binding peptide
  MOD_RES (4), (38): Xaa is C or S
  MOD_RES (18), (19), (20), (21), (22): Xaa is A or G
  MOD_RES (23), (24), (25), (26): Xaa is A or G or is absent
KPTXAPTKLEPLTVLYYXXXXXXXXXEQLSNNMVVRSX

SEQ ID NO: 13658 - protein, 43 aa, Artificial Sequence
  GFR-binding peptide
  MOD_RES (6), (7), (40), (42): Xaa is C or S
  MOD_RES (21), (22), (23), (24), (25): Xaa is A or G
  MOD_RES (26), (27), (28), (29): Xaa is A or G or is absent
ASAAPXXVPQALSPISILFIXXXXXXXXXYKQYEMIVRSXKXS

SEQ ID NO: 13659 - protein, 34 aa, Artificial Sequence; identical to SEQ ID NO: 6287
  GFR-binding peptide
  MOD_RES (1), (2): Xaa is C or S
  MOD_RES (16), (17), (18), (19), (20): Xaa is A or G
  MOD_RES (21), (22), (23), (24): Xaa is A or G or is absent

SEQ ID NO: 13660 - protein, 31 aa, Artificial Sequence
  GFR-binding peptide
  MOD_RES (1), (1): Xaa is C or S
XAPTQLSPISVLFIDDSSNVIYKQYENMVVR

SEQ ID NO: 13661 - protein, 41 aa, Artificial Sequence
  GFR-binding peptide
  MOD_RES (4), (5), (39), (41): Xaa is C or S
  MOD_RES (19), (20), (21), (22), (23): Xaa is A or G
  MOD_RES (24), (25), (26), (27): Xaa is A or G or is absent
PPTXXVPTRLEPLPIVYYXXXXXXXXXEQLSNDMVVESXGX

SEQ ID NO: 13662 - protein, 39 aa, Artificial Sequence; identical to SEQ ID NO: 6289
  GFR-binding peptide
  MOD_RES (2), (3), (37), (39): Xaa is C or S
  MOD_RES (17), (18), (19), (20), (21): Xaa is A or G
  MOD_RES (22), (23), (24), (25): Xaa is A or G or is absent

SEQ ID NO: 13663 - protein, 35 aa, Artificial Sequence; identical to SEQ ID NO: 6290
  GFR-binding peptide
  MOD_RES (3), (4), (35): Xaa is C or S

SEQ ID NO: 13664 - protein, 32 aa, Artificial Sequence
  GFR-binding peptide
  MOD_RES (1), (2): Xaa is C or S
XXVPQALSPISILFIVGRKPKVYKQYEMIVRS

SEQ ID NO: 13665 - protein, 41 aa, Artificial Sequence; identical to SEQ ID NO: 6294
  GFR-binding peptide
  MOD_RES (5), (6), (40): Xaa is C or S
  MOD_RES (20), (21), (22), (23), (24): Xaa is A or G
  MOD_RES (25), (26), (27), (28): Xaa is A or G or is absent

SEQ ID NO: 13666 - protein, 38 aa, Artificial Sequence
  GFR-binding peptide
  MOD_RES (1), (2), (35), (37): Xaa is C or S
  MOD_RES (16), (17), (18), (19), (20): Xaa is A or G
  MOD_RES (21), (22), (23), (24): Xaa is A or G or is absent
XXVPQDLEPLPIVYYXXXXXXXXXEQLSNMVVKSXKXS

SEQ ID NO: 13667 - protein, 39 aa, Artificial Sequence
  GFR-binding peptide
  MOD_RES (7), (7): Xaa is C or S
  MOD_RES (21), (22), (23), (24), (25): Xaa is A or G
  MOD_RES (26), (27), (28), (29): Xaa is A or G or is absent
HVTKPTXAPTKLEPLPVVYYXXXXXXXXXEQLSNNMVVR

SEQ ID NO: 13668 - protein, 39 aa, Artificial Sequence
  GFR-binding peptide
  MOD_RES (3), (4), (37), (39): Xaa is C or S
  MOD_RES (18), (19), (20), (21), (22): Xaa is A or G
  MOD_RES (23), (24), (25), (26): Xaa is A or G or is absent
APXXVPQALEPLPIVYYXXXXXXXXXEQLSNMIVRSXKX

SEQ ID NO: 13669 - protein, 35 aa, Artificial Sequence
  GFR-binding peptide
  MOD_RES (2), (3): Xaa is C or S
  MOD_RES (17), (18), (19), (20), (21): Xaa is A or G
  MOD_RES (22), (23), (24), (25): Xaa is A or G or is absent
PXXAPTQLEPLPVVYYXXXXXXXXXEQLSNNMVVR

SEQ ID NO: 13670 - protein, 37 aa, Artificial Sequence
  GFR-binding peptide
  MOD_RES (3), (4): Xaa is C or S
  MOD_RES (18), (19), (20), (21), (22): Xaa is A or G
  MOD_RES (23), (24), (25), (26): Xaa is A or G or is absent
KPXXAPTQLEPLTVLYYXXXXXXXXXEQLSNNMVVRA

SEQ ID NO: 13671 - protein, 34 aa, Artificial Sequence
  GFR-binding peptide
  MOD_RES (4), (4): Xaa is C or S
KPTXAPTKLEPLTVLYYDDSSNVIEQLSNNMVVR

SEQ ID NO: 13672 - protein, 44 aa, Artificial Sequence
  GFR-binding peptide
  MOD_RES (6), (7), (41), (43): Xaa is C or S
  MOD_RES (21), (22), (23), (24), (25): Xaa is A or G
  MOD_RES (26), (27), (28), (29): Xaa is A or G or is absent
TVPKPXXAPTQLSPISVLFIXXXXXXXXXYKQYENMVVRAXGXH

SEQ ID NO: 13673 - protein, 36 aa, Artificial Sequence; identical to SEQ ID NO: 6298
  GFR-binding peptide
  MOD_RES (2), (3), (36): Xaa is C or S
  MOD_RES (17), (18), (19), (20), (21): Xaa is A or G
  MOD_RES (22), (23), (24), (25): Xaa is A or G or is absent

SEQ ID NO: 13674 - protein, 37 aa, Artificial Sequence; identical to SEQ ID NO: 6299
  GFR-binding peptide
  MOD_RES (1), (35), (37): Xaa is C or S
  MOD_RES (15), (16), (17), (18), (19): Xaa is A or G
  MOD_RES (20), (21), (22), (23): Xaa is A or G or is absent

SEQ ID NO: 13675 - protein, 39 aa, Artificial Sequence
  GFR-binding peptide
  MOD_RES (5), (6): Xaa is C or S
  MOD_RES (20), (21), (22), (23), (24): Xaa is A or G
  MOD_RES (25), (26), (27), (28): Xaa is A or G or is absent
TPPTXXVPTRLEPLTILYYXXXXXXXXXEQLSNDMVVES

SEQ ID NO: 13676 - protein, 42 aa, Artificial Sequence
  GFR-binding peptide
  MOD_RES (6), (40), (42): Xaa is C or S
  MOD_RES (20), (21), (22), (23), (24): Xaa is A or G
  MOD_RES (25), (26), (27), (28): Xaa is A or G or is absent
VTKPTXAPTKLEPLPVVYYXXXXXXXXXEQLSNNMVVRSXGX

SEQ ID NO: 13677 - protein, 39 aa, Artificial Sequence
  GFR-binding peptide
  MOD_RES (2), (3), (36), (38): Xaa is C or S
  MOD_RES (17), (18), (19), (20), (21): Xaa is A or G
  MOD_RES (22), (23), (24), (25): Xaa is A or G or is absent
PXXVSQDLEPLPIVYYXXXXXXXXXEQLSNMIVKSXKXS

SEQ ID NO: 13678 - protein, 41 aa, Artificial Sequence
  GFR-binding peptide
  MOD_RES (4), (5), (39), (41): Xaa is C or S
  MOD_RES (19), (20), (21), (22), (23): Xaa is A or G
  MOD_RES (24), (25), (26), (27): Xaa is A or G or is absent
PKPXXAPTQLSPISVLFIXXXXXXXXXYKQYENMVVRAXGX

SEQ ID NO: 13679 - protein, 37 aa, Artificial Sequence
  GFR-binding peptide
  MOD_RES (1), (34), (36): Xaa is C or S
  MOD_RES (15), (16), (17), (18), (19): Xaa is A or G
  MOD_RES (20), (21), (22), (23): Xaa is A or G or is absent
XVSQDLEPLPIVYYXXXXXXXXXEQLSNMIVKSXKXS

SEQ ID NO: 13680 - protein, 38 aa, Artificial Sequence
  GFR-binding peptide
  MOD_RES (5), (6), (38): Xaa is C or S
TPPTXXVPTRLSAISILYLDSANNVVLKNYQDMVVESX

SEQ ID NO: 13681 - protein, 39 aa, Artificial Sequence
  GFR-binding peptide
  MOD_RES (4), (5), (39): Xaa is C or S
  MOD_RES (19), (20), (21), (22), (23): Xaa is A or G
  MOD_RES (24), (25), (26), (27): Xaa is A or G or is absent
PKAXXVPTELEPLTMLYYXXXXXXXXXEQLSNDMVVEGX

SEQ ID NO: 13682 - protein, 36 aa, Artificial Sequence
  GFR-binding peptide
  MOD_RES (3), (4): Xaa is C or S
  MOD_RES (18), (19), (20), (21), (22): Xaa is A or G
  MOD_RES (23), (24), (25), (26): Xaa is A or G or is absent
KPXXAPTQLEPLTVLYYXXXXXXXXXEQLSNNMVVR

SEQ ID NO: 13683 - protein, 38 aa, Artificial Sequence
  GFR-binding peptide
  MOD_RES (1), (2), (36), (38): Xaa is C or S
  MOD_RES (16), (17), (18), (19), (20): Xaa is A or G
  MOD_RES (21), (22), (23), (24): Xaa is A or G or is absent
XXVPTELEPLPMVYYXXXXXXXXXEQLSNDMVVEGXGX

SEQ ID NO: 13684 - protein, 39 aa, Artificial Sequence
  GFR-binding peptide
  MOD_RES (6), (38): Xaa is C or S
VTKPTXAPTKLSPISVLFIDDSSNVIYKQYENMVVRSXG

SEQ ID NO: 13685 - protein, 39 aa, Artificial Sequence; identical to SEQ ID NO: 6306
  GFR-binding peptide
  MOD_RES (1), (2), (36), (38): Xaa is C or S
  MOD_RES (16), (17), (18), (19), (20): Xaa is A or G
  MOD_RES (21), (22), (23), (24): Xaa is A or G or is absent

SEQ ID NO: 13686 - protein, 37 aa, Artificial Sequence
  GFR-binding peptide
  MOD_RES (4), (5): Xaa is C or S
  MOD_RES (19), (20), (21), (22), (23): Xaa is A or G
  MOD_RES (24), (25), (26), (27): Xaa is A or G or is absent
ASPXXVPQDLEPLPIVYYXXXXXXXXXEQLSNMVVKS

SEQ ID NO: 13687 - protein, 38 aa, Artificial Sequence; identical to SEQ ID NO: 6307
  GFR-binding peptide
  MOD_RES (5), (6): Xaa is C or S
  MOD_RES (20), (21), (22), (23), (24): Xaa is A or G
  MOD_RES (25), (26), (27), (28): Xaa is A or G or is absent

SEQ ID NO: 13688 - protein, 34 aa, Artificial Sequence; identical to SEQ ID NO: 6308
  GFR-binding peptide
  MOD_RES (1), (2): Xaa is C or S
  MOD_RES (16), (17), (18), (19), (20): Xaa is A or G
  MOD_RES (21), (22), (23), (24): Xaa is A or G or is absent

SEQ ID NO: 13689 - protein, 41 aa, Artificial Sequence
  GFR-binding peptide
  MOD_RES (6), (7), (40): Xaa is C or S
  MOD_RES (21), (22), (23), (24), (25): Xaa is A or G
  MOD_RES (26), (27), (28), (29): Xaa is A or G or is absent
ASASPXXVSQDLEPLPIVYYXXXXXXXXXEQLSNMIVKSXK

SEQ ID NO: 13690 - protein, 32 aa, Artificial Sequence; identical to SEQ ID NO: 6309
  GFR-binding peptide
  MOD_RES (2), (2): Xaa is C or S

SEQ ID NO: 13691 - protein, 35 aa, Artificial Sequence
  GFR-binding peptide
  MOD_RES (1), (2), (33), (35): Xaa is C or S
XXVSQDLEPLPIVYYIGKTPKIEQLSNMIVKSXKX

SEQ ID NO: 13692 - protein, 38 aa, Artificial Sequence
  GFR-binding peptide
  MOD_RES (2), (3), (35), (37): Xaa is C or S
AXXVPTELEPLPMVYYDEYDKVVEQLSNEMVVEGXGXR

SEQ ID NO: 13693 - protein, 35 aa, Artificial Sequence
  GFR-binding peptide
  MOD_RES (33), (35): Xaa is C or S
  MOD_RES (14), (15), (16), (17), (18): Xaa is A or G
  MOD_RES (19), (20), (21), (22): Xaa is A or G or is absent
VPQALSPISILFIXXXXXXXXXYKQYEMIVRSXKX

SEQ ID NO: 13694 - protein, 34 aa, Artificial Sequence
  GFR-binding peptide
  MOD_RES (2), (3): Xaa is C or S
PXXAPTQLEPLPVVYYDDSSNVIEQLSNNMVVRA

SEQ ID NO: 13695 - protein, 40 aa, Artificial Sequence
  GFR-binding peptide
  MOD_RES (6), (7), (39): Xaa is C or S
STPPTXXVPTRLNAISILYFDSANNVVLKKYRDMVVESXG

SEQ ID NO: 13696 - protein, 38 aa, Artificial Sequence
  GFR-binding peptide
  MOD_RES (1), (2), (35), (37): Xaa is C or S
  MOD_RES (16), (17), (18), (19), (20): Xaa is A or G
  MOD_RES (21), (22), (23), (24): Xaa is A or G or is absent
XXVSQDLSPISILFIXXXXXXXXXYKQYEMIVKSXKXS

SEQ ID NO: 13697 - protein, 36 aa, Artificial Sequence; identical to SEQ ID NO: 6317
  GFR-binding peptide
  MOD_RES (4), (5), (36): Xaa is C or S

SEQ ID NO: 13698 - protein, 34 aa, Artificial Sequence
  GFR-binding peptide
  MOD_RES (32), (34): Xaa is C or S
APTQLSPISVLFIDDSSNVIYKQYENMVVRAXGX

SEQ ID NO: 13699 - protein, 37 aa, Artificial Sequence; identical to SEQ ID NO: 6322
  GFR-binding peptide
  MOD_RES (2), (3), (37): Xaa is C or S
  MOD_RES (17), (18), (19), (20), (21): Xaa is A or G
  MOD_RES (22), (23), (24), (25): Xaa is A or G or is absent

SEQ ID NO: 13700 - protein, 41 aa, Artificial Sequence
  GFR-binding peptide
  MOD_RES (7), (41): Xaa is C or S
  MOD_RES (21), (22), (23), (24), (25): Xaa is A or G
  MOD_RES (26), (27), (28), (29): Xaa is A or G or is absent
HVTKPTXAPTKLEPLTVLYYXXXXXXXXXEQLSNNMVVRSX

SEQ ID NO: 13701 - protein, 35 aa, Artificial Sequence; identical to SEQ ID NO: 6323
  GFR-binding peptide
  MOD_RES (1), (34): Xaa is C or S
  MOD_RES (15), (16), (17), (18), (19): Xaa is A or G
  MOD_RES (20), (21), (22), (23): Xaa is A or G or is absent

SEQ ID NO: 13702 - protein, 35 aa, Artificial Sequence; identical to SEQ ID NO: 6325
  GFR-binding peptide
  MOD_RES (34), (34): Xaa is C or S
  MOD_RES (14), (15), (16), (17), (18): Xaa is A or G
  MOD_RES (19), (20), (21), (22): Xaa is A or G or is absent

SEQ ID NO: 13703 - protein, 30 aa, Artificial Sequence
  GFR-binding peptide
VPTELEPLTMLYYDENEKVVEQLSNDMVVE

SEQ ID NO: 13704 - protein, 40 aa, Artificial Sequence
  GFR-binding peptide
  MOD_RES (6), (7): Xaa is C or S
  MOD_RES (21), (22), (23), (24), (25): Xaa is A or G
  MOD_RES (26), (27), (28), (29): Xaa is A or G or is absent
SIPKAXXVPTELEPLPMVYYXXXXXXXXXEQLSNEMVVEG

SEQ ID NO: 13705 - protein, 37 aa, Artificial Sequence
  GFR-binding peptide
  MOD_RES (3), (4), (35), (37): Xaa is C or S
APXXVPQALSPISILFIVGRKPKVYKQYEMIVRSXKX

SEQ ID NO: 13706 - protein, 32 aa, Artificial Sequence
  GFR-binding peptide
  MOD_RES (14), (15), (16), (17), (18): Xaa is A or G
  MOD_RES (19), (20), (21), (22): Xaa is A or G or is absent
VPTELEPLTMLYYXXXXXXXXXEQLSNEMVVE

SEQ ID NO: 13707 - protein, 38 aa, Artificial Sequence
  GFR-binding peptide
  MOD_RES (3), (4), (38): Xaa is C or S
  MOD_RES (18), (19), (20), (21), (22): Xaa is A or G
  MOD_RES (23), (24), (25), (26): Xaa is A or G or is absent
KAXXVPTELSPISMLFIXXXXXXXXXYKQYEEMVVEGX

SEQ ID NO: 13708 - protein, 38 aa, Artificial Sequence
  GFR-binding peptide
  MOD_RES (2), (3), (35), (37): Xaa is C or S
PXXAPTQLEPLPVVYYDDSSNVIEQLSNNMVVRAXGXH

SEQ ID NO: 13709 - protein, 37 aa, Artificial Sequence
  GFR-binding peptide
  MOD_RES (1), (35), (37): Xaa is C or S
  MOD_RES (15), (16), (17), (18), (19): Xaa is A or G
  MOD_RES (20), (21), (22), (23): Xaa is A or G or is absent
XVPTELEPLTMLYYXXXXXXXXXEQLSNDMVVEGXGX

SEQ ID NO: 13710 - protein, 38 aa, Artificial Sequence
  GFR-binding peptide
  MOD_RES (5), (6): Xaa is C or S
  MOD_RES (20), (21), (22), (23), (24): Xaa is A or G
  MOD_RES (25), (26), (27), (28): Xaa is A or G or is absent
IPKAXXVPTELSPISMLFIXXXXXXXXXYKQYEDMVVE

SEQ ID NO: 13711 - protein, 31 aa, Artificial Sequence
  GFR-binding peptide
  MOD_RES (1), (1): Xaa is C or S
XAPTKLEPLPVVYYDDSSNVIEQLSNNMVVR

SEQ ID NO: 13712 - protein, 36 aa, Artificial Sequence
  GFR-binding peptide
  MOD_RES (1), (35): Xaa is C or S
  MOD_RES (15), (16), (17), (18), (19): Xaa is A or G
  MOD_RES (20), (21), (22), (23): Xaa is A or G or is absent
XAPTQLSPISVLFIXXXXXXXXXYKQYENMVVRAXG

SEQ ID NO: 13713 - protein, 39 aa, Artificial Sequence
  GFR-binding peptide
  MOD_RES (6), (7): Xaa is C or S
  MOD_RES (21), (22), (23), (24), (25): Xaa is A or G
  MOD_RES (26), (27), (28), (29): Xaa is A or G or is absent
YVPKPXXAPTKLSPISVLFIXXXXXXXXXYKQYENMVVR

SEQ ID NO: 13714 - protein, 42 aa, Artificial Sequence; identical to SEQ ID NO: 6334
  GFR-binding peptide
  MOD_RES (5), (6), (40), (42): Xaa is C or S
  MOD_RES (20), (21), (22), (23), (24): Xaa is A or G
  MOD_RES (25), (26), (27), (28): Xaa is A or G or is absent

SEQ ID NO: 13715 - protein, 36 aa, Artificial Sequence
  GFR-binding peptide
  MOD_RES (1), (35): Xaa is C or S
  MOD_RES (15), (16), (17), (18), (19): Xaa is A or G
  MOD_RES (20), (21), (22), (23): Xaa is A or G or is absent
XAPTQLEPLTVLYYXXXXXXXXXEQLSNNMVVRAXG

SEQ ID NO: 13716 - protein, 34 aa, Artificial Sequence; identical to SEQ ID NO: 6337
  GFR-binding peptide
  MOD_RES (1), (32), (34): Xaa is C or S

SEQ ID NO: 13717 - protein, 33 aa, Artificial Sequence; identical to SEQ ID NO: 6338
  GFR-binding peptide
  MOD_RES (2), (3): Xaa is C or S

SEQ ID NO: 13718 - protein, 37 aa, Artificial Sequence
  GFR-binding peptide
  MOD_RES (6), (7): Xaa is C or S
ASASPXXVPQDLSPISILFIVGRTPKVYKQYEMVVKS

SEQ ID NO: 13719 - protein, 36 aa, Artificial Sequence
  GFR-binding peptide
  MOD_RES (4), (5): Xaa is C or S
PKPXXAPTQLEPLTVLYYDDSSNVIEQLSNNMVVRA

SEQ ID NO: 13720 - protein, 37 aa, Artificial Sequence
  GFR-binding peptide
  MOD_RES (1), (35), (37): Xaa is C or S
  MOD_RES (15), (16), (17), (18), (19): Xaa is A or G
  MOD_RES (20), (21), (22), (23): Xaa is A or G or is absent
XVPTELEPLTMLYYXXXXXXXXXEQLSNEMVVEGXGX

SEQ ID NO: 13721 - protein, 38 aa, Artificial Sequence
  GFR-binding peptide
  MOD_RES (5), (6): Xaa is C or S
  MOD_RES (20), (21), (22), (23), (24): Xaa is A or G
  MOD_RES (25), (26), (27), (28): Xaa is A or G or is absent
TPPTXXVPTRLNAISILYFXXXXXXXXXLKKYRDMVVE

SEQ ID NO: 13722 - protein, 31 aa, Artificial Sequence
  GFR-binding peptide
  MOD_RES (31), (31): Xaa is C or S
VPQDLEPLPIVYYVGRTPKVEQLSNMVVKSX

SEQ ID NO: 13723 - protein, 32 aa, Artificial Sequence
  GFR-binding peptide
  MOD_RES (14), (15), (16), (17), (18): Xaa is A or G
  MOD_RES (19), (20), (21), (22): Xaa is A or G or is absent
VPTELEPLPMVYYXXXXXXXXXEQLSNEMVVE

SEQ ID NO: 13724 - protein, 34 aa, Artificial Sequence
  GFR-binding peptide
  MOD_RES (32), (34): Xaa is C or S
VPTELEPLTMLYYDENEKVVEQLSNDMVVEGXGX

SEQ ID NO: 13725 - protein, 41 aa, Artificial Sequence
  GFR-binding peptide
  MOD_RES (5), (6), (40): Xaa is C or S
  MOD_RES (20), (21), (22), (23), (24): Xaa is A or G
  MOD_RES (25), (26), (27), (28): Xaa is A or G or is absent
TPPTXXVPTRLEPLTILYYXXXXXXXXXEQLSNDMVVESXG

SEQ ID NO: 13726 - protein, 40 aa, Artificial Sequence
  GFR-binding peptide
  MOD_RES (6), (7): Xaa is C or S
  MOD_RES (21), (22), (23), (24), (25): Xaa is A or G
  MOD_RES (26), (27), (28), (29): Xaa is A or G or is absent
TVPKPXXAPTQLEPLTVLYYXXXXXXXXXEQLSNNMVVRA

SEQ ID NO: 13727 - protein, 34 aa, Artificial Sequence
  GFR-binding peptide
  MOD_RES (33), (33): Xaa is C or S
  MOD_RES (14), (15), (16), (17), (18): Xaa is A or G
  MOD_RES (19), (20), (21), (22): Xaa is A or G or is absent
VPQALSPISILFIXXXXXXXXXYKQYEMIVRSXK

SEQ ID NO: 13728 - protein, 34 aa, Artificial Sequence
  GFR-binding peptide
  MOD_RES (1), (1): Xaa is C or S
  MOD_RES (15), (16), (17), (18), (19): Xaa is A or G
  MOD_RES (20), (21), (22), (23): Xaa is A or G or is absent
XAPTQLEPLPVVYYXXXXXXXXXEQLSNNMVVRA

SEQ ID NO: 13729 - protein, 39 aa, Artificial Sequence
  GFR-binding peptide
  MOD_RES (2), (3), (37), (39): Xaa is C or S
  MOD_RES (17), (18), (19), (20), (21): Xaa is A or G
  MOD_RES (22), (23), (24), (25): Xaa is A or G or is absent
AXXVPTELSPISMLFIXXXXXXXXXYKQYEEMVVEGXGX

SEQ ID NO: 13730 - protein, 34 aa, Artificial Sequence
  GFR-binding peptide
  MOD_RES (34), (34): Xaa is C or S
  MOD_RES (14), (15), (16), (17), (18): Xaa is A or G
  MOD_RES (19), (20), (21), (22): Xaa is A or G or is absent
VPTRLEPLPIVYYXXXXXXXXXEQLSNDMVVESX

SEQ ID NO: 13731 - protein, 31 aa, Artificial Sequence; identical to SEQ ID NO: 6347
  GFR-binding peptide
  MOD_RES (1), (1): Xaa is C or S

SEQ ID NO: 13732 - protein, 34 aa, Artificial Sequence
  GFR-binding peptide
  MOD_RES (2), (3): Xaa is C or S
TXXVPTRLNAISILYFDSANNVVLKKYRDMVVES

SEQ ID NO: 13733 - protein, 39 aa, Artificial Sequence
  GFR-binding peptide
  MOD_RES (5), (6): Xaa is C or S
  MOD_RES (20), (21), (22), (23), (24): Xaa is A or G
  MOD_RES (25), (26), (27), (28): Xaa is A or G or is absent
IPKAXXVPTELEPLTMLYYXXXXXXXXXEQLSNDMVVEG

SEQ ID NO: 13734 - protein, 41 aa, Artificial Sequence
  GFR-binding peptide
  MOD_RES (5), (6), (38), (40): Xaa is C or S
TPPTXXVPTRLEPLTILYYDSANNVVEQLSNDMVVESXGXR

SEQ ID NO: 13735 - protein, 38 aa, Artificial Sequence; identical to SEQ ID NO: 6351
  GFR-binding peptide
  MOD_RES (5), (6): Xaa is C or S
  MOD_RES (20), (21), (22), (23), (24): Xaa is A or G
  MOD_RES (25), (26), (27), (28): Xaa is A or G or is absent

SEQ ID NO: 13736 - protein, 40 aa, Artificial Sequence; identical to SEQ ID NO: 6352
  GFR-binding peptide
  MOD_RES (4), (5), (37), (39): Xaa is C or S

SEQ ID NO: 13737 - protein, 42 aa, Artificial Sequence
  GFR-binding peptide
  MOD_RES (5), (6), (39), (41): Xaa is C or S
  MOD_RES (20), (21), (22), (23), (24): Xaa is A or G
  MOD_RES (25), (26), (27), (28): Xaa is A or G or is absent
SASPXXVPQDLEPLTILYYXXXXXXXXXEQLSNMVVKSXKXS

SEQ ID NO: 13738 - protein, 32 aa, Artificial Sequence; identical to SEQ ID NO: 6354
  GFR-binding peptide
  MOD_RES (1), (2): Xaa is C or S

SEQ ID NO: 13739 - protein, 33 aa, Artificial Sequence
  GFR-binding peptide
  MOD_RES (1), (33): Xaa is C or S
XVPTELEPLTMLYYDEYDKVVEQLSNEMVVEGX

SEQ ID NO: 13740 - protein, 40 aa, Artificial Sequence
  GFR-binding peptide
  MOD_RES (5), (6), (40): Xaa is C or S
  MOD_RES (20), (21), (22), (23), (24): Xaa is A or G
  MOD_RES (25), (26), (27), (28): Xaa is A or G or is absent
TPPTXXVPTRLSPISILFIXXXXXXXXXYKQYEDMVVESX

SEQ ID NO: 13741 - protein, 35 aa, Artificial Sequence
  GFR-binding peptide
  MOD_RES (2), (3), (35): Xaa is C or S
AXXVPTELSPISMLFIDEYDKVVYKQYEEMVVEGX

SEQ ID NO: 13742 - protein, 37 aa, Artificial Sequence
  GFR-binding peptide
  MOD_RES (5), (6): Xaa is C or S
IPKAXXVPTELEPLPMVYYDENEKVVEQLSNDMVVEG

SEQ ID NO: 13743 - protein, 33 aa, Artificial Sequence; identical to SEQ ID NO: 6355
  GFR-binding peptide
  MOD_RES (1), (1): Xaa is C or S
  MOD_RES (15), (16), (17), (18), (19): Xaa is A or G
  MOD_RES (20), (21), (22), (23): Xaa is A or G or is absent

SEQ ID NO: 13744 - protein, 38 aa, Artificial Sequence
  GFR-binding peptide
  MOD_RES (1), (2), (35), (37): Xaa is C or S
  MOD_RES (16), (17), (18), (19), (20): Xaa is A or G
  MOD_RES (21), (22), (23), (24): Xaa is A or G or is absent
XXVPQALEPLPIVYYXXXXXXXXXEQLSNMIVRSXKXS

SEQ ID NO: 13745 - protein, 38 aa, Artificial Sequence
  GFR-binding peptide
  MOD_RES (5), (6), (38): Xaa is C or S
IPKAXXVPTELSPISMLFIDEYDKVVYKQYEEMVVEGX

SEQ ID NO: 13746 - protein, 38 aa, Artificial Sequence; identical to SEQ ID NO: 6359
  GFR-binding peptide
  MOD_RES (6), (7), (38): Xaa is C or S

SEQ ID NO: 13747 - protein, 37 aa, Artificial Sequence
  GFR-binding peptide
  MOD_RES (3), (4), (35), (37): Xaa is C or S
APXXVPQALEPLTILYYVGRKPKVEQLSNMIVRSXKX

SEQ ID NO: 13748 - protein, 35 aa, Artificial Sequence
  GFR-binding peptide
  MOD_RES (3), (4), (35): Xaa is C or S
SPXXVSQDLEPLPIVYYIGKTPKIEQLSNMIVKSX

SEQ ID NO: 13749 - protein, 40 aa, Artificial Sequence
  GFR-binding peptide
  MOD_RES (2), (3), (37), (39): Xaa is C or S
  MOD_RES (17), (18), (19), (20), (21): Xaa is A or G
  MOD_RES (22), (23), (24), (25): Xaa is A or G or is absent
TXXVPTRLSPISILFIXXXXXXXXXYKQYEDMVVESXGXR

SEQ ID NO: 13750 - protein, 33 aa, Artificial Sequence; identical to SEQ ID NO: 6361
  GFR-binding peptide
  MOD_RES (1), (1): Xaa is C or S
  MOD_RES (15), (16), (17), (18), (19): Xaa is A or G
  MOD_RES (20), (21), (22), (23): Xaa is A or G or is absent

SEQ ID NO: 13751 - protein, 40 aa, Artificial Sequence
  GFR-binding peptide
  MOD_RES (2), (3), (37), (39): Xaa is C or S
  MOD_RES (17), (18), (19), (20), (21): Xaa is A or G
  MOD_RES (22), (23), (24), (25): Xaa is A or G or is absent
AXXVPTELEPLPMVYYXXXXXXXXXEQLSNEMVVEGXGXR

SEQ ID NO: 13752 - protein, 34 aa, Artificial Sequence
  GFR-binding peptide
  MOD_RES (3), (4): Xaa is C or S
KAXXVPTELSPISMLFIDENEKVVYKQYEDMVVE

SEQ ID NO: 13753 - protein, 32 aa, Artificial Sequence; identical to SEQ ID NO: 6363
  GFR-binding peptide
  MOD_RES (1), (32): Xaa is C or S

SEQ ID NO: 13754 - protein, 32 aa, Artificial Sequence; identical to SEQ ID NO: 6367
  GFR-binding peptide
  MOD_RES (14), (15), (16), (17), (18): Xaa is A or G
  MOD_RES (19), (20), (21), (22): Xaa is A or G or is absent

SEQ ID NO: 13755 - protein, 40 aa, Artificial Sequence
  GFR-binding peptide
  MOD_RES (5), (6), (40): Xaa is C or S
  MOD_RES (20), (21), (22), (23), (24): Xaa is A or G
  MOD_RES (25), (26), (27), (28): Xaa is A or G or is absent
VPKPXXAPTKLSPISVLFIXXXXXXXXXYKQYENMVVRSX

SEQ ID NO: 13756 - protein, 31 aa, Artificial Sequence; identical to SEQ ID NO: 6371
  GFR-binding peptide
  MOD_RES (31), (31): Xaa is C or S

SEQ ID NO: 13757 - protein, 39 aa, Artificial Sequence; identical to SEQ ID NO: 6373
  GFR-binding peptide
  MOD_RES (3), (4), (38): Xaa is C or S
  MOD_RES (18), (19), (20), (21), (22): Xaa is A or G
  MOD_RES (23), (24), (25), (26): Xaa is A or G or is absent

SEQ ID NO: 13758 - protein, 35 aa, Artificial Sequence
  GFR-binding peptide
  MOD_RES (2), (3): Xaa is C or S
  MOD_RES (17), (18), (19), (20), (21): Xaa is A or G
  MOD_RES (22), (23), (24), (25): Xaa is A or G or is absent
PXXAPTKLEPLTVLYYXXXXXXXXXEQLSNNMVVR

SEQ ID NO: 13759 - protein, 34 aa, Artificial Sequence
  GFR-binding peptide
  MOD_RES (1), (2), (34): Xaa is C or S
XXVPTELEPLTMLYYDENEKVVEQLSNDMVVEGX

SEQ ID NO: 13760 - protein, 34 aa, Artificial Sequence
  GFR-binding peptide
  MOD_RES (1), (34): Xaa is C or S
  MOD_RES (15), (16), (17), (18), (19): Xaa is A or G
  MOD_RES (20), (21), (22), (23): Xaa is A or G or is absent
XVPQALEPLPIVYYXXXXXXXXXEQLSNMIVRSX

SEQ ID NO: 13761 - protein, 34 aa, Artificial Sequence
  GFR-binding peptide
  MOD_RES (32), (34): Xaa is C or S
VPTELSPISMLFIDEYDKVVYKQYEEMVVEGXGX

SEQ ID NO: 13762 - protein, 40 aa, Artificial Sequence; identical to SEQ ID NO: 6379
  GFR-binding peptide
  MOD_RES (3), (4), (37), (39): Xaa is C or S
  MOD_RES (18), (19), (20), (21), (22): Xaa is A or G
  MOD_RES (23), (24), (25), (26): Xaa is A or G or is absent

SEQ ID NO: 13763 - protein, 38 aa, Artificial Sequence; identical to SEQ ID NO: 6380
  GFR-binding peptide
  MOD_RES (6), (7): Xaa is C or S

SEQ ID NO: 13764 - protein, 34 aa, Artificial Sequence
  GFR-binding peptide
  MOD_RES (3), (3): Xaa is C or S
PTXAPTKLEPLTVLYYDDSSNVIEQLSNNMVVRS

SEQ ID NO: 13765 - protein, 39 aa, Artificial Sequence; identical to SEQ ID NO: 6381
  GFR-binding peptide
  MOD_RES (4), (5), (36), (38): Xaa is C or S

SEQ ID NO: 13766 - protein, 37 aa, Artificial Sequence
  GFR-binding peptide
  MOD_RES (3), (4), (37): Xaa is C or S
  MOD_RES (18), (19), (20), (21), (22): Xaa is A or G
  MOD_RES (23), (24), (25), (26): Xaa is A or G or is absent
SPXXVPQDLEPLPIVYYXXXXXXXXXEQLSNMVVKSX

SEQ ID NO: 13767 - protein, 39 aa, Artificial Sequence; identical to SEQ ID NO: 6383
  GFR-binding peptide
  MOD_RES (5), (6): Xaa is C or S
  MOD_RES (20), (21), (22), (23), (24): Xaa is A or G
  MOD_RES (25), (26), (27), (28): Xaa is A or G or is absent

SEQ ID NO: 13768 - protein, 35 aa, Artificial Sequence; identical to SEQ ID NO: 6384
  GFR-binding peptide
  MOD_RES (33), (35): Xaa is C or S
  MOD_RES (14), (15), (16), (17), (18): Xaa is A or G
  MOD_RES (19), (20), (21), (22): Xaa is A or G or is absent

SEQ ID NO: 13769 - protein, 34 aa, Artificial Sequence
  GFR-binding peptide
  MOD_RES (1), (2), (33): Xaa is C or S
XXVPQALSPISILFIVGRKPKVYKQYEMIVRSXK

SEQ ID NO: 13770 - protein, 40 aa, Artificial Sequence
  GFR-binding peptide
  MOD_RES (7), (7): Xaa is C or S
  MOD_RES (21), (22), (23), (24), (25): Xaa is A or G
  MOD_RES (26), (27), (28), (29): Xaa is A or G or is absent
HVTKPTXAPTKLSPISVLFIXXXXXXXXXYKQYENMVVRS

SEQ ID NO: 13771 - protein, 40 aa, Artificial Sequence; identical to SEQ ID NO: 6387
  GFR-binding peptide
  MOD_RES (7), (39): Xaa is C or S

SEQ ID NO: 13772 - protein, 39 aa, Artificial Sequence
  GFR-binding peptide
  MOD_RES (5), (6): Xaa is C or S
  MOD_RES (20), (21), (22), (23), (24): Xaa is A or G
  MOD_RES (25), (26), (27), (28): Xaa is A or G or is absent
VPKPXXAPTQLEPLTVLYYXXXXXXXXXEQLSNNMVVRA

SEQ ID NO: 13773 - protein, 35 aa, Artificial Sequence
  GFR-binding peptide
  MOD_RES (1), (35): Xaa is C or S
  MOD_RES (15), (16), (17), (18), (19): Xaa is A or G
  MOD_RES (20), (21), (22), (23): Xaa is A or G or is absent
XVPTRLEPLTILYYXXXXXXXXXEQLSNDMVVESX

SEQ ID NO: 13774 - protein, 36 aa, Artificial Sequence
  GFR-binding peptide
  MOD_RES (6), (6): Xaa is C or S
VTKPTXAPTKLSPISVLFIDDSSNVIYKQYENMVVR

SEQ ID NO: 13775 - protein, 39 aa, Artificial Sequence
  GFR-binding peptide
  MOD_RES (6), (7): Xaa is C or S
  MOD_RES (21), (22), (23), (24), (25): Xaa is A or G
  MOD_RES (26), (27), (28), (29): Xaa is A or G or is absent
STPPTXXVPTRLSAISILYLXXXXXXXXXLKNYQDMVVE

SEQ ID NO: 13776 - protein, 34 aa, Artificial Sequence; identical to SEQ ID NO: 6392
  GFR-binding peptide
  MOD_RES (32), (34): Xaa is C or S

SEQ ID NO: 13777 - protein, 41 aa, Artificial Sequence
  GFR-binding peptide
  MOD_RES (5), (6), (38), (40): Xaa is C or S
TPPTXXVPTRLNAISILYFDSANNVVLKKYRDMVVESXGXR

SEQ ID NO: 13778 - protein, 38 aa, Artificial Sequence; identical to SEQ ID NO: 6394
  GFR-binding peptide
  MOD_RES (3), (4), (35), (37): Xaa is C or S

SEQ ID NO: 13779 - protein, 39 aa, Artificial Sequence
  GFR-binding peptide
  MOD_RES (1), (2), (36), (38): Xaa is C or S
  MOD_RES (16), (17), (18), (19), (20): Xaa is A or G
  MOD_RES (21), (22), (23), (24): Xaa is A or G or is absent
XXVPTELEPLPMVYYXXXXXXXXXEQLSNDMVVEGXGXR

SEQ ID NO: 13780 - protein, 37 aa, Artificial Sequence
  GFR-binding peptide
  MOD_RES (2), (3), (36): Xaa is C or S
  MOD_RES (17), (18), (19), (20), (21): Xaa is A or G
  MOD_RES (22), (23), (24), (25): Xaa is A or G or is absent
PXXVSQDLSPISILFIXXXXXXXXXYKQYEMIVKSXK

SEQ ID NO: 13781 - protein, 34 aa, Artificial Sequence
  GFR-binding peptide
  MOD_RES (1), (2), (34): Xaa is C or S
XXVPTELEPLTMLYYDEYDKVVEQLSNEMVVEGX

SEQ ID NO: 13782 - protein, 33 aa, Artificial Sequence
  GFR-binding peptide
  MOD_RES (2), (3): Xaa is C or S
TXXVPTRLSAISILYLDSANNVVLKNYQDMVVE

SEQ ID NO: 13783 - protein, 30 aa, Artificial Sequence
  GFR-binding peptide
VPTELEPLPMVYYDENEKVVEQLSNDMVVE

SEQ ID NO: 13784 - protein, 37 aa, Artificial Sequence
  GFR-binding peptide
  MOD_RES (1), (2), (35), (37): Xaa is C or S
  MOD_RES (16), (17), (18), (19), (20): Xaa is A or G
  MOD_RES (21), (22), (23), (24): Xaa is A or G or is absent
XXVPQALSPISILFIXXXXXXXXXYKQYEMIVRSXKX

SEQ ID NO: 13785 - protein, 42 aa, Artificial Sequence
  GFR-binding peptide
  MOD_RES (5), (6), (40), (42): Xaa is C or S
  MOD_RES (20), (21), (22), (23), (24): Xaa is A or G
  MOD_RES (25), (26), (27), (28): Xaa is A or G or is absent
TPPTXXVPTRLSAISILYLXXXXXXXXXLKNYQDMVVESXGX

SEQ ID NO: 13786 - protein, 33 aa, Artificial Sequence; identical to SEQ ID NO: 6409
  GFR-binding peptide
  MOD_RES (2), (2): Xaa is C or S

SEQ ID NO: 13787 - protein, 36 aa, Artificial Sequence
  GFR-binding peptide
  MOD_RES (3), (3): Xaa is C or S
  MOD_RES (17), (18), (19), (20), (21): Xaa is A or G
  MOD_RES (22), (23), (24), (25): Xaa is A or G or is absent
PTXAPTKLSPISVLFIXXXXXXXXXYKQYENMVVRS

SEQ ID NO: 13788 - protein, 39 aa, Artificial Sequence
  GFR-binding peptide
  MOD_RES (5), (6), (38): Xaa is C or S
IPKAXXVPTELEPLTMLYYDENEKVVEQLSNDMVVEGXG

SEQ ID NO: 13789 - protein, 37 aa, Artificial Sequence; identical to SEQ ID NO: 6411
  GFR-binding peptide
  MOD_RES (4), (5): Xaa is C or S
  MOD_RES (19), (20), (21), (22), (23): Xaa is A or G
  MOD_RES (24), (25), (26), (27): Xaa is A or G or is absent

SEQ ID NO: 13790 - protein, 35 aa, Artificial Sequence
  GFR-binding peptide
  MOD_RES (1), (2): Xaa is C or S
  MOD_RES (16), (17), (18), (19), (20): Xaa is A or G
  MOD_RES (21), (22), (23), (24): Xaa is A or G or is absent
XXAPTQLEPLPVVYYXXXXXXXXXEQLSNNMVVRA

SEQ ID NO: 13791 - protein, 35 aa, Artificial Sequence
  GFR-binding peptide
  MOD_RES (4), (5): Xaa is C or S
PKPXXAPTKLEPLPVVYYDDSSNVIEQLSNNMVVR

SEQ ID NO: 13792 - protein, 35 aa, Artificial Sequence
  GFR-binding peptide
  MOD_RES (2), (3), (35): Xaa is C or S
PXXAPTKLEPLPVVYYDDSSNVIEQLSNNMVVRSX

SEQ ID NO: 13793 - protein, 36 aa, Artificial Sequence
  GFR-binding peptide
  MOD_RES (2), (3), (35): Xaa is C or S
AXXVPTELEPLPMVYYDEYDKVVEQLSNEMVVEGXG

SEQ ID NO: 13794 - protein, 36 aa, Artificial Sequence
  GFR-binding peptide
  MOD_RES (2), (3), (35): Xaa is C or S
PXXAPTKLEPLPVVYYDDSSNVIEQLSNNMVVRSXG

SEQ ID NO: 13795 - protein, 34 aa, Artificial Sequence
  GFR-binding peptide
  MOD_RES (32), (34): Xaa is C or S
VPTRLNAISILYFDSANNVVLKKYRDMVVESXGX

SEQ ID NO: 13796 - protein, 32 aa, Artificial Sequence
  GFR-binding peptide
  MOD_RES (14), (15), (16), (17), (18): Xaa is A or G
  MOD_RES (19), (20), (21), (22): Xaa is A or G or is absent
VPTELSPISMLFIXXXXXXXXXYKQYEDMVVE

SEQ ID NO: 13797 - protein, 39 aa, Artificial Sequence; identical to SEQ ID NO: 6418
  GFR-binding peptide
  MOD_RES (5), (6), (37), (39): Xaa is C or S

SEQ ID NO: 13798 - protein, 37 aa, Artificial Sequence; identical to SEQ ID NO: 6419
  GFR-binding peptide
  MOD_RES (2), (36): Xaa is C or S
  MOD_RES (16), (17), (18), (19), (20): Xaa is A or G
  MOD_RES (21), (22), (23), (24): Xaa is A or G or is absent

SEQ ID NO: 13799 - protein, 39 aa, Artificial Sequence
  GFR-binding peptide
  MOD_RES (4), (5), (37), (39): Xaa is C or S
PKAXXVPTELEPLTMLYYDENEKVVEQLSNDMVVEGXGX

SEQ ID NO: 13800 - protein, 35 aa, Artificial Sequence
  GFR-binding peptide
  MOD_RES (2), (3), (35): Xaa is C or S
TXXVPTRLNAISILYFDSANNVVLKKYRDMVVESX

SEQ ID NO: 13801 - protein, 35 aa, Artificial Sequence
  GFR-binding peptide
  MOD_RES (2), (3), (35): Xaa is C or S
PXXAPTQLSPISVLFIDDSSNVIYKQYENMVVRAX

SEQ ID NO: 13802 - protein, 39 aa, Artificial Sequence; identical to SEQ ID NO: 6424
  GFR-binding peptide
  MOD_RES (2), (36), (38): Xaa is C or S
  MOD_RES (16), (17), (18), (19), (20): Xaa is A or G
  MOD_RES (21), (22), (23), (24): Xaa is A or G or is absent

SEQ ID NO: 13803 - protein, 34 aa, Artificial Sequence
  GFR-binding peptide
  MOD_RES (1), (33): Xaa is C or S
XVPTELSPISMLFIDEYDKVVYKQYEEMVVEGXG

SEQ ID NO: 13804 - protein, 32 aa, Artificial Sequence
  GFR-binding peptide
  MOD_RES (32), (32): Xaa is C or S
VPTELEPLTMLYYDENEKVVEQLSNDMVVEGX

SEQ ID NO: 13805 - protein, 33 aa, Artificial Sequence
  GFR-binding peptide
  MOD_RES (33), (33): Xaa is C or S
  MOD_RES (14), (15), (16), (17), (18): Xaa is A or G
  MOD_RES (19), (20), (21), (22): Xaa is A or G or is absent
VPQALSPISILFIXXXXXXXXXYKQYEMIVRSX

SEQ ID NO: 13806 - protein, 38 aa, Artificial Sequence; identical to SEQ ID NO: 6428
  GFR-binding peptide
  MOD_RES (4), (5), (38): Xaa is C or S
  MOD_RES (19), (20), (21), (22), (23): Xaa is A or G
  MOD_RES (24), (25), (26), (27): Xaa is A or G or is absent

SEQ ID NO: 13807 - protein, 32 aa, Artificial Sequence
  GFR-binding peptide
  MOD_RES (31), (31): Xaa is C or S
VPQALSPISILFIVGRKPKVYKQYEMIVRSXK

SEQ ID NO: 13808 - protein, 36 aa, Artificial Sequence
  GFR-binding peptide
  MOD_RES (1), (33), (35): Xaa is C or S
XAPTQLSPISVLFIDDSSNVIYKQYENMVVRAXGXH

SEQ ID NO: 13809 - protein, 42 aa, Artificial Sequence
  GFR-binding peptide
  MOD_RES (6), (7), (41): Xaa is C or S
  MOD_RES (21), (22), (23), (24), (25): Xaa is A or G
  MOD_RES (26), (27), (28), (29): Xaa is A or G or is absent
SIPKAXXVPTELEPLTMLYYXXXXXXXXXEQLSNEMVVEGXG

SEQ ID NO: 13810 - protein, 40 aa, Artificial Sequence
  GFR-binding peptide
  MOD_RES (4), (38), (40): Xaa is C or S
  MOD_RES (18), (19), (20), (21), (22): Xaa is A or G
  MOD_RES (23), (24), (25), (26): Xaa is A or G or is absent
KPTXAPTKLEPLPVVYYXXXXXXXXXEQLSNNMVVRSXGX

SEQ ID NO: 13811 - protein, 43 aa, Artificial Sequence
  GFR-binding peptide
  MOD_RES (6), (7), (40), (42): Xaa is C or S
  MOD_RES (21), (22), (23), (24), (25): Xaa is A or G
  MOD_RES (26), (27), (28), (29): Xaa is A or G or is absent
ASASPXXVSQDLEPLPIVYYXXXXXXXXXEQLSNMIVKSXKXS

SEQ ID NO: 13812 - protein, 37 aa, Artificial Sequence; identical to SEQ ID NO: 6432
  GFR-binding peptide
  MOD_RES (4), (5), (36): Xaa is C or S

SEQ ID NO: 13813 - protein, 32 aa, Artificial Sequence
  GFR-binding peptide
  MOD_RES (1), (2): Xaa is C or S
XXVPTRLNAISILYFDSANNVVLKKYRDMVVE

SEQ ID NO: 13814 - protein, 40 aa, Artificial Sequence; identical to SEQ ID NO: 6434
  GFR-binding peptide
  MOD_RES (6), (7): Xaa is C or S
  MOD_RES (21), (22), (23), (24), (25): Xaa is A or G
  MOD_RES (26), (27), (28), (29): Xaa is A or G or is absent

SEQ ID NO: 13815 - protein, 41 aa, Artificial Sequence; identical to SEQ ID NO: 6436
  GFR-binding peptide
  MOD_RES (5), (6), (38), (40): Xaa is C or S

SEQ ID NO: 13816 - protein, 36 aa, Artificial Sequence
  GFR-binding peptide
  MOD_RES (33), (35): Xaa is C or S
  MOD_RES (14), (15), (16), (17), (18): Xaa is A or G
  MOD_RES (19), (20), (21), (22): Xaa is A or G or is absent
VPQDLEPLPIVYYXXXXXXXXXEQLSNMVVKSXKXS

SEQ ID NO: 13817 - protein, 38 aa, Artificial Sequence; identical to SEQ ID NO: 6441
  GFR-binding peptide
  MOD_RES (3), (4), (37): Xaa is C or S
  MOD_RES (18), (19), (20), (21), (22): Xaa is A or G
  MOD_RES (23), (24), (25), (26): Xaa is A or G or is absent

SEQ ID NO: 13818 - protein, 31 aa, Artificial Sequence
  GFR-binding peptide
  MOD_RES (1), (1): Xaa is C or S
XVPTELEPLPMVYYDEYDKVVEQLSNEMVVE

SEQ ID NO: 13819 - protein, 34 aa, Artificial Sequence; identical to SEQ ID NO: 6442
  GFR-binding peptide
  MOD_RES (2), (34): Xaa is C or S

SEQ ID NO: 13820 - protein, 38 aa, Artificial Sequence
  GFR-binding peptide
  MOD_RES (1), (2), (36), (38): Xaa is C or S
  MOD_RES (16), (17), (18), (19), (20): Xaa is A or G
  MOD_RES (21), (22), (23), (24): Xaa is A or G or is absent
XXVPTRLSPISILFIXXXXXXXXXYKQYEDMVVESXGX

SEQ ID NO: 13821 - protein, 35 aa, Artificial Sequence
  GFR-binding peptide
  MOD_RES (2), (3), (35): Xaa is C or S
AXXVPTELSPISMLFIDENEKVVYKQYEDMVVEGX

SEQ ID NO: 13822 - protein, 39 aa, Artificial Sequence
  GFR-binding peptide
  MOD_RES (5), (37), (39): Xaa is C or S
TKPTXAPTKLSPISVLFIDDSSNVIYKQYENMVVRSXGX

SEQ ID NO: 13823 - protein, 41 aa, Artificial Sequence
  GFR-binding peptide
  MOD_RES (6), (38), (40): Xaa is C or S
VTKPTXAPTKLEPLTVLYYDDSSNVIEQLSNNMVVRSXGXH

SEQ ID NO: 13824 - protein, 36 aa, Artificial Sequence
  GFR-binding peptide
  MOD_RES (2), (3), (35): Xaa is C or S
PXXAPTKLSPISVLFIDDSSNVIYKQYENMVVRSXG

SEQ ID NO: 13825 - protein, 41 aa, Artificial Sequence; identical to SEQ ID NO: 6443
  GFR-binding peptide
  MOD_RES (3), (4), (38), (40): Xaa is C or S
  MOD_RES (18), (19), (20), (21), (22): Xaa is A or G
  MOD_RES (23), (24), (25), (26): Xaa is A or G or is absent

SEQ ID NO: 13826 - protein, 36 aa, Artificial Sequence
  GFR-binding peptide
  MOD_RES (5), (6): Xaa is C or S
IPKAXXVPTELSPISMLFIDEYDKVVYKQYEEMVVE

SEQ ID NO: 13827 - protein, 37 aa, Artificial Sequence
  GFR-binding peptide
  MOD_RES (1), (35), (37): Xaa is C or S
  MOD_RES (15), (16), (17), (18), (19): Xaa is A or G
  MOD_RES (20), (21), (22), (23): Xaa is A or G or is absent
XAPTKLEPLTVLYYXXXXXXXXXEQLSNNMVVRSXGX

SEQ ID NO: 13828 - protein, 36 aa, Artificial Sequence; identical to SEQ ID NO: 6445
  GFR-binding peptide
  MOD_RES (4), (5): Xaa is C or S

SEQ ID NO: 13829 - protein, 37 aa, Artificial Sequence; identical to SEQ ID NO: 6448
  GFR-binding peptide
  MOD_RES (34), (36): Xaa is C or S
  MOD_RES (14), (15), (16), (17), (18): Xaa is A or G
  MOD_RES (19), (20), (21), (22): Xaa is A or G or is absent

SEQ ID NO: 13830 - protein, 34 aa, Artificial Sequence; identical to SEQ ID NO: 6449
  GFR-binding peptide
  MOD_RES (31), (33): Xaa is C or S

SEQ ID NO: 13831 - protein, 37 aa, Artificial Sequence
  GFR-binding peptide
  MOD_RES (3), (4): Xaa is C or S
  MOD_RES (18), (19), (20), (21), (22): Xaa is A or G
  MOD_RES (23), (24), (25), (26): Xaa is A or G or is absent
KPXXAPTKLEPLTVLYYXXXXXXXXXEQLSNNMVVRS

SEQ ID NO: 13832 - protein, 36 aa, Artificial Sequence
  GFR-binding peptide
  MOD_RES (34), (36): Xaa is C or S
  MOD_RES (14), (15), (16), (17), (18): Xaa is A or G
  MOD_RES (19), (20), (21), (22): Xaa is A or G or is absent
APTQLEPLTVLYYXXXXXXXXXEQLSNNMVVRAXGX

SEQ ID NO: 13833 - protein, 35 aa, Artificial Sequence; identical to SEQ ID NO: 6458
  GFR-binding peptide
  MOD_RES (2), (3), (35): Xaa is C or S

SEQ ID NO: 13834 - protein, 39 aa, Artificial Sequence
  GFR-binding peptide
  MOD_RES (1), (2), (36), (38): Xaa is C or S
  MOD_RES (16), (17), (18), (19), (20): Xaa is A or G
  MOD_RES (21), (22), (23), (24): Xaa is A or G or is absent
XXVPTRLSPISILFIXXXXXXXXXYKQYEDMVVESXGXR

SEQ ID NO: 13835 - protein, 39 aa, Artificial Sequence; identical to SEQ ID NO: 6461
  GFR-binding peptide
  MOD_RES (5), (6), (37), (39): Xaa is C or S

SEQ ID NO: 13836 - protein, 40 aa, Artificial Sequence
  GFR-binding peptide
  MOD_RES (6), (38), (40): Xaa is C or S
VTKPTXAPTKLEPLTVLYYDDSSNVIEQLSNNMVVRSXGX

SEQ ID NO: 13837 - protein, 31 aa, Artificial Sequence
  GFR-binding peptide
  MOD_RES (31), (31): Xaa is C or S
VPQALSPISILFIVGRKPKVYKQYEMIVRSX

SEQ ID NO: 13838 - protein, 42 aa, Artificial Sequence
  GFR-binding peptide
  MOD_RES (6), (7), (39), (41): Xaa is C or S
KIPKAXXVPTELEPLPMVYYDENEKVVEQLSNDMVVEGXGXR

SEQ ID NO: 13839 - protein, 37 aa, Artificial Sequence
  GFR-binding peptide
  MOD_RES (1), (2), (36): Xaa is C or S
  MOD_RES (16), (17), (18), (19), (20): Xaa is A or G
  MOD_RES (21), (22), (23), (24): Xaa is A or G or is absent
XXVPTELEPLPMVYYXXXXXXXXXEQLSNDMVVEGXG

SEQ ID NO: 13840 - protein, 42 aa, Artificial Sequence
  GFR-binding peptide
  MOD_RES (6), (7), (40), (42): Xaa is C or S
  MOD_RES (21), (22), (23), (24), (25): Xaa is A or G
  MOD_RES (26), (27), (28), (29): Xaa is A or G or is absent
ASASPXXVSQDLSPISILFIXXXXXXXXXYKQYEMIVKSXKX

SEQ ID NO: 13841 - protein, 36 aa, Artificial Sequence
  GFR-binding peptide
  MOD_RES (1), (2), (33), (35): Xaa is C or S
XXVSQDLEPLPIVYYIGKTPKIEQLSNMIVKSXKXS

SEQ ID NO: 13842 - protein, 38 aa, Artificial Sequence; identical to SEQ ID NO: 6467
  GFR-binding peptide
  MOD_RES (2), (3), (36), (38): Xaa is C or S
  MOD_RES (17), (18), (19), (20), (21): Xaa is A or G
  MOD_RES (22), (23), (24), (25): Xaa is A or G or is absent

SEQ ID NO: 13843 - protein, 33 aa, Artificial Sequence
  GFR-binding peptide
  MOD_RES (31), (33): Xaa is C or S
VPQALEPLTILYYVGRKPKVEQLSNMIVRSXKX

SEQ ID NO: 13844 - protein, 38 aa, Artificial Sequence
  GFR-binding peptide
  MOD_RES (4), (5): Xaa is C or S
  MOD_RES (19), (20), (21), (22), (23): Xaa is A or G
  MOD_RES (24), (25), (26), (27): Xaa is A or G or is absent
PKAXXVPTELEPLPMVYYXXXXXXXXXEQLSNEMVVEG

SEQ ID NO: 13845 - protein, 39 aa, Artificial Sequence
  GFR-binding peptide
  MOD_RES (1), (2), (36), (38): Xaa is C or S
  MOD_RES (16), (17), (18), (19), (20): Xaa is A or G
  MOD_RES (21), (22), (23), (24): Xaa is A or G or is absent
XXVPTELEPLTMLYYXXXXXXXXXEQLSNDMVVEGXGXR

SEQ ID NO: 13846 - protein, 36 aa, Artificial Sequence
  GFR-binding peptide
  MOD_RES (5), (6): Xaa is C or S
IPKAXXVPTELSPISMLFIDENEKVVYKQYEDMVVE

SEQ ID NO: 13847 - protein, 36 aa, Artificial Sequence; identical to SEQ ID NO: 6473
  GFR-binding peptide
  MOD_RES (4), (5), (36): Xaa is C or S

SEQ ID NO: 13848 - protein, 35 aa, Artificial Sequence
  GFR-binding peptide
  MOD_RES (3), (4): Xaa is C or S
PTXXVPTRLEPLTILYYDSANNVVEQLSNDMVVES

SEQ ID NO: 13849 - protein, 37 aa, Artificial Sequence; identical to SEQ ID NO: 6477
  GFR-binding peptide
  MOD_RES (1), (2), (35), (37): Xaa is C or S
  MOD_RES (16), (17), (18), (19), (20): Xaa is A or G
  MOD_RES (21), (22), (23), (24): Xaa is A or G or is absent

SEQ ID NO: 13850 - protein, 33 aa, Artificial Sequence; identical to SEQ ID NO: 6478
  GFR-binding peptide
  MOD_RES (2), (3): Xaa is C or S

SEQ ID NO: 13851 - protein, 33 aa, Artificial Sequence
  GFR-binding peptide
  MOD_RES (2), (3): Xaa is C or S
TXXVPTRLEPLTILYYDSANNVVEQLSNDMVVE

SEQ ID NO: 13852 - protein, 36 aa, Artificial Sequence
  GFR-binding peptide
  MOD_RES (3), (4): Xaa is C or S
  MOD_RES (18), (19), (20), (21), (22): Xaa is A or G
  MOD_RES (23), (24), (25), (26): Xaa is A or G or is absent
PTXXVPTRLSAISILYLXXXXXXXXXLKNYQDMVVE

SEQ ID NO: 13853 - protein, 42 aa, Artificial Sequence; identical to SEQ ID NO: 6480
  GFR-binding peptide
  MOD_RES (7), (39), (41): Xaa is C or S

SEQ ID NO: 13854 - protein, 34 aa, Artificial Sequence
  GFR-binding peptide
  MOD_RES (3), (4): Xaa is C or S
KPXXAPTKLSPISVLFIDDSSNVIYKQYENMVVR

SEQ ID NO: 13855 - protein, 38 aa, Artificial Sequence
  GFR-binding peptide
  MOD_RES (6), (7), (38): Xaa is C or S
ASASPXXVPQDLSPISILFIVGRTPKVYKQYEMVVKSX

SEQ ID NO: 13856 - protein, 41 aa, Artificial Sequence; identical to SEQ ID NO: 6481
  GFR-binding peptide
  MOD_RES (6), (40): Xaa is C or S
  MOD_RES (20), (21), (22), (23), (24): Xaa is A or G
  MOD_RES (25), (26), (27), (28): Xaa is A or G or is absent

SEQ ID NO: 13857 - protein, 41 aa, Artificial Sequence; identical to SEQ ID NO: 6485
  GFR-binding peptide
  MOD_RES (5), (6), (40): Xaa is C or S
  MOD_RES (20), (21), (22), (23), (24): Xaa is A or G
  MOD_RES (25), (26), (27), (28): Xaa is A or G or is absent

SEQ ID NO: 13858 - protein, 37 aa, Artificial Sequence
  GFR-binding peptide
  MOD_RES (6), (7): Xaa is C or S
YVPKPXXAPTKLEPLTVLYYDDSSNVIEQLSNNMVVR

SEQ ID NO: 13859 - protein, 34 aa, Artificial Sequence; identical to SEQ ID NO: 6487
  GFR-binding peptide
  MOD_RES (1), (2), (34): Xaa is C or S

SEQ ID NO: 13860 - protein, 44 aa, Artificial Sequence; identical to SEQ ID NO: 6490
  GFR-binding peptide
  MOD_RES (6), (7), (41), (43): Xaa is C or S
  MOD_RES (21), (22), (23), (24), (25): Xaa is A or G
  MOD_RES (26), (27), (28), (29): Xaa is A or G or is absent

SEQ ID NO: 13861 - protein, 37 aa, Artificial Sequence
  GFR-binding peptide
  MOD_RES (1), (2), (34), (36): Xaa is C or S
XXAPTKLEPLTVLYYDDSSNVIEQLSNNMVVRSXGXH

SEQ ID NO: 13862 - protein, 38 aa, Artificial Sequence
  GFR-binding peptide
  MOD_RES (3), (4), (37): Xaa is C or S
  MOD_RES (18), (19), (20), (21), (22): Xaa is A or G
  MOD_RES (23), (24), (25), (26): Xaa is A or G or is absent
APXXVPQALSPISILFIXXXXXXXXXYKQYEMIVRSXK

SEQ ID NO: 13863 - protein, 38 aa, Artificial Sequence
  GFR-binding peptide
  MOD_RES (5), (6), (38): Xaa is C or S
IPKAXXVPTELEPLPMVYYDEYDKVVEQLSNEMVVEGX

SEQ ID NO: 13864 - protein, 32 aa, Artificial Sequence; identical to SEQ ID NO: 6491
  GFR-binding peptide
  MOD_RES (14), (15), (16), (17), (18): Xaa is A or G
  MOD_RES (19), (20), (21), (22): Xaa is A or G or is absent

SEQ ID NO: 13865 - protein, 33 aa, Artificial Sequence
  GFR-binding peptide
  MOD_RES (2), (3): Xaa is C or S
AXXVPTELEPLPMVYYDEYDKVVEQLSNEMVVE

SEQ ID NO: 13866 - protein, 38 aa, Artificial Sequence
  GFR-binding peptide
  MOD_RES (4), (5), (38): Xaa is C or S
  MOD_RES (19), (20), (21), (22), (23): Xaa is A or G
  MOD_RES (24), (25), (26), (27): Xaa is A or G or is absent
ASPXXVPQDLEPLTILYYXXXXXXXXXEQLSNMVVKSX

SEQ ID NO: 13867 - protein, 38 aa, Artificial Sequence
  GFR-binding peptide
  MOD_RES (4), (5), (36), (38): Xaa is C or S
AAPXXVPQALEPLTILYYVGRKPKVEQLSNMIVRSXKX

SEQ ID NO: 13868 - protein, 36 aa, Artificial Sequence
  GFR-binding peptide
  MOD_RES (3), (4): Xaa is C or S
  MOD_RES (18), (19), (20), (21), (22): Xaa is A or G
  MOD_RES (23), (24), (25), (26): Xaa is A or G or is absent
KPXXAPTQLEPLPVVYYXXXXXXXXXEQLSNNMVVR

SEQ ID NO: 13869 - protein, 33 aa, Artificial Sequence; identical to SEQ ID NO: 6498
  GFR-binding peptide
  MOD_RES (33), (33): Xaa is C or S
  MOD_RES (14), (15), (16), (17), (18): Xaa is A or G
  MOD_RES (19), (20), (21), (22): Xaa is A or G or is absent

SEQ ID NO: 13870 - protein, 35 aa, Artificial Sequence; identical to SEQ ID NO: 6500
  GFR-binding peptide
  MOD_RES (2), (3): Xaa is C or S
  MOD_RES (17), (18), (19), (20), (21): Xaa is A or G
  MOD_RES (22), (23), (24), (25): Xaa is A or G or is absent

SEQ ID NO: 13871 - protein, 34 aa, Artificial Sequence
  GFR-binding peptide
  MOD_RES (32), (34): Xaa is C or S
VPTELEPLPMVYYDEYDKVVEQLSNEMVVEGXGX

SEQ ID NO: 13872 - protein, 40 aa, Artificial Sequence; identical to SEQ ID NO: 6504
  GFR-binding peptide
  MOD_RES (5), (6), (37), (39): Xaa is C or S

SEQ ID NO: 13873 - protein, 35 aa, Artificial Sequence
  GFR-binding peptide
  MOD_RES (1), (32), (34): Xaa is C or S
XVPQDLSPISILFIVGRTPKVYKQYEMVVKSXKXS

SEQ ID NO: 13874 - protein, 39 aa, Artificial Sequence
  GFR-binding peptide
  MOD_RES (2), (3), (36), (38): Xaa is C or S
  MOD_RES (17), (18), (19), (20), (21): Xaa is A or G
  MOD_RES (22), (23), (24), (25): Xaa is A or G or is absent
PXXVPQDLEPLTILYYXXXXXXXXXEQLSNMVVKSXKXS

SEQ ID NO: 13875 - protein, 40 aa, Artificial Sequence
  GFR-binding peptide
  MOD_RES (4), (5), (38), (40): Xaa is C or S
  MOD_RES (19), (20), (21), (22), (23): Xaa is A or G
  MOD_RES (24), (25), (26), (27): Xaa is A or G or is absent
ASPXXVSQDLEPLPIVYYXXXXXXXXXEQLSNMIVKSXKX

SEQ ID NO: 13876 - protein, 36 aa, Artificial Sequence
  GFR-binding peptide
  MOD_RES (4), (5), (36): Xaa is C or S
ASPXXVSQDLEPLPIVYYIGKTPKIEQLSNMIVKSX

SEQ ID NO: 13877 - protein, 36 aa, Artificial Sequence; identical to SEQ ID NO: 6506
  GFR-binding peptide
  MOD_RES (2), (3), (36): Xaa is C or S
  MOD_RES (17), (18), (19), (20), (21): Xaa is A or G
  MOD_RES (22), (23), (24), (25): Xaa is A or G or is absent

SEQ ID NO: 13878 - protein, 40 aa, Artificial Sequence
  GFR-binding peptide
  MOD_RES (5), (6), (38), (40): Xaa is C or S
VPKPXXAPTKLEPLPVVYYDDSSNVIEQLSNNMVVRSXGX

SEQ ID NO: 13879 - protein, 41 aa, Artificial Sequence; identical to SEQ ID NO: 6507
  GFR-binding peptide
  MOD_RES (6), (7), (39), (41): Xaa is C or S

SEQ ID NO: 13880 - protein, 33 aa, Artificial Sequence; identical to SEQ ID NO: 6508
  GFR-binding peptide
  MOD_RES (1), (33): Xaa is C or S

SEQ ID NO: 13881 - protein, 40 aa, Artificial Sequence
  GFR-binding peptide
  MOD_RES (4), (5), (37), (39): Xaa is C or S
PKAXXVPTELEPLTMLYYDENEKVVEQLSNDMVVEGXGXR

SEQ ID NO: 13882 - protein, 36 aa, Artificial Sequence
  GFR-binding peptide
  MOD_RES (2), (3): Xaa is C or S
  MOD_RES (17), (18), (19), (20), (21): Xaa is A or G
  MOD_RES (22), (23), (24), (25): Xaa is A or G or is absent
AXXVPTELEPLTMLYYXXXXXXXXXEQLSNDMVVEG

SEQ ID NO: 13883 - protein, 31 aa, Artificial Sequence; identical to SEQ ID NO: 6513
  GFR-binding peptide
  MOD_RES (1), (1): Xaa is C or S

SEQ ID NO: 13884 - protein, 37 aa, Artificial Sequence; identical to SEQ ID NO: 6514
  GFR-binding peptide
  MOD_RES (6), (6): Xaa is C or S

SEQ ID NO: 13885 - protein, 35 aa, Artificial Sequence; identical to SEQ ID NO: 6515
  GFR-binding peptide
  MOD_RES (2), (2): Xaa is C or S
  MOD_RES (16), (17), (18), (19), (20): Xaa is A or G
  MOD_RES (21), (22), (23), (24): Xaa is A or G or is absent

SEQ ID NO: 13886 - protein, 35 aa, Artificial Sequence
  GFR-binding peptide
  MOD_RES (2), (3): Xaa is C or S
  MOD_RES (17), (18), (19), (20), (21): Xaa is A or G
  MOD_RES (22), (23), (24), (25): Xaa is A or G or is absent
PXXAPTQLEPLTVLYYXXXXXXXXXEQLSNNMVVR

SEQ ID NO: 13887 - protein, 41 aa, Artificial Sequence; identical to SEQ ID NO: 6518
  GFR-binding peptide
  MOD_RES (6), (7), (40): Xaa is C or S
  MOD_RES (21), (22), (23), (24), (25): Xaa is A or G
  MOD_RES (26), (27), (28), (29): Xaa is A or G or is absent

SEQ ID NO: 13888 - protein, 39 aa, Artificial Sequence; identical to SEQ ID NO: 6521
  GFR-binding peptide
  MOD_RES (2), (3), (36), (38): Xaa is C or S
  MOD_RES (17), (18), (19), (20), (21): Xaa is A or G
  MOD_RES (22), (23), (24), (25): Xaa is A or G or is absent

SEQ ID NO: 13889 - protein, 37 aa, Artificial Sequence; identical to SEQ ID NO: 6522
  GFR-binding peptide
  MOD_RES (4), (5), (37): Xaa is C or S

SEQ ID NO: 13890 - protein, 38 aa, Artificial Sequence; identical to SEQ ID NO: 6523
  GFR-binding peptide
  MOD_RES (5), (5): Xaa is C or S
  MOD_RES (19), (20), (21), (22), (23): Xaa is A or G
  MOD_RES (24), (25), (26), (27): Xaa is A or G or is absent

SEQ ID NO: 13891 - protein, 35 aa, Artificial Sequence
  GFR-binding peptide
  MOD_RES (1), (33), (35): Xaa is C or S
XVPTELEPLPMVYYDEYDKVVEQLSNEMVVEGXGX

SEQ ID NO: 13892 - protein, 38 aa, Artificial Sequence
  GFR-binding peptide
  MOD_RES (1), (35), (37): Xaa is C or S
  MOD_RES (15), (16), (17), (18), (19): Xaa is A or G
  MOD_RES (20), (21), (22), (23): Xaa is A or G or is absent
XAPTKLEPLPVVYYXXXXXXXXXEQLSNNMVVRSXGXH

SEQ ID NO: 13893 - protein, 37 aa, Artificial Sequence
  GFR-binding peptide
  MOD_RES (34), (36): Xaa is C or S
  MOD_RES (14), (15), (16), (17), (18): Xaa is A or G
  MOD_RES (19), (20), (21), (22): Xaa is A or G or is absent
VPTELEPLPMVYYXXXXXXXXXEQLSNDMVVEGXGXR

SEQ ID NO: 13894 - protein, 37 aa, Artificial Sequence; identical to SEQ ID NO: 6526
  GFR-binding peptide
  MOD_RES (6), (7): Xaa is C or S

SEQ ID NO: 13895 - protein, 36 aa, Artificial Sequence
  GFR-binding peptide
  MOD_RES (2), (34), (36): Xaa is C or S
TXAPTKLEPLTVLYYDDSSNVIEQLSNNMVVRSXGX

SEQ ID NO: 13896 - protein, 37 aa, Artificial Sequence; identical to SEQ ID NO: 6529
  GFR-binding peptide
  MOD_RES (5), (37): Xaa is C or S

SEQ ID NO: 13897 - protein, 32 aa, Artificial Sequence; identical to SEQ ID NO: 6530
  GFR-binding peptide
  MOD_RES (32), (32): Xaa is C or S

SEQ ID NO: 13898 - protein, 39 aa, Artificial Sequence
  GFR-binding peptide
  MOD_RES (6), (7): Xaa is C or S
  MOD_RES (21), (22), (23), (24), (25): Xaa is A or G
  MOD_RES (26), (27), (28), (29): Xaa is A or G or is absent
ASASPXXVSQDLEPLPIVYYXXXXXXXXXEQLSNMIVKS

SEQ ID NO: 13899 - protein, 39 aa, Artificial Sequence; identical to SEQ ID NO: 6535
  GFR-binding peptide
  MOD_RES (4), (5), (36), (38): Xaa is C or S

SEQ ID NO: 13900 - protein, 38 aa, Artificial Sequence
  GFR-binding peptide
  MOD_RES (5), (6): Xaa is C or S
  MOD_RES (20), (21), (22), (23), (24): Xaa is A or G
  MOD_RES (25), (26), (27), (28): Xaa is A or G or is absent
SASPXXVPQDLEPLTILYYXXXXXXXXXEQLSNMVVKS

SEQ ID NO: 13901 - protein, 33 aa, Artificial Sequence
  GFR-binding peptide
  MOD_RES (1), (1): Xaa is C or S
  MOD_RES (15), (16), (17), (18), (19): Xaa is A or G
  MOD_RES (20), (21), (22), (23): Xaa is A or G or is absent
XVPQDLSPISILFIXXXXXXXXXYKQYEMVVKS

SEQ ID NO: 13902 - protein, 36 aa, Artificial Sequence
  GFR-binding peptide
  MOD_RES (2), (3), (35): Xaa is C or S
TXXVPTRLNAISILYFDSANNVVLKKYRDMVVESXG

SEQ ID NO: 13903 - protein, 37 aa, Artificial Sequence
  GFR-binding peptide
  MOD_RES (34), (36): Xaa is C or S
  MOD_RES (14), (15), (16), (17), (18): Xaa is A or G
  MOD_RES (19), (20), (21), (22): Xaa is A or G or is absent
APTKLEPLPVVYYXXXXXXXXXEQLSNNMVVRSXGXH

SEQ ID NO: 13904 - protein, 36 aa, Artificial Sequence; identical to SEQ ID NO: 6540
  GFR-binding peptide
  MOD_RES (34), (36): Xaa is C or S
  MOD_RES (14), (15), (16), (17), (18): Xaa is A or G
  MOD_RES (19), (20), (21), (22): Xaa is A or G or is absent

SEQ ID NO: 13905 - protein, 38 aa, Artificial Sequence; identical to SEQ ID NO: 6541
  GFR-binding peptide
  MOD_RES (1), (2), (36), (38): Xaa is C or S
  MOD_RES (16), (17), (18), (19), (20): Xaa is A or G
  MOD_RES (21), (22), (23), (24): Xaa is A or G or is absent

SEQ ID NO: 13906 - protein, 38 aa, Artificial Sequence
  GFR-binding peptide
  MOD_RES (2), (3), (37): Xaa is C or S
  MOD_RES (17), (18), (19), (20), (21): Xaa is A or G
  MOD_RES (22), (23), (24), (25): Xaa is A or G or is absent
AXXVPTELSPISMLFIXXXXXXXXXYKQYEEMVVEGXG

SEQ ID NO: 13907 - protein, 40 aa, Artificial Sequence
  GFR-binding peptide
  MOD_RES (4), (5), (38), (40): Xaa is C or S
  MOD_RES (19), (20), (21), (22), (23): Xaa is A or G
  MOD_RES (24), (25), (26), (27): Xaa is A or G or is absent
AAPXXVPQALEPLPIVYYXXXXXXXXXEQLSNMIVRSXKX

SEQ ID NO: 13908 - protein, 35 aa, Artificial Sequence; identical to SEQ ID NO: 6542
  GFR-binding peptide
  MOD_RES (1), (32), (34): Xaa is C or S

SEQ ID NO: 13909 - protein, 37 aa, Artificial Sequence; identical to SEQ ID NO: 6543
  GFR-binding peptide
  MOD_RES (4), (5), (36): Xaa is C or S

SEQ ID NO: 13910 - protein, 35 aa, Artificial Sequence; identical to SEQ ID NO: 6544
  GFR-binding peptide
  MOD_RES (1), (2), (33), (35): Xaa is C or S

SEQ ID NO: 13911 - protein, 37 aa, Artificial Sequence; identical to SEQ ID NO: 6546
  GFR-binding peptide
  MOD_RES (4), (5): Xaa is C or S
  MOD_RES (19), (20), (21), (22), (23): Xaa is A or G
  MOD_RES (24), (25), (26), (27): Xaa is A or G or is absent

SEQ ID NO: 13912 - protein, 37 aa, Artificial Sequence
  GFR-binding peptide
  MOD_RES (6), (7): Xaa is C or S
SIPKAXXVPTELSPISMLFIDEYDKVVYKQYEEMVVE

SEQ ID NO: 13913 - protein, 36 aa, Artificial Sequence; identical to SEQ ID NO: 6547
  GFR-binding peptide
  MOD_RES (1), (35): Xaa is C or S
  MOD_RES (15), (16), (17), (18), (19): Xaa is A or G
  MOD_RES (20), (21), (22), (23): Xaa is A or G or is absent

SEQ ID NO: 13914 - protein, 35 aa, Artificial Sequence
  GFR-binding peptide
  MOD_RES (1), (32), (34): Xaa is C or S
XVPQALEPLTILYYVGRKPKVEQLSNMIVRSXKXS

SEQ ID NO: 13915 - protein, 35 aa, Artificial Sequence
  GFR-binding peptide
  MOD_RES (4), (5): Xaa is C or S
PKPXXAPTQLSPISVLFIDDSSNVIYKQYENMVVR

SEQ ID NO: 13916 - protein, 40 aa, Artificial Sequence
  GFR-binding peptide
  MOD_RES (4), (5), (39): Xaa is C or S
  MOD_RES (19), (20), (21), (22), (23): Xaa is A or G
  MOD_RES (24), (25), (26), (27): Xaa is A or G or is absent
PKAXXVPTELEPLTMLYYXXXXXXXXXEQLSNDMVVEGXG

SEQ ID NO: 13917 - protein, 35 aa, Artificial Sequence
  GFR-binding peptide
  MOD_RES (1), (35): Xaa is C or S
  MOD_RES (15), (16), (17), (18), (19): Xaa is A or G
  MOD_RES (20), (21), (22), (23): Xaa is A or G or is absent
XVPTRLNAISILYFXXXXXXXXXLKKYRDMVVESX

SEQ ID NO: 13918 - protein, 33 aa, Artificial Sequence; identical to SEQ ID NO: 6550
  GFR-binding peptide
  MOD_RES (33), (33): Xaa is C or S
  MOD_RES (14), (15), (16), (17), (18): Xaa is A or G
  MOD_RES (19), (20), (21), (22): Xaa is A or G or is absent

SEQ ID NO: 13919 - protein, 42 aa, Artificial Sequence
  GFR-binding peptide
  MOD_RES (4), (5), (39), (41): Xaa is C or S
  MOD_RES (19), (20), (21), (22), (23): Xaa is A or G
  MOD_RES (24), (25), (26), (27): Xaa is A or G or is absent
PKPXXAPTKLEPLTVLYYXXXXXXXXXEQLSNNMVVRSXGXH

SEQ ID NO: 13920 - protein, 41 aa, Artificial Sequence
  GFR-binding peptide
  MOD_RES (6), (7), (41): Xaa is C or S
  MOD_RES (21), (22), (23), (24), (25): Xaa is A or G
  MOD_RES (26), (27), (28), (29): Xaa is A or G or is absent
KIPKAXXVPTELSPISMLFIXXXXXXXXXYKQYEDMVVEGX

SEQ ID NO: 13921 - protein, 35 aa, Artificial Sequence
  GFR-binding peptide
  MOD_RES (1), (35): Xaa is C or S
  MOD_RES (15), (16), (17), (18), (19): Xaa is A or G
  MOD_RES (20), (21), (22), (23): Xaa is A or G or is absent
XAPTQLSPISVLFIXXXXXXXXXYKQYENMVVRAX

SEQ ID NO: 13922 - protein, 34 aa, Artificial Sequence; identical to SEQ ID NO: 6551
  GFR-binding peptide
  MOD_RES (4), (4): Xaa is C or S

SEQ ID NO: 13923 - protein, 36 aa, Artificial Sequence
  GFR-binding peptide
  MOD_RES (4), (4): Xaa is C or S
  MOD_RES (18), (19), (20), (21), (22): Xaa is A or G
  MOD_RES (23), (24), (25), (26): Xaa is A or G or is absent
KPTXAPTKLSPISVLFIXXXXXXXXXYKQYENMVVR

SEQ ID NO: 13924 - protein, 38 aa, Artificial Sequence
  GFR-binding peptide
  MOD_RES (4), (5), (36), (38): Xaa is C or S
ASPXXVSQDLEPLPIVYYIGKTPKIEQLSNMIVKSXKX

SEQ ID NO: 13925 - protein, 38 aa, Artificial Sequence
  GFR-binding peptide
  MOD_RES (4), (5): Xaa is C or S
  MOD_RES (19), (20), (21), (22), (23): Xaa is A or G
  MOD_RES (24), (25), (26), (27): Xaa is A or G or is absent
PPTXXVPTRLSAISILYLXXXXXXXXXLKNYQDMVVES

SEQ ID NO: 13926 - protein, 33 aa, Artificial Sequence
  GFR-binding peptide
  MOD_RES (2), (3): Xaa is C or S
PXXAPTQLEPLTVLYYDDSSNVIEQLSNNMVVR

SEQ ID NO: 13927 - protein, 38 aa, Artificial Sequence
  GFR-binding peptide
  MOD_RES (4), (5): Xaa is C or S
  MOD_RES (19), (20), (21), (22), (23): Xaa is A or G
  MOD_RES (24), (25), (26), (27): Xaa is A or G or is absent
PKPXXAPTQLEPLPVVYYXXXXXXXXXEQLSNNMVVRA

SEQ ID NO: 13928 - protein, 36 aa, Artificial Sequence; identical to SEQ ID NO: 6558
  GFR-binding peptide
  MOD_RES (1), (34), (36): Xaa is C or S
  MOD_RES (15), (16), (17), (18), (19): Xaa is A or G
  MOD_RES (20), (21), (22), (23): Xaa is A or G or is absent

SEQ ID NO: 13929 - protein, 34 aa, Artificial Sequence
  GFR-binding peptide
  MOD_RES (1), (32), (34): Xaa is C or S
XVPQALEPLTILYYVGRKPKVEQLSNMIVRSXKX

SEQ ID NO: 13930 - protein, 39 aa, Artificial Sequence
  GFR-binding peptide
  MOD_RES (3), (4), (36), (38): Xaa is C or S
PTXXVPTRLEPLPIVYYDSANNVVEQLSNDMVVESXGXR

SEQ ID NO: 13931 - protein, 39 aa, Artificial Sequence
  GFR-binding peptide
  MOD_RES (3), (4), (38): Xaa is C or S
  MOD_RES (18), (19), (20), (21), (22): Xaa is A or G
  MOD_RES (23), (24), (25), (26): Xaa is A or G or is absent
KPXXAPTKLEPLPVVYYXXXXXXXXXEQLSNNMVVRSXG

SEQ ID NO: 13932 - protein, 38 aa, Artificial Sequence
  GFR-binding peptide
  MOD_RES (6), (7): Xaa is C or S
TVPKPXXAPTQLSPISVLFIDDSSNVIYKQYENMVVRA

SEQ ID NO: 13933 - protein, 31 aa, Artificial Sequence
  GFR-binding peptide
VPTRLEPLPIVYYDSANNVVEQLSNDMVVES

SEQ ID NO: 13934 - protein, 41 aa, Artificial Sequence
  GFR-binding peptide
  MOD_RES (5), (6), (38), (40): Xaa is C or S
IPKAXXVPTELEPLTMLYYDENEKVVEQLSNDMVVEGXGXR

SEQ ID NO: 13935 - protein, 35 aa, Artificial Sequence
  GFR-binding peptide
  MOD_RES (3), (4): Xaa is C or S
PTXXVPTRLEPLPIVYYDSANNVVEQLSNDMVVES

SEQ ID NO: 13936 - protein, 35 aa, Artificial Sequence; identical to SEQ ID NO: 6562
  GFR-binding peptide
  MOD_RES (4), (4): Xaa is C or S

SEQ ID NO: 13937 - protein, 31 aa, Artificial Sequence
  GFR-binding peptide
  MOD_RES (1), (1): Xaa is C or S
XVPQALEPLTILYYVGRKPKVEQLSNMIVRS

SEQ ID NO: 13938 - protein, 38 aa, Artificial Sequence
  GFR-binding peptide
  MOD_RES (5), (6): Xaa is C or S
  MOD_RES (20), (21), (22), (23), (24): Xaa is A or G
  MOD_RES (25), (26), (27), (28): Xaa is A or G or is absent
IPKAXXVPTELEPLPMVYYXXXXXXXXXEQLSNEMVVE

SEQ ID NO: 13939 - protein, 39 aa, Artificial Sequence
  GFR-binding peptide
  MOD_RES (6), (7): Xaa is C or S
  MOD_RES (21), (22), (23), (24), (25): Xaa is A or G
  MOD_RES (26), (27), (28), (29): Xaa is A or G or is absent
STPPTXXVPTRLSPISILFIXXXXXXXXXYKQYEDMVVE

SEQ ID NO: 13940 - protein, 42 aa, Artificial Sequence
  GFR-binding peptide
  MOD_RES (5), (6), (40), (42): Xaa is C or S
  MOD_RES (20), (21), (22), (23), (24): Xaa is A or G
  MOD_RES (25), (26), (27), (28): Xaa is A or G or is absent
IPKAXXVPTELEPLPMVYYXXXXXXXXXEQLSNDMVVEGXGX

SEQ ID NO: 13941 - protein, 34 aa, Artificial Sequence
  GFR-binding peptide
  MOD_RES (1), (32), (34): Xaa is C or S
XVSQDLEPLPIVYYIGKTPKIEQLSNMIVKSXKX

SEQ ID NO: 13942 - protein, 36 aa, Artificial Sequence
  GFR-binding peptide
  MOD_RES (3), (4): Xaa is C or S
  MOD_RES (18), (19), (20), (21), (22): Xaa is A or G
  MOD_RES (23), (24), (25), (26): Xaa is A or G or is absent
SPXXVPQDLEPLPIVYYXXXXXXXXXEQLSNMVVKS

SEQ ID NO: 13943 - protein, 38 aa, Artificial Sequence
  GFR-binding peptide
  MOD_RES (4), (5): Xaa is C or S
  MOD_RES (19), (20), (21), (22), (23): Xaa is A or G
  MOD_RES (24), (25), (26), (27): Xaa is A or G or is absent
PKAXXVPTELSPISMLFIXXXXXXXXXYKQYEDMVVEG

SEQ ID NO: 13944 - protein, 40 aa, Artificial Sequence
  GFR-binding peptide
  MOD_RES (2), (3), (37), (39): Xaa is C or S
  MOD_RES (17), (18), (19), (20), (21): Xaa is A or G
  MOD_RES (22), (23), (24), (25): Xaa is A or G or is absent
AXXVPTELEPLTMLYYXXXXXXXXXEQLSNDMVVEGXGXR

SEQ ID NO: 13945 - protein, 41 aa, Artificial Sequence; identical to SEQ ID NO: 6574
  GFR-binding peptide
  MOD_RES (6), (7), (41): Xaa is C or S
  MOD_RES (21), (22), (23), (24), (25): Xaa is A or G
  MOD_RES (26), (27), (28), (29): Xaa is A or G or is absent

SEQ ID NO: 13946 - protein, 34 aa, Artificial Sequence; identical to SEQ ID NO: 6575
  GFR-binding peptide
  MOD_RES (31), (33): Xaa is C or S

SEQ ID NO: 13947 - protein, 39 aa, Artificial Sequence
  GFR-binding peptide
  MOD_RES (4), (5), (39): Xaa is C or S
  MOD_RES (19), (20), (21), (22), (23): Xaa is A or G
  MOD_RES (24), (25), (26), (27): Xaa is A or G or is absent
PKAXXVPTELEPLPMVYYXXXXXXXXXEQLSNEMVVEGX

SEQ ID NO: 13948 - protein, 41 aa, Artificial Sequence
  GFR-binding peptide
  MOD_RES (5), (6), (38), (40): Xaa is C or S
VPKPXXAPTKLSPISVLFIDDSSNVIYKQYENMVVRSXGXH

SEQ ID NO: 13949 - protein, 35 aa, Artificial Sequence
  GFR-binding peptide
  MOD_RES (3), (4), (35): Xaa is C or S
APXXVPQALSPISILFIVGRKPKVYKQYEMIVRSX

SEQ ID NO: 13950 - protein, 30 aa, Artificial Sequence; identical to SEQ ID NO: 6580
  GFR-binding peptide

SEQ ID NO: 13951 - protein, 39 aa, Artificial Sequence
  GFR-binding peptide
  MOD_RES (5), (6): Xaa is C or S
  MOD_RES (20), (21), (22), (23), (24): Xaa is A or G
  MOD_RES (25), (26), (27), (28): Xaa is A or G or is absent
VPKPXXAPTKLEPLTVLYYXXXXXXXXXEQLSNNMVVRS

SEQ ID NO: 13952 - protein, 41 aa, Artificial Sequence
  GFR-binding peptide
  MOD_RES (6), (7), (41): Xaa is C or S
  MOD_RES (21), (22), (23), (24), (25): Xaa is A or G
  MOD_RES (26), (27), (28), (29): Xaa is A or G or is absent
YVPKPXXAPTKLSPISVLFIXXXXXXXXXYKQYENMVVRSX

SEQ ID NO: 13953 - protein, 33 aa, Artificial Sequence
  GFR-binding peptide
  MOD_RES (1), (2): Xaa is C or S
XXVPTRLSAISILYLDSANNVVLKNYQDMVVES

SEQ ID NO: 13954 - protein, 37 aa, Artificial Sequence
  GFR-binding peptide
  MOD_RES (3), (4): Xaa is C or S
  MOD_RES (18), (19), (20), (21), (22): Xaa is A or G
  MOD_RES (23), (24), (25), (26): Xaa is A or G or is absent
KPXXAPTKLSPISVLFIXXXXXXXXXYKQYENMVVRS

SEQ ID NO: 13955 - protein, 34 aa, Artificial Sequence; identical to SEQ ID NO: 6585
  GFR-binding peptide
  MOD_RES (34), (34): Xaa is C or S
  MOD_RES (14), (15), (16), (17), (18): Xaa is A or G
  MOD_RES (19), (20), (21), (22): Xaa is A or G or is absent

SEQ ID NO: 13956 - protein, 34 aa, Artificial Sequence; identical to SEQ ID NO: 6589
  GFR-binding peptide
  MOD_RES (1), (1): Xaa is C or S
  MOD_RES (15), (16), (17), (18), (19): Xaa is A or G
  MOD_RES (20), (21), (22), (23): Xaa is A or G or is absent

SEQ ID NO: 13957 - protein, 34 aa, Artificial Sequence
  GFR-binding peptide
  MOD_RES (4), (4): Xaa is C or S
KPTXAPTKLEPLPVVYYDDSSNVIEQLSNNMVVR

SEQ ID NO: 13958 - protein, 35 aa, Artificial Sequence
  GFR-binding peptide
  MOD_RES (1), (2): Xaa is C or S
  MOD_RES (16), (17), (18), (19), (20): Xaa is A or G
  MOD_RES (21), (22), (23), (24): Xaa is A or G or is absent
XXAPTKLEPLPVVYYXXXXXXXXXEQLSNNMVVRS

SEQ ID NO: 13959 - protein, 37 aa, Artificial Sequence
  GFR-binding peptide
  MOD_RES (4), (4): Xaa is C or S
  MOD_RES (18), (19), (20), (21), (22): Xaa is A or G
  MOD_RES (23), (24), (25), (26): Xaa is A or G or is absent
KPTXAPTKLSPISVLFIXXXXXXXXXYKQYENMVVRS

SEQ ID NO: 13960 - protein, 37 aa, Artificial Sequence
  GFR-binding peptide
  MOD_RES (7), (7): Xaa is C or S
HVTKPTXAPTKLEPLPVVYYDDSSNVIEQLSNNMVVR

SEQ ID NO: 13961 - protein, 35 aa, Artificial Sequence; identical to SEQ ID NO: 6594
  GFR-binding peptide
  MOD_RES (1), (2): Xaa is C or S
  MOD_RES (16), (17), (18), (19), (20): Xaa is A or G
  MOD_RES (21), (22), (23), (24): Xaa is A or G or is absent

SEQ ID NO: 13962 - protein, 32 aa, Artificial Sequence
  GFR-binding peptide
  MOD_RES (1), (1): Xaa is C or S
XVPTRLNAISILYFDSANNVVLKKYRDMVVES

SEQ ID NO: 13963 - protein, 41 aa, Artificial Sequence
  GFR-binding peptide
  MOD_RES (6), (7), (40): Xaa is C or S
  MOD_RES (21), (22), (23), (24), (25): Xaa is A or G
  MOD_RES (26), (27), (28), (29): Xaa is A or G or is absent
ASASPXXVPQDLEPLPIVYYXXXXXXXXXEQLSNMVVKSXK

SEQ ID NO: 13964 - protein, 34 aa, Artificial Sequence
  GFR-binding peptide
  MOD_RES (1), (2): Xaa is C or S
  MOD_RES (16), (17), (18), (19), (20): Xaa is A or G
  MOD_RES (21), (22), (23), (24): Xaa is A or G or is absent
XXVPTELSPISMLFIXXXXXXXXXYKQYEDMVVE

SEQ ID NO: 13965 - protein, 36 aa, Artificial Sequence; identical to SEQ ID NO: 6602
  GFR-binding peptide
  MOD_RES (1), (2), (35): Xaa is C or S
  MOD_RES (16), (17), (18), (19), (20): Xaa is A or G
  MOD_RES (21), (22), (23), (24): Xaa is A or G or is absent

SEQ ID NO: 13966 - protein, 34 aa, Artificial Sequence
  GFR-binding peptide
  MOD_RES (2), (34): Xaa is C or S
TXAPTKLEPLTVLYYDDSSNVIEQLSNNMVVRSX

SEQ ID NO: 13967 - protein, 42 aa, Artificial Sequence
  GFR-binding peptide
  MOD_RES (6), (7), (41): Xaa is C or S
  MOD_RES (21), (22), (23), (24), (25): Xaa is A or G
  MOD_RES (26), (27), (28), (29): Xaa is A or G or is absent
STPPTXXVPTRLEPLPIVYYXXXXXXXXXEQLSNDMVVESXG

SEQ ID NO: 13968 - protein, 42 aa, Artificial Sequence
  GFR-binding peptide
  MOD_RES (6), (7), (41): Xaa is C or S
  MOD_RES (21), (22), (23), (24), (25): Xaa is A or G
  MOD_RES (26), (27), (28), (29): Xaa is A or G or is absent
SIPKAXXVPTELSPISMLFIXXXXXXXXXYKQYEEMVVEGXG

SEQ ID NO: 13969 - protein, 36 aa, Artificial Sequence
  GFR-binding peptide
  MOD_RES (3), (4), (36): Xaa is C or S
KAXXVPTELEPLTMLYYDENEKVVEQLSNDMVVEGX

SEQ ID NO: 13970 - protein, 33 aa, Artificial Sequence
  GFR-binding peptide
  MOD_RES (2), (3): Xaa is C or S
PXXVSQDLSPISILFIIGKTPKIYKQYEMIVKS

SEQ ID NO: 13971 - protein, 37 aa, Artificial Sequence
  GFR-binding peptide
  MOD_RES (5), (6), (37): Xaa is C or S
SASPXXVSQDLSPISILFIIGKTPKIYKQYEMIVKSX

SEQ ID NO: 13972 - protein, 37 aa, Artificial Sequence; identical to SEQ ID NO: 6607
  GFR-binding peptide
  MOD_RES (4), (5): Xaa is C or S
  MOD_RES (19), (20), (21), (22), (23): Xaa is A or G
  MOD_RES (24), (25), (26), (27): Xaa is A or G or is absent

SEQ ID NO: 13973 - protein, 41 aa, Artificial Sequence
  GFR-binding peptide
  MOD_RES (6), (7), (41): Xaa is C or S
  MOD_RES (21), (22), (23), (24), (25): Xaa is A or G
  MOD_RES (26), (27), (28), (29): Xaa is A or G or is absent
STPPTXXVPTRLSAISILYLXXXXXXXXXLKNYQDMVVESX

SEQ ID NO: 13974 - protein, 36 aa, Artificial Sequence; identical to SEQ ID NO: 6608
  GFR-binding peptide
  MOD_RES (2), (3), (35): Xaa is C or S

SEQ ID NO: 13975 - protein, 30 aa, Artificial Sequence; identical to SEQ ID NO: 6610
  GFR-binding peptide

SEQ ID NO: 13976 - protein, 38 aa, Artificial Sequence
  GFR-binding peptide
  MOD_RES (1), (2), (36), (38): Xaa is C or S
  MOD_RES (16), (17), (18), (19), (20): Xaa is A or G
  MOD_RES (21), (22), (23), (24): Xaa is A or G or is absent
XXAPTQLEPLTVLYYXXXXXXXXXEQLSNNMVVRAXGX

SEQ ID NO: 13977 - protein, 33 aa, Artificial Sequence; identical to SEQ ID NO: 6611
  GFR-binding peptide
  MOD_RES (1), (2): Xaa is C or S

SEQ ID NO: 13978 - protein, 32 aa, Artificial Sequence
  GFR-binding peptide
  MOD_RES (14), (15), (16), (17), (18): Xaa is A or G
  MOD_RES (19), (20), (21), (22): Xaa is A or G or is absent
VPTRLNAISILYFXXXXXXXXXLKKYRDMVVE

SEQ ID NO: 13979 - protein, 34 aa, Artificial Sequence
  GFR-binding peptide
  MOD_RES (1), (1): Xaa is C or S
  MOD_RES (15), (16), (17), (18), (19): Xaa is A or G
  MOD_RES (20), (21), (22), (23): Xaa is A or G or is absent
XAPTKLEPLPVVYYXXXXXXXXXEQLSNNMVVRS

SEQ ID NO: 13980 - protein, 31 aa, Artificial Sequence; identical to SEQ ID NO: 6616
  GFR-binding peptide
  MOD_RES (31), (31): Xaa is C or S

SEQ ID NO: 13981 - protein, 40 aa, Artificial Sequence
  GFR-binding peptide
  MOD_RES (7), (39): Xaa is C or S
HVTKPTXAPTKLEPLPVVYYDDSSNVIEQLSNNMVVRSXG

SEQ ID NO: 13982 - protein, 39 aa, Artificial Sequence; identical to SEQ ID NO: 6617
  GFR-binding peptide
  MOD_RES (5), (6), (39): Xaa is C or S
  MOD_RES (20), (21), (22), (23), (24): Xaa is A or G
  MOD_RES (25), (26), (27), (28): Xaa is A or G or is absent

SEQ ID NO: 13983 - protein, 40 aa, Artificial Sequence
  GFR-binding peptide
  MOD_RES (5), (6), (40): Xaa is C or S
  MOD_RES (20), (21), (22), (23), (24): Xaa is A or G
  MOD_RES (25), (26), (27), (28): Xaa is A or G or is absent
VPKPXXAPTQLEPLPVVYYXXXXXXXXXEQLSNNMVVRAX

SEQ ID NO: 13984 - protein, 31 aa, Artificial Sequence
  GFR-binding peptide
APTKLEPLTVLYYDDSSNVIEQLSNNMVVRS

SEQ ID NO: 13985 - protein, 35 aa, Artificial Sequence
  GFR-binding peptide
  MOD_RES (34), (34): Xaa is C or S
  MOD_RES (14), (15), (16), (17), (18): Xaa is A or G
  MOD_RES (19), (20), (21), (22): Xaa is A or G or is absent
VPTELSPISMLFIXXXXXXXXXYKQYEDMVVEGXG

SEQ ID NO: 13986 - protein, 37 aa, Artificial Sequence
  GFR-binding peptide
  MOD_RES (3), (4): Xaa is C or S
  MOD_RES (18), (19), (20), (21), (22): Xaa is A or G
  MOD_RES (23), (24), (25), (26): Xaa is A or G or is absent
PTXXVPTRLSPISILFIXXXXXXXXXYKQYEDMVVES

SEQ ID NO: 13987 - protein, 37 aa, Artificial Sequence
  GFR-binding peptide
  MOD_RES (3), (4): Xaa is C or S
  MOD_RES (18), (19), (20), (21), (22): Xaa is A or G
  MOD_RES (23), (24), (25), (26): Xaa is A or G or is absent
KAXXVPTELEPLPMVYYXXXXXXXXXEQLSNDMVVEG

SEQ ID NO: 13988 - protein, 38 aa, Artificial Sequence
  GFR-binding peptide
  MOD_RES (1), (35), (37): Xaa is C or S
  MOD_RES (15), (16), (17), (18), (19): Xaa is A or G
  MOD_RES (20), (21), (22), (23): Xaa is A or G or is absent
XVPTELEPLPMVYYXXXXXXXXXEQLSNDMVVEGXGXR

SEQ ID NO: 13989 - protein, 41 aa, Artificial Sequence; identical to SEQ ID NO: 6621
  GFR-binding peptide
  MOD_RES (4), (5), (38), (40): Xaa is C or S
  MOD_RES (19), (20), (21), (22), (23): Xaa is A or G
  MOD_RES (24), (25), (26), (27): Xaa is A or G or is absent

SEQ ID NO: 13990 - protein, 39 aa, Artificial Sequence; identical to SEQ ID NO: 6623
  GFR-binding peptide
  MOD_RES (6), (7): Xaa is C or S
  MOD_RES (21), (22), (23), (24), (25): Xaa is A or G
  MOD_RES (26), (27), (28), (29): Xaa is A or G or is absent

SEQ ID NO: 13991 - protein, 36 aa, Artificial Sequence
  GFR-binding peptide
  MOD_RES (1), (2), (34), (36): Xaa is C or S
XXAPTQLEPLTVLYYDDSSNVIEQLSNNMVVRAXGX

SEQ ID NO: 13992 - protein, 39 aa, Artificial Sequence
  GFR-binding peptide
  MOD_RES (5), (6): Xaa is C or S
  MOD_RES (20), (21), (22), (23), (24): Xaa is A or G
  MOD_RES (25), (26), (27), (28): Xaa is A or G or is absent
IPKAXXVPTELSPISMLFIXXXXXXXXXYKQYEEMVVEG

SEQ ID NO: 13993 - protein, 34 aa, Artificial Sequence
  GFR-binding peptide
  MOD_RES (1), (2): Xaa is C or S
  MOD_RES (16), (17), (18), (19), (20): Xaa is A or G
  MOD_RES (21), (22), (23), (24): Xaa is A or G or is absent
XXVSQDLSPISILFIXXXXXXXXXYKQYEMIVKS

SEQ ID NO: 13994 - protein, 38 aa, Artificial Sequence
  GFR-binding peptide
  MOD_RES (4), (5), (38): Xaa is C or S
  MOD_RES (19), (20), (21), (22), (23): Xaa is A or G
  MOD_RES (24), (25), (26), (27): Xaa is A or G or is absent
AAPXXVPQALSPISILFIXXXXXXXXXYKQYEMIVRSX

SEQ ID NO: 13995 - protein, 42 aa, Artificial Sequence
  GFR-binding peptide
  MOD_RES (5), (6), (40), (42): Xaa is C or S
  MOD_RES (20), (21), (22), (23), (24): Xaa is A or G
  MOD_RES (25), (26), (27), (28): Xaa is A or G or is absent
IPKAXXVPTELEPLPMVYYXXXXXXXXXEQLSNEMVVEGXGX

SEQ ID NO: 13996 - protein, 30 aa, Artificial Sequence
  GFR-binding peptide
VPTELEPLTMLYYDEYDKVVEQLSNEMVVE

SEQ ID NO: 13997 - protein, 37 aa, Artificial Sequence
  GFR-binding peptide
  MOD_RES (6), (7): Xaa is C or S
YVPKPXXAPTKLEPLPVVYYDDSSNVIEQLSNNMVVR

SEQ ID NO: 13998 - protein, 36 aa, Artificial Sequence
  GFR-binding peptide
  MOD_RES (1), (33), (35): Xaa is C or S
XAPTKLEPLTVLYYDDSSNVIEQLSNNMVVRSXGXH

SEQ ID NO: 13999 - protein, 40 aa, Artificial Sequence
  GFR-binding peptide
  MOD_RES (6), (7), (39): Xaa is C or S
STPPTXXVPTRLEPLTILYYDSANNVVEQLSNDMVVESXG

SEQ ID NO: 14000 - protein, 43 aa, Artificial Sequence
  GFR-binding peptide
  MOD_RES (6), (7), (40), (42): Xaa is C or S
  MOD_RES (21), (22), (23), (24), (25): Xaa is A or G
  MOD_RES (26), (27), (28), (29): Xaa is A or G or is absent
ASASPXXVPQDLEPLTILYYXXXXXXXXXEQLSNMVVKSXKXS

SEQ ID NO: 14001 - protein, 40 aa, Artificial Sequence
  GFR-binding peptide
  MOD_RES (4), (5), (39): Xaa is C or S
  MOD_RES (19), (20), (21), (22), (23): Xaa is A or G
  MOD_RES (24), (25), (26), (27): Xaa is A or G or is absent
PPTXXVPTRLSAISILYLXXXXXXXXXLKNYQDMVVESXG

SEQ ID NO: 14002 - protein, 35 aa, Artificial Sequence
  GFR-binding peptide
  MOD_RES (1), (2), (33), (35): Xaa is C or S
XXVPQALSPISILFIVGRKPKVYKQYEMIVRSXKX

SEQ ID NO: 14003 - protein, 37 aa, Artificial Sequence; identical to SEQ ID NO: 6632
  GFR-binding peptide
  MOD_RES (2), (3), (37): Xaa is C or S
  MOD_RES (17), (18), (19), (20), (21): Xaa is A or G
  MOD_RES (22), (23), (24), (25): Xaa is A or G or is absent

SEQ ID NO: 14004 - protein, 41 aa, Artificial Sequence
  GFR-binding peptide
  MOD_RES (5), (6), (39), (41): Xaa is C or S
  MOD_RES (20), (21), (22), (23), (24): Xaa is A or G
  MOD_RES (25), (26), (27), (28): Xaa is A or G or is absent
SAAPXXVPQALSPISILFIXXXXXXXXXYKQYEMIVRSXKX

SEQ ID NO: 14005 - protein, 36 aa, Artificial Sequence
  GFR-binding peptide
  MOD_RES (5), (5): Xaa is C or S
TKPTXAPTKLEPLPVVYYDDSSNVIEQLSNNMVVRS

SEQ ID NO: 14006 - protein, 40 aa, Artificial Sequence; identical to SEQ ID NO: 6635
  GFR-binding peptide
  MOD_RES (6), (7), (40): Xaa is C or S
  MOD_RES (21), (22), (23), (24), (25): Xaa is A or G
  MOD_RES (26), (27), (28), (29): Xaa is A or G or is absent

SEQ ID NO: 14007 - protein, 35 aa, Artificial Sequence
  GFR-binding peptide
  MOD_RES (1), (2), (33), (35): Xaa is C or S
XXVSQDLSPISILFIIGKTPKIYKQYEMIVKSXKX

SEQ ID NO: 14008 - protein, 36 aa, Artificial Sequence
  GFR-binding peptide
  MOD_RES (3), (4): Xaa is C or S
  MOD_RES (18), (19), (20), (21), (22): Xaa is A or G
  MOD_RES (23), (24), (25), (26): Xaa is A or G or is absent
SPXXVPQDLSPISILFIXXXXXXXXXYKQYEMVVKS

SEQ ID NO: 14009 - protein, 32 aa, Artificial Sequence; identical to SEQ ID NO: 6637
  GFR-binding peptide
  MOD_RES (14), (15), (16), (17), (18): Xaa is A or G
  MOD_RES (19), (20), (21), (22): Xaa is A or G or is absent

SEQ ID NO: 14010 - protein, 37 aa, Artificial Sequence; identical to SEQ ID NO: 6645
  GFR-binding peptide
  MOD_RES (3), (4), (37): Xaa is C or S
  MOD_RES (18), (19), (20), (21), (22): Xaa is A or G
  MOD_RES (23), (24), (25), (26): Xaa is A or G or is absent

SEQ ID NO: 14011 - protein, 39 aa, Artificial Sequence
  GFR-binding peptide
  MOD_RES (1), (2), (36), (38): Xaa is C or S
  MOD_RES (16), (17), (18), (19), (20): Xaa is A or G
  MOD_RES (21), (22), (23), (24): Xaa is A or G or is absent
XXAPTKLEPLTVLYYXXXXXXXXXEQLSNNMVVRSXGXH

SEQ ID NO: 14012 - protein, 41 aa, Artificial Sequence
  GFR-binding peptide
  MOD_RES (5), (6), (39), (41): Xaa is C or S
  MOD_RES (20), (21), (22), (23), (24): Xaa is A or G
  MOD_RES (25), (26), (27), (28): Xaa is A or G or is absent
SASPXXVSQDLSPISILFIXXXXXXXXXYKQYEMIVKSXKX

SEQ ID NO: 14013 - protein, 40 aa, Artificial Sequence
  GFR-binding peptide
  MOD_RES (4), (5), (39): Xaa is C or S
  MOD_RES (19), (20), (21), (22), (23): Xaa is A or G
  MOD_RES (24), (25), (26), (27): Xaa is A or G or is absent
PPTXXVPTRLSPISILFIXXXXXXXXXYKQYEDMVVESXG

SEQ ID NO: 14014 - protein, 41 aa, Artificial Sequence; identical to SEQ ID NO: 6649
  GFR-binding peptide
  MOD_RES (4), (5), (39), (41): Xaa is C or S
  MOD_RES (19), (20), (21), (22), (23): Xaa is A or G
  MOD_RES (24), (25), (26), (27): Xaa is A or G or is absent

SEQ ID NO: 14015 - protein, 35 aa, Artificial Sequence; identical to SEQ ID NO: 6652
  GFR-binding peptide
  MOD_RES (2), (3): Xaa is C or S
  MOD_RES (17), (18), (19), (20), (21): Xaa is A or G
  MOD_RES (22), (23), (24), (25): Xaa is A or G or is absent

SEQ ID NO: 14016 - protein, 37 aa, Artificial Sequence; identical to SEQ ID NO: 6654
  GFR-binding peptide
  MOD_RES (3), (4), (35), (37): Xaa is C or S

SEQ ID NO: 14017 - protein, 36 aa, Artificial Sequence; identical to SEQ ID NO: 6655
  GFR-binding peptide
  MOD_RES (4), (5): Xaa is C or S

SEQ ID NO: 14018 - protein, 32 aa, Artificial Sequence; identical to SEQ ID NO: 6657
  GFR-binding peptide
  MOD_RES (1), (2): Xaa is C or S

SEQ ID NO: 14019 - protein, 41 aa, Artificial Sequence
  GFR-binding peptide
  MOD_RES (4), (38), (40): Xaa is C or S
  MOD_RES (18), (19), (20), (21), (22): Xaa is A or G
  MOD_RES (23), (24), (25), (26): Xaa is A or G or is absent
KPTXAPTKLEPLTVLYYXXXXXXXXXEQLSNNMVVRSXGXH

SEQ ID NO: 14020 - protein, 35 aa, Artificial Sequence
  GFR-binding peptide
  MOD_RES (1), (2), (33), (35): Xaa is C or S
XXVPQDLEPLPIVYYVGRTPKVEQLSNMVVKSXKX

SEQ ID NO: 14021 - protein, 37 aa, Artificial Sequence
  GFR-binding peptide
  MOD_RES (2), (3), (35), (37): Xaa is C or S
TXXVPTRLEPLPIVYYDSANNVVEQLSNDMVVESXGX

SEQ ID NO: 14022 - protein, 36 aa, Artificial Sequence
  GFR-binding peptide
  MOD_RES (2), (3): Xaa is C or S
  MOD_RES (17), (18), (19), (20), (21): Xaa is A or G
  MOD_RES (22), (23), (24), (25): Xaa is A or G or is absent
AXXVPTELSPISMLFIXXXXXXXXXYKQYEDMVVEG

SEQ ID NO: 14023 - protein, 38 aa, Artificial Sequence
  GFR-binding peptide
  MOD_RES (1), (2), (36), (38): Xaa is C or S
  MOD_RES (16), (17), (18), (19), (20): Xaa is A or G
  MOD_RES (21), (22), (23), (24): Xaa is A or G or is absent
XXAPTKLEPLPVVYYXXXXXXXXXEQLSNNMVVRSXGX

SEQ ID NO: 14024 - protein, 38 aa, Artificial Sequence
  GFR-binding peptide
  MOD_RES (4), (5): Xaa is C or S
  MOD_RES (19), (20), (21), (22), (23): Xaa is A or G
  MOD_RES (24), (25), (26), (27): Xaa is A or G or is absent
PPTXXVPTRLEPLPIVYYXXXXXXXXXEQLSNDMVVES

SEQ ID NO: 14025 - protein, 38 aa, Artificial Sequence
  GFR-binding peptide
  MOD_RES (3), (37): Xaa is C or S
  MOD_RES (17), (18), (19), (20), (21): Xaa is A or G
  MOD_RES (22), (23), (24), (25): Xaa is A or G or is absent
PTXAPTKLEPLPVVYYXXXXXXXXXEQLSNNMVVRSXG

SEQ ID NO: 14026 - protein, 31 aa, Artificial Sequence
  GFR-binding peptide
VPTELEPLTMLYYDENEKVVEQLSNDMVVEG

SEQ ID NO: 14027 - protein, 39 aa, Artificial Sequence
  GFR-binding peptide
  MOD_RES (5), (37), (39): Xaa is C or S
TKPTXAPTKLEPLPVVYYDDSSNVIEQLSNNMVVRSXGX

SEQ ID NO: 14028 - protein, 37 aa, Artificial Sequence
  GFR-binding peptide
  MOD_RES (5), (37): Xaa is C or S
TKPTXAPTKLEPLTVLYYDDSSNVIEQLSNNMVVRSX

SEQ ID NO: 14029 - protein, 40 aa, Artificial Sequence; identical to SEQ ID NO: 6669
  GFR-binding peptide
  MOD_RES (5), (6), (40): Xaa is C or S
  MOD_RES (20), (21), (22), (23), (24): Xaa is A or G
  MOD_RES (25), (26), (27), (28): Xaa is A or G or is absent

SEQ ID NO: 14030 - protein, 33 aa, Artificial Sequence
  GFR-binding peptide
  MOD_RES (2), (3): Xaa is C or S
PXXVPQDLSPISILFIVGRTPKVYKQYEMVVKS

SEQ ID NO: 14031 - protein, 35 aa, Artificial Sequence; identical to SEQ ID NO: 6670
  GFR-binding peptide
  MOD_RES (3), (4): Xaa is C or S

SEQ ID NO: 14032 - protein, 38 aa, Artificial Sequence
  GFR-binding peptide
  MOD_RES (6), (7): Xaa is C or S
STPPTXXVPTRLSAISILYLDSANNVVLKNYQDMVVES

SEQ ID NO: 14033 - protein, 36 aa, Artificial Sequence; identical to SEQ ID NO: 6671
  GFR-binding peptide
  MOD_RES (1), (35): Xaa is C or S
  MOD_RES (15), (16), (17), (18), (19): Xaa is A or G
  MOD_RES (20), (21), (22), (23): Xaa is A or G or is absent

SEQ ID NO: 14034 - protein, 33 aa, Artificial Sequence; identical to SEQ ID NO: 6672
  GFR-binding peptide
  MOD_RES (33), (33): Xaa is C or S
  MOD_RES (14), (15), (16), (17), (18): Xaa is A or G
  MOD_RES (19), (20), (21), (22): Xaa is A or G or is absent

SEQ ID NO: 14035 - protein, 34 aa, Artificial Sequence; identical to SEQ ID NO: 6674
  GFR-binding peptide
  MOD_RES (1), (1): Xaa is C or S
  MOD_RES (15), (16), (17), (18), (19): Xaa is A or G
  MOD_RES (20), (21), (22), (23): Xaa is A or G or is absent

SEQ ID NO: 14036 - protein, 32 aa, Artificial Sequence
  GFR-binding peptide
  MOD_RES (1), (32): Xaa is C or S
XVPQALEPLTILYYVGRKPKVEQLSNMIVRSX

SEQ ID NO: 14037 - protein, 34 aa, Artificial Sequence
  GFR-binding peptide
  MOD_RES (1), (32), (34): Xaa is C or S
XVSQDLSPISILFIIGKTPKIYKQYEMIVKSXKX

SEQ ID NO: 14038 - protein, 32 aa, Artificial Sequence
  GFR-binding peptide
  MOD_RES (2), (2): Xaa is C or S
TXAPTKLEPLTVLYYDDSSNVIEQLSNNMVVR

SEQ ID NO: 14039 - protein, 37 aa, Artificial Sequence
  GFR-binding peptide
  MOD_RES (1), (2), (36): Xaa is C or S
  MOD_RES (16), (17), (18), (19), (20): Xaa is A or G
  MOD_RES (21), (22), (23), (24): Xaa is A or G or is absent
XXVPTRLEPLPIVYYXXXXXXXXXEQLSNDMVVESXG

SEQ ID NO: 14040 - protein, 34 aa, Artificial Sequence
  GFR-binding peptide
  MOD_RES (1), (32), (34): Xaa is C or S
XVPQALSPISILFIVGRKPKVYKQYEMIVRSXKX

SEQ ID NO: 14041 - protein, 38 aa, Artificial Sequence; identical to SEQ ID NO: 6677
  GFR-binding peptide
  MOD_RES (2), (3), (37): Xaa is C or S
  MOD_RES (17), (18), (19), (20), (21): Xaa is A or G
  MOD_RES (22), (23), (24), (25): Xaa is A or G or is absent

SEQ ID NO: 14042 - protein, 35 aa, Artificial Sequence
  GFR-binding peptide
  MOD_RES (1), (2), (35): Xaa is C or S
  MOD_RES (16), (17), (18), (19), (20): Xaa is A or G
  MOD_RES (21), (22), (23), (24): Xaa is A or G or is absent
XXVPQALEPLPIVYYXXXXXXXXXEQLSNMIVRSX

SEQ ID NO: 14043 - protein, 33 aa, Artificial Sequence; identical to SEQ ID NO: 6679
  GFR-binding peptide
  MOD_RES (1), (2): Xaa is C or S

SEQ ID NO: 14044 - protein, 38 aa, Artificial Sequence
  GFR-binding peptide
  MOD_RES (3), (4), (38): Xaa is C or S
  MOD_RES (18), (19), (20), (21), (22): Xaa is A or G
  MOD_RES (23), (24), (25), (26): Xaa is A or G or is absent
KAXXVPTELSPISMLFIXXXXXXXXXYKQYEDMVVEGX

SEQ ID NO: 14045 - protein, 35 aa, Artificial Sequence
  GFR-binding peptide
  MOD_RES (34), (34): Xaa is C or S
  MOD_RES (14), (15), (16), (17), (18): Xaa is A or G
  MOD_RES (19), (20), (21), (22): Xaa is A or G or is absent
APTQLEPLTVLYYXXXXXXXXXEQLSNNMVVRAXG

SEQ ID NO: 14046 - protein, 34 aa, Artificial Sequence
  GFR-binding peptide
  MOD_RES (1), (2): Xaa is C or S
  MOD_RES (16), (17), (18), (19), (20): Xaa is A or G
  MOD_RES (21), (22), (23), (24): Xaa is A or G or is absent
XXVPTELEPLPMVYYXXXXXXXXXEQLSNEMVVE

SEQ ID NO: 14047 - protein, 39 aa, Artificial Sequence; identical to SEQ ID NO: 6689
  GFR-binding peptide
  MOD_RES (2), (3), (36), (38): Xaa is C or S
  MOD_RES (17), (18), (19), (20), (21): Xaa is A or G
  MOD_RES (22), (23), (24), (25): Xaa is A or G or is absent

SEQ ID NO: 14048 - protein, 44 aa, Artificial Sequence
  GFR-binding peptide
  MOD_RES (6), (7), (41), (43): Xaa is C or S
  MOD_RES (21), (22), (23), (24), (25): Xaa is A or G
  MOD_RES (26), (27), (28), (29): Xaa is A or G or is absent
SIPKAXXVPTELEPLPMVYYXXXXXXXXXEQLSNEMVVEGXGXR

SEQ ID NO: 14049 - protein, 38 aa, Artificial Sequence
  GFR-binding peptide
  MOD_RES (6), (7): Xaa is C or S
TVPKPXXAPTQLEPLTVLYYDDSSNVIEQLSNNMVVRA

SEQ ID NO: 14050 - protein, 37 aa, Artificial Sequence
  GFR-binding peptide
  MOD_RES (4), (5), (37): Xaa is C or S
PKAXXVPTELEPLPMVYYDENEKVVEQLSNDMVVEGX

SEQ ID NO: 14051 - protein, 37 aa, Artificial Sequence
  GFR-binding peptide
  MOD_RES (2), (3), (35), (37): Xaa is C or S
PXXAPTQLEPLTVLYYDDSSNVIEQLSNNMVVRAXGX

SEQ ID NO: 14052 - protein, 35 aa, Artificial Sequence
  GFR-binding peptide
  MOD_RES (1), (33), (35): Xaa is C or S
XAPTQLEPLPVVYYDDSSNVIEQLSNNMVVRAXGX

SEQ ID NO: 14053 - protein, 36 aa, Artificial Sequence
  GFR-binding peptide
  MOD_RES (2), (3), (35): Xaa is C or S
TXXVPTRLSAISILYLDSANNVVLKNYQDMVVESXG

SEQ ID NO: 14054 - protein, 37 aa, Artificial Sequence
  GFR-binding peptide
  MOD_RES (2), (3), (35), (37): Xaa is C or S
PXXAPTKLEPLTVLYYDDSSNVIEQLSNNMVVRSXGX

SEQ ID NO: 14055 - protein, 34 aa, Artificial Sequence
  GFR-binding peptide
  MOD_RES (3), (3): Xaa is C or S
PTXAPTKLEPLPVVYYDDSSNVIEQLSNNMVVRS

SEQ ID NO: 14056 - protein, 33 aa, Artificial Sequence
  GFR-binding peptide
  MOD_RES (2), (3): Xaa is C or S
AXXVPTELEPLTMLYYDEYDKVVEQLSNEMVVE

SEQ ID NO: 14057 - protein, 33 aa, Artificial Sequence; identical to SEQ ID NO: 6706
  GFR-binding peptide
  MOD_RES (31), (33): Xaa is C or S

SEQ ID NO: 14058 - protein, 33 aa, Artificial Sequence
  GFR-binding peptide
  MOD_RES (32), (32): Xaa is C or S
VPTELEPLPMVYYDENEKVVEQLSNDMVVEGXG

SEQ ID NO: 14059 - protein, 40 aa, Artificial Sequence; identical to SEQ ID NO: 6708
  GFR-binding peptide
  MOD_RES (3), (4), (38), (40): Xaa is C or S
  MOD_RES (18), (19), (20), (21), (22): Xaa is A or G
  MOD_RES (23), (24), (25), (26): Xaa is A or G or is absent

SEQ ID NO: 14060 - protein, 38 aa, Artificial Sequence
  GFR-binding peptide
  MOD_RES (6), (6): Xaa is C or S
  MOD_RES (20), (21), (22), (23), (24): Xaa is A or G
  MOD_RES (25), (26), (27), (28): Xaa is A or G or is absent
VTKPTXAPTKLSPISVLFIXXXXXXXXXYKQYENMVVR

SEQ ID NO: 14061 - protein, 35 aa, Artificial Sequence
  GFR-binding peptide
  MOD_RES (4), (5): Xaa is C or S
PKAXXVPTELEPLPMVYYDENEKVVEQLSNDMVVE

SEQ ID NO: 14062 - protein, 36 aa, Artificial Sequence
  GFR-binding peptide
  MOD_RES (33), (35): Xaa is C or S
  MOD_RES (14), (15), (16), (17), (18): Xaa is A or G
  MOD_RES (19), (20), (21), (22): Xaa is A or G or is absent
VPQALEPLPIVYYXXXXXXXXXEQLSNMIVRSXKXS

SEQ ID NO: 14063 - protein, 43 aa, Artificial Sequence; identical to SEQ ID NO: 6711
  GFR-binding peptide
  MOD_RES (6), (7), (41), (43): Xaa is C or S
  MOD_RES (21), (22), (23), (24), (25): Xaa is A or G
  MOD_RES (26), (27), (28), (29): Xaa is A or G or is absent

SEQ ID NO: 14064 - protein, 34 aa, Artificial Sequence
  GFR-binding peptide
  MOD_RES (1), (2): Xaa is C or S
  MOD_RES (16), (17), (18), (19), (20): Xaa is A or G
  MOD_RES (21), (22), (23), (24): Xaa is A or G or is absent
XXVPQALEPLPIVYYXXXXXXXXXEQLSNMIVRS

SEQ ID NO: 14065 - protein, 36 aa, Artificial Sequence
  GFR-binding peptide
  MOD_RES (2), (36): Xaa is C or S
  MOD_RES (16), (17), (18), (19), (20): Xaa is A or G
  MOD_RES (21), (22), (23), (24): Xaa is A or G or is absent
TXAPTKLEPLPVVYYXXXXXXXXXEQLSNNMVVRSX

SEQ ID NO: 14066 - protein, 38 aa, Artificial Sequence
  GFR-binding peptide
  MOD_RES (1), (35), (37): Xaa is C or S
  MOD_RES (15), (16), (17), (18), (19): Xaa is A or G
  MOD_RES (20), (21), (22), (23): Xaa is A or G or is absent
XVPTRLNAISILYFXXXXXXXXXLKKYRDMVVESXGXR

SEQ ID NO: 14067 - protein, 38 aa, Artificial Sequence; identical to SEQ ID NO: 6713
  GFR-binding peptide
  MOD_RES (2), (3), (35), (37): Xaa is C or S

SEQ ID NO: 14068 - protein, 38 aa, Artificial Sequence
  GFR-binding peptide
  MOD_RES (5), (6), (38): Xaa is C or S
VPKPXXAPTKLEPLTVLYYDDSSNVIEQLSNNMVVRSX

SEQ ID NO: 14069 - protein, 40 aa, Artificial Sequence; identical to SEQ ID NO: 6718
  GFR-binding peptide
  MOD_RES (3), (4), (38), (40): Xaa is C or S
  MOD_RES (18), (19), (20), (21), (22): Xaa is A or G
  MOD_RES (23), (24), (25), (26): Xaa is A or G or is absent

SEQ ID NO: 14070 - protein, 35 aa, Artificial Sequence
  GFR-binding peptide
  MOD_RES (4), (5): Xaa is C or S
PPTXXVPTRLEPLPIVYYDSANNVVEQLSNDMVVE

SEQ ID NO: 14071 - protein, 35 aa, Artificial Sequence; identical to SEQ ID NO: 6719
  GFR-binding peptide
  MOD_RES (1), (32), (34): Xaa is C or S

SEQ ID NO: 14072 - protein, 44 aa, Artificial Sequence; identical to SEQ ID NO: 6720
  GFR-binding peptide
  MOD_RES (7), (41), (43): Xaa is C or S
  MOD_RES (21), (22), (23), (24), (25): Xaa is A or G
  MOD_RES (26), (27), (28), (29): Xaa is A or G or is absent

SEQ ID NO: 14073 - protein, 39 aa, Artificial Sequence
  GFR-binding peptide
  MOD_RES (3), (4), (38): Xaa is C or S
  MOD_RES (18), (19), (20), (21), (22): Xaa is A or G
  MOD_RES (23), (24), (25), (26): Xaa is A or G or is absent
PTXXVPTRLSAISILYLXXXXXXXXXLKNYQDMVVESXG

SEQ ID NO: 14074 - protein, 39 aa, Artificial Sequence; identical to SEQ ID NO: 6726
  GFR-binding peptide
  MOD_RES (5), (6), (39): Xaa is C or S
  MOD_RES (20), (21), (22), (23), (24): Xaa is A or G
  MOD_RES (25), (26), (27), (28): Xaa is A or G or is absent

SEQ ID NO: 14075 - protein, 35 aa, Artificial Sequence; identical to SEQ ID NO: 6727
  GFR-binding peptide
  MOD_RES (1), (2), (35): Xaa is C or S
  MOD_RES (16), (17), (18), (19), (20): Xaa is A or G
  MOD_RES (21), (22), (23), (24): Xaa is A or G or is absent

SEQ ID NO: 14076 - protein, 40 aa, Artificial Sequence
  GFR-binding peptide
  MOD_RES (3), (4), (38), (40): Xaa is C or S
  MOD_RES (18), (19), (20), (21), (22): Xaa is A or G
  MOD_RES (23), (24), (25), (26): Xaa is A or G or is absent
PTXXVPTRLSPISILFIXXXXXXXXXYKQYEDMVVESXGX

SEQ ID NO: 14077 - protein, 36 aa, Artificial Sequence
  GFR-binding peptide
  MOD_RES (33), (35): Xaa is C or S
  MOD_RES (14), (15), (16), (17), (18): Xaa is A or G
  MOD_RES (19), (20), (21), (22): Xaa is A or G or is absent
VPQDLSPISILFIXXXXXXXXXYKQYEMVVKSXKXS

SEQ ID NO: 14078 - protein, 34 aa, Artificial Sequence
  GFR-binding peptide
  MOD_RES (1), (32), (34): Xaa is C or S
XVPQDLEPLPIVYYVGRTPKVEQLSNMVVKSXKX

SEQ ID NO: 14079 - protein, 38 aa, Artificial Sequence
  GFR-binding peptide
  MOD_RES (2), (3), (35), (37): Xaa is C or S
PXXAPTQLEPLTVLYYDDSSNVIEQLSNNMVVRAXGXH

SEQ ID NO: 14080 - protein, 40 aa, Artificial Sequence
  GFR-binding peptide
  MOD_RES (2), (3), (37), (39): Xaa is C or S
  MOD_RES (17), (18), (19), (20), (21): Xaa is A or G
  MOD_RES (22), (23), (24), (25): Xaa is A or G or is absent
AXXVPTELEPLPMVYYXXXXXXXXXEQLSNDMVVEGXGXR

SEQ ID NO: 14081 - protein, 38 aa, Artificial Sequence
  GFR-binding peptide
  MOD_RES (4), (38): Xaa is C or S
  MOD_RES (18), (19), (20), (21), (22): Xaa is A or G
  MOD_RES (23), (24), (25), (26): Xaa is A or G or is absent
KPTXAPTKLEPLPVVYYXXXXXXXXXEQLSNNMVVRSX

SEQ ID NO: 14082 - protein, 33 aa, Artificial Sequence; identical to SEQ ID NO: 6733
  GFR-binding peptide
  MOD_RES (1), (2): Xaa is C or S

SEQ ID NO: 14083 - protein, 37 aa, Artificial Sequence; identical to SEQ ID NO: 6735
  GFR-binding peptide
  MOD_RES (1), (2), (36): Xaa is C or S
  MOD_RES (16), (17), (18), (19), (20): Xaa is A or G
  MOD_RES (21), (22), (23), (24): Xaa is A or G or is absent

SEQ ID NO: 14084 - protein, 33 aa, Artificial Sequence; identical to SEQ ID NO: 6736
  GFR-binding peptide
  MOD_RES (1), (33): Xaa is C or S

SEQ ID NO: 14085 - protein, 33 aa, Artificial Sequence
  GFR-binding peptide
  MOD_RES (14), (15), (16), (17), (18): Xaa is A or G
  MOD_RES (19), (20), (21), (22): Xaa is A or G or is absent
VPTELEPLTMLYYXXXXXXXXXEQLSNEMVVEG

SEQ ID NO: 14086 - protein, 41 aa, Artificial Sequence
  GFR-binding peptide
  MOD_RES (5), (6), (38), (40): Xaa is C or S
TPPTXXVPTRLEPLPIVYYDSANNVVEQLSNDMVVESXGXR

SEQ ID NO: 14087 - protein, 40 aa, Artificial Sequence; identical to SEQ ID NO: 6739
  GFR-binding peptide
  MOD_RES (2), (3), (37), (39): Xaa is C or S
  MOD_RES (17), (18), (19), (20), (21): Xaa is A or G
  MOD_RES (22), (23), (24), (25): Xaa is A or G or is absent

SEQ ID NO: 14088 - protein, 36 aa, Artificial Sequence
  GFR-binding peptide
  MOD_RES (3), (4), (36): Xaa is C or S
PTXXVPTRLSAISILYLDSANNVVLKNYQDMVVESX

SEQ ID NO: 14089 - protein, 37 aa, Artificial Sequence
  GFR-binding peptide
  MOD_RES (2), (3), (34), (36): Xaa is C or S
PXXVSQDLEPLPIVYYIGKTPKIEQLSNMIVKSXKXS

SEQ ID NO: 14090 - protein, 38 aa, Artificial Sequence
  GFR-binding peptide
  MOD_RES (5), (6): Xaa is C or S
  MOD_RES (20), (21), (22), (23), (24): Xaa is A or G
  MOD_RES (25), (26), (27), (28): Xaa is A or G or is absent
TPPTXXVPTRLSAISILYLXXXXXXXXXLKNYQDMVVE

SEQ ID NO: 14091 - protein, 37 aa, Artificial Sequence
  GFR-binding peptide
  MOD_RES (5), (6): Xaa is C or S
IPKAXXVPTELSPISMLFIDEYDKVVYKQYEEMVVEG

SEQ ID NO: 14092 - protein, 41 aa, Artificial Sequence
  GFR-binding peptide
  MOD_RES (3), (4), (38), (40): Xaa is C or S
  MOD_RES (18), (19), (20), (21), (22): Xaa is A or G
  MOD_RES (23), (24), (25), (26): Xaa is A or G or is absent
KPXXAPTQLEPLTVLYYXXXXXXXXXEQLSNNMVVRAXGXH

SEQ ID NO: 14093 - protein, 39 aa, Artificial Sequence
  GFR-binding peptide
  MOD_RES (4), (5), (37), (39): Xaa is C or S
PKAXXVPTELSPISMLFIDEYDKVVYKQYEEMVVEGXGX

SEQ ID NO: 14094 - protein, 39 aa, Artificial Sequence; identical to SEQ ID NO: 6746
  GFR-binding peptide
  MOD_RES (5), (6), (39): Xaa is C or S
  MOD_RES (20), (21), (22), (23), (24): Xaa is A or G
  MOD_RES (25), (26), (27), (28): Xaa is A or G or is absent

SEQ ID NO: 14095 - protein, 32 aa, Artificial Sequence
  GFR-binding peptide
  MOD_RES (1), (2): Xaa is C or S
XXVPTELEPLTMLYYDENEKVVEQLSNDMVVE

SEQ ID NO: 14096 - protein, 35 aa, Artificial Sequence
  GFR-binding peptide
  MOD_RES (33), (35): Xaa is C or S
  MOD_RES (14), (15), (16), (17), (18): Xaa is A or G
  MOD_RES (19), (20), (21), (22): Xaa is A or G or is absent
VPQDLSPISILFIXXXXXXXXXYKQYEMVVKSXKX

SEQ ID NO: 14097 - protein, 37 aa, Artificial Sequence; identical to SEQ ID NO: 6748
  GFR-binding peptide
  MOD_RES (2), (3), (36): Xaa is C or S
  MOD_RES (17), (18), (19), (20), (21): Xaa is A or G
  MOD_RES (22), (23), (24), (25): Xaa is A or G or is absent

SEQ ID NO: 14098 - protein, 39 aa, Artificial Sequence
  GFR-binding peptide
  MOD_RES (4), (5), (39): Xaa is C or S
  MOD_RES (19), (20), (21), (22), (23): Xaa is A or G
  MOD_RES (24), (25), (26), (27): Xaa is A or G or is absent
PPTXXVPTRLEPLTILYYXXXXXXXXXEQLSNDMVVESX

SEQ ID NO: 14099 - protein, 37 aa, Artificial Sequence
  GFR-binding peptide
  MOD_RES (2), (3), (37): Xaa is C or S
  MOD_RES (17), (18), (19), (20), (21): Xaa is A or G
  MOD_RES (22), (23), (24), (25): Xaa is A or G or is absent
PXXAPTQLEPLPVVYYXXXXXXXXXEQLSNNMVVRAX

SEQ ID NO: 14100 - protein, 34 aa, Artificial Sequence
  GFR-binding peptide
  MOD_RES (2), (2): Xaa is C or S
  MOD_RES (16), (17), (18), (19), (20): Xaa is A or G
  MOD_RES (21), (22), (23), (24): Xaa is A or G or is absent
TXAPTKLEPLPVVYYXXXXXXXXXEQLSNNMVVR

SEQ ID NO: 14101 - protein, 37 aa, Artificial Sequence; identical to SEQ ID NO: 6750
  GFR-binding peptide
  MOD_RES (2), (3), (34), (36): Xaa is C or S

SEQ ID NO: 14102 - protein, 38 aa, Artificial Sequence
  GFR-binding peptide
  MOD_RES (6), (7): Xaa is C or S
STPPTXXVPTRLNAISILYFDSANNVVLKKYRDMVVES

SEQ ID NO: 14103 - protein, 36 aa, Artificial Sequence
  GFR-binding peptide
  MOD_RES (2), (3), (35): Xaa is C or S
TXXVPTRLEPLTILYYDSANNVVEQLSNDMVVESXG

SEQ ID NO: 14104 - protein, 42 aa, Artificial Sequence; identical to SEQ ID NO: 6753
  GFR-binding peptide
  MOD_RES (6), (7), (41): Xaa is C or S
  MOD_RES (21), (22), (23), (24), (25): Xaa is A or G
  MOD_RES (26), (27), (28), (29): Xaa is A or G or is absent

SEQ ID NO: 14105 - protein, 34 aa, Artificial Sequence
  GFR-binding peptide
  MOD_RES (1), (33): Xaa is C or S
XVPTRLEPLTILYYDSANNVVEQLSNDMVVESXG

SEQ ID NO: 14106 - protein, 36 aa, Artificial Sequence
  GFR-binding peptide
  MOD_RES (1), (2), (36): Xaa is C or S
  MOD_RES (16), (17), (18), (19), (20): Xaa is A or G
  MOD_RES (21), (22), (23), (24): Xaa is A or G or is absent
XXVPTELEPLPMVYYXXXXXXXXXEQLSNEMVVEGX

SEQ ID NO: 14107 - protein, 44 aa, Artificial Sequence
  GFR-binding peptide
  MOD_RES (6), (7), (41), (43): Xaa is C or S
  MOD_RES (21), (22), (23), (24), (25): Xaa is A or G
  MOD_RES (26), (27), (28), (29): Xaa is A or G or is absent
KIPKAXXVPTELEPLTMLYYXXXXXXXXXEQLSNDMVVEGXGXR

SEQ ID NO: 14108 - protein, 34 aa, Artificial Sequence; identical to SEQ ID NO: 6756
  GFR-binding peptide
  MOD_RES (1), (2): Xaa is C or S
  MOD_RES (16), (17), (18), (19), (20): Xaa is A or G
  MOD_RES (21), (22), (23), (24): Xaa is A or G or is absent

SEQ ID NO: 14109 - protein, 41 aa, Artificial Sequence
  GFR-binding peptide
  MOD_RES (5), (6), (40): Xaa is C or S
  MOD_RES (20), (21), (22), (23), (24): Xaa is A or G
  MOD_RES (25), (26), (27), (28): Xaa is A or G or is absent
IPKAXXVPTELEPLPMVYYXXXXXXXXXEQLSNEMVVEGXG

SEQ ID NO: 14110 - protein, 33 aa, Artificial Sequence
  GFR-binding peptide
  MOD_RES (1), (2), (33): Xaa is C or S
XXVPQALSPISILFIVGRKPKVYKQYEMIVRSX

SEQ ID NO: 14111 - protein, 32 aa, Artificial Sequence; identical to SEQ ID NO: 6757
  GFR-binding peptide
  MOD_RES (1), (1): Xaa is C or S

SEQ ID NO: 14112 - protein, 38 aa, Artificial Sequence
  GFR-binding peptide
  MOD_RES (4), (5), (36), (38): Xaa is C or S
AAPXXVPQALSPISILFIVGRKPKVYKQYEMIVRSXKX

SEQ ID NO: 14113 - protein, 37 aa, Artificial Sequence
  GFR-binding peptide
  MOD_RES (4), (5), (37): Xaa is C or S
PKAXXVPTELSPISMLFIDENEKVVYKQYEDMVVEGX

SEQ ID NO: 14114 - protein, 35 aa, Artificial Sequence; identical to SEQ ID NO: 6763
  GFR-binding peptide
  MOD_RES (4), (5): Xaa is C or S

SEQ ID NO: 14115 - protein, 39 aa, Artificial Sequence; identical to SEQ ID NO: 6764
  GFR-binding peptide
  MOD_RES (6), (7): Xaa is C or S
  MOD_RES (21), (22), (23), (24), (25): Xaa is A or G
  MOD_RES (26), (27), (28), (29): Xaa is A or G or is absent

SEQ ID NO: 14116 - protein, 36 aa, Artificial Sequence
  GFR-binding peptide
  MOD_RES (5), (6): Xaa is C or S
TPPTXXVPTRLNAISILYFDSANNVVLKKYRDMVVE

SEQ ID NO: 14117 - protein, 38 aa, Artificial Sequence
  GFR-binding peptide
  MOD_RES (4), (36), (38): Xaa is C or S
KPTXAPTKLEPLPVVYYDDSSNVIEQLSNNMVVRSXGX

SEQ ID NO: 14118 - protein, 39 aa, Artificial Sequence
  GFR-binding peptide
  MOD_RES (3), (4), (36), (38): Xaa is C or S
PTXXVPTRLEPLTILYYDSANNVVEQLSNDMVVESXGXR

SEQ ID NO: 14119 - protein, 42 aa, Artificial Sequence; identical to SEQ ID NO: 6765
  GFR-binding peptide
  MOD_RES (5), (6), (39), (41): Xaa is C or S
  MOD_RES (20), (21), (22), (23), (24): Xaa is A or G
  MOD_RES (25), (26), (27), (28): Xaa is A or G or is absent

SEQ ID NO: 14120 - protein, 42 aa, Artificial Sequence
  GFR-binding peptide
  MOD_RES (6), (7), (39), (41): Xaa is C or S
YVPKPXXAPTKLSPISVLFIDDSSNVIYKQYENMVVRSXGXH

SEQ ID NO: 14121 - protein, 38 aa, Artificial Sequence
  GFR-binding peptide
  MOD_RES (3), (4), (36), (38): Xaa is C or S
KAXXVPTELEPLTMLYYDEYDKVVEQLSNEMVVEGXGX

SEQ ID NO: 14122 - protein, 38 aa, Artificial Sequence; identical to SEQ ID NO: 6766
  GFR-binding peptide
  MOD_RES (1), (2), (36), (38): Xaa is C or S
  MOD_RES (16), (17), (18), (19), (20): Xaa is A or G
  MOD_RES (21), (22), (23), (24): Xaa is A or G or is absent

SEQ ID NO: 14123 - protein, 35 aa, Artificial Sequence
  GFR-binding peptide
  MOD_RES (34), (34): Xaa is C or S
  MOD_RES (14), (15), (16), (17), (18): Xaa is A or G
  MOD_RES (19), (20), (21), (22): Xaa is A or G or is absent
VPTRLNAISILYFXXXXXXXXXLKKYRDMVVESXG

SEQ ID NO: 14124 - protein, 35 aa, Artificial Sequence; identical to SEQ ID NO: 6770
  GFR-binding peptide
  MOD_RES (2), (3): Xaa is C or S
  MOD_RES (17), (18), (19), (20), (21): Xaa is A or G
  MOD_RES (22), (23), (24), (25): Xaa is A or G or is absent

SEQ ID NO: 14125 - protein, 40 aa, Artificial Sequence; identical to SEQ ID NO: 6771
  GFR-binding peptide
  MOD_RES (5), (6), (40): Xaa is C or S
  MOD_RES (20), (21), (22), (23), (24): Xaa is A or G
  MOD_RES (25), (26), (27), (28): Xaa is A or G or is absent

SEQ ID NO: 14126 - protein, 42 aa, Artificial Sequence
  GFR-binding peptide
  MOD_RES (7), (39), (41): Xaa is C or S
HVTKPTXAPTKLSPISVLFIDDSSNVIYKQYENMVVRSXGXH

SEQ ID NO: 14127 - protein, 40 aa, Artificial Sequence
  GFR-binding peptide
  MOD_RES (6), (7), (39): Xaa is C or S
SIPKAXXVPTELSPISMLFIDEYDKVVYKQYEEMVVEGXG

SEQ ID NO: 14128 - protein, 40 aa, Artificial Sequence; identical to SEQ ID NO: 6775
  GFR-binding peptide
  MOD_RES (3), (4), (37), (39): Xaa is C or S
  MOD_RES (18), (19), (20), (21), (22): Xaa is A or G
  MOD_RES (23), (24), (25), (26): Xaa is A or G or is absent

SEQ ID NO: 14129 - protein, 40 aa, Artificial Sequence; identical to SEQ ID NO: 6780
  GFR-binding peptide
  MOD_RES (6), (7), (38), (40): Xaa is C or S

SEQ ID NO: 14130 - protein, 41 aa, Artificial Sequence
  GFR-binding peptide
  MOD_RES (4), (5), (39), (41): Xaa is C or S
  MOD_RES (19), (20), (21), (22), (23): Xaa is A or G
  MOD_RES (24), (25), (26), (27): Xaa is A or G or is absent
PPTXXVPTRLSAISILYLXXXXXXXXXLKNYQDMVVESXGX

SEQ ID NO: 14131 - protein, 33 aa, Artificial Sequence
  GFR-binding peptide
  MOD_RES (32), (32): Xaa is C or S
APTKLEPLPVVYYDDSSNVIEQLSNNMVVRSXG

SEQ ID NO: 14132 - protein, 37 aa, Artificial Sequence; identical to SEQ ID NO: 6782
  GFR-binding peptide
  MOD_RES (34), (36): Xaa is C or S
  MOD_RES (14), (15), (16), (17), (18): Xaa is A or G
  MOD_RES (19), (20), (21), (22): Xaa is A or G or is absent

SEQ ID NO: 14133 - protein, 39 aa, Artificial Sequence
  GFR-binding peptide
  MOD_RES (2), (36), (38): Xaa is C or S
  MOD_RES (16), (17), (18), (19), (20): Xaa is A or G
  MOD_RES (21), (22), (23), (24): Xaa is A or G or is absent
TXAPTKLEPLPVVYYXXXXXXXXXEQLSNNMVVRSXGXH

SEQ ID NO: 14134 - protein, 38 aa, Artificial Sequence
  GFR-binding peptide
  MOD_RES (1), (2), (36), (38): Xaa is C or S
  MOD_RES (16), (17), (18), (19), (20): Xaa is A or G
  MOD_RES (21), (22), (23), (24): Xaa is A or G or is absent
XXVPTELEPLPMVYYXXXXXXXXXEQLSNEMVVEGXGX

SEQ ID NO: 14135 - protein, 39 aa, Artificial Sequence
  GFR-binding peptide
  MOD_RES (5), (6), (37), (39): Xaa is C or S
SASPXXVPQDLSPISILFIVGRTPKVYKQYEMVVKSXKX

SEQ ID NO: 14136 - protein, 38 aa, Artificial Sequence
  GFR-binding peptide
  MOD_RES (3), (4), (36), (38): Xaa is C or S
KAXXVPTELEPLPMVYYDENEKVVEQLSNDMVVEGXGX

SEQ ID NO: 14137 - protein, 37 aa, Artificial Sequence; identical to SEQ ID NO: 6786
  GFR-binding peptide
  MOD_RES (1), (34), (36): Xaa is C or S
  MOD_RES (15), (16), (17), (18), (19): Xaa is A or G
  MOD_RES (20), (21), (22), (23): Xaa is A or G or is absent

SEQ ID NO: 14138 - protein, 35 aa, Artificial Sequence
  GFR-binding peptide
  MOD_RES (4), (5): Xaa is C or S
PKAXXVPTELEPLTMLYYDEYDKVVEQLSNEMVVE

SEQ ID NO: 14139 - protein, 34 aa, Artificial Sequence
  GFR-binding peptide
  MOD_RES (1), (33): Xaa is C or S
XAPTKLEPLTVLYYDDSSNVIEQLSNNMVVRSXG

SEQ ID NO: 14140 - protein, 35 aa, Artificial Sequence; identical to SEQ ID NO: 6794
  GFR-binding peptide
  MOD_RES (3), (4): Xaa is C or S

SEQ ID NO: 14141 - protein, 38 aa, Artificial Sequence
  GFR-binding peptide
  MOD_RES (2), (36), (38): Xaa is C or S
  MOD_RES (16), (17), (18), (19), (20): Xaa is A or G
  MOD_RES (21), (22), (23), (24): Xaa is A or G or is absent
TXAPTKLSPISVLFIXXXXXXXXXYKQYENMVVRSXGX

SEQ ID NO: 14142 - protein, 38 aa, Artificial Sequence
  GFR-binding peptide
  MOD_RES (5), (6), (38): Xaa is C or S
TPPTXXVPTRLEPLTILYYDSANNVVEQLSNDMVVESX

SEQ ID NO: 14143 - protein, 38 aa, Artificial Sequence
  GFR-binding peptide
  MOD_RES (3), (4), (38): Xaa is C or S
  MOD_RES (18), (19), (20), (21), (22): Xaa is A or G
  MOD_RES (23), (24), (25), (26): Xaa is A or G or is absent
KAXXVPTELEPLTMLYYXXXXXXXXXEQLSNEMVVEGX

SEQ ID NO: 14144 - protein, 32 aa, Artificial Sequence
  GFR-binding peptide
  MOD_RES (14), (15), (16), (17), (18): Xaa is A or G
  MOD_RES (19), (20), (21), (22): Xaa is A or G or is absent
VPTRLSAISILYLXXXXXXXXXLKNYQDMVVE

SEQ ID NO: 14145 - protein, 34 aa, Artificial Sequence; identical to SEQ ID NO: 6797
  GFR-binding peptide
  MOD_RES (34), (34): Xaa is C or S
  MOD_RES (14), (15), (16), (17), (18): Xaa is A or G
  MOD_RES (19), (20), (21), (22): Xaa is A or G or is absent

SEQ ID NO: 14146 - protein, 38 aa, Artificial Sequence
  GFR-binding peptide
  MOD_RES (3), (4), (36), (38): Xaa is C or S
KAXXVPTELSPISMLFIDENEKVVYKQYEDMVVEGXGX

SEQ ID NO: 14147 - protein, 38 aa, Artificial Sequence; identical to SEQ ID NO: 6801
  GFR-binding peptide
  MOD_RES (4), (5), (38): Xaa is C or S
  MOD_RES (19), (20), (21), (22), (23): Xaa is A or G
  MOD_RES (24), (25), (26), (27): Xaa is A or G or is absent

SEQ ID NO: 14148 - protein, 31 aa, Artificial Sequence; identical to SEQ ID NO: 6805
  GFR-binding peptide
  MOD_RES (1), (1): Xaa is C or S

SEQ ID NO: 14149 - protein, 33 aa, Artificial Sequence
  GFR-binding peptide
  MOD_RES (1), (1): Xaa is C or S
  MOD_RES (15), (16), (17), (18), (19): Xaa is A or G
  MOD_RES (20), (21), (22), (23): Xaa is A or G or is absent
XVPQALSPISILFIXXXXXXXXXYKQYEMIVRS

SEQ ID NO: 14150 - protein, 36 aa, Artificial Sequence
  GFR-binding peptide
  MOD_RES (1), (2), (36): Xaa is C or S
  MOD_RES (16), (17), (18), (19), (20): Xaa is A or G
  MOD_RES (21), (22), (23), (24): Xaa is A or G or is absent
XXAPTQLSPISVLFIXXXXXXXXXYKQYENMVVRAX

SEQ ID NO: 14151 - protein, 31 aa, Artificial Sequence; identical to SEQ ID NO: 6808
  GFR-binding peptide
  MOD_RES (1), (1): Xaa is C or S

SEQ ID NO: 14152 - protein, 32 aa, Artificial Sequence
  GFR-binding peptide
  MOD_RES (14), (15), (16), (17), (18): Xaa is A or G
  MOD_RES (19), (20), (21), (22): Xaa is A or G or is absent
APTKLSPISVLFIXXXXXXXXXYKQYENMVVR

SEQ ID NO: 14153 - protein, 36 aa, Artificial Sequence; identical to SEQ ID NO: 6816
  GFR-binding peptide
  MOD_RES (3), (4): Xaa is C or S
  MOD_RES (18), (19), (20), (21), (22): Xaa is A or G
  MOD_RES (23), (24), (25), (26): Xaa is A or G or is absent

SEQ ID NO: 14154 - protein, 33 aa, Artificial Sequence
  GFR-binding peptide
  MOD_RES (1), (33): Xaa is C or S
XAPTKLEPLPVVYYDDSSNVIEQLSNNMVVRSX

SEQ ID NO: 14155 - protein, 41 aa, Artificial Sequence; identical to SEQ ID NO: 6817
  GFR-binding peptide
  MOD_RES (5), (6), (38), (40): Xaa is C or S

SEQ ID NO: 14156 - protein, 40 aa, Artificial Sequence
  GFR-binding peptide
  MOD_RES (3), (4), (37), (39): Xaa is C or S
  MOD_RES (18), (19), (20), (21), (22): Xaa is A or G
  MOD_RES (23), (24), (25), (26): Xaa is A or G or is absent
APXXVPQALEPLPIVYYXXXXXXXXXEQLSNMIVRSXKXS

SEQ ID NO: 14157 - protein, 38 aa, Artificial Sequence
  GFR-binding peptide
  MOD_RES (6), (6): Xaa is C or S
  MOD_RES (20), (21), (22), (23), (24): Xaa is A or G
  MOD_RES (25), (26), (27), (28): Xaa is A or G or is absent
VTKPTXAPTKLEPLTVLYYXXXXXXXXXEQLSNNMVVR

SEQ ID NO: 14158 - protein, 39 aa, Artificial Sequence
  GFR-binding peptide
  MOD_RES (6), (7), (39): Xaa is C or S
SIPKAXXVPTELEPLTMLYYDEYDKVVEQLSNEMVVEGX

SEQ ID NO: 14159 - protein, 36 aa, Artificial Sequence
  GFR-binding peptide
  MOD_RES (4), (5): Xaa is C or S
PKPXXAPTQLEPLPVVYYDDSSNVIEQLSNNMVVRA

SEQ ID NO: 14160 - protein, 42 aa, Artificial Sequence
  GFR-binding peptide
  MOD_RES (4), (5), (39), (41): Xaa is C or S
  MOD_RES (19), (20), (21), (22), (23): Xaa is A or G
  MOD_RES (24), (25), (26), (27): Xaa is A or G or is absent
PKAXXVPTELEPLPMVYYXXXXXXXXXEQLSNEMVVEGXGXR

SEQ ID NO: 14161 - protein, 32 aa, Artificial Sequence
  GFR-binding peptide
  MOD_RES (14), (15), (16), (17), (18): Xaa is A or G
  MOD_RES (19), (20), (21), (22): Xaa is A or G or is absent
VSQDLSPISILFIXXXXXXXXXYKQYEMIVKS

SEQ ID NO: 14162 - protein, 40 aa, Artificial Sequence
  GFR-binding peptide
  MOD_RES (4), (5), (37), (39): Xaa is C or S
PKAXXVPTELEPLPMVYYDENEKVVEQLSNDMVVEGXGXR

SEQ ID NO: 14163 - protein, 39 aa, Artificial Sequence
  GFR-binding peptide
  MOD_RES (2), (3), (36), (38): Xaa is C or S
  MOD_RES (17), (18), (19), (20), (21): Xaa is A or G
  MOD_RES (22), (23), (24), (25): Xaa is A or G or is absent
PXXVPQALEPLTILYYXXXXXXXXXEQLSNMIVRSXKXS

SEQ ID NO: 14164 - protein, 35 aa, Artificial Sequence
  GFR-binding peptide
  MOD_RES (1), (32), (34): Xaa is C or S
XVPQDLEPLPIVYYVGRTPKVEQLSNMVVKSXKXS

SEQ ID NO: 14165 - protein, 38 aa, Artificial Sequence
  GFR-binding peptide
  MOD_RES (5), (6): Xaa is C or S
  MOD_RES (20), (21), (22), (23), (24): Xaa is A or G
  MOD_RES (25), (26), (27), (28): Xaa is A or G or is absent
TPPTXXVPTRLSPISILFIXXXXXXXXXYKQYEDMVVE

SEQ ID NO: 14166 - protein, 38 aa, Artificial Sequence; identical to SEQ ID NO: 6825
  GFR-binding peptide
  MOD_RES (1), (2), (35), (37): Xaa is C or S
  MOD_RES (16), (17), (18), (19), (20): Xaa is A or G
  MOD_RES (21), (22), (23), (24): Xaa is A or G or is absent

SEQ ID NO: 14167 - protein, 36 aa, Artificial Sequence
  GFR-binding peptide
  MOD_RES (4), (5): Xaa is C or S
PPTXXVPTRLNAISILYFDSANNVVLKKYRDMVVES

SEQ ID NO: 14168 - protein, 34 aa, Artificial Sequence
  GFR-binding peptide
  MOD_RES (31), (33): Xaa is C or S
VPQALEPLTILYYVGRKPKVEQLSNMIVRSXKXS

SEQ ID NO: 14169 - protein, 40 aa, Artificial Sequence; identical to SEQ ID NO: 6831
  GFR-binding peptide
  MOD_RES (6), (7), (38), (40): Xaa is C or S

SEQ ID NO: 14170 - protein, 37 aa, Artificial Sequence
  GFR-binding peptide
  MOD_RES (1), (34), (36): Xaa is C or S
  MOD_RES (15), (16), (17), (18), (19): Xaa is A or G
  MOD_RES (20), (21), (22), (23): Xaa is A or G or is absent
XVPQALEPLTILYYXXXXXXXXXEQLSNMIVRSXKXS

SEQ ID NO: 14171 - protein, 37 aa, Artificial Sequence
  GFR-binding peptide
  MOD_RES (34), (36): Xaa is C or S
  MOD_RES (14), (15), (16), (17), (18): Xaa is A or G
  MOD_RES (19), (20), (21), (22): Xaa is A or G or is absent
VPTELEPLPMVYYXXXXXXXXXEQLSNEMVVEGXGXR

SEQ ID NO: 14172 - protein, 39 aa, Artificial Sequence; identical to SEQ ID NO: 6832
  GFR-binding peptide
  MOD_RES (6), (6): Xaa is C or S
  MOD_RES (20), (21), (22), (23), (24): Xaa is A or G
  MOD_RES (25), (26), (27), (28): Xaa is A or G or is absent

SEQ ID NO: 14173 - protein, 40 aa, Artificial Sequence; identical to SEQ ID NO: 6834
  GFR-binding peptide
  MOD_RES (5), (6), (40): Xaa is C or S
  MOD_RES (20), (21), (22), (23), (24): Xaa is A or G
  MOD_RES (25), (26), (27), (28): Xaa is A or G or is absent

SEQ ID NO: 14174 - protein, 33 aa, Artificial Sequence
  GFR-binding peptide
  MOD_RES (32), (32): Xaa is C or S
VPTRLEPLPIVYYDSANNVVEQLSNDMVVESXG

SEQ ID NO: 14175 - protein, 35 aa, Artificial Sequence
  GFR-binding peptide
  MOD_RES (2), (3), (35): Xaa is C or S
AXXVPTELEPLPMVYYDENEKVVEQLSNDMVVEGX

SEQ ID NO: 14176 - protein, 40 aa, Artificial Sequence
  GFR-binding peptide
  MOD_RES (4), (5), (37), (39): Xaa is C or S
PKPXXAPTKLSPISVLFIDDSSNVIYKQYENMVVRSXGXH

SEQ ID NO: 14177 - protein, 32 aa, Artificial Sequence
  GFR-binding peptide
  MOD_RES (31), (31): Xaa is C or S
VPQDLSPISILFIVGRTPKVYKQYEMVVKSXK

SEQ ID NO: 14178 - protein, 36 aa, Artificial Sequence
  GFR-binding peptide
  MOD_RES (1), (2), (35): Xaa is C or S
  MOD_RES (16), (17), (18), (19), (20): Xaa is A or G
  MOD_RES (21), (22), (23), (24): Xaa is A or G or is absent
XXVPQDLEPLPIVYYXXXXXXXXXEQLSNMVVKSXK

SEQ ID NO: 14179 - protein, 36 aa, Artificial Sequence
  GFR-binding peptide
  MOD_RES (1), (2), (36): Xaa is C or S
  MOD_RES (16), (17), (18), (19), (20): Xaa is A or G
  MOD_RES (21), (22), (23), (24): Xaa is A or G or is absent
XXVPTRLNAISILYFXXXXXXXXXLKKYRDMVVESX

SEQ ID NO: 14180 - protein, 34 aa, Artificial Sequence
  GFR-binding peptide
  MOD_RES (1), (2): Xaa is C or S
  MOD_RES (16), (17), (18), (19), (20): Xaa is A or G
  MOD_RES (21), (22), (23), (24): Xaa is A or G or is absent
XXVPTRLNAISILYFXXXXXXXXXLKKYRDMVVE

SEQ ID NO: 14181 - protein, 33 aa, Artificial Sequence; identical to SEQ ID NO: 6840
  GFR-binding peptide
  MOD_RES (1), (2), (33): Xaa is C or S

SEQ ID NO: 14182 - protein, 39 aa, Artificial Sequence
  GFR-binding peptide
  MOD_RES (5), (6), (39): Xaa is C or S
  MOD_RES (20), (21), (22), (23), (24): Xaa is A or G
  MOD_RES (25), (26), (27), (28): Xaa is A or G or is absent
SAAPXXVPQALEPLPIVYYXXXXXXXXXEQLSNMIVRSX

SEQ ID NO: 14183 - protein, 38 aa, Artificial Sequence; identical to SEQ ID NO: 6844
  GFR-binding peptide
  MOD_RES (1), (35), (37): Xaa is C or S
  MOD_RES (15), (16), (17), (18), (19): Xaa is A or G
  MOD_RES (20), (21), (22), (23): Xaa is A or G or is absent

SEQ ID NO: 14184 - protein, 38 aa, Artificial Sequence; identical to SEQ ID NO: 6845
  GFR-binding peptide
  MOD_RES (3), (4), (38): Xaa is C or S
  MOD_RES (18), (19), (20), (21), (22): Xaa is A or G
  MOD_RES (23), (24), (25), (26): Xaa is A or G or is absent

SEQ ID NO: 14185 - protein, 35 aa, Artificial Sequence; identical to SEQ ID NO: 6849
  GFR-binding peptide
  MOD_RES (1), (2), (35): Xaa is C or S
  MOD_RES (16), (17), (18), (19), (20): Xaa is A or G
  MOD_RES (21), (22), (23), (24): Xaa is A or G or is absent

SEQ ID NO: 14186 - protein, 36 aa, Artificial Sequence
  GFR-binding peptide
  MOD_RES (2), (3): Xaa is C or S
  MOD_RES (17), (18), (19), (20), (21): Xaa is A or G
  MOD_RES (22), (23), (24), (25): Xaa is A or G or is absent
TXXVPTRLEPLPIVYYXXXXXXXXXEQLSNDMVVES

SEQ ID NO: 14187 - protein, 36 aa, Artificial Sequence; identical to SEQ ID NO: 6850
  GFR-binding peptide
  MOD_RES (4), (4): Xaa is C or S
  MOD_RES (18), (19), (20), (21), (22): Xaa is A or G
  MOD_RES (23), (24), (25), (26): Xaa is A or G or is absent

SEQ ID NO: 14188 - protein, 37 aa, Artificial Sequence; identical to SEQ ID NO: 6853
  GFR-binding peptide
  MOD_RES (2), (3), (37): Xaa is C or S
  MOD_RES (17), (18), (19), (20), (21): Xaa is A or G
  MOD_RES (22), (23), (24), (25): Xaa is A or G or is absent

SEQ ID NO: 14189 - protein, 33 aa, Artificial Sequence
  GFR-binding peptide
  MOD_RES (1), (32): Xaa is C or S
XVPQALSPISILFIVGRKPKVYKQYEMIVRSXK

SEQ ID NO: 14190 - protein, 36 aa, Artificial Sequence
  GFR-binding peptide
  MOD_RES (4), (5): Xaa is C or S
PKPXXAPTKLSPISVLFIDDSSNVIYKQYENMVVRS

SEQ ID NO: 14191 - protein, 36 aa, Artificial Sequence
  GFR-binding peptide
  MOD_RES (2), (3), (35): Xaa is C or S
PXXAPTQLSPISVLFIDDSSNVIYKQYENMVVRAXG

SEQ ID NO: 14192 - protein, 35 aa, Artificial Sequence
  GFR-binding peptide
  MOD_RES (2), (3): Xaa is C or S
  MOD_RES (17), (18), (19), (20), (21): Xaa is A or G
  MOD_RES (22), (23), (24), (25): Xaa is A or G or is absent
PXXVSQDLEPLPIVYYXXXXXXXXXEQLSNMIVKS

SEQ ID NO: 14193 - protein, 33 aa, Artificial Sequence; identical to SEQ ID NO: 6857
  GFR-binding peptide
  MOD_RES (32), (32): Xaa is C or S

SEQ ID NO: 14194 - protein, 42 aa, Artificial Sequence
  GFR-binding peptide
  MOD_RES (6), (7), (39), (41): Xaa is C or S
YVPKPXXAPTKLEPLPVVYYDDSSNVIEQLSNNMVVRSXGXH

SEQ ID NO: 14195 - protein, 37 aa, Artificial Sequence; identical to SEQ ID NO: 6858
  GFR-binding peptide
  MOD_RES (1), (35), (37): Xaa is C or S
  MOD_RES (15), (16), (17), (18), (19): Xaa is A or G
  MOD_RES (20), (21), (22), (23): Xaa is A or G or is absent

SEQ ID NO: 14196 - protein, 34 aa, Artificial Sequence
  GFR-binding peptide
  MOD_RES (3), (3): Xaa is C or S
PTXAPTKLSPISVLFIDDSSNVIYKQYENMVVRS

SEQ ID NO: 14197 - protein, 39 aa, Artificial Sequence
  GFR-binding peptide
  MOD_RES (6), (38): Xaa is C or S
VTKPTXAPTKLEPLPVVYYDDSSNVIEQLSNNMVVRSXG

SEQ ID NO: 14198 - protein, 34 aa, Artificial Sequence
  GFR-binding peptide
  MOD_RES (1), (2): Xaa is C or S
  MOD_RES (16), (17), (18), (19), (20): Xaa is A or G
  MOD_RES (21), (22), (23), (24): Xaa is A or G or is absent
XXVPQALEPLTILYYXXXXXXXXXEQLSNMIVRS

SEQ ID NO: 14199 - protein, 38 aa, Artificial Sequence; identical to SEQ ID NO: 6862
  GFR-binding peptide
  MOD_RES (4), (5): Xaa is C or S
  MOD_RES (19), (20), (21), (22), (23): Xaa is A or G
  MOD_RES (24), (25), (26), (27): Xaa is A or G or is absent

SEQ ID NO: 14200 - protein, 35 aa, Artificial Sequence
  GFR-binding peptide
  MOD_RES (32), (34): Xaa is C or S
VPTELEPLPMVYYDEYDKVVEQLSNEMVVEGXGXR

SEQ ID NO: 14201 - protein, 36 aa, Artificial Sequence
  GFR-binding peptide
  MOD_RES (3), (4): Xaa is C or S
  MOD_RES (18), (19), (20), (21), (22): Xaa is A or G
  MOD_RES (23), (24), (25), (26): Xaa is A or G or is absent
PTXXVPTRLSPISILFIXXXXXXXXXYKQYEDMVVE

SEQ ID NO: 14202 - protein, 36 aa, Artificial Sequence
  GFR-binding peptide
  MOD_RES (1), (33), (35): Xaa is C or S
XAPTQLEPLTVLYYDDSSNVIEQLSNNMVVRAXGXH

SEQ ID NO: 14203 - protein, 43 aa, Artificial Sequence; identical to SEQ ID NO: 6864
  GFR-binding peptide
  MOD_RES (6), (7), (40), (42): Xaa is C or S
  MOD_RES (21), (22), (23), (24), (25): Xaa is A or G
  MOD_RES (26), (27), (28), (29): Xaa is A or G or is absent

SEQ ID NO: 14204 - protein, 36 aa, Artificial Sequence
  GFR-binding peptide
  MOD_RES (2), (3): Xaa is C or S
  MOD_RES (17), (18), (19), (20), (21): Xaa is A or G
  MOD_RES (22), (23), (24), (25): Xaa is A or G or is absent
PXXAPTQLEPLPVVYYXXXXXXXXXEQLSNNMVVRA

SEQ ID NO: 14205 - protein, 37 aa, Artificial Sequence
  GFR-binding peptide
  MOD_RES (6), (7): Xaa is C or S
TVPKPXXAPTQLEPLPVVYYDDSSNVIEQLSNNMVVR

SEQ ID NO: 14206 - protein, 36 aa, Artificial Sequence
  GFR-binding peptide
  MOD_RES (4), (5): Xaa is C or S
PKPXXAPTQLSPISVLFIDDSSNVIYKQYENMVVRA

SEQ ID NO: 14207 - protein, 40 aa, Artificial Sequence; identical to SEQ ID NO: 6869
  GFR-binding peptide
  MOD_RES (3), (4), (37), (39): Xaa is C or S
  MOD_RES (18), (19), (20), (21), (22): Xaa is A or G
  MOD_RES (23), (24), (25), (26): Xaa is A or G or is absent

SEQ ID NO: 14208 - protein, 35 aa, Artificial Sequence; identical to SEQ ID NO: 6870
  GFR-binding peptide
  MOD_RES (1), (33), (35): Xaa is C or S

SEQ ID NO: 14209 - protein, 36 aa, Artificial Sequence
  GFR-binding peptide
  MOD_RES (5), (6): Xaa is C or S
VPKPXXAPTKLSPISVLFIDDSSNVIYKQYENMVVR

SEQ ID NO: 14210 - protein, 35 aa, Artificial Sequence; identical to SEQ ID NO: 6872
  GFR-binding peptide
  MOD_RES (3), (4): Xaa is C or S

SEQ ID NO: 14211 - protein, 33 aa, Artificial Sequence
  GFR-binding peptide
  MOD_RES (32), (32): Xaa is C or S
VPTELEPLTMLYYDEYDKVVEQLSNEMVVEGXG

SEQ ID NO: 14212 - protein, 35 aa, Artificial Sequence; identical to SEQ ID NO: 6875
  GFR-binding peptide
  MOD_RES (1), (2), (35): Xaa is C or S
  MOD_RES (16), (17), (18), (19), (20): Xaa is A or G
  MOD_RES (21), (22), (23), (24): Xaa is A or G or is absent

SEQ ID NO: 14213 - protein, 34 aa, Artificial Sequence
  GFR-binding peptide
  MOD_RES (1), (2), (34): Xaa is C or S
XXAPTKLEPLTVLYYDDSSNVIEQLSNNMVVRSX

SEQ ID NO: 14214 - protein, 35 aa, Artificial Sequence; identical to SEQ ID NO: 6877
  GFR-binding peptide
  MOD_RES (2), (3), (34): Xaa is C or S

SEQ ID NO: 14215 - protein, 32 aa, Artificial Sequence
  GFR-binding peptide
  MOD_RES (14), (15), (16), (17), (18): Xaa is A or G
  MOD_RES (19), (20), (21), (22): Xaa is A or G or is absent
VPTRLSPISILFIXXXXXXXXXYKQYEDMVVE

SEQ ID NO: 14216 - protein, 37 aa, Artificial Sequence
  GFR-binding peptide
  MOD_RES (4), (36): Xaa is C or S
KPTXAPTKLEPLPVVYYDDSSNVIEQLSNNMVVRSXG

SEQ ID NO: 14217 - protein, 37 aa, Artificial Sequence
  GFR-binding peptide
  MOD_RES (1), (35), (37): Xaa is C or S
  MOD_RES (15), (16), (17), (18), (19): Xaa is A or G
  MOD_RES (20), (21), (22), (23): Xaa is A or G or is absent
XAPTQLSPISVLFIXXXXXXXXXYKQYENMVVRAXGX

SEQ ID NO: 14218 - protein, 37 aa, Artificial Sequence
  GFR-binding peptide
  MOD_RES (5), (6): Xaa is C or S
IPKAXXVPTELEPLTMLYYDENEKVVEQLSNDMVVEG

SEQ ID NO: 14219 - protein, 36 aa, Artificial Sequence
  GFR-binding peptide
  MOD_RES (1), (34), (36): Xaa is C or S
  MOD_RES (15), (16), (17), (18), (19): Xaa is A or G
  MOD_RES (20), (21), (22), (23): Xaa is A or G or is absent
XVSQDLEPLPIVYYXXXXXXXXXEQLSNMIVKSXKX

SEQ ID NO: 14220 - protein, 38 aa, Artificial Sequence
  GFR-binding peptide
  MOD_RES (6), (6): Xaa is C or S
  MOD_RES (20), (21), (22), (23), (24): Xaa is A or G
  MOD_RES (25), (26), (27), (28): Xaa is A or G or is absent
VTKPTXAPTKLEPLPVVYYXXXXXXXXXEQLSNNMVVR

SEQ ID NO: 14221 - protein, 36 aa, Artificial Sequence
  GFR-binding peptide
  MOD_RES (1), (2), (36): Xaa is C or S
  MOD_RES (16), (17), (18), (19), (20): Xaa is A or G
  MOD_RES (21), (22), (23), (24): Xaa is A or G or is absent
XXAPTKLEPLPVVYYXXXXXXXXXEQLSNNMVVRSX

SEQ ID NO: 14222 - protein, 39 aa, Artificial Sequence; identical to SEQ ID NO: 6883
  GFR-binding peptide
  MOD_RES (4), (5), (38): Xaa is C or S
  MOD_RES (19), (20), (21), (22), (23): Xaa is A or G
  MOD_RES (24), (25), (26), (27): Xaa is A or G or is absent

SEQ ID NO: 14223 - protein, 38 aa, Artificial Sequence; identical to SEQ ID NO: 6885
  GFR-binding peptide
  MOD_RES (4), (36), (38): Xaa is C or S

SEQ ID NO: 14224 - protein, 35 aa, Artificial Sequence; identical to SEQ ID NO: 6886
  GFR-binding peptide
  MOD_RES (3), (4): Xaa is C or S

SEQ ID NO: 14225 - protein, 44 aa, Artificial Sequence
  GFR-binding peptide
  MOD_RES (6), (7), (41), (43): Xaa is C or S
  MOD_RES (21), (22), (23), (24), (25): Xaa is A or G
  MOD_RES (26), (27), (28), (29): Xaa is A or G or is absent
STPPTXXVPTRLSPISILFIXXXXXXXXXYKQYEDMVVESXGXR

SEQ ID NO: 14226 - protein, 35 aa, Artificial Sequence
  GFR-binding peptide
  MOD_RES (1), (33), (35): Xaa is C or S
XAPTQLSPISVLFIDDSSNVIYKQYENMVVRAXGX

SEQ ID NO: 14227 - protein, 39 aa, Artificial Sequence
  GFR-binding peptide
  MOD_RES (3), (4), (37), (39): Xaa is C or S
  MOD_RES (18), (19), (20), (21), (22): Xaa is A or G
  MOD_RES (23), (24), (25), (26): Xaa is A or G or is absent
APXXVPQALEPLTILYYXXXXXXXXXEQLSNMIVRSXKX

SEQ ID NO: 14228 - protein, 35 aa, Artificial Sequence
  GFR-binding peptide
  MOD_RES (32), (34): Xaa is C or S
APTQLSPISVLFIDDSSNVIYKQYENMVVRAXGXH

SEQ ID NO: 14229 - protein, 37 aa, Artificial Sequence; identical to SEQ ID NO: 6890
  GFR-binding peptide
  MOD_RES (4), (5), (36): Xaa is C or S

SEQ ID NO: 14230 - protein, 37 aa, Artificial Sequence
  GFR-binding peptide
  MOD_RES (4), (5): Xaa is C or S
  MOD_RES (19), (20), (21), (22), (23): Xaa is A or G
  MOD_RES (24), (25), (26), (27): Xaa is A or G or is absent
ASPXXVPQDLSPISILFIXXXXXXXXXYKQYEMVVKS

SEQ ID NO: 14231 - protein, 39 aa, Artificial Sequence
  GFR-binding peptide
  MOD_RES (3), (4), (37), (39): Xaa is C or S
  MOD_RES (18), (19), (20), (21), (22): Xaa is A or G
  MOD_RES (23), (24), (25), (26): Xaa is A or G or is absent
SPXXVPQDLSPISILFIXXXXXXXXXYKQYEMVVKSXKX

SEQ ID NO: 14232 - protein, 39 aa, Artificial Sequence
  GFR-binding peptide
  MOD_RES (2), (3), (37), (39): Xaa is C or S
  MOD_RES (17), (18), (19), (20), (21): Xaa is A or G
  MOD_RES (22), (23), (24), (25): Xaa is A or G or is absent
PXXAPTKLEPLTVLYYXXXXXXXXXEQLSNNMVVRSXGX

SEQ ID NO: 14233 - protein, 41 aa, Artificial Sequence; identical to SEQ ID NO: 6893
  GFR-binding peptide
  MOD_RES (6), (7), (38), (40): Xaa is C or S

SEQ ID NO: 14234 - protein, 33 aa, Artificial Sequence
  GFR-binding peptide
  MOD_RES (1), (1): Xaa is C or S
  MOD_RES (15), (16), (17), (18), (19): Xaa is A or G
  MOD_RES (20), (21), (22), (23): Xaa is A or G or is absent
XVPTELSPISMLFIXXXXXXXXXYKQYEEMVVE

SEQ ID NO: 14235 - protein, 38 aa, Artificial Sequence
  GFR-binding peptide
  MOD_RES (2), (3), (37): Xaa is C or S
  MOD_RES (17), (18), (19), (20), (21): Xaa is A or G
  MOD_RES (22), (23), (24), (25): Xaa is A or G or is absent
AXXVPTELEPLTMLYYXXXXXXXXXEQLSNDMVVEGXG

SEQ ID NO: 14236 - protein, 39 aa, Artificial Sequence; identical to SEQ ID NO: 6896
  GFR-binding peptide
  MOD_RES (4), (5), (39): Xaa is C or S
  MOD_RES (19), (20), (21), (22), (23): Xaa is A or G
  MOD_RES (24), (25), (26), (27): Xaa is A or G or is absent

SEQ ID NO: 14237 - protein, 39 aa, Artificial Sequence
  GFR-binding peptide
  MOD_RES (3), (4), (38): Xaa is C or S
  MOD_RES (18), (19), (20), (21), (22): Xaa is A or G
  MOD_RES (23), (24), (25), (26): Xaa is A or G or is absent
KAXXVPTELEPLTMLYYXXXXXXXXXEQLSNEMVVEGXG

SEQ ID NO: 14238 - protein, 43 aa, Artificial Sequence; identical to SEQ ID NO: 6897
  GFR-binding peptide
  MOD_RES (5), (6), (40), (42): Xaa is C or S
  MOD_RES (20), (21), (22), (23), (24): Xaa is A or G
  MOD_RES (25), (26), (27), (28): Xaa is A or G or is absent

SEQ ID NO: 14239 - protein, 39 aa, Artificial Sequence
  GFR-binding peptide
  MOD_RES (5), (6), (37), (39): Xaa is C or S
SASPXXVPQDLEPLPIVYYVGRTPKVEQLSNMVVKSXKX

SEQ ID NO: 14240 - protein, 38 aa, Artificial Sequence; identical to SEQ ID NO: 6898
  GFR-binding peptide
  MOD_RES (2), (3), (36), (38): Xaa is C or S
  MOD_RES (17), (18), (19), (20), (21): Xaa is A or G
  MOD_RES (22), (23), (24), (25): Xaa is A or G or is absent

SEQ ID NO: 14241 - protein, 34 aa, Artificial Sequence
  GFR-binding peptide
  MOD_RES (1), (2): Xaa is C or S
  MOD_RES (16), (17), (18), (19), (20): Xaa is A or G
  MOD_RES (21), (22), (23), (24): Xaa is A or G or is absent
XXVPTELEPLTMLYYXXXXXXXXXEQLSNEMVVE

SEQ ID NO: 14242 - protein, 37 aa, Artificial Sequence; identical to SEQ ID NO: 6901
  GFR-binding peptide
  MOD_RES (3), (4): Xaa is C or S
  MOD_RES (18), (19), (20), (21), (22): Xaa is A or G
  MOD_RES (23), (24), (25), (26): Xaa is A or G or is absent

SEQ ID NO: 14243 - protein, 33 aa, Artificial Sequence
  GFR-binding peptide
  MOD_RES (2), (3): Xaa is C or S
AXXVPTELEPLPMVYYDENEKVVEQLSNDMVVE

SEQ ID NO: 14244 - protein, 40 aa, Artificial Sequence
  GFR-binding peptide
  MOD_RES (6), (7), (40): Xaa is C or S
  MOD_RES (21), (22), (23), (24), (25): Xaa is A or G
  MOD_RES (26), (27), (28), (29): Xaa is A or G or is absent
ASASPXXVPQDLSPISILFIXXXXXXXXXYKQYEMVVKSX

SEQ ID NO: 14245 - protein, 44 aa, Artificial Sequence
  GFR-binding peptide
  MOD_RES (6), (7), (41), (43): Xaa is C or S
  MOD_RES (21), (22), (23), (24), (25): Xaa is A or G
  MOD_RES (26), (27), (28), (29): Xaa is A or G or is absent
YVPKPXXAPTKLSPISVLFIXXXXXXXXXYKQYENMVVRSXGXH

SEQ ID NO: 14246 - protein, 40 aa, Artificial Sequence
  GFR-binding peptide
  MOD_RES (5), (39): Xaa is C or S
  MOD_RES (19), (20), (21), (22), (23): Xaa is A or G
  MOD_RES (24), (25), (26), (27): Xaa is A or G or is absent
TKPTXAPTKLSPISVLFIXXXXXXXXXYKQYENMVVRSXG

SEQ ID NO: 14247 - protein, 40 aa, Artificial Sequence; identical to SEQ ID NO: 6903
  GFR-binding peptide
  MOD_RES (4), (38), (40): Xaa is C or S
  MOD_RES (18), (19), (20), (21), (22): Xaa is A or G
  MOD_RES (23), (24), (25), (26): Xaa is A or G or is absent

SEQ ID NO: 14248 - protein, 32 aa, Artificial Sequence; identical to SEQ ID NO: 6905
  GFR-binding peptide
  MOD_RES (14), (15), (16), (17), (18): Xaa is A or G
  MOD_RES (19), (20), (21), (22): Xaa is A or G or is absent

SEQ ID NO: 14249 - protein, 34 aa, Artificial Sequence
  GFR-binding peptide
  MOD_RES (1), (1): Xaa is C or S
  MOD_RES (15), (16), (17), (18), (19): Xaa is A or G
  MOD_RES (20), (21), (22), (23): Xaa is A or G or is absent
XVPTELEPLPMVYYXXXXXXXXXEQLSNEMVVEG

SEQ ID NO: 14250 - protein, 38 aa, Artificial Sequence
  GFR-binding peptide
  MOD_RES (2), (3), (37): Xaa is C or S
  MOD_RES (17), (18), (19), (20), (21): Xaa is A or G
  MOD_RES (22), (23), (24), (25): Xaa is A or G or is absent
TXXVPTRLEPLTILYYXXXXXXXXXEQLSNDMVVESXG

SEQ ID NO: 14251 - protein, 38 aa, Artificial Sequence
  GFR-binding peptide
  MOD_RES (1), (2), (36), (38): Xaa is C or S
  MOD_RES (16), (17), (18), (19), (20): Xaa is A or G
  MOD_RES (21), (22), (23), (24): Xaa is A or G or is absent
XXAPTKLEPLTVLYYXXXXXXXXXEQLSNNMVVRSXGX

SEQ ID NO: 14252 - protein, 40 aa, Artificial Sequence
  GFR-binding peptide
  MOD_RES (3), (4), (37), (39): Xaa is C or S
  MOD_RES (18), (19), (20), (21), (22): Xaa is A or G
  MOD_RES (23), (24), (25), (26): Xaa is A or G or is absent
APXXVPQALEPLTILYYXXXXXXXXXEQLSNMIVRSXKXS

SEQ ID NO: 14253 - protein, 32 aa, Artificial Sequence
  GFR-binding peptide
  MOD_RES (1), (2): Xaa is C or S
XXVPQDLEPLPIVYYVGRTPKVEQLSNMVVKS

SEQ ID NO: 14254 - protein, 37 aa, Artificial Sequence
  GFR-binding peptide
  MOD_RES (1), (35), (37): Xaa is C or S
  MOD_RES (15), (16), (17), (18), (19): Xaa is A or G
  MOD_RES (20), (21), (22), (23): Xaa is A or G or is absent
XVPTRLSPISILFIXXXXXXXXXYKQYEDMVVESXGX

SEQ ID NO: 14255 - protein, 35 aa, Artificial Sequence
  GFR-binding peptide
  MOD_RES (1), (2), (35): Xaa is C or S
  MOD_RES (16), (17), (18), (19), (20): Xaa is A or G
  MOD_RES (21), (22), (23), (24): Xaa is A or G or is absent
XXVPQDLSPISILFIXXXXXXXXXYKQYEMVVKSX

SEQ ID NO: 14256 - protein, 31 aa, Artificial Sequence; identical to SEQ ID NO: 6916
  GFR-binding peptide
  MOD_RES (1), (1): Xaa is C or S

SEQ ID NO: 14257 - protein, 39 aa, Artificial Sequence
  GFR-binding peptide
  MOD_RES (2), (3), (37), (39): Xaa is C or S
  MOD_RES (17), (18), (19), (20), (21): Xaa is A or G
  MOD_RES (22), (23), (24), (25): Xaa is A or G or is absent
AXXVPTELSPISMLFIXXXXXXXXXYKQYEDMVVEGXGX

SEQ ID NO: 14258 - protein, 37 aa, Artificial Sequence
  GFR-binding peptide
  MOD_RES (3), (4): Xaa is C or S
  MOD_RES (18), (19), (20), (21), (22): Xaa is A or G
  MOD_RES (23), (24), (25), (26): Xaa is A or G or is absent
PTXXVPTRLNAISILYFXXXXXXXXXLKKYRDMVVES

SEQ ID NO: 14259 - protein, 34 aa, Artificial Sequence
  GFR-binding peptide
  MOD_RES (3), (4): Xaa is C or S
KAXXVPTELSPISMLFIDEYDKVVYKQYEEMVVE

SEQ ID NO: 14260 - protein, 41 aa, Artificial Sequence
  GFR-binding peptide
  MOD_RES (6), (7), (41): Xaa is C or S
  MOD_RES (21), (22), (23), (24), (25): Xaa is A or G
  MOD_RES (26), (27), (28), (29): Xaa is A or G or is absent
TVPKPXXAPTQLEPLTVLYYXXXXXXXXXEQLSNNMVVRAX

SEQ ID NO: 14261 - protein, 36 aa, Artificial Sequence
  GFR-binding peptide
  MOD_RES (5), (6): Xaa is C or S
SASPXXVPQDLSPISILFIVGRTPKVYKQYEMVVKS

SEQ ID NO: 14262 - protein, 38 aa, Artificial Sequence
  GFR-binding peptide
  MOD_RES (1), (35), (37): Xaa is C or S
  MOD_RES (15), (16), (17), (18), (19): Xaa is A or G
  MOD_RES (20), (21), (22), (23): Xaa is A or G or is absent
XVPTRLSPISILFIXXXXXXXXXYKQYEDMVVESXGXR

SEQ ID NO: 14263 - protein, 34 aa, Artificial Sequence; identical to SEQ ID NO: 6920
  GFR-binding peptide
  MOD_RES (1), (2): Xaa is C or S
  MOD_RES (16), (17), (18), (19), (20): Xaa is A or G
  MOD_RES (21), (22), (23), (24): Xaa is A or G or is absent

SEQ ID NO: 14264 - protein, 32 aa, Artificial Sequence
  GFR-binding peptide
  MOD_RES (1), (32): Xaa is C or S
XVSQDLEPLPIVYYIGKTPKIEQLSNMIVKSX

SEQ ID NO: 14265 - protein, 42 aa, Artificial Sequence
  GFR-binding peptide
  MOD_RES (4), (5), (39), (41): Xaa is C or S
  MOD_RES (19), (20), (21), (22), (23): Xaa is A or G
  MOD_RES (24), (25), (26), (27): Xaa is A or G or is absent
PKPXXAPTKLEPLPVVYYXXXXXXXXXEQLSNNMVVRSXGXH

SEQ ID NO: 14266 - protein, 35 aa, Artificial Sequence; identical to SEQ ID NO: 6924
  GFR-binding peptide
  MOD_RES (2), (3), (35): Xaa is C or S

SEQ ID NO: 14267 - protein, 37 aa, Artificial Sequence
  GFR-binding peptide
  MOD_RES (6), (7): Xaa is C or S
ASAAPXXVPQALSPISILFIVGRKPKVYKQYEMIVRS

SEQ ID NO: 14268 - protein, 33 aa, Artificial Sequence
  GFR-binding peptide
  MOD_RES (2), (2): Xaa is C or S
TXAPTKLSPISVLFIDDSSNVIYKQYENMVVRS

SEQ ID NO: 14269 - protein, 32 aa, Artificial Sequence
  GFR-binding peptide
  MOD_RES (32), (32): Xaa is C or S
APTKLEPLTVLYYDDSSNVIEQLSNNMVVRSX

SEQ ID NO: 14270 - protein, 34 aa, Artificial Sequence; identical to SEQ ID NO: 6929
  GFR-binding peptide
  MOD_RES (2), (3), (34): Xaa is C or S

SEQ ID NO: 14271 - protein, 35 aa, Artificial Sequence
  GFR-binding peptide
  MOD_RES (2), (34): Xaa is C or S
TXAPTKLEPLPVVYYDDSSNVIEQLSNNMVVRSXG

SEQ ID NO: 14272 - protein, 38 aa, Artificial Sequence; identical to SEQ ID NO: 6930
  GFR-binding peptide
  MOD_RES (6), (7), (38): Xaa is C or S

SEQ ID NO: 14273 - protein, 40 aa, Artificial Sequence
  GFR-binding peptide
  MOD_RES (6), (7): Xaa is C or S
  MOD_RES (21), (22), (23), (24), (25): Xaa is A or G
  MOD_RES (26), (27), (28), (29): Xaa is A or G or is absent
TVPKPXXAPTQLSPISVLFIXXXXXXXXXYKQYENMVVRA

SEQ ID NO: 14274 - protein, 35 aa, Artificial Sequence
  GFR-binding peptide
  MOD_RES (32), (34): Xaa is C or S
APTQLEPLTVLYYDDSSNVIEQLSNNMVVRAXGXH

SEQ ID NO: 14275 - protein, 37 aa, Artificial Sequence
  GFR-binding peptide
  MOD_RES (3), (4): Xaa is C or S
  MOD_RES (18), (19), (20), (21), (22): Xaa is A or G
  MOD_RES (23), (24), (25), (26): Xaa is A or G or is absent
KAXXVPTELEPLTMLYYXXXXXXXXXEQLSNEMVVEG

SEQ ID NO: 14276 - protein, 41 aa, Artificial Sequence
  GFR-binding peptide
  MOD_RES (5), (6), (40): Xaa is C or S
  MOD_RES (20), (21), (22), (23), (24): Xaa is A or G
  MOD_RES (25), (26), (27), (28): Xaa is A or G or is absent
VPKPXXAPTQLEPLTVLYYXXXXXXXXXEQLSNNMVVRAXG

SEQ ID NO: 14277 - protein, 40 aa, Artificial Sequence
  GFR-binding peptide
  MOD_RES (4), (5), (39): Xaa is C or S
  MOD_RES (19), (20), (21), (22), (23): Xaa is A or G
  MOD_RES (24), (25), (26), (27): Xaa is A or G or is absent
PKPXXAPTQLEPLPVVYYXXXXXXXXXEQLSNNMVVRAXG

SEQ ID NO: 14278 - protein, 33 aa, Artificial Sequence; identical to SEQ ID NO: 6934
  GFR-binding peptide
  MOD_RES (14), (15), (16), (17), (18): Xaa is A or G
  MOD_RES (19), (20), (21), (22): Xaa is A or G or is absent

SEQ ID NO: 14279 - protein, 39 aa, Artificial Sequence; identical to SEQ ID NO: 6935
  GFR-binding peptide
  MOD_RES (1), (2), (36), (38): Xaa is C or S
  MOD_RES (16), (17), (18), (19), (20): Xaa is A or G
  MOD_RES (21), (22), (23), (24): Xaa is A or G or is absent

SEQ ID NO: 14280 - protein, 37 aa, Artificial Sequence
  GFR-binding peptide
  MOD_RES (3), (4), (37): Xaa is C or S
  MOD_RES (18), (19), (20), (21), (22): Xaa is A or G
  MOD_RES (23), (24), (25), (26): Xaa is A or G or is absent
APXXVPQALEPLPIVYYXXXXXXXXXEQLSNMIVRSX

SEQ ID NO: 14281 - protein, 40 aa, Artificial Sequence
  GFR-binding peptide
  MOD_RES (4), (5), (38), (40): Xaa is C or S
  MOD_RES (19), (20), (21), (22), (23): Xaa is A or G
  MOD_RES (24), (25), (26), (27): Xaa is A or G or is absent
AAPXXVPQALEPLTILYYXXXXXXXXXEQLSNMIVRSXKX

SEQ ID NO: 14282 - protein, 35 aa, Artificial Sequence
  GFR-binding peptide
  MOD_RES (33), (35): Xaa is C or S
  MOD_RES (14), (15), (16), (17), (18): Xaa is A or G
  MOD_RES (19), (20), (21), (22): Xaa is A or G or is absent
VSQDLEPLPIVYYXXXXXXXXXEQLSNMIVKSXKX

SEQ ID NO: 14283 - protein, 37 aa, Artificial Sequence
  GFR-binding peptide
  MOD_RES (5), (6), (37): Xaa is C or S
SASPXXVPQDLEPLPIVYYVGRTPKVEQLSNMVVKSX

SEQ ID NO: 14284 - protein, 35 aa, Artificial Sequence
  GFR-binding peptide
  MOD_RES (1), (2), (33), (35): Xaa is C or S
XXVPQALEPLTILYYVGRKPKVEQLSNMIVRSXKX

SEQ ID NO: 14285 - protein, 35 aa, Artificial Sequence
  GFR-binding peptide
  MOD_RES (1), (2): Xaa is C or S
  MOD_RES (16), (17), (18), (19), (20): Xaa is A or G
  MOD_RES (21), (22), (23), (24): Xaa is A or G or is absent
XXVPTELEPLPMVYYXXXXXXXXXEQLSNEMVVEG

SEQ ID NO: 14286 - protein, 36 aa, Artificial Sequence
  GFR-binding peptide
  MOD_RES (1), (33), (35): Xaa is C or S
XVPTELEPLPMVYYDEYDKVVEQLSNEMVVEGXGXR

SEQ ID NO: 14287 - protein, 42 aa, Artificial Sequence
  GFR-binding peptide
  MOD_RES (6), (7), (41): Xaa is C or S
  MOD_RES (21), (22), (23), (24), (25): Xaa is A or G
  MOD_RES (26), (27), (28), (29): Xaa is A or G or is absent
TVPKPXXAPTQLEPLPVVYYXXXXXXXXXEQLSNNMVVRAXG

SEQ ID NO: 14288 - protein, 37 aa, Artificial Sequence; identical to SEQ ID NO: 6941
  GFR-binding peptide
  MOD_RES (2), (3), (35), (37): Xaa is C or S

SEQ ID NO: 14289 - protein, 40 aa, Artificial Sequence; identical to SEQ ID NO: 6942
  GFR-binding peptide
  MOD_RES (6), (7): Xaa is C or S
  MOD_RES (21), (22), (23), (24), (25): Xaa is A or G
  MOD_RES (26), (27), (28), (29): Xaa is A or G or is absent

SEQ ID NO: 14290 - protein, 34 aa, Artificial Sequence
  GFR-binding peptide
  MOD_RES (1), (2): Xaa is C or S
  MOD_RES (16), (17), (18), (19), (20): Xaa is A or G
  MOD_RES (21), (22), (23), (24): Xaa is A or G or is absent
XXVSQDLEPLPIVYYXXXXXXXXXEQLSNMIVKS

SEQ ID NO: 14291 - protein, 35 aa, Artificial Sequence
  GFR-binding peptide
  MOD_RES (1), (2), (34): Xaa is C or S
XXVPTELSPISMLFIDENEKVVYKQYEDMVVEGXG

SEQ ID NO: 14292 - protein, 39 aa, Artificial Sequence
  GFR-binding peptide
  MOD_RES (5), (39): Xaa is C or S
  MOD_RES (19), (20), (21), (22), (23): Xaa is A or G
  MOD_RES (24), (25), (26), (27): Xaa is A or G or is absent
TKPTXAPTKLSPISVLFIXXXXXXXXXYKQYENMVVRSX

SEQ ID NO: 14293 - protein, 39 aa, Artificial Sequence
  GFR-binding peptide
  MOD_RES (5), (6), (37), (39): Xaa is C or S
SASPXXVSQDLSPISILFIIGKTPKIYKQYEMIVKSXKX

SEQ ID NO: 14294 - protein, 40 aa, Artificial Sequence; identical to SEQ ID NO: 6946
  GFR-binding peptide
  MOD_RES (6), (7), (38), (40): Xaa is C or S

SEQ ID NO: 14295 - protein, 37 aa, Artificial Sequence; identical to SEQ ID NO: 6947
  GFR-binding peptide
  MOD_RES (3), (4): Xaa is C or S
  MOD_RES (18), (19), (20), (21), (22): Xaa is A or G
  MOD_RES (23), (24), (25), (26): Xaa is A or G or is absent

SEQ ID NO: 14296 - protein, 40 aa, Artificial Sequence; identical to SEQ ID NO: 6954
  GFR-binding peptide
  MOD_RES (4), (5), (39): Xaa is C or S
  MOD_RES (19), (20), (21), (22), (23): Xaa is A or G
  MOD_RES (24), (25), (26), (27): Xaa is A or G or is absent

SEQ ID NO: 14297 - protein, 37 aa, Artificial Sequence; identical to SEQ ID NO: 6955
  GFR-binding peptide
  MOD_RES (4), (5): Xaa is C or S
  MOD_RES (19), (20), (21), (22), (23): Xaa is A or G
  MOD_RES (24), (25), (26), (27): Xaa is A or G or is absent

SEQ ID NO: 14298 - protein, 39 aa, Artificial Sequence; identical to SEQ ID NO: 6958
  GFR-binding peptide
  MOD_RES (4), (5), (38): Xaa is C or S
  MOD_RES (19), (20), (21), (22), (23): Xaa is A or G
  MOD_RES (24), (25), (26), (27): Xaa is A or G or is absent

SEQ ID NO: 14299 - protein, 36 aa, Artificial Sequence
  GFR-binding peptide
  MOD_RES (3), (3): Xaa is C or S
  MOD_RES (17), (18), (19), (20), (21): Xaa is A or G
  MOD_RES (22), (23), (24), (25): Xaa is A or G or is absent
PTXAPTKLEPLTVLYYXXXXXXXXXEQLSNNMVVRS

SEQ ID NO: 14300 - protein, 37 aa, Artificial Sequence; identical to SEQ ID NO: 6961
  GFR-binding peptide
  MOD_RES (1), (34), (36): Xaa is C or S
  MOD_RES (15), (16), (17), (18), (19): Xaa is A or G
  MOD_RES (20), (21), (22), (23): Xaa is A or G or is absent

SEQ ID NO: 14301 - protein, 40 aa, Artificial Sequence; identical to SEQ ID NO: 6962
  GFR-binding peptide
  MOD_RES (6), (7), (40): Xaa is C or S
  MOD_RES (21), (22), (23), (24), (25): Xaa is A or G
  MOD_RES (26), (27), (28), (29): Xaa is A or G or is absent

SEQ ID NO: 14302 - protein, 39 aa, Artificial Sequence
  GFR-binding peptide
  MOD_RES (7), (7): Xaa is C or S
  MOD_RES (21), (22), (23), (24), (25): Xaa is A or G
  MOD_RES (26), (27), (28), (29): Xaa is A or G or is absent
HVTKPTXAPTKLEPLTVLYYXXXXXXXXXEQLSNNMVVR

SEQ ID NO: 14303 - protein, 32 aa, Artificial Sequence
  GFR-binding peptide
  MOD_RES (1), (1): Xaa is C or S
XVPTELEPLTMLYYDENEKVVEQLSNDMVVEG

SEQ ID NO: 14304 - protein, 43 aa, Artificial Sequence
  GFR-binding peptide
  MOD_RES (6), (7), (41), (43): Xaa is C or S
  MOD_RES (21), (22), (23), (24), (25): Xaa is A or G
  MOD_RES (26), (27), (28), (29): Xaa is A or G or is absent
YVPKPXXAPTKLSPISVLFIXXXXXXXXXYKQYENMVVRSXGX

SEQ ID NO: 14305 - protein, 37 aa, Artificial Sequence; identical to SEQ ID NO: 6965
  GFR-binding peptide
  MOD_RES (1), (2), (36): Xaa is C or S
  MOD_RES (16), (17), (18), (19), (20): Xaa is A or G
  MOD_RES (21), (22), (23), (24): Xaa is A or G or is absent

SEQ ID NO: 14306 - protein, 41 aa, Artificial Sequence
  GFR-binding peptide
  MOD_RES (5), (6), (38), (40): Xaa is C or S
IPKAXXVPTELEPLPMVYYDENEKVVEQLSNDMVVEGXGXR

SEQ ID NO: 14307 - protein, 39 aa, Artificial Sequence
  GFR-binding peptide
  MOD_RES (1), (2), (36), (38): Xaa is C or S
  MOD_RES (16), (17), (18), (19), (20): Xaa is A or G
  MOD_RES (21), (22), (23), (24): Xaa is A or G or is absent
XXVPTELEPLPMVYYXXXXXXXXXEQLSNEMVVEGXGXR

SEQ ID NO: 14308 - protein, 42 aa, Artificial Sequence
  GFR-binding peptide
  MOD_RES (4), (5), (39), (41): Xaa is C or S
  MOD_RES (19), (20), (21), (22), (23): Xaa is A or G
  MOD_RES (24), (25), (26), (27): Xaa is A or G or is absent
PKAXXVPTELEPLPMVYYXXXXXXXXXEQLSNDMVVEGXGXR

SEQ ID NO: 14309 - protein, 35 aa, Artificial Sequence; identical to SEQ ID NO: 6970
  GFR-binding peptide
  MOD_RES (1), (2): Xaa is C or S
  MOD_RES (16), (17), (18), (19), (20): Xaa is A or G
  MOD_RES (21), (22), (23), (24): Xaa is A or G or is absent

SEQ ID NO: 14310 - protein, 33 aa, Artificial Sequence
  GFR-binding peptide
  MOD_RES (1), (33): Xaa is C or S
XAPTQLSPISVLFIDDSSNVIYKQYENMVVRAX

SEQ ID NO: 14311 - protein, 43 aa, Artificial Sequence
  GFR-binding peptide
  MOD_RES (5), (6), (40), (42): Xaa is C or S
  MOD_RES (20), (21), (22), (23), (24): Xaa is A or G
  MOD_RES (25), (26), (27), (28): Xaa is A or G or is absent
IPKAXXVPTELEPLTMLYYXXXXXXXXXEQLSNEMVVEGXGXR

SEQ ID NO: 14312 - protein, 37 aa, Artificial Sequence; identical to SEQ ID NO: 6974
  GFR-binding peptide
  MOD_RES (2), (3), (35), (37): Xaa is C or S

SEQ ID NO: 14313 - protein, 39 aa, Artificial Sequence
  GFR-binding peptide
  MOD_RES (2), (3), (37), (39): Xaa is C or S
  MOD_RES (17), (18), (19), (20), (21): Xaa is A or G
  MOD_RES (22), (23), (24), (25): Xaa is A or G or is absent
TXXVPTRLEPLPIVYYXXXXXXXXXEQLSNDMVVESXGX

SEQ ID NO: 14314 - protein, 38 aa, Artificial Sequence; identical to SEQ ID NO: 6975
  GFR-binding peptide
  MOD_RES (4), (5): Xaa is C or S
  MOD_RES (19), (20), (21), (22), (23): Xaa is A or G
  MOD_RES (24), (25), (26), (27): Xaa is A or G or is absent

SEQ ID NO: 14315 - protein, 32 aa, Artificial Sequence; identical to SEQ ID NO: 6976
  GFR-binding peptide
  MOD_RES (14), (15), (16), (17), (18): Xaa is A or G
  MOD_RES (19), (20), (21), (22): Xaa is A or G or is absent

SEQ ID NO: 14316 - protein, 39 aa, Artificial Sequence
  GFR-binding peptide
  MOD_RES (3), (4), (36), (38): Xaa is C or S
KAXXVPTELSPISMLFIDENEKVVYKQYEDMVVEGXGXR

SEQ ID NO: 14317 - protein, 41 aa, Artificial Sequence
  GFR-binding peptide
  MOD_RES (4), (5), (39), (41): Xaa is C or S
  MOD_RES (19), (20), (21), (22), (23): Xaa is A or G
  MOD_RES (24), (25), (26), (27): Xaa is A or G or is absent
PKAXXVPTELEPLPMVYYXXXXXXXXXEQLSNDMVVEGXGX

SEQ ID NO: 14318 - protein, 37 aa, Artificial Sequence
  GFR-binding peptide
  MOD_RES (34), (36): Xaa is C or S
  MOD_RES (14), (15), (16), (17), (18): Xaa is A or G
  MOD_RES (19), (20), (21), (22): Xaa is A or G or is absent
VPTELSPISMLFIXXXXXXXXXYKQYEEMVVEGXGXR

SEQ ID NO: 14319 - protein, 33 aa, Artificial Sequence; identical to SEQ ID NO: 6981
  GFR-binding peptide
  MOD_RES (1), (1): Xaa is C or S
  MOD_RES (15), (16), (17), (18), (19): Xaa is A or G
  MOD_RES (20), (21), (22), (23): Xaa is A or G or is absent

SEQ ID NO: 14320 - protein, 35 aa, Artificial Sequence
  GFR-binding peptide
  MOD_RES (5), (5): Xaa is C or S
TKPTXAPTKLEPLPVVYYDDSSNVIEQLSNNMVVR

SEQ ID NO: 14321 - protein, 34 aa, Artificial Sequence; identical to SEQ ID NO: 6984
  GFR-binding peptide
  MOD_RES (3), (4): Xaa is C or S

SEQ ID NO: 14322 - protein, 42 aa, Artificial Sequence
  GFR-binding peptide
  MOD_RES (6), (7), (39), (41): Xaa is C or S
YVPKPXXAPTKLEPLTVLYYDDSSNVIEQLSNNMVVRSXGXH

SEQ ID NO: 14323 - protein, 40 aa, Artificial Sequence
  GFR-binding peptide
  MOD_RES (5), (6), (39): Xaa is C or S
  MOD_RES (20), (21), (22), (23), (24): Xaa is A or G
  MOD_RES (25), (26), (27), (28): Xaa is A or G or is absent
SASPXXVPQDLEPLTILYYXXXXXXXXXEQLSNMVVKSXK

SEQ ID NO: 14324 - protein, 31 aa, Artificial Sequence; identical to SEQ ID NO: 6986
  GFR-binding peptide
  MOD_RES (1), (1): Xaa is C or S

SEQ ID NO: 14325 - protein, 36 aa, Artificial Sequence
  GFR-binding peptide
  MOD_RES (34), (36): Xaa is C or S
  MOD_RES (14), (15), (16), (17), (18): Xaa is A or G
  MOD_RES (19), (20), (21), (22): Xaa is A or G or is absent
APTKLEPLPVVYYXXXXXXXXXEQLSNNMVVRSXGX

SEQ ID NO: 14326 - protein, 35 aa, Artificial Sequence
  GFR-binding peptide
  MOD_RES (34), (34): Xaa is C or S
  MOD_RES (14), (15), (16), (17), (18): Xaa is A or G
  MOD_RES (19), (20), (21), (22): Xaa is A or G or is absent
VPTRLSPISILFIXXXXXXXXXYKQYEDMVVESXG

SEQ ID NO: 14327 - protein, 40 aa, Artificial Sequence
  GFR-binding peptide
  MOD_RES (3), (37), (39): Xaa is C or S
  MOD_RES (17), (18), (19), (20), (21): Xaa is A or G
  MOD_RES (22), (23), (24), (25): Xaa is A or G or is absent
PTXAPTKLEPLPVVYYXXXXXXXXXEQLSNNMVVRSXGXH

SEQ ID NO: 14328 - protein, 38 aa, Artificial Sequence
  GFR-binding peptide
  MOD_RES (4), (5), (37): Xaa is C or S
PKAXXVPTELSPISMLFIDEYDKVVYKQYEEMVVEGXG

SEQ ID NO: 14329 - protein, 38 aa, Artificial Sequence; identical to SEQ ID NO: 6993
  GFR-binding peptide
  MOD_RES (6), (7): Xaa is C or S

SEQ ID NO: 14330 - protein, 35 aa, Artificial Sequence
  GFR-binding peptide
  MOD_RES (1), (33), (35): Xaa is C or S
XAPTKLEPLPVVYYDDSSNVIEQLSNNMVVRSXGX

SEQ ID NO: 14331 - protein, 35 aa, Artificial Sequence
  GFR-binding peptide
  MOD_RES (2), (3), (35): Xaa is C or S
PXXAPTQLEPLPVVYYDDSSNVIEQLSNNMVVRAX

SEQ ID NO: 14332 - protein, 38 aa, Artificial Sequence
  GFR-binding peptide
  MOD_RES (4), (36), (38): Xaa is C or S
KPTXAPTKLSPISVLFIDDSSNVIYKQYENMVVRSXGX

SEQ ID NO: 14333 - protein, 40 aa, Artificial Sequence
  GFR-binding peptide
  MOD_RES (6), (7), (39): Xaa is C or S
YVPKPXXAPTKLEPLTVLYYDDSSNVIEQLSNNMVVRSXG

SEQ ID NO: 14334 - protein, 33 aa, Artificial Sequence; identical to SEQ ID NO: 6998
  GFR-binding peptide
  MOD_RES (14), (15), (16), (17), (18): Xaa is A or G
  MOD_RES (19), (20), (21), (22): Xaa is A or G or is absent

SEQ ID NO: 14335 - protein, 40 aa, Artificial Sequence
  GFR-binding peptide
  MOD_RES (3), (4), (38), (40): Xaa is C or S
  MOD_RES (18), (19), (20), (21), (22): Xaa is A or G
  MOD_RES (23), (24), (25), (26): Xaa is A or G or is absent
KAXXVPTELSPISMLFIXXXXXXXXXYKQYEEMVVEGXGX

SEQ ID NO: 14336 - protein, 36 aa, Artificial Sequence
  GFR-binding peptide
  MOD_RES (2), (3), (36): Xaa is C or S
  MOD_RES (17), (18), (19), (20), (21): Xaa is A or G
  MOD_RES (22), (23), (24), (25): Xaa is A or G or is absent
PXXVPQALEPLTILYYXXXXXXXXXEQLSNMIVRSX

SEQ ID NO: 14337 - protein, 37 aa, Artificial Sequence
  GFR-binding peptide
  MOD_RES (4), (5), (37): Xaa is C or S
PKAXXVPTELEPLPMVYYDEYDKVVEQLSNEMVVEGX

SEQ ID NO: 14338 - protein, 40 aa, Artificial Sequence
  GFR-binding peptide
  MOD_RES (6), (7), (38), (40): Xaa is C or S
ASASPXXVPQDLEPLPIVYYVGRTPKVEQLSNMVVKSXKX

SEQ ID NO: 14339 - protein, 35 aa, Artificial Sequence
  GFR-binding peptide
  MOD_RES (1), (33), (35): Xaa is C or S
XAPTKLSPISVLFIDDSSNVIYKQYENMVVRSXGX

SEQ ID NO: 14340 - protein, 32 aa, Artificial Sequence
  GFR-binding peptide
  MOD_RES (1), (2): Xaa is C or S
XXVPTELSPISMLFIDEYDKVVYKQYEEMVVE

SEQ ID NO: 14341 - protein, 35 aa, Artificial Sequence; identical to SEQ ID NO: 7006
  GFR-binding peptide
  MOD_RES (33), (35): Xaa is C or S
  MOD_RES (14), (15), (16), (17), (18): Xaa is A or G
  MOD_RES (19), (20), (21), (22): Xaa is A or G or is absent

SEQ ID NO: 14342 - protein, 36 aa, Artificial Sequence; identical to SEQ ID NO: 7007
  GFR-binding peptide
  MOD_RES (1), (2), (33), (35): Xaa is C or S

SEQ ID NO: 14343 - protein, 34 aa, Artificial Sequence; identical to SEQ ID NO: 7010
  GFR-binding peptide
  MOD_RES (2), (3), (34): Xaa is C or S

SEQ ID NO: 14344 - protein, 39 aa, Artificial Sequence
  GFR-binding peptide
  MOD_RES (2), (3), (36), (38): Xaa is C or S
  MOD_RES (17), (18), (19), (20), (21): Xaa is A or G
  MOD_RES (22), (23), (24), (25): Xaa is A or G or is absent
PXXVSQDLSPISILFIXXXXXXXXXYKQYEMIVKSXKXS

SEQ ID NO: 14345 - protein, 38 aa, Artificial Sequence
  GFR-binding peptide
  MOD_RES (5), (6), (37): Xaa is C or S
SAAPXXVPQALEPLTILYYVGRKPKVEQLSNMIVRSXK

SEQ ID NO: 14346 - protein, 33 aa, Artificial Sequence; identical to SEQ ID NO: 7011
  GFR-binding peptide
  MOD_RES (1), (1): Xaa is C or S
  MOD_RES (15), (16), (17), (18), (19): Xaa is A or G
  MOD_RES (20), (21), (22), (23): Xaa is A or G or is absent

SEQ ID NO: 14347 - protein, 37 aa, Artificial Sequence
  GFR-binding peptide
  MOD_RES (34), (36): Xaa is C or S
  MOD_RES (14), (15), (16), (17), (18): Xaa is A or G
  MOD_RES (19), (20), (21), (22): Xaa is A or G or is absent
APTQLEPLTVLYYXXXXXXXXXEQLSNNMVVRAXGXH

SEQ ID NO: 14348 - protein, 35 aa, Artificial Sequence
  GFR-binding peptide
  MOD_RES (1), (33), (35): Xaa is C or S
XVPTRLSAISILYLDSANNVVLKNYQDMVVESXGX

SEQ ID NO: 14349 - protein, 39 aa, Artificial Sequence; identical to SEQ ID NO: 7015
  GFR-binding peptide
  MOD_RES (3), (4), (37), (39): Xaa is C or S
  MOD_RES (18), (19), (20), (21), (22): Xaa is A or G
  MOD_RES (23), (24), (25), (26): Xaa is A or G or is absent

SEQ ID NO: 14350 - protein, 37 aa, Artificial Sequence
  GFR-binding peptide
  MOD_RES (4), (5): Xaa is C or S
  MOD_RES (19), (20), (21), (22), (23): Xaa is A or G
  MOD_RES (24), (25), (26), (27): Xaa is A or G or is absent
PKAXXVPTELSPISMLFIXXXXXXXXXYKQYEDMVVE

SEQ ID NO: 14351 - protein, 39 aa, Artificial Sequence
  GFR-binding peptide
  MOD_RES (6), (7): Xaa is C or S
  MOD_RES (21), (22), (23), (24), (25): Xaa is A or G
  MOD_RES (26), (27), (28), (29): Xaa is A or G or is absent
STPPTXXVPTRLEPLPIVYYXXXXXXXXXEQLSNDMVVE

SEQ ID NO: 14352 - protein, 41 aa, Artificial Sequence; identical to SEQ ID NO: 7021
  GFR-binding peptide
  MOD_RES (4), (38), (40): Xaa is C or S
  MOD_RES (18), (19), (20), (21), (22): Xaa is A or G
  MOD_RES (23), (24), (25), (26): Xaa is A or G or is absent

SEQ ID NO: 14353 - protein, 40 aa, Artificial Sequence
  GFR-binding peptide
  MOD_RES (4), (5), (38), (40): Xaa is C or S
  MOD_RES (19), (20), (21), (22), (23): Xaa is A or G
  MOD_RES (24), (25), (26), (27): Xaa is A or G or is absent
ASPXXVPQDLSPISILFIXXXXXXXXXYKQYEMVVKSXKX

SEQ ID NO: 14354 - protein, 36 aa, Artificial Sequence; identical to SEQ ID NO: 7023
  GFR-binding peptide
  MOD_RES (1), (35): Xaa is C or S
  MOD_RES (15), (16), (17), (18), (19): Xaa is A or G
  MOD_RES (20), (21), (22), (23): Xaa is A or G or is absent

SEQ ID NO: 14355 - protein, 36 aa, Artificial Sequence; identical to SEQ ID NO: 7025
  GFR-binding peptide
  MOD_RES (1), (2), (34), (36): Xaa is C or S

SEQ ID NO: 14356 - protein, 42 aa, Artificial Sequence
  GFR-binding peptide
  MOD_RES (6), (7), (41): Xaa is C or S
  MOD_RES (21), (22), (23), (24), (25): Xaa is A or G
  MOD_RES (26), (27), (28), (29): Xaa is A or G or is absent
KIPKAXXVPTELSPISMLFIXXXXXXXXXYKQYEDMVVEGXG

SEQ ID NO: 14357 - protein, 31 aa, Artificial Sequence
  GFR-binding peptide
  MOD_RES (31), (31): Xaa is C or S
VSQDLSPISILFIIGKTPKIYKQYEMIVKSX

SEQ ID NO: 14358 - protein, 34 aa, Artificial Sequence; identical to SEQ ID NO: 7028
  GFR-binding peptide
  MOD_RES (1), (34): Xaa is C or S
  MOD_RES (15), (16), (17), (18), (19): Xaa is A or G
  MOD_RES (20), (21), (22), (23): Xaa is A or G or is absent

SEQ ID NO: 14359 - protein, 41 aa, Artificial Sequence; identical to SEQ ID NO: 7031
  GFR-binding peptide
  MOD_RES (5), (6), (39), (41): Xaa is C or S
  MOD_RES (20), (21), (22), (23), (24): Xaa is A or G
  MOD_RES (25), (26), (27), (28): Xaa is A or G or is absent

SEQ ID NO: 14360 - protein, 36 aa, Artificial Sequence
  GFR-binding peptide
  MOD_RES (2), (36): Xaa is C or S
  MOD_RES (16), (17), (18), (19), (20): Xaa is A or G
  MOD_RES (21), (22), (23), (24): Xaa is A or G or is absent
TXAPTKLEPLTVLYYXXXXXXXXXEQLSNNMVVRSX

SEQ ID NO: 14361 - protein, 42 aa, Artificial Sequence; identical to SEQ ID NO: 7037
  GFR-binding peptide
  MOD_RES (6), (40), (42): Xaa is C or S
  MOD_RES (20), (21), (22), (23), (24): Xaa is A or G
  MOD_RES (25), (26), (27), (28): Xaa is A or G or is absent

SEQ ID NO: 14362 - protein, 37 aa, Artificial Sequence
  GFR-binding peptide
  MOD_RES (5), (6): Xaa is C or S
VPKPXXAPTKLEPLTVLYYDDSSNVIEQLSNNMVVRS

SEQ ID NO: 14363 - protein, 37 aa, Artificial Sequence
  GFR-binding peptide
  MOD_RES (34), (36): Xaa is C or S
  MOD_RES (14), (15), (16), (17), (18): Xaa is A or G
  MOD_RES (19), (20), (21), (22): Xaa is A or G or is absent
VPTELEPLTMLYYXXXXXXXXXEQLSNDMVVEGXGXR

SEQ ID NO: 14364 - protein, 36 aa, Artificial Sequence
  GFR-binding peptide
  MOD_RES (2), (3), (35): Xaa is C or S
AXXVPTELSPISMLFIDENEKVVYKQYEDMVVEGXG

SEQ ID NO: 14365 - protein, 37 aa, Artificial Sequence
  GFR-binding peptide
  MOD_RES (4), (5), (36): Xaa is C or S
ASPXXVPQDLEPLPIVYYVGRTPKVEQLSNMVVKSXK

SEQ ID NO: 14366 - protein, 39 aa, Artificial Sequence; identical to SEQ ID NO: 7043
  GFR-binding peptide
  MOD_RES (5), (6): Xaa is C or S
  MOD_RES (20), (21), (22), (23), (24): Xaa is A or G
  MOD_RES (25), (26), (27), (28): Xaa is A or G or is absent

SEQ ID NO: 14367 - protein, 34 aa, Artificial Sequence; identical to SEQ ID NO: 7044
  GFR-binding peptide
  MOD_RES (1), (2): Xaa is C or S
  MOD_RES (16), (17), (18), (19), (20): Xaa is A or G
  MOD_RES (21), (22), (23), (24): Xaa is A or G or is absent

SEQ ID NO: 14368 - protein, 40 aa, Artificial Sequence; identical to SEQ ID NO: 7045
  GFR-binding peptide
  MOD_RES (4), (5), (37), (39): Xaa is C or S

SEQ ID NO: 14369 - protein, 35 aa, Artificial Sequence
  GFR-binding peptide
  MOD_RES (1), (35): Xaa is C or S
  MOD_RES (15), (16), (17), (18), (19): Xaa is A or G
  MOD_RES (20), (21), (22), (23): Xaa is A or G or is absent
XAPTKLEPLPVVYYXXXXXXXXXEQLSNNMVVRSX

SEQ ID NO: 14370 - protein, 34 aa, Artificial Sequence
  GFR-binding peptide
  MOD_RES (1), (34): Xaa is C or S
  MOD_RES (15), (16), (17), (18), (19): Xaa is A or G
  MOD_RES (20), (21), (22), (23): Xaa is A or G or is absent
XVSQDLEPLPIVYYXXXXXXXXXEQLSNMIVKSX

SEQ ID NO: 14371 - protein, 37 aa, Artificial Sequence; identical to SEQ ID NO: 7046
  GFR-binding peptide
  MOD_RES (3), (37): Xaa is C or S
  MOD_RES (17), (18), (19), (20), (21): Xaa is A or G
  MOD_RES (22), (23), (24), (25): Xaa is A or G or is absent

SEQ ID NO: 14372 - protein, 34 aa, Artificial Sequence
  GFR-binding peptide
  MOD_RES (3), (4): Xaa is C or S
APXXVPQALEPLTILYYVGRKPKVEQLSNMIVRS

SEQ ID NO: 14373 - protein, 41 aa, Artificial Sequence
  GFR-binding peptide
  MOD_RES (6), (40): Xaa is C or S
  MOD_RES (20), (21), (22), (23), (24): Xaa is A or G
  MOD_RES (25), (26), (27), (28): Xaa is A or G or is absent
VTKPTXAPTKLEPLPVVYYXXXXXXXXXEQLSNNMVVRSXG

SEQ ID NO: 14374 - protein, 37 aa, Artificial Sequence
  GFR-binding peptide
  MOD_RES (4), (5), (37): Xaa is C or S
PPTXXVPTRLSAISILYLDSANNVVLKNYQDMVVESX

SEQ ID NO: 14375 - protein, 39 aa, Artificial Sequence
  GFR-binding peptide
  MOD_RES (6), (7): Xaa is C or S
  MOD_RES (21), (22), (23), (24), (25): Xaa is A or G
  MOD_RES (26), (27), (28), (29): Xaa is A or G or is absent
STPPTXXVPTRLNAISILYFXXXXXXXXXLKKYRDMVVE

SEQ ID NO: 14376 - protein, 40 aa, Artificial Sequence
  GFR-binding peptide
  MOD_RES (6), (7), (40): Xaa is C or S
  MOD_RES (21), (22), (23), (24), (25): Xaa is A or G
  MOD_RES (26), (27), (28), (29): Xaa is A or G or is absent
ASAAPXXVPQALSPISILFIXXXXXXXXXYKQYEMIVRSX

SEQ ID NO: 14377 - protein, 36 aa, Artificial Sequence
  GFR-binding peptide
  MOD_RES (3), (4), (36): Xaa is C or S
KPXXAPTKLEPLTVLYYDDSSNVIEQLSNNMVVRSX

SEQ ID NO: 14378 - protein, 37 aa, Artificial Sequence; identical to SEQ ID NO: 7055
  GFR-binding peptide
  MOD_RES (1), (2), (36): Xaa is C or S
  MOD_RES (16), (17), (18), (19), (20): Xaa is A or G
  MOD_RES (21), (22), (23), (24): Xaa is A or G or is absent

SEQ ID NO: 14379 - protein, 39 aa, Artificial Sequence
  GFR-binding peptide
  MOD_RES (6), (7), (39): Xaa is C or S
TVPKPXXAPTQLEPLTVLYYDDSSNVIEQLSNNMVVRAX

SEQ ID NO: 14380 - protein, 35 aa, Artificial Sequence
  GFR-binding peptide
  MOD_RES (1), (34): Xaa is C or S
  MOD_RES (15), (16), (17), (18), (19): Xaa is A or G
  MOD_RES (20), (21), (22), (23): Xaa is A or G or is absent
XVPQDLEPLPIVYYXXXXXXXXXEQLSNMVVKSXK

SEQ ID NO: 14381 - protein, 36 aa, Artificial Sequence
  GFR-binding peptide
  MOD_RES (3), (4): Xaa is C or S
  MOD_RES (18), (19), (20), (21), (22): Xaa is A or G
  MOD_RES (23), (24), (25), (26): Xaa is A or G or is absent
KPXXAPTKLEPLPVVYYXXXXXXXXXEQLSNNMVVR

SEQ ID NO: 14382 - protein, 43 aa, Artificial Sequence; identical to SEQ ID NO: 7061
  GFR-binding peptide
  MOD_RES (6), (7), (40), (42): Xaa is C or S
  MOD_RES (21), (22), (23), (24), (25): Xaa is A or G
  MOD_RES (26), (27), (28), (29): Xaa is A or G or is absent

SEQ ID NO: 14383 - protein, 39 aa, Artificial Sequence
  GFR-binding peptide
  MOD_RES (5), (6), (38): Xaa is C or S
IPKAXXVPTELEPLTMLYYDEYDKVVEQLSNEMVVEGXG

SEQ ID NO: 14384 - protein, 42 aa, Artificial Sequence; identical to SEQ ID NO: 7063
  GFR-binding peptide
  MOD_RES (6), (7), (39), (41): Xaa is C or S

SEQ ID NO: 14385 - protein, 34 aa, Artificial Sequence; identical to SEQ ID NO: 7066
  GFR-binding peptide
  MOD_RES (34), (34): Xaa is C or S
  MOD_RES (14), (15), (16), (17), (18): Xaa is A or G
  MOD_RES (19), (20), (21), (22): Xaa is A or G or is absent

SEQ ID NO: 14386 - protein, 35 aa, Artificial Sequence
  GFR-binding peptide
  MOD_RES (34), (34): Xaa is C or S
  MOD_RES (14), (15), (16), (17), (18): Xaa is A or G
  MOD_RES (19), (20), (21), (22): Xaa is A or G or is absent
APTKLEPLTVLYYXXXXXXXXXEQLSNNMVVRSXG

SEQ ID NO: 14387 - protein, 37 aa, Artificial Sequence
  GFR-binding peptide
  MOD_RES (2), (36): Xaa is C or S
  MOD_RES (16), (17), (18), (19), (20): Xaa is A or G
  MOD_RES (21), (22), (23), (24): Xaa is A or G or is absent
TXAPTKLEPLTVLYYXXXXXXXXXEQLSNNMVVRSXG

SEQ ID NO: 14388 - protein, 42 aa, Artificial Sequence; identical to SEQ ID NO: 7070
  GFR-binding peptide
  MOD_RES (4), (5), (39), (41): Xaa is C or S
  MOD_RES (19), (20), (21), (22), (23): Xaa is A or G
  MOD_RES (24), (25), (26), (27): Xaa is A or G or is absent

SEQ ID NO: 14389 - protein, 33 aa, Artificial Sequence; identical to SEQ ID NO: 7073
  GFR-binding peptide
  MOD_RES (1), (2), (33): Xaa is C or S

SEQ ID NO: 14390 - protein, 37 aa, Artificial Sequence
  GFR-binding peptide
  MOD_RES (1), (2), (34), (36): Xaa is C or S
XXAPTKLEPLPVVYYDDSSNVIEQLSNNMVVRSXGXH

SEQ ID NO: 14391 - protein, 40 aa, Artificial Sequence
  GFR-binding peptide
  MOD_RES (5), (6), (38), (40): Xaa is C or S
TPPTXXVPTRLEPLPIVYYDSANNVVEQLSNDMVVESXGX

SEQ ID NO: 14392 - protein, 36 aa, Artificial Sequence
  GFR-binding peptide
  MOD_RES (3), (4): Xaa is C or S
  MOD_RES (18), (19), (20), (21), (22): Xaa is A or G
  MOD_RES (23), (24), (25), (26): Xaa is A or G or is absent
KAXXVPTELEPLTMLYYXXXXXXXXXEQLSNDMVVE

SEQ ID NO: 14393 - protein, 33 aa, Artificial Sequence; identical to SEQ ID NO: 7080
  GFR-binding peptide
  MOD_RES (2), (3): Xaa is C or S

SEQ ID NO: 14394 - protein, 33 aa, Artificial Sequence; identical to SEQ ID NO: 7082
  GFR-binding peptide
  MOD_RES (2), (3): Xaa is C or S

SEQ ID NO: 14395 - protein, 35 aa, Artificial Sequence
  GFR-binding peptide
  MOD_RES (1), (33), (35): Xaa is C or S
XVPTRLEPLTILYYDSANNVVEQLSNDMVVESXGX

SEQ ID NO: 14396 - protein, 35 aa, Artificial Sequence
  GFR-binding peptide
  MOD_RES (2), (2): Xaa is C or S
  MOD_RES (16), (17), (18), (19), (20): Xaa is A or G
  MOD_RES (21), (22), (23), (24): Xaa is A or G or is absent
TXAPTKLEPLPVVYYXXXXXXXXXEQLSNNMVVRS

SEQ ID NO: 14397 - protein, 40 aa, Artificial Sequence
  GFR-binding peptide
  MOD_RES (4), (5), (39): Xaa is C or S
  MOD_RES (19), (20), (21), (22), (23): Xaa is A or G
  MOD_RES (24), (25), (26), (27): Xaa is A or G or is absent
PKAXXVPTELEPLTMLYYXXXXXXXXXEQLSNEMVVEGXG

SEQ ID NO: 14398 - protein, 36 aa, Artificial Sequence
  GFR-binding peptide
  MOD_RES (5), (6): Xaa is C or S
SAAPXXVPQALSPISILFIVGRKPKVYKQYEMIVRS

SEQ ID NO: 14399 - protein, 32 aa, Artificial Sequence; identical to SEQ ID NO: 7087
  GFR-binding peptide
  MOD_RES (31), (31): Xaa is C or S

SEQ ID NO: 14400 - protein, 41 aa, Artificial Sequence
  GFR-binding peptide
  MOD_RES (5), (6), (38), (40): Xaa is C or S
VPKPXXAPTQLSPISVLFIDDSSNVIYKQYENMVVRAXGXH

SEQ ID NO: 14401 - protein, 40 aa, Artificial Sequence
  GFR-binding peptide
  MOD_RES (6), (7), (38), (40): Xaa is C or S
ASASPXXVSQDLSPISILFIIGKTPKIYKQYEMIVKSXKX

SEQ ID NO: 14402 - protein, 42 aa, Artificial Sequence
  GFR-binding peptide
  MOD_RES (6), (7), (40), (42): Xaa is C or S
  MOD_RES (21), (22), (23), (24), (25): Xaa is A or G
  MOD_RES (26), (27), (28), (29): Xaa is A or G or is absent
ASASPXXVPQDLEPLPIVYYXXXXXXXXXEQLSNMVVKSXKX

SEQ ID NO: 14403 - protein, 41 aa, Artificial Sequence
  GFR-binding peptide
  MOD_RES (3), (4), (38), (40): Xaa is C or S
  MOD_RES (18), (19), (20), (21), (22): Xaa is A or G
  MOD_RES (23), (24), (25), (26): Xaa is A or G or is absent
PTXXVPTRLSAISILYLXXXXXXXXXLKNYQDMVVESXGXR

SEQ ID NO: 14404 - protein, 37 aa, Artificial Sequence
  GFR-binding peptide
  MOD_RES (3), (4): Xaa is C or S
  MOD_RES (18), (19), (20), (21), (22): Xaa is A or G
  MOD_RES (23), (24), (25), (26): Xaa is A or G or is absent
KAXXVPTELSPISMLFIXXXXXXXXXYKQYEEMVVEG

SEQ ID NO: 14405 - protein, 40 aa, Artificial Sequence
  GFR-binding peptide
  MOD_RES (6), (7), (38), (40): Xaa is C or S
ASASPXXVSQDLEPLPIVYYIGKTPKIEQLSNMIVKSXKX

SEQ ID NO: 14406 - protein, 34 aa, Artificial Sequence
  GFR-binding peptide
  MOD_RES (1), (34): Xaa is C or S
  MOD_RES (15), (16), (17), (18), (19): Xaa is A or G
  MOD_RES (20), (21), (22), (23): Xaa is A or G or is absent
XVPQDLEPLTILYYXXXXXXXXXEQLSNMVVKSX

SEQ ID NO: 14407 - protein, 36 aa, Artificial Sequence
  GFR-binding peptide
  MOD_RES (3), (4): Xaa is C or S
  MOD_RES (18), (19), (20), (21), (22): Xaa is A or G
  MOD_RES (23), (24), (25), (26): Xaa is A or G or is absent
KAXXVPTELEPLPMVYYXXXXXXXXXEQLSNDMVVE

SEQ ID NO: 14408 - protein, 39 aa, Artificial Sequence; identical to SEQ ID NO: 7090
  GFR-binding peptide
  MOD_RES (3), (4), (37), (39): Xaa is C or S
  MOD_RES (18), (19), (20), (21), (22): Xaa is A or G
  MOD_RES (23), (24), (25), (26): Xaa is A or G or is absent

SEQ ID NO: 14409 - protein, 42 aa, Artificial Sequence
  GFR-binding peptide
  MOD_RES (4), (5), (39), (41): Xaa is C or S
  MOD_RES (19), (20), (21), (22), (23): Xaa is A or G
  MOD_RES (24), (25), (26), (27): Xaa is A or G or is absent
PPTXXVPTRLSPISILFIXXXXXXXXXYKQYEDMVVESXGXR

SEQ ID NO: 14410 - protein, 38 aa, Artificial Sequence
  GFR-binding peptide
  MOD_RES (5), (6): Xaa is C or S
  MOD_RES (20), (21), (22), (23), (24): Xaa is A or G
  MOD_RES (25), (26), (27), (28): Xaa is A or G or is absent
SAAPXXVPQALEPLTILYYXXXXXXXXXEQLSNMIVRS

SEQ ID NO: 14411 - protein, 35 aa, Artificial Sequence
  GFR-binding peptide
  MOD_RES (3), (4): Xaa is C or S
KAXXVPTELEPLTMLYYDEYDKVVEQLSNEMVVEG

SEQ ID NO: 14412 - protein, 36 aa, Artificial Sequence; identical to SEQ ID NO: 7091
  GFR-binding peptide
  MOD_RES (1), (33), (35): Xaa is C or S

SEQ ID NO: 14413 - protein, 36 aa, Artificial Sequence
  GFR-binding peptide
  MOD_RES (3), (4): Xaa is C or S
  MOD_RES (18), (19), (20), (21), (22): Xaa is A or G
  MOD_RES (23), (24), (25), (26): Xaa is A or G or is absent
KPXXAPTKLEPLTVLYYXXXXXXXXXEQLSNNMVVR

SEQ ID NO: 14414 - protein, 41 aa, Artificial Sequence
  GFR-binding peptide
  MOD_RES (6), (7), (40): Xaa is C or S
  MOD_RES (21), (22), (23), (24), (25): Xaa is A or G
  MOD_RES (26), (27), (28), (29): Xaa is A or G or is absent
ASASPXXVPQDLEPLTILYYXXXXXXXXXEQLSNMVVKSXK

SEQ ID NO: 14415 - protein, 35 aa, Artificial Sequence
  GFR-binding peptide
  MOD_RES (1), (32), (34): Xaa is C or S
XVSQDLSPISILFIIGKTPKIYKQYEMIVKSXKXS

SEQ ID NO: 14416 - protein, 32 aa, Artificial Sequence; identical to SEQ ID NO: 7094
  GFR-binding peptide
  MOD_RES (14), (15), (16), (17), (18): Xaa is A or G
  MOD_RES (19), (20), (21), (22): Xaa is A or G or is absent

SEQ ID NO: 14417 - protein, 37 aa, Artificial Sequence
  GFR-binding peptide
  MOD_RES (2), (3), (36): Xaa is C or S
  MOD_RES (17), (18), (19), (20), (21): Xaa is A or G
  MOD_RES (22), (23), (24), (25): Xaa is A or G or is absent
PXXVPQDLSPISILFIXXXXXXXXXYKQYEMVVKSXK

SEQ ID NO: 14418 - protein, 33 aa, Artificial Sequence
  GFR-binding peptide
  MOD_RES (31), (33): Xaa is C or S
VPQALSPISILFIVGRKPKVYKQYEMIVRSXKX

SEQ ID NO: 14419 - protein, 35 aa, Artificial Sequence
  GFR-binding peptide
  MOD_RES (4), (5): Xaa is C or S
PPTXXVPTRLSAISILYLDSANNVVLKNYQDMVVE

SEQ ID NO: 14420 - protein, 42 aa, Artificial Sequence; identical to SEQ ID NO: 7099
  GFR-binding peptide
  MOD_RES (6), (7), (39), (41): Xaa is C or S

SEQ ID NO: 14421 - protein, 42 aa, Artificial Sequence; identical to SEQ ID NO: 7101
  GFR-binding peptide
  MOD_RES (5), (6), (40), (42): Xaa is C or S
  MOD_RES (20), (21), (22), (23), (24): Xaa is A or G
  MOD_RES (25), (26), (27), (28): Xaa is A or G or is absent

SEQ ID NO: 14422 - protein, 38 aa, Artificial Sequence
  GFR-binding peptide
  MOD_RES (2), (3), (36), (38): Xaa is C or S
  MOD_RES (17), (18), (19), (20), (21): Xaa is A or G
  MOD_RES (22), (23), (24), (25): Xaa is A or G or is absent
PXXVSQDLSPISILFIXXXXXXXXXYKQYEMIVKSXKX

SEQ ID NO: 14423 - protein, 42 aa, Artificial Sequence; identical to SEQ ID NO: 7102
  GFR-binding peptide
  MOD_RES (6), (7), (39), (41): Xaa is C or S

SEQ ID NO: 14424 - protein, 36 aa, Artificial Sequence
  GFR-binding peptide
  MOD_RES (33), (35): Xaa is C or S
  MOD_RES (14), (15), (16), (17), (18): Xaa is A or G
  MOD_RES (19), (20), (21), (22): Xaa is A or G or is absent
VSQDLSPISILFIXXXXXXXXXYKQYEMIVKSXKXS

SEQ ID NO: 14425 - protein, 37 aa, Artificial Sequence
  GFR-binding peptide
  MOD_RES (2), (3), (37): Xaa is C or S
  MOD_RES (17), (18), (19), (20), (21): Xaa is A or G
  MOD_RES (22), (23), (24), (25): Xaa is A or G or is absent
PXXAPTKLSPISVLFIXXXXXXXXXYKQYENMVVRSX

SEQ ID NO: 14426 - protein, 35 aa, Artificial Sequence
  GFR-binding peptide
  MOD_RES (32), (34): Xaa is C or S
APTQLEPLPVVYYDDSSNVIEQLSNNMVVRAXGXH

SEQ ID NO: 14427 - protein, 38 aa, Artificial Sequence; identical to SEQ ID NO: 7104
  GFR-binding peptide
  MOD_RES (1), (2), (36), (38): Xaa is C or S
  MOD_RES (16), (17), (18), (19), (20): Xaa is A or G
  MOD_RES (21), (22), (23), (24): Xaa is A or G or is absent

SEQ ID NO: 14428 - protein, 35 aa, Artificial Sequence; identical to SEQ ID NO: 7106
  GFR-binding peptide
  MOD_RES (2), (3): Xaa is C or S
  MOD_RES (17), (18), (19), (20), (21): Xaa is A or G
  MOD_RES (22), (23), (24), (25): Xaa is A or G or is absent

SEQ ID NO: 14429 - protein, 32 aa, Artificial Sequence
  GFR-binding peptide
  MOD_RES (14), (15), (16), (17), (18): Xaa is A or G
  MOD_RES (19), (20), (21), (22): Xaa is A or G or is absent
VPTELSPISMLFIXXXXXXXXXYKQYEEMVVE

SEQ ID NO: 14430 - protein, 33 aa, Artificial Sequence; identical to SEQ ID NO: 7110
  GFR-binding peptide
  MOD_RES (1), (32): Xaa is C or S

SEQ ID NO: 14431 - protein, 36 aa, Artificial Sequence
  GFR-binding peptide
  MOD_RES (4), (5), (36): Xaa is C or S
ASPXXVSQDLSPISILFIIGKTPKIYKQYEMIVKSX

SEQ ID NO: 14432 - protein, 36 aa, Artificial Sequence
  GFR-binding peptide
  MOD_RES (34), (36): Xaa is C or S
  MOD_RES (14), (15), (16), (17), (18): Xaa is A or G
  MOD_RES (19), (20), (21), (22): Xaa is A or G or is absent
APTQLEPLPVVYYXXXXXXXXXEQLSNNMVVRAXGX

SEQ ID NO: 14433 - protein, 35 aa, Artificial Sequence; identical to SEQ ID NO: 7112
  GFR-binding peptide
  MOD_RES (1), (35): Xaa is C or S
  MOD_RES (15), (16), (17), (18), (19): Xaa is A or G
  MOD_RES (20), (21), (22), (23): Xaa is A or G or is absent

SEQ ID NO: 14434 - protein, 36 aa, Artificial Sequence; identical to SEQ ID NO: 7117
  GFR-binding peptide
  MOD_RES (1), (33), (35): Xaa is C or S

SEQ ID NO: 14435 - protein, 36 aa, Artificial Sequence
  GFR-binding peptide
  MOD_RES (3), (4): Xaa is C or S
  MOD_RES (18), (19), (20), (21), (22): Xaa is A or G
  MOD_RES (23), (24), (25), (26): Xaa is A or G or is absent
KPXXAPTQLSPISVLFIXXXXXXXXXYKQYENMVVR

SEQ ID NO: 14436 - protein, 36 aa, Artificial Sequence
  GFR-binding peptide
  MOD_RES (2), (3): Xaa is C or S
  MOD_RES (17), (18), (19), (20), (21): Xaa is A or G
  MOD_RES (22), (23), (24), (25): Xaa is A or G or is absent
PXXAPTQLSPISVLFIXXXXXXXXXYKQYENMVVRA

SEQ ID NO: 14437 - protein, 38 aa, Artificial Sequence
  GFR-binding peptide
  MOD_RES (4), (5), (37): Xaa is C or S
PKPXXAPTKLSPISVLFIDDSSNVIYKQYENMVVRSXG

SEQ ID NO: 14438 - protein, 32 aa, Artificial Sequence
  GFR-binding peptide
  MOD_RES (14), (15), (16), (17), (18): Xaa is A or G
  MOD_RES (19), (20), (21), (22): Xaa is A or G or is absent
VPQALSPISILFIXXXXXXXXXYKQYEMIVRS

SEQ ID NO: 14439 - protein, 41 aa, Artificial Sequence
  GFR-binding peptide
  MOD_RES (5), (6), (40): Xaa is C or S
  MOD_RES (20), (21), (22), (23), (24): Xaa is A or G
  MOD_RES (25), (26), (27), (28): Xaa is A or G or is absent
IPKAXXVPTELEPLPMVYYXXXXXXXXXEQLSNDMVVEGXG

SEQ ID NO: 14440 - protein, 41 aa, Artificial Sequence; identical to SEQ ID NO: 7121
  GFR-binding peptide
  MOD_RES (5), (6), (39), (41): Xaa is C or S
  MOD_RES (20), (21), (22), (23), (24): Xaa is A or G
  MOD_RES (25), (26), (27), (28): Xaa is A or G or is absent

SEQ ID NO: 14441 - protein, 38 aa, Artificial Sequence
  GFR-binding peptide
  MOD_RES (1), (2), (36), (38): Xaa is C or S
  MOD_RES (16), (17), (18), (19), (20): Xaa is A or G
  MOD_RES (21), (22), (23), (24): Xaa is A or G or is absent
XXVPTELSPISMLFIXXXXXXXXXYKQYEDMVVEGXGX

SEQ ID NO: 14442 - protein, 39 aa, Artificial Sequence
  GFR-binding peptide
  MOD_RES (7), (39): Xaa is C or S
HVTKPTXAPTKLSPISVLFIDDSSNVIYKQYENMVVRSX

SEQ ID NO: 14443 - protein, 42 aa, Artificial Sequence
  GFR-binding peptide
  MOD_RES (5), (6), (40), (42): Xaa is C or S
  MOD_RES (20), (21), (22), (23), (24): Xaa is A or G
  MOD_RES (25), (26), (27), (28): Xaa is A or G or is absent
TPPTXXVPTRLEPLTILYYXXXXXXXXXEQLSNDMVVESXGX

SEQ ID NO: 14444 - protein, 37 aa, Artificial Sequence; identical to SEQ ID NO: 7126
  GFR-binding peptide
  MOD_RES (34), (36): Xaa is C or S
  MOD_RES (14), (15), (16), (17), (18): Xaa is A or G
  MOD_RES (19), (20), (21), (22): Xaa is A or G or is absent

SEQ ID NO: 14445 - protein, 36 aa, Artificial Sequence
  GFR-binding peptide
  MOD_RES (1), (33), (35): Xaa is C or S
XVPTELEPLTMLYYDEYDKVVEQLSNEMVVEGXGXR

SEQ ID NO: 14446 - protein, 35 aa, Artificial Sequence; identical to SEQ ID NO: 7128
  GFR-binding peptide
  MOD_RES (34), (34): Xaa is C or S
  MOD_RES (14), (15), (16), (17), (18): Xaa is A or G
  MOD_RES (19), (20), (21), (22): Xaa is A or G or is absent

SEQ ID NO: 14447 - protein, 39 aa, Artificial Sequence
  GFR-binding peptide
  MOD_RES (4), (5), (36), (38): Xaa is C or S
AAPXXVPQALSPISILFIVGRKPKVYKQYEMIVRSXKXS

SEQ ID NO: 14448 - protein, 42 aa, Artificial Sequence
  GFR-binding peptide
  MOD_RES (6), (7), (39), (41): Xaa is C or S
KIPKAXXVPTELSPISMLFIDENEKVVYKQYEDMVVEGXGXR

SEQ ID NO: 14449 - protein, 38 aa, Artificial Sequence
  GFR-binding peptide
  MOD_RES (1), (2), (35), (37): Xaa is C or S
  MOD_RES (16), (17), (18), (19), (20): Xaa is A or G
  MOD_RES (21), (22), (23), (24): Xaa is A or G or is absent
XXVSQDLEPLPIVYYXXXXXXXXXEQLSNMIVKSXKXS

SEQ ID NO: 14450 - protein, 33 aa, Artificial Sequence
  GFR-binding peptide
  MOD_RES (33), (33): Xaa is C or S
  MOD_RES (14), (15), (16), (17), (18): Xaa is A or G
  MOD_RES (19), (20), (21), (22): Xaa is A or G or is absent
VSQDLEPLPIVYYXXXXXXXXXEQLSNMIVKSX

SEQ ID NO: 14451 - protein, 38 aa, Artificial Sequence
  GFR-binding peptide
  MOD_RES (5), (6), (38): Xaa is C or S
TPPTXXVPTRLEPLPIVYYDSANNVVEQLSNDMVVESX

SEQ ID NO: 14452 - protein, 38 aa, Artificial Sequence
  GFR-binding peptide
  MOD_RES (1), (2), (35), (37): Xaa is C or S
  MOD_RES (16), (17), (18), (19), (20): Xaa is A or G
  MOD_RES (21), (22), (23), (24): Xaa is A or G or is absent
XXVPQDLSPISILFIXXXXXXXXXYKQYEMVVKSXKXS

SEQ ID NO: 14453 - protein, 37 aa, Artificial Sequence
  GFR-binding peptide
  MOD_RES (3), (4), (37): Xaa is C or S
  MOD_RES (18), (19), (20), (21), (22): Xaa is A or G
  MOD_RES (23), (24), (25), (26): Xaa is A or G or is absent
SPXXVPQDLEPLTILYYXXXXXXXXXEQLSNMVVKSX

SEQ ID NO: 14454 - protein, 36 aa, Artificial Sequence; identical to SEQ ID NO: 7130
  GFR-binding peptide
  MOD_RES (2), (3), (35): Xaa is C or S

SEQ ID NO: 14455 - protein, 37 aa, Artificial Sequence; identical to SEQ ID NO: 7131
  GFR-binding peptide
  MOD_RES (7), (7): Xaa is C or S

SEQ ID NO: 14456 - protein, 33 aa, Artificial Sequence
  GFR-binding peptide
  MOD_RES (1), (2): Xaa is C or S
XXAPTQLEPLTVLYYDDSSNVIEQLSNNMVVRA

SEQ ID NO: 14457 - protein, 37 aa, Artificial Sequence
  GFR-binding peptide
  MOD_RES (2), (3), (35), (37): Xaa is C or S
AXXVPTELEPLPMVYYDEYDKVVEQLSNEMVVEGXGX

SEQ ID NO: 14458 - protein, 32 aa, Artificial Sequence
  GFR-binding peptide
  MOD_RES (1), (1): Xaa is C or S
XVPTRLSAISILYLDSANNVVLKNYQDMVVES

SEQ ID NO: 14459 - protein, 37 aa, Artificial Sequence
  GFR-binding peptide
  MOD_RES (5), (6): Xaa is C or S
VPKPXXAPTQLEPLTVLYYDDSSNVIEQLSNNMVVRA

SEQ ID NO: 14460 - protein, 37 aa, Artificial Sequence
  GFR-binding peptide
  MOD_RES (34), (36): Xaa is C or S
  MOD_RES (14), (15), (16), (17), (18): Xaa is A or G
  MOD_RES (19), (20), (21), (22): Xaa is A or G or is absent
VPTELEPLTMLYYXXXXXXXXXEQLSNEMVVEGXGXR

SEQ ID NO: 14461 - protein, 42 aa, Artificial Sequence
  GFR-binding peptide
  MOD_RES (5), (6), (40), (42): Xaa is C or S
  MOD_RES (20), (21), (22), (23), (24): Xaa is A or G
  MOD_RES (25), (26), (27), (28): Xaa is A or G or is absent
IPKAXXVPTELSPISMLFIXXXXXXXXXYKQYEEMVVEGXGX

SEQ ID NO: 14462 - protein, 35 aa, Artificial Sequence
  GFR-binding peptide
  MOD_RES (1), (2), (34): Xaa is C or S
XXVPTELEPLTMLYYDEYDKVVEQLSNEMVVEGXG

SEQ ID NO: 14463 - protein, 37 aa, Artificial Sequence
  GFR-binding peptide
  MOD_RES (4), (5), (37): Xaa is C or S
PKPXXAPTQLEPLPVVYYDDSSNVIEQLSNNMVVRAX

SEQ ID NO: 14464 - protein, 39 aa, Artificial Sequence
  GFR-binding peptide
  MOD_RES (6), (7), (39): Xaa is C or S
STPPTXXVPTRLEPLTILYYDSANNVVEQLSNDMVVESX

SEQ ID NO: 14465 - protein, 36 aa, Artificial Sequence
  GFR-binding peptide
  MOD_RES (2), (3), (34), (36): Xaa is C or S
PXXVPQALSPISILFIVGRKPKVYKQYEMIVRSXKX

SEQ ID NO: 14466 - protein, 39 aa, Artificial Sequence
  GFR-binding peptide
  MOD_RES (6), (7): Xaa is C or S
  MOD_RES (21), (22), (23), (24), (25): Xaa is A or G
  MOD_RES (26), (27), (28), (29): Xaa is A or G or is absent
STPPTXXVPTRLEPLTILYYXXXXXXXXXEQLSNDMVVE

SEQ ID NO: 14467 - protein, 37 aa, Artificial Sequence
  GFR-binding peptide
  MOD_RES (4), (5): Xaa is C or S
  MOD_RES (19), (20), (21), (22), (23): Xaa is A or G
  MOD_RES (24), (25), (26), (27): Xaa is A or G or is absent
PKAXXVPTELEPLTMLYYXXXXXXXXXEQLSNEMVVE

SEQ ID NO: 14468 - protein, 30 aa, Artificial Sequence
  GFR-binding peptide
VPTELSPISMLFIDEYDKVVYKQYEEMVVE

SEQ ID NO: 14469 - protein, 38 aa, Artificial Sequence
  GFR-binding peptide
  MOD_RES (4), (5), (37): Xaa is C or S
PKAXXVPTELEPLPMVYYDEYDKVVEQLSNEMVVEGXG

SEQ ID NO: 14470 - protein, 40 aa, Artificial Sequence; identical to SEQ ID NO: 7150
  GFR-binding peptide
  MOD_RES (3), (4), (38), (40): Xaa is C or S
  MOD_RES (18), (19), (20), (21), (22): Xaa is A or G
  MOD_RES (23), (24), (25), (26): Xaa is A or G or is absent

SEQ ID NO: 14471 - protein, 37 aa, Artificial Sequence; identical to SEQ ID NO: 7151
  GFR-binding peptide
  MOD_RES (1), (35), (37): Xaa is C or S
  MOD_RES (15), (16), (17), (18), (19): Xaa is A or G
  MOD_RES (20), (21), (22), (23): Xaa is A or G or is absent

SEQ ID NO: 14472 - protein, 36 aa, Artificial Sequence
  GFR-binding peptide
  MOD_RES (1), (2), (35): Xaa is C or S
  MOD_RES (16), (17), (18), (19), (20): Xaa is A or G
  MOD_RES (21), (22), (23), (24): Xaa is A or G or is absent
XXVSQDLEPLPIVYYXXXXXXXXXEQLSNMIVKSXK

SEQ ID NO: 14473 - protein, 39 aa, Artificial Sequence; identical to SEQ ID NO: 7159
  GFR-binding peptide
  MOD_RES (6), (7), (39): Xaa is C or S

SEQ ID NO: 14474 - protein, 37 aa, Artificial Sequence
  GFR-binding peptide
  MOD_RES (3), (4), (36): Xaa is C or S
PTXXVPTRLSAISILYLDSANNVVLKNYQDMVVESXG

SEQ ID NO: 14475 - protein, 33 aa, Artificial Sequence
  GFR-binding peptide
  MOD_RES (3), (3): Xaa is C or S
PTXAPTKLSPISVLFIDDSSNVIYKQYENMVVR

SEQ ID NO: 14476 - protein, 38 aa, Artificial Sequence; identical to SEQ ID NO: 7161
  GFR-binding peptide
  MOD_RES (2), (3), (36), (38): Xaa is C or S
  MOD_RES (17), (18), (19), (20), (21): Xaa is A or G
  MOD_RES (22), (23), (24), (25): Xaa is A or G or is absent

SEQ ID NO: 14477 - protein, 41 aa, Artificial Sequence
  GFR-binding peptide
  MOD_RES (6), (7), (39), (41): Xaa is C or S
SIPKAXXVPTELSPISMLFIDEYDKVVYKQYEEMVVEGXGX

SEQ ID NO: 14478 - protein, 43 aa, Artificial Sequence
  GFR-binding peptide
  MOD_RES (5), (6), (40), (42): Xaa is C or S
  MOD_RES (20), (21), (22), (23), (24): Xaa is A or G
  MOD_RES (25), (26), (27), (28): Xaa is A or G or is absent
VPKPXXAPTKLEPLPVVYYXXXXXXXXXEQLSNNMVVRSXGXH

SEQ ID NO: 14479 - protein, 43 aa, Artificial Sequence
  GFR-binding peptide
  MOD_RES (6), (7), (41), (43): Xaa is C or S
  MOD_RES (21), (22), (23), (24), (25): Xaa is A or G
  MOD_RES (26), (27), (28), (29): Xaa is A or G or is absent
STPPTXXVPTRLEPLTILYYXXXXXXXXXEQLSNDMVVESXGX

SEQ ID NO: 14480 - protein, 37 aa, Artificial Sequence; identical to SEQ ID NO: 7168
  GFR-binding peptide
  MOD_RES (5), (6), (37): Xaa is C or S

SEQ ID NO: 14481 - protein, 37 aa, Artificial Sequence; identical to SEQ ID NO: 7170
  GFR-binding peptide
  MOD_RES (2), (3), (36): Xaa is C or S
  MOD_RES (17), (18), (19), (20), (21): Xaa is A or G
  MOD_RES (22), (23), (24), (25): Xaa is A or G or is absent

SEQ ID NO: 14482 - protein, 33 aa, Artificial Sequence
  GFR-binding peptide
  MOD_RES (33), (33): Xaa is C or S
  MOD_RES (14), (15), (16), (17), (18): Xaa is A or G
  MOD_RES (19), (20), (21), (22): Xaa is A or G or is absent
VPQDLEPLPIVYYXXXXXXXXXEQLSNMVVKSX

SEQ ID NO: 14483 - protein, 37 aa, Artificial Sequence; identical to SEQ ID NO: 7171
  GFR-binding peptide
  MOD_RES (5), (6), (37): Xaa is C or S

SEQ ID NO: 14484 - protein, 41 aa, Artificial Sequence; identical to SEQ ID NO: 7173
  GFR-binding peptide
  MOD_RES (6), (7), (41): Xaa is C or S
  MOD_RES (21), (22), (23), (24), (25): Xaa is A or G
  MOD_RES (26), (27), (28), (29): Xaa is A or G or is absent

SEQ ID NO: 14485 - protein, 36 aa, Artificial Sequence; identical to SEQ ID NO: 7176
  GFR-binding peptide
  MOD_RES (33), (35): Xaa is C or S
  MOD_RES (14), (15), (16), (17), (18): Xaa is A or G
  MOD_RES (19), (20), (21), (22): Xaa is A or G or is absent

SEQ ID NO: 14486 - protein, 42 aa, Artificial Sequence; identical to SEQ ID NO: 7177
  GFR-binding peptide
  MOD_RES (4), (5), (39), (41): Xaa is C or S
  MOD_RES (19), (20), (21), (22), (23): Xaa is A or G
  MOD_RES (24), (25), (26), (27): Xaa is A or G or is absent

SEQ ID NO: 14487 - protein, 37 aa, Artificial Sequence; identical to SEQ ID NO: 7179
  GFR-binding peptide
  MOD_RES (2), (3), (36): Xaa is C or S
  MOD_RES (17), (18), (19), (20), (21): Xaa is A or G
  MOD_RES (22), (23), (24), (25): Xaa is A or G or is absent

SEQ ID NO: 14488 - protein, 40 aa, Artificial Sequence
  GFR-binding peptide
  MOD_RES (6), (7), (39): Xaa is C or S
TVPKPXXAPTQLSPISVLFIDDSSNVIYKQYENMVVRAXG

SEQ ID NO: 14489 - protein, 43 aa, Artificial Sequence; identical to SEQ ID NO: 7185
  GFR-binding peptide
  MOD_RES (6), (7), (41), (43): Xaa is C or S
  MOD_RES (21), (22), (23), (24), (25): Xaa is A or G
  MOD_RES (26), (27), (28), (29): Xaa is A or G or is absent

SEQ ID NO: 14490 - protein, 32 aa, Artificial Sequence
  GFR-binding peptide
  MOD_RES (31), (31): Xaa is C or S
VSQDLEPLPIVYYIGKTPKIEQLSNMIVKSXK

SEQ ID NO: 14491 - protein, 36 aa, Artificial Sequence; identical to SEQ ID NO: 7187
  GFR-binding peptide
  MOD_RES (1), (2), (36): Xaa is C or S
  MOD_RES (16), (17), (18), (19), (20): Xaa is A or G
  MOD_RES (21), (22), (23), (24): Xaa is A or G or is absent

SEQ ID NO: 14492 - protein, 38 aa, Artificial Sequence
  GFR-binding peptide
  MOD_RES (6), (7): Xaa is C or S
TVPKPXXAPTQLEPLPVVYYDDSSNVIEQLSNNMVVRA

SEQ ID NO: 14493 - protein, 34 aa, Artificial Sequence
  GFR-binding peptide
  MOD_RES (1), (32), (34): Xaa is C or S
XVPQDLSPISILFIVGRTPKVYKQYEMVVKSXKX

SEQ ID NO: 14494 - protein, 35 aa, Artificial Sequence
  GFR-binding peptide
  MOD_RES (4), (4): Xaa is C or S
KPTXAPTKLSPISVLFIDDSSNVIYKQYENMVVRS

SEQ ID NO: 14495 - protein, 35 aa, Artificial Sequence
  GFR-binding peptide
  MOD_RES (4), (5): Xaa is C or S
ASPXXVPQDLSPISILFIVGRTPKVYKQYEMVVKS

SEQ ID NO: 14496 - protein, 37 aa, Artificial Sequence; identical to SEQ ID NO: 7195
  GFR-binding peptide
  MOD_RES (1), (2), (34), (36): Xaa is C or S

SEQ ID NO: 14497 - protein, 36 aa, Artificial Sequence; identical to SEQ ID NO: 7197
  GFR-binding peptide
  MOD_RES (1), (2), (36): Xaa is C or S
  MOD_RES (16), (17), (18), (19), (20): Xaa is A or G
  MOD_RES (21), (22), (23), (24): Xaa is A or G or is absent

SEQ ID NO: 14498 - protein, 39 aa, Artificial Sequence
  GFR-binding peptide
  MOD_RES (3), (4), (38): Xaa is C or S
  MOD_RES (18), (19), (20), (21), (22): Xaa is A or G
  MOD_RES (23), (24), (25), (26): Xaa is A or G or is absent
KPXXAPTQLSPISVLFIXXXXXXXXXYKQYENMVVRAXG

SEQ ID NO: 14499 - protein, 37 aa, Artificial Sequence; identical to SEQ ID NO: 7199
  GFR-binding peptide
  MOD_RES (1), (35), (37): Xaa is C or S
  MOD_RES (15), (16), (17), (18), (19): Xaa is A or G
  MOD_RES (20), (21), (22), (23): Xaa is A or G or is absent

SEQ ID NO: 14500 - protein, 33 aa, Artificial Sequence
  GFR-binding peptide
  MOD_RES (1), (1): Xaa is C or S
  MOD_RES (15), (16), (17), (18), (19): Xaa is A or G
  MOD_RES (20), (21), (22), (23): Xaa is A or G or is absent
XVPTELEPLTMLYYXXXXXXXXXEQLSNDMVVE

SEQ ID NO: 14501 - protein, 31 aa, Artificial Sequence
  GFR-binding peptide
VPTELEPLPMVYYDENEKVVEQLSNDMVVEG

SEQ ID NO: 14502 - protein, 37 aa, Artificial Sequence; identical to SEQ ID NO: 7200
  GFR-binding peptide
  MOD_RES (3), (4), (35), (37): Xaa is C or S

SEQ ID NO: 14503 - protein, 39 aa, Artificial Sequence
  GFR-binding peptide
  MOD_RES (5), (6): Xaa is C or S
  MOD_RES (20), (21), (22), (23), (24): Xaa is A or G
  MOD_RES (25), (26), (27), (28): Xaa is A or G or is absent
IPKAXXVPTELEPLTMLYYXXXXXXXXXEQLSNEMVVEG

SEQ ID NO: 14504 - protein, 40 aa, Artificial Sequence
  GFR-binding peptide
  MOD_RES (6), (7), (39): Xaa is C or S
KIPKAXXVPTELEPLTMLYYDENEKVVEQLSNDMVVEGXG

SEQ ID NO: 14505 - protein, 36 aa, Artificial Sequence; identical to SEQ ID NO: 7203
  GFR-binding peptide
  MOD_RES (3), (4), (35): Xaa is C or S

SEQ ID NO: 14506 - protein, 36 aa, Artificial Sequence
  GFR-binding peptide
  MOD_RES (1), (35): Xaa is C or S
  MOD_RES (15), (16), (17), (18), (19): Xaa is A or G
  MOD_RES (20), (21), (22), (23): Xaa is A or G or is absent
XVPTRLEPLPIVYYXXXXXXXXXEQLSNDMVVESXG

SEQ ID NO: 14507 - protein, 42 aa, Artificial Sequence; identical to SEQ ID NO: 7204
  GFR-binding peptide
  MOD_RES (5), (6), (40), (42): Xaa is C or S
  MOD_RES (20), (21), (22), (23), (24): Xaa is A or G
  MOD_RES (25), (26), (27), (28): Xaa is A or G or is absent

SEQ ID NO: 14508 - protein, 40 aa, Artificial Sequence
  GFR-binding peptide
  MOD_RES (3), (4), (37), (39): Xaa is C or S
  MOD_RES (18), (19), (20), (21), (22): Xaa is A or G
  MOD_RES (23), (24), (25), (26): Xaa is A or G or is absent
SPXXVPQDLSPISILFIXXXXXXXXXYKQYEMVVKSXKXS

SEQ ID NO: 14509 - protein, 32 aa, Artificial Sequence
  GFR-binding peptide
  MOD_RES (14), (15), (16), (17), (18): Xaa is A or G
  MOD_RES (19), (20), (21), (22): Xaa is A or G or is absent
VPTELEPLPMVYYXXXXXXXXXEQLSNDMVVE

SEQ ID NO: 14510 - protein, 39 aa, Artificial Sequence
  GFR-binding peptide
  MOD_RES (5), (6), (38): Xaa is C or S
IPKAXXVPTELEPLPMVYYDENEKVVEQLSNDMVVEGXG

SEQ ID NO: 14511 - protein, 41 aa, Artificial Sequence
  GFR-binding peptide
  MOD_RES (6), (7), (41): Xaa is C or S
  MOD_RES (21), (22), (23), (24), (25): Xaa is A or G
  MOD_RES (26), (27), (28), (29): Xaa is A or G or is absent
STPPTXXVPTRLSPISILFIXXXXXXXXXYKQYEDMVVESX

SEQ ID NO: 14512 - protein, 36 aa, Artificial Sequence; identical to SEQ ID NO: 7207
  GFR-binding peptide
  MOD_RES (2), (3), (34), (36): Xaa is C or S

SEQ ID NO: 14513 - protein, 35 aa, Artificial Sequence
  GFR-binding peptide
  MOD_RES (1), (2): Xaa is C or S
  MOD_RES (16), (17), (18), (19), (20): Xaa is A or G
  MOD_RES (21), (22), (23), (24): Xaa is A or G or is absent
XXVPTELEPLTMLYYXXXXXXXXXEQLSNEMVVEG

SEQ ID NO: 14514 - protein, 38 aa, Artificial Sequence
  GFR-binding peptide
  MOD_RES (4), (5), (37): Xaa is C or S
PKPXXAPTQLEPLTVLYYDDSSNVIEQLSNNMVVRAXG

SEQ ID NO: 14515 - protein, 39 aa, Artificial Sequence; identical to SEQ ID NO: 7210
  GFR-binding peptide
  MOD_RES (5), (6): Xaa is C or S
  MOD_RES (20), (21), (22), (23), (24): Xaa is A or G
  MOD_RES (25), (26), (27), (28): Xaa is A or G or is absent

SEQ ID NO: 14516 - protein, 40 aa, Artificial Sequence
  GFR-binding peptide
  MOD_RES (5), (6), (38), (40): Xaa is C or S
TPPTXXVPTRLNAISILYFDSANNVVLKKYRDMVVESXGX

SEQ ID NO: 14517 - protein, 36 aa, Artificial Sequence; identical to SEQ ID NO: 7214
  GFR-binding peptide
  MOD_RES (1), (33), (35): Xaa is C or S

SEQ ID NO: 14518 - protein, 39 aa, Artificial Sequence
  GFR-binding peptide
  MOD_RES (1), (2), (36), (38): Xaa is C or S
  MOD_RES (16), (17), (18), (19), (20): Xaa is A or G
  MOD_RES (21), (22), (23), (24): Xaa is A or G or is absent
XXVPTRLNAISILYFXXXXXXXXXLKKYRDMVVESXGXR

SEQ ID NO: 14519 - protein, 32 aa, Artificial Sequence; identical to SEQ ID NO: 7215
  GFR-binding peptide
  MOD_RES (14), (15), (16), (17), (18): Xaa is A or G
  MOD_RES (19), (20), (21), (22): Xaa is A or G or is absent

SEQ ID NO: 14520 - protein, 38 aa, Artificial Sequence
  GFR-binding peptide
  MOD_RES (3), (4), (38): Xaa is C or S
  MOD_RES (18), (19), (20), (21), (22): Xaa is A or G
  MOD_RES (23), (24), (25), (26): Xaa is A or G or is absent
KPXXAPTKLEPLPVVYYXXXXXXXXXEQLSNNMVVRSX

SEQ ID NO: 14521 - protein, 34 aa, Artificial Sequence
  GFR-binding peptide
  MOD_RES (1), (34): Xaa is C or S
  MOD_RES (15), (16), (17), (18), (19): Xaa is A or G
  MOD_RES (20), (21), (22), (23): Xaa is A or G or is absent
XVSQDLSPISILFIXXXXXXXXXYKQYEMIVKSX

SEQ ID NO: 14522 - protein, 36 aa, Artificial Sequence
  GFR-binding peptide
  MOD_RES (1), (2), (36): Xaa is C or S
  MOD_RES (16), (17), (18), (19), (20): Xaa is A or G
  MOD_RES (21), (22), (23), (24): Xaa is A or G or is absent
XXVPTRLSPISILFIXXXXXXXXXYKQYEDMVVESX

SEQ ID NO: 14523 - protein, 35 aa, Artificial Sequence
  GFR-binding peptide
  MOD_RES (1), (32), (34): Xaa is C or S
XVSQDLEPLPIVYYIGKTPKIEQLSNMIVKSXKXS

SEQ ID NO: 14524 - protein, 39 aa, Artificial Sequence
  GFR-binding peptide
  MOD_RES (2), (3), (37), (39): Xaa is C or S
  MOD_RES (17), (18), (19), (20), (21): Xaa is A or G
  MOD_RES (22), (23), (24), (25): Xaa is A or G or is absent
PXXAPTQLEPLTVLYYXXXXXXXXXEQLSNNMVVRAXGX

SEQ ID NO: 14525 - protein, 39 aa, Artificial Sequence
  GFR-binding peptide
  MOD_RES (1), (2), (36), (38): Xaa is C or S
  MOD_RES (16), (17), (18), (19), (20): Xaa is A or G
  MOD_RES (21), (22), (23), (24): Xaa is A or G or is absent
XXAPTQLSPISVLFIXXXXXXXXXYKQYENMVVRAXGXH

SEQ ID NO: 14526 - protein, 38 aa, Artificial Sequence
  GFR-binding peptide
  MOD_RES (3), (35), (37): Xaa is C or S
PTXAPTKLSPISVLFIDDSSNVIYKQYENMVVRSXGXH

SEQ ID NO: 14527 - protein, 39 aa, Artificial Sequence
  GFR-binding peptide
  MOD_RES (4), (38): Xaa is C or S
  MOD_RES (18), (19), (20), (21), (22): Xaa is A or G
  MOD_RES (23), (24), (25), (26): Xaa is A or G or is absent
KPTXAPTKLEPLTVLYYXXXXXXXXXEQLSNNMVVRSXG

SEQ ID NO: 14528 - protein, 39 aa, Artificial Sequence
  GFR-binding peptide
  MOD_RES (5), (6), (39): Xaa is C or S
  MOD_RES (20), (21), (22), (23), (24): Xaa is A or G
  MOD_RES (25), (26), (27), (28): Xaa is A or G or is absent
SASPXXVPQDLSPISILFIXXXXXXXXXYKQYEMVVKSX

SEQ ID NO: 14529 - protein, 40 aa, Artificial Sequence
  GFR-binding peptide
  MOD_RES (4), (5), (37), (39): Xaa is C or S
PPTXXVPTRLEPLTILYYDSANNVVEQLSNDMVVESXGXR

SEQ ID NO: 14530 - protein, 36 aa, Artificial Sequence
  GFR-binding peptide
  MOD_RES (4), (36): Xaa is C or S
KPTXAPTKLSPISVLFIDDSSNVIYKQYENMVVRSX

SEQ ID NO: 14531 - protein, 40 aa, Artificial Sequence
  GFR-binding peptide
  MOD_RES (6), (7): Xaa is C or S
  MOD_RES (21), (22), (23), (24), (25): Xaa is A or G
  MOD_RES (26), (27), (28), (29): Xaa is A or G or is absent
STPPTXXVPTRLSPISILFIXXXXXXXXXYKQYEDMVVES

SEQ ID NO: 14532 - protein, 37 aa, Artificial Sequence
  GFR-binding peptide
  MOD_RES (4), (5), (37): Xaa is C or S
PKAXXVPTELEPLTMLYYDENEKVVEQLSNDMVVEGX

SEQ ID NO: 14533 - protein, 36 aa, Artificial Sequence
  GFR-binding peptide
  MOD_RES (1), (35): Xaa is C or S
  MOD_RES (15), (16), (17), (18), (19): Xaa is A or G
  MOD_RES (20), (21), (22), (23): Xaa is A or G or is absent
XVPTELEPLPMVYYXXXXXXXXXEQLSNDMVVEGXG

SEQ ID NO: 14534 - protein, 33 aa, Artificial Sequence
  GFR-binding peptide
  MOD_RES (1), (2): Xaa is C or S
XXVPTELEPLTMLYYDEYDKVVEQLSNEMVVEG

SEQ ID NO: 14535 - protein, 40 aa, Artificial Sequence
  GFR-binding peptide
  MOD_RES (5), (39): Xaa is C or S
  MOD_RES (19), (20), (21), (22), (23): Xaa is A or G
  MOD_RES (24), (25), (26), (27): Xaa is A or G or is absent
TKPTXAPTKLEPLTVLYYXXXXXXXXXEQLSNNMVVRSXG

SEQ ID NO: 14536 - protein, 34 aa, Artificial Sequence
  GFR-binding peptide
  MOD_RES (1), (1): Xaa is C or S
  MOD_RES (15), (16), (17), (18), (19): Xaa is A or G
  MOD_RES (20), (21), (22), (23): Xaa is A or G or is absent
XVPTELEPLPMVYYXXXXXXXXXEQLSNDMVVEG

SEQ ID NO: 14537 - protein, 40 aa, Artificial Sequence; identical to SEQ ID NO: 7234
  GFR-binding peptide
  MOD_RES (6), (7), (40): Xaa is C or S
  MOD_RES (21), (22), (23), (24), (25): Xaa is A or G
  MOD_RES (26), (27), (28), (29): Xaa is A or G or is absent

SEQ ID NO: 14538 - protein, 37 aa, Artificial Sequence
  GFR-binding peptide
  MOD_RES (2), (3), (36): Xaa is C or S
  MOD_RES (17), (18), (19), (20), (21): Xaa is A or G
  MOD_RES (22), (23), (24), (25): Xaa is A or G or is absent
PXXVPQDLEPLTILYYXXXXXXXXXEQLSNMVVKSXK

SEQ ID NO: 14539 - protein, 37 aa, Artificial Sequence
  GFR-binding peptide
  MOD_RES (5), (37): Xaa is C or S
TKPTXAPTKLEPLPVVYYDDSSNVIEQLSNNMVVRSX

SEQ ID NO: 14540 - protein, 39 aa, Artificial Sequence; identical to SEQ ID NO: 7236
  GFR-binding peptide
  MOD_RES (6), (7): Xaa is C or S
  MOD_RES (21), (22), (23), (24), (25): Xaa is A or G
  MOD_RES (26), (27), (28), (29): Xaa is A or G or is absent

SEQ ID NO: 14541 - protein, 36 aa, Artificial Sequence; identical to SEQ ID NO: 7237
  GFR-binding peptide
  MOD_RES (3), (4), (35): Xaa is C or S

SEQ ID NO: 14542 - protein, 36 aa, Artificial Sequence
  GFR-binding peptide
  MOD_RES (5), (6): Xaa is C or S
SASPXXVSQDLSPISILFIIGKTPKIYKQYEMIVKS

SEQ ID NO: 14543 - protein, 42 aa, Artificial Sequence
  GFR-binding peptide
  MOD_RES (5), (6), (39), (41): Xaa is C or S
  MOD_RES (20), (21), (22), (23), (24): Xaa is A or G
  MOD_RES (25), (26), (27), (28): Xaa is A or G or is absent
SASPXXVPQDLEPLPIVYYXXXXXXXXXEQLSNMVVKSXKXS

SEQ ID NO: 14544 - protein, 36 aa, Artificial Sequence; identical to SEQ ID NO: 7239
  GFR-binding peptide
  MOD_RES (3), (4): Xaa is C or S
  MOD_RES (18), (19), (20), (21), (22): Xaa is A or G
  MOD_RES (23), (24), (25), (26): Xaa is A or G or is absent

SEQ ID NO: 14545 - protein, 35 aa, Artificial Sequence
  GFR-binding peptide
  MOD_RES (4), (5): Xaa is C or S
ASPXXVPQDLEPLPIVYYVGRTPKVEQLSNMVVKS

SEQ ID NO: 14546 - protein, 41 aa, Artificial Sequence
  GFR-binding peptide
  MOD_RES (6), (7), (41): Xaa is C or S
  MOD_RES (21), (22), (23), (24), (25): Xaa is A or G
  MOD_RES (26), (27), (28), (29): Xaa is A or G or is absent
KIPKAXXVPTELEPLTMLYYXXXXXXXXXEQLSNDMVVEGX

SEQ ID NO: 14547 - protein, 43 aa, Artificial Sequence; identical to SEQ ID NO: 7248
  GFR-binding peptide
  MOD_RES (5), (6), (40), (42): Xaa is C or S
  MOD_RES (20), (21), (22), (23), (24): Xaa is A or G
  MOD_RES (25), (26), (27), (28): Xaa is A or G or is absent

SEQ ID NO: 14548 - protein, 38 aa, Artificial Sequence
  GFR-binding peptide
  MOD_RES (3), (4), (37): Xaa is C or S
  MOD_RES (18), (19), (20), (21), (22): Xaa is A or G
  MOD_RES (23), (24), (25), (26): Xaa is A or G or is absent
SPXXVPQDLSPISILFIXXXXXXXXXYKQYEMVVKSXK

SEQ ID NO: 14549 - protein, 40 aa, Artificial Sequence
  GFR-binding peptide
  MOD_RES (7), (7): Xaa is C or S
  MOD_RES (21), (22), (23), (24), (25): Xaa is A or G
  MOD_RES (26), (27), (28), (29): Xaa is A or G or is absent
HVTKPTXAPTKLEPLTVLYYXXXXXXXXXEQLSNNMVVRS

SEQ ID NO: 14550 - protein, 37 aa, Artificial Sequence
  GFR-binding peptide
  MOD_RES (1), (2), (34), (36): Xaa is C or S
XXVPTELEPLTMLYYDEYDKVVEQLSNEMVVEGXGXR

SEQ ID NO: 14551 - protein, 39 aa, Artificial Sequence
  GFR-binding peptide
  MOD_RES (1), (2), (36), (38): Xaa is C or S
  MOD_RES (16), (17), (18), (19), (20): Xaa is A or G
  MOD_RES (21), (22), (23), (24): Xaa is A or G or is absent
XXVPTRLEPLPIVYYXXXXXXXXXEQLSNDMVVESXGXR

SEQ ID NO: 14552 - protein, 38 aa, Artificial Sequence; identical to SEQ ID NO: 7254
  GFR-binding peptide
  MOD_RES (3), (4), (38): Xaa is C or S
  MOD_RES (18), (19), (20), (21), (22): Xaa is A or G
  MOD_RES (23), (24), (25), (26): Xaa is A or G or is absent

SEQ ID NO: 14553 - protein, 37 aa, Artificial Sequence; identical to SEQ ID NO: 7255
  GFR-binding peptide
  MOD_RES (4), (5): Xaa is C or S
  MOD_RES (19), (20), (21), (22), (23): Xaa is A or G
  MOD_RES (24), (25), (26), (27): Xaa is A or G or is absent

SEQ ID NO: 14554 - protein, 40 aa, Artificial Sequence; identical to SEQ ID NO: 7256
  GFR-binding peptide
  MOD_RES (5), (6), (37), (39): Xaa is C or S

SEQ ID NO: 14555 - protein, 44 aa, Artificial Sequence
  GFR-binding peptide
  MOD_RES (6), (7), (41), (43): Xaa is C or S
  MOD_RES (21), (22), (23), (24), (25): Xaa is A or G
  MOD_RES (26), (27), (28), (29): Xaa is A or G or is absent
STPPTXXVPTRLNAISILYFXXXXXXXXXLKKYRDMVVESXGXR

SEQ ID NO: 14556 - protein, 41 aa, Artificial Sequence
  GFR-binding peptide
  MOD_RES (6), (7), (39), (41): Xaa is C or S
TVPKPXXAPTQLEPLTVLYYDDSSNVIEQLSNNMVVRAXGX

SEQ ID NO: 14557 - protein, 40 aa, Artificial Sequence; identical to SEQ ID NO: 7257
  GFR-binding peptide
  MOD_RES (4), (5), (39): Xaa is C or S
  MOD_RES (19), (20), (21), (22), (23): Xaa is A or G
  MOD_RES (24), (25), (26), (27): Xaa is A or G or is absent

SEQ ID NO: 14558 - protein, 38 aa, Artificial Sequence
  GFR-binding peptide
  MOD_RES (3), (4), (35), (37): Xaa is C or S
SPXXVPQDLSPISILFIVGRTPKVYKQYEMVVKSXKXS

SEQ ID NO: 14559 - protein, 35 aa, Artificial Sequence; identical to SEQ ID NO: 7258
  GFR-binding peptide
  MOD_RES (1), (2): Xaa is C or S
  MOD_RES (16), (17), (18), (19), (20): Xaa is A or G
  MOD_RES (21), (22), (23), (24): Xaa is A or G or is absent

SEQ ID NO: 14560 - protein, 30 aa, Artificial Sequence; identical to SEQ ID NO: 7259
  GFR-binding peptide

SEQ ID NO: 14561 - protein, 43 aa, Artificial Sequence
  GFR-binding peptide
  MOD_RES (6), (7), (40), (42): Xaa is C or S
  MOD_RES (21), (22), (23), (24), (25): Xaa is A or G
  MOD_RES (26), (27), (28), (29): Xaa is A or G or is absent
ASAAPXXVPQALEPLPIVYYXXXXXXXXXEQLSNMIVRSXKXS

SEQ ID NO: 14562 - protein, 32 aa, Artificial Sequence
  GFR-binding peptide
  MOD_RES (1), (2): Xaa is C or S
XXVPTELSPISMLFIDENEKVVYKQYEDMVVE

SEQ ID NO: 14563 - protein, 37 aa, Artificial Sequence
  GFR-binding peptide
  MOD_RES (6), (7): Xaa is C or S
STPPTXXVPTRLEPLPIVYYDSANNVVEQLSNDMVVE

SEQ ID NO: 14564 - protein, 37 aa, Artificial Sequence
  GFR-binding peptide
  MOD_RES (1), (35), (37): Xaa is C or S
  MOD_RES (15), (16), (17), (18), (19): Xaa is A or G
  MOD_RES (20), (21), (22), (23): Xaa is A or G or is absent
XVPTELEPLPMVYYXXXXXXXXXEQLSNDMVVEGXGX

SEQ ID NO: 14565 - protein, 34 aa, Artificial Sequence
  GFR-binding peptide
  MOD_RES (1), (2), (34): Xaa is C or S
XXAPTKLEPLPVVYYDDSSNVIEQLSNNMVVRSX

SEQ ID NO: 14566 - protein, 38 aa, Artificial Sequence
  GFR-binding peptide
  MOD_RES (2), (3), (35), (37): Xaa is C or S
PXXAPTKLEPLPVVYYDDSSNVIEQLSNNMVVRSXGXH

SEQ ID NO: 14567 - protein, 33 aa, Artificial Sequence
  GFR-binding peptide
  MOD_RES (3), (3): Xaa is C or S
PTXAPTKLEPLPVVYYDDSSNVIEQLSNNMVVR

SEQ ID NO: 14568 - protein, 38 aa, Artificial Sequence
  GFR-binding peptide
  MOD_RES (2), (3), (35), (37): Xaa is C or S
PXXAPTQLSPISVLFIDDSSNVIYKQYENMVVRAXGXH

SEQ ID NO: 14569 - protein, 37 aa, Artificial Sequence; identical to SEQ ID NO: 7266
  GFR-binding peptide
  MOD_RES (3), (4): Xaa is C or S
  MOD_RES (18), (19), (20), (21), (22): Xaa is A or G
  MOD_RES (23), (24), (25), (26): Xaa is A or G or is absent

SEQ ID NO: 14570 - protein, 40 aa, Artificial Sequence
  GFR-binding peptide
  MOD_RES (6), (7): Xaa is C or S
  MOD_RES (21), (22), (23), (24), (25): Xaa is A or G
  MOD_RES (26), (27), (28), (29): Xaa is A or G or is absent
STPPTXXVPTRLEPLPIVYYXXXXXXXXXEQLSNDMVVES

SEQ ID NO: 14571 - protein, 36 aa, Artificial Sequence
  GFR-binding peptide
  MOD_RES (3), (4), (35): Xaa is C or S
APXXVPQALSPISILFIVGRKPKVYKQYEMIVRSXK

SEQ ID NO: 14572 - protein, 39 aa, Artificial Sequence
  GFR-binding peptide
  MOD_RES (4), (5), (39): Xaa is C or S
  MOD_RES (19), (20), (21), (22), (23): Xaa is A or G
  MOD_RES (24), (25), (26), (27): Xaa is A or G or is absent
PPTXXVPTRLEPLPIVYYXXXXXXXXXEQLSNDMVVESX

SEQ ID NO: 14573 - protein, 38 aa, Artificial Sequence; identical to SEQ ID NO: 7274
  GFR-binding peptide
  MOD_RES (6), (7), (38): Xaa is C or S

SEQ ID NO: 14574 - protein, 41 aa, Artificial Sequence
  GFR-binding peptide
  MOD_RES (6), (7), (39), (41): Xaa is C or S
SIPKAXXVPTELEPLTMLYYDEYDKVVEQLSNEMVVEGXGX

SEQ ID NO: 14575 - protein, 41 aa, Artificial Sequence
  GFR-binding peptide
  MOD_RES (4), (5), (39), (41): Xaa is C or S
  MOD_RES (19), (20), (21), (22), (23): Xaa is A or G
  MOD_RES (24), (25), (26), (27): Xaa is A or G or is absent
PKPXXAPTQLEPLPVVYYXXXXXXXXXEQLSNNMVVRAXGX

SEQ ID NO: 14576 - protein, 34 aa, Artificial Sequence; identical to SEQ ID NO: 7279
  GFR-binding peptide
  MOD_RES (3), (4): Xaa is C or S

SEQ ID NO: 14577 - protein, 39 aa, Artificial Sequence
  GFR-binding peptide
  MOD_RES (4), (5), (36), (38): Xaa is C or S
ASPXXVSQDLEPLPIVYYIGKTPKIEQLSNMIVKSXKXS

SEQ ID NO: 14578 - protein, 34 aa, Artificial Sequence
  GFR-binding peptide
  MOD_RES (3), (4): Xaa is C or S
KPXXAPTQLEPLTVLYYDDSSNVIEQLSNNMVVR

SEQ ID NO: 14579 - protein, 39 aa, Artificial Sequence; identical to SEQ ID NO: 7281
  GFR-binding peptide
  MOD_RES (5), (6), (38): Xaa is C or S

SEQ ID NO: 14580 - protein, 37 aa, Artificial Sequence; identical to SEQ ID NO: 7283
  GFR-binding peptide
  MOD_RES (1), (35), (37): Xaa is C or S
  MOD_RES (15), (16), (17), (18), (19): Xaa is A or G
  MOD_RES (20), (21), (22), (23): Xaa is A or G or is absent

SEQ ID NO: 14581 - protein, 34 aa, Artificial Sequence
  GFR-binding peptide
  MOD_RES (3), (4): Xaa is C or S
KPXXAPTQLEPLPVVYYDDSSNVIEQLSNNMVVR

SEQ ID NO: 14582 - protein, 43 aa, Artificial Sequence
  GFR-binding peptide
  MOD_RES (6), (40), (42): Xaa is C or S
  MOD_RES (20), (21), (22), (23), (24): Xaa is A or G
  MOD_RES (25), (26), (27), (28): Xaa is A or G or is absent
VTKPTXAPTKLEPLPVVYYXXXXXXXXXEQLSNNMVVRSXGXH

SEQ ID NO: 14583 - protein, 40 aa, Artificial Sequence
  GFR-binding peptide
  MOD_RES (3), (37), (39): Xaa is C or S
  MOD_RES (17), (18), (19), (20), (21): Xaa is A or G
  MOD_RES (22), (23), (24), (25): Xaa is A or G or is absent
PTXAPTKLEPLTVLYYXXXXXXXXXEQLSNNMVVRSXGXH

SEQ ID NO: 14584 - protein, 42 aa, Artificial Sequence
  GFR-binding peptide
  MOD_RES (5), (6), (40), (42): Xaa is C or S
  MOD_RES (20), (21), (22), (23), (24): Xaa is A or G
  MOD_RES (25), (26), (27), (28): Xaa is A or G or is absent
TPPTXXVPTRLNAISILYFXXXXXXXXXLKKYRDMVVESXGX

SEQ ID NO: 14585 - protein, 39 aa, Artificial Sequence
  GFR-binding peptide
  MOD_RES (2), (3), (37), (39): Xaa is C or S
  MOD_RES (17), (18), (19), (20), (21): Xaa is A or G
  MOD_RES (22), (23), (24), (25): Xaa is A or G or is absent
AXXVPTELEPLPMVYYXXXXXXXXXEQLSNDMVVEGXGX

SEQ ID NO: 14586 - protein, 38 aa, Artificial Sequence
  GFR-binding peptide
  MOD_RES (2), (3), (35), (37): Xaa is C or S
AXXVPTELSPISMLFIDEYDKVVYKQYEEMVVEGXGXR

SEQ ID NO: 14587 - protein, 37 aa, Artificial Sequence; identical to SEQ ID NO: 7287
  GFR-binding peptide
  MOD_RES (3), (4): Xaa is C or S
  MOD_RES (18), (19), (20), (21), (22): Xaa is A or G
  MOD_RES (23), (24), (25), (26): Xaa is A or G or is absent

SEQ ID NO: 14588 - protein, 38 aa, Artificial Sequence
  GFR-binding peptide
  MOD_RES (4), (5), (38): Xaa is C or S
  MOD_RES (19), (20), (21), (22), (23): Xaa is A or G
  MOD_RES (24), (25), (26), (27): Xaa is A or G or is absent
ASPXXVSQDLSPISILFIXXXXXXXXXYKQYEMIVKSX

SEQ ID NO: 14589 - protein, 40 aa, Artificial Sequence
  GFR-binding peptide
  MOD_RES (6), (7): Xaa is C or S
  MOD_RES (21), (22), (23), (24), (25): Xaa is A or G
  MOD_RES (26), (27), (28), (29): Xaa is A or G or is absent
YVPKPXXAPTKLSPISVLFIXXXXXXXXXYKQYENMVVRS

SEQ ID NO: 14590 - protein, 34 aa, Artificial Sequence; identical to SEQ ID NO: 7289
  GFR-binding peptide
  MOD_RES (31), (33): Xaa is C or S

SEQ ID NO: 14591 - protein, 42 aa, Artificial Sequence
  GFR-binding peptide
  MOD_RES (6), (7), (41): Xaa is C or S
  MOD_RES (21), (22), (23), (24), (25): Xaa is A or G
  MOD_RES (26), (27), (28), (29): Xaa is A or G or is absent
STPPTXXVPTRLNAISILYFXXXXXXXXXLKKYRDMVVESXG

SEQ ID NO: 14592 - protein, 35 aa, Artificial Sequence; identical to SEQ ID NO: 7293
  GFR-binding peptide
  MOD_RES (4), (5): Xaa is C or S

SEQ ID NO: 14593 - protein, 36 aa, Artificial Sequence
  GFR-binding peptide
  MOD_RES (3), (4), (36): Xaa is C or S
KPXXAPTQLEPLTVLYYDDSSNVIEQLSNNMVVRAX

SEQ ID NO: 14594 - protein, 38 aa, Artificial Sequence
  GFR-binding peptide
  MOD_RES (5), (6): Xaa is C or S
  MOD_RES (20), (21), (22), (23), (24): Xaa is A or G
  MOD_RES (25), (26), (27), (28): Xaa is A or G or is absent
IPKAXXVPTELSPISMLFIXXXXXXXXXYKQYEEMVVE

SEQ ID NO: 14595 - protein, 35 aa, Artificial Sequence; identical to SEQ ID NO: 7297
  GFR-binding peptide
  MOD_RES (1), (2): Xaa is C or S
  MOD_RES (16), (17), (18), (19), (20): Xaa is A or G
  MOD_RES (21), (22), (23), (24): Xaa is A or G or is absent

SEQ ID NO: 14596 - protein, 36 aa, Artificial Sequence
  GFR-binding peptide
  MOD_RES (2), (3), (35): Xaa is C or S
PXXAPTQLEPLPVVYYDDSSNVIEQLSNNMVVRAXG

SEQ ID NO: 14597 - protein, 32 aa, Artificial Sequence
  GFR-binding peptide
  MOD_RES (32), (32): Xaa is C or S
VPTRLNAISILYFDSANNVVLKKYRDMVVESX

SEQ ID NO: 14598 - protein, 33 aa, Artificial Sequence
  GFR-binding peptide
  MOD_RES (32), (32): Xaa is C or S
APTQLEPLPVVYYDDSSNVIEQLSNNMVVRAXG

SEQ ID NO: 14599 - protein, 32 aa, Artificial Sequence
  GFR-binding peptide
  MOD_RES (1), (1): Xaa is C or S
XVPTRLEPLPIVYYDSANNVVEQLSNDMVVES

SEQ ID NO: 14600 - protein, 40 aa, Artificial Sequence
  GFR-binding peptide
  MOD_RES (5), (6), (39): Xaa is C or S
  MOD_RES (20), (21), (22), (23), (24): Xaa is A or G
  MOD_RES (25), (26), (27), (28): Xaa is A or G or is absent
SAAPXXVPQALEPLTILYYXXXXXXXXXEQLSNMIVRSXK

SEQ ID NO: 14601 - protein, 40 aa, Artificial Sequence
  GFR-binding peptide
  MOD_RES (6), (7), (39): Xaa is C or S
SIPKAXXVPTELEPLPMVYYDEYDKVVEQLSNEMVVEGXG

SEQ ID NO: 14602 - protein, 41 aa, Artificial Sequence; identical to SEQ ID NO: 7302
  GFR-binding peptide
  MOD_RES (5), (6), (39), (41): Xaa is C or S
  MOD_RES (20), (21), (22), (23), (24): Xaa is A or G
  MOD_RES (25), (26), (27), (28): Xaa is A or G or is absent

SEQ ID NO: 14603 - protein, 37 aa, Artificial Sequence; identical to SEQ ID NO: 7303
  GFR-binding peptide
  MOD_RES (4), (5): Xaa is C or S
  MOD_RES (19), (20), (21), (22), (23): Xaa is A or G
  MOD_RES (24), (25), (26), (27): Xaa is A or G or is absent

SEQ ID NO: 14604 - protein, 37 aa, Artificial Sequence
  GFR-binding peptide
  MOD_RES (6), (6): Xaa is C or S
VTKPTXAPTKLSPISVLFIDDSSNVIYKQYENMVVRS

SEQ ID NO: 14605 - protein, 34 aa, Artificial Sequence; identical to SEQ ID NO: 7305
  GFR-binding peptide
  MOD_RES (1), (2): Xaa is C or S
  MOD_RES (16), (17), (18), (19), (20): Xaa is A or G
  MOD_RES (21), (22), (23), (24): Xaa is A or G or is absent

SEQ ID NO: 14606 - protein, 39 aa, Artificial Sequence; identical to SEQ ID NO: 7308
  GFR-binding peptide
  MOD_RES (3), (4), (38): Xaa is C or S
  MOD_RES (18), (19), (20), (21), (22): Xaa is A or G
  MOD_RES (23), (24), (25), (26): Xaa is A or G or is absent

SEQ ID NO: 14607 - protein, 39 aa, Artificial Sequence
  GFR-binding peptide
  MOD_RES (4), (5), (39): Xaa is C or S
  MOD_RES (19), (20), (21), (22), (23): Xaa is A or G
  MOD_RES (24), (25), (26), (27): Xaa is A or G or is absent
PKAXXVPTELSPISMLFIXXXXXXXXXYKQYEDMVVEGX

SEQ ID NO: 14608 - protein, 32 aa, Artificial Sequence
  GFR-binding peptide
  MOD_RES (2), (2): Xaa is C or S
TXAPTKLEPLPVVYYDDSSNVIEQLSNNMVVR

SEQ ID NO: 14609 - protein, 35 aa, Artificial Sequence
  GFR-binding peptide
  MOD_RES (2), (2): Xaa is C or S
  MOD_RES (16), (17), (18), (19), (20): Xaa is A or G
  MOD_RES (21), (22), (23), (24): Xaa is A or G or is absent
TXAPTKLEPLTVLYYXXXXXXXXXEQLSNNMVVRS

SEQ ID NO: 14610 - protein, 35 aa, Artificial Sequence
  GFR-binding peptide
  MOD_RES (4), (5): Xaa is C or S
PPTXXVPTRLNAISILYFDSANNVVLKKYRDMVVE

SEQ ID NO: 14611 - protein, 33 aa, Artificial Sequence
  GFR-binding peptide
  MOD_RES (2), (3): Xaa is C or S
AXXVPTELEPLTMLYYDENEKVVEQLSNDMVVE

SEQ ID NO: 14612 - protein, 36 aa, Artificial Sequence
  GFR-binding peptide
  MOD_RES (1), (35): Xaa is C or S
  MOD_RES (15), (16), (17), (18), (19): Xaa is A or G
  MOD_RES (20), (21), (22), (23): Xaa is A or G or is absent
XAPTKLEPLTVLYYXXXXXXXXXEQLSNNMVVRSXG

SEQ ID NO: 14613 - protein, 33 aa, Artificial Sequence
  GFR-binding peptide
  MOD_RES (14), (15), (16), (17), (18): Xaa is A or G
  MOD_RES (19), (20), (21), (22): Xaa is A or G or is absent
APTQLEPLTVLYYXXXXXXXXXEQLSNNMVVRA

SEQ ID NO: 14614 - protein, 34 aa, Artificial Sequence
  GFR-binding peptide
  MOD_RES (2), (2): Xaa is C or S
  MOD_RES (16), (17), (18), (19), (20): Xaa is A or G
  MOD_RES (21), (22), (23), (24): Xaa is A or G or is absent
TXAPTKLEPLTVLYYXXXXXXXXXEQLSNNMVVR

SEQ ID NO: 14615 - protein, 34 aa, Artificial Sequence; identical to SEQ ID NO: 7319
  GFR-binding peptide
  MOD_RES (3), (3): Xaa is C or S

SEQ ID NO: 14616 - protein, 34 aa, Artificial Sequence; identical to SEQ ID NO: 7321
  GFR-binding peptide
  MOD_RES (1), (1): Xaa is C or S
  MOD_RES (15), (16), (17), (18), (19): Xaa is A or G
  MOD_RES (20), (21), (22), (23): Xaa is A or G or is absent

SEQ ID NO: 14617 - protein, 37 aa, Artificial Sequence; identical to SEQ ID NO: 7322
  GFR-binding peptide
  MOD_RES (2), (3), (34), (36): Xaa is C or S

SEQ ID NO: 14618 - protein, 37 aa, Artificial Sequence; identical to SEQ ID NO: 7323
  GFR-binding peptide
  MOD_RES (1), (2), (35), (37): Xaa is C or S
  MOD_RES (16), (17), (18), (19), (20): Xaa is A or G
  MOD_RES (21), (22), (23), (24): Xaa is A or G or is absent

SEQ ID NO: 14619 - protein, 34 aa, Artificial Sequence; identical to SEQ ID NO: 7324
  GFR-binding peptide
  MOD_RES (1), (33): Xaa is C or S

SEQ ID NO: 14620 - protein, 32 aa, Artificial Sequence
  GFR-binding peptide
  MOD_RES (31), (31): Xaa is C or S
VSQDLSPISILFIIGKTPKIYKQYEMIVKSXK

SEQ ID NO: 14621 - protein, 42 aa, Artificial Sequence
  GFR-binding peptide
  MOD_RES (5), (6), (39), (41): Xaa is C or S
  MOD_RES (20), (21), (22), (23), (24): Xaa is A or G
  MOD_RES (25), (26), (27), (28): Xaa is A or G or is absent
SASPXXVSQDLSPISILFIXXXXXXXXXYKQYEMIVKSXKXS

SEQ ID NO: 14622 - protein, 41 aa, Artificial Sequence
  GFR-binding peptide
  MOD_RES (6), (7), (39), (41): Xaa is C or S
STPPTXXVPTRLEPLPIVYYDSANNVVEQLSNDMVVESXGX

SEQ ID NO: 14623 - protein, 37 aa, Artificial Sequence
  GFR-binding peptide
  MOD_RES (3), (4), (36): Xaa is C or S
KAXXVPTELEPLTMLYYDENEKVVEQLSNDMVVEGXG

SEQ ID NO: 14624 - protein, 41 aa, Artificial Sequence; identical to SEQ ID NO: 7327
  GFR-binding peptide
  MOD_RES (4), (5), (38), (40): Xaa is C or S
  MOD_RES (19), (20), (21), (22), (23): Xaa is A or G
  MOD_RES (24), (25), (26), (27): Xaa is A or G or is absent

SEQ ID NO: 14625 - protein, 39 aa, Artificial Sequence
  GFR-binding peptide
  MOD_RES (3), (4), (36), (38): Xaa is C or S
KAXXVPTELEPLTMLYYDENEKVVEQLSNDMVVEGXGXR

SEQ ID NO: 14626 - protein, 34 aa, Artificial Sequence; identical to SEQ ID NO: 7329
  GFR-binding peptide
  MOD_RES (2), (3), (34): Xaa is C or S

SEQ ID NO: 14627 - protein, 36 aa, Artificial Sequence; identical to SEQ ID NO: 7332
  GFR-binding peptide
  MOD_RES (2), (3), (34), (36): Xaa is C or S

SEQ ID NO: 14628 - protein, 38 aa, Artificial Sequence; identical to SEQ ID NO: 7333
  GFR-binding peptide
  MOD_RES (3), (4), (35), (37): Xaa is C or S

SEQ ID NO: 14629 - protein, 41 aa, Artificial Sequence
  GFR-binding peptide
  MOD_RES (6), (7), (39), (41): Xaa is C or S
TVPKPXXAPTQLSPISVLFIDDSSNVIYKQYENMVVRAXGX

SEQ ID NO: 14630 - protein, 39 aa, Artificial Sequence
  GFR-binding peptide
  MOD_RES (2), (3), (37), (39): Xaa is C or S
  MOD_RES (17), (18), (19), (20), (21): Xaa is A or G
  MOD_RES (22), (23), (24), (25): Xaa is A or G or is absent
PXXAPTQLSPISVLFIXXXXXXXXXYKQYENMVVRAXGX

SEQ ID NO: 14631 - protein, 36 aa, Artificial Sequence
  GFR-binding peptide
  MOD_RES (1), (33), (35): Xaa is C or S
XVPTELSPISMLFIDENEKVVYKQYEDMVVEGXGXR

SEQ ID NO: 14632 - protein, 36 aa, Artificial Sequence; identical to SEQ ID NO: 7341
  GFR-binding peptide
  MOD_RES (4), (5): Xaa is C or S

SEQ ID NO: 14633 - protein, 35 aa, Artificial Sequence
  GFR-binding peptide
  MOD_RES (1), (33), (35): Xaa is C or S
XVPTELSPISMLFIDENEKVVYKQYEDMVVEGXGX

SEQ ID NO: 14634 - protein, 40 aa, Artificial Sequence
  GFR-binding peptide
  MOD_RES (5), (6), (40): Xaa is C or S
  MOD_RES (20), (21), (22), (23), (24): Xaa is A or G
  MOD_RES (25), (26), (27), (28): Xaa is A or G or is absent
VPKPXXAPTQLSPISVLFIXXXXXXXXXYKQYENMVVRAX

SEQ ID NO: 14635 - protein, 38 aa, Artificial Sequence
  GFR-binding peptide
  MOD_RES (4), (5), (36), (38): Xaa is C or S
ASPXXVSQDLSPISILFIIGKTPKIYKQYEMIVKSXKX

SEQ ID NO: 14636 - protein, 37 aa, Artificial Sequence
  GFR-binding peptide
  MOD_RES (4), (4): Xaa is C or S
  MOD_RES (18), (19), (20), (21), (22): Xaa is A or G
  MOD_RES (23), (24), (25), (26): Xaa is A or G or is absent
KPTXAPTKLEPLTVLYYXXXXXXXXXEQLSNNMVVRS

SEQ ID NO: 14637 - protein, 43 aa, Artificial Sequence
  GFR-binding peptide
  MOD_RES (6), (7), (41), (43): Xaa is C or S
  MOD_RES (21), (22), (23), (24), (25): Xaa is A or G
  MOD_RES (26), (27), (28), (29): Xaa is A or G or is absent
STPPTXXVPTRLNAISILYFXXXXXXXXXLKKYRDMVVESXGX

SEQ ID NO: 14638 - protein, 35 aa, Artificial Sequence
  GFR-binding peptide
  MOD_RES (1), (35): Xaa is C or S
  MOD_RES (15), (16), (17), (18), (19): Xaa is A or G
  MOD_RES (20), (21), (22), (23): Xaa is A or G or is absent
XVPTELEPLTMLYYXXXXXXXXXEQLSNDMVVEGX

SEQ ID NO: 14639 - protein, 36 aa, Artificial Sequence
  GFR-binding peptide
  MOD_RES (1), (33), (35): Xaa is C or S
XVPTELEPLTMLYYDENEKVVEQLSNDMVVEGXGXR

SEQ ID NO: 14640 - protein, 41 aa, Artificial Sequence
  GFR-binding peptide
  MOD_RES (5), (6), (40): Xaa is C or S
  MOD_RES (20), (21), (22), (23), (24): Xaa is A or G
  MOD_RES (25), (26), (27), (28): Xaa is A or G or is absent
TPPTXXVPTRLSAISILYLXXXXXXXXXLKNYQDMVVESXG

SEQ ID NO: 14641 - protein, 35 aa, Artificial Sequence
  GFR-binding peptide
  MOD_RES (1), (2), (34): Xaa is C or S
XXVPTRLEPLTILYYDSANNVVEQLSNDMVVESXG

SEQ ID NO: 14642 - protein, 42 aa, Artificial Sequence
  GFR-binding peptide
  MOD_RES (5), (6), (40), (42): Xaa is C or S
  MOD_RES (20), (21), (22), (23), (24): Xaa is A or G
  MOD_RES (25), (26), (27), (28): Xaa is A or G or is absent
VPKPXXAPTQLEPLTVLYYXXXXXXXXXEQLSNNMVVRAXGX

SEQ ID NO: 14643 - protein, 40 aa, Artificial Sequence
  GFR-binding peptide
  MOD_RES (3), (4), (38), (40): Xaa is C or S
  MOD_RES (18), (19), (20), (21), (22): Xaa is A or G
  MOD_RES (23), (24), (25), (26): Xaa is A or G or is absent
KAXXVPTELEPLTMLYYXXXXXXXXXEQLSNDMVVEGXGX

SEQ ID NO: 14644 - protein, 37 aa, Artificial Sequence
  GFR-binding peptide
  MOD_RES (1), (2), (36): Xaa is C or S
  MOD_RES (16), (17), (18), (19), (20): Xaa is A or G
  MOD_RES (21), (22), (23), (24): Xaa is A or G or is absent
XXVPTELEPLTMLYYXXXXXXXXXEQLSNEMVVEGXG

SEQ ID NO: 14645 - protein, 34 aa, Artificial Sequence; identical to SEQ ID NO: 7350
  GFR-binding peptide
  MOD_RES (1), (2), (33): Xaa is C or S

SEQ ID NO: 14646 - protein, 38 aa, Artificial Sequence
  GFR-binding peptide
  MOD_RES (5), (6): Xaa is C or S
  MOD_RES (20), (21), (22), (23), (24): Xaa is A or G
  MOD_RES (25), (26), (27), (28): Xaa is A or G or is absent
VPKPXXAPTKLEPLPVVYYXXXXXXXXXEQLSNNMVVR

SEQ ID NO: 14647 - protein, 34 aa, Artificial Sequence
  GFR-binding peptide
  MOD_RES (32), (34): Xaa is C or S
APTKLEPLTVLYYDDSSNVIEQLSNNMVVRSXGX

SEQ ID NO: 14648 - protein, 39 aa, Artificial Sequence; identical to SEQ ID NO: 7351
  GFR-binding peptide
  MOD_RES (4), (5), (39): Xaa is C or S
  MOD_RES (19), (20), (21), (22), (23): Xaa is A or G
  MOD_RES (24), (25), (26), (27): Xaa is A or G or is absent

SEQ ID NO: 14649 - protein, 34 aa, Artificial Sequence; identical to SEQ ID NO: 7352
  GFR-binding peptide
  MOD_RES (33), (33): Xaa is C or S
  MOD_RES (14), (15), (16), (17), (18): Xaa is A or G
  MOD_RES (19), (20), (21), (22): Xaa is A or G or is absent

SEQ ID NO: 14650 - protein, 43 aa, Artificial Sequence
  GFR-binding peptide
  MOD_RES (6), (7), (41), (43): Xaa is C or S
  MOD_RES (21), (22), (23), (24), (25): Xaa is A or G
  MOD_RES (26), (27), (28), (29): Xaa is A or G or is absent
KIPKAXXVPTELEPLTMLYYXXXXXXXXXEQLSNDMVVEGXGX

SEQ ID NO: 14651 - protein, 32 aa, Artificial Sequence
  GFR-binding peptide
  MOD_RES (32), (32): Xaa is C or S
APTKLEPLPVVYYDDSSNVIEQLSNNMVVRSX

SEQ ID NO: 14652 - protein, 37 aa, Artificial Sequence
  GFR-binding peptide
  MOD_RES (2), (3), (35), (37): Xaa is C or S
TXXVPTRLEPLTILYYDSANNVVEQLSNDMVVESXGX

SEQ ID NO: 14653 - protein, 36 aa, Artificial Sequence
  GFR-binding peptide
  MOD_RES (1), (33), (35): Xaa is C or S
XAPTKLSPISVLFIDDSSNVIYKQYENMVVRSXGXH

SEQ ID NO: 14654 - protein, 40 aa, Artificial Sequence; identical to SEQ ID NO: 7353
  GFR-binding peptide
  MOD_RES (2), (3), (37), (39): Xaa is C or S
  MOD_RES (17), (18), (19), (20), (21): Xaa is A or G
  MOD_RES (22), (23), (24), (25): Xaa is A or G or is absent

SEQ ID NO: 14655 - protein, 38 aa, Artificial Sequence
  GFR-binding peptide
  MOD_RES (6), (7): Xaa is C or S
KIPKAXXVPTELEPLPMVYYDENEKVVEQLSNDMVVEG

SEQ ID NO: 14656 - protein, 36 aa, Artificial Sequence
  GFR-binding peptide
  MOD_RES (2), (3), (36): Xaa is C or S
  MOD_RES (17), (18), (19), (20), (21): Xaa is A or G
  MOD_RES (22), (23), (24), (25): Xaa is A or G or is absent
PXXVSQDLSPISILFIXXXXXXXXXYKQYEMIVKSX

SEQ ID NO: 14657 - protein, 37 aa, Artificial Sequence
  GFR-binding peptide
  MOD_RES (2), (34), (36): Xaa is C or S
TXAPTKLSPISVLFIDDSSNVIYKQYENMVVRSXGXH

SEQ ID NO: 14658 - protein, 39 aa, Artificial Sequence
  GFR-binding peptide
  MOD_RES (5), (6): Xaa is C or S
  MOD_RES (20), (21), (22), (23), (24): Xaa is A or G
  MOD_RES (25), (26), (27), (28): Xaa is A or G or is absent
VPKPXXAPTQLSPISVLFIXXXXXXXXXYKQYENMVVRA

SEQ ID NO: 14659 - protein, 43 aa, Artificial Sequence
  GFR-binding peptide
  MOD_RES (7), (41), (43): Xaa is C or S
  MOD_RES (21), (22), (23), (24), (25): Xaa is A or G
  MOD_RES (26), (27), (28), (29): Xaa is A or G or is absent
HVTKPTXAPTKLEPLTVLYYXXXXXXXXXEQLSNNMVVRSXGX

SEQ ID NO: 14660 - protein, 34 aa, Artificial Sequence; identical to SEQ ID NO: 7354
  GFR-binding peptide
  MOD_RES (2), (3): Xaa is C or S

SEQ ID NO: 14661 - protein, 31 aa, Artificial Sequence
  GFR-binding peptide
  MOD_RES (1), (1): Xaa is C or S
XVPTELEPLPMVYYDENEKVVEQLSNDMVVE

SEQ ID NO: 14662 - protein, 38 aa, Artificial Sequence
  GFR-binding peptide
  MOD_RES (4), (5): Xaa is C or S
  MOD_RES (19), (20), (21), (22), (23): Xaa is A or G
  MOD_RES (24), (25), (26), (27): Xaa is A or G or is absent
PKPXXAPTKLEPLTVLYYXXXXXXXXXEQLSNNMVVRS

SEQ ID NO: 14663 - protein, 34 aa, Artificial Sequence
  GFR-binding peptide
  MOD_RES (32), (34): Xaa is C or S
APTKLSPISVLFIDDSSNVIYKQYENMVVRSXGX

SEQ ID NO: 14664 - protein, 39 aa, Artificial Sequence; identical to SEQ ID NO: 7359
  GFR-binding peptide
  MOD_RES (6), (7), (38): Xaa is C or S

SEQ ID NO: 14665 - protein, 41 aa, Artificial Sequence
  GFR-binding peptide
  MOD_RES (6), (7), (39), (41): Xaa is C or S
KIPKAXXVPTELEPLPMVYYDENEKVVEQLSNDMVVEGXGX

SEQ ID NO: 14666 - protein, 30 aa, Artificial Sequence
  GFR-binding peptide
VPTELEPLPMVYYDEYDKVVEQLSNEMVVE

SEQ ID NO: 14667 - protein, 39 aa, Artificial Sequence; identical to SEQ ID NO: 7363
  GFR-binding peptide
  MOD_RES (2), (3), (37), (39): Xaa is C or S
  MOD_RES (17), (18), (19), (20), (21): Xaa is A or G
  MOD_RES (22), (23), (24), (25): Xaa is A or G or is absent

SEQ ID NO: 14668 - protein, 35 aa, Artificial Sequence; identical to SEQ ID NO: 7365
  GFR-binding peptide
  MOD_RES (32), (34): Xaa is C or S

SEQ ID NO: 14669 - protein, 36 aa, Artificial Sequence; identical to SEQ ID NO: 7366
  GFR-binding peptide
  MOD_RES (5), (6): Xaa is C or S

SEQ ID NO: 14670 - protein, 33 aa, Artificial Sequence
  GFR-binding peptide
  MOD_RES (1), (2): Xaa is C or S
XXVPTRLNAISILYFDSANNVVLKKYRDMVVES

SEQ ID NO: 14671 - protein, 36 aa, Artificial Sequence
  GFR-binding peptide
  MOD_RES (3), (35): Xaa is C or S
PTXAPTKLEPLTVLYYDDSSNVIEQLSNNMVVRSXG

SEQ ID NO: 14672 - protein, 36 aa, Artificial Sequence
  GFR-binding peptide
  MOD_RES (1), (2), (36): Xaa is C or S
  MOD_RES (16), (17), (18), (19), (20): Xaa is A or G
  MOD_RES (21), (22), (23), (24): Xaa is A or G or is absent
XXVPTELEPLTMLYYXXXXXXXXXEQLSNEMVVEGX

SEQ ID NO: 14673 - protein, 35 aa, Artificial Sequence
  GFR-binding peptide
  MOD_RES (1), (33), (35): Xaa is C or S
XVPTELEPLTMLYYDENEKVVEQLSNDMVVEGXGX

SEQ ID NO: 14674 - protein, 43 aa, Artificial Sequence
  GFR-binding peptide
  MOD_RES (5), (6), (40), (42): Xaa is C or S
  MOD_RES (20), (21), (22), (23), (24): Xaa is A or G
  MOD_RES (25), (26), (27), (28): Xaa is A or G or is absent
TPPTXXVPTRLEPLTILYYXXXXXXXXXEQLSNDMVVESXGXR

SEQ ID NO: 14675 - protein, 30 aa, Artificial Sequence; identical to SEQ ID NO: 7373
  GFR-binding peptide

SEQ ID NO: 14676 - protein, 36 aa, Artificial Sequence
  GFR-binding peptide
  MOD_RES (2), (3), (35): Xaa is C or S
PXXAPTKLEPLTVLYYDDSSNVIEQLSNNMVVRSXG

SEQ ID NO: 14677 - protein, 40 aa, Artificial Sequence
  GFR-binding peptide
  MOD_RES (6), (7), (39): Xaa is C or S
TVPKPXXAPTQLEPLPVVYYDDSSNVIEQLSNNMVVRAXG

SEQ ID NO: 14678 - protein, 39 aa, Artificial Sequence
  GFR-binding peptide
  MOD_RES (1), (2), (36), (38): Xaa is C or S
  MOD_RES (16), (17), (18), (19), (20): Xaa is A or G
  MOD_RES (21), (22), (23), (24): Xaa is A or G or is absent
XXAPTQLEPLTVLYYXXXXXXXXXEQLSNNMVVRAXGXH

SEQ ID NO: 14679 - protein, 38 aa, Artificial Sequence; identical to SEQ ID NO: 7375
  GFR-binding peptide
  MOD_RES (3), (4), (35), (37): Xaa is C or S

SEQ ID NO: 14680 - protein, 32 aa, Artificial Sequence
  GFR-binding peptide
  MOD_RES (31), (31): Xaa is C or S
VPQDLEPLPIVYYVGRTPKVEQLSNMVVKSXK

SEQ ID NO: 14681 - protein, 36 aa, Artificial Sequence; identical to SEQ ID NO: 7377
  GFR-binding peptide
  MOD_RES (1), (2), (35): Xaa is C or S
  MOD_RES (16), (17), (18), (19), (20): Xaa is A or G
  MOD_RES (21), (22), (23), (24): Xaa is A or G or is absent

SEQ ID NO: 14682 - protein, 40 aa, Artificial Sequence; identical to SEQ ID NO: 7378
  GFR-binding peptide
  MOD_RES (4), (5), (39): Xaa is C or S
  MOD_RES (19), (20), (21), (22), (23): Xaa is A or G
  MOD_RES (24), (25), (26), (27): Xaa is A or G or is absent

SEQ ID NO: 14683 - protein, 37 aa, Artificial Sequence
  GFR-binding peptide
  MOD_RES (7), (7): Xaa is C or S
HVTKPTXAPTKLEPLTVLYYDDSSNVIEQLSNNMVVR

SEQ ID NO: 14684 - protein, 37 aa, Artificial Sequence
  GFR-binding peptide
  MOD_RES (3), (4), (36): Xaa is C or S
KAXXVPTELSPISMLFIDEYDKVVYKQYEEMVVEGXG

SEQ ID NO: 14685 - protein, 36 aa, Artificial Sequence; identical to SEQ ID NO: 7390
  GFR-binding peptide
  MOD_RES (1), (34), (36): Xaa is C or S
  MOD_RES (15), (16), (17), (18), (19): Xaa is A or G
  MOD_RES (20), (21), (22), (23): Xaa is A or G or is absent

SEQ ID NO: 14686 - protein, 41 aa, Artificial Sequence
  GFR-binding peptide
  MOD_RES (6), (7), (40): Xaa is C or S
  MOD_RES (21), (22), (23), (24), (25): Xaa is A or G
  MOD_RES (26), (27), (28), (29): Xaa is A or G or is absent
ASASPXXVPQDLSPISILFIXXXXXXXXXYKQYEMVVKSXK

SEQ ID NO: 14687 - protein, 37 aa, Artificial Sequence
  GFR-binding peptide
  MOD_RES (3), (4), (36): Xaa is C or S
KPXXAPTKLSPISVLFIDDSSNVIYKQYENMVVRSXG

SEQ ID NO: 14688 - protein, 40 aa, Artificial Sequence
  GFR-binding peptide
  MOD_RES (4), (5), (38), (40): Xaa is C or S
  MOD_RES (19), (20), (21), (22), (23): Xaa is A or G
  MOD_RES (24), (25), (26), (27): Xaa is A or G or is absent
AAPXXVPQALSPISILFIXXXXXXXXXYKQYEMIVRSXKX

SEQ ID NO: 14689 - protein, 37 aa, Artificial Sequence
  GFR-binding peptide
  MOD_RES (2), (3), (34), (36): Xaa is C or S
PXXVPQDLSPISILFIVGRTPKVYKQYEMVVKSXKXS

SEQ ID NO: 14690 - protein, 38 aa, Artificial Sequence; identical to SEQ ID NO: 7397
  GFR-binding peptide
  MOD_RES (3), (35), (37): Xaa is C or S

SEQ ID NO: 14691 - protein, 34 aa, Artificial Sequence
  GFR-binding peptide
  MOD_RES (1), (1): Xaa is C or S
  MOD_RES (15), (16), (17), (18), (19): Xaa is A or G
  MOD_RES (20), (21), (22), (23): Xaa is A or G or is absent
XVPTELEPLTMLYYXXXXXXXXXEQLSNEMVVEG

SEQ ID NO: 14692 - protein, 42 aa, Artificial Sequence; identical to SEQ ID NO: 7401
  GFR-binding peptide
  MOD_RES (6), (7), (40), (42): Xaa is C or S
  MOD_RES (21), (22), (23), (24), (25): Xaa is A or G
  MOD_RES (26), (27), (28), (29): Xaa is A or G or is absent

SEQ ID NO: 14693 - protein, 35 aa, Artificial Sequence
  GFR-binding peptide
  MOD_RES (4), (5): Xaa is C or S
PKPXXAPTQLEPLTVLYYDDSSNVIEQLSNNMVVR

SEQ ID NO: 14694 - protein, 37 aa, Artificial Sequence
  GFR-binding peptide
  MOD_RES (2), (34), (36): Xaa is C or S
TXAPTKLEPLTVLYYDDSSNVIEQLSNNMVVRSXGXH

SEQ ID NO: 14695 - protein, 41 aa, Artificial Sequence
  GFR-binding peptide
  MOD_RES (4), (5), (38), (40): Xaa is C or S
  MOD_RES (19), (20), (21), (22), (23): Xaa is A or G
  MOD_RES (24), (25), (26), (27): Xaa is A or G or is absent
ASPXXVSQDLEPLPIVYYXXXXXXXXXEQLSNMIVKSXKXS

SEQ ID NO: 14696 - protein, 38 aa, Artificial Sequence
  GFR-binding peptide
  MOD_RES (4), (5), (38): Xaa is C or S
  MOD_RES (19), (20), (21), (22), (23): Xaa is A or G
  MOD_RES (24), (25), (26), (27): Xaa is A or G or is absent
ASPXXVPQDLSPISILFIXXXXXXXXXYKQYEMVVKSX

SEQ ID NO: 14697 - protein, 37 aa, Artificial Sequence
  GFR-binding peptide
  MOD_RES (2), (3), (37): Xaa is C or S
  MOD_RES (17), (18), (19), (20), (21): Xaa is A or G
  MOD_RES (22), (23), (24), (25): Xaa is A or G or is absent
AXXVPTELSPISMLFIXXXXXXXXXYKQYEEMVVEGX

SEQ ID NO: 14698 - protein, 40 aa, Artificial Sequence
  GFR-binding peptide
  MOD_RES (6), (7): Xaa is C or S
  MOD_RES (21), (22), (23), (24), (25): Xaa is A or G
  MOD_RES (26), (27), (28), (29): Xaa is A or G or is absent
KIPKAXXVPTELEPLPMVYYXXXXXXXXXEQLSNDMVVEG

SEQ ID NO: 14699 - protein, 39 aa, Artificial Sequence; identical to SEQ ID NO: 7408
  GFR-binding peptide
  MOD_RES (5), (6), (37), (39): Xaa is C or S

SEQ ID NO: 14700 - protein, 34 aa, Artificial Sequence
  GFR-binding peptide
  MOD_RES (1), (33): Xaa is C or S
XVPTELEPLPMVYYDENEKVVEQLSNDMVVEGXG

SEQ ID NO: 14701 - protein, 36 aa, Artificial Sequence
  GFR-binding peptide
  MOD_RES (1), (2), (36): Xaa is C or S
  MOD_RES (16), (17), (18), (19), (20): Xaa is A or G
  MOD_RES (21), (22), (23), (24): Xaa is A or G or is absent
XXAPTQLEPLTVLYYXXXXXXXXXEQLSNNMVVRAX

SEQ ID NO: 14702 - protein, 40 aa, Artificial Sequence
  GFR-binding peptide
  MOD_RES (6), (7): Xaa is C or S
  MOD_RES (21), (22), (23), (24), (25): Xaa is A or G
  MOD_RES (26), (27), (28), (29): Xaa is A or G or is absent
KIPKAXXVPTELEPLTMLYYXXXXXXXXXEQLSNDMVVEG

SEQ ID NO: 14703 - protein, 40 aa, Artificial Sequence
  GFR-binding peptide
  MOD_RES (7), (39): Xaa is C or S
HVTKPTXAPTKLEPLTVLYYDDSSNVIEQLSNNMVVRSXG

SEQ ID NO: 14704 - protein, 37 aa, Artificial Sequence
  GFR-binding peptide
  MOD_RES (34), (36): Xaa is C or S
  MOD_RES (14), (15), (16), (17), (18): Xaa is A or G
  MOD_RES (19), (20), (21), (22): Xaa is A or G or is absent
APTQLEPLPVVYYXXXXXXXXXEQLSNNMVVRAXGXH

SEQ ID NO: 14705 - protein, 39 aa, Artificial Sequence
  GFR-binding peptide
  MOD_RES (6), (7), (39): Xaa is C or S
KIPKAXXVPTELSPISMLFIDENEKVVYKQYEDMVVEGX

SEQ ID NO: 14706 - protein, 37 aa, Artificial Sequence
  GFR-binding peptide
  MOD_RES (1), (2), (36): Xaa is C or S
  MOD_RES (16), (17), (18), (19), (20): Xaa is A or G
  MOD_RES (21), (22), (23), (24): Xaa is A or G or is absent
XXVPTELSPISMLFIXXXXXXXXXYKQYEEMVVEGXG

SEQ ID NO: 14707 - protein, 38 aa, Artificial Sequence
  GFR-binding peptide
  MOD_RES (4), (5), (37): Xaa is C or S
PPTXXVPTRLSAISILYLDSANNVVLKNYQDMVVESXG

SEQ ID NO: 14708 - protein, 37 aa, Artificial Sequence
  GFR-binding peptide
  MOD_RES (3), (4), (36): Xaa is C or S
KAXXVPTELEPLPMVYYDEYDKVVEQLSNEMVVEGXG

SEQ ID NO: 14709 - protein, 34 aa, Artificial Sequence; identical to SEQ ID NO: 7413
  GFR-binding peptide
  MOD_RES (3), (4): Xaa is C or S

SEQ ID NO: 14710 - protein, 39 aa, Artificial Sequence
  GFR-binding peptide
  MOD_RES (3), (4), (38): Xaa is C or S
  MOD_RES (18), (19), (20), (21), (22): Xaa is A or G
  MOD_RES (23), (24), (25), (26): Xaa is A or G or is absent
KAXXVPTELEPLPMVYYXXXXXXXXXEQLSNDMVVEGXG

SEQ ID NO: 14711 - protein, 36 aa, Artificial Sequence
  GFR-binding peptide
  MOD_RES (5), (6): Xaa is C or S
IPKAXXVPTELEPLTMLYYDENEKVVEQLSNDMVVE

SEQ ID NO: 14712 - protein, 37 aa, Artificial Sequence
  GFR-binding peptide
  MOD_RES (1), (2), (34), (36): Xaa is C or S
XXAPTQLEPLPVVYYDDSSNVIEQLSNNMVVRAXGXH

SEQ ID NO: 14713 - protein, 35 aa, Artificial Sequence
  GFR-binding peptide
  MOD_RES (2), (3): Xaa is C or S
  MOD_RES (17), (18), (19), (20), (21): Xaa is A or G
  MOD_RES (22), (23), (24), (25): Xaa is A or G or is absent
TXXVPTRLSPISILFIXXXXXXXXXYKQYEDMVVE

SEQ ID NO: 14714 - protein, 38 aa, Artificial Sequence; identical to SEQ ID NO: 7416
  GFR-binding peptide
  MOD_RES (5), (6): Xaa is C or S
  MOD_RES (20), (21), (22), (23), (24): Xaa is A or G
  MOD_RES (25), (26), (27), (28): Xaa is A or G or is absent

SEQ ID NO: 14715 - protein, 37 aa, Artificial Sequence
  GFR-binding peptide
  MOD_RES (2), (3), (37): Xaa is C or S
  MOD_RES (17), (18), (19), (20), (21): Xaa is A or G
  MOD_RES (22), (23), (24), (25): Xaa is A or G or is absent
TXXVPTRLNAISILYFXXXXXXXXXLKKYRDMVVESX

SEQ ID NO: 14716 - protein, 40 aa, Artificial Sequence; identical to SEQ ID NO: 7419
  GFR-binding peptide
  MOD_RES (3), (4), (37), (39): Xaa is C or S
  MOD_RES (18), (19), (20), (21), (22): Xaa is A or G
  MOD_RES (23), (24), (25), (26): Xaa is A or G or is absent

SEQ ID NO: 14717 - protein, 30 aa, Artificial Sequence
  GFR-binding peptide
APTKLEPLTVLYYDDSSNVIEQLSNNMVVR

SEQ ID NO: 14718 - protein, 38 aa, Artificial Sequence
  GFR-binding peptide
  MOD_RES (1), (2), (36), (38): Xaa is C or S
  MOD_RES (16), (17), (18), (19), (20): Xaa is A or G
  MOD_RES (21), (22), (23), (24): Xaa is A or G or is absent
XXAPTQLEPLPVVYYXXXXXXXXXEQLSNNMVVRAXGX

SEQ ID NO: 14719 - protein, 39 aa, Artificial Sequence
  GFR-binding peptide
  MOD_RES (3), (4), (36), (38): Xaa is C or S
KPXXAPTQLEPLPVVYYDDSSNVIEQLSNNMVVRAXGXH

SEQ ID NO: 14720 - protein, 39 aa, Artificial Sequence
  GFR-binding peptide
  MOD_RES (6), (7): Xaa is C or S
  MOD_RES (21), (22), (23), (24), (25): Xaa is A or G
  MOD_RES (26), (27), (28), (29): Xaa is A or G or is absent
KIPKAXXVPTELSPISMLFIXXXXXXXXXYKQYEDMVVE

SEQ ID NO: 14721 - protein, 41 aa, Artificial Sequence
  GFR-binding peptide
  MOD_RES (6), (7), (40): Xaa is C or S
  MOD_RES (21), (22), (23), (24), (25): Xaa is A or G
  MOD_RES (26), (27), (28), (29): Xaa is A or G or is absent
ASAAPXXVPQALEPLPIVYYXXXXXXXXXEQLSNMIVRSXK

SEQ ID NO: 14722 - protein, 33 aa, Artificial Sequence; identical to SEQ ID NO: 7423
  GFR-binding peptide
  MOD_RES (1), (33): Xaa is C or S

SEQ ID NO: 14723 - protein, 43 aa, Artificial Sequence
  GFR-binding peptide
  MOD_RES (5), (6), (40), (42): Xaa is C or S
  MOD_RES (20), (21), (22), (23), (24): Xaa is A or G
  MOD_RES (25), (26), (27), (28): Xaa is A or G or is absent
IPKAXXVPTELEPLTMLYYXXXXXXXXXEQLSNDMVVEGXGXR

SEQ ID NO: 14724 - protein, 43 aa, Artificial Sequence; identical to SEQ ID NO: 7425
  GFR-binding peptide
  MOD_RES (6), (7), (41), (43): Xaa is C or S
  MOD_RES (21), (22), (23), (24), (25): Xaa is A or G
  MOD_RES (26), (27), (28), (29): Xaa is A or G or is absent

SEQ ID NO: 14725 - protein, 42 aa, Artificial Sequence
  GFR-binding peptide
  MOD_RES (6), (7), (39), (41): Xaa is C or S
SIPKAXXVPTELEPLPMVYYDEYDKVVEQLSNEMVVEGXGXR

SEQ ID NO: 14726 - protein, 38 aa, Artificial Sequence; identical to SEQ ID NO: 7427
  GFR-binding peptide
  MOD_RES (5), (6): Xaa is C or S
  MOD_RES (20), (21), (22), (23), (24): Xaa is A or G
  MOD_RES (25), (26), (27), (28): Xaa is A or G or is absent

SEQ ID NO: 14727 - protein, 34 aa, Artificial Sequence; identical to SEQ ID NO: 7428
  GFR-binding peptide
  MOD_RES (1), (2), (34): Xaa is C or S

SEQ ID NO: 14728 - protein, 37 aa, Artificial Sequence
  GFR-binding peptide
  MOD_RES (3), (4), (36): Xaa is C or S
KPXXAPTKLEPLTVLYYDDSSNVIEQLSNNMVVRSXG

SEQ ID NO: 14729 - protein, 34 aa, Artificial Sequence
  GFR-binding peptide
  MOD_RES (1), (2), (33): Xaa is C or S
XXVSQDLEPLPIVYYIGKTPKIEQLSNMIVKSXK

SEQ ID NO: 14730 - protein, 38 aa, Artificial Sequence
  GFR-binding peptide
  MOD_RES (5), (6), (37): Xaa is C or S
SASPXXVSQDLEPLPIVYYIGKTPKIEQLSNMIVKSXK

SEQ ID NO: 14731 - protein, 37 aa, Artificial Sequence
  GFR-binding peptide
  MOD_RES (5), (5): Xaa is C or S
  MOD_RES (19), (20), (21), (22), (23): Xaa is A or G
  MOD_RES (24), (25), (26), (27): Xaa is A or G or is absent
TKPTXAPTKLEPLTVLYYXXXXXXXXXEQLSNNMVVR

SEQ ID NO: 14732 - protein, 34 aa, Artificial Sequence
  GFR-binding peptide
  MOD_RES (2), (3): Xaa is C or S
PXXAPTKLEPLTVLYYDDSSNVIEQLSNNMVVRS

SEQ ID NO: 14733 - protein, 35 aa, Artificial Sequence; identical to SEQ ID NO: 7434
  GFR-binding peptide
  MOD_RES (1), (34): Xaa is C or S
  MOD_RES (15), (16), (17), (18), (19): Xaa is A or G
  MOD_RES (20), (21), (22), (23): Xaa is A or G or is absent

SEQ ID NO: 14734 - protein, 37 aa, Artificial Sequence
  GFR-binding peptide
  MOD_RES (4), (5), (37): Xaa is C or S
PKPXXAPTQLEPLTVLYYDDSSNVIEQLSNNMVVRAX

SEQ ID NO: 14735 - protein, 36 aa, Artificial Sequence; identical to SEQ ID NO: 7436
  GFR-binding peptide
  MOD_RES (1), (2), (33), (35): Xaa is C or S

SEQ ID NO: 14736 - protein, 36 aa, Artificial Sequence; identical to SEQ ID NO: 7437
  GFR-binding peptide
  MOD_RES (1), (2), (36): Xaa is C or S
  MOD_RES (16), (17), (18), (19), (20): Xaa is A or G
  MOD_RES (21), (22), (23), (24): Xaa is A or G or is absent

SEQ ID NO: 14737 - protein, 42 aa, Artificial Sequence
  GFR-binding peptide
  MOD_RES (7), (39), (41): Xaa is C or S
HVTKPTXAPTKLEPLTVLYYDDSSNVIEQLSNNMVVRSXGXH

SEQ ID NO: 14738 - protein, 32 aa, Artificial Sequence; identical to SEQ ID NO: 7440
  GFR-binding peptide
  MOD_RES (32), (32): Xaa is C or S

SEQ ID NO: 14739 - protein, 33 aa, Artificial Sequence
  GFR-binding peptide
  MOD_RES (1), (2): Xaa is C or S
XXAPTQLEPLPVVYYDDSSNVIEQLSNNMVVRA

SEQ ID NO: 14740 - protein, 38 aa, Artificial Sequence; identical to SEQ ID NO: 7441
  GFR-binding peptide
  MOD_RES (5), (6), (38): Xaa is C or S

SEQ ID NO: 14741 - protein, 37 aa, Artificial Sequence; identical to SEQ ID NO: 7442
  GFR-binding peptide
  MOD_RES (6), (7): Xaa is C or S

SEQ ID NO: 14742 - protein, 40 aa, Artificial Sequence
  GFR-binding peptide
  MOD_RES (5), (6), (38), (40): Xaa is C or S
IPKAXXVPTELEPLPMVYYDENEKVVEQLSNDMVVEGXGX

SEQ ID NO: 14743 - protein, 38 aa, Artificial Sequence; identical to SEQ ID NO: 7445
  GFR-binding peptide
  MOD_RES (2), (3), (37): Xaa is C or S
  MOD_RES (17), (18), (19), (20), (21): Xaa is A or G
  MOD_RES (22), (23), (24), (25): Xaa is A or G or is absent

SEQ ID NO: 14744 - protein, 37 aa, Artificial Sequence; identical to SEQ ID NO: 7446
  GFR-binding peptide
  MOD_RES (3), (4), (37): Xaa is C or S
  MOD_RES (18), (19), (20), (21), (22): Xaa is A or G
  MOD_RES (23), (24), (25), (26): Xaa is A or G or is absent

SEQ ID NO: 14745 - protein, 31 aa, Artificial Sequence
  GFR-binding peptide
  MOD_RES (1), (1): Xaa is C or S
XAPTQLEPLTVLYYDDSSNVIEQLSNNMVVR

SEQ ID NO: 14746 - protein, 35 aa, Artificial Sequence
  GFR-binding peptide
  MOD_RES (2), (3): Xaa is C or S
  MOD_RES (17), (18), (19), (20), (21): Xaa is A or G
  MOD_RES (22), (23), (24), (25): Xaa is A or G or is absent
AXXVPTELSPISMLFIXXXXXXXXXYKQYEEMVVE

SEQ ID NO: 14747 - protein, 42 aa, Artificial Sequence
  GFR-binding peptide
  MOD_RES (6), (40), (42): Xaa is C or S
  MOD_RES (20), (21), (22), (23), (24): Xaa is A or G
  MOD_RES (25), (26), (27), (28): Xaa is A or G or is absent
VTKPTXAPTKLEPLTVLYYXXXXXXXXXEQLSNNMVVRSXGX

SEQ ID NO: 14748 - protein, 36 aa, Artificial Sequence
  GFR-binding peptide
  MOD_RES (3), (4): Xaa is C or S
  MOD_RES (18), (19), (20), (21), (22): Xaa is A or G
  MOD_RES (23), (24), (25), (26): Xaa is A or G or is absent
SPXXVPQDLEPLTILYYXXXXXXXXXEQLSNMVVKS

SEQ ID NO: 14749 - protein, 36 aa, Artificial Sequence
  GFR-binding peptide
  MOD_RES (3), (4): Xaa is C or S
  MOD_RES (18), (19), (20), (21), (22): Xaa is A or G
  MOD_RES (23), (24), (25), (26): Xaa is A or G or is absent
PTXXVPTRLEPLTILYYXXXXXXXXXEQLSNDMVVE

SEQ ID NO: 14750 - protein, 37 aa, Artificial Sequence
  GFR-binding peptide
  MOD_RES (1), (2), (34), (36): Xaa is C or S
XXVPTELSPISMLFIDEYDKVVYKQYEEMVVEGXGXR

SEQ ID NO: 14751 - protein, 33 aa, Artificial Sequence
  GFR-binding peptide
  MOD_RES (1), (1): Xaa is C or S
  MOD_RES (15), (16), (17), (18), (19): Xaa is A or G
  MOD_RES (20), (21), (22), (23): Xaa is A or G or is absent
XAPTKLEPLPVVYYXXXXXXXXXEQLSNNMVVR

SEQ ID NO: 14752 - protein, 40 aa, Artificial Sequence
  GFR-binding peptide
  MOD_RES (5), (6), (39): Xaa is C or S
  MOD_RES (20), (21), (22), (23), (24): Xaa is A or G
  MOD_RES (25), (26), (27), (28): Xaa is A or G or is absent
SASPXXVPQDLSPISILFIXXXXXXXXXYKQYEMVVKSXK

SEQ ID NO: 14753 - protein, 37 aa, Artificial Sequence
  GFR-binding peptide
  MOD_RES (4), (5): Xaa is C or S
  MOD_RES (19), (20), (21), (22), (23): Xaa is A or G
  MOD_RES (24), (25), (26), (27): Xaa is A or G or is absent
PKAXXVPTELEPLPMVYYXXXXXXXXXEQLSNEMVVE

SEQ ID NO: 14754 - protein, 33 aa, Artificial Sequence
  GFR-binding peptide
  MOD_RES (1), (1): Xaa is C or S
  MOD_RES (15), (16), (17), (18), (19): Xaa is A or G
  MOD_RES (20), (21), (22), (23): Xaa is A or G or is absent
XAPTKLEPLTVLYYXXXXXXXXXEQLSNNMVVR

SEQ ID NO: 14755 - protein, 40 aa, Artificial Sequence
  GFR-binding peptide
  MOD_RES (5), (6), (37), (39): Xaa is C or S
SASPXXVPQDLEPLPIVYYVGRTPKVEQLSNMVVKSXKXS

SEQ ID NO: 14756 - protein, 36 aa, Artificial Sequence; identical to SEQ ID NO: 7455
  GFR-binding peptide
  MOD_RES (1), (2), (34), (36): Xaa is C or S

SEQ ID NO: 14757 - protein, 36 aa, Artificial Sequence
  GFR-binding peptide
  MOD_RES (33), (35): Xaa is C or S
  MOD_RES (14), (15), (16), (17), (18): Xaa is A or G
  MOD_RES (19), (20), (21), (22): Xaa is A or G or is absent
VSQDLEPLPIVYYXXXXXXXXXEQLSNMIVKSXKXS

SEQ ID NO: 14758 - protein, 37 aa, Artificial Sequence; identical to SEQ ID NO: 7457
  GFR-binding peptide
  MOD_RES (1), (34), (36): Xaa is C or S
  MOD_RES (15), (16), (17), (18), (19): Xaa is A or G
  MOD_RES (20), (21), (22), (23): Xaa is A or G or is absent

SEQ ID NO: 14759 - protein, 41 aa, Artificial Sequence; identical to SEQ ID NO: 7462
  GFR-binding peptide
  MOD_RES (6), (7), (39), (41): Xaa is C or S

SEQ ID NO: 14760 - protein, 34 aa, Artificial Sequence; identical to SEQ ID NO: 7463
  GFR-binding peptide
  MOD_RES (1), (2): Xaa is C or S
  MOD_RES (16), (17), (18), (19), (20): Xaa is A or G
  MOD_RES (21), (22), (23), (24): Xaa is A or G or is absent

SEQ ID NO: 14761 - protein, 38 aa, Artificial Sequence
  GFR-binding peptide
  MOD_RES (3), (4), (38): Xaa is C or S
  MOD_RES (18), (19), (20), (21), (22): Xaa is A or G
  MOD_RES (23), (24), (25), (26): Xaa is A or G or is absent
PTXXVPTRLSPISILFIXXXXXXXXXYKQYEDMVVESX

SEQ ID NO: 14762 - protein, 42 aa, Artificial Sequence
  GFR-binding peptide
  MOD_RES (5), (6), (40), (42): Xaa is C or S
  MOD_RES (20), (21), (22), (23), (24): Xaa is A or G
  MOD_RES (25), (26), (27), (28): Xaa is A or G or is absent
IPKAXXVPTELEPLTMLYYXXXXXXXXXEQLSNEMVVEGXGX

SEQ ID NO: 14763 - protein, 32 aa, Artificial Sequence
  GFR-binding peptide
  MOD_RES (32), (32): Xaa is C or S
VPTELEPLTMLYYDEYDKVVEQLSNEMVVEGX

SEQ ID NO: 14764 - protein, 32 aa, Artificial Sequence
  GFR-binding peptide
  MOD_RES (14), (15), (16), (17), (18): Xaa is A or G
  MOD_RES (19), (20), (21), (22): Xaa is A or G or is absent
APTKLEPLPVVYYXXXXXXXXXEQLSNNMVVR

SEQ ID NO: 14765 - protein, 36 aa, Artificial Sequence
  GFR-binding peptide
  MOD_RES (1), (34), (36): Xaa is C or S
  MOD_RES (15), (16), (17), (18), (19): Xaa is A or G
  MOD_RES (20), (21), (22), (23): Xaa is A or G or is absent
XVPQDLSPISILFIXXXXXXXXXYKQYEMVVKSXKX

SEQ ID NO: 14766 - protein, 40 aa, Artificial Sequence; identical to SEQ ID NO: 7468
  GFR-binding peptide
  MOD_RES (5), (6), (40): Xaa is C or S
  MOD_RES (20), (21), (22), (23), (24): Xaa is A or G
  MOD_RES (25), (26), (27), (28): Xaa is A or G or is absent

SEQ ID NO: 14767 - protein, 36 aa, Artificial Sequence
  GFR-binding peptide
  MOD_RES (5), (6): Xaa is C or S
TPPTXXVPTRLEPLTILYYDSANNVVEQLSNDMVVE

SEQ ID NO: 14768 - protein, 32 aa, Artificial Sequence
  GFR-binding peptide
  MOD_RES (1), (2): Xaa is C or S
XXVPTELEPLPMVYYDENEKVVEQLSNDMVVE

SEQ ID NO: 14769 - protein, 38 aa, Artificial Sequence
  GFR-binding peptide
  MOD_RES (4), (5), (36), (38): Xaa is C or S
ASPXXVPQDLSPISILFIVGRTPKVYKQYEMVVKSXKX

SEQ ID NO: 14770 - protein, 34 aa, Artificial Sequence; identical to SEQ ID NO: 7475
  GFR-binding peptide
  MOD_RES (2), (3), (34): Xaa is C or S

SEQ ID NO: 14771 - protein, 35 aa, Artificial Sequence; identical to SEQ ID NO: 7478
  GFR-binding peptide
  MOD_RES (2), (3): Xaa is C or S
  MOD_RES (17), (18), (19), (20), (21): Xaa is A or G
  MOD_RES (22), (23), (24), (25): Xaa is A or G or is absent

SEQ ID NO: 14772 - protein, 40 aa, Artificial Sequence
  GFR-binding peptide
  MOD_RES (4), (5), (39): Xaa is C or S
  MOD_RES (19), (20), (21), (22), (23): Xaa is A or G
  MOD_RES (24), (25), (26), (27): Xaa is A or G or is absent
PKPXXAPTKLEPLPVVYYXXXXXXXXXEQLSNNMVVRSXG

SEQ ID NO: 14773 - protein, 33 aa, Artificial Sequence
  GFR-binding peptide
  MOD_RES (31), (33): Xaa is C or S
VPQDLSPISILFIVGRTPKVYKQYEMVVKSXKX

SEQ ID NO: 14774 - protein, 36 aa, Artificial Sequence
  GFR-binding peptide
  MOD_RES (34), (36): Xaa is C or S
  MOD_RES (14), (15), (16), (17), (18): Xaa is A or G
  MOD_RES (19), (20), (21), (22): Xaa is A or G or is absent
VPTELSPISMLFIXXXXXXXXXYKQYEDMVVEGXGX

SEQ ID NO: 14775 - protein, 38 aa, Artificial Sequence
  GFR-binding peptide
  MOD_RES (5), (6): Xaa is C or S
  MOD_RES (20), (21), (22), (23), (24): Xaa is A or G
  MOD_RES (25), (26), (27), (28): Xaa is A or G or is absent
VPKPXXAPTKLEPLTVLYYXXXXXXXXXEQLSNNMVVR

SEQ ID NO: 14776 - protein, 38 aa, Artificial Sequence; identical to SEQ ID NO: 7480
  GFR-binding peptide
  MOD_RES (1), (2), (36), (38): Xaa is C or S
  MOD_RES (16), (17), (18), (19), (20): Xaa is A or G
  MOD_RES (21), (22), (23), (24): Xaa is A or G or is absent

SEQ ID NO: 14777 - protein, 40 aa, Artificial Sequence
  GFR-binding peptide
  MOD_RES (5), (6), (40): Xaa is C or S
  MOD_RES (20), (21), (22), (23), (24): Xaa is A or G
  MOD_RES (25), (26), (27), (28): Xaa is A or G or is absent
VPKPXXAPTKLEPLTVLYYXXXXXXXXXEQLSNNMVVRSX

SEQ ID NO: 14778 - protein, 34 aa, Artificial Sequence
  GFR-binding peptide
  MOD_RES (2), (3): Xaa is C or S
AXXVPTELSPISMLFIDENEKVVYKQYEDMVVEG

SEQ ID NO: 14779 - protein, 32 aa, Artificial Sequence
  GFR-binding peptide
  MOD_RES (1), (32): Xaa is C or S
XVPQALSPISILFIVGRKPKVYKQYEMIVRSX

SEQ ID NO: 14780 - protein, 42 aa, Artificial Sequence
  GFR-binding peptide
  MOD_RES (5), (6), (40), (42): Xaa is C or S
  MOD_RES (20), (21), (22), (23), (24): Xaa is A or G
  MOD_RES (25), (26), (27), (28): Xaa is A or G or is absent
IPKAXXVPTELEPLTMLYYXXXXXXXXXEQLSNDMVVEGXGX

SEQ ID NO: 14781 - protein, 38 aa, Artificial Sequence; identical to SEQ ID NO: 7481
  GFR-binding peptide
  MOD_RES (3), (4), (37): Xaa is C or S
  MOD_RES (18), (19), (20), (21), (22): Xaa is A or G
  MOD_RES (23), (24), (25), (26): Xaa is A or G or is absent

SEQ ID NO: 14782 - protein, 41 aa, Artificial Sequence; identical to SEQ ID NO: 7482
  GFR-binding peptide
  MOD_RES (6), (7), (38), (40): Xaa is C or S

SEQ ID NO: 14783 - protein, 37 aa, Artificial Sequence
  GFR-binding peptide
  MOD_RES (3), (4), (36): Xaa is C or S
KPXXAPTQLEPLTVLYYDDSSNVIEQLSNNMVVRAXG

SEQ ID NO: 14784 - protein, 40 aa, Artificial Sequence; identical to SEQ ID NO: 7484
  GFR-binding peptide
  MOD_RES (6), (7), (38), (40): Xaa is C or S

SEQ ID NO: 14785 - protein, 34 aa, Artificial Sequence; identical to SEQ ID NO: 7485
  GFR-binding peptide
  MOD_RES (1), (33): Xaa is C or S

SEQ ID NO: 14786 - protein, 41 aa, Artificial Sequence
  GFR-binding peptide
  MOD_RES (4), (5), (38), (40): Xaa is C or S
  MOD_RES (19), (20), (21), (22), (23): Xaa is A or G
  MOD_RES (24), (25), (26), (27): Xaa is A or G or is absent
AAPXXVPQALSPISILFIXXXXXXXXXYKQYEMIVRSXKXS

SEQ ID NO: 14787 - protein, 39 aa, Artificial Sequence
  GFR-binding peptide
  MOD_RES (5), (39): Xaa is C or S
  MOD_RES (19), (20), (21), (22), (23): Xaa is A or G
  MOD_RES (24), (25), (26), (27): Xaa is A or G or is absent
TKPTXAPTKLEPLTVLYYXXXXXXXXXEQLSNNMVVRSX

SEQ ID NO: 14788 - protein, 38 aa, Artificial Sequence
  GFR-binding peptide
  MOD_RES (1), (35), (37): Xaa is C or S
  MOD_RES (15), (16), (17), (18), (19): Xaa is A or G
  MOD_RES (20), (21), (22), (23): Xaa is A or G or is absent
XAPTQLEPLPVVYYXXXXXXXXXEQLSNNMVVRAXGXH

SEQ ID NO: 14789 - protein, 41 aa, Artificial Sequence; identical to SEQ ID NO: 7488
  GFR-binding peptide
  MOD_RES (6), (7), (40): Xaa is C or S
  MOD_RES (21), (22), (23), (24), (25): Xaa is A or G
  MOD_RES (26), (27), (28), (29): Xaa is A or G or is absent

SEQ ID NO: 14790 - protein, 38 aa, Artificial Sequence
  GFR-binding peptide
  MOD_RES (5), (6): Xaa is C or S
  MOD_RES (20), (21), (22), (23), (24): Xaa is A or G
  MOD_RES (25), (26), (27), (28): Xaa is A or G or is absent
SASPXXVPQDLEPLPIVYYXXXXXXXXXEQLSNMVVKS

SEQ ID NO: 14791 - protein, 37 aa, Artificial Sequence; identical to SEQ ID NO: 7489
  GFR-binding peptide
  MOD_RES (6), (7): Xaa is C or S

SEQ ID NO: 14792 - protein, 40 aa, Artificial Sequence
  GFR-binding peptide
  MOD_RES (6), (7): Xaa is C or S
  MOD_RES (21), (22), (23), (24), (25): Xaa is A or G
  MOD_RES (26), (27), (28), (29): Xaa is A or G or is absent
SIPKAXXVPTELEPLTMLYYXXXXXXXXXEQLSNEMVVEG

SEQ ID NO: 14793 - protein, 41 aa, Artificial Sequence
  GFR-binding peptide
  MOD_RES (3), (4), (38), (40): Xaa is C or S
  MOD_RES (18), (19), (20), (21), (22): Xaa is A or G
  MOD_RES (23), (24), (25), (26): Xaa is A or G or is absent
KPXXAPTKLEPLTVLYYXXXXXXXXXEQLSNNMVVRSXGXH

SEQ ID NO: 14794 - protein, 32 aa, Artificial Sequence
  GFR-binding peptide
  MOD_RES (2), (2): Xaa is C or S
TXAPTKLSPISVLFIDDSSNVIYKQYENMVVR

SEQ ID NO: 14795 - protein, 42 aa, Artificial Sequence; identical to SEQ ID NO: 7492
  GFR-binding peptide
  MOD_RES (6), (7), (41): Xaa is C or S
  MOD_RES (21), (22), (23), (24), (25): Xaa is A or G
  MOD_RES (26), (27), (28), (29): Xaa is A or G or is absent

SEQ ID NO: 14796 - protein, 36 aa, Artificial Sequence; identical to SEQ ID NO: 7494
  GFR-binding peptide
  MOD_RES (1), (2), (33), (35): Xaa is C or S

SEQ ID NO: 14797 - protein, 37 aa, Artificial Sequence
  GFR-binding peptide
  MOD_RES (1), (34), (36): Xaa is C or S
  MOD_RES (15), (16), (17), (18), (19): Xaa is A or G
  MOD_RES (20), (21), (22), (23): Xaa is A or G or is absent
XVSQDLSPISILFIXXXXXXXXXYKQYEMIVKSXKXS

SEQ ID NO: 14798 - protein, 36 aa, Artificial Sequence; identical to SEQ ID NO: 7496
  GFR-binding peptide
  MOD_RES (5), (6): Xaa is C or S

SEQ ID NO: 14799 - protein, 37 aa, Artificial Sequence
  GFR-binding peptide
  MOD_RES (3), (35), (37): Xaa is C or S
PTXAPTKLSPISVLFIDDSSNVIYKQYENMVVRSXGX

SEQ ID NO: 14800 - protein, 37 aa, Artificial Sequence
  GFR-binding peptide
  MOD_RES (4), (5): Xaa is C or S
  MOD_RES (19), (20), (21), (22), (23): Xaa is A or G
  MOD_RES (24), (25), (26), (27): Xaa is A or G or is absent
AAPXXVPQALSPISILFIXXXXXXXXXYKQYEMIVRS

SEQ ID NO: 14801 - protein, 37 aa, Artificial Sequence
  GFR-binding peptide
  MOD_RES (5), (5): Xaa is C or S
  MOD_RES (19), (20), (21), (22), (23): Xaa is A or G
  MOD_RES (24), (25), (26), (27): Xaa is A or G or is absent
TKPTXAPTKLEPLPVVYYXXXXXXXXXEQLSNNMVVR

SEQ ID NO: 14802 - protein, 40 aa, Artificial Sequence
  GFR-binding peptide
  MOD_RES (2), (3), (37), (39): Xaa is C or S
  MOD_RES (17), (18), (19), (20), (21): Xaa is A or G
  MOD_RES (22), (23), (24), (25): Xaa is A or G or is absent
TXXVPTRLNAISILYFXXXXXXXXXLKKYRDMVVESXGXR

SEQ ID NO: 14803 - protein, 33 aa, Artificial Sequence; identical to SEQ ID NO: 7497
  GFR-binding peptide
  MOD_RES (1), (2): Xaa is C or S

SEQ ID NO: 14804 - protein, 36 aa, Artificial Sequence; identical to SEQ ID NO: 7498
  GFR-binding peptide
  MOD_RES (3), (4): Xaa is C or S
  MOD_RES (18), (19), (20), (21), (22): Xaa is A or G
  MOD_RES (23), (24), (25), (26): Xaa is A or G or is absent

SEQ ID NO: 14805 - protein, 37 aa, Artificial Sequence
  GFR-binding peptide
  MOD_RES (4), (5), (36): Xaa is C or S
ASPXXVPQDLSPISILFIVGRTPKVYKQYEMVVKSXK

SEQ ID NO: 14806 - protein, 36 aa, Artificial Sequence
  GFR-binding peptide
  MOD_RES (3), (4): Xaa is C or S
  MOD_RES (18), (19), (20), (21), (22): Xaa is A or G
  MOD_RES (23), (24), (25), (26): Xaa is A or G or is absent
PTXXVPTRLEPLPIVYYXXXXXXXXXEQLSNDMVVE

SEQ ID NO: 14807 - protein, 40 aa, Artificial Sequence
  GFR-binding peptide
  MOD_RES (6), (7): Xaa is C or S
  MOD_RES (21), (22), (23), (24), (25): Xaa is A or G
  MOD_RES (26), (27), (28), (29): Xaa is A or G or is absent
YVPKPXXAPTKLEPLPVVYYXXXXXXXXXEQLSNNMVVRS

SEQ ID NO: 14808 - protein, 37 aa, Artificial Sequence
  GFR-binding peptide
  MOD_RES (1), (2), (36): Xaa is C or S
  MOD_RES (16), (17), (18), (19), (20): Xaa is A or G
  MOD_RES (21), (22), (23), (24): Xaa is A or G or is absent
XXVPTRLNAISILYFXXXXXXXXXLKKYRDMVVESXG

SEQ ID NO: 14809 - protein, 37 aa, Artificial Sequence; identical to SEQ ID NO: 7501
  GFR-binding peptide
  MOD_RES (1), (2), (34), (36): Xaa is C or S

SEQ ID NO: 14810 - protein, 38 aa, Artificial Sequence; identical to SEQ ID NO: 7502
  GFR-binding peptide
  MOD_RES (2), (3), (36), (38): Xaa is C or S
  MOD_RES (17), (18), (19), (20), (21): Xaa is A or G
  MOD_RES (22), (23), (24), (25): Xaa is A or G or is absent

SEQ ID NO: 14811 - protein, 41 aa, Artificial Sequence
  GFR-binding peptide
  MOD_RES (6), (7), (41): Xaa is C or S
  MOD_RES (21), (22), (23), (24), (25): Xaa is A or G
  MOD_RES (26), (27), (28), (29): Xaa is A or G or is absent
SIPKAXXVPTELSPISMLFIXXXXXXXXXYKQYEEMVVEGX

SEQ ID NO: 14812 - protein, 36 aa, Artificial Sequence; identical to SEQ ID NO: 7507
  GFR-binding peptide
  MOD_RES (5), (6): Xaa is C or S

SEQ ID NO: 14813 - protein, 39 aa, Artificial Sequence
  GFR-binding peptide
  MOD_RES (3), (4), (38): Xaa is C or S
  MOD_RES (18), (19), (20), (21), (22): Xaa is A or G
  MOD_RES (23), (24), (25), (26): Xaa is A or G or is absent
KAXXVPTELSPISMLFIXXXXXXXXXYKQYEDMVVEGXG

SEQ ID NO: 14814 - protein, 39 aa, Artificial Sequence
  GFR-binding peptide
  MOD_RES (4), (5), (36), (38): Xaa is C or S
AAPXXVPQALEPLTILYYVGRKPKVEQLSNMIVRSXKXS

SEQ ID NO: 14815 - protein, 40 aa, Artificial Sequence
  GFR-binding peptide
  MOD_RES (5), (6), (38), (40): Xaa is C or S
VPKPXXAPTQLEPLPVVYYDDSSNVIEQLSNNMVVRAXGX

SEQ ID NO: 14816 - protein, 43 aa, Artificial Sequence
  GFR-binding peptide
  MOD_RES (6), (7), (41), (43): Xaa is C or S
  MOD_RES (21), (22), (23), (24), (25): Xaa is A or G
  MOD_RES (26), (27), (28), (29): Xaa is A or G or is absent
KIPKAXXVPTELEPLPMVYYXXXXXXXXXEQLSNDMVVEGXGX

SEQ ID NO: 14817 - protein, 33 aa, Artificial Sequence
  GFR-binding peptide
  MOD_RES (14), (15), (16), (17), (18): Xaa is A or G
  MOD_RES (19), (20), (21), (22): Xaa is A or G or is absent
APTQLEPLPVVYYXXXXXXXXXEQLSNNMVVRA

SEQ ID NO: 14818 - protein, 32 aa, Artificial Sequence
  GFR-binding peptide
  MOD_RES (1), (2): Xaa is C or S
XXAPTQLEPLTVLYYDDSSNVIEQLSNNMVVR

SEQ ID NO: 14819 - protein, 42 aa, Artificial Sequence
  GFR-binding peptide
  MOD_RES (4), (5), (39), (41): Xaa is C or S
  MOD_RES (19), (20), (21), (22), (23): Xaa is A or G
  MOD_RES (24), (25), (26), (27): Xaa is A or G or is absent
PKPXXAPTQLEPLTVLYYXXXXXXXXXEQLSNNMVVRAXGXH

SEQ ID NO: 14820 - protein, 34 aa, Artificial Sequence
  GFR-binding peptide
  MOD_RES (2), (3): Xaa is C or S
PXXAPTKLEPLPVVYYDDSSNVIEQLSNNMVVRS

SEQ ID NO: 14821 - protein, 40 aa, Artificial Sequence
  GFR-binding peptide
  MOD_RES (7), (39): Xaa is C or S
HVTKPTXAPTKLSPISVLFIDDSSNVIYKQYENMVVRSXG

SEQ ID NO: 14822 - protein, 38 aa, Artificial Sequence
  GFR-binding peptide
  MOD_RES (6), (7), (38): Xaa is C or S
ASASPXXVSQDLSPISILFIIGKTPKIYKQYEMIVKSX

SEQ ID NO: 14823 - protein, 41 aa, Artificial Sequence
  GFR-binding peptide
  MOD_RES (6), (7), (39), (41): Xaa is C or S
YVPKPXXAPTKLEPLPVVYYDDSSNVIEQLSNNMVVRSXGX

SEQ ID NO: 14824 - protein, 35 aa, Artificial Sequence
  GFR-binding peptide
  MOD_RES (1), (33), (35): Xaa is C or S
XVPTELSPISMLFIDEYDKVVYKQYEEMVVEGXGX

SEQ ID NO: 14825 - protein, 38 aa, Artificial Sequence; identical to SEQ ID NO: 7514
  GFR-binding peptide
  MOD_RES (3), (4), (37): Xaa is C or S
  MOD_RES (18), (19), (20), (21), (22): Xaa is A or G
  MOD_RES (23), (24), (25), (26): Xaa is A or G or is absent

SEQ ID NO: 14826 - protein, 34 aa, Artificial Sequence
  GFR-binding peptide
  MOD_RES (31), (33): Xaa is C or S
VPQDLEPLPIVYYVGRTPKVEQLSNMVVKSXKXS

SEQ ID NO: 14827 - protein, 40 aa, Artificial Sequence
  GFR-binding peptide
  MOD_RES (4), (5), (38), (40): Xaa is C or S
  MOD_RES (19), (20), (21), (22), (23): Xaa is A or G
  MOD_RES (24), (25), (26), (27): Xaa is A or G or is absent
ASPXXVSQDLSPISILFIXXXXXXXXXYKQYEMIVKSXKX

SEQ ID NO: 14828 - protein, 38 aa, Artificial Sequence
  GFR-binding peptide
  MOD_RES (2), (36), (38): Xaa is C or S
  MOD_RES (16), (17), (18), (19), (20): Xaa is A or G
  MOD_RES (21), (22), (23), (24): Xaa is A or G or is absent
TXAPTKLEPLTVLYYXXXXXXXXXEQLSNNMVVRSXGX

SEQ ID NO: 14829 - protein, 40 aa, Artificial Sequence
  GFR-binding peptide
  MOD_RES (3), (4), (38), (40): Xaa is C or S
  MOD_RES (18), (19), (20), (21), (22): Xaa is A or G
  MOD_RES (23), (24), (25), (26): Xaa is A or G or is absent
KAXXVPTELEPLPMVYYXXXXXXXXXEQLSNEMVVEGXGX

SEQ ID NO: 14830 - protein, 39 aa, Artificial Sequence
  GFR-binding peptide
  MOD_RES (5), (6): Xaa is C or S
  MOD_RES (20), (21), (22), (23), (24): Xaa is A or G
  MOD_RES (25), (26), (27), (28): Xaa is A or G or is absent
TPPTXXVPTRLSPISILFIXXXXXXXXXYKQYEDMVVES

SEQ ID NO: 14831 - protein, 36 aa, Artificial Sequence
  GFR-binding peptide
  MOD_RES (1), (2), (34), (36): Xaa is C or S
XXAPTKLEPLPVVYYDDSSNVIEQLSNNMVVRSXGX

SEQ ID NO: 14832 - protein, 36 aa, Artificial Sequence
  GFR-binding peptide
  MOD_RES (3), (35): Xaa is C or S
PTXAPTKLSPISVLFIDDSSNVIYKQYENMVVRSXG

SEQ ID NO: 14833 - protein, 39 aa, Artificial Sequence
  GFR-binding peptide
  MOD_RES (6), (7), (39): Xaa is C or S
SIPKAXXVPTELEPLPMVYYDEYDKVVEQLSNEMVVEGX

SEQ ID NO: 14834 - protein, 38 aa, Artificial Sequence; identical to SEQ ID NO: 7521
  GFR-binding peptide
  MOD_RES (3), (4), (38): Xaa is C or S
  MOD_RES (18), (19), (20), (21), (22): Xaa is A or G
  MOD_RES (23), (24), (25), (26): Xaa is A or G or is absent

SEQ ID NO: 14835 - protein, 35 aa, Artificial Sequence
  GFR-binding peptide
  MOD_RES (34), (34): Xaa is C or S
  MOD_RES (14), (15), (16), (17), (18): Xaa is A or G
  MOD_RES (19), (20), (21), (22): Xaa is A or G or is absent
VPTELEPLTMLYYXXXXXXXXXEQLSNDMVVEGXG

SEQ ID NO: 14836 - protein, 39 aa, Artificial Sequence; identical to SEQ ID NO: 7522
  GFR-binding peptide
  MOD_RES (6), (7): Xaa is C or S
  MOD_RES (21), (22), (23), (24), (25): Xaa is A or G
  MOD_RES (26), (27), (28), (29): Xaa is A or G or is absent

SEQ ID NO: 14837 - protein, 39 aa, Artificial Sequence
  GFR-binding peptide
  MOD_RES (4), (5), (37), (39): Xaa is C or S
PKAXXVPTELEPLPMVYYDEYDKVVEQLSNEMVVEGXGX

SEQ ID NO: 14838 - protein, 39 aa, Artificial Sequence; identical to SEQ ID NO: 7527
  GFR-binding peptide
  MOD_RES (5), (6): Xaa is C or S
  MOD_RES (20), (21), (22), (23), (24): Xaa is A or G
  MOD_RES (25), (26), (27), (28): Xaa is A or G or is absent

SEQ ID NO: 14839 - protein, 37 aa, Artificial Sequence
  GFR-binding peptide
  MOD_RES (34), (36): Xaa is C or S
  MOD_RES (14), (15), (16), (17), (18): Xaa is A or G
  MOD_RES (19), (20), (21), (22): Xaa is A or G or is absent
APTQLSPISVLFIXXXXXXXXXYKQYENMVVRAXGXH

SEQ ID NO: 14840 - protein, 38 aa, Artificial Sequence
  GFR-binding peptide
  MOD_RES (4), (5): Xaa is C or S
  MOD_RES (19), (20), (21), (22), (23): Xaa is A or G
  MOD_RES (24), (25), (26), (27): Xaa is A or G or is absent
PPTXXVPTRLEPLTILYYXXXXXXXXXEQLSNDMVVES

SEQ ID NO: 14841 - protein, 42 aa, Artificial Sequence
  GFR-binding peptide
  MOD_RES (5), (6), (40), (42): Xaa is C or S
  MOD_RES (20), (21), (22), (23), (24): Xaa is A or G
  MOD_RES (25), (26), (27), (28): Xaa is A or G or is absent
VPKPXXAPTQLEPLPVVYYXXXXXXXXXEQLSNNMVVRAXGX

SEQ ID NO: 14842 - protein, 33 aa, Artificial Sequence
  GFR-binding peptide
  MOD_RES (31), (33): Xaa is C or S
VSQDLSPISILFIIGKTPKIYKQYEMIVKSXKX

SEQ ID NO: 14843 - protein, 35 aa, Artificial Sequence
  GFR-binding peptide
  MOD_RES (1), (33), (35): Xaa is C or S
XVPTELEPLTMLYYDEYDKVVEQLSNEMVVEGXGX

SEQ ID NO: 14844 - protein, 37 aa, Artificial Sequence
  GFR-binding peptide
  MOD_RES (3), (35), (37): Xaa is C or S
PTXAPTKLEPLTVLYYDDSSNVIEQLSNNMVVRSXGX

SEQ ID NO: 14845 - protein, 42 aa, Artificial Sequence
  GFR-binding peptide
  MOD_RES (5), (6), (39), (41): Xaa is C or S
  MOD_RES (20), (21), (22), (23), (24): Xaa is A or G
  MOD_RES (25), (26), (27), (28): Xaa is A or G or is absent
SAAPXXVPQALEPLPIVYYXXXXXXXXXEQLSNMIVRSXKXS

SEQ ID NO: 14846 - protein, 34 aa, Artificial Sequence
  GFR-binding peptide
  MOD_RES (34), (34): Xaa is C or S
  MOD_RES (14), (15), (16), (17), (18): Xaa is A or G
  MOD_RES (19), (20), (21), (22): Xaa is A or G or is absent
VPTELEPLTMLYYXXXXXXXXXEQLSNDMVVEGX

SEQ ID NO: 14847 - protein, 43 aa, Artificial Sequence
  GFR-binding peptide
  MOD_RES (5), (6), (40), (42): Xaa is C or S
  MOD_RES (20), (21), (22), (23), (24): Xaa is A or G
  MOD_RES (25), (26), (27), (28): Xaa is A or G or is absent
VPKPXXAPTKLEPLTVLYYXXXXXXXXXEQLSNNMVVRSXGXH

SEQ ID NO: 14848 - protein, 36 aa, Artificial Sequence; identical to SEQ ID NO: 7535
  GFR-binding peptide
  MOD_RES (34), (36): Xaa is C or S
  MOD_RES (14), (15), (16), (17), (18): Xaa is A or G
  MOD_RES (19), (20), (21), (22): Xaa is A or G or is absent

SEQ ID NO: 14849 - protein, 37 aa, Artificial Sequence
  GFR-binding peptide
  MOD_RES (2), (3), (36): Xaa is C or S
  MOD_RES (17), (18), (19), (20), (21): Xaa is A or G
  MOD_RES (22), (23), (24), (25): Xaa is A or G or is absent
PXXVPQALEPLPIVYYXXXXXXXXXEQLSNMIVRSXK

SEQ ID NO: 14850 - protein, 42 aa, Artificial Sequence
  GFR-binding peptide
  MOD_RES (5), (6), (40), (42): Xaa is C or S
  MOD_RES (20), (21), (22), (23), (24): Xaa is A or G
  MOD_RES (25), (26), (27), (28): Xaa is A or G or is absent
VPKPXXAPTKLSPISVLFIXXXXXXXXXYKQYENMVVRSXGX

SEQ ID NO: 14851 - protein, 37 aa, Artificial Sequence; identical to SEQ ID NO: 7537
  GFR-binding peptide
  MOD_RES (1), (34), (36): Xaa is C or S
  MOD_RES (15), (16), (17), (18), (19): Xaa is A or G
  MOD_RES (20), (21), (22), (23): Xaa is A or G or is absent

SEQ ID NO: 14852 - protein, 39 aa, Artificial Sequence; identical to SEQ ID NO: 7538
  GFR-binding peptide
  MOD_RES (5), (6), (37), (39): Xaa is C or S

SEQ ID NO: 14853 - protein, 40 aa, Artificial Sequence
  GFR-binding peptide
  MOD_RES (3), (4), (38), (40): Xaa is C or S
  MOD_RES (18), (19), (20), (21), (22): Xaa is A or G
  MOD_RES (23), (24), (25), (26): Xaa is A or G or is absent
KAXXVPTELEPLPMVYYXXXXXXXXXEQLSNDMVVEGXGX

SEQ ID NO: 14854 - protein, 36 aa, Artificial Sequence
  GFR-binding peptide
  MOD_RES (1), (33), (35): Xaa is C or S
XVPTELSPISMLFIDEYDKVVYKQYEEMVVEGXGXR

SEQ ID NO: 14855 - protein, 37 aa, Artificial Sequence; identical to SEQ ID NO: 7540
  GFR-binding peptide
  MOD_RES (2), (3), (37): Xaa is C or S
  MOD_RES (17), (18), (19), (20), (21): Xaa is A or G
  MOD_RES (22), (23), (24), (25): Xaa is A or G or is absent

SEQ ID NO: 14856 - protein, 40 aa, Artificial Sequence
  GFR-binding peptide
  MOD_RES (3), (4), (38), (40): Xaa is C or S
  MOD_RES (18), (19), (20), (21), (22): Xaa is A or G
  MOD_RES (23), (24), (25), (26): Xaa is A or G or is absent
KAXXVPTELEPLTMLYYXXXXXXXXXEQLSNEMVVEGXGX

SEQ ID NO: 14857 - protein, 38 aa, Artificial Sequence; identical to SEQ ID NO: 7543
  GFR-binding peptide
  MOD_RES (2), (3), (37): Xaa is C or S
  MOD_RES (17), (18), (19), (20), (21): Xaa is A or G
  MOD_RES (22), (23), (24), (25): Xaa is A or G or is absent

SEQ ID NO: 14858 - protein, 37 aa, Artificial Sequence; identical to SEQ ID NO: 7544
  GFR-binding peptide
  MOD_RES (3), (4): Xaa is C or S
  MOD_RES (18), (19), (20), (21), (22): Xaa is A or G
  MOD_RES (23), (24), (25), (26): Xaa is A or G or is absent

SEQ ID NO: 14859 - protein, 38 aa, Artificial Sequence
  GFR-binding peptide
  MOD_RES (3), (4), (36), (38): Xaa is C or S
KPXXAPTQLEPLPVVYYDDSSNVIEQLSNNMVVRAXGX

SEQ ID NO: 14860 - protein, 38 aa, Artificial Sequence; identical to SEQ ID NO: 7546
  GFR-binding peptide
  MOD_RES (1), (35), (37): Xaa is C or S
  MOD_RES (15), (16), (17), (18), (19): Xaa is A or G
  MOD_RES (20), (21), (22), (23): Xaa is A or G or is absent

SEQ ID NO: 14861 - protein, 36 aa, Artificial Sequence; identical to SEQ ID NO: 7548
  GFR-binding peptide
  MOD_RES (1), (2), (35): Xaa is C or S
  MOD_RES (16), (17), (18), (19), (20): Xaa is A or G
  MOD_RES (21), (22), (23), (24): Xaa is A or G or is absent

SEQ ID NO: 14862 - protein, 37 aa, Artificial Sequence; identical to SEQ ID NO: 7549
  GFR-binding peptide
  MOD_RES (6), (7): Xaa is C or S

SEQ ID NO: 14863 - protein, 37 aa, Artificial Sequence; identical to SEQ ID NO: 7550
  GFR-binding peptide
  MOD_RES (3), (4): Xaa is C or S
  MOD_RES (18), (19), (20), (21), (22): Xaa is A or G
  MOD_RES (23), (24), (25), (26): Xaa is A or G or is absent

SEQ ID NO: 14864 - protein, 37 aa, Artificial Sequence
  GFR-binding peptide
  MOD_RES (1), (2), (35), (37): Xaa is C or S
  MOD_RES (16), (17), (18), (19), (20): Xaa is A or G
  MOD_RES (21), (22), (23), (24): Xaa is A or G or is absent
XXVPQDLSPISILFIXXXXXXXXXYKQYEMVVKSXKX

SEQ ID NO: 14865 - protein, 41 aa, Artificial Sequence; identical to SEQ ID NO: 7553
  GFR-binding peptide
  MOD_RES (5), (6), (40): Xaa is C or S
  MOD_RES (20), (21), (22), (23), (24): Xaa is A or G
  MOD_RES (25), (26), (27), (28): Xaa is A or G or is absent

SEQ ID NO: 14866 - protein, 37 aa, Artificial Sequence; identical to SEQ ID NO: 7556
  GFR-binding peptide
  MOD_RES (4), (5): Xaa is C or S
  MOD_RES (19), (20), (21), (22), (23): Xaa is A or G
  MOD_RES (24), (25), (26), (27): Xaa is A or G or is absent

SEQ ID NO: 14867 - protein, 38 aa, Artificial Sequence; identical to SEQ ID NO: 7558
  GFR-binding peptide
  MOD_RES (4), (5), (37): Xaa is C or S

SEQ ID NO: 14868 - protein, 34 aa, Artificial Sequence; identical to SEQ ID NO: 7559
  GFR-binding peptide
  MOD_RES (1), (2): Xaa is C or S
  MOD_RES (16), (17), (18), (19), (20): Xaa is A or G
  MOD_RES (21), (22), (23), (24): Xaa is A or G or is absent

SEQ ID NO: 14869 - protein, 41 aa, Artificial Sequence
  GFR-binding peptide
  MOD_RES (6), (7), (41): Xaa is C or S
  MOD_RES (21), (22), (23), (24), (25): Xaa is A or G
  MOD_RES (26), (27), (28), (29): Xaa is A or G or is absent
TVPKPXXAPTQLEPLPVVYYXXXXXXXXXEQLSNNMVVRAX

SEQ ID NO: 14870 - protein, 33 aa, Artificial Sequence
  GFR-binding peptide
  MOD_RES (1), (1): Xaa is C or S
  MOD_RES (15), (16), (17), (18), (19): Xaa is A or G
  MOD_RES (20), (21), (22), (23): Xaa is A or G or is absent
XVPQALEPLPIVYYXXXXXXXXXEQLSNMIVRS

SEQ ID NO: 14871 - protein, 38 aa, Artificial Sequence
  GFR-binding peptide
  MOD_RES (5), (6): Xaa is C or S
  MOD_RES (20), (21), (22), (23), (24): Xaa is A or G
  MOD_RES (25), (26), (27), (28): Xaa is A or G or is absent
SASPXXVPQDLSPISILFIXXXXXXXXXYKQYEMVVKS

SEQ ID NO: 14872 - protein, 32 aa, Artificial Sequence
  GFR-binding peptide
  MOD_RES (1), (2): Xaa is C or S
XXAPTKLEPLTVLYYDDSSNVIEQLSNNMVVR

SEQ ID NO: 14873 - protein, 42 aa, Artificial Sequence
  GFR-binding peptide
  MOD_RES (5), (39), (41): Xaa is C or S
  MOD_RES (19), (20), (21), (22), (23): Xaa is A or G
  MOD_RES (24), (25), (26), (27): Xaa is A or G or is absent
TKPTXAPTKLEPLPVVYYXXXXXXXXXEQLSNNMVVRSXGXH

SEQ ID NO: 14874 - protein, 35 aa, Artificial Sequence
  GFR-binding peptide
  MOD_RES (1), (34): Xaa is C or S
  MOD_RES (15), (16), (17), (18), (19): Xaa is A or G
  MOD_RES (20), (21), (22), (23): Xaa is A or G or is absent
XVPQALSPISILFIXXXXXXXXXYKQYEMIVRSXK

SEQ ID NO: 14875 - protein, 37 aa, Artificial Sequence
  GFR-binding peptide
  MOD_RES (1), (2), (36): Xaa is C or S
  MOD_RES (16), (17), (18), (19), (20): Xaa is A or G
  MOD_RES (21), (22), (23), (24): Xaa is A or G or is absent
XXAPTQLSPISVLFIXXXXXXXXXYKQYENMVVRAXG

SEQ ID NO: 14876 - protein, 36 aa, Artificial Sequence; identical to SEQ ID NO: 7564
  GFR-binding peptide
  MOD_RES (1), (2), (36): Xaa is C or S
  MOD_RES (16), (17), (18), (19), (20): Xaa is A or G
  MOD_RES (21), (22), (23), (24): Xaa is A or G or is absent

SEQ ID NO: 14877 - protein, 31 aa, Artificial Sequence; identical to SEQ ID NO: 7565
  GFR-binding peptide
  MOD_RES (31), (31): Xaa is C or S

SEQ ID NO: 14878 - protein, 39 aa, Artificial Sequence; identical to SEQ ID NO: 7567
  GFR-binding peptide
  MOD_RES (3), (4), (37), (39): Xaa is C or S
  MOD_RES (18), (19), (20), (21), (22): Xaa is A or G
  MOD_RES (23), (24), (25), (26): Xaa is A or G or is absent

SEQ ID NO: 14879 - protein, 36 aa, Artificial Sequence
  GFR-binding peptide
  MOD_RES (2), (3), (35): Xaa is C or S
AXXVPTELEPLPMVYYDENEKVVEQLSNDMVVEGXG

SEQ ID NO: 14880 - protein, 38 aa, Artificial Sequence
  GFR-binding peptide
  MOD_RES (6), (7), (38): Xaa is C or S
ASAAPXXVPQALEPLTILYYVGRKPKVEQLSNMIVRSX

SEQ ID NO: 14881 - protein, 35 aa, Artificial Sequence
  GFR-binding peptide
  MOD_RES (32), (34): Xaa is C or S
VPTELEPLPMVYYDENEKVVEQLSNDMVVEGXGXR

SEQ ID NO: 14882 - protein, 40 aa, Artificial Sequence
  GFR-binding peptide
  MOD_RES (5), (6), (38), (40): Xaa is C or S
IPKAXXVPTELEPLPMVYYDEYDKVVEQLSNEMVVEGXGX

SEQ ID NO: 14883 - protein, 36 aa, Artificial Sequence; identical to SEQ ID NO: 7572
  GFR-binding peptide
  MOD_RES (34), (36): Xaa is C or S
  MOD_RES (14), (15), (16), (17), (18): Xaa is A or G
  MOD_RES (19), (20), (21), (22): Xaa is A or G or is absent

SEQ ID NO: 14884 - protein, 40 aa, Artificial Sequence
  GFR-binding peptide
  MOD_RES (5), (6), (40): Xaa is C or S
  MOD_RES (20), (21), (22), (23), (24): Xaa is A or G
  MOD_RES (25), (26), (27), (28): Xaa is A or G or is absent
TPPTXXVPTRLNAISILYFXXXXXXXXXLKKYRDMVVESX

SEQ ID NO: 14885 - protein, 35 aa, Artificial Sequence; identical to SEQ ID NO: 7574
  GFR-binding peptide
  MOD_RES (34), (34): Xaa is C or S
  MOD_RES (14), (15), (16), (17), (18): Xaa is A or G
  MOD_RES (19), (20), (21), (22): Xaa is A or G or is absent

SEQ ID NO: 14886 - protein, 33 aa, Artificial Sequence
  GFR-binding peptide
  MOD_RES (1), (2), (33): Xaa is C or S
XXVSQDLSPISILFIIGKTPKIYKQYEMIVKSX

SEQ ID NO: 14887 - protein, 40 aa, Artificial Sequence; identical to SEQ ID NO: 7580
  GFR-binding peptide
  MOD_RES (4), (5), (39): Xaa is C or S
  MOD_RES (19), (20), (21), (22), (23): Xaa is A or G
  MOD_RES (24), (25), (26), (27): Xaa is A or G or is absent

SEQ ID NO: 14888 - protein, 37 aa, Artificial Sequence
  GFR-binding peptide
  MOD_RES (4), (5): Xaa is C or S
  MOD_RES (19), (20), (21), (22), (23): Xaa is A or G
  MOD_RES (24), (25), (26), (27): Xaa is A or G or is absent
PPTXXVPTRLNAISILYFXXXXXXXXXLKKYRDMVVE

SEQ ID NO: 14889 - protein, 37 aa, Artificial Sequence
  GFR-binding peptide
  MOD_RES (1), (2), (36): Xaa is C or S
  MOD_RES (16), (17), (18), (19), (20): Xaa is A or G
  MOD_RES (21), (22), (23), (24): Xaa is A or G or is absent
XXVPTELSPISMLFIXXXXXXXXXYKQYEDMVVEGXG

SEQ ID NO: 14890 - protein, 39 aa, Artificial Sequence
  GFR-binding peptide
  MOD_RES (4), (5), (38): Xaa is C or S
  MOD_RES (19), (20), (21), (22), (23): Xaa is A or G
  MOD_RES (24), (25), (26), (27): Xaa is A or G or is absent
AAPXXVPQALEPLTILYYXXXXXXXXXEQLSNMIVRSXK

SEQ ID NO: 14891 - protein, 39 aa, Artificial Sequence; identical to SEQ ID NO: 7585
  GFR-binding peptide
  MOD_RES (6), (7): Xaa is C or S
  MOD_RES (21), (22), (23), (24), (25): Xaa is A or G
  MOD_RES (26), (27), (28), (29): Xaa is A or G or is absent

SEQ ID NO: 14892 - protein, 39 aa, Artificial Sequence
  GFR-binding peptide
  MOD_RES (1), (2), (36), (38): Xaa is C or S
  MOD_RES (16), (17), (18), (19), (20): Xaa is A or G
  MOD_RES (21), (22), (23), (24): Xaa is A or G or is absent
XXVPTELEPLTMLYYXXXXXXXXXEQLSNEMVVEGXGXR

SEQ ID NO: 14893 - protein, 34 aa, Artificial Sequence
  GFR-binding peptide
  MOD_RES (34), (34): Xaa is C or S
  MOD_RES (14), (15), (16), (17), (18): Xaa is A or G
  MOD_RES (19), (20), (21), (22): Xaa is A or G or is absent
VPTELSPISMLFIXXXXXXXXXYKQYEEMVVEGX

SEQ ID NO: 14894 - protein, 35 aa, Artificial Sequence
  GFR-binding peptide
  MOD_RES (1), (2): Xaa is C or S
  MOD_RES (16), (17), (18), (19), (20): Xaa is A or G
  MOD_RES (21), (22), (23), (24): Xaa is A or G or is absent
XXVPTELEPLPMVYYXXXXXXXXXEQLSNDMVVEG

SEQ ID NO: 14895 - protein, 39 aa, Artificial Sequence; identical to SEQ ID NO: 7588
  GFR-binding peptide
  MOD_RES (2), (3), (36), (38): Xaa is C or S
  MOD_RES (17), (18), (19), (20), (21): Xaa is A or G
  MOD_RES (22), (23), (24), (25): Xaa is A or G or is absent

SEQ ID NO: 14896 - protein, 39 aa, Artificial Sequence
  GFR-binding peptide
  MOD_RES (5), (6): Xaa is C or S
  MOD_RES (20), (21), (22), (23), (24): Xaa is A or G
  MOD_RES (25), (26), (27), (28): Xaa is A or G or is absent
IPKAXXVPTELEPLPMVYYXXXXXXXXXEQLSNEMVVEG

SEQ ID NO: 14897 - protein, 35 aa, Artificial Sequence; identical to SEQ ID NO: 7592
  GFR-binding peptide
  MOD_RES (1), (2), (35): Xaa is C or S
  MOD_RES (16), (17), (18), (19), (20): Xaa is A or G
  MOD_RES (21), (22), (23), (24): Xaa is A or G or is absent

SEQ ID NO: 14898 - protein, 36 aa, Artificial Sequence
  GFR-binding peptide
  MOD_RES (5), (6): Xaa is C or S
IPKAXXVPTELEPLPMVYYDENEKVVEQLSNDMVVE

SEQ ID NO: 14899 - protein, 34 aa, Artificial Sequence
  GFR-binding peptide
  MOD_RES (32), (34): Xaa is C or S
VPTRLSAISILYLDSANNVVLKNYQDMVVESXGX

SEQ ID NO: 14900 - protein, 42 aa, Artificial Sequence
  GFR-binding peptide
  MOD_RES (4), (5), (39), (41): Xaa is C or S
  MOD_RES (19), (20), (21), (22), (23): Xaa is A or G
  MOD_RES (24), (25), (26), (27): Xaa is A or G or is absent
PPTXXVPTRLEPLTILYYXXXXXXXXXEQLSNDMVVESXGXR

SEQ ID NO: 14901 - protein, 40 aa, Artificial Sequence
  GFR-binding peptide
  MOD_RES (6), (7): Xaa is C or S
  MOD_RES (21), (22), (23), (24), (25): Xaa is A or G
  MOD_RES (26), (27), (28), (29): Xaa is A or G or is absent
YVPKPXXAPTKLEPLTVLYYXXXXXXXXXEQLSNNMVVRS

SEQ ID NO: 14902 - protein, 43 aa, Artificial Sequence
  GFR-binding peptide
  MOD_RES (6), (40), (42): Xaa is C or S
  MOD_RES (20), (21), (22), (23), (24): Xaa is A or G
  MOD_RES (25), (26), (27), (28): Xaa is A or G or is absent
VTKPTXAPTKLSPISVLFIXXXXXXXXXYKQYENMVVRSXGXH

SEQ ID NO: 14903 - protein, 32 aa, Artificial Sequence
  GFR-binding peptide
  MOD_RES (1), (2): Xaa is C or S
XXAPTQLEPLPVVYYDDSSNVIEQLSNNMVVR

SEQ ID NO: 14904 - protein, 38 aa, Artificial Sequence; identical to SEQ ID NO: 7600
  GFR-binding peptide
  MOD_RES (2), (3), (36), (38): Xaa is C or S
  MOD_RES (17), (18), (19), (20), (21): Xaa is A or G
  MOD_RES (22), (23), (24), (25): Xaa is A or G or is absent

SEQ ID NO: 14905 - protein, 39 aa, Artificial Sequence; identical to SEQ ID NO: 7601
  GFR-binding peptide
  MOD_RES (6), (7), (39): Xaa is C or S

SEQ ID NO: 14906 - protein, 35 aa, Artificial Sequence; identical to SEQ ID NO: 7603
  GFR-binding peptide
  MOD_RES (2), (3), (34): Xaa is C or S

SEQ ID NO: 14907 - protein, 40 aa, Artificial Sequence
  GFR-binding peptide
  MOD_RES (4), (5), (39): Xaa is C or S
  MOD_RES (19), (20), (21), (22), (23): Xaa is A or G
  MOD_RES (24), (25), (26), (27): Xaa is A or G or is absent
PPTXXVPTRLEPLTILYYXXXXXXXXXEQLSNDMVVESXG

SEQ ID NO: 14908 - protein, 35 aa, Artificial Sequence; identical to SEQ ID NO: 7607
  GFR-binding peptide
  MOD_RES (4), (5): Xaa is C or S

SEQ ID NO: 14909 - protein, 37 aa, Artificial Sequence
  GFR-binding peptide
  MOD_RES (3), (4), (36): Xaa is C or S
KAXXVPTELSPISMLFIDENEKVVYKQYEDMVVEGXG

SEQ ID NO: 14910 - protein, 40 aa, Artificial Sequence
  GFR-binding peptide
  MOD_RES (6), (7), (39): Xaa is C or S
YVPKPXXAPTKLEPLPVVYYDDSSNVIEQLSNNMVVRSXG

SEQ ID NO: 14911 - protein, 36 aa, Artificial Sequence
  GFR-binding peptide
  MOD_RES (4), (5), (36): Xaa is C or S
AAPXXVPQALSPISILFIVGRKPKVYKQYEMIVRSX

SEQ ID NO: 14912 - protein, 32 aa, Artificial Sequence; identical to SEQ ID NO: 7611
  GFR-binding peptide
  MOD_RES (32), (32): Xaa is C or S

SEQ ID NO: 14913 - protein, 42 aa, Artificial Sequence
  GFR-binding peptide
  MOD_RES (6), (7), (41): Xaa is C or S
  MOD_RES (21), (22), (23), (24), (25): Xaa is A or G
  MOD_RES (26), (27), (28), (29): Xaa is A or G or is absent
KIPKAXXVPTELEPLTMLYYXXXXXXXXXEQLSNDMVVEGXG

SEQ ID NO: 14914 - protein, 38 aa, Artificial Sequence
  GFR-binding peptide
  MOD_RES (2), (3), (37): Xaa is C or S
  MOD_RES (17), (18), (19), (20), (21): Xaa is A or G
  MOD_RES (22), (23), (24), (25): Xaa is A or G or is absent
AXXVPTELEPLTMLYYXXXXXXXXXEQLSNEMVVEGXG

SEQ ID NO: 14915 - protein, 33 aa, Artificial Sequence
  GFR-binding peptide
  MOD_RES (1), (2): Xaa is C or S
XXAPTQLSPISVLFIDDSSNVIYKQYENMVVRA

SEQ ID NO: 14916 - protein, 33 aa, Artificial Sequence
  GFR-binding peptide
  MOD_RES (1), (2): Xaa is C or S
XXVPTRLEPLTILYYDSANNVVEQLSNDMVVES

SEQ ID NO: 14917 - protein, 43 aa, Artificial Sequence; identical to SEQ ID NO: 7614
  GFR-binding peptide
  MOD_RES (6), (7), (41), (43): Xaa is C or S
  MOD_RES (21), (22), (23), (24), (25): Xaa is A or G
  MOD_RES (26), (27), (28), (29): Xaa is A or G or is absent

SEQ ID NO: 14918 - protein, 33 aa, Artificial Sequence
  GFR-binding peptide
  MOD_RES (1), (1): Xaa is C or S
  MOD_RES (15), (16), (17), (18), (19): Xaa is A or G
  MOD_RES (20), (21), (22), (23): Xaa is A or G or is absent
XVPTELEPLPMVYYXXXXXXXXXEQLSNEMVVE

SEQ ID NO: 14919 - protein, 40 aa, Artificial Sequence
  GFR-binding peptide
  MOD_RES (3), (4), (37), (39): Xaa is C or S
  MOD_RES (18), (19), (20), (21), (22): Xaa is A or G
  MOD_RES (23), (24), (25), (26): Xaa is A or G or is absent
APXXVPQALSPISILFIXXXXXXXXXYKQYEMIVRSXKXS

SEQ ID NO: 14920 - protein, 37 aa, Artificial Sequence
  GFR-binding peptide
  MOD_RES (5), (6): Xaa is C or S
VPKPXXAPTQLSPISVLFIDDSSNVIYKQYENMVVRA

SEQ ID NO: 14921 - protein, 33 aa, Artificial Sequence
  GFR-binding peptide
  MOD_RES (14), (15), (16), (17), (18): Xaa is A or G
  MOD_RES (19), (20), (21), (22): Xaa is A or G or is absent
APTQLSPISVLFIXXXXXXXXXYKQYENMVVRA

SEQ ID NO: 14922 - protein, 39 aa, Artificial Sequence
  GFR-binding peptide
  MOD_RES (4), (5), (37), (39): Xaa is C or S
PKPXXAPTQLEPLPVVYYDDSSNVIEQLSNNMVVRAXGX

SEQ ID NO: 14923 - protein, 34 aa, Artificial Sequence
  GFR-binding peptide
  MOD_RES (1), (2): Xaa is C or S
  MOD_RES (16), (17), (18), (19), (20): Xaa is A or G
  MOD_RES (21), (22), (23), (24): Xaa is A or G or is absent
XXVPTELEPLPMVYYXXXXXXXXXEQLSNDMVVE

SEQ ID NO: 14924 - protein, 33 aa, Artificial Sequence
  GFR-binding peptide
  MOD_RES (32), (32): Xaa is C or S
VPTRLEPLTILYYDSANNVVEQLSNDMVVESXG

SEQ ID NO: 14925 - protein, 36 aa, Artificial Sequence
  GFR-binding peptide
  MOD_RES (1), (2), (36): Xaa is C or S
  MOD_RES (16), (17), (18), (19), (20): Xaa is A or G
  MOD_RES (21), (22), (23), (24): Xaa is A or G or is absent
XXVPTELSPISMLFIXXXXXXXXXYKQYEDMVVEGX

SEQ ID NO: 14926 - protein, 39 aa, Artificial Sequence; identical to SEQ ID NO: 7620
  GFR-binding peptide
  MOD_RES (6), (38): Xaa is C or S

SEQ ID NO: 14927 - protein, 41 aa, Artificial Sequence
  GFR-binding peptide
  MOD_RES (7), (41): Xaa is C or S
  MOD_RES (21), (22), (23), (24), (25): Xaa is A or G
  MOD_RES (26), (27), (28), (29): Xaa is A or G or is absent
HVTKPTXAPTKLEPLPVVYYXXXXXXXXXEQLSNNMVVRSX

SEQ ID NO: 14928 - protein, 40 aa, Artificial Sequence; identical to SEQ ID NO: 7625
  GFR-binding peptide
  MOD_RES (6), (7), (39): Xaa is C or S

SEQ ID NO: 14929 - protein, 34 aa, Artificial Sequence
  GFR-binding peptide
  MOD_RES (3), (4): Xaa is C or S
APXXVPQALSPISILFIVGRKPKVYKQYEMIVRS

SEQ ID NO: 14930 - protein, 42 aa, Artificial Sequence
  GFR-binding peptide
  MOD_RES (6), (7), (39), (41): Xaa is C or S
KIPKAXXVPTELEPLTMLYYDENEKVVEQLSNDMVVEGXGXR

SEQ ID NO: 14931 - protein, 38 aa, Artificial Sequence
  GFR-binding peptide
  MOD_RES (1), (35), (37): Xaa is C or S
  MOD_RES (15), (16), (17), (18), (19): Xaa is A or G
  MOD_RES (20), (21), (22), (23): Xaa is A or G or is absent
XAPTQLSPISVLFIXXXXXXXXXYKQYENMVVRAXGXH

SEQ ID NO: 14932 - protein, 39 aa, Artificial Sequence
  GFR-binding peptide
  MOD_RES (3), (4), (36), (38): Xaa is C or S
KAXXVPTELEPLTMLYYDEYDKVVEQLSNEMVVEGXGXR

SEQ ID NO: 14933 - protein, 34 aa, Artificial Sequence; identical to SEQ ID NO: 7626
  GFR-binding peptide
  MOD_RES (1), (2), (33): Xaa is C or S

SEQ ID NO: 14934 - protein, 38 aa, Artificial Sequence
  GFR-binding peptide
  MOD_RES (5), (6), (37): Xaa is C or S
SASPXXVPQDLEPLPIVYYVGRTPKVEQLSNMVVKSXK

SEQ ID NO: 14935 - protein, 36 aa, Artificial Sequence; identical to SEQ ID NO: 7629
  GFR-binding peptide
  MOD_RES (3), (4): Xaa is C or S
  MOD_RES (18), (19), (20), (21), (22): Xaa is A or G
  MOD_RES (23), (24), (25), (26): Xaa is A or G or is absent

SEQ ID NO: 14936 - protein, 38 aa, Artificial Sequence
  GFR-binding peptide
  MOD_RES (3), (4), (36), (38): Xaa is C or S
KPXXAPTKLEPLPVVYYDDSSNVIEQLSNNMVVRSXGX

SEQ ID NO: 14937 - protein, 37 aa, Artificial Sequence
  GFR-binding peptide
  MOD_RES (3), (37): Xaa is C or S
  MOD_RES (17), (18), (19), (20), (21): Xaa is A or G
  MOD_RES (22), (23), (24), (25): Xaa is A or G or is absent
PTXAPTKLSPISVLFIXXXXXXXXXYKQYENMVVRSX

SEQ ID NO: 14938 - protein, 35 aa, Artificial Sequence
  GFR-binding peptide
  MOD_RES (3), (4): Xaa is C or S
KPXXAPTKLEPLPVVYYDDSSNVIEQLSNNMVVRS

SEQ ID NO: 14939 - protein, 34 aa, Artificial Sequence
  GFR-binding peptide
  MOD_RES (1), (2): Xaa is C or S
  MOD_RES (16), (17), (18), (19), (20): Xaa is A or G
  MOD_RES (21), (22), (23), (24): Xaa is A or G or is absent
XXAPTQLSPISVLFIXXXXXXXXXYKQYENMVVR

SEQ ID NO: 14940 - protein, 38 aa, Artificial Sequence
  GFR-binding peptide
  MOD_RES (2), (3), (37): Xaa is C or S
  MOD_RES (17), (18), (19), (20), (21): Xaa is A or G
  MOD_RES (22), (23), (24), (25): Xaa is A or G or is absent
TXXVPTRLNAISILYFXXXXXXXXXLKKYRDMVVESXG

SEQ ID NO: 14941 - protein, 40 aa, Artificial Sequence
  GFR-binding peptide
  MOD_RES (6), (7), (40): Xaa is C or S
  MOD_RES (21), (22), (23), (24), (25): Xaa is A or G
  MOD_RES (26), (27), (28), (29): Xaa is A or G or is absent
ASASPXXVSQDLEPLPIVYYXXXXXXXXXEQLSNMIVKSX

SEQ ID NO: 14942 - protein, 34 aa, Artificial Sequence
  GFR-binding peptide
  MOD_RES (1), (1): Xaa is C or S
  MOD_RES (15), (16), (17), (18), (19): Xaa is A or G
  MOD_RES (20), (21), (22), (23): Xaa is A or G or is absent
XAPTQLSPISVLFIXXXXXXXXXYKQYENMVVRA

SEQ ID NO: 14943 - protein, 35 aa, Artificial Sequence
  GFR-binding peptide
  MOD_RES (1), (2), (34): Xaa is C or S
XXVPTELSPISMLFIDEYDKVVYKQYEEMVVEGXG

SEQ ID NO: 14944 - protein, 35 aa, Artificial Sequence
  GFR-binding peptide
  MOD_RES (4), (5): Xaa is C or S
ASPXXVSQDLEPLPIVYYIGKTPKIEQLSNMIVKS

SEQ ID NO: 14945 - protein, 37 aa, Artificial Sequence
  GFR-binding peptide
  MOD_RES (3), (4): Xaa is C or S
  MOD_RES (18), (19), (20), (21), (22): Xaa is A or G
  MOD_RES (23), (24), (25), (26): Xaa is A or G or is absent
PTXXVPTRLEPLTILYYXXXXXXXXXEQLSNDMVVES

SEQ ID NO: 14946 - protein, 37 aa, Artificial Sequence
  GFR-binding peptide
  MOD_RES (3), (4), (35), (37): Xaa is C or S
SPXXVPQDLSPISILFIVGRTPKVYKQYEMVVKSXKX

SEQ ID NO: 14947 - protein, 37 aa, Artificial Sequence
  GFR-binding peptide
  MOD_RES (4), (5): Xaa is C or S
  MOD_RES (19), (20), (21), (22), (23): Xaa is A or G
  MOD_RES (24), (25), (26), (27): Xaa is A or G or is absent
AAPXXVPQALEPLPIVYYXXXXXXXXXEQLSNMIVRS

SEQ ID NO: 14948 - protein, 36 aa, Artificial Sequence; identical to SEQ ID NO: 7635
  GFR-binding peptide
  MOD_RES (2), (3), (34), (36): Xaa is C or S

SEQ ID NO: 14949 - protein, 34 aa, Artificial Sequence
  GFR-binding peptide
  MOD_RES (32), (34): Xaa is C or S
VPTRLEPLPIVYYDSANNVVEQLSNDMVVESXGX

SEQ ID NO: 14950 - protein, 34 aa, Artificial Sequence
  GFR-binding peptide
  MOD_RES (34), (34): Xaa is C or S
  MOD_RES (14), (15), (16), (17), (18): Xaa is A or G
  MOD_RES (19), (20), (21), (22): Xaa is A or G or is absent
VPTRLEPLTILYYXXXXXXXXXEQLSNDMVVESX

SEQ ID NO: 14951 - protein, 38 aa, Artificial Sequence; identical to SEQ ID NO: 7639
  GFR-binding peptide
  MOD_RES (4), (5): Xaa is C or S
  MOD_RES (19), (20), (21), (22), (23): Xaa is A or G
  MOD_RES (24), (25), (26), (27): Xaa is A or G or is absent

SEQ ID NO: 14952 - protein, 40 aa, Artificial Sequence; identical to SEQ ID NO: 7641
  GFR-binding peptide
  MOD_RES (6), (7): Xaa is C or S
  MOD_RES (21), (22), (23), (24), (25): Xaa is A or G
  MOD_RES (26), (27), (28), (29): Xaa is A or G or is absent

SEQ ID NO: 14953 - protein, 39 aa, Artificial Sequence
  GFR-binding peptide
  MOD_RES (4), (5), (38): Xaa is C or S
  MOD_RES (19), (20), (21), (22), (23): Xaa is A or G
  MOD_RES (24), (25), (26), (27): Xaa is A or G or is absent
ASPXXVPQDLSPISILFIXXXXXXXXXYKQYEMVVKSXK

SEQ ID NO: 14954 - protein, 39 aa, Artificial Sequence
  GFR-binding peptide
  MOD_RES (4), (5), (37), (39): Xaa is C or S
PPTXXVPTRLSAISILYLDSANNVVLKNYQDMVVESXGX

SEQ ID NO: 14955 - protein, 38 aa, Artificial Sequence; identical to SEQ ID NO: 7647
  GFR-binding peptide
  MOD_RES (3), (4), (36), (38): Xaa is C or S

SEQ ID NO: 14956 - protein, 37 aa, Artificial Sequence
  GFR-binding peptide
  MOD_RES (34), (36): Xaa is C or S
  MOD_RES (14), (15), (16), (17), (18): Xaa is A or G
  MOD_RES (19), (20), (21), (22): Xaa is A or G or is absent
VPTRLEPLPIVYYXXXXXXXXXEQLSNDMVVESXGXR

SEQ ID NO: 14957 - protein, 34 aa, Artificial Sequence
  GFR-binding peptide
  MOD_RES (1), (2): Xaa is C or S
  MOD_RES (16), (17), (18), (19), (20): Xaa is A or G
  MOD_RES (21), (22), (23), (24): Xaa is A or G or is absent
XXVPTRLSPISILFIXXXXXXXXXYKQYEDMVVE

SEQ ID NO: 14958 - protein, 40 aa, Artificial Sequence
  GFR-binding peptide
  MOD_RES (5), (37), (39): Xaa is C or S
TKPTXAPTKLEPLPVVYYDDSSNVIEQLSNNMVVRSXGXH

SEQ ID NO: 14959 - protein, 42 aa, Artificial Sequence; identical to SEQ ID NO: 7654
  GFR-binding peptide
  MOD_RES (5), (6), (39), (41): Xaa is C or S
  MOD_RES (20), (21), (22), (23), (24): Xaa is A or G
  MOD_RES (25), (26), (27), (28): Xaa is A or G or is absent

SEQ ID NO: 14960 - protein, 38 aa, Artificial Sequence
  GFR-binding peptide
  MOD_RES (1), (35), (37): Xaa is C or S
  MOD_RES (15), (16), (17), (18), (19): Xaa is A or G
  MOD_RES (20), (21), (22), (23): Xaa is A or G or is absent
XVPTRLSAISILYLXXXXXXXXXLKNYQDMVVESXGXR

SEQ ID NO: 14961 - protein, 35 aa, Artificial Sequence
  GFR-binding peptide
  MOD_RES (3), (4): Xaa is C or S
PTXXVPTRLSAISILYLDSANNVVLKNYQDMVVES

SEQ ID NO: 14962 - protein, 39 aa, Artificial Sequence
  GFR-binding peptide
  MOD_RES (4), (5), (37), (39): Xaa is C or S
PKPXXAPTKLEPLPVVYYDDSSNVIEQLSNNMVVRSXGX

SEQ ID NO: 14963 - protein, 39 aa, Artificial Sequence; identical to SEQ ID NO: 7659
  GFR-binding peptide
  MOD_RES (4), (5), (37), (39): Xaa is C or S

SEQ ID NO: 14964 - protein, 39 aa, Artificial Sequence
  GFR-binding peptide
  MOD_RES (5), (6), (38): Xaa is C or S
IPKAXXVPTELSPISMLFIDENEKVVYKQYEDMVVEGXG

SEQ ID NO: 14965 - protein, 38 aa, Artificial Sequence; identical to SEQ ID NO: 7663
  GFR-binding peptide
  MOD_RES (4), (5), (36), (38): Xaa is C or S

SEQ ID NO: 14966 - protein, 41 aa, Artificial Sequence
  GFR-binding peptide
  MOD_RES (6), (7), (41): Xaa is C or S
  MOD_RES (21), (22), (23), (24), (25): Xaa is A or G
  MOD_RES (26), (27), (28), (29): Xaa is A or G or is absent
KIPKAXXVPTELEPLPMVYYXXXXXXXXXEQLSNDMVVEGX

SEQ ID NO: 14967 - protein, 37 aa, Artificial Sequence
  GFR-binding peptide
  MOD_RES (1), (2), (35), (37): Xaa is C or S
  MOD_RES (16), (17), (18), (19), (20): Xaa is A or G
  MOD_RES (21), (22), (23), (24): Xaa is A or G or is absent
XXVSQDLSPISILFIXXXXXXXXXYKQYEMIVKSXKX

SEQ ID NO: 14968 - protein, 37 aa, Artificial Sequence
  GFR-binding peptide
  MOD_RES (5), (6), (37): Xaa is C or S
SAAPXXVPQALEPLTILYYVGRKPKVEQLSNMIVRSX

SEQ ID NO: 14969 - protein, 42 aa, Artificial Sequence
  GFR-binding peptide
  MOD_RES (7), (41): Xaa is C or S
  MOD_RES (21), (22), (23), (24), (25): Xaa is A or G
  MOD_RES (26), (27), (28), (29): Xaa is A or G or is absent
HVTKPTXAPTKLEPLPVVYYXXXXXXXXXEQLSNNMVVRSXG

SEQ ID NO: 14970 - protein, 41 aa, Artificial Sequence
  GFR-binding peptide
  MOD_RES (7), (39), (41): Xaa is C or S
HVTKPTXAPTKLEPLPVVYYDDSSNVIEQLSNNMVVRSXGX

SEQ ID NO: 14971 - protein, 40 aa, Artificial Sequence; identical to SEQ ID NO: 7670
  GFR-binding peptide
  MOD_RES (5), (6), (38), (40): Xaa is C or S

SEQ ID NO: 14972 - protein, 35 aa, Artificial Sequence
  GFR-binding peptide
  MOD_RES (4), (5): Xaa is C or S
PKPXXAPTQLEPLPVVYYDDSSNVIEQLSNNMVVR

SEQ ID NO: 14973 - protein, 34 aa, Artificial Sequence; identical to SEQ ID NO: 7671
  GFR-binding peptide
  MOD_RES (32), (34): Xaa is C or S

SEQ ID NO: 14974 - protein, 36 aa, Artificial Sequence; identical to SEQ ID NO: 7673
  GFR-binding peptide
  MOD_RES (2), (3), (35): Xaa is C or S

SEQ ID NO: 14975 - protein, 33 aa, Artificial Sequence
  GFR-binding peptide
  MOD_RES (14), (15), (16), (17), (18): Xaa is A or G
  MOD_RES (19), (20), (21), (22): Xaa is A or G or is absent
VPTELEPLTMLYYXXXXXXXXXEQLSNDMVVEG

SEQ ID NO: 14976 - protein, 37 aa, Artificial Sequence; identical to SEQ ID NO: 7675
  GFR-binding peptide
  MOD_RES (2), (3), (34), (36): Xaa is C or S

SEQ ID NO: 14977 - protein, 38 aa, Artificial Sequence
  GFR-binding peptide
  MOD_RES (4), (5), (37): Xaa is C or S
PKPXXAPTKLEPLTVLYYDDSSNVIEQLSNNMVVRSXG

SEQ ID NO: 14978 - protein, 30 aa, Artificial Sequence
  GFR-binding peptide
APTQLEPLTVLYYDDSSNVIEQLSNNMVVR

SEQ ID NO: 14979 - protein, 38 aa, Artificial Sequence
  GFR-binding peptide
  MOD_RES (2), (3), (36), (38): Xaa is C or S
  MOD_RES (17), (18), (19), (20), (21): Xaa is A or G
  MOD_RES (22), (23), (24), (25): Xaa is A or G or is absent
PXXVPQDLEPLPIVYYXXXXXXXXXEQLSNMVVKSXKX

SEQ ID NO: 14980 - protein, 43 aa, Artificial Sequence
  GFR-binding peptide
  MOD_RES (5), (6), (40), (42): Xaa is C or S
  MOD_RES (20), (21), (22), (23), (24): Xaa is A or G
  MOD_RES (25), (26), (27), (28): Xaa is A or G or is absent
IPKAXXVPTELEPLPMVYYXXXXXXXXXEQLSNEMVVEGXGXR

SEQ ID NO: 14981 - protein, 37 aa, Artificial Sequence; identical to SEQ ID NO: 7680
  GFR-binding peptide
  MOD_RES (1), (35), (37): Xaa is C or S
  MOD_RES (15), (16), (17), (18), (19): Xaa is A or G
  MOD_RES (20), (21), (22), (23): Xaa is A or G or is absent

SEQ ID NO: 14982 - protein, 35 aa, Artificial Sequence
  GFR-binding peptide
  MOD_RES (1), (2), (34): Xaa is C or S
XXVPTRLEPLPIVYYDSANNVVEQLSNDMVVESXG

SEQ ID NO: 14983 - protein, 35 aa, Artificial Sequence; identical to SEQ ID NO: 7682
  GFR-binding peptide
  MOD_RES (4), (5): Xaa is C or S

SEQ ID NO: 14984 - protein, 41 aa, Artificial Sequence; identical to SEQ ID NO: 7683
  GFR-binding peptide
  MOD_RES (6), (7), (40): Xaa is C or S
  MOD_RES (21), (22), (23), (24), (25): Xaa is A or G
  MOD_RES (26), (27), (28), (29): Xaa is A or G or is absent

SEQ ID NO: 14985 - protein, 35 aa, Artificial Sequence
  GFR-binding peptide
  MOD_RES (33), (35): Xaa is C or S
  MOD_RES (14), (15), (16), (17), (18): Xaa is A or G
  MOD_RES (19), (20), (21), (22): Xaa is A or G or is absent
VPQALEPLPIVYYXXXXXXXXXEQLSNMIVRSXKX

SEQ ID NO: 14986 - protein, 41 aa, Artificial Sequence
  GFR-binding peptide
  MOD_RES (3), (4), (38), (40): Xaa is C or S
  MOD_RES (18), (19), (20), (21), (22): Xaa is A or G
  MOD_RES (23), (24), (25), (26): Xaa is A or G or is absent
PTXXVPTRLNAISILYFXXXXXXXXXLKKYRDMVVESXGXR

SEQ ID NO: 14987 - protein, 41 aa, Artificial Sequence
  GFR-binding peptide
  MOD_RES (3), (4), (38), (40): Xaa is C or S
  MOD_RES (18), (19), (20), (21), (22): Xaa is A or G
  MOD_RES (23), (24), (25), (26): Xaa is A or G or is absent
PTXXVPTRLEPLPIVYYXXXXXXXXXEQLSNDMVVESXGXR

SEQ ID NO: 14988 - protein, 37 aa, Artificial Sequence
  GFR-binding peptide
  MOD_RES (5), (6): Xaa is C or S
IPKAXXVPTELEPLPMVYYDEYDKVVEQLSNEMVVEG

SEQ ID NO: 14989 - protein, 37 aa, Artificial Sequence
  GFR-binding peptide
  MOD_RES (1), (35), (37): Xaa is C or S
  MOD_RES (15), (16), (17), (18), (19): Xaa is A or G
  MOD_RES (20), (21), (22), (23): Xaa is A or G or is absent
XVPTELEPLPMVYYXXXXXXXXXEQLSNEMVVEGXGX

SEQ ID NO: 14990 - protein, 39 aa, Artificial Sequence; identical to SEQ ID NO: 7690
  GFR-binding peptide
  MOD_RES (6), (7): Xaa is C or S
  MOD_RES (21), (22), (23), (24), (25): Xaa is A or G
  MOD_RES (26), (27), (28), (29): Xaa is A or G or is absent

SEQ ID NO: 14991 - protein, 31 aa, Artificial Sequence
  GFR-binding peptide
  MOD_RES (1), (1): Xaa is C or S
XVPTELSPISMLFIDENEKVVYKQYEDMVVE

SEQ ID NO: 14992 - protein, 38 aa, Artificial Sequence
  GFR-binding peptide
  MOD_RES (4), (5): Xaa is C or S
  MOD_RES (19), (20), (21), (22), (23): Xaa is A or G
  MOD_RES (24), (25), (26), (27): Xaa is A or G or is absent
PKPXXAPTKLEPLPVVYYXXXXXXXXXEQLSNNMVVRS

SEQ ID NO: 14993 - protein, 37 aa, Artificial Sequence; identical to SEQ ID NO: 7694
  GFR-binding peptide
  MOD_RES (2), (34), (36): Xaa is C or S

SEQ ID NO: 14994 - protein, 39 aa, Artificial Sequence
  GFR-binding peptide
  MOD_RES (2), (3), (37), (39): Xaa is C or S
  MOD_RES (17), (18), (19), (20), (21): Xaa is A or G
  MOD_RES (22), (23), (24), (25): Xaa is A or G or is absent
AXXVPTELEPLTMLYYXXXXXXXXXEQLSNDMVVEGXGX

SEQ ID NO: 14995 - protein, 38 aa, Artificial Sequence; identical to SEQ ID NO: 7698
  GFR-binding peptide
  MOD_RES (5), (6): Xaa is C or S
  MOD_RES (20), (21), (22), (23), (24): Xaa is A or G
  MOD_RES (25), (26), (27), (28): Xaa is A or G or is absent

SEQ ID NO: 14996 - protein, 37 aa, Artificial Sequence
  GFR-binding peptide
  MOD_RES (1), (2), (36): Xaa is C or S
  MOD_RES (16), (17), (18), (19), (20): Xaa is A or G
  MOD_RES (21), (22), (23), (24): Xaa is A or G or is absent
XXVPTRLSPISILFIXXXXXXXXXYKQYEDMVVESXG

SEQ ID NO: 14997 - protein, 34 aa, Artificial Sequence
  GFR-binding peptide
  MOD_RES (2), (3), (34): Xaa is C or S
PXXVPQDLSPISILFIVGRTPKVYKQYEMVVKSX

SEQ ID NO: 14998 - protein, 35 aa, Artificial Sequence; identical to SEQ ID NO: 7701
  GFR-binding peptide
  MOD_RES (2), (3), (35): Xaa is C or S

SEQ ID NO: 14999 - protein, 41 aa, Artificial Sequence
  GFR-binding peptide
  MOD_RES (5), (6), (40): Xaa is C or S
  MOD_RES (20), (21), (22), (23), (24): Xaa is A or G
  MOD_RES (25), (26), (27), (28): Xaa is A or G or is absent
VPKPXXAPTKLEPLPVVYYXXXXXXXXXEQLSNNMVVRSXG

SEQ ID NO: 15000 - protein, 35 aa, Artificial Sequence; identical to SEQ ID NO: 7702
  GFR-binding peptide
  MOD_RES (2), (3): Xaa is C or S
  MOD_RES (17), (18), (19), (20), (21): Xaa is A or G
  MOD_RES (22), (23), (24), (25): Xaa is A or G or is absent

SEQ ID NO: 15001 - protein, 32 aa, Artificial Sequence
  GFR-binding peptide
  MOD_RES (1), (1): Xaa is C or S
XVPTELSPISMLFIDEYDKVVYKQYEEMVVEG

SEQ ID NO: 15002 - protein, 35 aa, Artificial Sequence; identical to SEQ ID NO: 7704
  GFR-binding peptide
  MOD_RES (1), (2), (33), (35): Xaa is C or S

SEQ ID NO: 15003 - protein, 35 aa, Artificial Sequence
  GFR-binding peptide
  MOD_RES (3), (4): Xaa is C or S
PTXXVPTRLNAISILYFDSANNVVLKKYRDMVVES

SEQ ID NO: 15004 - protein, 39 aa, Artificial Sequence
  GFR-binding peptide
  MOD_RES (4), (36), (38): Xaa is C or S
KPTXAPTKLSPISVLFIDDSSNVIYKQYENMVVRSXGXH

SEQ ID NO: 15005 - protein, 35 aa, Artificial Sequence
  GFR-binding peptide
  MOD_RES (2), (3): Xaa is C or S
  MOD_RES (17), (18), (19), (20), (21): Xaa is A or G
  MOD_RES (22), (23), (24), (25): Xaa is A or G or is absent
PXXVPQDLSPISILFIXXXXXXXXXYKQYEMVVKS

SEQ ID NO: 15006 - protein, 34 aa, Artificial Sequence
  GFR-binding peptide
  MOD_RES (31), (33): Xaa is C or S
VSQDLSPISILFIIGKTPKIYKQYEMIVKSXKXS

SEQ ID NO: 15007 - protein, 38 aa, Artificial Sequence; identical to SEQ ID NO: 7712
  GFR-binding peptide
  MOD_RES (6), (38): Xaa is C or S

SEQ ID NO: 15008 - protein, 38 aa, Artificial Sequence; identical to SEQ ID NO: 7713
  GFR-binding peptide
  MOD_RES (1), (2), (35), (37): Xaa is C or S
  MOD_RES (16), (17), (18), (19), (20): Xaa is A or G
  MOD_RES (21), (22), (23), (24): Xaa is A or G or is absent

SEQ ID NO: 15009 - protein, 35 aa, Artificial Sequence; identical to SEQ ID NO: 7714
  GFR-binding peptide
  MOD_RES (1), (2), (33), (35): Xaa is C or S

SEQ ID NO: 15010 - protein, 35 aa, Artificial Sequence
  GFR-binding peptide
  MOD_RES (1), (2), (35): Xaa is C or S
  MOD_RES (16), (17), (18), (19), (20): Xaa is A or G
  MOD_RES (21), (22), (23), (24): Xaa is A or G or is absent
XXVSQDLEPLPIVYYXXXXXXXXXEQLSNMIVKSX

SEQ ID NO: 15011 - protein, 41 aa, Artificial Sequence; identical to SEQ ID NO: 7718
  GFR-binding peptide
  MOD_RES (7), (39), (41): Xaa is C or S

SEQ ID NO: 15012 - protein, 39 aa, Artificial Sequence; identical to SEQ ID NO: 7719
  GFR-binding peptide
  MOD_RES (2), (3), (37), (39): Xaa is C or S
  MOD_RES (17), (18), (19), (20), (21): Xaa is A or G
  MOD_RES (22), (23), (24), (25): Xaa is A or G or is absent

SEQ ID NO: 15013 - protein, 39 aa, Artificial Sequence; identical to SEQ ID NO: 7720
  GFR-binding peptide
  MOD_RES (3), (4), (38): Xaa is C or S
  MOD_RES (18), (19), (20), (21), (22): Xaa is A or G
  MOD_RES (23), (24), (25), (26): Xaa is A or G or is absent

SEQ ID NO: 15014 - protein, 34 aa, Artificial Sequence; identical to SEQ ID NO: 7721
  GFR-binding peptide
  MOD_RES (32), (34): Xaa is C or S

SEQ ID NO: 15015 - protein, 38 aa, Artificial Sequence
  GFR-binding peptide
  MOD_RES (5), (6), (38): Xaa is C or S
IPKAXXVPTELSPISMLFIDENEKVVYKQYEDMVVEGX

SEQ ID NO: 15016 - protein, 40 aa, Artificial Sequence
  GFR-binding peptide
  MOD_RES (4), (5), (37), (39): Xaa is C or S
PKAXXVPTELEPLPMVYYDEYDKVVEQLSNEMVVEGXGXR

SEQ ID NO: 15017 - protein, 40 aa, Artificial Sequence; identical to SEQ ID NO: 7723
  GFR-binding peptide
  MOD_RES (6), (7): Xaa is C or S
  MOD_RES (21), (22), (23), (24), (25): Xaa is A or G
  MOD_RES (26), (27), (28), (29): Xaa is A or G or is absent

SEQ ID NO: 15018 - protein, 33 aa, Artificial Sequence
  GFR-binding peptide
  MOD_RES (1), (2): Xaa is C or S
XXVPTELEPLPMVYYDEYDKVVEQLSNEMVVEG

SEQ ID NO: 15019 - protein, 40 aa, Artificial Sequence
  GFR-binding peptide
  MOD_RES (5), (6), (39): Xaa is C or S
  MOD_RES (20), (21), (22), (23), (24): Xaa is A or G
  MOD_RES (25), (26), (27), (28): Xaa is A or G or is absent
SAAPXXVPQALEPLPIVYYXXXXXXXXXEQLSNMIVRSXK

SEQ ID NO: 15020 - protein, 38 aa, Artificial Sequence
  GFR-binding peptide
  MOD_RES (6), (38): Xaa is C or S
VTKPTXAPTKLSPISVLFIDDSSNVIYKQYENMVVRSX

SEQ ID NO: 15021 - protein, 38 aa, Artificial Sequence
  GFR-binding peptide
  MOD_RES (3), (4), (36), (38): Xaa is C or S
PTXXVPTRLSAISILYLDSANNVVLKNYQDMVVESXGX

SEQ ID NO: 15022 - protein, 36 aa, Artificial Sequence
  GFR-binding peptide
  MOD_RES (1), (35): Xaa is C or S
  MOD_RES (15), (16), (17), (18), (19): Xaa is A or G
  MOD_RES (20), (21), (22), (23): Xaa is A or G or is absent
XVPTELEPLPMVYYXXXXXXXXXEQLSNEMVVEGXG

SEQ ID NO: 15023 - protein, 37 aa, Artificial Sequence
  GFR-binding peptide
  MOD_RES (2), (3), (37): Xaa is C or S
  MOD_RES (17), (18), (19), (20), (21): Xaa is A or G
  MOD_RES (22), (23), (24), (25): Xaa is A or G or is absent
PXXAPTQLEPLTVLYYXXXXXXXXXEQLSNNMVVRAX

SEQ ID NO: 15024 - protein, 39 aa, Artificial Sequence; identical to SEQ ID NO: 7726
  GFR-binding peptide
  MOD_RES (3), (4), (36), (38): Xaa is C or S

SEQ ID NO: 15025 - protein, 43 aa, Artificial Sequence; identical to SEQ ID NO: 7727
  GFR-binding peptide
  MOD_RES (6), (7), (40), (42): Xaa is C or S
  MOD_RES (21), (22), (23), (24), (25): Xaa is A or G
  MOD_RES (26), (27), (28), (29): Xaa is A or G or is absent

SEQ ID NO: 15026 - protein, 41 aa, Artificial Sequence
  GFR-binding peptide
  MOD_RES (4), (5), (39), (41): Xaa is C or S
  MOD_RES (19), (20), (21), (22), (23): Xaa is A or G
  MOD_RES (24), (25), (26), (27): Xaa is A or G or is absent
PKAXXVPTELEPLTMLYYXXXXXXXXXEQLSNEMVVEGXGX

SEQ ID NO: 15027 - protein, 37 aa, Artificial Sequence
  GFR-binding peptide
  MOD_RES (34), (36): Xaa is C or S
  MOD_RES (14), (15), (16), (17), (18): Xaa is A or G
  MOD_RES (19), (20), (21), (22): Xaa is A or G or is absent
VPTRLNAISILYFXXXXXXXXXLKKYRDMVVESXGXR

SEQ ID NO: 15028 - protein, 35 aa, Artificial Sequence
  GFR-binding peptide
  MOD_RES (1), (35): Xaa is C or S
  MOD_RES (15), (16), (17), (18), (19): Xaa is A or G
  MOD_RES (20), (21), (22), (23): Xaa is A or G or is absent
XVPTRLEPLPIVYYXXXXXXXXXEQLSNDMVVESX

SEQ ID NO: 15029 - protein, 36 aa, Artificial Sequence
  GFR-binding peptide
  MOD_RES (34), (36): Xaa is C or S
  MOD_RES (14), (15), (16), (17), (18): Xaa is A or G
  MOD_RES (19), (20), (21), (22): Xaa is A or G or is absent
VPTRLSPISILFIXXXXXXXXXYKQYEDMVVESXGX

SEQ ID NO: 15030 - protein, 38 aa, Artificial Sequence; identical to SEQ ID NO: 7730
  GFR-binding peptide
  MOD_RES (5), (6): Xaa is C or S
  MOD_RES (20), (21), (22), (23), (24): Xaa is A or G
  MOD_RES (25), (26), (27), (28): Xaa is A or G or is absent

SEQ ID NO: 15031 - protein, 39 aa, Artificial Sequence
  GFR-binding peptide
  MOD_RES (6), (38): Xaa is C or S
VTKPTXAPTKLEPLTVLYYDDSSNVIEQLSNNMVVRSXG

SEQ ID NO: 15032 - protein, 33 aa, Artificial Sequence
  GFR-binding peptide
  MOD_RES (3), (3): Xaa is C or S
PTXAPTKLEPLTVLYYDDSSNVIEQLSNNMVVR

SEQ ID NO: 15033 - protein, 36 aa, Artificial Sequence
  GFR-binding peptide
  MOD_RES (3), (4), (36): Xaa is C or S
KPXXAPTKLSPISVLFIDDSSNVIYKQYENMVVRSX

SEQ ID NO: 15034 - protein, 34 aa, Artificial Sequence; identical to SEQ ID NO: 7737
  GFR-binding peptide
  MOD_RES (1), (34): Xaa is C or S
  MOD_RES (15), (16), (17), (18), (19): Xaa is A or G
  MOD_RES (20), (21), (22), (23): Xaa is A or G or is absent

SEQ ID NO: 15035 - protein, 44 aa, Artificial Sequence
  GFR-binding peptide
  MOD_RES (6), (7), (41), (43): Xaa is C or S
  MOD_RES (21), (22), (23), (24), (25): Xaa is A or G
  MOD_RES (26), (27), (28), (29): Xaa is A or G or is absent
YVPKPXXAPTKLEPLTVLYYXXXXXXXXXEQLSNNMVVRSXGXH

SEQ ID NO: 15036 - protein, 41 aa, Artificial Sequence
  GFR-binding peptide
  MOD_RES (5), (6), (39), (41): Xaa is C or S
  MOD_RES (20), (21), (22), (23), (24): Xaa is A or G
  MOD_RES (25), (26), (27), (28): Xaa is A or G or is absent
SASPXXVPQDLEPLTILYYXXXXXXXXXEQLSNMVVKSXKX

SEQ ID NO: 15037 - protein, 37 aa, Artificial Sequence
  GFR-binding peptide
  MOD_RES (2), (3), (37): Xaa is C or S
  MOD_RES (17), (18), (19), (20), (21): Xaa is A or G
  MOD_RES (22), (23), (24), (25): Xaa is A or G or is absent
TXXVPTRLSPISILFIXXXXXXXXXYKQYEDMVVESX

SEQ ID NO: 15038 - protein, 41 aa, Artificial Sequence
  GFR-binding peptide
  MOD_RES (6), (7), (41): Xaa is C or S
  MOD_RES (21), (22), (23), (24), (25): Xaa is A or G
  MOD_RES (26), (27), (28), (29): Xaa is A or G or is absent
STPPTXXVPTRLNAISILYFXXXXXXXXXLKKYRDMVVESX

SEQ ID NO: 15039 - protein, 41 aa, Artificial Sequence
  GFR-binding peptide
  MOD_RES (3), (4), (38), (40): Xaa is C or S
  MOD_RES (18), (19), (20), (21), (22): Xaa is A or G
  MOD_RES (23), (24), (25), (26): Xaa is A or G or is absent
KAXXVPTELSPISMLFIXXXXXXXXXYKQYEEMVVEGXGXR

SEQ ID NO: 15040 - protein, 39 aa, Artificial Sequence; identical to SEQ ID NO: 7740
  GFR-binding peptide
  MOD_RES (6), (7): Xaa is C or S
  MOD_RES (21), (22), (23), (24), (25): Xaa is A or G
  MOD_RES (26), (27), (28), (29): Xaa is A or G or is absent

SEQ ID NO: 15041 - protein, 39 aa, Artificial Sequence
  GFR-binding peptide
  MOD_RES (5), (6), (37), (39): Xaa is C or S
SAAPXXVPQALEPLTILYYVGRKPKVEQLSNMIVRSXKX

SEQ ID NO: 15042 - protein, 34 aa, Artificial Sequence
  GFR-binding peptide
  MOD_RES (1), (2), (34): Xaa is C or S
XXVPTRLSAISILYLDSANNVVLKNYQDMVVESX

SEQ ID NO: 15043 - protein, 34 aa, Artificial Sequence
  GFR-binding peptide
  MOD_RES (1), (1): Xaa is C or S
  MOD_RES (15), (16), (17), (18), (19): Xaa is A or G
  MOD_RES (20), (21), (22), (23): Xaa is A or G or is absent
XAPTQLEPLTVLYYXXXXXXXXXEQLSNNMVVRA

SEQ ID NO: 15044 - protein, 34 aa, Artificial Sequence; identical to SEQ ID NO: 7743
  GFR-binding peptide
  MOD_RES (3), (4): Xaa is C or S

SEQ ID NO: 15045 - protein, 36 aa, Artificial Sequence; identical to SEQ ID NO: 7745
  GFR-binding peptide
  MOD_RES (2), (3), (34), (36): Xaa is C or S

SEQ ID NO: 15046 - protein, 41 aa, Artificial Sequence; identical to SEQ ID NO: 7748
  GFR-binding peptide
  MOD_RES (4), (5), (39), (41): Xaa is C or S
  MOD_RES (19), (20), (21), (22), (23): Xaa is A or G
  MOD_RES (24), (25), (26), (27): Xaa is A or G or is absent

SEQ ID NO: 15047 - protein, 42 aa, Artificial Sequence
  GFR-binding peptide
  MOD_RES (6), (7), (40), (42): Xaa is C or S
  MOD_RES (21), (22), (23), (24), (25): Xaa is A or G
  MOD_RES (26), (27), (28), (29): Xaa is A or G or is absent
ASAAPXXVPQALSPISILFIXXXXXXXXXYKQYEMIVRSXKX

SEQ ID NO: 15048 - protein, 39 aa, Artificial Sequence; identical to SEQ ID NO: 7749
  GFR-binding peptide
  MOD_RES (4), (5), (38): Xaa is C or S
  MOD_RES (19), (20), (21), (22), (23): Xaa is A or G
  MOD_RES (24), (25), (26), (27): Xaa is A or G or is absent

SEQ ID NO: 15049 - protein, 40 aa, Artificial Sequence
  GFR-binding peptide
  MOD_RES (6), (7), (40): Xaa is C or S
  MOD_RES (21), (22), (23), (24), (25): Xaa is A or G
  MOD_RES (26), (27), (28), (29): Xaa is A or G or is absent
ASAAPXXVPQALEPLTILYYXXXXXXXXXEQLSNMIVRSX

SEQ ID NO: 15050 - protein, 38 aa, Artificial Sequence; identical to SEQ ID NO: 7750
  GFR-binding peptide
  MOD_RES (4), (38): Xaa is C or S
  MOD_RES (18), (19), (20), (21), (22): Xaa is A or G
  MOD_RES (23), (24), (25), (26): Xaa is A or G or is absent

SEQ ID NO: 15051 - protein, 38 aa, Artificial Sequence
  GFR-binding peptide
  MOD_RES (1), (35), (37): Xaa is C or S
  MOD_RES (15), (16), (17), (18), (19): Xaa is A or G
  MOD_RES (20), (21), (22), (23): Xaa is A or G or is absent
XVPTELEPLPMVYYXXXXXXXXXEQLSNEMVVEGXGXR

SEQ ID NO: 15052 - protein, 42 aa, Artificial Sequence
  GFR-binding peptide
  MOD_RES (4), (5), (39), (41): Xaa is C or S
  MOD_RES (19), (20), (21), (22), (23): Xaa is A or G
  MOD_RES (24), (25), (26), (27): Xaa is A or G or is absent
PKAXXVPTELEPLTMLYYXXXXXXXXXEQLSNEMVVEGXGXR

SEQ ID NO: 15053 - protein, 37 aa, Artificial Sequence
  GFR-binding peptide
  MOD_RES (2), (36): Xaa is C or S
  MOD_RES (16), (17), (18), (19), (20): Xaa is A or G
  MOD_RES (21), (22), (23), (24): Xaa is A or G or is absent
TXAPTKLSPISVLFIXXXXXXXXXYKQYENMVVRSXG

SEQ ID NO: 15054 - protein, 36 aa, Artificial Sequence; identical to SEQ ID NO: 7752
  GFR-binding peptide
  MOD_RES (2), (3), (36): Xaa is C or S
  MOD_RES (17), (18), (19), (20), (21): Xaa is A or G
  MOD_RES (22), (23), (24), (25): Xaa is A or G or is absent

SEQ ID NO: 15055 - protein, 35 aa, Artificial Sequence
  GFR-binding peptide
  MOD_RES (34), (34): Xaa is C or S
  MOD_RES (14), (15), (16), (17), (18): Xaa is A or G
  MOD_RES (19), (20), (21), (22): Xaa is A or G or is absent
APTKLSPISVLFIXXXXXXXXXYKQYENMVVRSXG

SEQ ID NO: 15056 - protein, 41 aa, Artificial Sequence
  GFR-binding peptide
  MOD_RES (5), (6), (40): Xaa is C or S
  MOD_RES (20), (21), (22), (23), (24): Xaa is A or G
  MOD_RES (25), (26), (27), (28): Xaa is A or G or is absent
VPKPXXAPTQLSPISVLFIXXXXXXXXXYKQYENMVVRAXG

SEQ ID NO: 15057 - protein, 39 aa, Artificial Sequence
  GFR-binding peptide
  MOD_RES (4), (5), (37), (39): Xaa is C or S
PPTXXVPTRLEPLPIVYYDSANNVVEQLSNDMVVESXGX

SEQ ID NO: 15058 - protein, 41 aa, Artificial Sequence
  GFR-binding peptide
  MOD_RES (4), (5), (39), (41): Xaa is C or S
  MOD_RES (19), (20), (21), (22), (23): Xaa is A or G
  MOD_RES (24), (25), (26), (27): Xaa is A or G or is absent
PPTXXVPTRLSPISILFIXXXXXXXXXYKQYEDMVVESXGX

SEQ ID NO: 15059 - protein, 40 aa, Artificial Sequence
  GFR-binding peptide
  MOD_RES (5), (6), (39): Xaa is C or S
  MOD_RES (20), (21), (22), (23), (24): Xaa is A or G
  MOD_RES (25), (26), (27), (28): Xaa is A or G or is absent
SASPXXVSQDLEPLPIVYYXXXXXXXXXEQLSNMIVKSXK

SEQ ID NO: 15060 - protein, 38 aa, Artificial Sequence
  GFR-binding peptide
  MOD_RES (3), (4), (38): Xaa is C or S
  MOD_RES (18), (19), (20), (21), (22): Xaa is A or G
  MOD_RES (23), (24), (25), (26): Xaa is A or G or is absent
KAXXVPTELEPLTMLYYXXXXXXXXXEQLSNDMVVEGX

SEQ ID NO: 15061 - protein, 39 aa, Artificial Sequence; identical to SEQ ID NO: 7756
  GFR-binding peptide
  MOD_RES (5), (39): Xaa is C or S
  MOD_RES (19), (20), (21), (22), (23): Xaa is A or G
  MOD_RES (24), (25), (26), (27): Xaa is A or G or is absent

SEQ ID NO: 15062 - protein, 38 aa, Artificial Sequence
  GFR-binding peptide
  MOD_RES (2), (3), (37): Xaa is C or S
  MOD_RES (17), (18), (19), (20), (21): Xaa is A or G
  MOD_RES (22), (23), (24), (25): Xaa is A or G or is absent
TXXVPTRLSPISILFIXXXXXXXXXYKQYEDMVVESXG

SEQ ID NO: 15063 - protein, 34 aa, Artificial Sequence
  GFR-binding peptide
  MOD_RES (2), (3): Xaa is C or S
TXXVPTRLEPLTILYYDSANNVVEQLSNDMVVES

SEQ ID NO: 15064 - protein, 39 aa, Artificial Sequence
  GFR-binding peptide
  MOD_RES (6), (6): Xaa is C or S
  MOD_RES (20), (21), (22), (23), (24): Xaa is A or G
  MOD_RES (25), (26), (27), (28): Xaa is A or G or is absent
VTKPTXAPTKLEPLTVLYYXXXXXXXXXEQLSNNMVVRS

SEQ ID NO: 15065 - protein, 34 aa, Artificial Sequence
  GFR-binding peptide
  MOD_RES (3), (4): Xaa is C or S
KPXXAPTKLEPLTVLYYDDSSNVIEQLSNNMVVR

SEQ ID NO: 15066 - protein, 31 aa, Artificial Sequence
  GFR-binding peptide
  MOD_RES (1), (1): Xaa is C or S
XAPTKLEPLTVLYYDDSSNVIEQLSNNMVVR

SEQ ID NO: 15067 - protein, 33 aa, Artificial Sequence
  GFR-binding peptide
  MOD_RES (1), (2): Xaa is C or S
XXVPTELSPISMLFIDEYDKVVYKQYEEMVVEG

SEQ ID NO: 15068 - protein, 39 aa, Artificial Sequence; identical to SEQ ID NO: 7767
  GFR-binding peptide
  MOD_RES (4), (5), (37), (39): Xaa is C or S

SEQ ID NO: 15069 - protein, 40 aa, Artificial Sequence; identical to SEQ ID NO: 7768
  GFR-binding peptide
  MOD_RES (3), (4), (38), (40): Xaa is C or S
  MOD_RES (18), (19), (20), (21), (22): Xaa is A or G
  MOD_RES (23), (24), (25), (26): Xaa is A or G or is absent

SEQ ID NO: 15070 - protein, 34 aa, Artificial Sequence
  GFR-binding peptide
  MOD_RES (32), (34): Xaa is C or S
APTQLEPLTVLYYDDSSNVIEQLSNNMVVRAXGX

SEQ ID NO: 15071 - protein, 38 aa, Artificial Sequence
  GFR-binding peptide
  MOD_RES (3), (4), (36), (38): Xaa is C or S
PTXXVPTRLEPLPIVYYDSANNVVEQLSNDMVVESXGX

SEQ ID NO: 15072 - protein, 38 aa, Artificial Sequence
  GFR-binding peptide
  MOD_RES (2), (3), (37): Xaa is C or S
  MOD_RES (17), (18), (19), (20), (21): Xaa is A or G
  MOD_RES (22), (23), (24), (25): Xaa is A or G or is absent
AXXVPTELSPISMLFIXXXXXXXXXYKQYEDMVVEGXG

SEQ ID NO: 15073 - protein, 38 aa, Artificial Sequence
  GFR-binding peptide
  MOD_RES (1), (35), (37): Xaa is C or S
  MOD_RES (15), (16), (17), (18), (19): Xaa is A or G
  MOD_RES (20), (21), (22), (23): Xaa is A or G or is absent
XVPTELEPLTMLYYXXXXXXXXXEQLSNDMVVEGXGXR

SEQ ID NO: 15074 - protein, 34 aa, Artificial Sequence
  GFR-binding peptide
  MOD_RES (2), (3): Xaa is C or S
PXXAPTKLSPISVLFIDDSSNVIYKQYENMVVRS

SEQ ID NO: 15075 - protein, 40 aa, Artificial Sequence
  GFR-binding peptide
  MOD_RES (4), (5), (37), (39): Xaa is C or S
PKAXXVPTELSPISMLFIDENEKVVYKQYEDMVVEGXGXR

SEQ ID NO: 15076 - protein, 40 aa, Artificial Sequence
  GFR-binding peptide
  MOD_RES (4), (5), (39): Xaa is C or S
  MOD_RES (19), (20), (21), (22), (23): Xaa is A or G
  MOD_RES (24), (25), (26), (27): Xaa is A or G or is absent
PKAXXVPTELSPISMLFIXXXXXXXXXYKQYEEMVVEGXG

SEQ ID NO: 15077 - protein, 36 aa, Artificial Sequence; identical to SEQ ID NO: 7771
  GFR-binding peptide
  MOD_RES (4), (5), (36): Xaa is C or S

SEQ ID NO: 15078 - protein, 43 aa, Artificial Sequence
  GFR-binding peptide
  MOD_RES (5), (6), (40), (42): Xaa is C or S
  MOD_RES (20), (21), (22), (23), (24): Xaa is A or G
  MOD_RES (25), (26), (27), (28): Xaa is A or G or is absent
VPKPXXAPTQLSPISVLFIXXXXXXXXXYKQYENMVVRAXGXH

SEQ ID NO: 15079 - protein, 38 aa, Artificial Sequence
  GFR-binding peptide
  MOD_RES (4), (5), (37): Xaa is C or S
PKAXXVPTELEPLTMLYYDENEKVVEQLSNDMVVEGXG

SEQ ID NO: 15080 - protein, 37 aa, Artificial Sequence
  GFR-binding peptide
  MOD_RES (3), (4), (35), (37): Xaa is C or S
SPXXVSQDLSPISILFIIGKTPKIYKQYEMIVKSXKX

SEQ ID NO: 15081 - protein, 37 aa, Artificial Sequence
  GFR-binding peptide
  MOD_RES (34), (36): Xaa is C or S
  MOD_RES (14), (15), (16), (17), (18): Xaa is A or G
  MOD_RES (19), (20), (21), (22): Xaa is A or G or is absent
VPTRLSPISILFIXXXXXXXXXYKQYEDMVVESXGXR

SEQ ID NO: 15082 - protein, 34 aa, Artificial Sequence; identical to SEQ ID NO: 7777
  GFR-binding peptide
  MOD_RES (33), (33): Xaa is C or S
  MOD_RES (14), (15), (16), (17), (18): Xaa is A or G
  MOD_RES (19), (20), (21), (22): Xaa is A or G or is absent

SEQ ID NO: 15083 - protein, 38 aa, Artificial Sequence; identical to SEQ ID NO: 7778
  GFR-binding peptide
  MOD_RES (3), (4), (36), (38): Xaa is C or S

SEQ ID NO: 15084 - protein, 34 aa, Artificial Sequence
  GFR-binding peptide
  MOD_RES (1), (2), (33): Xaa is C or S
XXVPQDLEPLPIVYYVGRTPKVEQLSNMVVKSXK

SEQ ID NO: 15085 - protein, 37 aa, Artificial Sequence; identical to SEQ ID NO: 7780
  GFR-binding peptide
  MOD_RES (5), (6), (37): Xaa is C or S

SEQ ID NO: 15086 - protein, 39 aa, Artificial Sequence; identical to SEQ ID NO: 7781
  GFR-binding peptide
  MOD_RES (4), (5), (39): Xaa is C or S
  MOD_RES (19), (20), (21), (22), (23): Xaa is A or G
  MOD_RES (24), (25), (26), (27): Xaa is A or G or is absent

SEQ ID NO: 15087 - protein, 39 aa, Artificial Sequence
  GFR-binding peptide
  MOD_RES (3), (4), (36), (38): Xaa is C or S
PTXXVPTRLNAISILYFDSANNVVLKKYRDMVVESXGXR

SEQ ID NO: 15088 - protein, 39 aa, Artificial Sequence
  GFR-binding peptide
  MOD_RES (3), (4), (38): Xaa is C or S
  MOD_RES (18), (19), (20), (21), (22): Xaa is A or G
  MOD_RES (23), (24), (25), (26): Xaa is A or G or is absent
KAXXVPTELSPISMLFIXXXXXXXXXYKQYEEMVVEGXG

SEQ ID NO: 15089 - protein, 34 aa, Artificial Sequence; identical to SEQ ID NO: 7784
  GFR-binding peptide
  MOD_RES (2), (2): Xaa is C or S
  MOD_RES (16), (17), (18), (19), (20): Xaa is A or G
  MOD_RES (21), (22), (23), (24): Xaa is A or G or is absent

SEQ ID NO: 15090 - protein, 34 aa, Artificial Sequence
  GFR-binding peptide
  MOD_RES (1), (2): Xaa is C or S
  MOD_RES (16), (17), (18), (19), (20): Xaa is A or G
  MOD_RES (21), (22), (23), (24): Xaa is A or G or is absent
XXVPTRLSAISILYLXXXXXXXXXLKNYQDMVVE

SEQ ID NO: 15091 - protein, 35 aa, Artificial Sequence
  GFR-binding peptide
  MOD_RES (3), (4), (35): Xaa is C or S
SPXXVPQDLEPLPIVYYVGRTPKVEQLSNMVVKSX

SEQ ID NO: 15092 - protein, 37 aa, Artificial Sequence
  GFR-binding peptide
  MOD_RES (5), (5): Xaa is C or S
  MOD_RES (19), (20), (21), (22), (23): Xaa is A or G
  MOD_RES (24), (25), (26), (27): Xaa is A or G or is absent
TKPTXAPTKLSPISVLFIXXXXXXXXXYKQYENMVVR

SEQ ID NO: 15093 - protein, 41 aa, Artificial Sequence
  GFR-binding peptide
  MOD_RES (5), (6), (40): Xaa is C or S
  MOD_RES (20), (21), (22), (23), (24): Xaa is A or G
  MOD_RES (25), (26), (27), (28): Xaa is A or G or is absent
IPKAXXVPTELSPISMLFIXXXXXXXXXYKQYEDMVVEGXG

SEQ ID NO: 15094 - protein, 42 aa, Artificial Sequence
  GFR-binding peptide
  MOD_RES (5), (6), (40), (42): Xaa is C or S
  MOD_RES (20), (21), (22), (23), (24): Xaa is A or G
  MOD_RES (25), (26), (27), (28): Xaa is A or G or is absent
TPPTXXVPTRLEPLPIVYYXXXXXXXXXEQLSNDMVVESXGX

SEQ ID NO: 15095 - protein, 37 aa, Artificial Sequence; identical to SEQ ID NO: 7787
  GFR-binding peptide
  MOD_RES (1), (2), (36): Xaa is C or S
  MOD_RES (16), (17), (18), (19), (20): Xaa is A or G
  MOD_RES (21), (22), (23), (24): Xaa is A or G or is absent

SEQ ID NO: 15096 - protein, 34 aa, Artificial Sequence
  GFR-binding peptide
  MOD_RES (1), (33): Xaa is C or S
XAPTKLEPLPVVYYDDSSNVIEQLSNNMVVRSXG

SEQ ID NO: 15097 - protein, 35 aa, Artificial Sequence
  GFR-binding peptide
  MOD_RES (4), (5): Xaa is C or S
PKPXXAPTKLEPLTVLYYDDSSNVIEQLSNNMVVR

SEQ ID NO: 15098 - protein, 36 aa, Artificial Sequence
  GFR-binding peptide
  MOD_RES (1), (2), (34), (36): Xaa is C or S
XXVPTELEPLPMVYYDEYDKVVEQLSNEMVVEGXGX

SEQ ID NO: 15099 - protein, 32 aa, Artificial Sequence
  GFR-binding peptide
  MOD_RES (14), (15), (16), (17), (18): Xaa is A or G
  MOD_RES (19), (20), (21), (22): Xaa is A or G or is absent
VPQALEPLPIVYYXXXXXXXXXEQLSNMIVRS

SEQ ID NO: 15100 - protein, 39 aa, Artificial Sequence
  GFR-binding peptide
  MOD_RES (4), (5), (38): Xaa is C or S
  MOD_RES (19), (20), (21), (22), (23): Xaa is A or G
  MOD_RES (24), (25), (26), (27): Xaa is A or G or is absent
ASPXXVSQDLEPLPIVYYXXXXXXXXXEQLSNMIVKSXK

SEQ ID NO: 15101 - protein, 41 aa, Artificial Sequence; identical to SEQ ID NO: 7793
  GFR-binding peptide
  MOD_RES (4), (5), (39), (41): Xaa is C or S
  MOD_RES (19), (20), (21), (22), (23): Xaa is A or G
  MOD_RES (24), (25), (26), (27): Xaa is A or G or is absent

SEQ ID NO: 15102 - protein, 41 aa, Artificial Sequence
  GFR-binding peptide
  MOD_RES (6), (40): Xaa is C or S
  MOD_RES (20), (21), (22), (23), (24): Xaa is A or G
  MOD_RES (25), (26), (27), (28): Xaa is A or G or is absent
VTKPTXAPTKLSPISVLFIXXXXXXXXXYKQYENMVVRSXG

SEQ ID NO: 15103 - protein, 38 aa, Artificial Sequence
  GFR-binding peptide
  MOD_RES (2), (3), (35), (37): Xaa is C or S
TXXVPTRLNAISILYFDSANNVVLKKYRDMVVESXGXR

SEQ ID NO: 15104 - protein, 42 aa, Artificial Sequence
  GFR-binding peptide
  MOD_RES (6), (7), (41): Xaa is C or S
  MOD_RES (21), (22), (23), (24), (25): Xaa is A or G
  MOD_RES (26), (27), (28), (29): Xaa is A or G or is absent
YVPKPXXAPTKLEPLPVVYYXXXXXXXXXEQLSNNMVVRSXG

SEQ ID NO: 15105 - protein, 33 aa, Artificial Sequence
  GFR-binding peptide
  MOD_RES (1), (2), (33): Xaa is C or S
XXVPQDLSPISILFIVGRTPKVYKQYEMVVKSX

SEQ ID NO: 15106 - protein, 37 aa, Artificial Sequence
  GFR-binding peptide
  MOD_RES (4), (5): Xaa is C or S
  MOD_RES (19), (20), (21), (22), (23): Xaa is A or G
  MOD_RES (24), (25), (26), (27): Xaa is A or G or is absent
AAPXXVPQALEPLTILYYXXXXXXXXXEQLSNMIVRS

SEQ ID NO: 15107 - protein, 43 aa, Artificial Sequence
  GFR-binding peptide
  MOD_RES (6), (7), (40), (42): Xaa is C or S
  MOD_RES (21), (22), (23), (24), (25): Xaa is A or G
  MOD_RES (26), (27), (28), (29): Xaa is A or G or is absent
ASASPXXVPQDLSPISILFIXXXXXXXXXYKQYEMVVKSXKXS

SEQ ID NO: 15108 - protein, 36 aa, Artificial Sequence
  GFR-binding peptide
  MOD_RES (2), (3): Xaa is C or S
  MOD_RES (17), (18), (19), (20), (21): Xaa is A or G
  MOD_RES (22), (23), (24), (25): Xaa is A or G or is absent
TXXVPTRLSAISILYLXXXXXXXXXLKNYQDMVVES

SEQ ID NO: 15109 - protein, 44 aa, Artificial Sequence
  GFR-binding peptide
  MOD_RES (6), (7), (41), (43): Xaa is C or S
  MOD_RES (21), (22), (23), (24), (25): Xaa is A or G
  MOD_RES (26), (27), (28), (29): Xaa is A or G or is absent
STPPTXXVPTRLSAISILYLXXXXXXXXXLKNYQDMVVESXGXR

SEQ ID NO: 15110 - protein, 37 aa, Artificial Sequence
  GFR-binding peptide
  MOD_RES (4), (5): Xaa is C or S
  MOD_RES (19), (20), (21), (22), (23): Xaa is A or G
  MOD_RES (24), (25), (26), (27): Xaa is A or G or is absent
PKPXXAPTQLEPLPVVYYXXXXXXXXXEQLSNNMVVR

SEQ ID NO: 15111 - protein, 38 aa, Artificial Sequence
  GFR-binding peptide
  MOD_RES (3), (4), (38): Xaa is C or S
  MOD_RES (18), (19), (20), (21), (22): Xaa is A or G
  MOD_RES (23), (24), (25), (26): Xaa is A or G or is absent
KPXXAPTKLEPLTVLYYXXXXXXXXXEQLSNNMVVRSX

SEQ ID NO: 15112 - protein, 35 aa, Artificial Sequence
  GFR-binding peptide
  MOD_RES (2), (34): Xaa is C or S
TXAPTKLSPISVLFIDDSSNVIYKQYENMVVRSXG

SEQ ID NO: 15113 - protein, 41 aa, Artificial Sequence
  GFR-binding peptide
  MOD_RES (3), (4), (38), (40): Xaa is C or S
  MOD_RES (18), (19), (20), (21), (22): Xaa is A or G
  MOD_RES (23), (24), (25), (26): Xaa is A or G or is absent
PTXXVPTRLSPISILFIXXXXXXXXXYKQYEDMVVESXGXR

SEQ ID NO: 15114 - protein, 38 aa, Artificial Sequence
  GFR-binding peptide
  MOD_RES (1), (2), (35), (37): Xaa is C or S
  MOD_RES (16), (17), (18), (19), (20): Xaa is A or G
  MOD_RES (21), (22), (23), (24): Xaa is A or G or is absent
XXVPQALSPISILFIXXXXXXXXXYKQYEMIVRSXKXS

SEQ ID NO: 15115 - protein, 42 aa, Artificial Sequence; identical to SEQ ID NO: 7801
  GFR-binding peptide
  MOD_RES (4), (5), (39), (41): Xaa is C or S
  MOD_RES (19), (20), (21), (22), (23): Xaa is A or G
  MOD_RES (24), (25), (26), (27): Xaa is A or G or is absent

SEQ ID NO: 15116 - protein, 40 aa, Artificial Sequence; identical to SEQ ID NO: 7806
  GFR-binding peptide
  MOD_RES (2), (3), (37), (39): Xaa is C or S
  MOD_RES (17), (18), (19), (20), (21): Xaa is A or G
  MOD_RES (22), (23), (24), (25): Xaa is A or G or is absent

SEQ ID NO: 15117 - protein, 37 aa, Artificial Sequence
  GFR-binding peptide
  MOD_RES (4), (5): Xaa is C or S
  MOD_RES (19), (20), (21), (22), (23): Xaa is A or G
  MOD_RES (24), (25), (26), (27): Xaa is A or G or is absent
PKAXXVPTELSPISMLFIXXXXXXXXXYKQYEEMVVE

SEQ ID NO: 15118 - protein, 35 aa, Artificial Sequence
  GFR-binding peptide
  MOD_RES (3), (4): Xaa is C or S
KAXXVPTELEPLPMVYYDENEKVVEQLSNDMVVEG

SEQ ID NO: 15119 - protein, 34 aa, Artificial Sequence
  GFR-binding peptide
  MOD_RES (2), (2): Xaa is C or S
  MOD_RES (16), (17), (18), (19), (20): Xaa is A or G
  MOD_RES (21), (22), (23), (24): Xaa is A or G or is absent
TXAPTKLSPISVLFIXXXXXXXXXYKQYENMVVR

SEQ ID NO: 15120 - protein, 40 aa, Artificial Sequence
  GFR-binding peptide
  MOD_RES (5), (6), (37), (39): Xaa is C or S
SAAPXXVPQALEPLTILYYVGRKPKVEQLSNMIVRSXKXS

SEQ ID NO: 15121 - protein, 40 aa, Artificial Sequence; identical to SEQ ID NO: 7808
  GFR-binding peptide
  MOD_RES (5), (6), (40): Xaa is C or S
  MOD_RES (20), (21), (22), (23), (24): Xaa is A or G
  MOD_RES (25), (26), (27), (28): Xaa is A or G or is absent

SEQ ID NO: 15122 - protein, 40 aa, Artificial Sequence; identical to SEQ ID NO: 7809
  GFR-binding peptide
  MOD_RES (5), (6), (39): Xaa is C or S
  MOD_RES (20), (21), (22), (23), (24): Xaa is A or G
  MOD_RES (25), (26), (27), (28): Xaa is A or G or is absent

SEQ ID NO: 15123 - protein, 41 aa, Artificial Sequence
  GFR-binding peptide
  MOD_RES (4), (5), (39), (41): Xaa is C or S
  MOD_RES (19), (20), (21), (22), (23): Xaa is A or G
  MOD_RES (24), (25), (26), (27): Xaa is A or G or is absent
PKPXXAPTKLSPISVLFIXXXXXXXXXYKQYENMVVRSXGX

SEQ ID NO: 15124 - protein, 36 aa, Artificial Sequence
  GFR-binding peptide
  MOD_RES (2), (3), (36): Xaa is C or S
  MOD_RES (17), (18), (19), (20), (21): Xaa is A or G
  MOD_RES (22), (23), (24), (25): Xaa is A or G or is absent
PXXVPQDLEPLPIVYYXXXXXXXXXEQLSNMVVKSX

SEQ ID NO: 15125 - protein, 35 aa, Artificial Sequence; identical to SEQ ID NO: 7816
  GFR-binding peptide
  MOD_RES (33), (35): Xaa is C or S
  MOD_RES (14), (15), (16), (17), (18): Xaa is A or G
  MOD_RES (19), (20), (21), (22): Xaa is A or G or is absent

SEQ ID NO: 15126 - protein, 38 aa, Artificial Sequence; identical to SEQ ID NO: 7817
  GFR-binding peptide
  MOD_RES (2), (3), (35), (37): Xaa is C or S

SEQ ID NO: 15127 - protein, 39 aa, Artificial Sequence
  GFR-binding peptide
  MOD_RES (6), (7): Xaa is C or S
  MOD_RES (21), (22), (23), (24), (25): Xaa is A or G
  MOD_RES (26), (27), (28), (29): Xaa is A or G or is absent
ASASPXXVPQDLSPISILFIXXXXXXXXXYKQYEMVVKS

SEQ ID NO: 15128 - protein, 36 aa, Artificial Sequence; identical to SEQ ID NO: 7818
  GFR-binding peptide
  MOD_RES (33), (35): Xaa is C or S
  MOD_RES (14), (15), (16), (17), (18): Xaa is A or G
  MOD_RES (19), (20), (21), (22): Xaa is A or G or is absent

SEQ ID NO: 15129 - protein, 35 aa, Artificial Sequence; identical to SEQ ID NO: 7819
  GFR-binding peptide
  MOD_RES (2), (34): Xaa is C or S

SEQ ID NO: 15130 - protein, 38 aa, Artificial Sequence
  GFR-binding peptide
  MOD_RES (4), (5), (37): Xaa is C or S
PKAXXVPTELSPISMLFIDENEKVVYKQYEDMVVEGXG

SEQ ID NO: 15131 - protein, 33 aa, Artificial Sequence
  GFR-binding peptide
  MOD_RES (1), (1): Xaa is C or S
  MOD_RES (15), (16), (17), (18), (19): Xaa is A or G
  MOD_RES (20), (21), (22), (23): Xaa is A or G or is absent
XVPTELEPLTMLYYXXXXXXXXXEQLSNEMVVE

SEQ ID NO: 15132 - protein, 33 aa, Artificial Sequence
  GFR-binding peptide
  MOD_RES (1), (33): Xaa is C or S
XVPTRLSAISILYLDSANNVVLKNYQDMVVESX

SEQ ID NO: 15133 - protein, 38 aa, Artificial Sequence
  GFR-binding peptide
  MOD_RES (3), (37): Xaa is C or S
  MOD_RES (17), (18), (19), (20), (21): Xaa is A or G
  MOD_RES (22), (23), (24), (25): Xaa is A or G or is absent
PTXAPTKLSPISVLFIXXXXXXXXXYKQYENMVVRSXG

SEQ ID NO: 15134 - protein, 34 aa, Artificial Sequence
  GFR-binding peptide
  MOD_RES (1), (2): Xaa is C or S
  MOD_RES (16), (17), (18), (19), (20): Xaa is A or G
  MOD_RES (21), (22), (23), (24): Xaa is A or G or is absent
XXVPTELEPLTMLYYXXXXXXXXXEQLSNDMVVE

SEQ ID NO: 15135 - protein, 39 aa, Artificial Sequence
  GFR-binding peptide
  MOD_RES (4), (5), (38): Xaa is C or S
  MOD_RES (19), (20), (21), (22), (23): Xaa is A or G
  MOD_RES (24), (25), (26), (27): Xaa is A or G or is absent
AAPXXVPQALEPLPIVYYXXXXXXXXXEQLSNMIVRSXK

SEQ ID NO: 15136 - protein, 32 aa, Artificial Sequence; identical to SEQ ID NO: 7823
  GFR-binding peptide
  MOD_RES (31), (31): Xaa is C or S

SEQ ID NO: 15137 - protein, 33 aa, Artificial Sequence; identical to SEQ ID NO: 7824
  GFR-binding peptide
  MOD_RES (1), (1): Xaa is C or S
  MOD_RES (15), (16), (17), (18), (19): Xaa is A or G
  MOD_RES (20), (21), (22), (23): Xaa is A or G or is absent

SEQ ID NO: 15138 - protein, 41 aa, Artificial Sequence
  GFR-binding peptide
  MOD_RES (5), (6), (38), (40): Xaa is C or S
VPKPXXAPTKLEPLPVVYYDDSSNVIEQLSNNMVVRSXGXH

SEQ ID NO: 15139 - protein, 36 aa, Artificial Sequence
  GFR-binding peptide
  MOD_RES (1), (2), (35): Xaa is C or S
  MOD_RES (16), (17), (18), (19), (20): Xaa is A or G
  MOD_RES (21), (22), (23), (24): Xaa is A or G or is absent
XXVPQALEPLTILYYXXXXXXXXXEQLSNMIVRSXK

SEQ ID NO: 15140 - protein, 40 aa, Artificial Sequence; identical to SEQ ID NO: 7829
  GFR-binding peptide
  MOD_RES (2), (3), (37), (39): Xaa is C or S
  MOD_RES (17), (18), (19), (20), (21): Xaa is A or G
  MOD_RES (22), (23), (24), (25): Xaa is A or G or is absent

SEQ ID NO: 15141 - protein, 40 aa, Artificial Sequence
  GFR-binding peptide
  MOD_RES (3), (4), (38), (40): Xaa is C or S
  MOD_RES (18), (19), (20), (21), (22): Xaa is A or G
  MOD_RES (23), (24), (25), (26): Xaa is A or G or is absent
KPXXAPTQLEPLTVLYYXXXXXXXXXEQLSNNMVVRAXGX

SEQ ID NO: 15142 - protein, 39 aa, Artificial Sequence
  GFR-binding peptide
  MOD_RES (5), (6), (38): Xaa is C or S
IPKAXXVPTELEPLPMVYYDEYDKVVEQLSNEMVVEGXG

SEQ ID NO: 15143 - protein, 39 aa, Artificial Sequence; identical to SEQ ID NO: 7832
  GFR-binding peptide
  MOD_RES (4), (5), (39): Xaa is C or S
  MOD_RES (19), (20), (21), (22), (23): Xaa is A or G
  MOD_RES (24), (25), (26), (27): Xaa is A or G or is absent

SEQ ID NO: 15144 - protein, 32 aa, Artificial Sequence
  GFR-binding peptide
  MOD_RES (32), (32): Xaa is C or S
VPTRLSAISILYLDSANNVVLKNYQDMVVESX

SEQ ID NO: 15145 - protein, 43 aa, Artificial Sequence
  GFR-binding peptide
  MOD_RES (6), (7), (41), (43): Xaa is C or S
  MOD_RES (21), (22), (23), (24), (25): Xaa is A or G
  MOD_RES (26), (27), (28), (29): Xaa is A or G or is absent
SIPKAXXVPTELEPLTMLYYXXXXXXXXXEQLSNEMVVEGXGX

SEQ ID NO: 15146 - protein, 39 aa, Artificial Sequence
  GFR-binding peptide
  MOD_RES (6), (6): Xaa is C or S
  MOD_RES (20), (21), (22), (23), (24): Xaa is A or G
  MOD_RES (25), (26), (27), (28): Xaa is A or G or is absent
VTKPTXAPTKLEPLPVVYYXXXXXXXXXEQLSNNMVVRS

SEQ ID NO: 15147 - protein, 38 aa, Artificial Sequence
  GFR-binding peptide
  MOD_RES (2), (3), (37): Xaa is C or S
  MOD_RES (17), (18), (19), (20), (21): Xaa is A or G
  MOD_RES (22), (23), (24), (25): Xaa is A or G or is absent
PXXAPTKLEPLPVVYYXXXXXXXXXEQLSNNMVVRSXG

SEQ ID NO: 15148 - protein, 44 aa, Artificial Sequence
  GFR-binding peptide
  MOD_RES (6), (7), (41), (43): Xaa is C or S
  MOD_RES (21), (22), (23), (24), (25): Xaa is A or G
  MOD_RES (26), (27), (28), (29): Xaa is A or G or is absent
SIPKAXXVPTELEPLTMLYYXXXXXXXXXEQLSNEMVVEGXGXR

SEQ ID NO: 15149 - protein, 35 aa, Artificial Sequence; identical to SEQ ID NO: 7839
  GFR-binding peptide
  MOD_RES (2), (3): Xaa is C or S
  MOD_RES (17), (18), (19), (20), (21): Xaa is A or G
  MOD_RES (22), (23), (24), (25): Xaa is A or G or is absent

SEQ ID NO: 15150 - protein, 34 aa, Artificial Sequence
  GFR-binding peptide
  MOD_RES (2), (3): Xaa is C or S
AXXVPTELEPLTMLYYDENEKVVEQLSNDMVVEG

SEQ ID NO: 15151 - protein, 37 aa, Artificial Sequence
  GFR-binding peptide
  MOD_RES (4), (5), (37): Xaa is C or S
PKPXXAPTKLSPISVLFIDDSSNVIYKQYENMVVRSX

SEQ ID NO: 15152 - protein, 36 aa, Artificial Sequence; identical to SEQ ID NO: 7843
  GFR-binding peptide
  MOD_RES (34), (36): Xaa is C or S
  MOD_RES (14), (15), (16), (17), (18): Xaa is A or G
  MOD_RES (19), (20), (21), (22): Xaa is A or G or is absent

SEQ ID NO: 15153 - protein, 38 aa, Artificial Sequence; identical to SEQ ID NO: 7844
  GFR-binding peptide
  MOD_RES (4), (5): Xaa is C or S
  MOD_RES (19), (20), (21), (22), (23): Xaa is A or G
  MOD_RES (24), (25), (26), (27): Xaa is A or G or is absent

SEQ ID NO: 15154 - protein, 30 aa, Artificial Sequence; identical to SEQ ID NO: 7845
  GFR-binding peptide

SEQ ID NO: 15155 - protein, 32 aa, Artificial Sequence
  GFR-binding peptide
  MOD_RES (14), (15), (16), (17), (18): Xaa is A or G
  MOD_RES (19), (20), (21), (22): Xaa is A or G or is absent
VPQALEPLTILYYXXXXXXXXXEQLSNMIVRS

SEQ ID NO: 15156 - protein, 40 aa, Artificial Sequence
  GFR-binding peptide
  MOD_RES (4), (38), (40): Xaa is C or S
  MOD_RES (18), (19), (20), (21), (22): Xaa is A or G
  MOD_RES (23), (24), (25), (26): Xaa is A or G or is absent
KPTXAPTKLSPISVLFIXXXXXXXXXYKQYENMVVRSXGX

SEQ ID NO: 15157 - protein, 38 aa, Artificial Sequence; identical to SEQ ID NO: 7846
  GFR-binding peptide
  MOD_RES (1), (2), (36), (38): Xaa is C or S
  MOD_RES (16), (17), (18), (19), (20): Xaa is A or G
  MOD_RES (21), (22), (23), (24): Xaa is A or G or is absent

SEQ ID NO: 15158 - protein, 37 aa, Artificial Sequence
  GFR-binding peptide
  MOD_RES (4), (5): Xaa is C or S
  MOD_RES (19), (20), (21), (22), (23): Xaa is A or G
  MOD_RES (24), (25), (26), (27): Xaa is A or G or is absent
PKPXXAPTQLEPLTVLYYXXXXXXXXXEQLSNNMVVR

SEQ ID NO: 15159 - protein, 36 aa, Artificial Sequence; identical to SEQ ID NO: 7847
  GFR-binding peptide
  MOD_RES (3), (4): Xaa is C or S
  MOD_RES (18), (19), (20), (21), (22): Xaa is A or G
  MOD_RES (23), (24), (25), (26): Xaa is A or G or is absent

SEQ ID NO: 15160 - protein, 34 aa, Artificial Sequence
  GFR-binding peptide
  MOD_RES (1), (1): Xaa is C or S
  MOD_RES (15), (16), (17), (18), (19): Xaa is A or G
  MOD_RES (20), (21), (22), (23): Xaa is A or G or is absent
XVPTELSPISMLFIXXXXXXXXXYKQYEDMVVEG

SEQ ID NO: 15161 - protein, 38 aa, Artificial Sequence
  GFR-binding peptide
  MOD_RES (1), (35), (37): Xaa is C or S
  MOD_RES (15), (16), (17), (18), (19): Xaa is A or G
  MOD_RES (20), (21), (22), (23): Xaa is A or G or is absent
XVPTELSPISMLFIXXXXXXXXXYKQYEEMVVEGXGXR

SEQ ID NO: 15162 - protein, 40 aa, Artificial Sequence; identical to SEQ ID NO: 7854
  GFR-binding peptide
  MOD_RES (6), (7), (38), (40): Xaa is C or S

SEQ ID NO: 15163 - protein, 34 aa, Artificial Sequence; identical to SEQ ID NO: 7856
  GFR-binding peptide
  MOD_RES (1), (34): Xaa is C or S
  MOD_RES (15), (16), (17), (18), (19): Xaa is A or G
  MOD_RES (20), (21), (22), (23): Xaa is A or G or is absent

SEQ ID NO: 15164 - protein, 38 aa, Artificial Sequence; identical to SEQ ID NO: 7857
  GFR-binding peptide
  MOD_RES (6), (7), (38): Xaa is C or S

SEQ ID NO: 15165 - protein, 40 aa, Artificial Sequence
  GFR-binding peptide
  MOD_RES (2), (3), (37), (39): Xaa is C or S
  MOD_RES (17), (18), (19), (20), (21): Xaa is A or G
  MOD_RES (22), (23), (24), (25): Xaa is A or G or is absent
AXXVPTELEPLTMLYYXXXXXXXXXEQLSNEMVVEGXGXR

SEQ ID NO: 15166 - protein, 37 aa, Artificial Sequence
  GFR-binding peptide
  MOD_RES (1), (34), (36): Xaa is C or S
  MOD_RES (15), (16), (17), (18), (19): Xaa is A or G
  MOD_RES (20), (21), (22), (23): Xaa is A or G or is absent
XVPQDLEPLTILYYXXXXXXXXXEQLSNMVVKSXKXS

SEQ ID NO: 15167 - protein, 39 aa, Artificial Sequence; identical to SEQ ID NO: 7860
  GFR-binding peptide
  MOD_RES (5), (6), (37), (39): Xaa is C or S

SEQ ID NO: 15168 - protein, 31 aa, Artificial Sequence
  GFR-binding peptide
APTKLSPISVLFIDDSSNVIYKQYENMVVRS

SEQ ID NO: 15169 - protein, 34 aa, Artificial Sequence; identical to SEQ ID NO: 7863
  GFR-binding peptide
  MOD_RES (3), (4): Xaa is C or S

SEQ ID NO: 15170 - protein, 40 aa, Artificial Sequence
  GFR-binding peptide
  MOD_RES (6), (7), (39): Xaa is C or S
KIPKAXXVPTELSPISMLFIDENEKVVYKQYEDMVVEGXG

SEQ ID NO: 15171 - protein, 42 aa, Artificial Sequence; identical to SEQ ID NO: 7865
  GFR-binding peptide
  MOD_RES (5), (6), (40), (42): Xaa is C or S
  MOD_RES (20), (21), (22), (23), (24): Xaa is A or G
  MOD_RES (25), (26), (27), (28): Xaa is A or G or is absent

SEQ ID NO: 15172 - protein, 41 aa, Artificial Sequence; identical to SEQ ID NO: 7866
  GFR-binding peptide
  MOD_RES (5), (6), (40): Xaa is C or S
  MOD_RES (20), (21), (22), (23), (24): Xaa is A or G
  MOD_RES (25), (26), (27), (28): Xaa is A or G or is absent

SEQ ID NO: 15173 - protein, 34 aa, Artificial Sequence
  GFR-binding peptide
  MOD_RES (1), (34): Xaa is C or S
  MOD_RES (15), (16), (17), (18), (19): Xaa is A or G
  MOD_RES (20), (21), (22), (23): Xaa is A or G or is absent
XVPQDLEPLPIVYYXXXXXXXXXEQLSNMVVKSX

SEQ ID NO: 15174 - protein, 35 aa, Artificial Sequence
  GFR-binding peptide
  MOD_RES (32), (34): Xaa is C or S
VPTRLEPLPIVYYDSANNVVEQLSNDMVVESXGXR

SEQ ID NO: 15175 - protein, 40 aa, Artificial Sequence
  GFR-binding peptide
  MOD_RES (6), (7), (38), (40): Xaa is C or S
ASAAPXXVPQALEPLTILYYVGRKPKVEQLSNMIVRSXKX

SEQ ID NO: 15176 - protein, 33 aa, Artificial Sequence
  GFR-binding peptide
  MOD_RES (1), (32): Xaa is C or S
XVPQDLEPLPIVYYVGRTPKVEQLSNMVVKSXK

SEQ ID NO: 15177 - protein, 32 aa, Artificial Sequence
  GFR-binding peptide
  MOD_RES (1), (1): Xaa is C or S
XAPTQLSPISVLFIDDSSNVIYKQYENMVVRA

SEQ ID NO: 15178 - protein, 36 aa, Artificial Sequence; identical to SEQ ID NO: 7874
  GFR-binding peptide
  MOD_RES (1), (2), (33), (35): Xaa is C or S

SEQ ID NO: 15179 - protein, 36 aa, Artificial Sequence; identical to SEQ ID NO: 7875
  GFR-binding peptide
  MOD_RES (3), (4), (36): Xaa is C or S

SEQ ID NO: 15180 - protein, 34 aa, Artificial Sequence
  GFR-binding peptide
  MOD_RES (2), (3), (34): Xaa is C or S
PXXVPQALEPLTILYYVGRKPKVEQLSNMIVRSX

SEQ ID NO: 15181 - protein, 36 aa, Artificial Sequence; identical to SEQ ID NO: 7877
  GFR-binding peptide
  MOD_RES (5), (6): Xaa is C or S

SEQ ID NO: 15182 - protein, 37 aa, Artificial Sequence
  GFR-binding peptide
  MOD_RES (6), (7): Xaa is C or S
TVPKPXXAPTQLEPLTVLYYDDSSNVIEQLSNNMVVR

SEQ ID NO: 15183 - protein, 37 aa, Artificial Sequence
  GFR-binding peptide
  MOD_RES (5), (6): Xaa is C or S
VPKPXXAPTQLEPLPVVYYDDSSNVIEQLSNNMVVRA

SEQ ID NO: 15184 - protein, 35 aa, Artificial Sequence
  GFR-binding peptide
  MOD_RES (2), (3): Xaa is C or S
  MOD_RES (17), (18), (19), (20), (21): Xaa is A or G
  MOD_RES (22), (23), (24), (25): Xaa is A or G or is absent
TXXVPTRLEPLTILYYXXXXXXXXXEQLSNDMVVE

SEQ ID NO: 15185 - protein, 39 aa, Artificial Sequence
  GFR-binding peptide
  MOD_RES (4), (5), (39): Xaa is C or S
  MOD_RES (19), (20), (21), (22), (23): Xaa is A or G
  MOD_RES (24), (25), (26), (27): Xaa is A or G or is absent
PKAXXVPTELEPLTMLYYXXXXXXXXXEQLSNEMVVEGX

SEQ ID NO: 15186 - protein, 35 aa, Artificial Sequence; identical to SEQ ID NO: 7881
  GFR-binding peptide
  MOD_RES (4), (5): Xaa is C or S

SEQ ID NO: 15187 - protein, 32 aa, Artificial Sequence
  GFR-binding peptide
  MOD_RES (1), (1): Xaa is C or S
XVPTELEPLPMVYYDEYDKVVEQLSNEMVVEG

SEQ ID NO: 15188 - protein, 31 aa, Artificial Sequence
  GFR-binding peptide
VPTELSPISMLFIDENEKVVYKQYEDMVVEG

SEQ ID NO: 15189 - protein, 37 aa, Artificial Sequence; identical to SEQ ID NO: 7884
  GFR-binding peptide
  MOD_RES (5), (6), (37): Xaa is C or S

SEQ ID NO: 15190 - protein, 44 aa, Artificial Sequence
  GFR-binding peptide
  MOD_RES (6), (7), (41), (43): Xaa is C or S
  MOD_RES (21), (22), (23), (24), (25): Xaa is A or G
  MOD_RES (26), (27), (28), (29): Xaa is A or G or is absent
TVPKPXXAPTQLEPLTVLYYXXXXXXXXXEQLSNNMVVRAXGXH

SEQ ID NO: 15191 - protein, 37 aa, Artificial Sequence; identical to SEQ ID NO: 7888
  GFR-binding peptide
  MOD_RES (4), (5), (37): Xaa is C or S

SEQ ID NO: 15192 - protein, 41 aa, Artificial Sequence; identical to SEQ ID NO: 7889
  GFR-binding peptide
  MOD_RES (4), (5), (38), (40): Xaa is C or S
  MOD_RES (19), (20), (21), (22), (23): Xaa is A or G
  MOD_RES (24), (25), (26), (27): Xaa is A or G or is absent

SEQ ID NO: 15193 - protein, 36 aa, Artificial Sequence
  GFR-binding peptide
  MOD_RES (1), (35): Xaa is C or S
  MOD_RES (15), (16), (17), (18), (19): Xaa is A or G
  MOD_RES (20), (21), (22), (23): Xaa is A or G or is absent
XAPTQLEPLPVVYYXXXXXXXXXEQLSNNMVVRAXG

SEQ ID NO: 15194 - protein, 38 aa, Artificial Sequence
  GFR-binding peptide
  MOD_RES (4), (5), (37): Xaa is C or S
PKPXXAPTQLSPISVLFIDDSSNVIYKQYENMVVRAXG

SEQ ID NO: 15195 - protein, 40 aa, Artificial Sequence; identical to SEQ ID NO: 7898
  GFR-binding peptide
  MOD_RES (6), (7), (40): Xaa is C or S
  MOD_RES (21), (22), (23), (24), (25): Xaa is A or G
  MOD_RES (26), (27), (28), (29): Xaa is A or G or is absent

SEQ ID NO: 15196 - protein, 37 aa, Artificial Sequence
  GFR-binding peptide
  MOD_RES (2), (3), (35), (37): Xaa is C or S
AXXVPTELEPLPMVYYDENEKVVEQLSNDMVVEGXGX

SEQ ID NO: 15197 - protein, 34 aa, Artificial Sequence; identical to SEQ ID NO: 7901
  GFR-binding peptide
  MOD_RES (34), (34): Xaa is C or S
  MOD_RES (14), (15), (16), (17), (18): Xaa is A or G
  MOD_RES (19), (20), (21), (22): Xaa is A or G or is absent

SEQ ID NO: 15198 - protein, 32 aa, Artificial Sequence
  GFR-binding peptide
  MOD_RES (14), (15), (16), (17), (18): Xaa is A or G
  MOD_RES (19), (20), (21), (22): Xaa is A or G or is absent
VSQDLEPLPIVYYXXXXXXXXXEQLSNMIVKS

SEQ ID NO: 15199 - protein, 37 aa, Artificial Sequence
  GFR-binding peptide
  MOD_RES (4), (5), (36): Xaa is C or S
AAPXXVPQALEPLTILYYVGRKPKVEQLSNMIVRSXK

SEQ ID NO: 15200 - protein, 33 aa, Artificial Sequence
  GFR-binding peptide
  MOD_RES (1), (1): Xaa is C or S
  MOD_RES (15), (16), (17), (18), (19): Xaa is A or G
  MOD_RES (20), (21), (22), (23): Xaa is A or G or is absent
XVPQALEPLTILYYXXXXXXXXXEQLSNMIVRS

SEQ ID NO: 15201 - protein, 40 aa, Artificial Sequence; identical to SEQ ID NO: 7904
  GFR-binding peptide
  MOD_RES (6), (7), (40): Xaa is C or S
  MOD_RES (21), (22), (23), (24), (25): Xaa is A or G
  MOD_RES (26), (27), (28), (29): Xaa is A or G or is absent

SEQ ID NO: 15202 - protein, 33 aa, Artificial Sequence
  GFR-binding peptide
  MOD_RES (1), (1): Xaa is C or S
  MOD_RES (15), (16), (17), (18), (19): Xaa is A or G
  MOD_RES (20), (21), (22), (23): Xaa is A or G or is absent
XVSQDLEPLPIVYYXXXXXXXXXEQLSNMIVKS

SEQ ID NO: 15203 - protein, 39 aa, Artificial Sequence
  GFR-binding peptide
  MOD_RES (6), (6): Xaa is C or S
  MOD_RES (20), (21), (22), (23), (24): Xaa is A or G
  MOD_RES (25), (26), (27), (28): Xaa is A or G or is absent
VTKPTXAPTKLSPISVLFIXXXXXXXXXYKQYENMVVRS

SEQ ID NO: 15204 - protein, 39 aa, Artificial Sequence; identical to SEQ ID NO: 7911
  GFR-binding peptide
  MOD_RES (4), (36), (38): Xaa is C or S

SEQ ID NO: 15205 - protein, 40 aa, Artificial Sequence
  GFR-binding peptide
  MOD_RES (3), (4), (37), (39): Xaa is C or S
  MOD_RES (18), (19), (20), (21), (22): Xaa is A or G
  MOD_RES (23), (24), (25), (26): Xaa is A or G or is absent
SPXXVSQDLEPLPIVYYXXXXXXXXXEQLSNMIVKSXKXS

SEQ ID NO: 15206 - protein, 34 aa, Artificial Sequence
  GFR-binding peptide
  MOD_RES (2), (3): Xaa is C or S
TXXVPTRLSAISILYLDSANNVVLKNYQDMVVES

SEQ ID NO: 15207 - protein, 39 aa, Artificial Sequence
  GFR-binding peptide
  MOD_RES (2), (3), (36), (38): Xaa is C or S
  MOD_RES (17), (18), (19), (20), (21): Xaa is A or G
  MOD_RES (22), (23), (24), (25): Xaa is A or G or is absent
PXXVPQALSPISILFIXXXXXXXXXYKQYEMIVRSXKXS

SEQ ID NO: 15208 - protein, 35 aa, Artificial Sequence
  GFR-binding peptide
  MOD_RES (2), (3): Xaa is C or S
  MOD_RES (17), (18), (19), (20), (21): Xaa is A or G
  MOD_RES (22), (23), (24), (25): Xaa is A or G or is absent
PXXAPTQLSPISVLFIXXXXXXXXXYKQYENMVVR

SEQ ID NO: 15209 - protein, 39 aa, Artificial Sequence; identical to SEQ ID NO: 7920
  GFR-binding peptide
  MOD_RES (1), (2), (36), (38): Xaa is C or S
  MOD_RES (16), (17), (18), (19), (20): Xaa is A or G
  MOD_RES (21), (22), (23), (24): Xaa is A or G or is absent

SEQ ID NO: 15210 - protein, 35 aa, Artificial Sequence; identical to SEQ ID NO: 7921
  GFR-binding peptide
  MOD_RES (34), (34): Xaa is C or S
  MOD_RES (14), (15), (16), (17), (18): Xaa is A or G
  MOD_RES (19), (20), (21), (22): Xaa is A or G or is absent

SEQ ID NO: 15211 - protein, 38 aa, Artificial Sequence
  GFR-binding peptide
  MOD_RES (2), (3), (35), (37): Xaa is C or S
AXXVPTELEPLTMLYYDEYDKVVEQLSNEMVVEGXGXR

SEQ ID NO: 15212 - protein, 37 aa, Artificial Sequence
  GFR-binding peptide
  MOD_RES (4), (5), (36): Xaa is C or S
ASPXXVSQDLSPISILFIIGKTPKIYKQYEMIVKSXK

SEQ ID NO: 15213 - protein, 39 aa, Artificial Sequence
  GFR-binding peptide
  MOD_RES (4), (36), (38): Xaa is C or S
KPTXAPTKLEPLTVLYYDDSSNVIEQLSNNMVVRSXGXH

SEQ ID NO: 15214 - protein, 40 aa, Artificial Sequence
  GFR-binding peptide
  MOD_RES (3), (4), (38), (40): Xaa is C or S
  MOD_RES (18), (19), (20), (21), (22): Xaa is A or G
  MOD_RES (23), (24), (25), (26): Xaa is A or G or is absent
KPXXAPTQLEPLPVVYYXXXXXXXXXEQLSNNMVVRAXGX

SEQ ID NO: 15215 - protein, 38 aa, Artificial Sequence; identical to SEQ ID NO: 7925
  GFR-binding peptide
  MOD_RES (1), (35), (37): Xaa is C or S
  MOD_RES (15), (16), (17), (18), (19): Xaa is A or G
  MOD_RES (20), (21), (22), (23): Xaa is A or G or is absent

SEQ ID NO: 15216 - protein, 38 aa, Artificial Sequence
  GFR-binding peptide
  MOD_RES (2), (3), (36), (38): Xaa is C or S
  MOD_RES (17), (18), (19), (20), (21): Xaa is A or G
  MOD_RES (22), (23), (24), (25): Xaa is A or G or is absent
PXXVPQALEPLPIVYYXXXXXXXXXEQLSNMIVRSXKX

SEQ ID NO: 15217 - protein, 34 aa, Artificial Sequence
  GFR-binding peptide
  MOD_RES (1), (1): Xaa is C or S
  MOD_RES (15), (16), (17), (18), (19): Xaa is A or G
  MOD_RES (20), (21), (22), (23): Xaa is A or G or is absent
XVPTELEPLTMLYYXXXXXXXXXEQLSNDMVVEG

SEQ ID NO: 15218 - protein, 35 aa, Artificial Sequence; identical to SEQ ID NO: 7926
  GFR-binding peptide
  MOD_RES (1), (35): Xaa is C or S
  MOD_RES (15), (16), (17), (18), (19): Xaa is A or G
  MOD_RES (20), (21), (22), (23): Xaa is A or G or is absent

SEQ ID NO: 15219 - protein, 38 aa, Artificial Sequence; identical to SEQ ID NO: 7928
  GFR-binding peptide
  MOD_RES (2), (36), (38): Xaa is C or S
  MOD_RES (16), (17), (18), (19), (20): Xaa is A or G
  MOD_RES (21), (22), (23), (24): Xaa is A or G or is absent

SEQ ID NO: 15220 - protein, 41 aa, Artificial Sequence
  GFR-binding peptide
  MOD_RES (6), (38), (40): Xaa is C or S
VTKPTXAPTKLEPLPVVYYDDSSNVIEQLSNNMVVRSXGXH

SEQ ID NO: 15221 - protein, 36 aa, Artificial Sequence
  GFR-binding peptide
  MOD_RES (1), (2), (33), (35): Xaa is C or S
XXVPQDLSPISILFIVGRTPKVYKQYEMVVKSXKXS

SEQ ID NO: 15222 - protein, 41 aa, Artificial Sequence; identical to SEQ ID NO: 7930
  GFR-binding peptide
  MOD_RES (6), (7), (41): Xaa is C or S
  MOD_RES (21), (22), (23), (24), (25): Xaa is A or G
  MOD_RES (26), (27), (28), (29): Xaa is A or G or is absent

SEQ ID NO: 15223 - protein, 34 aa, Artificial Sequence
  GFR-binding peptide
  MOD_RES (34), (34): Xaa is C or S
  MOD_RES (14), (15), (16), (17), (18): Xaa is A or G
  MOD_RES (19), (20), (21), (22): Xaa is A or G or is absent
VPTELEPLPMVYYXXXXXXXXXEQLSNDMVVEGX

SEQ ID NO: 15224 - protein, 38 aa, Artificial Sequence; identical to SEQ ID NO: 7932
  GFR-binding peptide
  MOD_RES (3), (4), (35), (37): Xaa is C or S

SEQ ID NO: 15225 - protein, 36 aa, Artificial Sequence
  GFR-binding peptide
  MOD_RES (4), (5): Xaa is C or S
PPTXXVPTRLEPLPIVYYDSANNVVEQLSNDMVVES

SEQ ID NO: 15226 - protein, 38 aa, Artificial Sequence; identical to SEQ ID NO: 7934
  GFR-binding peptide
  MOD_RES (6), (7), (38): Xaa is C or S

SEQ ID NO: 15227 - protein, 40 aa, Artificial Sequence
  GFR-binding peptide
  MOD_RES (5), (6), (40): Xaa is C or S
  MOD_RES (20), (21), (22), (23), (24): Xaa is A or G
  MOD_RES (25), (26), (27), (28): Xaa is A or G or is absent
IPKAXXVPTELEPLTMLYYXXXXXXXXXEQLSNDMVVEGX

SEQ ID NO: 15228 - protein, 33 aa, Artificial Sequence
  GFR-binding peptide
  MOD_RES (32), (32): Xaa is C or S
VPTRLSAISILYLDSANNVVLKNYQDMVVESXG

SEQ ID NO: 15229 - protein, 34 aa, Artificial Sequence; identical to SEQ ID NO: 7937
  GFR-binding peptide
  MOD_RES (2), (3): Xaa is C or S

SEQ ID NO: 15230 - protein, 35 aa, Artificial Sequence
  GFR-binding peptide
  MOD_RES (34), (34): Xaa is C or S
  MOD_RES (14), (15), (16), (17), (18): Xaa is A or G
  MOD_RES (19), (20), (21), (22): Xaa is A or G or is absent
VPTRLEPLTILYYXXXXXXXXXEQLSNDMVVESXG

SEQ ID NO: 15231 - protein, 36 aa, Artificial Sequence
  GFR-binding peptide
  MOD_RES (1), (2), (34), (36): Xaa is C or S
XXVPTELEPLPMVYYDENEKVVEQLSNDMVVEGXGX

SEQ ID NO: 15232 - protein, 34 aa, Artificial Sequence
  GFR-binding peptide
  MOD_RES (1), (33): Xaa is C or S
XAPTQLEPLPVVYYDDSSNVIEQLSNNMVVRAXG

SEQ ID NO: 15233 - protein, 35 aa, Artificial Sequence
  GFR-binding peptide
  MOD_RES (1), (2): Xaa is C or S
  MOD_RES (16), (17), (18), (19), (20): Xaa is A or G
  MOD_RES (21), (22), (23), (24): Xaa is A or G or is absent
XXAPTQLEPLTVLYYXXXXXXXXXEQLSNNMVVRA

SEQ ID NO: 15234 - protein, 37 aa, Artificial Sequence
  GFR-binding peptide
  MOD_RES (1), (34), (36): Xaa is C or S
  MOD_RES (15), (16), (17), (18), (19): Xaa is A or G
  MOD_RES (20), (21), (22), (23): Xaa is A or G or is absent
XVPQDLEPLPIVYYXXXXXXXXXEQLSNMVVKSXKXS

SEQ ID NO: 15235 - protein, 35 aa, Artificial Sequence
  GFR-binding peptide
  MOD_RES (1), (35): Xaa is C or S
  MOD_RES (15), (16), (17), (18), (19): Xaa is A or G
  MOD_RES (20), (21), (22), (23): Xaa is A or G or is absent
XVPTELEPLPMVYYXXXXXXXXXEQLSNDMVVEGX

SEQ ID NO: 15236 - protein, 41 aa, Artificial Sequence; identical to SEQ ID NO: 7948
  GFR-binding peptide
  MOD_RES (6), (7), (38), (40): Xaa is C or S

SEQ ID NO: 15237 - protein, 32 aa, Artificial Sequence; identical to SEQ ID NO: 7949
  GFR-binding peptide
  MOD_RES (14), (15), (16), (17), (18): Xaa is A or G
  MOD_RES (19), (20), (21), (22): Xaa is A or G or is absent

SEQ ID NO: 15238 - protein, 35 aa, Artificial Sequence
  GFR-binding peptide
  MOD_RES (2), (3): Xaa is C or S
  MOD_RES (17), (18), (19), (20), (21): Xaa is A or G
  MOD_RES (22), (23), (24), (25): Xaa is A or G or is absent
TXXVPTRLEPLPIVYYXXXXXXXXXEQLSNDMVVE

SEQ ID NO: 15239 - protein, 39 aa, Artificial Sequence
  GFR-binding peptide
  MOD_RES (6), (7): Xaa is C or S
  MOD_RES (21), (22), (23), (24), (25): Xaa is A or G
  MOD_RES (26), (27), (28), (29): Xaa is A or G or is absent
KIPKAXXVPTELEPLPMVYYXXXXXXXXXEQLSNDMVVE

SEQ ID NO: 15240 - protein, 39 aa, Artificial Sequence
  GFR-binding peptide
  MOD_RES (6), (7): Xaa is C or S
  MOD_RES (21), (22), (23), (24), (25): Xaa is A or G
  MOD_RES (26), (27), (28), (29): Xaa is A or G or is absent
KIPKAXXVPTELEPLTMLYYXXXXXXXXXEQLSNDMVVE

SEQ ID NO: 15241 - protein, 38 aa, Artificial Sequence; identical to SEQ ID NO: 7954
  GFR-binding peptide
  MOD_RES (2), (3), (37): Xaa is C or S
  MOD_RES (17), (18), (19), (20), (21): Xaa is A or G
  MOD_RES (22), (23), (24), (25): Xaa is A or G or is absent

SEQ ID NO: 15242 - protein, 35 aa, Artificial Sequence
  GFR-binding peptide
  MOD_RES (1), (2): Xaa is C or S
  MOD_RES (16), (17), (18), (19), (20): Xaa is A or G
  MOD_RES (21), (22), (23), (24): Xaa is A or G or is absent
XXVPTELSPISMLFIXXXXXXXXXYKQYEDMVVEG

SEQ ID NO: 15243 - protein, 39 aa, Artificial Sequence
  GFR-binding peptide
  MOD_RES (2), (3), (37), (39): Xaa is C or S
  MOD_RES (17), (18), (19), (20), (21): Xaa is A or G
  MOD_RES (22), (23), (24), (25): Xaa is A or G or is absent
TXXVPTRLNAISILYFXXXXXXXXXLKKYRDMVVESXGX

SEQ ID NO: 15244 - protein, 32 aa, Artificial Sequence
  GFR-binding peptide
  MOD_RES (1), (2): Xaa is C or S
XXVPTRLEPLPIVYYDSANNVVEQLSNDMVVE

SEQ ID NO: 15245 - protein, 38 aa, Artificial Sequence
  GFR-binding peptide
  MOD_RES (3), (4), (37): Xaa is C or S
  MOD_RES (18), (19), (20), (21), (22): Xaa is A or G
  MOD_RES (23), (24), (25), (26): Xaa is A or G or is absent
APXXVPQALEPLTILYYXXXXXXXXXEQLSNMIVRSXK

SEQ ID NO: 15246 - protein, 35 aa, Artificial Sequence
  GFR-binding peptide
  MOD_RES (1), (33), (35): Xaa is C or S
XVPTRLNAISILYFDSANNVVLKKYRDMVVESXGX

SEQ ID NO: 15247 - protein, 33 aa, Artificial Sequence; identical to SEQ ID NO: 7958
  GFR-binding peptide
  MOD_RES (1), (1): Xaa is C or S
  MOD_RES (15), (16), (17), (18), (19): Xaa is A or G
  MOD_RES (20), (21), (22), (23): Xaa is A or G or is absent

SEQ ID NO: 15248 - protein, 39 aa, Artificial Sequence
  GFR-binding peptide
  MOD_RES (3), (4), (38): Xaa is C or S
  MOD_RES (18), (19), (20), (21), (22): Xaa is A or G
  MOD_RES (23), (24), (25), (26): Xaa is A or G or is absent
PTXXVPTRLEPLTILYYXXXXXXXXXEQLSNDMVVESXG

SEQ ID NO: 15249 - protein, 36 aa, Artificial Sequence
  GFR-binding peptide
  MOD_RES (2), (3), (36): Xaa is C or S
  MOD_RES (17), (18), (19), (20), (21): Xaa is A or G
  MOD_RES (22), (23), (24), (25): Xaa is A or G or is absent
PXXVPQALEPLPIVYYXXXXXXXXXEQLSNMIVRSX

SEQ ID NO: 15250 - protein, 36 aa, Artificial Sequence
  GFR-binding peptide
  MOD_RES (1), (34), (36): Xaa is C or S
  MOD_RES (15), (16), (17), (18), (19): Xaa is A or G
  MOD_RES (20), (21), (22), (23): Xaa is A or G or is absent
XVPQDLEPLTILYYXXXXXXXXXEQLSNMVVKSXKX

SEQ ID NO: 15251 - protein, 37 aa, Artificial Sequence; identical to SEQ ID NO: 7962
  GFR-binding peptide
  MOD_RES (2), (3), (37): Xaa is C or S
  MOD_RES (17), (18), (19), (20), (21): Xaa is A or G
  MOD_RES (22), (23), (24), (25): Xaa is A or G or is absent

SEQ ID NO: 15252 - protein, 37 aa, Artificial Sequence
  GFR-binding peptide
  MOD_RES (2), (3), (36): Xaa is C or S
  MOD_RES (17), (18), (19), (20), (21): Xaa is A or G
  MOD_RES (22), (23), (24), (25): Xaa is A or G or is absent
PXXVPQALEPLTILYYXXXXXXXXXEQLSNMIVRSXK

SEQ ID NO: 15253 - protein, 31 aa, Artificial Sequence
  GFR-binding peptide
  MOD_RES (1), (1): Xaa is C or S
XVPTRLEPLPIVYYDSANNVVEQLSNDMVVE

SEQ ID NO: 15254 - protein, 32 aa, Artificial Sequence; identical to SEQ ID NO: 7966
  GFR-binding peptide
  MOD_RES (1), (32): Xaa is C or S

SEQ ID NO: 15255 - protein, 40 aa, Artificial Sequence
  GFR-binding peptide
  MOD_RES (4), (5), (39): Xaa is C or S
  MOD_RES (19), (20), (21), (22), (23): Xaa is A or G
  MOD_RES (24), (25), (26), (27): Xaa is A or G or is absent
PKPXXAPTQLSPISVLFIXXXXXXXXXYKQYENMVVRAXG

SEQ ID NO: 15256 - protein, 31 aa, Artificial Sequence; identical to SEQ ID NO: 7967
  GFR-binding peptide
  MOD_RES (31), (31): Xaa is C or S

SEQ ID NO: 15257 - protein, 37 aa, Artificial Sequence; identical to SEQ ID NO: 7969
  GFR-binding peptide
  MOD_RES (1), (2), (36): Xaa is C or S
  MOD_RES (16), (17), (18), (19), (20): Xaa is A or G
  MOD_RES (21), (22), (23), (24): Xaa is A or G or is absent

SEQ ID NO: 15258 - protein, 35 aa, Artificial Sequence
  GFR-binding peptide
  MOD_RES (2), (34): Xaa is C or S
TXAPTKLEPLTVLYYDDSSNVIEQLSNNMVVRSXG

SEQ ID NO: 15259 - protein, 36 aa, Artificial Sequence
  GFR-binding peptide
  MOD_RES (33), (35): Xaa is C or S
  MOD_RES (14), (15), (16), (17), (18): Xaa is A or G
  MOD_RES (19), (20), (21), (22): Xaa is A or G or is absent
VPQALSPISILFIXXXXXXXXXYKQYEMIVRSXKXS

SEQ ID NO: 15260 - protein, 40 aa, Artificial Sequence; identical to SEQ ID NO: 7972
  GFR-binding peptide
  MOD_RES (6), (7), (38), (40): Xaa is C or S

SEQ ID NO: 15261 - protein, 42 aa, Artificial Sequence
  GFR-binding peptide
  MOD_RES (5), (6), (39), (41): Xaa is C or S
  MOD_RES (20), (21), (22), (23), (24): Xaa is A or G
  MOD_RES (25), (26), (27), (28): Xaa is A or G or is absent
SASPXXVPQDLSPISILFIXXXXXXXXXYKQYEMVVKSXKXS

SEQ ID NO: 15262 - protein, 38 aa, Artificial Sequence; identical to SEQ ID NO: 7973
  GFR-binding peptide
  MOD_RES (4), (5), (38): Xaa is C or S
  MOD_RES (19), (20), (21), (22), (23): Xaa is A or G
  MOD_RES (24), (25), (26), (27): Xaa is A or G or is absent

SEQ ID NO: 15263 - protein, 42 aa, Artificial Sequence
  GFR-binding peptide
  MOD_RES (6), (7), (41): Xaa is C or S
  MOD_RES (21), (22), (23), (24), (25): Xaa is A or G
  MOD_RES (26), (27), (28), (29): Xaa is A or G or is absent
YVPKPXXAPTKLEPLTVLYYXXXXXXXXXEQLSNNMVVRSXG

SEQ ID NO: 15264 - protein, 40 aa, Artificial Sequence
  GFR-binding peptide
  MOD_RES (3), (4), (37), (39): Xaa is C or S
  MOD_RES (18), (19), (20), (21), (22): Xaa is A or G
  MOD_RES (23), (24), (25), (26): Xaa is A or G or is absent
SPXXVSQDLSPISILFIXXXXXXXXXYKQYEMIVKSXKXS

SEQ ID NO: 15265 - protein, 39 aa, Artificial Sequence
  GFR-binding peptide
  MOD_RES (6), (7): Xaa is C or S
  MOD_RES (21), (22), (23), (24), (25): Xaa is A or G
  MOD_RES (26), (27), (28), (29): Xaa is A or G or is absent
SIPKAXXVPTELSPISMLFIXXXXXXXXXYKQYEEMVVE

SEQ ID NO: 15266 - protein, 37 aa, Artificial Sequence; identical to SEQ ID NO: 7974
  GFR-binding peptide
  MOD_RES (2), (3), (34), (36): Xaa is C or S

SEQ ID NO: 15267 - protein, 36 aa, Artificial Sequence
  GFR-binding peptide
  MOD_RES (34), (36): Xaa is C or S
  MOD_RES (14), (15), (16), (17), (18): Xaa is A or G
  MOD_RES (19), (20), (21), (22): Xaa is A or G or is absent
VPTRLSAISILYLXXXXXXXXXLKNYQDMVVESXGX

SEQ ID NO: 15268 - protein, 35 aa, Artificial Sequence
  GFR-binding peptide
  MOD_RES (34), (34): Xaa is C or S
  MOD_RES (14), (15), (16), (17), (18): Xaa is A or G
  MOD_RES (19), (20), (21), (22): Xaa is A or G or is absent
APTKLEPLPVVYYXXXXXXXXXEQLSNNMVVRSXG

SEQ ID NO: 15269 - protein, 34 aa, Artificial Sequence
  GFR-binding peptide
  MOD_RES (2), (3), (34): Xaa is C or S
PXXVSQDLSPISILFIIGKTPKIYKQYEMIVKSX

SEQ ID NO: 15270 - protein, 35 aa, Artificial Sequence
  GFR-binding peptide
  MOD_RES (33), (35): Xaa is C or S
  MOD_RES (14), (15), (16), (17), (18): Xaa is A or G
  MOD_RES (19), (20), (21), (22): Xaa is A or G or is absent
VPQALEPLTILYYXXXXXXXXXEQLSNMIVRSXKX

SEQ ID NO: 15271 - protein, 39 aa, Artificial Sequence
  GFR-binding peptide
  MOD_RES (6), (7), (38): Xaa is C or S
ASASPXXVSQDLSPISILFIIGKTPKIYKQYEMIVKSXK

SEQ ID NO: 15272 - protein, 42 aa, Artificial Sequence; identical to SEQ ID NO: 7977
  GFR-binding peptide
  MOD_RES (5), (6), (39), (41): Xaa is C or S
  MOD_RES (20), (21), (22), (23), (24): Xaa is A or G
  MOD_RES (25), (26), (27), (28): Xaa is A or G or is absent

SEQ ID NO: 15273 - protein, 36 aa, Artificial Sequence
  GFR-binding peptide
  MOD_RES (6), (6): Xaa is C or S
VTKPTXAPTKLEPLPVVYYDDSSNVIEQLSNNMVVR

SEQ ID NO: 15274 - protein, 35 aa, Artificial Sequence
  GFR-binding peptide
  MOD_RES (1), (34): Xaa is C or S
  MOD_RES (15), (16), (17), (18), (19): Xaa is A or G
  MOD_RES (20), (21), (22), (23): Xaa is A or G or is absent
XVPQALEPLPIVYYXXXXXXXXXEQLSNMIVRSXK

SEQ ID NO: 15275 - protein, 43 aa, Artificial Sequence; identical to SEQ ID NO: 7981
  GFR-binding peptide
  MOD_RES (7), (41), (43): Xaa is C or S
  MOD_RES (21), (22), (23), (24), (25): Xaa is A or G
  MOD_RES (26), (27), (28), (29): Xaa is A or G or is absent

SEQ ID NO: 15276 - protein, 41 aa, Artificial Sequence
  GFR-binding peptide
  MOD_RES (4), (5), (38), (40): Xaa is C or S
  MOD_RES (19), (20), (21), (22), (23): Xaa is A or G
  MOD_RES (24), (25), (26), (27): Xaa is A or G or is absent
ASPXXVSQDLSPISILFIXXXXXXXXXYKQYEMIVKSXKXS

SEQ ID NO: 15277 - protein, 44 aa, Artificial Sequence; identical to SEQ ID NO: 7986
  GFR-binding peptide
  MOD_RES (6), (7), (41), (43): Xaa is C or S
  MOD_RES (21), (22), (23), (24), (25): Xaa is A or G
  MOD_RES (26), (27), (28), (29): Xaa is A or G or is absent

SEQ ID NO: 15278 - protein, 35 aa, Artificial Sequence
  GFR-binding peptide
  MOD_RES (1), (33), (35): Xaa is C or S
XVPTRLEPLPIVYYDSANNVVEQLSNDMVVESXGX

SEQ ID NO: 15279 - protein, 34 aa, Artificial Sequence
  GFR-binding peptide
  MOD_RES (2), (3): Xaa is C or S
AXXVPTELEPLPMVYYDEYDKVVEQLSNEMVVEG

SEQ ID NO: 15280 - protein, 33 aa, Artificial Sequence
  GFR-binding peptide
  MOD_RES (2), (3): Xaa is C or S
AXXVPTELSPISMLFIDEYDKVVYKQYEEMVVE

SEQ ID NO: 15281 - protein, 34 aa, Artificial Sequence
  GFR-binding peptide
  MOD_RES (2), (3), (34): Xaa is C or S
PXXVPQDLEPLPIVYYVGRTPKVEQLSNMVVKSX

SEQ ID NO: 15282 - protein, 35 aa, Artificial Sequence; identical to SEQ ID NO: 7994
  GFR-binding peptide
  MOD_RES (1), (32), (34): Xaa is C or S

SEQ ID NO: 15283 - protein, 40 aa, Artificial Sequence
  GFR-binding peptide
  MOD_RES (5), (6), (40): Xaa is C or S
  MOD_RES (20), (21), (22), (23), (24): Xaa is A or G
  MOD_RES (25), (26), (27), (28): Xaa is A or G or is absent
IPKAXXVPTELEPLPMVYYXXXXXXXXXEQLSNDMVVEGX

SEQ ID NO: 15284 - protein, 32 aa, Artificial Sequence
  GFR-binding peptide
  MOD_RES (32), (32): Xaa is C or S
VPTELSPISMLFIDENEKVVYKQYEDMVVEGX

SEQ ID NO: 15285 - protein, 39 aa, Artificial Sequence
  GFR-binding peptide
  MOD_RES (3), (4), (36), (38): Xaa is C or S
KAXXVPTELSPISMLFIDEYDKVVYKQYEEMVVEGXGXR

SEQ ID NO: 15286 - protein, 38 aa, Artificial Sequence
  GFR-binding peptide
  MOD_RES (4), (5), (37): Xaa is C or S
PKPXXAPTQLEPLPVVYYDDSSNVIEQLSNNMVVRAXG

SEQ ID NO: 15287 - protein, 33 aa, Artificial Sequence
  GFR-binding peptide
  MOD_RES (1), (1): Xaa is C or S
  MOD_RES (15), (16), (17), (18), (19): Xaa is A or G
  MOD_RES (20), (21), (22), (23): Xaa is A or G or is absent
XVSQDLSPISILFIXXXXXXXXXYKQYEMIVKS

SEQ ID NO: 15288 - protein, 41 aa, Artificial Sequence; identical to SEQ ID NO: 7999
  GFR-binding peptide
  MOD_RES (5), (6), (38), (40): Xaa is C or S

SEQ ID NO: 15289 - protein, 38 aa, Artificial Sequence
  GFR-binding peptide
  MOD_RES (3), (4), (38): Xaa is C or S
  MOD_RES (18), (19), (20), (21), (22): Xaa is A or G
  MOD_RES (23), (24), (25), (26): Xaa is A or G or is absent
KAXXVPTELEPLPMVYYXXXXXXXXXEQLSNDMVVEGX

SEQ ID NO: 15290 - protein, 36 aa, Artificial Sequence
  GFR-binding peptide
  MOD_RES (2), (3), (34), (36): Xaa is C or S
PXXVSQDLSPISILFIIGKTPKIYKQYEMIVKSXKX

SEQ ID NO: 15291 - protein, 43 aa, Artificial Sequence
  GFR-binding peptide
  MOD_RES (5), (6), (40), (42): Xaa is C or S
  MOD_RES (20), (21), (22), (23), (24): Xaa is A or G
  MOD_RES (25), (26), (27), (28): Xaa is A or G or is absent
IPKAXXVPTELSPISMLFIXXXXXXXXXYKQYEEMVVEGXGXR

SEQ ID NO: 15292 - protein, 37 aa, Artificial Sequence
  GFR-binding peptide
  MOD_RES (6), (6): Xaa is C or S
VTKPTXAPTKLEPLPVVYYDDSSNVIEQLSNNMVVRS

SEQ ID NO: 15293 - protein, 36 aa, Artificial Sequence
  GFR-binding peptide
  MOD_RES (1), (2), (34), (36): Xaa is C or S
XXVPTELSPISMLFIDEYDKVVYKQYEEMVVEGXGX

SEQ ID NO: 15294 - protein, 33 aa, Artificial Sequence
  GFR-binding peptide
  MOD_RES (1), (33): Xaa is C or S
XVPTRLNAISILYFDSANNVVLKKYRDMVVESX

SEQ ID NO: 15295 - protein, 35 aa, Artificial Sequence
  GFR-binding peptide
  MOD_RES (1), (2): Xaa is C or S
  MOD_RES (16), (17), (18), (19), (20): Xaa is A or G
  MOD_RES (21), (22), (23), (24): Xaa is A or G or is absent
XXAPTQLSPISVLFIXXXXXXXXXYKQYENMVVRA

SEQ ID NO: 15296 - protein, 35 aa, Artificial Sequence
  GFR-binding peptide
  MOD_RES (2), (3), (35): Xaa is C or S
AXXVPTELEPLTMLYYDENEKVVEQLSNDMVVEGX

SEQ ID NO: 15297 - protein, 37 aa, Artificial Sequence; identical to SEQ ID NO: 8005
  GFR-binding peptide
  MOD_RES (4), (4): Xaa is C or S
  MOD_RES (18), (19), (20), (21), (22): Xaa is A or G
  MOD_RES (23), (24), (25), (26): Xaa is A or G or is absent

SEQ ID NO: 15298 - protein, 39 aa, Artificial Sequence
  GFR-binding peptide
  MOD_RES (2), (3), (36), (38): Xaa is C or S
  MOD_RES (17), (18), (19), (20), (21): Xaa is A or G
  MOD_RES (22), (23), (24), (25): Xaa is A or G or is absent
PXXVPQDLSPISILFIXXXXXXXXXYKQYEMVVKSXKXS

SEQ ID NO: 15299 - protein, 37 aa, Artificial Sequence
  GFR-binding peptide
  MOD_RES (1), (34), (36): Xaa is C or S
  MOD_RES (15), (16), (17), (18), (19): Xaa is A or G
  MOD_RES (20), (21), (22), (23): Xaa is A or G or is absent
XVPQDLSPISILFIXXXXXXXXXYKQYEMVVKSXKXS

SEQ ID NO: 15300 - protein, 36 aa, Artificial Sequence; identical to SEQ ID NO: 8007
  GFR-binding peptide
  MOD_RES (3), (4), (35): Xaa is C or S

SEQ ID NO: 15301 - protein, 40 aa, Artificial Sequence
  GFR-binding peptide
  MOD_RES (4), (5), (37), (39): Xaa is C or S
PKAXXVPTELEPLTMLYYDEYDKVVEQLSNEMVVEGXGXR

SEQ ID NO: 15302 - protein, 37 aa, Artificial Sequence
  GFR-binding peptide
  MOD_RES (3), (4), (37): Xaa is C or S
  MOD_RES (18), (19), (20), (21), (22): Xaa is A or G
  MOD_RES (23), (24), (25), (26): Xaa is A or G or is absent
SPXXVSQDLEPLPIVYYXXXXXXXXXEQLSNMIVKSX

SEQ ID NO: 15303 - protein, 36 aa, Artificial Sequence
  GFR-binding peptide
  MOD_RES (1), (2), (34), (36): Xaa is C or S
XXVPTRLNAISILYFDSANNVVLKKYRDMVVESXGX

SEQ ID NO: 15304 - protein, 36 aa, Artificial Sequence
  GFR-binding peptide
  MOD_RES (1), (2), (35): Xaa is C or S
  MOD_RES (16), (17), (18), (19), (20): Xaa is A or G
  MOD_RES (21), (22), (23), (24): Xaa is A or G or is absent
XXVPQALEPLPIVYYXXXXXXXXXEQLSNMIVRSXK

SEQ ID NO: 15305 - protein, 35 aa, Artificial Sequence
  GFR-binding peptide
  MOD_RES (2), (3): Xaa is C or S
  MOD_RES (17), (18), (19), (20), (21): Xaa is A or G
  MOD_RES (22), (23), (24), (25): Xaa is A or G or is absent
TXXVPTRLNAISILYFXXXXXXXXXLKKYRDMVVE

SEQ ID NO: 15306 - protein, 38 aa, Artificial Sequence
  GFR-binding peptide
  MOD_RES (4), (5), (37): Xaa is C or S
PKAXXVPTELEPLTMLYYDEYDKVVEQLSNEMVVEGXG

SEQ ID NO: 15307 - protein, 39 aa, Artificial Sequence
  GFR-binding peptide
  MOD_RES (6), (7), (38): Xaa is C or S
ASASPXXVPQDLEPLPIVYYVGRTPKVEQLSNMVVKSXK

SEQ ID NO: 15308 - protein, 41 aa, Artificial Sequence
  GFR-binding peptide
  MOD_RES (3), (4), (38), (40): Xaa is C or S
  MOD_RES (18), (19), (20), (21), (22): Xaa is A or G
  MOD_RES (23), (24), (25), (26): Xaa is A or G or is absent
KAXXVPTELEPLTMLYYXXXXXXXXXEQLSNDMVVEGXGXR

SEQ ID NO: 15309 - protein, 42 aa, Artificial Sequence; identical to SEQ ID NO: 8013
  GFR-binding peptide
  MOD_RES (5), (6), (40), (42): Xaa is C or S
  MOD_RES (20), (21), (22), (23), (24): Xaa is A or G
  MOD_RES (25), (26), (27), (28): Xaa is A or G or is absent

SEQ ID NO: 15310 - protein, 34 aa, Artificial Sequence; identical to SEQ ID NO: 8014
  GFR-binding peptide
  MOD_RES (2), (3), (34): Xaa is C or S

SEQ ID NO: 15311 - protein, 36 aa, Artificial Sequence
  GFR-binding peptide
  MOD_RES (3), (4), (35): Xaa is C or S
SPXXVPQDLEPLPIVYYVGRTPKVEQLSNMVVKSXK

SEQ ID NO: 15312 - protein, 36 aa, Artificial Sequence
  GFR-binding peptide
  MOD_RES (3), (4), (36): Xaa is C or S
KAXXVPTELEPLPMVYYDENEKVVEQLSNDMVVEGX

SEQ ID NO: 15313 - protein, 39 aa, Artificial Sequence; identical to SEQ ID NO: 8017
  GFR-binding peptide
  MOD_RES (3), (4), (38): Xaa is C or S
  MOD_RES (18), (19), (20), (21), (22): Xaa is A or G
  MOD_RES (23), (24), (25), (26): Xaa is A or G or is absent

SEQ ID NO: 15314 - protein, 34 aa, Artificial Sequence; identical to SEQ ID NO: 8019
  GFR-binding peptide
  MOD_RES (34), (34): Xaa is C or S
  MOD_RES (14), (15), (16), (17), (18): Xaa is A or G
  MOD_RES (19), (20), (21), (22): Xaa is A or G or is absent

SEQ ID NO: 15315 - protein, 39 aa, Artificial Sequence; identical to SEQ ID NO: 8020
  GFR-binding peptide
  MOD_RES (7), (39): Xaa is C or S

SEQ ID NO: 15316 - protein, 31 aa, Artificial Sequence
  GFR-binding peptide
  MOD_RES (1), (1): Xaa is C or S
XVPTRLNAISILYFDSANNVVLKKYRDMVVE

SEQ ID NO: 15317 - protein, 36 aa, Artificial Sequence
  GFR-binding peptide
  MOD_RES (3), (4), (35): Xaa is C or S
SPXXVSQDLSPISILFIIGKTPKIYKQYEMIVKSXK

SEQ ID NO: 15318 - protein, 40 aa, Artificial Sequence; identical to SEQ ID NO: 8022
  GFR-binding peptide
  MOD_RES (7), (7): Xaa is C or S
  MOD_RES (21), (22), (23), (24), (25): Xaa is A or G
  MOD_RES (26), (27), (28), (29): Xaa is A or G or is absent

SEQ ID NO: 15319 - protein, 40 aa, Artificial Sequence
  GFR-binding peptide
  MOD_RES (4), (5), (37), (39): Xaa is C or S
PKPXXAPTQLEPLTVLYYDDSSNVIEQLSNNMVVRAXGXH

SEQ ID NO: 15320 - protein, 37 aa, Artificial Sequence
  GFR-binding peptide
  MOD_RES (2), (3), (37): Xaa is C or S
  MOD_RES (17), (18), (19), (20), (21): Xaa is A or G
  MOD_RES (22), (23), (24), (25): Xaa is A or G or is absent
AXXVPTELEPLTMLYYXXXXXXXXXEQLSNDMVVEGX

SEQ ID NO: 15321 - protein, 39 aa, Artificial Sequence
  GFR-binding peptide
  MOD_RES (2), (3), (37), (39): Xaa is C or S
  MOD_RES (17), (18), (19), (20), (21): Xaa is A or G
  MOD_RES (22), (23), (24), (25): Xaa is A or G or is absent
AXXVPTELEPLTMLYYXXXXXXXXXEQLSNEMVVEGXGX

SEQ ID NO: 15322 - protein, 35 aa, Artificial Sequence
  GFR-binding peptide
  MOD_RES (1), (33), (35): Xaa is C or S
XAPTKLEPLTVLYYDDSSNVIEQLSNNMVVRSXGX

SEQ ID NO: 15323 - protein, 39 aa, Artificial Sequence; identical to SEQ ID NO: 8025
  GFR-binding peptide
  MOD_RES (6), (7), (38): Xaa is C or S

SEQ ID NO: 15324 - protein, 37 aa, Artificial Sequence
  GFR-binding peptide
  MOD_RES (3), (4), (36): Xaa is C or S
KAXXVPTELEPLPMVYYDENEKVVEQLSNDMVVEGXG

SEQ ID NO: 15325 - protein, 35 aa, Artificial Sequence
  GFR-binding peptide
  MOD_RES (1), (2), (34): Xaa is C or S
XXAPTQLSPISVLFIDDSSNVIYKQYENMVVRAXG

SEQ ID NO: 15326 - protein, 42 aa, Artificial Sequence
  GFR-binding peptide
  MOD_RES (6), (7), (39), (41): Xaa is C or S
TVPKPXXAPTQLEPLPVVYYDDSSNVIEQLSNNMVVRAXGXH

SEQ ID NO: 15327 - protein, 34 aa, Artificial Sequence
  GFR-binding peptide
  MOD_RES (34), (34): Xaa is C or S
  MOD_RES (14), (15), (16), (17), (18): Xaa is A or G
  MOD_RES (19), (20), (21), (22): Xaa is A or G or is absent
VPTELSPISMLFIXXXXXXXXXYKQYEDMVVEGX

SEQ ID NO: 15328 - protein, 37 aa, Artificial Sequence; identical to SEQ ID NO: 8028
  GFR-binding peptide
  MOD_RES (1), (35), (37): Xaa is C or S
  MOD_RES (15), (16), (17), (18), (19): Xaa is A or G
  MOD_RES (20), (21), (22), (23): Xaa is A or G or is absent

SEQ ID NO: 15329 - protein, 40 aa, Artificial Sequence
  GFR-binding peptide
  MOD_RES (5), (6), (37), (39): Xaa is C or S
SASPXXVSQDLEPLPIVYYIGKTPKIEQLSNMIVKSXKXS

SEQ ID NO: 15330 - protein, 40 aa, Artificial Sequence
  GFR-binding peptide
  MOD_RES (3), (4), (38), (40): Xaa is C or S
  MOD_RES (18), (19), (20), (21), (22): Xaa is A or G
  MOD_RES (23), (24), (25), (26): Xaa is A or G or is absent
KPXXAPTKLSPISVLFIXXXXXXXXXYKQYENMVVRSXGX

SEQ ID NO: 15331 - protein, 37 aa, Artificial Sequence
  GFR-binding peptide
  MOD_RES (3), (4): Xaa is C or S
  MOD_RES (18), (19), (20), (21), (22): Xaa is A or G
  MOD_RES (23), (24), (25), (26): Xaa is A or G or is absent
PTXXVPTRLEPLPIVYYXXXXXXXXXEQLSNDMVVES

SEQ ID NO: 15332 - protein, 39 aa, Artificial Sequence
  GFR-binding peptide
  MOD_RES (3), (4), (36), (38): Xaa is C or S
KPXXAPTQLSPISVLFIDDSSNVIYKQYENMVVRAXGXH

SEQ ID NO: 15333 - protein, 35 aa, Artificial Sequence
  GFR-binding peptide
  MOD_RES (1), (2): Xaa is C or S
  MOD_RES (16), (17), (18), (19), (20): Xaa is A or G
  MOD_RES (21), (22), (23), (24): Xaa is A or G or is absent
XXVPTELEPLTMLYYXXXXXXXXXEQLSNDMVVEG

SEQ ID NO: 15334 - protein, 36 aa, Artificial Sequence
  GFR-binding peptide
  MOD_RES (1), (34), (36): Xaa is C or S
  MOD_RES (15), (16), (17), (18), (19): Xaa is A or G
  MOD_RES (20), (21), (22), (23): Xaa is A or G or is absent
XVPQALEPLTILYYXXXXXXXXXEQLSNMIVRSXKX

SEQ ID NO: 15335 - protein, 38 aa, Artificial Sequence; identical to SEQ ID NO: 8036
  GFR-binding peptide
  MOD_RES (5), (6): Xaa is C or S
  MOD_RES (20), (21), (22), (23), (24): Xaa is A or G
  MOD_RES (25), (26), (27), (28): Xaa is A or G or is absent

SEQ ID NO: 15336 - protein, 33 aa, Artificial Sequence; identical to SEQ ID NO: 8037
  GFR-binding peptide
  MOD_RES (1), (32): Xaa is C or S

SEQ ID NO: 15337 - protein, 39 aa, Artificial Sequence
  GFR-binding peptide
  MOD_RES (3), (4), (38): Xaa is C or S
  MOD_RES (18), (19), (20), (21), (22): Xaa is A or G
  MOD_RES (23), (24), (25), (26): Xaa is A or G or is absent
KPXXAPTKLEPLTVLYYXXXXXXXXXEQLSNNMVVRSXG

SEQ ID NO: 15338 - protein, 39 aa, Artificial Sequence; identical to SEQ ID NO: 8038
  GFR-binding peptide
  MOD_RES (1), (2), (36), (38): Xaa is C or S
  MOD_RES (16), (17), (18), (19), (20): Xaa is A or G
  MOD_RES (21), (22), (23), (24): Xaa is A or G or is absent

SEQ ID NO: 15339 - protein, 41 aa, Artificial Sequence
  GFR-binding peptide
  MOD_RES (5), (6), (39), (41): Xaa is C or S
  MOD_RES (20), (21), (22), (23), (24): Xaa is A or G
  MOD_RES (25), (26), (27), (28): Xaa is A or G or is absent
SASPXXVSQDLEPLPIVYYXXXXXXXXXEQLSNMIVKSXKX

SEQ ID NO: 15340 - protein, 33 aa, Artificial Sequence; identical to SEQ ID NO: 8039
  GFR-binding peptide
  MOD_RES (1), (32): Xaa is C or S

SEQ ID NO: 15341 - protein, 37 aa, Artificial Sequence; identical to SEQ ID NO: 8040
  GFR-binding peptide
  MOD_RES (1), (2), (36): Xaa is C or S
  MOD_RES (16), (17), (18), (19), (20): Xaa is A or G
  MOD_RES (21), (22), (23), (24): Xaa is A or G or is absent

SEQ ID NO: 15342 - protein, 38 aa, Artificial Sequence; identical to SEQ ID NO: 8044
  GFR-binding peptide
  MOD_RES (3), (4), (38): Xaa is C or S
  MOD_RES (18), (19), (20), (21), (22): Xaa is A or G
  MOD_RES (23), (24), (25), (26): Xaa is A or G or is absent

SEQ ID NO: 15343 - protein, 39 aa, Artificial Sequence
  GFR-binding peptide
  MOD_RES (5), (6), (38): Xaa is C or S
VPKPXXAPTKLEPLTVLYYDDSSNVIEQLSNNMVVRSXG

SEQ ID NO: 15344 - protein, 33 aa, Artificial Sequence
  GFR-binding peptide
  MOD_RES (14), (15), (16), (17), (18): Xaa is A or G
  MOD_RES (19), (20), (21), (22): Xaa is A or G or is absent
VPTRLEPLTILYYXXXXXXXXXEQLSNDMVVES

SEQ ID NO: 15345 - protein, 40 aa, Artificial Sequence; identical to SEQ ID NO: 8045
  GFR-binding peptide
  MOD_RES (4), (5), (37), (39): Xaa is C or S

SEQ ID NO: 15346 - protein, 36 aa, Artificial Sequence; identical to SEQ ID NO: 8046
  GFR-binding peptide
  MOD_RES (1), (2), (33), (35): Xaa is C or S

SEQ ID NO: 15347 - protein, 36 aa, Artificial Sequence
  GFR-binding peptide
  MOD_RES (1), (2), (34), (36): Xaa is C or S
XXAPTQLEPLPVVYYDDSSNVIEQLSNNMVVRAXGX

SEQ ID NO: 15348 - protein, 37 aa, Artificial Sequence
  GFR-binding peptide
  MOD_RES (1), (35), (37): Xaa is C or S
  MOD_RES (15), (16), (17), (18), (19): Xaa is A or G
  MOD_RES (20), (21), (22), (23): Xaa is A or G or is absent
XVPTELSPISMLFIXXXXXXXXXYKQYEDMVVEGXGX

SEQ ID NO: 15349 - protein, 32 aa, Artificial Sequence; identical to SEQ ID NO: 8048
  GFR-binding peptide
  MOD_RES (1), (2): Xaa is C or S

SEQ ID NO: 15350 - protein, 33 aa, Artificial Sequence; identical to SEQ ID NO: 8050
  GFR-binding peptide
  MOD_RES (1), (1): Xaa is C or S
  MOD_RES (15), (16), (17), (18), (19): Xaa is A or G
  MOD_RES (20), (21), (22), (23): Xaa is A or G or is absent

SEQ ID NO: 15351 - protein, 37 aa, Artificial Sequence
  GFR-binding peptide
  MOD_RES (4), (5): Xaa is C or S
  MOD_RES (19), (20), (21), (22), (23): Xaa is A or G
  MOD_RES (24), (25), (26), (27): Xaa is A or G or is absent
PKAXXVPTELEPLTMLYYXXXXXXXXXEQLSNDMVVE

SEQ ID NO: 15352 - protein, 41 aa, Artificial Sequence
  GFR-binding peptide
  MOD_RES (3), (4), (38), (40): Xaa is C or S
  MOD_RES (18), (19), (20), (21), (22): Xaa is A or G
  MOD_RES (23), (24), (25), (26): Xaa is A or G or is absent
KAXXVPTELEPLPMVYYXXXXXXXXXEQLSNEMVVEGXGXR

SEQ ID NO: 15353 - protein, 32 aa, Artificial Sequence; identical to SEQ ID NO: 8053
  GFR-binding peptide
  MOD_RES (32), (32): Xaa is C or S

SEQ ID NO: 15354 - protein, 37 aa, Artificial Sequence
  GFR-binding peptide
  MOD_RES (3), (4), (37): Xaa is C or S
  MOD_RES (18), (19), (20), (21), (22): Xaa is A or G
  MOD_RES (23), (24), (25), (26): Xaa is A or G or is absent
SPXXVPQDLSPISILFIXXXXXXXXXYKQYEMVVKSX

SEQ ID NO: 15355 - protein, 36 aa, Artificial Sequence
  GFR-binding peptide
  MOD_RES (3), (4), (35): Xaa is C or S
SPXXVPQDLSPISILFIVGRTPKVYKQYEMVVKSXK

SEQ ID NO: 15356 - protein, 44 aa, Artificial Sequence
  GFR-binding peptide
  MOD_RES (6), (7), (41), (43): Xaa is C or S
  MOD_RES (21), (22), (23), (24), (25): Xaa is A or G
  MOD_RES (26), (27), (28), (29): Xaa is A or G or is absent
KIPKAXXVPTELSPISMLFIXXXXXXXXXYKQYEDMVVEGXGXR

SEQ ID NO: 15357 - protein, 38 aa, Artificial Sequence; identical to SEQ ID NO: 8061
  GFR-binding peptide
  MOD_RES (5), (6): Xaa is C or S
  MOD_RES (20), (21), (22), (23), (24): Xaa is A or G
  MOD_RES (25), (26), (27), (28): Xaa is A or G or is absent

SEQ ID NO: 15358 - protein, 33 aa, Artificial Sequence
  GFR-binding peptide
  MOD_RES (32), (32): Xaa is C or S
APTQLEPLTVLYYDDSSNVIEQLSNNMVVRAXG

SEQ ID NO: 15359 - protein, 38 aa, Artificial Sequence
  GFR-binding peptide
  MOD_RES (1), (35), (37): Xaa is C or S
  MOD_RES (15), (16), (17), (18), (19): Xaa is A or G
  MOD_RES (20), (21), (22), (23): Xaa is A or G or is absent
XVPTRLEPLTILYYXXXXXXXXXEQLSNDMVVESXGXR

SEQ ID NO: 15360 - protein, 38 aa, Artificial Sequence
  GFR-binding peptide
  MOD_RES (3), (4), (38): Xaa is C or S
  MOD_RES (18), (19), (20), (21), (22): Xaa is A or G
  MOD_RES (23), (24), (25), (26): Xaa is A or G or is absent
KPXXAPTQLSPISVLFIXXXXXXXXXYKQYENMVVRAX

SEQ ID NO: 15361 - protein, 35 aa, Artificial Sequence; identical to SEQ ID NO: 8069
  GFR-binding peptide
  MOD_RES (1), (2): Xaa is C or S
  MOD_RES (16), (17), (18), (19), (20): Xaa is A or G
  MOD_RES (21), (22), (23), (24): Xaa is A or G or is absent

SEQ ID NO: 15362 - protein, 36 aa, Artificial Sequence; identical to SEQ ID NO: 8070
  GFR-binding peptide
  MOD_RES (1), (35): Xaa is C or S
  MOD_RES (15), (16), (17), (18), (19): Xaa is A or G
  MOD_RES (20), (21), (22), (23): Xaa is A or G or is absent

SEQ ID NO: 15363 - protein, 38 aa, Artificial Sequence
  GFR-binding peptide
  MOD_RES (5), (6): Xaa is C or S
  MOD_RES (20), (21), (22), (23), (24): Xaa is A or G
  MOD_RES (25), (26), (27), (28): Xaa is A or G or is absent
SAAPXXVPQALSPISILFIXXXXXXXXXYKQYEMIVRS

SEQ ID NO: 15364 - protein, 33 aa, Artificial Sequence; identical to SEQ ID NO: 8073
  GFR-binding peptide
  MOD_RES (33), (33): Xaa is C or S
  MOD_RES (14), (15), (16), (17), (18): Xaa is A or G
  MOD_RES (19), (20), (21), (22): Xaa is A or G or is absent

SEQ ID NO: 15365 - protein, 37 aa, Artificial Sequence
  GFR-binding peptide
  MOD_RES (3), (4), (36): Xaa is C or S
KPXXAPTQLSPISVLFIDDSSNVIYKQYENMVVRAXG

SEQ ID NO: 15366 - protein, 35 aa, Artificial Sequence; identical to SEQ ID NO: 8075
  GFR-binding peptide
  MOD_RES (34), (34): Xaa is C or S
  MOD_RES (14), (15), (16), (17), (18): Xaa is A or G
  MOD_RES (19), (20), (21), (22): Xaa is A or G or is absent

SEQ ID NO: 15367 - protein, 34 aa, Artificial Sequence; identical to SEQ ID NO: 8076
  GFR-binding peptide
  MOD_RES (1), (34): Xaa is C or S
  MOD_RES (15), (16), (17), (18), (19): Xaa is A or G
  MOD_RES (20), (21), (22), (23): Xaa is A or G or is absent

SEQ ID NO: 15368 - protein, 40 aa, Artificial Sequence
  GFR-binding peptide
  MOD_RES (5), (6), (39): Xaa is C or S
  MOD_RES (20), (21), (22), (23), (24): Xaa is A or G
  MOD_RES (25), (26), (27), (28): Xaa is A or G or is absent
SAAPXXVPQALSPISILFIXXXXXXXXXYKQYEMIVRSXK

SEQ ID NO: 15369 - protein, 37 aa, Artificial Sequence
  GFR-binding peptide
  MOD_RES (2), (3), (37): Xaa is C or S
  MOD_RES (17), (18), (19), (20), (21): Xaa is A or G
  MOD_RES (22), (23), (24), (25): Xaa is A or G or is absent
AXXVPTELEPLPMVYYXXXXXXXXXEQLSNEMVVEGX

SEQ ID NO: 15370 - protein, 42 aa, Artificial Sequence
  GFR-binding peptide
  MOD_RES (6), (7), (40), (42): Xaa is C or S
  MOD_RES (21), (22), (23), (24), (25): Xaa is A or G
  MOD_RES (26), (27), (28), (29): Xaa is A or G or is absent
ASAAPXXVPQALEPLTILYYXXXXXXXXXEQLSNMIVRSXKX

SEQ ID NO: 15371 - protein, 43 aa, Artificial Sequence
  GFR-binding peptide
  MOD_RES (6), (7), (40), (42): Xaa is C or S
  MOD_RES (21), (22), (23), (24), (25): Xaa is A or G
  MOD_RES (26), (27), (28), (29): Xaa is A or G or is absent
ASAAPXXVPQALEPLTILYYXXXXXXXXXEQLSNMIVRSXKXS

SEQ ID NO: 15372 - protein, 32 aa, Artificial Sequence; identical to SEQ ID NO: 8084
  GFR-binding peptide
  MOD_RES (14), (15), (16), (17), (18): Xaa is A or G
  MOD_RES (19), (20), (21), (22): Xaa is A or G or is absent

SEQ ID NO: 15373 - protein, 38 aa, Artificial Sequence
  GFR-binding peptide
  MOD_RES (2), (3), (37): Xaa is C or S
  MOD_RES (17), (18), (19), (20), (21): Xaa is A or G
  MOD_RES (22), (23), (24), (25): Xaa is A or G or is absent
AXXVPTELEPLPMVYYXXXXXXXXXEQLSNEMVVEGXG

SEQ ID NO: 15374 - protein, 32 aa, Artificial Sequence
  GFR-binding peptide
  MOD_RES (1), (2): Xaa is C or S
XXAPTKLEPLPVVYYDDSSNVIEQLSNNMVVR

SEQ ID NO: 15375 - protein, 39 aa, Artificial Sequence; identical to SEQ ID NO: 8087
  GFR-binding peptide
  MOD_RES (2), (3), (37), (39): Xaa is C or S
  MOD_RES (17), (18), (19), (20), (21): Xaa is A or G
  MOD_RES (22), (23), (24), (25): Xaa is A or G or is absent

SEQ ID NO: 15376 - protein, 33 aa, Artificial Sequence; identical to SEQ ID NO: 8088
  GFR-binding peptide
  MOD_RES (1), (1): Xaa is C or S
  MOD_RES (15), (16), (17), (18), (19): Xaa is A or G
  MOD_RES (20), (21), (22), (23): Xaa is A or G or is absent

SEQ ID NO: 15377 - protein, 36 aa, Artificial Sequence
  GFR-binding peptide
  MOD_RES (2), (3), (35): Xaa is C or S
PXXAPTQLEPLTVLYYDDSSNVIEQLSNNMVVRAXG

SEQ ID NO: 15378 - protein, 34 aa, Artificial Sequence; identical to SEQ ID NO: 8089
  GFR-binding peptide
  MOD_RES (2), (3), (34): Xaa is C or S

SEQ ID NO: 15379 - protein, 37 aa, Artificial Sequence
  GFR-binding peptide
  MOD_RES (2), (3), (37): Xaa is C or S
  MOD_RES (17), (18), (19), (20), (21): Xaa is A or G
  MOD_RES (22), (23), (24), (25): Xaa is A or G or is absent
TXXVPTRLEPLPIVYYXXXXXXXXXEQLSNDMVVESX

SEQ ID NO: 15380 - protein, 34 aa, Artificial Sequence
  GFR-binding peptide
  MOD_RES (32), (34): Xaa is C or S
VPTELEPLPMVYYDENEKVVEQLSNDMVVEGXGX

SEQ ID NO: 15381 - protein, 39 aa, Artificial Sequence
  GFR-binding peptide
  MOD_RES (3), (4), (37), (39): Xaa is C or S
  MOD_RES (18), (19), (20), (21), (22): Xaa is A or G
  MOD_RES (23), (24), (25), (26): Xaa is A or G or is absent
SPXXVPQDLEPLPIVYYXXXXXXXXXEQLSNMVVKSXKX

SEQ ID NO: 15382 - protein, 37 aa, Artificial Sequence
  GFR-binding peptide
  MOD_RES (6), (7): Xaa is C or S
SIPKAXXVPTELEPLPMVYYDEYDKVVEQLSNEMVVE

SEQ ID NO: 15383 - protein, 36 aa, Artificial Sequence
  GFR-binding peptide
  MOD_RES (34), (36): Xaa is C or S
  MOD_RES (14), (15), (16), (17), (18): Xaa is A or G
  MOD_RES (19), (20), (21), (22): Xaa is A or G or is absent
APTQLSPISVLFIXXXXXXXXXYKQYENMVVRAXGX

SEQ ID NO: 15384 - protein, 33 aa, Artificial Sequence
  GFR-binding peptide
  MOD_RES (2), (3): Xaa is C or S
PXXVSQDLEPLPIVYYIGKTPKIEQLSNMIVKS

SEQ ID NO: 15385 - protein, 41 aa, Artificial Sequence
  GFR-binding peptide
  MOD_RES (5), (6), (40): Xaa is C or S
  MOD_RES (20), (21), (22), (23), (24): Xaa is A or G
  MOD_RES (25), (26), (27), (28): Xaa is A or G or is absent
IPKAXXVPTELSPISMLFIXXXXXXXXXYKQYEEMVVEGXG

SEQ ID NO: 15386 - protein, 37 aa, Artificial Sequence; identical to SEQ ID NO: 8094
  GFR-binding peptide
  MOD_RES (34), (36): Xaa is C or S
  MOD_RES (14), (15), (16), (17), (18): Xaa is A or G
  MOD_RES (19), (20), (21), (22): Xaa is A or G or is absent

SEQ ID NO: 15387 - protein, 36 aa, Artificial Sequence; identical to SEQ ID NO: 8095
  GFR-binding peptide
  MOD_RES (1), (35): Xaa is C or S
  MOD_RES (15), (16), (17), (18), (19): Xaa is A or G
  MOD_RES (20), (21), (22), (23): Xaa is A or G or is absent

SEQ ID NO: 15388 - protein, 38 aa, Artificial Sequence
  GFR-binding peptide
  MOD_RES (3), (4), (35), (37): Xaa is C or S
SPXXVSQDLEPLPIVYYIGKTPKIEQLSNMIVKSXKXS

SEQ ID NO: 15389 - protein, 42 aa, Artificial Sequence; identical to SEQ ID NO: 8096
  GFR-binding peptide
  MOD_RES (4), (5), (39), (41): Xaa is C or S
  MOD_RES (19), (20), (21), (22), (23): Xaa is A or G
  MOD_RES (24), (25), (26), (27): Xaa is A or G or is absent

SEQ ID NO: 15390 - protein, 42 aa, Artificial Sequence; identical to SEQ ID NO: 8097
  GFR-binding peptide
  MOD_RES (6), (7), (41): Xaa is C or S
  MOD_RES (21), (22), (23), (24), (25): Xaa is A or G
  MOD_RES (26), (27), (28), (29): Xaa is A or G or is absent

SEQ ID NO: 15391 - protein, 40 aa, Artificial Sequence
  GFR-binding peptide
  MOD_RES (6), (7): Xaa is C or S
  MOD_RES (21), (22), (23), (24), (25): Xaa is A or G
  MOD_RES (26), (27), (28), (29): Xaa is A or G or is absent
SIPKAXXVPTELSPISMLFIXXXXXXXXXYKQYEEMVVEG

SEQ ID NO: 15392 - protein, 34 aa, Artificial Sequence; identical to SEQ ID NO: 8101
  GFR-binding peptide
  MOD_RES (34), (34): Xaa is C or S
  MOD_RES (14), (15), (16), (17), (18): Xaa is A or G
  MOD_RES (19), (20), (21), (22): Xaa is A or G or is absent

SEQ ID NO: 15393 - protein, 38 aa, Artificial Sequence
  GFR-binding peptide
  MOD_RES (4), (5): Xaa is C or S
  MOD_RES (19), (20), (21), (22), (23): Xaa is A or G
  MOD_RES (24), (25), (26), (27): Xaa is A or G or is absent
PKPXXAPTQLSPISVLFIXXXXXXXXXYKQYENMVVRA

SEQ ID NO: 15394 - protein, 32 aa, Artificial Sequence
  GFR-binding peptide
  MOD_RES (14), (15), (16), (17), (18): Xaa is A or G
  MOD_RES (19), (20), (21), (22): Xaa is A or G or is absent
APTQLEPLTVLYYXXXXXXXXXEQLSNNMVVR

SEQ ID NO: 15395 - protein, 34 aa, Artificial Sequence
  GFR-binding peptide
  MOD_RES (3), (4): Xaa is C or S
KAXXVPTELEPLTMLYYDEYDKVVEQLSNEMVVE

SEQ ID NO: 15396 - protein, 39 aa, Artificial Sequence; identical to SEQ ID NO: 8102
  GFR-binding peptide
  MOD_RES (4), (5), (39): Xaa is C or S
  MOD_RES (19), (20), (21), (22), (23): Xaa is A or G
  MOD_RES (24), (25), (26), (27): Xaa is A or G or is absent

SEQ ID NO: 15397 - protein, 36 aa, Artificial Sequence
  GFR-binding peptide
  MOD_RES (1), (34), (36): Xaa is C or S
  MOD_RES (15), (16), (17), (18), (19): Xaa is A or G
  MOD_RES (20), (21), (22), (23): Xaa is A or G or is absent
XVPQDLEPLPIVYYXXXXXXXXXEQLSNMVVKSXKX

SEQ ID NO: 15398 - protein, 39 aa, Artificial Sequence
  GFR-binding peptide
  MOD_RES (4), (5), (39): Xaa is C or S
  MOD_RES (19), (20), (21), (22), (23): Xaa is A or G
  MOD_RES (24), (25), (26), (27): Xaa is A or G or is absent
PKPXXAPTKLSPISVLFIXXXXXXXXXYKQYENMVVRSX

SEQ ID NO: 15399 - protein, 36 aa, Artificial Sequence
  GFR-binding peptide
  MOD_RES (5), (6): Xaa is C or S
SASPXXVPQDLEPLPIVYYVGRTPKVEQLSNMVVKS

SEQ ID NO: 15400 - protein, 37 aa, Artificial Sequence
  GFR-binding peptide
  MOD_RES (3), (4), (36): Xaa is C or S
PTXXVPTRLEPLTILYYDSANNVVEQLSNDMVVESXG

SEQ ID NO: 15401 - protein, 35 aa, Artificial Sequence; identical to SEQ ID NO: 8106
  GFR-binding peptide
  MOD_RES (2), (3): Xaa is C or S
  MOD_RES (17), (18), (19), (20), (21): Xaa is A or G
  MOD_RES (22), (23), (24), (25): Xaa is A or G or is absent

SEQ ID NO: 15402 - protein, 41 aa, Artificial Sequence
  GFR-binding peptide
  MOD_RES (4), (5), (39), (41): Xaa is C or S
  MOD_RES (19), (20), (21), (22), (23): Xaa is A or G
  MOD_RES (24), (25), (26), (27): Xaa is A or G or is absent
PKPXXAPTQLEPLTVLYYXXXXXXXXXEQLSNNMVVRAXGX

SEQ ID NO: 15403 - protein, 34 aa, Artificial Sequence
  GFR-binding peptide
  MOD_RES (32), (34): Xaa is C or S
VPTELSPISMLFIDENEKVVYKQYEDMVVEGXGX

SEQ ID NO: 15404 - protein, 40 aa, Artificial Sequence
  GFR-binding peptide
  MOD_RES (2), (3), (37), (39): Xaa is C or S
  MOD_RES (17), (18), (19), (20), (21): Xaa is A or G
  MOD_RES (22), (23), (24), (25): Xaa is A or G or is absent
TXXVPTRLSAISILYLXXXXXXXXXLKNYQDMVVESXGXR

SEQ ID NO: 15405 - protein, 37 aa, Artificial Sequence
  GFR-binding peptide
  MOD_RES (1), (2), (35), (37): Xaa is C or S
  MOD_RES (16), (17), (18), (19), (20): Xaa is A or G
  MOD_RES (21), (22), (23), (24): Xaa is A or G or is absent
XXVPQALEPLTILYYXXXXXXXXXEQLSNMIVRSXKX

SEQ ID NO: 15406 - protein, 40 aa, Artificial Sequence
  GFR-binding peptide
  MOD_RES (2), (3), (37), (39): Xaa is C or S
  MOD_RES (17), (18), (19), (20), (21): Xaa is A or G
  MOD_RES (22), (23), (24), (25): Xaa is A or G or is absent
PXXAPTQLEPLPVVYYXXXXXXXXXEQLSNNMVVRAXGXH

SEQ ID NO: 15407 - protein, 35 aa, Artificial Sequence
  GFR-binding peptide
  MOD_RES (5), (5): Xaa is C or S
TKPTXAPTKLSPISVLFIDDSSNVIYKQYENMVVR

SEQ ID NO: 15408 - protein, 39 aa, Artificial Sequence; identical to SEQ ID NO: 8107
  GFR-binding peptide
  MOD_RES (4), (38): Xaa is C or S
  MOD_RES (18), (19), (20), (21), (22): Xaa is A or G
  MOD_RES (23), (24), (25), (26): Xaa is A or G or is absent

SEQ ID NO: 15409 - protein, 39 aa, Artificial Sequence; identical to SEQ ID NO: 8108
  GFR-binding peptide
  MOD_RES (5), (6): Xaa is C or S
  MOD_RES (20), (21), (22), (23), (24): Xaa is A or G
  MOD_RES (25), (26), (27), (28): Xaa is A or G or is absent

SEQ ID NO: 15410 - protein, 35 aa, Artificial Sequence
  GFR-binding peptide
  MOD_RES (32), (34): Xaa is C or S
VPTRLNAISILYFDSANNVVLKKYRDMVVESXGXR

SEQ ID NO: 15411 - protein, 36 aa, Artificial Sequence; identical to SEQ ID NO: 8110
  GFR-binding peptide
  MOD_RES (3), (35): Xaa is C or S

SEQ ID NO: 15412 - protein, 44 aa, Artificial Sequence
  GFR-binding peptide
  MOD_RES (6), (7), (41), (43): Xaa is C or S
  MOD_RES (21), (22), (23), (24), (25): Xaa is A or G
  MOD_RES (26), (27), (28), (29): Xaa is A or G or is absent
SIPKAXXVPTELSPISMLFIXXXXXXXXXYKQYEEMVVEGXGXR

SEQ ID NO: 15413 - protein, 38 aa, Artificial Sequence
  GFR-binding peptide
  MOD_RES (4), (5): Xaa is C or S
  MOD_RES (19), (20), (21), (22), (23): Xaa is A or G
  MOD_RES (24), (25), (26), (27): Xaa is A or G or is absent
PPTXXVPTRLNAISILYFXXXXXXXXXLKKYRDMVVES

SEQ ID NO: 15414 - protein, 43 aa, Artificial Sequence
  GFR-binding peptide
  MOD_RES (5), (6), (40), (42): Xaa is C or S
  MOD_RES (20), (21), (22), (23), (24): Xaa is A or G
  MOD_RES (25), (26), (27), (28): Xaa is A or G or is absent
VPKPXXAPTQLEPLPVVYYXXXXXXXXXEQLSNNMVVRAXGXH

SEQ ID NO: 15415 - protein, 37 aa, Artificial Sequence
  GFR-binding peptide
  MOD_RES (3), (4): Xaa is C or S
  MOD_RES (18), (19), (20), (21), (22): Xaa is A or G
  MOD_RES (23), (24), (25), (26): Xaa is A or G or is absent
KAXXVPTELSPISMLFIXXXXXXXXXYKQYEDMVVEG

SEQ ID NO: 15416 - protein, 35 aa, Artificial Sequence; identical to SEQ ID NO: 8116
  GFR-binding peptide
  MOD_RES (33), (35): Xaa is C or S
  MOD_RES (14), (15), (16), (17), (18): Xaa is A or G
  MOD_RES (19), (20), (21), (22): Xaa is A or G or is absent

SEQ ID NO: 15417 - protein, 36 aa, Artificial Sequence
  GFR-binding peptide
  MOD_RES (1), (2), (36): Xaa is C or S
  MOD_RES (16), (17), (18), (19), (20): Xaa is A or G
  MOD_RES (21), (22), (23), (24): Xaa is A or G or is absent
XXAPTQLEPLPVVYYXXXXXXXXXEQLSNNMVVRAX

SEQ ID NO: 15418 - protein, 36 aa, Artificial Sequence; identical to SEQ ID NO: 8121
  GFR-binding peptide
  MOD_RES (33), (35): Xaa is C or S
  MOD_RES (14), (15), (16), (17), (18): Xaa is A or G
  MOD_RES (19), (20), (21), (22): Xaa is A or G or is absent

SEQ ID NO: 15419 - protein, 42 aa, Artificial Sequence; identical to SEQ ID NO: 8122
  GFR-binding peptide
  MOD_RES (5), (39), (41): Xaa is C or S
  MOD_RES (19), (20), (21), (22), (23): Xaa is A or G
  MOD_RES (24), (25), (26), (27): Xaa is A or G or is absent

SEQ ID NO: 15420 - protein, 34 aa, Artificial Sequence
  GFR-binding peptide
  MOD_RES (1), (34): Xaa is C or S
  MOD_RES (15), (16), (17), (18), (19): Xaa is A or G
  MOD_RES (20), (21), (22), (23): Xaa is A or G or is absent
XVPQALSPISILFIXXXXXXXXXYKQYEMIVRSX

SEQ ID NO: 15421 - protein, 44 aa, Artificial Sequence
  GFR-binding peptide
  MOD_RES (7), (41), (43): Xaa is C or S
  MOD_RES (21), (22), (23), (24), (25): Xaa is A or G
  MOD_RES (26), (27), (28), (29): Xaa is A or G or is absent
HVTKPTXAPTKLEPLPVVYYXXXXXXXXXEQLSNNMVVRSXGXH

SEQ ID NO: 15422 - protein, 39 aa, Artificial Sequence
  GFR-binding peptide
  MOD_RES (6), (7), (38): Xaa is C or S
ASASPXXVSQDLEPLPIVYYIGKTPKIEQLSNMIVKSXK

SEQ ID NO: 15423 - protein, 42 aa, Artificial Sequence; identical to SEQ ID NO: 8123
  GFR-binding peptide
  MOD_RES (4), (5), (39), (41): Xaa is C or S
  MOD_RES (19), (20), (21), (22), (23): Xaa is A or G
  MOD_RES (24), (25), (26), (27): Xaa is A or G or is absent

SEQ ID NO: 15424 - protein, 37 aa, Artificial Sequence
  GFR-binding peptide
  MOD_RES (4), (5), (36): Xaa is C or S
AAPXXVPQALSPISILFIVGRKPKVYKQYEMIVRSXK

SEQ ID NO: 15425 - protein, 36 aa, Artificial Sequence
  GFR-binding peptide
  MOD_RES (2), (3): Xaa is C or S
  MOD_RES (17), (18), (19), (20), (21): Xaa is A or G
  MOD_RES (22), (23), (24), (25): Xaa is A or G or is absent
TXXVPTRLNAISILYFXXXXXXXXXLKKYRDMVVES

SEQ ID NO: 15426 - protein, 33 aa, Artificial Sequence; identical to SEQ ID NO: 8125
  GFR-binding peptide
  MOD_RES (31), (33): Xaa is C or S

SEQ ID NO: 15427 - protein, 37 aa, Artificial Sequence
  GFR-binding peptide
  MOD_RES (4), (5): Xaa is C or S
  MOD_RES (19), (20), (21), (22), (23): Xaa is A or G
  MOD_RES (24), (25), (26), (27): Xaa is A or G or is absent
PPTXXVPTRLSAISILYLXXXXXXXXXLKNYQDMVVE

SEQ ID NO: 15428 - protein, 38 aa, Artificial Sequence; identical to SEQ ID NO: 8129
  GFR-binding peptide
  MOD_RES (5), (6): Xaa is C or S
  MOD_RES (20), (21), (22), (23), (24): Xaa is A or G
  MOD_RES (25), (26), (27), (28): Xaa is A or G or is absent

SEQ ID NO: 15429 - protein, 40 aa, Artificial Sequence
  GFR-binding peptide
  MOD_RES (4), (5), (39): Xaa is C or S
  MOD_RES (19), (20), (21), (22), (23): Xaa is A or G
  MOD_RES (24), (25), (26), (27): Xaa is A or G or is absent
PKAXXVPTELEPLPMVYYXXXXXXXXXEQLSNDMVVEGXG

SEQ ID NO: 15430 - protein, 38 aa, Artificial Sequence
  GFR-binding peptide
  MOD_RES (3), (4), (37): Xaa is C or S
  MOD_RES (18), (19), (20), (21), (22): Xaa is A or G
  MOD_RES (23), (24), (25), (26): Xaa is A or G or is absent
SPXXVPQDLEPLTILYYXXXXXXXXXEQLSNMVVKSXK

SEQ ID NO: 15431 - protein, 39 aa, Artificial Sequence; identical to SEQ ID NO: 8132
  GFR-binding peptide
  MOD_RES (6), (7): Xaa is C or S
  MOD_RES (21), (22), (23), (24), (25): Xaa is A or G
  MOD_RES (26), (27), (28), (29): Xaa is A or G or is absent

SEQ ID NO: 15432 - protein, 35 aa, Artificial Sequence
  GFR-binding peptide
  MOD_RES (1), (2): Xaa is C or S
  MOD_RES (16), (17), (18), (19), (20): Xaa is A or G
  MOD_RES (21), (22), (23), (24): Xaa is A or G or is absent
XXAPTKLSPISVLFIXXXXXXXXXYKQYENMVVRS

SEQ ID NO: 15433 - protein, 35 aa, Artificial Sequence
  GFR-binding peptide
  MOD_RES (3), (4): Xaa is C or S
KPXXAPTKLEPLTVLYYDDSSNVIEQLSNNMVVRS

SEQ ID NO: 15434 - protein, 36 aa, Artificial Sequence
  GFR-binding peptide
  MOD_RES (5), (6): Xaa is C or S
SAAPXXVPQALEPLTILYYVGRKPKVEQLSNMIVRS

SEQ ID NO: 15435 - protein, 38 aa, Artificial Sequence
  GFR-binding peptide
  MOD_RES (6), (7): Xaa is C or S
STPPTXXVPTRLEPLTILYYDSANNVVEQLSNDMVVES

SEQ ID NO: 15436 - protein, 34 aa, Artificial Sequence; identical to SEQ ID NO: 8142
  GFR-binding peptide
  MOD_RES (1), (33): Xaa is C or S

SEQ ID NO: 15437 - protein, 41 aa, Artificial Sequence
  GFR-binding peptide
  MOD_RES (5), (6), (40): Xaa is C or S
  MOD_RES (20), (21), (22), (23), (24): Xaa is A or G
  MOD_RES (25), (26), (27), (28): Xaa is A or G or is absent
IPKAXXVPTELEPLTMLYYXXXXXXXXXEQLSNEMVVEGXG

SEQ ID NO: 15438 - protein, 32 aa, Artificial Sequence
  GFR-binding peptide
  MOD_RES (32), (32): Xaa is C or S
VPTELEPLPMVYYDENEKVVEQLSNDMVVEGX

SEQ ID NO: 15439 - protein, 35 aa, Artificial Sequence; identical to SEQ ID NO: 8145
  GFR-binding peptide
  MOD_RES (2), (3), (34): Xaa is C or S

SEQ ID NO: 15440 - protein, 35 aa, Artificial Sequence; identical to SEQ ID NO: 8147
  GFR-binding peptide
  MOD_RES (1), (2), (33), (35): Xaa is C or S

SEQ ID NO: 15441 - protein, 32 aa, Artificial Sequence
  GFR-binding peptide
  MOD_RES (1), (1): Xaa is C or S
XAPTQLEPLPVVYYDDSSNVIEQLSNNMVVRA

SEQ ID NO: 15442 - protein, 38 aa, Artificial Sequence
  GFR-binding peptide
  MOD_RES (5), (6): Xaa is C or S
  MOD_RES (20), (21), (22), (23), (24): Xaa is A or G
  MOD_RES (25), (26), (27), (28): Xaa is A or G or is absent
VPKPXXAPTKLSPISVLFIXXXXXXXXXYKQYENMVVR

SEQ ID NO: 15443 - protein, 39 aa, Artificial Sequence
  GFR-binding peptide
  MOD_RES (3), (4), (36), (38): Xaa is C or S
KPXXAPTKLEPLPVVYYDDSSNVIEQLSNNMVVRSXGXH

SEQ ID NO: 15444 - protein, 33 aa, Artificial Sequence; identical to SEQ ID NO: 8150
  GFR-binding peptide
  MOD_RES (2), (3): Xaa is C or S

SEQ ID NO: 15445 - protein, 36 aa, Artificial Sequence; identical to SEQ ID NO: 8151
  GFR-binding peptide
  MOD_RES (1), (2), (35): Xaa is C or S
  MOD_RES (16), (17), (18), (19), (20): Xaa is A or G
  MOD_RES (21), (22), (23), (24): Xaa is A or G or is absent

SEQ ID NO: 15446 - protein, 33 aa, Artificial Sequence; identical to SEQ ID NO: 8152
  GFR-binding peptide
  MOD_RES (2), (3): Xaa is C or S

SEQ ID NO: 15447 - protein, 38 aa, Artificial Sequence
  GFR-binding peptide
  MOD_RES (2), (3), (35), (37): Xaa is C or S
PXXAPTKLSPISVLFIDDSSNVIYKQYENMVVRSXGXH

SEQ ID NO: 15448 - protein, 40 aa, Artificial Sequence; identical to SEQ ID NO: 8155
  GFR-binding peptide
  MOD_RES (5), (39): Xaa is C or S
  MOD_RES (19), (20), (21), (22), (23): Xaa is A or G
  MOD_RES (24), (25), (26), (27): Xaa is A or G or is absent

SEQ ID NO: 15449 - protein, 40 aa, Artificial Sequence
  GFR-binding peptide
  MOD_RES (4), (5), (37), (39): Xaa is C or S
PPTXXVPTRLSAISILYLDSANNVVLKNYQDMVVESXGXR

SEQ ID NO: 15450 - protein, 42 aa, Artificial Sequence
  GFR-binding peptide
  MOD_RES (6), (7), (41): Xaa is C or S
  MOD_RES (21), (22), (23), (24), (25): Xaa is A or G
  MOD_RES (26), (27), (28), (29): Xaa is A or G or is absent
YVPKPXXAPTKLSPISVLFIXXXXXXXXXYKQYENMVVRSXG

SEQ ID NO: 15451 - protein, 43 aa, Artificial Sequence
  GFR-binding peptide
  MOD_RES (6), (7), (41), (43): Xaa is C or S
  MOD_RES (21), (22), (23), (24), (25): Xaa is A or G
  MOD_RES (26), (27), (28), (29): Xaa is A or G or is absent
SIPKAXXVPTELEPLPMVYYXXXXXXXXXEQLSNEMVVEGXGX

SEQ ID NO: 15452 - protein, 34 aa, Artificial Sequence
  GFR-binding peptide
  MOD_RES (32), (34): Xaa is C or S
VPTELEPLTMLYYDEYDKVVEQLSNEMVVEGXGX

SEQ ID NO: 15453 - protein, 34 aa, Artificial Sequence
  GFR-binding peptide
  MOD_RES (2), (3), (34): Xaa is C or S
PXXVPQALSPISILFIVGRKPKVYKQYEMIVRSX

SEQ ID NO: 15454 - protein, 33 aa, Artificial Sequence; identical to SEQ ID NO: 8159
  GFR-binding peptide
  MOD_RES (2), (3): Xaa is C or S

SEQ ID NO: 15455 - protein, 41 aa, Artificial Sequence; identical to SEQ ID NO: 8160
  GFR-binding peptide
  MOD_RES (5), (6), (40): Xaa is C or S
  MOD_RES (20), (21), (22), (23), (24): Xaa is A or G
  MOD_RES (25), (26), (27), (28): Xaa is A or G or is absent

SEQ ID NO: 15456 - protein, 36 aa, Artificial Sequence
  GFR-binding peptide
  MOD_RES (2), (3), (34), (36): Xaa is C or S
PXXVPQDLEPLPIVYYVGRTPKVEQLSNMVVKSXKX

SEQ ID NO: 15457 - protein, 38 aa, Artificial Sequence; identical to SEQ ID NO: 8161
  GFR-binding peptide
  MOD_RES (5), (6), (37): Xaa is C or S

SEQ ID NO: 15458 - protein, 36 aa, Artificial Sequence; identical to SEQ ID NO: 8162
  GFR-binding peptide
  MOD_RES (2), (3), (36): Xaa is C or S
  MOD_RES (17), (18), (19), (20), (21): Xaa is A or G
  MOD_RES (22), (23), (24), (25): Xaa is A or G or is absent

SEQ ID NO: 15459 - protein, 42 aa, Artificial Sequence
  GFR-binding peptide
  MOD_RES (6), (7), (39), (41): Xaa is C or S
TVPKPXXAPTQLEPLTVLYYDDSSNVIEQLSNNMVVRAXGXH

SEQ ID NO: 15460 - protein, 33 aa, Artificial Sequence
  GFR-binding peptide
  MOD_RES (1), (1): Xaa is C or S
  MOD_RES (15), (16), (17), (18), (19): Xaa is A or G
  MOD_RES (20), (21), (22), (23): Xaa is A or G or is absent
XVPTELSPISMLFIXXXXXXXXXYKQYEDMVVE

SEQ ID NO: 15461 - protein, 36 aa, Artificial Sequence
  GFR-binding peptide
  MOD_RES (1), (2), (36): Xaa is C or S
  MOD_RES (16), (17), (18), (19), (20): Xaa is A or G
  MOD_RES (21), (22), (23), (24): Xaa is A or G or is absent
XXVPTELSPISMLFIXXXXXXXXXYKQYEEMVVEGX

SEQ ID NO: 15462 - protein, 36 aa, Artificial Sequence; identical to SEQ ID NO: 8163
  GFR-binding peptide
  MOD_RES (3), (4): Xaa is C or S
  MOD_RES (18), (19), (20), (21), (22): Xaa is A or G
  MOD_RES (23), (24), (25), (26): Xaa is A or G or is absent

SEQ ID NO: 15463 - protein, 34 aa, Artificial Sequence; identical to SEQ ID NO: 8165
  GFR-binding peptide
  MOD_RES (33), (33): Xaa is C or S
  MOD_RES (14), (15), (16), (17), (18): Xaa is A or G
  MOD_RES (19), (20), (21), (22): Xaa is A or G or is absent

SEQ ID NO: 15464 - protein, 37 aa, Artificial Sequence
  GFR-binding peptide
  MOD_RES (7), (7): Xaa is C or S
HVTKPTXAPTKLSPISVLFIDDSSNVIYKQYENMVVR

SEQ ID NO: 15465 - protein, 38 aa, Artificial Sequence
  GFR-binding peptide
  MOD_RES (2), (3), (35), (37): Xaa is C or S
AXXVPTELEPLPMVYYDENEKVVEQLSNDMVVEGXGXR

SEQ ID NO: 15466 - protein, 38 aa, Artificial Sequence
  GFR-binding peptide
  MOD_RES (6), (7): Xaa is C or S
KIPKAXXVPTELSPISMLFIDENEKVVYKQYEDMVVEG

SEQ ID NO: 15467 - protein, 33 aa, Artificial Sequence; identical to SEQ ID NO: 8168
  GFR-binding peptide
  MOD_RES (1), (2), (33): Xaa is C or S

SEQ ID NO: 15468 - protein, 31 aa, Artificial Sequence
  GFR-binding peptide
APTQLSPISVLFIDDSSNVIYKQYENMVVRA

SEQ ID NO: 15469 - protein, 35 aa, Artificial Sequence
  GFR-binding peptide
  MOD_RES (2), (3): Xaa is C or S
  MOD_RES (17), (18), (19), (20), (21): Xaa is A or G
  MOD_RES (22), (23), (24), (25): Xaa is A or G or is absent
AXXVPTELEPLPMVYYXXXXXXXXXEQLSNEMVVE

SEQ ID NO: 15470 - protein, 36 aa, Artificial Sequence
  GFR-binding peptide
  MOD_RES (3), (4), (36): Xaa is C or S
KAXXVPTELSPISMLFIDENEKVVYKQYEDMVVEGX

SEQ ID NO: 15471 - protein, 40 aa, Artificial Sequence
  GFR-binding peptide
  MOD_RES (2), (3), (37), (39): Xaa is C or S
  MOD_RES (17), (18), (19), (20), (21): Xaa is A or G
  MOD_RES (22), (23), (24), (25): Xaa is A or G or is absent
TXXVPTRLEPLTILYYXXXXXXXXXEQLSNDMVVESXGXR

SEQ ID NO: 15472 - protein, 35 aa, Artificial Sequence
  GFR-binding peptide
  MOD_RES (2), (3): Xaa is C or S
  MOD_RES (17), (18), (19), (20), (21): Xaa is A or G
  MOD_RES (22), (23), (24), (25): Xaa is A or G or is absent
PXXVPQALEPLPIVYYXXXXXXXXXEQLSNMIVRS

SEQ ID NO: 15473 - protein, 34 aa, Artificial Sequence
  GFR-binding peptide
  MOD_RES (1), (1): Xaa is C or S
  MOD_RES (15), (16), (17), (18), (19): Xaa is A or G
  MOD_RES (20), (21), (22), (23): Xaa is A or G or is absent
XVPTELSPISMLFIXXXXXXXXXYKQYEEMVVEG

SEQ ID NO: 15474 - protein, 35 aa, Artificial Sequence
  GFR-binding peptide
  MOD_RES (2), (3): Xaa is C or S
  MOD_RES (17), (18), (19), (20), (21): Xaa is A or G
  MOD_RES (22), (23), (24), (25): Xaa is A or G or is absent
PXXVPQALEPLTILYYXXXXXXXXXEQLSNMIVRS

SEQ ID NO: 15475 - protein, 32 aa, Artificial Sequence; identical to SEQ ID NO: 8175
  GFR-binding peptide
  MOD_RES (31), (31): Xaa is C or S

SEQ ID NO: 15476 - protein, 38 aa, Artificial Sequence; identical to SEQ ID NO: 8178
  GFR-binding peptide
  MOD_RES (4), (5): Xaa is C or S
  MOD_RES (19), (20), (21), (22), (23): Xaa is A or G
  MOD_RES (24), (25), (26), (27): Xaa is A or G or is absent

SEQ ID NO: 15477 - protein, 41 aa, Artificial Sequence
  GFR-binding peptide
  MOD_RES (5), (6), (39), (41): Xaa is C or S
  MOD_RES (20), (21), (22), (23), (24): Xaa is A or G
  MOD_RES (25), (26), (27), (28): Xaa is A or G or is absent
SAAPXXVPQALEPLPIVYYXXXXXXXXXEQLSNMIVRSXKX

SEQ ID NO: 15478 - protein, 38 aa, Artificial Sequence; identical to SEQ ID NO: 8180
  GFR-binding peptide
  MOD_RES (4), (5), (37): Xaa is C or S

SEQ ID NO: 15479 - protein, 36 aa, Artificial Sequence
  GFR-binding peptide
  MOD_RES (2), (34), (36): Xaa is C or S
TXAPTKLEPLPVVYYDDSSNVIEQLSNNMVVRSXGX

SEQ ID NO: 15480 - protein, 39 aa, Artificial Sequence; identical to SEQ ID NO: 8182
  GFR-binding peptide
  MOD_RES (4), (5), (36), (38): Xaa is C or S

SEQ ID NO: 15481 - protein, 33 aa, Artificial Sequence
  GFR-binding peptide
  MOD_RES (33), (33): Xaa is C or S
  MOD_RES (14), (15), (16), (17), (18): Xaa is A or G
  MOD_RES (19), (20), (21), (22): Xaa is A or G or is absent
VPQDLEPLTILYYXXXXXXXXXEQLSNMVVKSX

SEQ ID NO: 15482 - protein, 36 aa, Artificial Sequence
  GFR-binding peptide
  MOD_RES (2), (3): Xaa is C or S
  MOD_RES (17), (18), (19), (20), (21): Xaa is A or G
  MOD_RES (22), (23), (24), (25): Xaa is A or G or is absent
PXXAPTKLEPLTVLYYXXXXXXXXXEQLSNNMVVRS

SEQ ID NO: 15483 - protein, 32 aa, Artificial Sequence; identical to SEQ ID NO: 8185
  GFR-binding peptide
  MOD_RES (14), (15), (16), (17), (18): Xaa is A or G
  MOD_RES (19), (20), (21), (22): Xaa is A or G or is absent

SEQ ID NO: 15484 - protein, 37 aa, Artificial Sequence
  GFR-binding peptide
  MOD_RES (1), (2), (34), (36): Xaa is C or S
XXVPTRLSAISILYLDSANNVVLKNYQDMVVESXGXR

SEQ ID NO: 15485 - protein, 43 aa, Artificial Sequence; identical to SEQ ID NO: 8186
  GFR-binding peptide
  MOD_RES (6), (7), (40), (42): Xaa is C or S
  MOD_RES (21), (22), (23), (24), (25): Xaa is A or G
  MOD_RES (26), (27), (28), (29): Xaa is A or G or is absent

SEQ ID NO: 15486 - protein, 31 aa, Artificial Sequence
  GFR-binding peptide
  MOD_RES (1), (1): Xaa is C or S
XVPQALSPISILFIVGRKPKVYKQYEMIVRS

SEQ ID NO: 15487 - protein, 38 aa, Artificial Sequence
  GFR-binding peptide
  MOD_RES (4), (5): Xaa is C or S
  MOD_RES (19), (20), (21), (22), (23): Xaa is A or G
  MOD_RES (24), (25), (26), (27): Xaa is A or G or is absent
PPTXXVPTRLSPISILFIXXXXXXXXXYKQYEDMVVES

SEQ ID NO: 15488 - protein, 39 aa, Artificial Sequence; identical to SEQ ID NO: 8189
  GFR-binding peptide
  MOD_RES (5), (6), (38): Xaa is C or S

SEQ ID NO: 15489 - protein, 41 aa, Artificial Sequence; identical to SEQ ID NO: 8190
  GFR-binding peptide
  MOD_RES (5), (6), (40): Xaa is C or S
  MOD_RES (20), (21), (22), (23), (24): Xaa is A or G
  MOD_RES (25), (26), (27), (28): Xaa is A or G or is absent

SEQ ID NO: 15490 - protein, 36 aa, Artificial Sequence; identical to SEQ ID NO: 8191
  GFR-binding peptide
  MOD_RES (33), (35): Xaa is C or S
  MOD_RES (14), (15), (16), (17), (18): Xaa is A or G
  MOD_RES (19), (20), (21), (22): Xaa is A or G or is absent

SEQ ID NO: 15491 - protein, 37 aa, Artificial Sequence
  GFR-binding peptide
  MOD_RES (2), (3), (34), (36): Xaa is C or S
PXXVPQALEPLTILYYVGRKPKVEQLSNMIVRSXKXS

SEQ ID NO: 15492 - protein, 37 aa, Artificial Sequence
  GFR-binding peptide
  MOD_RES (3), (4), (36): Xaa is C or S
KPXXAPTQLEPLPVVYYDDSSNVIEQLSNNMVVRAXG

SEQ ID NO: 15493 - protein, 30 aa, Artificial Sequence
  GFR-binding peptide
VPTRLSAISILYLDSANNVVLKNYQDMVVE

SEQ ID NO: 15494 - protein, 37 aa, Artificial Sequence
  GFR-binding peptide
  MOD_RES (4), (5): Xaa is C or S
  MOD_RES (19), (20), (21), (22), (23): Xaa is A or G
  MOD_RES (24), (25), (26), (27): Xaa is A or G or is absent
PPTXXVPTRLSPISILFIXXXXXXXXXYKQYEDMVVE

SEQ ID NO: 15495 - protein, 36 aa, Artificial Sequence
  GFR-binding peptide
  MOD_RES (1), (2), (34), (36): Xaa is C or S
XXVPTRLEPLTILYYDSANNVVEQLSNDMVVESXGX

SEQ ID NO: 15496 - protein, 36 aa, Artificial Sequence
  GFR-binding peptide
  MOD_RES (3), (3): Xaa is C or S
  MOD_RES (17), (18), (19), (20), (21): Xaa is A or G
  MOD_RES (22), (23), (24), (25): Xaa is A or G or is absent
PTXAPTKLEPLPVVYYXXXXXXXXXEQLSNNMVVRS

SEQ ID NO: 15497 - protein, 37 aa, Artificial Sequence
  GFR-binding peptide
  MOD_RES (3), (4), (36): Xaa is C or S
KAXXVPTELEPLTMLYYDEYDKVVEQLSNEMVVEGXG

SEQ ID NO: 15498 - protein, 34 aa, Artificial Sequence; identical to SEQ ID NO: 8193
  GFR-binding peptide
  MOD_RES (1), (32), (34): Xaa is C or S

SEQ ID NO: 15499 - protein, 38 aa, Artificial Sequence
  GFR-binding peptide
  MOD_RES (2), (3), (36), (38): Xaa is C or S
  MOD_RES (17), (18), (19), (20), (21): Xaa is A or G
  MOD_RES (22), (23), (24), (25): Xaa is A or G or is absent
PXXVPQDLSPISILFIXXXXXXXXXYKQYEMVVKSXKX

SEQ ID NO: 15500 - protein, 37 aa, Artificial Sequence
  GFR-binding peptide
  MOD_RES (34), (36): Xaa is C or S
  MOD_RES (14), (15), (16), (17), (18): Xaa is A or G
  MOD_RES (19), (20), (21), (22): Xaa is A or G or is absent
APTKLSPISVLFIXXXXXXXXXYKQYENMVVRSXGXH

SEQ ID NO: 15501 - protein, 40 aa, Artificial Sequence; identical to SEQ ID NO: 8195
  GFR-binding peptide
  MOD_RES (3), (4), (37), (39): Xaa is C or S
  MOD_RES (18), (19), (20), (21), (22): Xaa is A or G
  MOD_RES (23), (24), (25), (26): Xaa is A or G or is absent

SEQ ID NO: 15502 - protein, 38 aa, Artificial Sequence
  GFR-binding peptide
  MOD_RES (6), (7), (38): Xaa is C or S
ASASPXXVSQDLEPLPIVYYIGKTPKIEQLSNMIVKSX

SEQ ID NO: 15503 - protein, 41 aa, Artificial Sequence
  GFR-binding peptide
  MOD_RES (4), (5), (38), (40): Xaa is C or S
  MOD_RES (19), (20), (21), (22), (23): Xaa is A or G
  MOD_RES (24), (25), (26), (27): Xaa is A or G or is absent
ASPXXVPQDLEPLPIVYYXXXXXXXXXEQLSNMVVKSXKXS

SEQ ID NO: 15504 - protein, 31 aa, Artificial Sequence
  GFR-binding peptide
  MOD_RES (1), (1): Xaa is C or S
XAPTQLEPLPVVYYDDSSNVIEQLSNNMVVR

SEQ ID NO: 15505 - protein, 44 aa, Artificial Sequence; identical to SEQ ID NO: 8197
  GFR-binding peptide
  MOD_RES (6), (7), (41), (43): Xaa is C or S
  MOD_RES (21), (22), (23), (24), (25): Xaa is A or G
  MOD_RES (26), (27), (28), (29): Xaa is A or G or is absent

SEQ ID NO: 15506 - protein, 38 aa, Artificial Sequence
  GFR-binding peptide
  MOD_RES (6), (7): Xaa is C or S
YVPKPXXAPTKLEPLPVVYYDDSSNVIEQLSNNMVVRS

SEQ ID NO: 15507 - protein, 38 aa, Artificial Sequence; identical to SEQ ID NO: 8199
  GFR-binding peptide
  MOD_RES (3), (4), (37): Xaa is C or S
  MOD_RES (18), (19), (20), (21), (22): Xaa is A or G
  MOD_RES (23), (24), (25), (26): Xaa is A or G or is absent

SEQ ID NO: 15508 - protein, 37 aa, Artificial Sequence; identical to SEQ ID NO: 8201
  GFR-binding peptide
  MOD_RES (3), (4), (36): Xaa is C or S

SEQ ID NO: 15509 - protein, 43 aa, Artificial Sequence
  GFR-binding peptide
  MOD_RES (6), (7), (41), (43): Xaa is C or S
  MOD_RES (21), (22), (23), (24), (25): Xaa is A or G
  MOD_RES (26), (27), (28), (29): Xaa is A or G or is absent
STPPTXXVPTRLEPLPIVYYXXXXXXXXXEQLSNDMVVESXGX

SEQ ID NO: 15510 - protein, 36 aa, Artificial Sequence
  GFR-binding peptide
  MOD_RES (3), (4), (36): Xaa is C or S
KPXXAPTKLEPLPVVYYDDSSNVIEQLSNNMVVRSX

SEQ ID NO: 15511 - protein, 41 aa, Artificial Sequence
  GFR-binding peptide
  MOD_RES (6), (7), (40): Xaa is C or S
  MOD_RES (21), (22), (23), (24), (25): Xaa is A or G
  MOD_RES (26), (27), (28), (29): Xaa is A or G or is absent
ASAAPXXVPQALSPISILFIXXXXXXXXXYKQYEMIVRSXK

SEQ ID NO: 15512 - protein, 37 aa, Artificial Sequence
  GFR-binding peptide
  MOD_RES (4), (5): Xaa is C or S
  MOD_RES (19), (20), (21), (22), (23): Xaa is A or G
  MOD_RES (24), (25), (26), (27): Xaa is A or G or is absent
PKAXXVPTELEPLPMVYYXXXXXXXXXEQLSNDMVVE

SEQ ID NO: 15513 - protein, 34 aa, Artificial Sequence; identical to SEQ ID NO: 8208
  GFR-binding peptide
  MOD_RES (1), (2): Xaa is C or S
  MOD_RES (16), (17), (18), (19), (20): Xaa is A or G
  MOD_RES (21), (22), (23), (24): Xaa is A or G or is absent

SEQ ID NO: 15514 - protein, 39 aa, Artificial Sequence
  GFR-binding peptide
  MOD_RES (5), (6): Xaa is C or S
  MOD_RES (20), (21), (22), (23), (24): Xaa is A or G
  MOD_RES (25), (26), (27), (28): Xaa is A or G or is absent
VPKPXXAPTKLEPLPVVYYXXXXXXXXXEQLSNNMVVRS

SEQ ID NO: 15515 - protein, 38 aa, Artificial Sequence
  GFR-binding peptide
  MOD_RES (3), (4), (36), (38): Xaa is C or S
PTXXVPTRLNAISILYFDSANNVVLKKYRDMVVESXGX

SEQ ID NO: 15516 - protein, 35 aa, Artificial Sequence
  GFR-binding peptide
  MOD_RES (2), (3), (34): Xaa is C or S
PXXVSQDLSPISILFIIGKTPKIYKQYEMIVKSXK

SEQ ID NO: 15517 - protein, 39 aa, Artificial Sequence; identical to SEQ ID NO: 8212
  GFR-binding peptide
  MOD_RES (5), (6), (39): Xaa is C or S
  MOD_RES (20), (21), (22), (23), (24): Xaa is A or G
  MOD_RES (25), (26), (27), (28): Xaa is A or G or is absent

SEQ ID NO: 15518 - protein, 36 aa, Artificial Sequence
  GFR-binding peptide
  MOD_RES (1), (33), (35): Xaa is C or S
XVPTRLNAISILYFDSANNVVLKKYRDMVVESXGXR

SEQ ID NO: 15519 - protein, 34 aa, Artificial Sequence; identical to SEQ ID NO: 8215
  GFR-binding peptide
  MOD_RES (1), (2), (33): Xaa is C or S

SEQ ID NO: 15520 - protein, 35 aa, Artificial Sequence
  GFR-binding peptide
  MOD_RES (2), (3), (35): Xaa is C or S
PXXAPTKLEPLTVLYYDDSSNVIEQLSNNMVVRSX

SEQ ID NO: 15521 - protein, 36 aa, Artificial Sequence
  GFR-binding peptide
  MOD_RES (33), (35): Xaa is C or S
  MOD_RES (14), (15), (16), (17), (18): Xaa is A or G
  MOD_RES (19), (20), (21), (22): Xaa is A or G or is absent
VPQALEPLTILYYXXXXXXXXXEQLSNMIVRSXKXS

SEQ ID NO: 15522 - protein, 33 aa, Artificial Sequence
  GFR-binding peptide
  MOD_RES (14), (15), (16), (17), (18): Xaa is A or G
  MOD_RES (19), (20), (21), (22): Xaa is A or G or is absent
VPTELSPISMLFIXXXXXXXXXYKQYEDMVVEG

SEQ ID NO: 15523 - protein, 39 aa, Artificial Sequence
  GFR-binding peptide
  MOD_RES (2), (36), (38): Xaa is C or S
  MOD_RES (16), (17), (18), (19), (20): Xaa is A or G
  MOD_RES (21), (22), (23), (24): Xaa is A or G or is absent
TXAPTKLSPISVLFIXXXXXXXXXYKQYENMVVRSXGXH

SEQ ID NO: 15524 - protein, 41 aa, Artificial Sequence; identical to SEQ ID NO: 8217
  GFR-binding peptide
  MOD_RES (6), (7), (39), (41): Xaa is C or S

SEQ ID NO: 15525 - protein, 34 aa, Artificial Sequence
  GFR-binding peptide
  MOD_RES (1), (1): Xaa is C or S
  MOD_RES (15), (16), (17), (18), (19): Xaa is A or G
  MOD_RES (20), (21), (22), (23): Xaa is A or G or is absent
XAPTKLSPISVLFIXXXXXXXXXYKQYENMVVRS

SEQ ID NO: 15526 - protein, 38 aa, Artificial Sequence; identical to SEQ ID NO: 8218
  GFR-binding peptide
  MOD_RES (6), (7), (38): Xaa is C or S

SEQ ID NO: 15527 - protein, 33 aa, Artificial Sequence
  GFR-binding peptide
  MOD_RES (1), (2): Xaa is C or S
XXAPTKLEPLPVVYYDDSSNVIEQLSNNMVVRS

SEQ ID NO: 15528 - protein, 35 aa, Artificial Sequence
  GFR-binding peptide
  MOD_RES (1), (2), (35): Xaa is C or S
  MOD_RES (16), (17), (18), (19), (20): Xaa is A or G
  MOD_RES (21), (22), (23), (24): Xaa is A or G or is absent
XXVPQDLEPLPIVYYXXXXXXXXXEQLSNMVVKSX

SEQ ID NO: 15529 - protein, 38 aa, Artificial Sequence; identical to SEQ ID NO: 8220
  GFR-binding peptide
  MOD_RES (4), (5), (36), (38): Xaa is C or S

SEQ ID NO: 15530 - protein, 37 aa, Artificial Sequence
  GFR-binding peptide
  MOD_RES (4), (5): Xaa is C or S
  MOD_RES (19), (20), (21), (22), (23): Xaa is A or G
  MOD_RES (24), (25), (26), (27): Xaa is A or G or is absent
PKPXXAPTKLEPLTVLYYXXXXXXXXXEQLSNNMVVR

SEQ ID NO: 15531 - protein, 35 aa, Artificial Sequence
  GFR-binding peptide
  MOD_RES (33), (35): Xaa is C or S
  MOD_RES (14), (15), (16), (17), (18): Xaa is A or G
  MOD_RES (19), (20), (21), (22): Xaa is A or G or is absent
VPQDLEPLPIVYYXXXXXXXXXEQLSNMVVKSXKX

SEQ ID NO: 15532 - protein, 36 aa, Artificial Sequence; identical to SEQ ID NO: 8223
  GFR-binding peptide
  MOD_RES (2), (3), (36): Xaa is C or S
  MOD_RES (17), (18), (19), (20), (21): Xaa is A or G
  MOD_RES (22), (23), (24), (25): Xaa is A or G or is absent

SEQ ID NO: 15533 - protein, 36 aa, Artificial Sequence
  GFR-binding peptide
  MOD_RES (3), (4), (35): Xaa is C or S
SPXXVSQDLEPLPIVYYIGKTPKIEQLSNMIVKSXK

SEQ ID NO: 15534 - protein, 40 aa, Artificial Sequence; identical to SEQ ID NO: 8226
  GFR-binding peptide
  MOD_RES (5), (6), (39): Xaa is C or S
  MOD_RES (20), (21), (22), (23), (24): Xaa is A or G
  MOD_RES (25), (26), (27), (28): Xaa is A or G or is absent

SEQ ID NO: 15535 - protein, 36 aa, Artificial Sequence
  GFR-binding peptide
  MOD_RES (4), (5): Xaa is C or S
PKAXXVPTELEPLTMLYYDENEKVVEQLSNDMVVEG

SEQ ID NO: 15536 - protein, 36 aa, Artificial Sequence
  GFR-binding peptide
  MOD_RES (1), (35): Xaa is C or S
  MOD_RES (15), (16), (17), (18), (19): Xaa is A or G
  MOD_RES (20), (21), (22), (23): Xaa is A or G or is absent
XVPTRLSAISILYLXXXXXXXXXLKNYQDMVVESXG

SEQ ID NO: 15537 - protein, 38 aa, Artificial Sequence
  GFR-binding peptide
  MOD_RES (2), (3), (37): Xaa is C or S
  MOD_RES (17), (18), (19), (20), (21): Xaa is A or G
  MOD_RES (22), (23), (24), (25): Xaa is A or G or is absent
PXXAPTQLSPISVLFIXXXXXXXXXYKQYENMVVRAXG

SEQ ID NO: 15538 - protein, 37 aa, Artificial Sequence; identical to SEQ ID NO: 8227
  GFR-binding peptide
  MOD_RES (3), (4), (36): Xaa is C or S

SEQ ID NO: 15539 - protein, 34 aa, Artificial Sequence; identical to SEQ ID NO: 8229
  GFR-binding peptide
  MOD_RES (33), (33): Xaa is C or S
  MOD_RES (14), (15), (16), (17), (18): Xaa is A or G
  MOD_RES (19), (20), (21), (22): Xaa is A or G or is absent

SEQ ID NO: 15540 - protein, 40 aa, Artificial Sequence; identical to SEQ ID NO: 8230
  GFR-binding peptide
  MOD_RES (4), (5), (39): Xaa is C or S
  MOD_RES (19), (20), (21), (22), (23): Xaa is A or G
  MOD_RES (24), (25), (26), (27): Xaa is A or G or is absent

SEQ ID NO: 15541 - protein, 34 aa, Artificial Sequence
  GFR-binding peptide
  MOD_RES (1), (2): Xaa is C or S
  MOD_RES (16), (17), (18), (19), (20): Xaa is A or G
  MOD_RES (21), (22), (23), (24): Xaa is A or G or is absent
XXVPQDLSPISILFIXXXXXXXXXYKQYEMVVKS

SEQ ID NO: 15542 - protein, 32 aa, Artificial Sequence
  GFR-binding peptide
  MOD_RES (14), (15), (16), (17), (18): Xaa is A or G
  MOD_RES (19), (20), (21), (22): Xaa is A or G or is absent
APTKLEPLTVLYYXXXXXXXXXEQLSNNMVVR

SEQ ID NO: 15543 - protein, 34 aa, Artificial Sequence
  GFR-binding peptide
  MOD_RES (1), (2), (34): Xaa is C or S
XXVPTELEPLPMVYYDEYDKVVEQLSNEMVVEGX

SEQ ID NO: 15544 - protein, 41 aa, Artificial Sequence
  GFR-binding peptide
  MOD_RES (5), (6), (38), (40): Xaa is C or S
IPKAXXVPTELSPISMLFIDEYDKVVYKQYEEMVVEGXGXR

SEQ ID NO: 15545 - protein, 37 aa, Artificial Sequence; identical to SEQ ID NO: 8232
  GFR-binding peptide
  MOD_RES (2), (3), (34), (36): Xaa is C or S

SEQ ID NO: 15546 - protein, 42 aa, Artificial Sequence
  GFR-binding peptide
  MOD_RES (6), (7), (40), (42): Xaa is C or S
  MOD_RES (21), (22), (23), (24), (25): Xaa is A or G
  MOD_RES (26), (27), (28), (29): Xaa is A or G or is absent
ASASPXXVSQDLEPLPIVYYXXXXXXXXXEQLSNMIVKSXKX

SEQ ID NO: 15547 - protein, 37 aa, Artificial Sequence
  GFR-binding peptide
  MOD_RES (1), (2), (34), (36): Xaa is C or S
XXVPTRLNAISILYFDSANNVVLKKYRDMVVESXGXR

SEQ ID NO: 15548 - protein, 36 aa, Artificial Sequence; identical to SEQ ID NO: 8236
  GFR-binding peptide
  MOD_RES (2), (36): Xaa is C or S
  MOD_RES (16), (17), (18), (19), (20): Xaa is A or G
  MOD_RES (21), (22), (23), (24): Xaa is A or G or is absent

SEQ ID NO: 15549 - protein, 36 aa, Artificial Sequence
  GFR-binding peptide
  MOD_RES (4), (5): Xaa is C or S
PKAXXVPTELEPLPMVYYDENEKVVEQLSNDMVVEG

SEQ ID NO: 15550 - protein, 42 aa, Artificial Sequence
  GFR-binding peptide
  MOD_RES (5), (6), (39), (41): Xaa is C or S
  MOD_RES (20), (21), (22), (23), (24): Xaa is A or G
  MOD_RES (25), (26), (27), (28): Xaa is A or G or is absent
SAAPXXVPQALEPLTILYYXXXXXXXXXEQLSNMIVRSXKXS

SEQ ID NO: 15551 - protein, 41 aa, Artificial Sequence
  GFR-binding peptide
  MOD_RES (4), (5), (39), (41): Xaa is C or S
  MOD_RES (19), (20), (21), (22), (23): Xaa is A or G
  MOD_RES (24), (25), (26), (27): Xaa is A or G or is absent
PKPXXAPTKLEPLPVVYYXXXXXXXXXEQLSNNMVVRSXGX

SEQ ID NO: 15552 - protein, 35 aa, Artificial Sequence; identical to SEQ ID NO: 8240
  GFR-binding peptide
  MOD_RES (1), (2): Xaa is C or S
  MOD_RES (16), (17), (18), (19), (20): Xaa is A or G
  MOD_RES (21), (22), (23), (24): Xaa is A or G or is absent

SEQ ID NO: 15553 - protein, 38 aa, Artificial Sequence
  GFR-binding peptide
  MOD_RES (6), (7): Xaa is C or S
KIPKAXXVPTELEPLTMLYYDENEKVVEQLSNDMVVEG

SEQ ID NO: 15554 - protein, 39 aa, Artificial Sequence; identical to SEQ ID NO: 8241
  GFR-binding peptide
  MOD_RES (3), (4), (38): Xaa is C or S
  MOD_RES (18), (19), (20), (21), (22): Xaa is A or G
  MOD_RES (23), (24), (25), (26): Xaa is A or G or is absent

SEQ ID NO: 15555 - protein, 32 aa, Artificial Sequence
  GFR-binding peptide
  MOD_RES (1), (1): Xaa is C or S
XAPTQLEPLTVLYYDDSSNVIEQLSNNMVVRA

SEQ ID NO: 15556 - protein, 39 aa, Artificial Sequence
  GFR-binding peptide
  MOD_RES (4), (5), (39): Xaa is C or S
  MOD_RES (19), (20), (21), (22), (23): Xaa is A or G
  MOD_RES (24), (25), (26), (27): Xaa is A or G or is absent
PKPXXAPTQLEPLPVVYYXXXXXXXXXEQLSNNMVVRAX

SEQ ID NO: 15557 - protein, 38 aa, Artificial Sequence
  GFR-binding peptide
  MOD_RES (3), (35), (37): Xaa is C or S
PTXAPTKLEPLPVVYYDDSSNVIEQLSNNMVVRSXGXH

SEQ ID NO: 15558 - protein, 41 aa, Artificial Sequence
  GFR-binding peptide
  MOD_RES (6), (7), (41): Xaa is C or S
  MOD_RES (21), (22), (23), (24), (25): Xaa is A or G
  MOD_RES (26), (27), (28), (29): Xaa is A or G or is absent
YVPKPXXAPTKLEPLPVVYYXXXXXXXXXEQLSNNMVVRSX

SEQ ID NO: 15559 - protein, 42 aa, Artificial Sequence
  GFR-binding peptide
  MOD_RES (5), (39), (41): Xaa is C or S
  MOD_RES (19), (20), (21), (22), (23): Xaa is A or G
  MOD_RES (24), (25), (26), (27): Xaa is A or G or is absent
TKPTXAPTKLEPLTVLYYXXXXXXXXXEQLSNNMVVRSXGXH

SEQ ID NO: 15560 - protein, 40 aa, Artificial Sequence
  GFR-binding peptide
  MOD_RES (6), (7), (40): Xaa is C or S
  MOD_RES (21), (22), (23), (24), (25): Xaa is A or G
  MOD_RES (26), (27), (28), (29): Xaa is A or G or is absent
ASAAPXXVPQALEPLPIVYYXXXXXXXXXEQLSNMIVRSX

SEQ ID NO: 15561 - protein, 39 aa, Artificial Sequence
  GFR-binding peptide
  MOD_RES (3), (37), (39): Xaa is C or S
  MOD_RES (17), (18), (19), (20), (21): Xaa is A or G
  MOD_RES (22), (23), (24), (25): Xaa is A or G or is absent
PTXAPTKLSPISVLFIXXXXXXXXXYKQYENMVVRSXGX

SEQ ID NO: 15562 - protein, 36 aa, Artificial Sequence
  GFR-binding peptide
  MOD_RES (5), (6): Xaa is C or S
TPPTXXVPTRLSAISILYLDSANNVVLKNYQDMVVE

SEQ ID NO: 15563 - protein, 39 aa, Artificial Sequence
  GFR-binding peptide
  MOD_RES (1), (2), (36), (38): Xaa is C or S
  MOD_RES (16), (17), (18), (19), (20): Xaa is A or G
  MOD_RES (21), (22), (23), (24): Xaa is A or G or is absent
XXVPTRLSAISILYLXXXXXXXXXLKNYQDMVVESXGXR

SEQ ID NO: 15564 - protein, 36 aa, Artificial Sequence; identical to SEQ ID NO: 8248
  GFR-binding peptide
  MOD_RES (4), (36): Xaa is C or S

SEQ ID NO: 15565 - protein, 42 aa, Artificial Sequence
  GFR-binding peptide
  MOD_RES (6), (7), (40), (42): Xaa is C or S
  MOD_RES (21), (22), (23), (24), (25): Xaa is A or G
  MOD_RES (26), (27), (28), (29): Xaa is A or G or is absent
ASAAPXXVPQALEPLPIVYYXXXXXXXXXEQLSNMIVRSXKX

SEQ ID NO: 15566 - protein, 35 aa, Artificial Sequence; identical to SEQ ID NO: 8249
  GFR-binding peptide
  MOD_RES (2), (3): Xaa is C or S
  MOD_RES (17), (18), (19), (20), (21): Xaa is A or G
  MOD_RES (22), (23), (24), (25): Xaa is A or G or is absent

SEQ ID NO: 15567 - protein, 38 aa, Artificial Sequence
  GFR-binding peptide
  MOD_RES (3), (4), (38): Xaa is C or S
  MOD_RES (18), (19), (20), (21), (22): Xaa is A or G
  MOD_RES (23), (24), (25), (26): Xaa is A or G or is absent
PTXXVPTRLEPLPIVYYXXXXXXXXXEQLSNDMVVESX

SEQ ID NO: 15568 - protein, 40 aa, Artificial Sequence
  GFR-binding peptide
  MOD_RES (6), (7), (38), (40): Xaa is C or S
ASAAPXXVPQALSPISILFIVGRKPKVYKQYEMIVRSXKX

SEQ ID NO: 15569 - protein, 31 aa, Artificial Sequence
  GFR-binding peptide
VPTRLSAISILYLDSANNVVLKNYQDMVVES

SEQ ID NO: 15570 - protein, 34 aa, Artificial Sequence; identical to SEQ ID NO: 8255
  GFR-binding peptide
  MOD_RES (31), (33): Xaa is C or S

SEQ ID NO: 15571 - protein, 33 aa, Artificial Sequence
  GFR-binding peptide
  MOD_RES (1), (32): Xaa is C or S
XVSQDLEPLPIVYYIGKTPKIEQLSNMIVKSXK

SEQ ID NO: 15572 - protein, 37 aa, Artificial Sequence; identical to SEQ ID NO: 8256
  GFR-binding peptide
  MOD_RES (5), (5): Xaa is C or S
  MOD_RES (19), (20), (21), (22), (23): Xaa is A or G
  MOD_RES (24), (25), (26), (27): Xaa is A or G or is absent

SEQ ID NO: 15573 - protein, 37 aa, Artificial Sequence
  GFR-binding peptide
  MOD_RES (3), (4): Xaa is C or S
  MOD_RES (18), (19), (20), (21), (22): Xaa is A or G
  MOD_RES (23), (24), (25), (26): Xaa is A or G or is absent
KPXXAPTQLEPLPVVYYXXXXXXXXXEQLSNNMVVRA

SEQ ID NO: 15574 - protein, 36 aa, Artificial Sequence
  GFR-binding peptide
  MOD_RES (2), (34), (36): Xaa is C or S
TXAPTKLSPISVLFIDDSSNVIYKQYENMVVRSXGX

SEQ ID NO: 15575 - protein, 39 aa, Artificial Sequence
  GFR-binding peptide
  MOD_RES (3), (4), (38): Xaa is C or S
  MOD_RES (18), (19), (20), (21), (22): Xaa is A or G
  MOD_RES (23), (24), (25), (26): Xaa is A or G or is absent
KPXXAPTKLSPISVLFIXXXXXXXXXYKQYENMVVRSXG

SEQ ID NO: 15576 - protein, 38 aa, Artificial Sequence
  GFR-binding peptide
  MOD_RES (3), (4), (36), (38): Xaa is C or S
KAXXVPTELEPLPMVYYDEYDKVVEQLSNEMVVEGXGX

SEQ ID NO: 15577 - protein, 34 aa, Artificial Sequence; identical to SEQ ID NO: 8262
  GFR-binding peptide
  MOD_RES (1), (2), (33): Xaa is C or S

SEQ ID NO: 15578 - protein, 38 aa, Artificial Sequence; identical to SEQ ID NO: 8266
  GFR-binding peptide
  MOD_RES (5), (37): Xaa is C or S

SEQ ID NO: 15579 - protein, 32 aa, Artificial Sequence
  GFR-binding peptide
  MOD_RES (1), (2): Xaa is C or S
XXAPTQLSPISVLFIDDSSNVIYKQYENMVVR

SEQ ID NO: 15580 - protein, 39 aa, Artificial Sequence; identical to SEQ ID NO: 8268
  GFR-binding peptide
  MOD_RES (3), (4), (36), (38): Xaa is C or S

SEQ ID NO: 15581 - protein, 38 aa, Artificial Sequence
  GFR-binding peptide
  MOD_RES (3), (4), (35), (37): Xaa is C or S
SPXXVSQDLSPISILFIIGKTPKIYKQYEMIVKSXKXS

SEQ ID NO: 15582 - protein, 38 aa, Artificial Sequence
  GFR-binding peptide
  MOD_RES (6), (7): Xaa is C or S
STPPTXXVPTRLEPLPIVYYDSANNVVEQLSNDMVVES

SEQ ID NO: 15583 - protein, 35 aa, Artificial Sequence
  GFR-binding peptide
  MOD_RES (2), (3), (34): Xaa is C or S
PXXVPQDLEPLPIVYYVGRTPKVEQLSNMVVKSXK

SEQ ID NO: 15584 - protein, 41 aa, Artificial Sequence; identical to SEQ ID NO: 8271
  GFR-binding peptide
  MOD_RES (7), (41): Xaa is C or S
  MOD_RES (21), (22), (23), (24), (25): Xaa is A or G
  MOD_RES (26), (27), (28), (29): Xaa is A or G or is absent

SEQ ID NO: 15585 - protein, 40 aa, Artificial Sequence; identical to SEQ ID NO: 8275
  GFR-binding peptide
  MOD_RES (6), (7): Xaa is C or S
  MOD_RES (21), (22), (23), (24), (25): Xaa is A or G
  MOD_RES (26), (27), (28), (29): Xaa is A or G or is absent

SEQ ID NO: 15586 - protein, 39 aa, Artificial Sequence
  GFR-binding peptide
  MOD_RES (3), (4), (37), (39): Xaa is C or S
  MOD_RES (18), (19), (20), (21), (22): Xaa is A or G
  MOD_RES (23), (24), (25), (26): Xaa is A or G or is absent
SPXXVPQDLEPLTILYYXXXXXXXXXEQLSNMVVKSXKX

SEQ ID NO: 15587 - protein, 33 aa, Artificial Sequence; identical to SEQ ID NO: 8276
  GFR-binding peptide
  MOD_RES (1), (1): Xaa is C or S
  MOD_RES (15), (16), (17), (18), (19): Xaa is A or G
  MOD_RES (20), (21), (22), (23): Xaa is A or G or is absent

SEQ ID NO: 15588 - protein, 37 aa, Artificial Sequence
  GFR-binding peptide
  MOD_RES (6), (6): Xaa is C or S
VTKPTXAPTKLEPLTVLYYDDSSNVIEQLSNNMVVRS

SEQ ID NO: 15589 - protein, 35 aa, Artificial Sequence; identical to SEQ ID NO: 8278
  GFR-binding peptide
  MOD_RES (34), (34): Xaa is C or S
  MOD_RES (14), (15), (16), (17), (18): Xaa is A or G
  MOD_RES (19), (20), (21), (22): Xaa is A or G or is absent

SEQ ID NO: 15590 - protein, 35 aa, Artificial Sequence
  GFR-binding peptide
  MOD_RES (4), (5): Xaa is C or S
ASPXXVSQDLSPISILFIIGKTPKIYKQYEMIVKS

SEQ ID NO: 15591 - protein, 41 aa, Artificial Sequence
  GFR-binding peptide
  MOD_RES (5), (6), (38), (40): Xaa is C or S
IPKAXXVPTELEPLTMLYYDEYDKVVEQLSNEMVVEGXGXR

SEQ ID NO: 15592 - protein, 37 aa, Artificial Sequence
  GFR-binding peptide
  MOD_RES (3), (4): Xaa is C or S
  MOD_RES (18), (19), (20), (21), (22): Xaa is A or G
  MOD_RES (23), (24), (25), (26): Xaa is A or G or is absent
KPXXAPTKLEPLPVVYYXXXXXXXXXEQLSNNMVVRS

SEQ ID NO: 15593 - protein, 38 aa, Artificial Sequence; identical to SEQ ID NO: 8286
  GFR-binding peptide
  MOD_RES (2), (3), (36), (38): Xaa is C or S
  MOD_RES (17), (18), (19), (20), (21): Xaa is A or G
  MOD_RES (22), (23), (24), (25): Xaa is A or G or is absent

SEQ ID NO: 15594 - protein, 40 aa, Artificial Sequence
  GFR-binding peptide
  MOD_RES (6), (7), (39): Xaa is C or S
SIPKAXXVPTELEPLTMLYYDEYDKVVEQLSNEMVVEGXG

SEQ ID NO: 15595 - protein, 35 aa, Artificial Sequence
  GFR-binding peptide
  MOD_RES (34), (34): Xaa is C or S
  MOD_RES (14), (15), (16), (17), (18): Xaa is A or G
  MOD_RES (19), (20), (21), (22): Xaa is A or G or is absent
VPTELEPLPMVYYXXXXXXXXXEQLSNDMVVEGXG

SEQ ID NO: 15596 - protein, 32 aa, Artificial Sequence
  GFR-binding peptide
  MOD_RES (14), (15), (16), (17), (18): Xaa is A or G
  MOD_RES (19), (20), (21), (22): Xaa is A or G or is absent
VPTRLEPLTILYYXXXXXXXXXEQLSNDMVVE

SEQ ID NO: 15597 - protein, 39 aa, Artificial Sequence; identical to SEQ ID NO: 8290
  GFR-binding peptide
  MOD_RES (4), (5), (37), (39): Xaa is C or S

SEQ ID NO: 15598 - protein, 40 aa, Artificial Sequence
  GFR-binding peptide
  MOD_RES (6), (7), (39): Xaa is C or S
TVPKPXXAPTQLEPLTVLYYDDSSNVIEQLSNNMVVRAXG

SEQ ID NO: 15599 - protein, 33 aa, Artificial Sequence
  GFR-binding peptide
  MOD_RES (1), (2): Xaa is C or S
XXAPTKLEPLTVLYYDDSSNVIEQLSNNMVVRS

SEQ ID NO: 15600 - protein, 35 aa, Artificial Sequence
  GFR-binding peptide
  MOD_RES (34), (34): Xaa is C or S
  MOD_RES (14), (15), (16), (17), (18): Xaa is A or G
  MOD_RES (19), (20), (21), (22): Xaa is A or G or is absent
VPTRLSAISILYLXXXXXXXXXLKNYQDMVVESXG

SEQ ID NO: 15601 - protein, 40 aa, Artificial Sequence; identical to SEQ ID NO: 8298
  GFR-binding peptide
  MOD_RES (4), (5), (38), (40): Xaa is C or S
  MOD_RES (19), (20), (21), (22), (23): Xaa is A or G
  MOD_RES (24), (25), (26), (27): Xaa is A or G or is absent

SEQ ID NO: 15602 - protein, 35 aa, Artificial Sequence
  GFR-binding peptide
  MOD_RES (1), (35): Xaa is C or S
  MOD_RES (15), (16), (17), (18), (19): Xaa is A or G
  MOD_RES (20), (21), (22), (23): Xaa is A or G or is absent
XAPTQLEPLPVVYYXXXXXXXXXEQLSNNMVVRAX

SEQ ID NO: 15603 - protein, 39 aa, Artificial Sequence
  GFR-binding peptide
  MOD_RES (6), (7), (38): Xaa is C or S
ASASPXXVPQDLSPISILFIVGRTPKVYKQYEMVVKSXK

SEQ ID NO: 15604 - protein, 41 aa, Artificial Sequence
  GFR-binding peptide
  MOD_RES (5), (6), (40): Xaa is C or S
  MOD_RES (20), (21), (22), (23), (24): Xaa is A or G
  MOD_RES (25), (26), (27), (28): Xaa is A or G or is absent
VPKPXXAPTKLEPLTVLYYXXXXXXXXXEQLSNNMVVRSXG

SEQ ID NO: 15605 - protein, 37 aa, Artificial Sequence; identical to SEQ ID NO: 8303
  GFR-binding peptide
  MOD_RES (2), (3), (36): Xaa is C or S
  MOD_RES (17), (18), (19), (20), (21): Xaa is A or G
  MOD_RES (22), (23), (24), (25): Xaa is A or G or is absent

SEQ ID NO: 15606 - protein, 35 aa, Artificial Sequence
  GFR-binding peptide
  MOD_RES (1), (35): Xaa is C or S
  MOD_RES (15), (16), (17), (18), (19): Xaa is A or G
  MOD_RES (20), (21), (22), (23): Xaa is A or G or is absent
XVPTELSPISMLFIXXXXXXXXXYKQYEEMVVEGX

SEQ ID NO: 15607 - protein, 31 aa, Artificial Sequence; identical to SEQ ID NO: 8305
  GFR-binding peptide

SEQ ID NO: 15608 - protein, 35 aa, Artificial Sequence; identical to SEQ ID NO: 8308
  GFR-binding peptide
  MOD_RES (1), (34): Xaa is C or S
  MOD_RES (15), (16), (17), (18), (19): Xaa is A or G
  MOD_RES (20), (21), (22), (23): Xaa is A or G or is absent

SEQ ID NO: 15609 - protein, 39 aa, Artificial Sequence
  GFR-binding peptide
  MOD_RES (2), (3), (37), (39): Xaa is C or S
  MOD_RES (17), (18), (19), (20), (21): Xaa is A or G
  MOD_RES (22), (23), (24), (25): Xaa is A or G or is absent
PXXAPTKLSPISVLFIXXXXXXXXXYKQYENMVVRSXGX

SEQ ID NO: 15610 - protein, 39 aa, Artificial Sequence
  GFR-binding peptide
  MOD_RES (6), (7): Xaa is C or S
  MOD_RES (21), (22), (23), (24), (25): Xaa is A or G
  MOD_RES (26), (27), (28), (29): Xaa is A or G or is absent
ASASPXXVPQDLEPLPIVYYXXXXXXXXXEQLSNMVVKS

SEQ ID NO: 15611 - protein, 35 aa, Artificial Sequence
  GFR-binding peptide
  MOD_RES (3), (4): Xaa is C or S
KAXXVPTELSPISMLFIDENEKVVYKQYEDMVVEG

SEQ ID NO: 15612 - protein, 42 aa, Artificial Sequence
  GFR-binding peptide
  MOD_RES (6), (7), (41): Xaa is C or S
  MOD_RES (21), (22), (23), (24), (25): Xaa is A or G
  MOD_RES (26), (27), (28), (29): Xaa is A or G or is absent
STPPTXXVPTRLEPLTILYYXXXXXXXXXEQLSNDMVVESXG

SEQ ID NO: 15613 - protein, 36 aa, Artificial Sequence
  GFR-binding peptide
  MOD_RES (1), (33), (35): Xaa is C or S
XVPTRLEPLTILYYDSANNVVEQLSNDMVVESXGXR

SEQ ID NO: 15614 - protein, 37 aa, Artificial Sequence; identical to SEQ ID NO: 8309
  GFR-binding peptide
  MOD_RES (2), (3), (37): Xaa is C or S
  MOD_RES (17), (18), (19), (20), (21): Xaa is A or G
  MOD_RES (22), (23), (24), (25): Xaa is A or G or is absent

SEQ ID NO: 15615 - protein, 33 aa, Artificial Sequence; identical to SEQ ID NO: 8311
  GFR-binding peptide
  MOD_RES (3), (3): Xaa is C or S

SEQ ID NO: 15616 - protein, 33 aa, Artificial Sequence; identical to SEQ ID NO: 8312
  GFR-binding peptide
  MOD_RES (1), (2), (33): Xaa is C or S

SEQ ID NO: 15617 - protein, 37 aa, Artificial Sequence
  GFR-binding peptide
  MOD_RES (2), (3), (35), (37): Xaa is C or S
TXXVPTRLSAISILYLDSANNVVLKNYQDMVVESXGX

SEQ ID NO: 15618 - protein, 41 aa, Artificial Sequence; identical to SEQ ID NO: 8315
  GFR-binding peptide
  MOD_RES (6), (7), (41): Xaa is C or S
  MOD_RES (21), (22), (23), (24), (25): Xaa is A or G
  MOD_RES (26), (27), (28), (29): Xaa is A or G or is absent

SEQ ID NO: 15619 - protein, 36 aa, Artificial Sequence; identical to SEQ ID NO: 8316
  GFR-binding peptide
  MOD_RES (3), (4), (36): Xaa is C or S

SEQ ID NO: 15620 - protein, 38 aa, Artificial Sequence
  GFR-binding peptide
  MOD_RES (1), (2), (36), (38): Xaa is C or S
  MOD_RES (16), (17), (18), (19), (20): Xaa is A or G
  MOD_RES (21), (22), (23), (24): Xaa is A or G or is absent
XXVPTRLSAISILYLXXXXXXXXXLKNYQDMVVESXGX

SEQ ID NO: 15621 - protein, 34 aa, Artificial Sequence; identical to SEQ ID NO: 8320
  GFR-binding peptide
  MOD_RES (1), (32), (34): Xaa is C or S

SEQ ID NO: 15622 - protein, 35 aa, Artificial Sequence
  GFR-binding peptide
  MOD_RES (4), (4): Xaa is C or S
KPTXAPTKLEPLPVVYYDDSSNVIEQLSNNMVVRS

SEQ ID NO: 15623 - protein, 39 aa, Artificial Sequence
  GFR-binding peptide
  MOD_RES (3), (4), (37), (39): Xaa is C or S
  MOD_RES (18), (19), (20), (21), (22): Xaa is A or G
  MOD_RES (23), (24), (25), (26): Xaa is A or G or is absent
SPXXVSQDLSPISILFIXXXXXXXXXYKQYEMIVKSXKX

SEQ ID NO: 15624 - protein, 36 aa, Artificial Sequence
  GFR-binding peptide
  MOD_RES (1), (33), (35): Xaa is C or S
XVPTRLSAISILYLDSANNVVLKNYQDMVVESXGXR

SEQ ID NO: 15625 - protein, 41 aa, Artificial Sequence
  GFR-binding peptide
  MOD_RES (6), (7), (40): Xaa is C or S
  MOD_RES (21), (22), (23), (24), (25): Xaa is A or G
  MOD_RES (26), (27), (28), (29): Xaa is A or G or is absent
ASASPXXVSQDLSPISILFIXXXXXXXXXYKQYEMIVKSXK

SEQ ID NO: 15626 - protein, 37 aa, Artificial Sequence
  GFR-binding peptide
  MOD_RES (1), (34), (36): Xaa is C or S
  MOD_RES (15), (16), (17), (18), (19): Xaa is A or G
  MOD_RES (20), (21), (22), (23): Xaa is A or G or is absent
XVPQALSPISILFIXXXXXXXXXYKQYEMIVRSXKXS

SEQ ID NO: 15627 - protein, 33 aa, Artificial Sequence
  GFR-binding peptide
  MOD_RES (1), (1): Xaa is C or S
  MOD_RES (15), (16), (17), (18), (19): Xaa is A or G
  MOD_RES (20), (21), (22), (23): Xaa is A or G or is absent
XVPTRLNAISILYFXXXXXXXXXLKKYRDMVVE

SEQ ID NO: 15628 - protein, 36 aa, Artificial Sequence; identical to SEQ ID NO: 8331
  GFR-binding peptide
  MOD_RES (1), (2), (34), (36): Xaa is C or S

SEQ ID NO: 15629 - protein, 36 aa, Artificial Sequence
  GFR-binding peptide
  MOD_RES (3), (35): Xaa is C or S
PTXAPTKLEPLPVVYYDDSSNVIEQLSNNMVVRSXG

SEQ ID NO: 15630 - protein, 39 aa, Artificial Sequence
  GFR-binding peptide
  MOD_RES (5), (37), (39): Xaa is C or S
TKPTXAPTKLEPLTVLYYDDSSNVIEQLSNNMVVRSXGX

SEQ ID NO: 15631 - protein, 34 aa, Artificial Sequence
  GFR-binding peptide
  MOD_RES (3), (4): Xaa is C or S
KAXXVPTELEPLTMLYYDENEKVVEQLSNDMVVE

SEQ ID NO: 15632 - protein, 32 aa, Artificial Sequence
  GFR-binding peptide
  MOD_RES (14), (15), (16), (17), (18): Xaa is A or G
  MOD_RES (19), (20), (21), (22): Xaa is A or G or is absent
VPQDLSPISILFIXXXXXXXXXYKQYEMVVKS

SEQ ID NO: 15633 - protein, 37 aa, Artificial Sequence; identical to SEQ ID NO: 8341
  GFR-binding peptide
  MOD_RES (3), (35), (37): Xaa is C or S

SEQ ID NO: 15634 - protein, 36 aa, Artificial Sequence; identical to SEQ ID NO: 8342
  GFR-binding peptide
  MOD_RES (4), (5), (36): Xaa is C or S

SEQ ID NO: 15635 - protein, 33 aa, Artificial Sequence; identical to SEQ ID NO: 8344
  GFR-binding peptide
  MOD_RES (31), (33): Xaa is C or S

SEQ ID NO: 15636 - protein, 37 aa, Artificial Sequence
  GFR-binding peptide
  MOD_RES (4), (5): Xaa is C or S
  MOD_RES (19), (20), (21), (22), (23): Xaa is A or G
  MOD_RES (24), (25), (26), (27): Xaa is A or G or is absent
PKPXXAPTKLEPLPVVYYXXXXXXXXXEQLSNNMVVR

SEQ ID NO: 15637 - protein, 42 aa, Artificial Sequence
  GFR-binding peptide
  MOD_RES (6), (7), (41): Xaa is C or S
  MOD_RES (21), (22), (23), (24), (25): Xaa is A or G
  MOD_RES (26), (27), (28), (29): Xaa is A or G or is absent
SIPKAXXVPTELEPLPMVYYXXXXXXXXXEQLSNEMVVEGXG

SEQ ID NO: 15638 - protein, 37 aa, Artificial Sequence; identical to SEQ ID NO: 8346
  GFR-binding peptide
  MOD_RES (3), (4), (36): Xaa is C or S

SEQ ID NO: 15639 - protein, 39 aa, Artificial Sequence; identical to SEQ ID NO: 8347
  GFR-binding peptide
  MOD_RES (5), (6), (39): Xaa is C or S
  MOD_RES (20), (21), (22), (23), (24): Xaa is A or G
  MOD_RES (25), (26), (27), (28): Xaa is A or G or is absent

SEQ ID NO: 15640 - protein, 33 aa, Artificial Sequence
  GFR-binding peptide
  MOD_RES (1), (2), (33): Xaa is C or S
XXVPQALEPLTILYYVGRKPKVEQLSNMIVRSX

SEQ ID NO: 15641 - protein, 33 aa, Artificial Sequence
  GFR-binding peptide
  MOD_RES (2), (3): Xaa is C or S
PXXVPQALEPLTILYYVGRKPKVEQLSNMIVRS

SEQ ID NO: 15642 - protein, 42 aa, Artificial Sequence; identical to SEQ ID NO: 8349
  GFR-binding peptide
  MOD_RES (5), (6), (40), (42): Xaa is C or S
  MOD_RES (20), (21), (22), (23), (24): Xaa is A or G
  MOD_RES (25), (26), (27), (28): Xaa is A or G or is absent

SEQ ID NO: 15643 - protein, 42 aa, Artificial Sequence
  GFR-binding peptide
  MOD_RES (6), (7), (41): Xaa is C or S
  MOD_RES (21), (22), (23), (24), (25): Xaa is A or G
  MOD_RES (26), (27), (28), (29): Xaa is A or G or is absent
STPPTXXVPTRLSPISILFIXXXXXXXXXYKQYEDMVVESXG

SEQ ID NO: 15644 - protein, 38 aa, Artificial Sequence; identical to SEQ ID NO: 8350
  GFR-binding peptide
  MOD_RES (2), (3), (35), (37): Xaa is C or S

SEQ ID NO: 15645 - protein, 38 aa, Artificial Sequence
  GFR-binding peptide
  MOD_RES (3), (4), (37): Xaa is C or S
  MOD_RES (18), (19), (20), (21), (22): Xaa is A or G
  MOD_RES (23), (24), (25), (26): Xaa is A or G or is absent
APXXVPQALEPLPIVYYXXXXXXXXXEQLSNMIVRSXK

SEQ ID NO: 15646 - protein, 40 aa, Artificial Sequence
  GFR-binding peptide
  MOD_RES (6), (38), (40): Xaa is C or S
VTKPTXAPTKLSPISVLFIDDSSNVIYKQYENMVVRSXGX

SEQ ID NO: 15647 - protein, 38 aa, Artificial Sequence
  GFR-binding peptide
  MOD_RES (5), (6), (38): Xaa is C or S
VPKPXXAPTKLEPLPVVYYDDSSNVIEQLSNNMVVRSX

SEQ ID NO: 15648 - protein, 37 aa, Artificial Sequence
  GFR-binding peptide
  MOD_RES (1), (2), (35), (37): Xaa is C or S
  MOD_RES (16), (17), (18), (19), (20): Xaa is A or G
  MOD_RES (21), (22), (23), (24): Xaa is A or G or is absent
XXVPQDLEPLPIVYYXXXXXXXXXEQLSNMVVKSXKX

SEQ ID NO: 15649 - protein, 36 aa, Artificial Sequence
  GFR-binding peptide
  MOD_RES (4), (5): Xaa is C or S
PKAXXVPTELEPLTMLYYDEYDKVVEQLSNEMVVEG

SEQ ID NO: 15650 - protein, 38 aa, Artificial Sequence
  GFR-binding peptide
  MOD_RES (4), (5): Xaa is C or S
  MOD_RES (19), (20), (21), (22), (23): Xaa is A or G
  MOD_RES (24), (25), (26), (27): Xaa is A or G or is absent
PKPXXAPTKLSPISVLFIXXXXXXXXXYKQYENMVVRS

SEQ ID NO: 15651 - protein, 40 aa, Artificial Sequence
  GFR-binding peptide
  MOD_RES (7), (7): Xaa is C or S
  MOD_RES (21), (22), (23), (24), (25): Xaa is A or G
  MOD_RES (26), (27), (28), (29): Xaa is A or G or is absent
HVTKPTXAPTKLEPLPVVYYXXXXXXXXXEQLSNNMVVRS

SEQ ID NO: 15652 - protein, 38 aa, Artificial Sequence
  GFR-binding peptide
  MOD_RES (4), (5), (37): Xaa is C or S
PPTXXVPTRLEPLTILYYDSANNVVEQLSNDMVVESXG

SEQ ID NO: 15653 - protein, 38 aa, Artificial Sequence; identical to SEQ ID NO: 8357
  GFR-binding peptide
  MOD_RES (4), (5), (36), (38): Xaa is C or S

SEQ ID NO: 15654 - protein, 34 aa, Artificial Sequence
  GFR-binding peptide
  MOD_RES (33), (33): Xaa is C or S
  MOD_RES (14), (15), (16), (17), (18): Xaa is A or G
  MOD_RES (19), (20), (21), (22): Xaa is A or G or is absent
VPQDLEPLTILYYXXXXXXXXXEQLSNMVVKSXK

SEQ ID NO: 15655 - protein, 39 aa, Artificial Sequence
  GFR-binding peptide
  MOD_RES (5), (6), (39): Xaa is C or S
  MOD_RES (20), (21), (22), (23), (24): Xaa is A or G
  MOD_RES (25), (26), (27), (28): Xaa is A or G or is absent
SASPXXVPQDLEPLTILYYXXXXXXXXXEQLSNMVVKSX

SEQ ID NO: 15656 - protein, 39 aa, Artificial Sequence; identical to SEQ ID NO: 8359
  GFR-binding peptide
  MOD_RES (4), (5), (38): Xaa is C or S
  MOD_RES (19), (20), (21), (22), (23): Xaa is A or G
  MOD_RES (24), (25), (26), (27): Xaa is A or G or is absent

SEQ ID NO: 15657 - protein, 33 aa, Artificial Sequence
  GFR-binding peptide
  MOD_RES (1), (32): Xaa is C or S
XVPQALEPLTILYYVGRKPKVEQLSNMIVRSXK

SEQ ID NO: 15658 - protein, 38 aa, Artificial Sequence
  GFR-binding peptide
  MOD_RES (2), (3), (37): Xaa is C or S
  MOD_RES (17), (18), (19), (20), (21): Xaa is A or G
  MOD_RES (22), (23), (24), (25): Xaa is A or G or is absent
PXXAPTQLEPLTVLYYXXXXXXXXXEQLSNNMVVRAXG

SEQ ID NO: 15659 - protein, 38 aa, Artificial Sequence; identical to SEQ ID NO: 8361
  GFR-binding peptide
  MOD_RES (4), (5), (38): Xaa is C or S
  MOD_RES (19), (20), (21), (22), (23): Xaa is A or G
  MOD_RES (24), (25), (26), (27): Xaa is A or G or is absent

SEQ ID NO: 15660 - protein, 30 aa, Artificial Sequence
  GFR-binding peptide
VPTELSPISMLFIDENEKVVYKQYEDMVVE

SEQ ID NO: 15661 - protein, 39 aa, Artificial Sequence
  GFR-binding peptide
  MOD_RES (5), (6), (37), (39): Xaa is C or S
SAAPXXVPQALSPISILFIVGRKPKVYKQYEMIVRSXKX

SEQ ID NO: 15662 - protein, 34 aa, Artificial Sequence
  GFR-binding peptide
  MOD_RES (34), (34): Xaa is C or S
  MOD_RES (14), (15), (16), (17), (18): Xaa is A or G
  MOD_RES (19), (20), (21), (22): Xaa is A or G or is absent
APTKLEPLTVLYYXXXXXXXXXEQLSNNMVVRSX

SEQ ID NO: 15663 - protein, 41 aa, Artificial Sequence
  GFR-binding peptide
  MOD_RES (5), (6), (38), (40): Xaa is C or S
VPKPXXAPTQLEPLPVVYYDDSSNVIEQLSNNMVVRAXGXH

SEQ ID NO: 15664 - protein, 40 aa, Artificial Sequence
  GFR-binding peptide
  MOD_RES (3), (4), (38), (40): Xaa is C or S
  MOD_RES (18), (19), (20), (21), (22): Xaa is A or G
  MOD_RES (23), (24), (25), (26): Xaa is A or G or is absent
PTXXVPTRLSAISILYLXXXXXXXXXLKNYQDMVVESXGX

SEQ ID NO: 15665 - protein, 40 aa, Artificial Sequence
  GFR-binding peptide
  MOD_RES (6), (7): Xaa is C or S
  MOD_RES (21), (22), (23), (24), (25): Xaa is A or G
  MOD_RES (26), (27), (28), (29): Xaa is A or G or is absent
STPPTXXVPTRLEPLTILYYXXXXXXXXXEQLSNDMVVES

SEQ ID NO: 15666 - protein, 36 aa, Artificial Sequence
  GFR-binding peptide
  MOD_RES (2), (3): Xaa is C or S
  MOD_RES (17), (18), (19), (20), (21): Xaa is A or G
  MOD_RES (22), (23), (24), (25): Xaa is A or G or is absent
PXXAPTQLEPLTVLYYXXXXXXXXXEQLSNNMVVRA

SEQ ID NO: 15667 - protein, 38 aa, Artificial Sequence; identical to SEQ ID NO: 8365
  GFR-binding peptide
  MOD_RES (4), (5), (36), (38): Xaa is C or S

SEQ ID NO: 15668 - protein, 36 aa, Artificial Sequence
  GFR-binding peptide
  MOD_RES (1), (2), (34), (36): Xaa is C or S
XXAPTQLSPISVLFIDDSSNVIYKQYENMVVRAXGX

SEQ ID NO: 15669 - protein, 36 aa, Artificial Sequence
  GFR-binding peptide
  MOD_RES (5), (6): Xaa is C or S
IPKAXXVPTELEPLPMVYYDEYDKVVEQLSNEMVVE

SEQ ID NO: 15670 - protein, 35 aa, Artificial Sequence; identical to SEQ ID NO: 8368
  GFR-binding peptide
  MOD_RES (2), (3): Xaa is C or S
  MOD_RES (17), (18), (19), (20), (21): Xaa is A or G
  MOD_RES (22), (23), (24), (25): Xaa is A or G or is absent

SEQ ID NO: 15671 - protein, 36 aa, Artificial Sequence
  GFR-binding peptide
  MOD_RES (5), (6): Xaa is C or S
IPKAXXVPTELEPLTMLYYDEYDKVVEQLSNEMVVE

SEQ ID NO: 15672 - protein, 37 aa, Artificial Sequence
  GFR-binding peptide
  MOD_RES (34), (36): Xaa is C or S
  MOD_RES (14), (15), (16), (17), (18): Xaa is A or G
  MOD_RES (19), (20), (21), (22): Xaa is A or G or is absent
VPTRLEPLTILYYXXXXXXXXXEQLSNDMVVESXGXR

SEQ ID NO: 15673 - protein, 34 aa, Artificial Sequence
  GFR-binding peptide
  MOD_RES (1), (33): Xaa is C or S
XVPTRLEPLPIVYYDSANNVVEQLSNDMVVESXG

SEQ ID NO: 15674 - protein, 34 aa, Artificial Sequence; identical to SEQ ID NO: 8374
  GFR-binding peptide
  MOD_RES (1), (1): Xaa is C or S
  MOD_RES (15), (16), (17), (18), (19): Xaa is A or G
  MOD_RES (20), (21), (22), (23): Xaa is A or G or is absent

SEQ ID NO: 15675 - protein, 34 aa, Artificial Sequence
  GFR-binding peptide
  MOD_RES (1), (33): Xaa is C or S
XVPTELEPLTMLYYDENEKVVEQLSNDMVVEGXG

SEQ ID NO: 15676 - protein, 36 aa, Artificial Sequence
  GFR-binding peptide
  MOD_RES (4), (5), (36): Xaa is C or S
ASPXXVPQDLSPISILFIVGRTPKVYKQYEMVVKSX

SEQ ID NO: 15677 - protein, 31 aa, Artificial Sequence; identical to SEQ ID NO: 8378
  GFR-binding peptide

SEQ ID NO: 15678 - protein, 41 aa, Artificial Sequence
  GFR-binding peptide
  MOD_RES (6), (7), (41): Xaa is C or S
  MOD_RES (21), (22), (23), (24), (25): Xaa is A or G
  MOD_RES (26), (27), (28), (29): Xaa is A or G or is absent
STPPTXXVPTRLEPLPIVYYXXXXXXXXXEQLSNDMVVESX

SEQ ID NO: 15679 - protein, 35 aa, Artificial Sequence; identical to SEQ ID NO: 8379
  GFR-binding peptide
  MOD_RES (2), (3): Xaa is C or S
  MOD_RES (17), (18), (19), (20), (21): Xaa is A or G
  MOD_RES (22), (23), (24), (25): Xaa is A or G or is absent

SEQ ID NO: 15680 - protein, 40 aa, Artificial Sequence
  GFR-binding peptide
  MOD_RES (2), (3), (37), (39): Xaa is C or S
  MOD_RES (17), (18), (19), (20), (21): Xaa is A or G
  MOD_RES (22), (23), (24), (25): Xaa is A or G or is absent
PXXAPTQLEPLTVLYYXXXXXXXXXEQLSNNMVVRAXGXH

SEQ ID NO: 15681 - protein, 35 aa, Artificial Sequence
  GFR-binding peptide
  MOD_RES (1), (32), (34): Xaa is C or S
XVPQALSPISILFIVGRKPKVYKQYEMIVRSXKXS

SEQ ID NO: 15682 - protein, 40 aa, Artificial Sequence; identical to SEQ ID NO: 8382
  GFR-binding peptide
  MOD_RES (5), (6), (38), (40): Xaa is C or S

SEQ ID NO: 15683 - protein, 39 aa, Artificial Sequence
  GFR-binding peptide
  MOD_RES (3), (4), (37), (39): Xaa is C or S
  MOD_RES (18), (19), (20), (21), (22): Xaa is A or G
  MOD_RES (23), (24), (25), (26): Xaa is A or G or is absent
APXXVPQALSPISILFIXXXXXXXXXYKQYEMIVRSXKX

SEQ ID NO: 15684 - protein, 38 aa, Artificial Sequence; identical to SEQ ID NO: 8383
  GFR-binding peptide
  MOD_RES (5), (6): Xaa is C or S
  MOD_RES (20), (21), (22), (23), (24): Xaa is A or G
  MOD_RES (25), (26), (27), (28): Xaa is A or G or is absent

SEQ ID NO: 15685 - protein, 34 aa, Artificial Sequence
  GFR-binding peptide
  MOD_RES (3), (4): Xaa is C or S
KAXXVPTELEPLPMVYYDENEKVVEQLSNDMVVE

SEQ ID NO: 15686 - protein, 37 aa, Artificial Sequence
  GFR-binding peptide
  MOD_RES (4), (5): Xaa is C or S
  MOD_RES (19), (20), (21), (22), (23): Xaa is A or G
  MOD_RES (24), (25), (26), (27): Xaa is A or G or is absent
ASPXXVSQDLEPLPIVYYXXXXXXXXXEQLSNMIVKS

SEQ ID NO: 15687 - protein, 33 aa, Artificial Sequence; identical to SEQ ID NO: 8390
  GFR-binding peptide
  MOD_RES (33), (33): Xaa is C or S
  MOD_RES (14), (15), (16), (17), (18): Xaa is A or G
  MOD_RES (19), (20), (21), (22): Xaa is A or G or is absent

SEQ ID NO: 15688 - protein, 38 aa, Artificial Sequence
  GFR-binding peptide
  MOD_RES (3), (4), (37): Xaa is C or S
  MOD_RES (18), (19), (20), (21), (22): Xaa is A or G
  MOD_RES (23), (24), (25), (26): Xaa is A or G or is absent
SPXXVSQDLEPLPIVYYXXXXXXXXXEQLSNMIVKSXK

SEQ ID NO: 15689 - protein, 36 aa, Artificial Sequence
  GFR-binding peptide
  MOD_RES (1), (2), (36): Xaa is C or S
  MOD_RES (16), (17), (18), (19), (20): Xaa is A or G
  MOD_RES (21), (22), (23), (24): Xaa is A or G or is absent
XXVPTRLSAISILYLXXXXXXXXXLKNYQDMVVESX

SEQ ID NO: 15690 - protein, 39 aa, Artificial Sequence
  GFR-binding peptide
  MOD_RES (5), (6), (38): Xaa is C or S
VPKPXXAPTQLEPLPVVYYDDSSNVIEQLSNNMVVRAXG

SEQ ID NO: 15691 - protein, 35 aa, Artificial Sequence
  GFR-binding peptide
  MOD_RES (1), (2), (34): Xaa is C or S
XXVPTRLSAISILYLDSANNVVLKNYQDMVVESXG

SEQ ID NO: 15692 - protein, 40 aa, Artificial Sequence
  GFR-binding peptide
  MOD_RES (6), (40): Xaa is C or S
  MOD_RES (20), (21), (22), (23), (24): Xaa is A or G
  MOD_RES (25), (26), (27), (28): Xaa is A or G or is absent
VTKPTXAPTKLEPLPVVYYXXXXXXXXXEQLSNNMVVRSX

SEQ ID NO: 15693 - protein, 34 aa, Artificial Sequence
  GFR-binding peptide
  MOD_RES (1), (2), (33): Xaa is C or S
XXVPQALEPLTILYYVGRKPKVEQLSNMIVRSXK

SEQ ID NO: 15694 - protein, 36 aa, Artificial Sequence; identical to SEQ ID NO: 8397
  GFR-binding peptide
  MOD_RES (3), (4), (35): Xaa is C or S

SEQ ID NO: 15695 - protein, 32 aa, Artificial Sequence; identical to SEQ ID NO: 8400
  GFR-binding peptide
  MOD_RES (1), (32): Xaa is C or S

SEQ ID NO: 15696 - protein, 39 aa, Artificial Sequence
  GFR-binding peptide
  MOD_RES (5), (6): Xaa is C or S
  MOD_RES (20), (21), (22), (23), (24): Xaa is A or G
  MOD_RES (25), (26), (27), (28): Xaa is A or G or is absent
VPKPXXAPTQLEPLPVVYYXXXXXXXXXEQLSNNMVVRA

SEQ ID NO: 15697 - protein, 36 aa, Artificial Sequence; identical to SEQ ID NO: 8401
  GFR-binding peptide
  MOD_RES (1), (2), (35): Xaa is C or S
  MOD_RES (16), (17), (18), (19), (20): Xaa is A or G
  MOD_RES (21), (22), (23), (24): Xaa is A or G or is absent

SEQ ID NO: 15698 - protein, 34 aa, Artificial Sequence
  GFR-binding peptide
  MOD_RES (3), (4): Xaa is C or S
PTXXVPTRLEPLPIVYYDSANNVVEQLSNDMVVE

SEQ ID NO: 15699 - protein, 33 aa, Artificial Sequence
  GFR-binding peptide
  MOD_RES (1), (2): Xaa is C or S
XXVPTRLEPLPIVYYDSANNVVEQLSNDMVVES

SEQ ID NO: 15700 - protein, 39 aa, Artificial Sequence
  GFR-binding peptide
  MOD_RES (4), (5), (38): Xaa is C or S
  MOD_RES (19), (20), (21), (22), (23): Xaa is A or G
  MOD_RES (24), (25), (26), (27): Xaa is A or G or is absent
ASPXXVPQDLEPLTILYYXXXXXXXXXEQLSNMVVKSXK

SEQ ID NO: 15701 - protein, 37 aa, Artificial Sequence
  GFR-binding peptide
  MOD_RES (1), (35), (37): Xaa is C or S
  MOD_RES (15), (16), (17), (18), (19): Xaa is A or G
  MOD_RES (20), (21), (22), (23): Xaa is A or G or is absent
XAPTKLEPLPVVYYXXXXXXXXXEQLSNNMVVRSXGX

SEQ ID NO: 15702 - protein, 37 aa, Artificial Sequence
  GFR-binding peptide
  MOD_RES (1), (35), (37): Xaa is C or S
  MOD_RES (15), (16), (17), (18), (19): Xaa is A or G
  MOD_RES (20), (21), (22), (23): Xaa is A or G or is absent
XVPTRLNAISILYFXXXXXXXXXLKKYRDMVVESXGX

SEQ ID NO: 15703 - protein, 36 aa, Artificial Sequence; identical to SEQ ID NO: 8404
  GFR-binding peptide
  MOD_RES (1), (2), (36): Xaa is C or S
  MOD_RES (16), (17), (18), (19), (20): Xaa is A or G
  MOD_RES (21), (22), (23), (24): Xaa is A or G or is absent

SEQ ID NO: 15704 - protein, 33 aa, Artificial Sequence
  GFR-binding peptide
  MOD_RES (1), (32): Xaa is C or S
XVPQDLSPISILFIVGRTPKVYKQYEMVVKSXK

SEQ ID NO: 15705 - protein, 36 aa, Artificial Sequence
  GFR-binding peptide
  MOD_RES (34), (36): Xaa is C or S
  MOD_RES (14), (15), (16), (17), (18): Xaa is A or G
  MOD_RES (19), (20), (21), (22): Xaa is A or G or is absent
VPTRLEPLPIVYYXXXXXXXXXEQLSNDMVVESXGX

SEQ ID NO: 15706 - protein, 38 aa, Artificial Sequence
  GFR-binding peptide
  MOD_RES (3), (35), (37): Xaa is C or S
PTXAPTKLEPLTVLYYDDSSNVIEQLSNNMVVRSXGXH

SEQ ID NO: 15707 - protein, 35 aa, Artificial Sequence
  GFR-binding peptide
  MOD_RES (4), (4): Xaa is C or S
KPTXAPTKLEPLTVLYYDDSSNVIEQLSNNMVVRS

SEQ ID NO: 15708 - protein, 36 aa, Artificial Sequence; identical to SEQ ID NO: 8408
  GFR-binding peptide
  MOD_RES (2), (3), (36): Xaa is C or S
  MOD_RES (17), (18), (19), (20), (21): Xaa is A or G
  MOD_RES (22), (23), (24), (25): Xaa is A or G or is absent

SEQ ID NO: 15709 - protein, 35 aa, Artificial Sequence
  GFR-binding peptide
  MOD_RES (1), (33), (35): Xaa is C or S
XVPTELEPLPMVYYDENEKVVEQLSNDMVVEGXGX

SEQ ID NO: 15710 - protein, 33 aa, Artificial Sequence; identical to SEQ ID NO: 8409
  GFR-binding peptide
  MOD_RES (1), (1): Xaa is C or S
  MOD_RES (15), (16), (17), (18), (19): Xaa is A or G
  MOD_RES (20), (21), (22), (23): Xaa is A or G or is absent

SEQ ID NO: 15711 - protein, 34 aa, Artificial Sequence; identical to SEQ ID NO: 8411
  GFR-binding peptide
  MOD_RES (1), (2), (33): Xaa is C or S

SEQ ID NO: 15712 - protein, 37 aa, Artificial Sequence; identical to SEQ ID NO: 8412
  GFR-binding peptide
  MOD_RES (1), (2), (36): Xaa is C or S
  MOD_RES (16), (17), (18), (19), (20): Xaa is A or G
  MOD_RES (21), (22), (23), (24): Xaa is A or G or is absent

SEQ ID NO: 15713 - protein, 38 aa, Artificial Sequence
  GFR-binding peptide
  MOD_RES (5), (6), (37): Xaa is C or S
SASPXXVSQDLSPISILFIIGKTPKIYKQYEMIVKSXK

SEQ ID NO: 15714 - protein, 38 aa, Artificial Sequence; identical to SEQ ID NO: 8413
  GFR-binding peptide
  MOD_RES (5), (6), (38): Xaa is C or S

SEQ ID NO: 15715 - protein, 37 aa, Artificial Sequence
  GFR-binding peptide
  MOD_RES (2), (3), (36): Xaa is C or S
  MOD_RES (17), (18), (19), (20), (21): Xaa is A or G
  MOD_RES (22), (23), (24), (25): Xaa is A or G or is absent
PXXVSQDLEPLPIVYYXXXXXXXXXEQLSNMIVKSXK

SEQ ID NO: 15716 - protein, 43 aa, Artificial Sequence; identical to SEQ ID NO: 8414
  GFR-binding peptide
  MOD_RES (6), (7), (41), (43): Xaa is C or S
  MOD_RES (21), (22), (23), (24), (25): Xaa is A or G
  MOD_RES (26), (27), (28), (29): Xaa is A or G or is absent

SEQ ID NO: 15717 - protein, 34 aa, Artificial Sequence
  GFR-binding peptide
  MOD_RES (1), (2): Xaa is C or S
  MOD_RES (16), (17), (18), (19), (20): Xaa is A or G
  MOD_RES (21), (22), (23), (24): Xaa is A or G or is absent
XXVPTRLEPLTILYYXXXXXXXXXEQLSNDMVVE

SEQ ID NO: 15718 - protein, 36 aa, Artificial Sequence; identical to SEQ ID NO: 8417
  GFR-binding peptide
  MOD_RES (1), (2), (36): Xaa is C or S
  MOD_RES (16), (17), (18), (19), (20): Xaa is A or G
  MOD_RES (21), (22), (23), (24): Xaa is A or G or is absent

SEQ ID NO: 15719 - protein, 35 aa, Artificial Sequence; identical to SEQ ID NO: 8419
  GFR-binding peptide
  MOD_RES (1), (2), (33), (35): Xaa is C or S

SEQ ID NO: 15720 - protein, 38 aa, Artificial Sequence; identical to SEQ ID NO: 8420
  GFR-binding peptide
  MOD_RES (3), (4), (35), (37): Xaa is C or S

SEQ ID NO: 15721 - protein, 37 aa, Artificial Sequence
  GFR-binding peptide
  MOD_RES (2), (3), (35), (37): Xaa is C or S
PXXAPTKLSPISVLFIDDSSNVIYKQYENMVVRSXGX

SEQ ID NO: 15722 - protein, 43 aa, Artificial Sequence
  GFR-binding peptide
  MOD_RES (7), (41), (43): Xaa is C or S
  MOD_RES (21), (22), (23), (24), (25): Xaa is A or G
  MOD_RES (26), (27), (28), (29): Xaa is A or G or is absent
HVTKPTXAPTKLEPLPVVYYXXXXXXXXXEQLSNNMVVRSXGX

SEQ ID NO: 15723 - protein, 44 aa, Artificial Sequence; identical to SEQ ID NO: 8426
  GFR-binding peptide
  MOD_RES (7), (41), (43): Xaa is C or S
  MOD_RES (21), (22), (23), (24), (25): Xaa is A or G
  MOD_RES (26), (27), (28), (29): Xaa is A or G or is absent

SEQ ID NO: 15724 - protein, 36 aa, Artificial Sequence
  GFR-binding peptide
  MOD_RES (3), (4): Xaa is C or S
  MOD_RES (18), (19), (20), (21), (22): Xaa is A or G
  MOD_RES (23), (24), (25), (26): Xaa is A or G or is absent
SPXXVSQDLEPLPIVYYXXXXXXXXXEQLSNMIVKS

SEQ ID NO: 15725 - protein, 41 aa, Artificial Sequence
  GFR-binding peptide
  MOD_RES (5), (6), (40): Xaa is C or S
  MOD_RES (20), (21), (22), (23), (24): Xaa is A or G
  MOD_RES (25), (26), (27), (28): Xaa is A or G or is absent
VPKPXXAPTQLEPLPVVYYXXXXXXXXXEQLSNNMVVRAXG

SEQ ID NO: 15726 - protein, 36 aa, Artificial Sequence; identical to SEQ ID NO: 8428
  GFR-binding peptide
  MOD_RES (1), (2), (34), (36): Xaa is C or S

SEQ ID NO: 15727 - protein, 38 aa, Artificial Sequence
  GFR-binding peptide
  MOD_RES (2), (3), (37): Xaa is C or S
  MOD_RES (17), (18), (19), (20), (21): Xaa is A or G
  MOD_RES (22), (23), (24), (25): Xaa is A or G or is absent
PXXAPTKLSPISVLFIXXXXXXXXXYKQYENMVVRSXG

SEQ ID NO: 15728 - protein, 35 aa, Artificial Sequence
  GFR-binding peptide
  MOD_RES (1), (35): Xaa is C or S
  MOD_RES (15), (16), (17), (18), (19): Xaa is A or G
  MOD_RES (20), (21), (22), (23): Xaa is A or G or is absent
XAPTKLEPLTVLYYXXXXXXXXXEQLSNNMVVRSX

SEQ ID NO: 15729 - protein, 41 aa, Artificial Sequence; identical to SEQ ID NO: 8429
  GFR-binding peptide
  MOD_RES (4), (5), (39), (41): Xaa is C or S
  MOD_RES (19), (20), (21), (22), (23): Xaa is A or G
  MOD_RES (24), (25), (26), (27): Xaa is A or G or is absent

SEQ ID NO: 15730 - protein, 38 aa, Artificial Sequence; identical to SEQ ID NO: 8431
  GFR-binding peptide
  MOD_RES (1), (35), (37): Xaa is C or S
  MOD_RES (15), (16), (17), (18), (19): Xaa is A or G
  MOD_RES (20), (21), (22), (23): Xaa is A or G or is absent

SEQ ID NO: 15731 - protein, 37 aa, Artificial Sequence; identical to SEQ ID NO: 8432
  GFR-binding peptide
  MOD_RES (5), (6), (37): Xaa is C or S

SEQ ID NO: 15732 - protein, 37 aa, Artificial Sequence
  GFR-binding peptide
  MOD_RES (5), (6), (37): Xaa is C or S
SASPXXVPQDLSPISILFIVGRTPKVYKQYEMVVKSX

SEQ ID NO: 15733 - protein, 37 aa, Artificial Sequence
  GFR-binding peptide
  MOD_RES (6), (7): Xaa is C or S
SIPKAXXVPTELEPLTMLYYDEYDKVVEQLSNEMVVE

SEQ ID NO: 15734 - protein, 41 aa, Artificial Sequence; identical to SEQ ID NO: 8436
  GFR-binding peptide
  MOD_RES (3), (4), (38), (40): Xaa is C or S
  MOD_RES (18), (19), (20), (21), (22): Xaa is A or G
  MOD_RES (23), (24), (25), (26): Xaa is A or G or is absent

SEQ ID NO: 15735 - protein, 37 aa, Artificial Sequence
  GFR-binding peptide
  MOD_RES (4), (5): Xaa is C or S
  MOD_RES (19), (20), (21), (22), (23): Xaa is A or G
  MOD_RES (24), (25), (26), (27): Xaa is A or G or is absent
PKPXXAPTQLSPISVLFIXXXXXXXXXYKQYENMVVR

SEQ ID NO: 15736 - protein, 38 aa, Artificial Sequence
  GFR-binding peptide
  MOD_RES (3), (4), (36), (38): Xaa is C or S
KAXXVPTELSPISMLFIDEYDKVVYKQYEEMVVEGXGX

SEQ ID NO: 15737 - protein, 37 aa, Artificial Sequence; identical to SEQ ID NO: 8440
  GFR-binding peptide
  MOD_RES (5), (6): Xaa is C or S

SEQ ID NO: 15738 - protein, 38 aa, Artificial Sequence; identical to SEQ ID NO: 8442
  GFR-binding peptide
  MOD_RES (1), (2), (35), (37): Xaa is C or S
  MOD_RES (16), (17), (18), (19), (20): Xaa is A or G
  MOD_RES (21), (22), (23), (24): Xaa is A or G or is absent

SEQ ID NO: 15739 - protein, 35 aa, Artificial Sequence
  GFR-binding peptide
  MOD_RES (2), (2): Xaa is C or S
  MOD_RES (16), (17), (18), (19), (20): Xaa is A or G
  MOD_RES (21), (22), (23), (24): Xaa is A or G or is absent
TXAPTKLSPISVLFIXXXXXXXXXYKQYENMVVRS

SEQ ID NO: 15740 - protein, 40 aa, Artificial Sequence
  GFR-binding peptide
  MOD_RES (6), (7): Xaa is C or S
  MOD_RES (21), (22), (23), (24), (25): Xaa is A or G
  MOD_RES (26), (27), (28), (29): Xaa is A or G or is absent
KIPKAXXVPTELSPISMLFIXXXXXXXXXYKQYEDMVVEG

SEQ ID NO: 15741 - protein, 41 aa, Artificial Sequence
  GFR-binding peptide
  MOD_RES (4), (5), (39), (41): Xaa is C or S
  MOD_RES (19), (20), (21), (22), (23): Xaa is A or G
  MOD_RES (24), (25), (26), (27): Xaa is A or G or is absent
PKAXXVPTELEPLTMLYYXXXXXXXXXEQLSNDMVVEGXGX

SEQ ID NO: 15742 - protein, 32 aa, Artificial Sequence; identical to SEQ ID NO: 8444
  GFR-binding peptide
  MOD_RES (1), (2): Xaa is C or S

SEQ ID NO: 15743 - protein, 36 aa, Artificial Sequence
  GFR-binding peptide
  MOD_RES (4), (5): Xaa is C or S
PKPXXAPTKLEPLPVVYYDDSSNVIEQLSNNMVVRS

SEQ ID NO: 15744 - protein, 34 aa, Artificial Sequence; identical to SEQ ID NO: 8446
  GFR-binding peptide
  MOD_RES (1), (1): Xaa is C or S
  MOD_RES (15), (16), (17), (18), (19): Xaa is A or G
  MOD_RES (20), (21), (22), (23): Xaa is A or G or is absent

SEQ ID NO: 15745 - protein, 38 aa, Artificial Sequence
  GFR-binding peptide
  MOD_RES (3), (4), (38): Xaa is C or S
  MOD_RES (18), (19), (20), (21), (22): Xaa is A or G
  MOD_RES (23), (24), (25), (26): Xaa is A or G or is absent
PTXXVPTRLNAISILYFXXXXXXXXXLKKYRDMVVESX

SEQ ID NO: 15746 - protein, 36 aa, Artificial Sequence
  GFR-binding peptide
  MOD_RES (3), (4), (36): Xaa is C or S
PTXXVPTRLEPLPIVYYDSANNVVEQLSNDMVVESX

SEQ ID NO: 15747 - protein, 38 aa, Artificial Sequence
  GFR-binding peptide
  MOD_RES (2), (3), (37): Xaa is C or S
  MOD_RES (17), (18), (19), (20), (21): Xaa is A or G
  MOD_RES (22), (23), (24), (25): Xaa is A or G or is absent
AXXVPTELEPLPMVYYXXXXXXXXXEQLSNDMVVEGXG

SEQ ID NO: 15748 - protein, 38 aa, Artificial Sequence
  GFR-binding peptide
  MOD_RES (5), (6), (38): Xaa is C or S
VPKPXXAPTQLSPISVLFIDDSSNVIYKQYENMVVRAX

SEQ ID NO: 15749 - protein, 39 aa, Artificial Sequence
  GFR-binding peptide
  MOD_RES (3), (4), (38): Xaa is C or S
  MOD_RES (18), (19), (20), (21), (22): Xaa is A or G
  MOD_RES (23), (24), (25), (26): Xaa is A or G or is absent
KAXXVPTELEPLPMVYYXXXXXXXXXEQLSNEMVVEGXG

SEQ ID NO: 15750 - protein, 39 aa, Artificial Sequence
  GFR-binding peptide
  MOD_RES (5), (6): Xaa is C or S
  MOD_RES (20), (21), (22), (23), (24): Xaa is A or G
  MOD_RES (25), (26), (27), (28): Xaa is A or G or is absent
TPPTXXVPTRLEPLPIVYYXXXXXXXXXEQLSNDMVVES

SEQ ID NO: 15751 - protein, 41 aa, Artificial Sequence
  GFR-binding peptide
  MOD_RES (6), (7), (40): Xaa is C or S
  MOD_RES (21), (22), (23), (24), (25): Xaa is A or G
  MOD_RES (26), (27), (28), (29): Xaa is A or G or is absent
ASAAPXXVPQALEPLTILYYXXXXXXXXXEQLSNMIVRSXK

SEQ ID NO: 15752 - protein, 35 aa, Artificial Sequence
  GFR-binding peptide
  MOD_RES (1), (2), (35): Xaa is C or S
  MOD_RES (16), (17), (18), (19), (20): Xaa is A or G
  MOD_RES (21), (22), (23), (24): Xaa is A or G or is absent
XXVPQALSPISILFIXXXXXXXXXYKQYEMIVRSX

SEQ ID NO: 15753 - protein, 40 aa, Artificial Sequence
  GFR-binding peptide
  MOD_RES (5), (6), (40): Xaa is C or S
  MOD_RES (20), (21), (22), (23), (24): Xaa is A or G
  MOD_RES (25), (26), (27), (28): Xaa is A or G or is absent
TPPTXXVPTRLSAISILYLXXXXXXXXXLKNYQDMVVESX

SEQ ID NO: 15754 - protein, 32 aa, Artificial Sequence
  GFR-binding peptide
  MOD_RES (32), (32): Xaa is C or S
APTQLEPLPVVYYDDSSNVIEQLSNNMVVRAX

SEQ ID NO: 15755 - protein, 40 aa, Artificial Sequence
  GFR-binding peptide
  MOD_RES (2), (3), (37), (39): Xaa is C or S
  MOD_RES (17), (18), (19), (20), (21): Xaa is A or G
  MOD_RES (22), (23), (24), (25): Xaa is A or G or is absent
TXXVPTRLEPLPIVYYXXXXXXXXXEQLSNDMVVESXGXR

SEQ ID NO: 15756 - protein, 41 aa, Artificial Sequence
  GFR-binding peptide
  MOD_RES (6), (7), (41): Xaa is C or S
  MOD_RES (21), (22), (23), (24), (25): Xaa is A or G
  MOD_RES (26), (27), (28), (29): Xaa is A or G or is absent
SIPKAXXVPTELEPLPMVYYXXXXXXXXXEQLSNEMVVEGX

SEQ ID NO: 15757 - protein, 33 aa, Artificial Sequence
  GFR-binding peptide
  MOD_RES (2), (3): Xaa is C or S
AXXVPTELSPISMLFIDENEKVVYKQYEDMVVE

SEQ ID NO: 15758 - protein, 39 aa, Artificial Sequence
  GFR-binding peptide
  MOD_RES (6), (7): Xaa is C or S
  MOD_RES (21), (22), (23), (24), (25): Xaa is A or G
  MOD_RES (26), (27), (28), (29): Xaa is A or G or is absent
ASASPXXVPQDLEPLTILYYXXXXXXXXXEQLSNMVVKS

SEQ ID NO: 15759 - protein, 39 aa, Artificial Sequence
  GFR-binding peptide
  MOD_RES (3), (4), (36), (38): Xaa is C or S
KPXXAPTQLEPLTVLYYDDSSNVIEQLSNNMVVRAXGXH

SEQ ID NO: 15760 - protein, 34 aa, Artificial Sequence
  GFR-binding peptide
  MOD_RES (3), (4): Xaa is C or S
PTXXVPTRLEPLTILYYDSANNVVEQLSNDMVVE

SEQ ID NO: 15761 - protein, 36 aa, Artificial Sequence
  GFR-binding peptide
  MOD_RES (3), (4), (36): Xaa is C or S
KPXXAPTQLEPLPVVYYDDSSNVIEQLSNNMVVRAX

SEQ ID NO: 15762 - protein, 35 aa, Artificial Sequence
  GFR-binding peptide
  MOD_RES (32), (34): Xaa is C or S
VPTELSPISMLFIDEYDKVVYKQYEEMVVEGXGXR

SEQ ID NO: 15763 - protein, 32 aa, Artificial Sequence
  GFR-binding peptide
  MOD_RES (1), (2): Xaa is C or S
XXVPQDLSPISILFIVGRTPKVYKQYEMVVKS

SEQ ID NO: 15764 - protein, 39 aa, Artificial Sequence; identical to SEQ ID NO: 8457
  GFR-binding peptide
  MOD_RES (2), (3), (37), (39): Xaa is C or S
  MOD_RES (17), (18), (19), (20), (21): Xaa is A or G
  MOD_RES (22), (23), (24), (25): Xaa is A or G or is absent

SEQ ID NO: 15765 - protein, 37 aa, Artificial Sequence; identical to SEQ ID NO: 8458
  GFR-binding peptide
  MOD_RES (6), (7): Xaa is C or S

SEQ ID NO: 15766 - protein, 34 aa, Artificial Sequence
  GFR-binding peptide
  MOD_RES (1), (2), (34): Xaa is C or S
XXVPTELSPISMLFIDENEKVVYKQYEDMVVEGX

SEQ ID NO: 15767 - protein, 31 aa, Artificial Sequence
  GFR-binding peptide
  MOD_RES (1), (1): Xaa is C or S
XVPQDLEPLPIVYYVGRTPKVEQLSNMVVKS

SEQ ID NO: 15768 - protein, 33 aa, Artificial Sequence; identical to SEQ ID NO: 8460
  GFR-binding peptide
  MOD_RES (2), (3): Xaa is C or S

SEQ ID NO: 15769 - protein, 34 aa, Artificial Sequence
  GFR-binding peptide
  MOD_RES (4), (4): Xaa is C or S
KPTXAPTKLSPISVLFIDDSSNVIYKQYENMVVR

SEQ ID NO: 15770 - protein, 35 aa, Artificial Sequence
  GFR-binding peptide
  MOD_RES (2), (3), (35): Xaa is C or S
PXXAPTQLEPLTVLYYDDSSNVIEQLSNNMVVRAX

SEQ ID NO: 15771 - protein, 38 aa, Artificial Sequence
  GFR-binding peptide
  MOD_RES (2), (3), (37): Xaa is C or S
  MOD_RES (17), (18), (19), (20), (21): Xaa is A or G
  MOD_RES (22), (23), (24), (25): Xaa is A or G or is absent
TXXVPTRLEPLPIVYYXXXXXXXXXEQLSNDMVVESXG

SEQ ID NO: 15772 - protein, 37 aa, Artificial Sequence; identical to SEQ ID NO: 8462
  GFR-binding peptide
  MOD_RES (2), (3), (35), (37): Xaa is C or S

SEQ ID NO: 15773 - protein, 39 aa, Artificial Sequence
  GFR-binding peptide
  MOD_RES (4), (5), (37), (39): Xaa is C or S
PKAXXVPTELEPLPMVYYDENEKVVEQLSNDMVVEGXGX

SEQ ID NO: 15774 - protein, 37 aa, Artificial Sequence
  GFR-binding peptide
  MOD_RES (4), (5): Xaa is C or S
  MOD_RES (19), (20), (21), (22), (23): Xaa is A or G
  MOD_RES (24), (25), (26), (27): Xaa is A or G or is absent
ASPXXVSQDLSPISILFIXXXXXXXXXYKQYEMIVKS

SEQ ID NO: 15775 - protein, 34 aa, Artificial Sequence; identical to SEQ ID NO: 8464
  GFR-binding peptide
  MOD_RES (3), (4): Xaa is C or S

SEQ ID NO: 15776 - protein, 40 aa, Artificial Sequence
  GFR-binding peptide
  MOD_RES (2), (3), (37), (39): Xaa is C or S
  MOD_RES (17), (18), (19), (20), (21): Xaa is A or G
  MOD_RES (22), (23), (24), (25): Xaa is A or G or is absent
AXXVPTELSPISMLFIXXXXXXXXXYKQYEEMVVEGXGXR

SEQ ID NO: 15777 - protein, 40 aa, Artificial Sequence
  GFR-binding peptide
  MOD_RES (6), (7): Xaa is C or S
  MOD_RES (21), (22), (23), (24), (25): Xaa is A or G
  MOD_RES (26), (27), (28), (29): Xaa is A or G or is absent
TVPKPXXAPTQLEPLPVVYYXXXXXXXXXEQLSNNMVVRA

SEQ ID NO: 15778 - protein, 38 aa, Artificial Sequence
  GFR-binding peptide
  MOD_RES (2), (36), (38): Xaa is C or S
  MOD_RES (16), (17), (18), (19), (20): Xaa is A or G
  MOD_RES (21), (22), (23), (24): Xaa is A or G or is absent
TXAPTKLEPLPVVYYXXXXXXXXXEQLSNNMVVRSXGX

SEQ ID NO: 15779 - protein, 33 aa, Artificial Sequence; identical to SEQ ID NO: 8473
  GFR-binding peptide
  MOD_RES (31), (33): Xaa is C or S

SEQ ID NO: 15780 - protein, 40 aa, Artificial Sequence; identical to SEQ ID NO: 8474
  GFR-binding peptide
  MOD_RES (3), (4), (38), (40): Xaa is C or S
  MOD_RES (18), (19), (20), (21), (22): Xaa is A or G
  MOD_RES (23), (24), (25), (26): Xaa is A or G or is absent

SEQ ID NO: 15781 - protein, 37 aa, Artificial Sequence
  GFR-binding peptide
  MOD_RES (1), (2), (34), (36): Xaa is C or S
XXVPTRLEPLTILYYDSANNVVEQLSNDMVVESXGXR

SEQ ID NO: 15782 - protein, 39 aa, Artificial Sequence; identical to SEQ ID NO: 8476
  GFR-binding peptide
  MOD_RES (5), (6), (37), (39): Xaa is C or S

SEQ ID NO: 15783 - protein, 37 aa, Artificial Sequence
  GFR-binding peptide
  MOD_RES (3), (4), (36): Xaa is C or S
PTXXVPTRLNAISILYFDSANNVVLKKYRDMVVESXG

SEQ ID NO: 15784 - protein, 40 aa, Artificial Sequence; identical to SEQ ID NO: 8480
  GFR-binding peptide
  MOD_RES (5), (6), (37), (39): Xaa is C or S

SEQ ID NO: 15785 - protein, 36 aa, Artificial Sequence
  GFR-binding peptide
  MOD_RES (4), (5), (36): Xaa is C or S
AAPXXVPQALEPLTILYYVGRKPKVEQLSNMIVRSX

SEQ ID NO: 15786 - protein, 36 aa, Artificial Sequence
  GFR-binding peptide
  MOD_RES (1), (2), (35): Xaa is C or S
  MOD_RES (16), (17), (18), (19), (20): Xaa is A or G
  MOD_RES (21), (22), (23), (24): Xaa is A or G or is absent
XXVSQDLSPISILFIXXXXXXXXXYKQYEMIVKSXK

SEQ ID NO: 15787 - protein, 34 aa, Artificial Sequence
  GFR-binding peptide
  MOD_RES (33), (33): Xaa is C or S
  MOD_RES (14), (15), (16), (17), (18): Xaa is A or G
  MOD_RES (19), (20), (21), (22): Xaa is A or G or is absent
VPQDLSPISILFIXXXXXXXXXYKQYEMVVKSXK

SEQ ID NO: 15788 - protein, 36 aa, Artificial Sequence
  GFR-binding peptide
  MOD_RES (4), (5): Xaa is C or S
PKAXXVPTELEPLPMVYYDEYDKVVEQLSNEMVVEG

SEQ ID NO: 15789 - protein, 34 aa, Artificial Sequence
  GFR-binding peptide
  MOD_RES (3), (4): Xaa is C or S
KAXXVPTELEPLPMVYYDEYDKVVEQLSNEMVVE

SEQ ID NO: 15790 - protein, 35 aa, Artificial Sequence
  GFR-binding peptide
  MOD_RES (1), (34): Xaa is C or S
  MOD_RES (15), (16), (17), (18), (19): Xaa is A or G
  MOD_RES (20), (21), (22), (23): Xaa is A or G or is absent
XVSQDLSPISILFIXXXXXXXXXYKQYEMIVKSXK

SEQ ID NO: 15791 - protein, 35 aa, Artificial Sequence; identical to SEQ ID NO: 8490
  GFR-binding peptide
  MOD_RES (1), (35): Xaa is C or S
  MOD_RES (15), (16), (17), (18), (19): Xaa is A or G
  MOD_RES (20), (21), (22), (23): Xaa is A or G or is absent

SEQ ID NO: 15792 - protein, 34 aa, Artificial Sequence
  GFR-binding peptide
  MOD_RES (3), (4): Xaa is C or S
PTXXVPTRLNAISILYFDSANNVVLKKYRDMVVE

SEQ ID NO: 15793 - protein, 39 aa, Artificial Sequence
  GFR-binding peptide
  MOD_RES (1), (2), (36), (38): Xaa is C or S
  MOD_RES (16), (17), (18), (19), (20): Xaa is A or G
  MOD_RES (21), (22), (23), (24): Xaa is A or G or is absent
XXVPTRLEPLTILYYXXXXXXXXXEQLSNDMVVESXGXR

SEQ ID NO: 15794 - protein, 38 aa, Artificial Sequence; identical to SEQ ID NO: 8496
  GFR-binding peptide
  MOD_RES (1), (35), (37): Xaa is C or S
  MOD_RES (15), (16), (17), (18), (19): Xaa is A or G
  MOD_RES (20), (21), (22), (23): Xaa is A or G or is absent

SEQ ID NO: 15795 - protein, 38 aa, Artificial Sequence; identical to SEQ ID NO: 8497
  GFR-binding peptide
  MOD_RES (5), (6), (37): Xaa is C or S

SEQ ID NO: 15796 - protein, 33 aa, Artificial Sequence
  GFR-binding peptide
  MOD_RES (1), (33): Xaa is C or S
XVPTELEPLPMVYYDEYDKVVEQLSNEMVVEGX

SEQ ID NO: 15797 - protein, 43 aa, Artificial Sequence
  GFR-binding peptide
  MOD_RES (6), (7), (40), (42): Xaa is C or S
  MOD_RES (21), (22), (23), (24), (25): Xaa is A or G
  MOD_RES (26), (27), (28), (29): Xaa is A or G or is absent
ASASPXXVSQDLEPLTILYYXXXXXXXXXEQLSNMIVKSXKXS

SEQ ID NO: 15798 - protein, 36 aa, Artificial Sequence
  GFR-binding peptide
  MOD_RES (3), (4), (36): Xaa is C or S
KAXXVPTELEPLPMVYYDEYDKVVEQLSNEMVVEGX

SEQ ID NO: 15799 - protein, 34 aa, Artificial Sequence
  GFR-binding peptide
  MOD_RES (3), (4): Xaa is C or S
KPXXAPTKLEPLPVVYYDDSSNVIEQLSNNMVVR

SEQ ID NO: 15800 - protein, 36 aa, Artificial Sequence; identical to SEQ ID NO: 8500
  GFR-binding peptide
  MOD_RES (5), (6): Xaa is C or S

SEQ ID NO: 15801 - protein, 36 aa, Artificial Sequence
  GFR-binding peptide
  MOD_RES (5), (6): Xaa is C or S
VPKPXXAPTKLEPLPVVYYDDSSNVIEQLSNNMVVR

SEQ ID NO: 15802 - protein, 39 aa, Artificial Sequence
  GFR-binding peptide
  MOD_RES (1), (2), (36), (38): Xaa is C or S
  MOD_RES (16), (17), (18), (19), (20): Xaa is A or G
  MOD_RES (21), (22), (23), (24): Xaa is A or G or is absent
XXVPTELSPISMLFIXXXXXXXXXYKQYEDMVVEGXGXR

SEQ ID NO: 15803 - protein, 34 aa, Artificial Sequence; identical to SEQ ID NO: 8505
  GFR-binding peptide
  MOD_RES (3), (4): Xaa is C or S

SEQ ID NO: 15804 - protein, 36 aa, Artificial Sequence
  GFR-binding peptide
  MOD_RES (2), (3), (35): Xaa is C or S
AXXVPTELEPLTMLYYDENEKVVEQLSNDMVVEGXG

SEQ ID NO: 15805 - protein, 40 aa, Artificial Sequence
  GFR-binding peptide
  MOD_RES (5), (6), (40): Xaa is C or S
  MOD_RES (20), (21), (22), (23), (24): Xaa is A or G
  MOD_RES (25), (26), (27), (28): Xaa is A or G or is absent
VPKPXXAPTKLEPLPVVYYXXXXXXXXXEQLSNNMVVRSX

SEQ ID NO: 15806 - protein, 40 aa, Artificial Sequence
  GFR-binding peptide
  MOD_RES (4), (5), (39): Xaa is C or S
  MOD_RES (19), (20), (21), (22), (23): Xaa is A or G
  MOD_RES (24), (25), (26), (27): Xaa is A or G or is absent
PKAXXVPTELEPLPMVYYXXXXXXXXXEQLSNEMVVEGXG

SEQ ID NO: 15807 - protein, 38 aa, Artificial Sequence
  GFR-binding peptide
  MOD_RES (2), (3), (36), (38): Xaa is C or S
  MOD_RES (17), (18), (19), (20), (21): Xaa is A or G
  MOD_RES (22), (23), (24), (25): Xaa is A or G or is absent
PXXVSQDLEPLPIVYYXXXXXXXXXEQLSNMIVKSXKX

SEQ ID NO: 15808 - protein, 39 aa, Artificial Sequence
  GFR-binding peptide
  MOD_RES (6), (7), (39): Xaa is C or S
STPPTXXVPTRLEPLPIVYYDSANNVVEQLSNDMVVESX

SEQ ID NO: 15809 - protein, 35 aa, Artificial Sequence
  GFR-binding peptide
  MOD_RES (1), (2): Xaa is C or S
  MOD_RES (16), (17), (18), (19), (20): Xaa is A or G
  MOD_RES (21), (22), (23), (24): Xaa is A or G or is absent
XXVPTRLEPLTILYYXXXXXXXXXEQLSNDMVVES

SEQ ID NO: 15810 - protein, 39 aa, Artificial Sequence
  GFR-binding peptide
  MOD_RES (4), (5), (36), (38): Xaa is C or S
ASPXXVPQDLEPLPIVYYVGRTPKVEQLSNMVVKSXKXS

SEQ ID NO: 15811 - protein, 39 aa, Artificial Sequence
  GFR-binding peptide
  MOD_RES (6), (7), (39): Xaa is C or S
YVPKPXXAPTKLSPISVLFIDDSSNVIYKQYENMVVRSX

SEQ ID NO: 15812 - protein, 44 aa, Artificial Sequence
  GFR-binding peptide
  MOD_RES (6), (7), (41), (43): Xaa is C or S
  MOD_RES (21), (22), (23), (24), (25): Xaa is A or G
  MOD_RES (26), (27), (28), (29): Xaa is A or G or is absent
STPPTXXVPTRLEPLTILYYXXXXXXXXXEQLSNDMVVESXGXR

SEQ ID NO: 15813 - protein, 37 aa, Artificial Sequence
  GFR-binding peptide
  MOD_RES (1), (2), (35), (37): Xaa is C or S
  MOD_RES (16), (17), (18), (19), (20): Xaa is A or G
  MOD_RES (21), (22), (23), (24): Xaa is A or G or is absent
XXVPQALEPLPIVYYXXXXXXXXXEQLSNMIVRSXKX

SEQ ID NO: 15814 - protein, 37 aa, Artificial Sequence
  GFR-binding peptide
  MOD_RES (3), (4), (36): Xaa is C or S
KPXXAPTKLEPLPVVYYDDSSNVIEQLSNNMVVRSXG

SEQ ID NO: 15815 - protein, 37 aa, Artificial Sequence
  GFR-binding peptide
  MOD_RES (6), (7): Xaa is C or S
ASASPXXVSQDLEPLPIVYYIGKTPKIEQLSNMIVKS

SEQ ID NO: 15816 - protein, 38 aa, Artificial Sequence
  GFR-binding peptide
  MOD_RES (4), (5): Xaa is C or S
  MOD_RES (19), (20), (21), (22), (23): Xaa is A or G
  MOD_RES (24), (25), (26), (27): Xaa is A or G or is absent
PKAXXVPTELSPISMLFIXXXXXXXXXYKQYEEMVVEG

SEQ ID NO: 15817 - protein, 32 aa, Artificial Sequence
  GFR-binding peptide
  MOD_RES (1), (1): Xaa is C or S
XVPTRLEPLTILYYDSANNVVEQLSNDMVVES

SEQ ID NO: 15818 - protein, 39 aa, Artificial Sequence
  GFR-binding peptide
  MOD_RES (4), (5), (37), (39): Xaa is C or S
PKAXXVPTELEPLTMLYYDEYDKVVEQLSNEMVVEGXGX

SEQ ID NO: 15819 - protein, 36 aa, Artificial Sequence; identical to SEQ ID NO: 8517
  GFR-binding peptide
  MOD_RES (3), (4): Xaa is C or S
  MOD_RES (18), (19), (20), (21), (22): Xaa is A or G
  MOD_RES (23), (24), (25), (26): Xaa is A or G or is absent

SEQ ID NO: 15820 - protein, 37 aa, Artificial Sequence; identical to SEQ ID NO: 8518
  GFR-binding peptide
  MOD_RES (4), (5): Xaa is C or S
  MOD_RES (19), (20), (21), (22), (23): Xaa is A or G
  MOD_RES (24), (25), (26), (27): Xaa is A or G or is absent

SEQ ID NO: 15821 - protein, 41 aa, Artificial Sequence
  GFR-binding peptide
  MOD_RES (5), (6), (40): Xaa is C or S
  MOD_RES (20), (21), (22), (23), (24): Xaa is A or G
  MOD_RES (25), (26), (27), (28): Xaa is A or G or is absent
VPKPXXAPTKLSPISVLFIXXXXXXXXXYKQYENMVVRSXG

SEQ ID NO: 15822 - protein, 37 aa, Artificial Sequence; identical to SEQ ID NO: 8524
  GFR-binding peptide
  MOD_RES (5), (6): Xaa is C or S

SEQ ID NO: 15823 - protein, 33 aa, Artificial Sequence; identical to SEQ ID NO: 8526
  GFR-binding peptide
  MOD_RES (1), (2), (33): Xaa is C or S

SEQ ID NO: 15824 - protein, 42 aa, Artificial Sequence
  GFR-binding peptide
  MOD_RES (6), (7), (39), (41): Xaa is C or S
STPPTXXVPTRLSAISILYLDSANNVVLKNYQDMVVESXGXR

SEQ ID NO: 15825 - protein, 33 aa, Artificial Sequence; identical to SEQ ID NO: 8529
  GFR-binding peptide
  MOD_RES (1), (32): Xaa is C or S

SEQ ID NO: 15826 - protein, 35 aa, Artificial Sequence
  GFR-binding peptide
  MOD_RES (1), (35): Xaa is C or S
  MOD_RES (15), (16), (17), (18), (19): Xaa is A or G
  MOD_RES (20), (21), (22), (23): Xaa is A or G or is absent
XVPTRLSAISILYLXXXXXXXXXLKNYQDMVVESX

SEQ ID NO: 15827 - protein, 32 aa, Artificial Sequence
  GFR-binding peptide
  MOD_RES (32), (32): Xaa is C or S
VPTELSPISMLFIDEYDKVVYKQYEEMVVEGX

SEQ ID NO: 15828 - protein, 38 aa, Artificial Sequence
  GFR-binding peptide
  MOD_RES (2), (3), (35), (37): Xaa is C or S
TXXVPTRLSAISILYLDSANNVVLKNYQDMVVESXGXR

SEQ ID NO: 15829 - protein, 39 aa, Artificial Sequence
  GFR-binding peptide
  MOD_RES (1), (2), (36), (38): Xaa is C or S
  MOD_RES (16), (17), (18), (19), (20): Xaa is A or G
  MOD_RES (21), (22), (23), (24): Xaa is A or G or is absent
XXAPTQLEPLPVVYYXXXXXXXXXEQLSNNMVVRAXGXH

SEQ ID NO: 15830 - protein, 41 aa, Artificial Sequence
  GFR-binding peptide
  MOD_RES (4), (5), (39), (41): Xaa is C or S
  MOD_RES (19), (20), (21), (22), (23): Xaa is A or G
  MOD_RES (24), (25), (26), (27): Xaa is A or G or is absent
PPTXXVPTRLEPLTILYYXXXXXXXXXEQLSNDMVVESXGX

SEQ ID NO: 15831 - protein, 38 aa, Artificial Sequence; identical to SEQ ID NO: 8534
  GFR-binding peptide
  MOD_RES (1), (2), (35), (37): Xaa is C or S
  MOD_RES (16), (17), (18), (19), (20): Xaa is A or G
  MOD_RES (21), (22), (23), (24): Xaa is A or G or is absent

SEQ ID NO: 15832 - protein, 39 aa, Artificial Sequence; identical to SEQ ID NO: 8535
  GFR-binding peptide
  MOD_RES (6), (7), (39): Xaa is C or S

SEQ ID NO: 15833 - protein, 36 aa, Artificial Sequence; identical to SEQ ID NO: 8536
  GFR-binding peptide
  MOD_RES (5), (6): Xaa is C or S

SEQ ID NO: 15834 - protein, 43 aa, Artificial Sequence
  GFR-binding peptide
  MOD_RES (6), (7), (41), (43): Xaa is C or S
  MOD_RES (21), (22), (23), (24), (25): Xaa is A or G
  MOD_RES (26), (27), (28), (29): Xaa is A or G or is absent
TVPKPXXAPTQLEPLPVVYYXXXXXXXXXEQLSNNMVVRAXGX

SEQ ID NO: 15835 - protein, 34 aa, Artificial Sequence
  GFR-binding peptide
  MOD_RES (1), (2): Xaa is C or S
  MOD_RES (16), (17), (18), (19), (20): Xaa is A or G
  MOD_RES (21), (22), (23), (24): Xaa is A or G or is absent
XXVPQDLEPLPIVYYXXXXXXXXXEQLSNMVVKS

SEQ ID NO: 15836 - protein, 37 aa, Artificial Sequence; identical to SEQ ID NO: 8538
  GFR-binding peptide
  MOD_RES (6), (7): Xaa is C or S

SEQ ID NO: 15837 - protein, 35 aa, Artificial Sequence
  GFR-binding peptide
  MOD_RES (1), (2), (34): Xaa is C or S
XXAPTKLEPLPVVYYDDSSNVIEQLSNNMVVRSXG

SEQ ID NO: 15838 - protein, 37 aa, Artificial Sequence; identical to SEQ ID NO: 8541
  GFR-binding peptide
  MOD_RES (4), (5): Xaa is C or S
  MOD_RES (19), (20), (21), (22), (23): Xaa is A or G
  MOD_RES (24), (25), (26), (27): Xaa is A or G or is absent

SEQ ID NO: 15839 - protein, 33 aa, Artificial Sequence
  GFR-binding peptide
  MOD_RES (1), (1): Xaa is C or S
  MOD_RES (15), (16), (17), (18), (19): Xaa is A or G
  MOD_RES (20), (21), (22), (23): Xaa is A or G or is absent
XVPTRLSAISILYLXXXXXXXXXLKNYQDMVVE

SEQ ID NO: 15840 - protein, 33 aa, Artificial Sequence
  GFR-binding peptide
  MOD_RES (2), (2): Xaa is C or S
TXAPTKLEPLPVVYYDDSSNVIEQLSNNMVVRS

SEQ ID NO: 15841 - protein, 37 aa, Artificial Sequence
  GFR-binding peptide
  MOD_RES (1), (2), (35), (37): Xaa is C or S
  MOD_RES (16), (17), (18), (19), (20): Xaa is A or G
  MOD_RES (21), (22), (23), (24): Xaa is A or G or is absent
XXVPQDLEPLTILYYXXXXXXXXXEQLSNMVVKSXKX

SEQ ID NO: 15842 - protein, 39 aa, Artificial Sequence; identical to SEQ ID NO: 8546
  GFR-binding peptide
  MOD_RES (4), (5), (36), (38): Xaa is C or S

SEQ ID NO: 15843 - protein, 39 aa, Artificial Sequence
  GFR-binding peptide
  MOD_RES (6), (7), (38): Xaa is C or S
ASAAPXXVPQALEPLTILYYVGRKPKVEQLSNMIVRSXK

SEQ ID NO: 15844 - protein, 34 aa, Artificial Sequence
  GFR-binding peptide
  MOD_RES (31), (33): Xaa is C or S
VPQALSPISILFIVGRKPKVYKQYEMIVRSXKXS

SEQ ID NO: 15845 - protein, 39 aa, Artificial Sequence
  GFR-binding peptide
  MOD_RES (3), (4), (36), (38): Xaa is C or S
PTXXVPTRLSAISILYLDSANNVVLKNYQDMVVESXGXR

SEQ ID NO: 15846 - protein, 32 aa, Artificial Sequence; identical to SEQ ID NO: 8549
  GFR-binding peptide
  MOD_RES (1), (1): Xaa is C or S

SEQ ID NO: 15847 - protein, 37 aa, Artificial Sequence; identical to SEQ ID NO: 8551
  GFR-binding peptide
  MOD_RES (2), (3), (35), (37): Xaa is C or S

SEQ ID NO: 15848 - protein, 39 aa, Artificial Sequence
  GFR-binding peptide
  MOD_RES (2), (3), (37), (39): Xaa is C or S
  MOD_RES (17), (18), (19), (20), (21): Xaa is A or G
  MOD_RES (22), (23), (24), (25): Xaa is A or G or is absent
PXXAPTQLEPLPVVYYXXXXXXXXXEQLSNNMVVRAXGX

SEQ ID NO: 15849 - protein, 37 aa, Artificial Sequence; identical to SEQ ID NO: 8554
  GFR-binding peptide
  MOD_RES (4), (5): Xaa is C or S
  MOD_RES (19), (20), (21), (22), (23): Xaa is A or G
  MOD_RES (24), (25), (26), (27): Xaa is A or G or is absent

SEQ ID NO: 15850 - protein, 41 aa, Artificial Sequence; identical to SEQ ID NO: 8556
  GFR-binding peptide
  MOD_RES (6), (7), (41): Xaa is C or S
  MOD_RES (21), (22), (23), (24), (25): Xaa is A or G
  MOD_RES (26), (27), (28), (29): Xaa is A or G or is absent

SEQ ID NO: 15851 - protein, 36 aa, Artificial Sequence
  GFR-binding peptide
  MOD_RES (2), (3), (34), (36): Xaa is C or S
PXXVPQALEPLTILYYVGRKPKVEQLSNMIVRSXKX

SEQ ID NO: 15852 - protein, 41 aa, Artificial Sequence; identical to SEQ ID NO: 8557
  GFR-binding peptide
  MOD_RES (3), (4), (38), (40): Xaa is C or S
  MOD_RES (18), (19), (20), (21), (22): Xaa is A or G
  MOD_RES (23), (24), (25), (26): Xaa is A or G or is absent

SEQ ID NO: 15853 - protein, 32 aa, Artificial Sequence; identical to SEQ ID NO: 8558
  GFR-binding peptide
  MOD_RES (1), (1): Xaa is C or S

SEQ ID NO: 15854 - protein, 40 aa, Artificial Sequence; identical to SEQ ID NO: 8560
  GFR-binding peptide
  MOD_RES (5), (6), (39): Xaa is C or S
  MOD_RES (20), (21), (22), (23), (24): Xaa is A or G
  MOD_RES (25), (26), (27), (28): Xaa is A or G or is absent

SEQ ID NO: 15855 - protein, 36 aa, Artificial Sequence; identical to SEQ ID NO: 8561
  GFR-binding peptide
  MOD_RES (2), (3), (34), (36): Xaa is C or S

SEQ ID NO: 15856 - protein, 37 aa, Artificial Sequence; identical to SEQ ID NO: 8563
  GFR-binding peptide
  MOD_RES (34), (36): Xaa is C or S
  MOD_RES (14), (15), (16), (17), (18): Xaa is A or G
  MOD_RES (19), (20), (21), (22): Xaa is A or G or is absent

SEQ ID NO: 15857 - protein, 36 aa, Artificial Sequence; identical to SEQ ID NO: 8564
  GFR-binding peptide
  MOD_RES (2), (3), (34), (36): Xaa is C or S

SEQ ID NO: 15858 - protein, 40 aa, Artificial Sequence; identical to SEQ ID NO: 8566
  GFR-binding peptide
  MOD_RES (6), (7), (39): Xaa is C or S

SEQ ID NO: 15859 - protein, 34 aa, Artificial Sequence
  GFR-binding peptide
  MOD_RES (33), (33): Xaa is C or S
  MOD_RES (14), (15), (16), (17), (18): Xaa is A or G
  MOD_RES (19), (20), (21), (22): Xaa is A or G or is absent
VSQDLEPLPIVYYXXXXXXXXXEQLSNMIVKSXK

SEQ ID NO: 15860 - protein, 38 aa, Artificial Sequence
  GFR-binding peptide
  MOD_RES (5), (6), (38): Xaa is C or S
VPKPXXAPTQLEPLPVVYYDDSSNVIEQLSNNMVVRAX

SEQ ID NO: 15861 - protein, 38 aa, Artificial Sequence
  GFR-binding peptide
  MOD_RES (1), (2), (35), (37): Xaa is C or S
  MOD_RES (16), (17), (18), (19), (20): Xaa is A or G
  MOD_RES (21), (22), (23), (24): Xaa is A or G or is absent
XXVPQALEPLTILYYXXXXXXXXXEQLSNMIVRSXKXS

SEQ ID NO: 15862 - protein, 37 aa, Artificial Sequence
  GFR-binding peptide
  MOD_RES (4), (5), (37): Xaa is C or S
PPTXXVPTRLEPLTILYYDSANNVVEQLSNDMVVESX

SEQ ID NO: 15863 - protein, 35 aa, Artificial Sequence
  GFR-binding peptide
  MOD_RES (3), (4), (35): Xaa is C or S
APXXVPQALEPLTILYYVGRKPKVEQLSNMIVRSX

SEQ ID NO: 15864 - protein, 35 aa, Artificial Sequence
  GFR-binding peptide
  MOD_RES (4), (5): Xaa is C or S
PKAXXVPTELSPISMLFIDENEKVVYKQYEDMVVE

SEQ ID NO: 15865 - protein, 32 aa, Artificial Sequence
  GFR-binding peptide
  MOD_RES (1), (32): Xaa is C or S
XVPQDLEPLPIVYYVGRTPKVEQLSNMVVKSX

SEQ ID NO: 15866 - protein, 36 aa, Artificial Sequence
  GFR-binding peptide
  MOD_RES (2), (3), (34), (36): Xaa is C or S
PXXVSQDLEPLPIVYYIGKTPKIEQLSNMIVKSXKX

SEQ ID NO: 15867 - protein, 35 aa, Artificial Sequence; identical to SEQ ID NO: 8570
  GFR-binding peptide
  MOD_RES (33), (35): Xaa is C or S
  MOD_RES (14), (15), (16), (17), (18): Xaa is A or G
  MOD_RES (19), (20), (21), (22): Xaa is A or G or is absent

SEQ ID NO: 15868 - protein, 31 aa, Artificial Sequence
  GFR-binding peptide
  MOD_RES (31), (31): Xaa is C or S
VSQDLEPLPIVYYIGKTPKIEQLSNMIVKSX

SEQ ID NO: 15869 - protein, 37 aa, Artificial Sequence
  GFR-binding peptide
  MOD_RES (2), (3), (35), (37): Xaa is C or S
PXXAPTQLSPISVLFIDDSSNVIYKQYENMVVRAXGX

SEQ ID NO: 15870 - protein, 40 aa, Artificial Sequence
  GFR-binding peptide
  MOD_RES (4), (5), (37), (39): Xaa is C or S
PKPXXAPTQLEPLPVVYYDDSSNVIEQLSNNMVVRAXGXH

SEQ ID NO: 15871 - protein, 41 aa, Artificial Sequence
  GFR-binding peptide
  MOD_RES (5), (6), (38), (40): Xaa is C or S
VPKPXXAPTQLEPLTVLYYDDSSNVIEQLSNNMVVRAXGXH

SEQ ID NO: 15872 - protein, 41 aa, Artificial Sequence; identical to SEQ ID NO: 8571
  GFR-binding peptide
  MOD_RES (6), (7), (39), (41): Xaa is C or S

SEQ ID NO: 15873 - protein, 37 aa, Artificial Sequence; identical to SEQ ID NO: 8574
  GFR-binding peptide
  MOD_RES (5), (6), (37): Xaa is C or S

SEQ ID NO: 15874 - protein, 37 aa, Artificial Sequence; identical to SEQ ID NO: 8575
  GFR-binding peptide
  MOD_RES (2), (3), (34), (36): Xaa is C or S

SEQ ID NO: 15875 - protein, 31 aa, Artificial Sequence; identical to SEQ ID NO: 8576
  GFR-binding peptide
  MOD_RES (1), (1): Xaa is C or S

SEQ ID NO: 15876 - protein, 41 aa, Artificial Sequence
  GFR-binding peptide
  MOD_RES (3), (4), (38), (40): Xaa is C or S
  MOD_RES (18), (19), (20), (21), (22): Xaa is A or G
  MOD_RES (23), (24), (25), (26): Xaa is A or G or is absent
KPXXAPTQLSPISVLFIXXXXXXXXXYKQYENMVVRAXGXH

SEQ ID NO: 15877 - protein, 41 aa, Artificial Sequence
  GFR-binding peptide
  MOD_RES (5), (6), (39), (41): Xaa is C or S
  MOD_RES (20), (21), (22), (23), (24): Xaa is A or G
  MOD_RES (25), (26), (27), (28): Xaa is A or G or is absent
SASPXXVPQDLSPISILFIXXXXXXXXXYKQYEMVVKSXKX

SEQ ID NO: 15878 - protein, 35 aa, Artificial Sequence
  GFR-binding peptide
  MOD_RES (3), (4): Xaa is C or S
KPXXAPTKLSPISVLFIDDSSNVIYKQYENMVVRS

SEQ ID NO: 15879 - protein, 37 aa, Artificial Sequence
  GFR-binding peptide
  MOD_RES (1), (2), (36): Xaa is C or S
  MOD_RES (16), (17), (18), (19), (20): Xaa is A or G
  MOD_RES (21), (22), (23), (24): Xaa is A or G or is absent
XXVPTELEPLTMLYYXXXXXXXXXEQLSNDMVVEGXG

SEQ ID NO: 15880 - protein, 39 aa, Artificial Sequence; identical to SEQ ID NO: 8580
  GFR-binding peptide
  MOD_RES (3), (4), (36), (38): Xaa is C or S

SEQ ID NO: 15881 - protein, 40 aa, Artificial Sequence
  GFR-binding peptide
  MOD_RES (4), (5), (37), (39): Xaa is C or S
PKPXXAPTKLEPLPVVYYDDSSNVIEQLSNNMVVRSXGXH

SEQ ID NO: 15882 - protein, 34 aa, Artificial Sequence; identical to SEQ ID NO: 8581
  GFR-binding peptide
  MOD_RES (1), (33): Xaa is C or S

SEQ ID NO: 15883 - protein, 35 aa, Artificial Sequence; identical to SEQ ID NO: 8583
  GFR-binding peptide
  MOD_RES (1), (35): Xaa is C or S
  MOD_RES (15), (16), (17), (18), (19): Xaa is A or G
  MOD_RES (20), (21), (22), (23): Xaa is A or G or is absent

SEQ ID NO: 15884 - protein, 38 aa, Artificial Sequence
  GFR-binding peptide
  MOD_RES (2), (3), (35), (37): Xaa is C or S
AXXVPTELSPISMLFIDENEKVVYKQYEDMVVEGXGXR

SEQ ID NO: 15885 - protein, 40 aa, Artificial Sequence
  GFR-binding peptide
  MOD_RES (6), (7), (40): Xaa is C or S
  MOD_RES (21), (22), (23), (24), (25): Xaa is A or G
  MOD_RES (26), (27), (28), (29): Xaa is A or G or is absent
ASASPXXVPQDLEPLPIVYYXXXXXXXXXEQLSNMVVKSX

SEQ ID NO: 15886 - protein, 39 aa, Artificial Sequence
  GFR-binding peptide
  MOD_RES (6), (7): Xaa is C or S
  MOD_RES (21), (22), (23), (24), (25): Xaa is A or G
  MOD_RES (26), (27), (28), (29): Xaa is A or G or is absent
TVPKPXXAPTQLSPISVLFIXXXXXXXXXYKQYENMVVR

SEQ ID NO: 15887 - protein, 42 aa, Artificial Sequence; identical to SEQ ID NO: 8585
  GFR-binding peptide
  MOD_RES (6), (7), (40), (42): Xaa is C or S
  MOD_RES (21), (22), (23), (24), (25): Xaa is A or G
  MOD_RES (26), (27), (28), (29): Xaa is A or G or is absent

SEQ ID NO: 15888 - protein, 41 aa, Artificial Sequence; identical to SEQ ID NO: 8586
  GFR-binding peptide
  MOD_RES (5), (6), (39), (41): Xaa is C or S
  MOD_RES (20), (21), (22), (23), (24): Xaa is A or G
  MOD_RES (25), (26), (27), (28): Xaa is A or G or is absent

SEQ ID NO: 15889 - protein, 37 aa, Artificial Sequence
  GFR-binding peptide
  MOD_RES (2), (3), (37): Xaa is C or S
  MOD_RES (17), (18), (19), (20), (21): Xaa is A or G
  MOD_RES (22), (23), (24), (25): Xaa is A or G or is absent
AXXVPTELEPLTMLYYXXXXXXXXXEQLSNEMVVEGX

SEQ ID NO: 15890 - protein, 41 aa, Artificial Sequence; identical to SEQ ID NO: 8588
  GFR-binding peptide
  MOD_RES (4), (5), (39), (41): Xaa is C or S
  MOD_RES (19), (20), (21), (22), (23): Xaa is A or G
  MOD_RES (24), (25), (26), (27): Xaa is A or G or is absent

SEQ ID NO: 15891 - protein, 36 aa, Artificial Sequence
  GFR-binding peptide
  MOD_RES (3), (4), (36): Xaa is C or S
KAXXVPTELSPISMLFIDEYDKVVYKQYEEMVVEGX

SEQ ID NO: 15892 - protein, 37 aa, Artificial Sequence
  GFR-binding peptide
  MOD_RES (4), (4): Xaa is C or S
  MOD_RES (18), (19), (20), (21), (22): Xaa is A or G
  MOD_RES (23), (24), (25), (26): Xaa is A or G or is absent
KPTXAPTKLEPLPVVYYXXXXXXXXXEQLSNNMVVRS

SEQ ID NO: 15893 - protein, 37 aa, Artificial Sequence; identical to SEQ ID NO: 8590
  GFR-binding peptide
  MOD_RES (3), (4), (35), (37): Xaa is C or S

SEQ ID NO: 15894 - protein, 40 aa, Artificial Sequence
  GFR-binding peptide
  MOD_RES (4), (5), (37), (39): Xaa is C or S
PKAXXVPTELSPISMLFIDEYDKVVYKQYEEMVVEGXGXR

SEQ ID NO: 15895 - protein, 35 aa, Artificial Sequence
  GFR-binding peptide
  MOD_RES (1), (2), (34): Xaa is C or S
XXAPTQLEPLPVVYYDDSSNVIEQLSNNMVVRAXG

SEQ ID NO: 15896 - protein, 39 aa, Artificial Sequence; identical to SEQ ID NO: 8592
  GFR-binding peptide
  MOD_RES (2), (3), (36), (38): Xaa is C or S
  MOD_RES (17), (18), (19), (20), (21): Xaa is A or G
  MOD_RES (22), (23), (24), (25): Xaa is A or G or is absent

SEQ ID NO: 15897 - protein, 35 aa, Artificial Sequence; identical to SEQ ID NO: 8594
  GFR-binding peptide
  MOD_RES (1), (34): Xaa is C or S
  MOD_RES (15), (16), (17), (18), (19): Xaa is A or G
  MOD_RES (20), (21), (22), (23): Xaa is A or G or is absent

SEQ ID NO: 15898 - protein, 39 aa, Artificial Sequence
  GFR-binding peptide
  MOD_RES (4), (5), (37), (39): Xaa is C or S
PKAXXVPTELSPISMLFIDENEKVVYKQYEDMVVEGXGX

SEQ ID NO: 15899 - protein, 35 aa, Artificial Sequence
  GFR-binding peptide
  MOD_RES (2), (3): Xaa is C or S
  MOD_RES (17), (18), (19), (20), (21): Xaa is A or G
  MOD_RES (22), (23), (24), (25): Xaa is A or G or is absent
TXXVPTRLSAISILYLXXXXXXXXXLKNYQDMVVE

SEQ ID NO: 15900 - protein, 37 aa, Artificial Sequence
  GFR-binding peptide
  MOD_RES (5), (6): Xaa is C or S
TPPTXXVPTRLEPLPIVYYDSANNVVEQLSNDMVVES

SEQ ID NO: 15901 - protein, 35 aa, Artificial Sequence
  GFR-binding peptide
  MOD_RES (1), (2): Xaa is C or S
  MOD_RES (16), (17), (18), (19), (20): Xaa is A or G
  MOD_RES (21), (22), (23), (24): Xaa is A or G or is absent
XXVPTELSPISMLFIXXXXXXXXXYKQYEEMVVEG

SEQ ID NO: 15902 - protein, 41 aa, Artificial Sequence
  GFR-binding peptide
  MOD_RES (5), (6), (40): Xaa is C or S
  MOD_RES (20), (21), (22), (23), (24): Xaa is A or G
  MOD_RES (25), (26), (27), (28): Xaa is A or G or is absent
TPPTXXVPTRLEPLPIVYYXXXXXXXXXEQLSNDMVVESXG

SEQ ID NO: 15903 - protein, 37 aa, Artificial Sequence
  GFR-binding peptide
  MOD_RES (1), (2), (36): Xaa is C or S
  MOD_RES (16), (17), (18), (19), (20): Xaa is A or G
  MOD_RES (21), (22), (23), (24): Xaa is A or G or is absent
XXAPTKLSPISVLFIXXXXXXXXXYKQYENMVVRSXG

SEQ ID NO: 15904 - protein, 42 aa, Artificial Sequence; identical to SEQ ID NO: 8601
  GFR-binding peptide
  MOD_RES (6), (7), (40), (42): Xaa is C or S
  MOD_RES (21), (22), (23), (24), (25): Xaa is A or G
  MOD_RES (26), (27), (28), (29): Xaa is A or G or is absent

SEQ ID NO: 15905 - protein, 34 aa, Artificial Sequence
  GFR-binding peptide
  MOD_RES (1), (1): Xaa is C or S
  MOD_RES (15), (16), (17), (18), (19): Xaa is A or G
  MOD_RES (20), (21), (22), (23): Xaa is A or G or is absent
XAPTKLEPLTVLYYXXXXXXXXXEQLSNNMVVRS

SEQ ID NO: 15906 - protein, 32 aa, Artificial Sequence
  GFR-binding peptide
  MOD_RES (1), (2): Xaa is C or S
XXVPTELEPLPMVYYDEYDKVVEQLSNEMVVE

SEQ ID NO: 15907 - protein, 32 aa, Artificial Sequence
  GFR-binding peptide
  MOD_RES (31), (31): Xaa is C or S
VPQALEPLTILYYVGRKPKVEQLSNMIVRSXK

SEQ ID NO: 15908 - protein, 36 aa, Artificial Sequence
  GFR-binding peptide
  MOD_RES (2), (3), (34), (36): Xaa is C or S
PXXVPQDLSPISILFIVGRTPKVYKQYEMVVKSXKX

SEQ ID NO: 15909 - protein, 37 aa, Artificial Sequence
  GFR-binding peptide
  MOD_RES (3), (4): Xaa is C or S
  MOD_RES (18), (19), (20), (21), (22): Xaa is A or G
  MOD_RES (23), (24), (25), (26): Xaa is A or G or is absent
PTXXVPTRLSAISILYLXXXXXXXXXLKNYQDMVVES

SEQ ID NO: 15910 - protein, 39 aa, Artificial Sequence
  GFR-binding peptide
  MOD_RES (6), (7), (39): Xaa is C or S
TVPKPXXAPTQLEPLPVVYYDDSSNVIEQLSNNMVVRAX

SEQ ID NO: 15911 - protein, 36 aa, Artificial Sequence
  GFR-binding peptide
  MOD_RES (1), (35): Xaa is C or S
  MOD_RES (15), (16), (17), (18), (19): Xaa is A or G
  MOD_RES (20), (21), (22), (23): Xaa is A or G or is absent
XVPTRLEPLTILYYXXXXXXXXXEQLSNDMVVESXG

SEQ ID NO: 15912 - protein, 40 aa, Artificial Sequence
  GFR-binding peptide
  MOD_RES (5), (6), (37), (39): Xaa is C or S
SASPXXVSQDLSPISILFIIGKTPKIYKQYEMIVKSXKXS

SEQ ID NO: 15913 - protein, 34 aa, Artificial Sequence; identical to SEQ ID NO: 8608
  GFR-binding peptide
  MOD_RES (1), (32), (34): Xaa is C or S

SEQ ID NO: 15914 - protein, 39 aa, Artificial Sequence
  GFR-binding peptide
  MOD_RES (4), (5), (36), (38): Xaa is C or S
ASPXXVPQDLSPISILFIVGRTPKVYKQYEMVVKSXKXS

SEQ ID NO: 15915 - protein, 39 aa, Artificial Sequence; identical to SEQ ID NO: 8610
  GFR-binding peptide
  MOD_RES (6), (7), (38): Xaa is C or S

SEQ ID NO: 15916 - protein, 38 aa, Artificial Sequence; identical to SEQ ID NO: 8613
  GFR-binding peptide
  MOD_RES (3), (4), (37): Xaa is C or S
  MOD_RES (18), (19), (20), (21), (22): Xaa is A or G
  MOD_RES (23), (24), (25), (26): Xaa is A or G or is absent

SEQ ID NO: 15917 - protein, 36 aa, Artificial Sequence
  GFR-binding peptide
  MOD_RES (3), (4): Xaa is C or S
  MOD_RES (18), (19), (20), (21), (22): Xaa is A or G
  MOD_RES (23), (24), (25), (26): Xaa is A or G or is absent
SPXXVSQDLSPISILFIXXXXXXXXXYKQYEMIVKS

SEQ ID NO: 15918 - protein, 38 aa, Artificial Sequence
  GFR-binding peptide
  MOD_RES (1), (35), (37): Xaa is C or S
  MOD_RES (15), (16), (17), (18), (19): Xaa is A or G
  MOD_RES (20), (21), (22), (23): Xaa is A or G or is absent
XAPTKLSPISVLFIXXXXXXXXXYKQYENMVVRSXGXH

SEQ ID NO: 15919 - protein, 35 aa, Artificial Sequence
  GFR-binding peptide
  MOD_RES (33), (35): Xaa is C or S
  MOD_RES (14), (15), (16), (17), (18): Xaa is A or G
  MOD_RES (19), (20), (21), (22): Xaa is A or G or is absent
VSQDLSPISILFIXXXXXXXXXYKQYEMIVKSXKX

SEQ ID NO: 15920 - protein, 38 aa, Artificial Sequence
  GFR-binding peptide
  MOD_RES (3), (4), (38): Xaa is C or S
  MOD_RES (18), (19), (20), (21), (22): Xaa is A or G
  MOD_RES (23), (24), (25), (26): Xaa is A or G or is absent
KAXXVPTELEPLPMVYYXXXXXXXXXEQLSNEMVVEGX

SEQ ID NO: 15921 - protein, 39 aa, Artificial Sequence; identical to SEQ ID NO: 8615
  GFR-binding peptide
  MOD_RES (1), (2), (36), (38): Xaa is C or S
  MOD_RES (16), (17), (18), (19), (20): Xaa is A or G
  MOD_RES (21), (22), (23), (24): Xaa is A or G or is absent

SEQ ID NO: 15922 - protein, 36 aa, Artificial Sequence
  GFR-binding peptide
  MOD_RES (1), (2), (35): Xaa is C or S
  MOD_RES (16), (17), (18), (19), (20): Xaa is A or G
  MOD_RES (21), (22), (23), (24): Xaa is A or G or is absent
XXVPQDLEPLTILYYXXXXXXXXXEQLSNMVVKSXK

SEQ ID NO: 15923 - protein, 44 aa, Artificial Sequence
  GFR-binding peptide
  MOD_RES (6), (7), (41), (43): Xaa is C or S
  MOD_RES (21), (22), (23), (24), (25): Xaa is A or G
  MOD_RES (26), (27), (28), (29): Xaa is A or G or is absent
TVPKPXXAPTQLEPLPVVYYXXXXXXXXXEQLSNNMVVRAXGXH

SEQ ID NO: 15924 - protein, 36 aa, Artificial Sequence
  GFR-binding peptide
  MOD_RES (1), (2), (36): Xaa is C or S
  MOD_RES (16), (17), (18), (19), (20): Xaa is A or G
  MOD_RES (21), (22), (23), (24): Xaa is A or G or is absent
XXAPTKLEPLTVLYYXXXXXXXXXEQLSNNMVVRSX

SEQ ID NO: 15925 - protein, 37 aa, Artificial Sequence
  GFR-binding peptide
  MOD_RES (6), (7): Xaa is C or S
STPPTXXVPTRLEPLTILYYDSANNVVEQLSNDMVVE

SEQ ID NO: 15926 - protein, 36 aa, Artificial Sequence; identical to SEQ ID NO: 8629
  GFR-binding peptide
  MOD_RES (34), (36): Xaa is C or S
  MOD_RES (14), (15), (16), (17), (18): Xaa is A or G
  MOD_RES (19), (20), (21), (22): Xaa is A or G or is absent

SEQ ID NO: 15927 - protein, 37 aa, Artificial Sequence; identical to SEQ ID NO: 8631
  GFR-binding peptide
  MOD_RES (1), (34), (36): Xaa is C or S
  MOD_RES (15), (16), (17), (18), (19): Xaa is A or G
  MOD_RES (20), (21), (22), (23): Xaa is A or G or is absent

SEQ ID NO: 15928 - protein, 36 aa, Artificial Sequence; identical to SEQ ID NO: 8636
  GFR-binding peptide
  MOD_RES (3), (4), (36): Xaa is C or S

SEQ ID NO: 15929 - protein, 37 aa, Artificial Sequence
  GFR-binding peptide
  MOD_RES (1), (2), (36): Xaa is C or S
  MOD_RES (16), (17), (18), (19), (20): Xaa is A or G
  MOD_RES (21), (22), (23), (24): Xaa is A or G or is absent
XXAPTQLEPLTVLYYXXXXXXXXXEQLSNNMVVRAXG

SEQ ID NO: 15930 - protein, 35 aa, Artificial Sequence
  GFR-binding peptide
  MOD_RES (2), (3): Xaa is C or S
  MOD_RES (17), (18), (19), (20), (21): Xaa is A or G
  MOD_RES (22), (23), (24), (25): Xaa is A or G or is absent
AXXVPTELEPLTMLYYXXXXXXXXXEQLSNEMVVE

SEQ ID NO: 15931 - protein, 38 aa, Artificial Sequence
  GFR-binding peptide
  MOD_RES (2), (3), (35), (37): Xaa is C or S
TXXVPTRLEPLTILYYDSANNVVEQLSNDMVVESXGXR

SEQ ID NO: 15932 - protein, 38 aa, Artificial Sequence
  GFR-binding peptide
  MOD_RES (1), (2), (36), (38): Xaa is C or S
  MOD_RES (16), (17), (18), (19), (20): Xaa is A or G
  MOD_RES (21), (22), (23), (24): Xaa is A or G or is absent
XXVPTELSPISMLFIXXXXXXXXXYKQYEEMVVEGXGX

SEQ ID NO: 15933 - protein, 35 aa, Artificial Sequence
  GFR-binding peptide
  MOD_RES (2), (3), (35): Xaa is C or S
TXXVPTRLEPLTILYYDSANNVVEQLSNDMVVESX

SEQ ID NO: 15934 - protein, 34 aa, Artificial Sequence
  GFR-binding peptide
  MOD_RES (1), (33): Xaa is C or S
XVPTRLSAISILYLDSANNVVLKNYQDMVVESXG

SEQ ID NO: 15935 - protein, 41 aa, Artificial Sequence
  GFR-binding peptide
  MOD_RES (6), (7), (41): Xaa is C or S
  MOD_RES (21), (22), (23), (24), (25): Xaa is A or G
  MOD_RES (26), (27), (28), (29): Xaa is A or G or is absent
STPPTXXVPTRLEPLTILYYXXXXXXXXXEQLSNDMVVESX

SEQ ID NO: 15936 - protein, 34 aa, Artificial Sequence
  GFR-binding peptide
  MOD_RES (2), (3): Xaa is C or S
AXXVPTELEPLPMVYYDENEKVVEQLSNDMVVEG

SEQ ID NO: 15937 - protein, 40 aa, Artificial Sequence
  GFR-binding peptide
  MOD_RES (4), (5), (38), (40): Xaa is C or S
  MOD_RES (19), (20), (21), (22), (23): Xaa is A or G
  MOD_RES (24), (25), (26), (27): Xaa is A or G or is absent
ASPXXVPQDLEPLPIVYYXXXXXXXXXEQLSNMVVKSXKX

SEQ ID NO: 15938 - protein, 37 aa, Artificial Sequence
  GFR-binding peptide
  MOD_RES (1), (2), (34), (36): Xaa is C or S
XXVPTRLEPLPIVYYDSANNVVEQLSNDMVVESXGXR

SEQ ID NO: 15939 - protein, 36 aa, Artificial Sequence
  GFR-binding peptide
  MOD_RES (1), (2), (36): Xaa is C or S
  MOD_RES (16), (17), (18), (19), (20): Xaa is A or G
  MOD_RES (21), (22), (23), (24): Xaa is A or G or is absent
XXAPTKLSPISVLFIXXXXXXXXXYKQYENMVVRSX

SEQ ID NO: 15940 - protein, 35 aa, Artificial Sequence; identical to SEQ ID NO: 8646
  GFR-binding peptide
  MOD_RES (3), (35): Xaa is C or S

SEQ ID NO: 15941 - protein, 37 aa, Artificial Sequence
  GFR-binding peptide
  MOD_RES (2), (3), (37): Xaa is C or S
  MOD_RES (17), (18), (19), (20), (21): Xaa is A or G
  MOD_RES (22), (23), (24), (25): Xaa is A or G or is absent
AXXVPTELEPLPMVYYXXXXXXXXXEQLSNDMVVEGX

SEQ ID NO: 15942 - protein, 37 aa, Artificial Sequence
  GFR-binding peptide
  MOD_RES (34), (36): Xaa is C or S
  MOD_RES (14), (15), (16), (17), (18): Xaa is A or G
  MOD_RES (19), (20), (21), (22): Xaa is A or G or is absent
VPTRLSAISILYLXXXXXXXXXLKNYQDMVVESXGXR

SEQ ID NO: 15943 - protein, 40 aa, Artificial Sequence
  GFR-binding peptide
  MOD_RES (4), (5), (39): Xaa is C or S
  MOD_RES (19), (20), (21), (22), (23): Xaa is A or G
  MOD_RES (24), (25), (26), (27): Xaa is A or G or is absent
PPTXXVPTRLNAISILYFXXXXXXXXXLKKYRDMVVESXG

SEQ ID NO: 15944 - protein, 30 aa, Artificial Sequence
  GFR-binding peptide
APTQLEPLPVVYYDDSSNVIEQLSNNMVVR

SEQ ID NO: 15945 - protein, 31 aa, Artificial Sequence
  GFR-binding peptide
  MOD_RES (31), (31): Xaa is C or S
VPQALEPLTILYYVGRKPKVEQLSNMIVRSX

SEQ ID NO: 15946 - protein, 36 aa, Artificial Sequence; identical to SEQ ID NO: 8649
  GFR-binding peptide
  MOD_RES (3), (4): Xaa is C or S
  MOD_RES (18), (19), (20), (21), (22): Xaa is A or G
  MOD_RES (23), (24), (25), (26): Xaa is A or G or is absent

SEQ ID NO: 15947 - protein, 35 aa, Artificial Sequence; identical to SEQ ID NO: 8651
  GFR-binding peptide
  MOD_RES (3), (4), (35): Xaa is C or S

SEQ ID NO: 15948 - protein, 39 aa, Artificial Sequence; identical to SEQ ID NO: 8652
  GFR-binding peptide
  MOD_RES (6), (7): Xaa is C or S
  MOD_RES (21), (22), (23), (24), (25): Xaa is A or G
  MOD_RES (26), (27), (28), (29): Xaa is A or G or is absent

SEQ ID NO: 15949 - protein, 35 aa, Artificial Sequence
  GFR-binding peptide
  MOD_RES (1), (2), (34): Xaa is C or S
XXVPTELEPLTMLYYDENEKVVEQLSNDMVVEGXG

SEQ ID NO: 15950 - protein, 35 aa, Artificial Sequence
  GFR-binding peptide
  MOD_RES (1), (2), (34): Xaa is C or S
XXVPTRLNAISILYFDSANNVVLKKYRDMVVESXG

SEQ ID NO: 15951 - protein, 39 aa, Artificial Sequence
  GFR-binding peptide
  MOD_RES (7), (39): Xaa is C or S
HVTKPTXAPTKLEPLTVLYYDDSSNVIEQLSNNMVVRSX

SEQ ID NO: 15952 - protein, 38 aa, Artificial Sequence; identical to SEQ ID NO: 8656
  GFR-binding peptide
  MOD_RES (4), (5): Xaa is C or S
  MOD_RES (19), (20), (21), (22), (23): Xaa is A or G
  MOD_RES (24), (25), (26), (27): Xaa is A or G or is absent

SEQ ID NO: 15953 - protein, 33 aa, Artificial Sequence; identical to SEQ ID NO: 8658
  GFR-binding peptide
  MOD_RES (1), (2), (33): Xaa is C or S

SEQ ID NO: 15954 - protein, 34 aa, Artificial Sequence
  GFR-binding peptide
  MOD_RES (1), (2), (33): Xaa is C or S
XXVSQDLSPISILFIIGKTPKIYKQYEMIVKSXK

SEQ ID NO: 15955 - protein, 33 aa, Artificial Sequence
  GFR-binding peptide
  MOD_RES (1), (1): Xaa is C or S
  MOD_RES (15), (16), (17), (18), (19): Xaa is A or G
  MOD_RES (20), (21), (22), (23): Xaa is A or G or is absent
XAPTKLSPISVLFIXXXXXXXXXYKQYENMVVR

SEQ ID NO: 15956 - protein, 32 aa, Artificial Sequence
  GFR-binding peptide
  MOD_RES (32), (32): Xaa is C or S
VPTELEPLPMVYYDEYDKVVEQLSNEMVVEGX

SEQ ID NO: 15957 - protein, 34 aa, Artificial Sequence; identical to SEQ ID NO: 8660
  GFR-binding peptide
  MOD_RES (1), (1): Xaa is C or S
  MOD_RES (15), (16), (17), (18), (19): Xaa is A or G
  MOD_RES (20), (21), (22), (23): Xaa is A or G or is absent

SEQ ID NO: 15958 - protein, 38 aa, Artificial Sequence; identical to SEQ ID NO: 8661
  GFR-binding peptide
  MOD_RES (4), (5): Xaa is C or S
  MOD_RES (19), (20), (21), (22), (23): Xaa is A or G
  MOD_RES (24), (25), (26), (27): Xaa is A or G or is absent

SEQ ID NO: 15959 - protein, 38 aa, Artificial Sequence
  GFR-binding peptide
  MOD_RES (4), (5), (38): Xaa is C or S
  MOD_RES (19), (20), (21), (22), (23): Xaa is A or G
  MOD_RES (24), (25), (26), (27): Xaa is A or G or is absent
ASPXXVPQDLEPLPIVYYXXXXXXXXXEQLSNMVVKSX

SEQ ID NO: 15960 - protein, 34 aa, Artificial Sequence
  GFR-binding peptide
  MOD_RES (1), (2), (34): Xaa is C or S
XXAPTQLSPISVLFIDDSSNVIYKQYENMVVRAX

SEQ ID NO: 15961 - protein, 41 aa, Artificial Sequence
  GFR-binding peptide
  MOD_RES (6), (40): Xaa is C or S
  MOD_RES (20), (21), (22), (23), (24): Xaa is A or G
  MOD_RES (25), (26), (27), (28): Xaa is A or G or is absent
VTKPTXAPTKLEPLTVLYYXXXXXXXXXEQLSNNMVVRSXG

SEQ ID NO: 15962 - protein, 33 aa, Artificial Sequence
  GFR-binding peptide
  MOD_RES (33), (33): Xaa is C or S
  MOD_RES (14), (15), (16), (17), (18): Xaa is A or G
  MOD_RES (19), (20), (21), (22): Xaa is A or G or is absent
VPQALEPLPIVYYXXXXXXXXXEQLSNMIVRSX

SEQ ID NO: 15963 - protein, 38 aa, Artificial Sequence; identical to SEQ ID NO: 8667
  GFR-binding peptide
  MOD_RES (2), (3), (37): Xaa is C or S
  MOD_RES (17), (18), (19), (20), (21): Xaa is A or G
  MOD_RES (22), (23), (24), (25): Xaa is A or G or is absent

SEQ ID NO: 15964 - protein, 36 aa, Artificial Sequence
  GFR-binding peptide
  MOD_RES (2), (3): Xaa is C or S
  MOD_RES (17), (18), (19), (20), (21): Xaa is A or G
  MOD_RES (22), (23), (24), (25): Xaa is A or G or is absent
AXXVPTELEPLPMVYYXXXXXXXXXEQLSNDMVVEG

SEQ ID NO: 15965 - protein, 37 aa, Artificial Sequence
  GFR-binding peptide
  MOD_RES (2), (3), (35), (37): Xaa is C or S
PXXAPTKLEPLPVVYYDDSSNVIEQLSNNMVVRSXGX

SEQ ID NO: 15966 - protein, 34 aa, Artificial Sequence
  GFR-binding peptide
  MOD_RES (1), (34): Xaa is C or S
  MOD_RES (15), (16), (17), (18), (19): Xaa is A or G
  MOD_RES (20), (21), (22), (23): Xaa is A or G or is absent
XVPQALEPLTILYYXXXXXXXXXEQLSNMIVRSX

SEQ ID NO: 15967 - protein, 34 aa, Artificial Sequence
  GFR-binding peptide
  MOD_RES (1), (2): Xaa is C or S
  MOD_RES (16), (17), (18), (19), (20): Xaa is A or G
  MOD_RES (21), (22), (23), (24): Xaa is A or G or is absent
XXAPTQLEPLTVLYYXXXXXXXXXEQLSNNMVVR

SEQ ID NO: 15968 - protein, 43 aa, Artificial Sequence
  GFR-binding peptide
  MOD_RES (6), (7), (41), (43): Xaa is C or S
  MOD_RES (21), (22), (23), (24), (25): Xaa is A or G
  MOD_RES (26), (27), (28), (29): Xaa is A or G or is absent
STPPTXXVPTRLSAISILYLXXXXXXXXXLKNYQDMVVESXGX

SEQ ID NO: 15969 - protein, 34 aa, Artificial Sequence
  GFR-binding peptide
  MOD_RES (2), (34): Xaa is C or S
TXAPTKLSPISVLFIDDSSNVIYKQYENMVVRSX

SEQ ID NO: 15970 - protein, 36 aa, Artificial Sequence
  GFR-binding peptide
  MOD_RES (1), (35): Xaa is C or S
  MOD_RES (15), (16), (17), (18), (19): Xaa is A or G
  MOD_RES (20), (21), (22), (23): Xaa is A or G or is absent
XVPTELSPISMLFIXXXXXXXXXYKQYEEMVVEGXG

SEQ ID NO: 15971 - protein, 37 aa, Artificial Sequence
  GFR-binding peptide
  MOD_RES (2), (3), (37): Xaa is C or S
  MOD_RES (17), (18), (19), (20), (21): Xaa is A or G
  MOD_RES (22), (23), (24), (25): Xaa is A or G or is absent
AXXVPTELSPISMLFIXXXXXXXXXYKQYEDMVVEGX

SEQ ID NO: 15972 - protein, 38 aa, Artificial Sequence; identical to SEQ ID NO: 8673
  GFR-binding peptide
  MOD_RES (2), (3), (37): Xaa is C or S
  MOD_RES (17), (18), (19), (20), (21): Xaa is A or G
  MOD_RES (22), (23), (24), (25): Xaa is A or G or is absent

SEQ ID NO: 15973 - protein, 38 aa, Artificial Sequence; identical to SEQ ID NO: 8674
  GFR-binding peptide
  MOD_RES (3), (4), (35), (37): Xaa is C or S

SEQ ID NO: 15974 - protein, 37 aa, Artificial Sequence
  GFR-binding peptide
  MOD_RES (3), (4): Xaa is C or S
  MOD_RES (18), (19), (20), (21), (22): Xaa is A or G
  MOD_RES (23), (24), (25), (26): Xaa is A or G or is absent
KAXXVPTELEPLPMVYYXXXXXXXXXEQLSNEMVVEG

SEQ ID NO: 15975 - protein, 38 aa, Artificial Sequence
  GFR-binding peptide
  MOD_RES (1), (2), (36), (38): Xaa is C or S
  MOD_RES (16), (17), (18), (19), (20): Xaa is A or G
  MOD_RES (21), (22), (23), (24): Xaa is A or G or is absent
XXAPTQLSPISVLFIXXXXXXXXXYKQYENMVVRAXGX

SEQ ID NO: 15976 - protein, 39 aa, Artificial Sequence
  GFR-binding peptide
  MOD_RES (4), (5), (39): Xaa is C or S
  MOD_RES (19), (20), (21), (22), (23): Xaa is A or G
  MOD_RES (24), (25), (26), (27): Xaa is A or G or is absent
PPTXXVPTRLSAISILYLXXXXXXXXXLKNYQDMVVESX

SEQ ID NO: 15977 - protein, 36 aa, Artificial Sequence
  GFR-binding peptide
  MOD_RES (34), (36): Xaa is C or S
  MOD_RES (14), (15), (16), (17), (18): Xaa is A or G
  MOD_RES (19), (20), (21), (22): Xaa is A or G or is absent
VPTRLEPLTILYYXXXXXXXXXEQLSNDMVVESXGX

SEQ ID NO: 15978 - protein, 32 aa, Artificial Sequence
  GFR-binding peptide
  MOD_RES (1), (2): Xaa is C or S
XXVPTRLEPLTILYYDSANNVVEQLSNDMVVE

SEQ ID NO: 15979 - protein, 34 aa, Artificial Sequence
  GFR-binding peptide
  MOD_RES (34), (34): Xaa is C or S
  MOD_RES (14), (15), (16), (17), (18): Xaa is A or G
  MOD_RES (19), (20), (21), (22): Xaa is A or G or is absent
VPTRLSAISILYLXXXXXXXXXLKNYQDMVVESX

SEQ ID NO: 15980 - protein, 36 aa, Artificial Sequence
  GFR-binding peptide
  MOD_RES (2), (3), (36): Xaa is C or S
  MOD_RES (17), (18), (19), (20), (21): Xaa is A or G
  MOD_RES (22), (23), (24), (25): Xaa is A or G or is absent
PXXVPQDLEPLTILYYXXXXXXXXXEQLSNMVVKSX

SEQ ID NO: 15981 - protein, 41 aa, Artificial Sequence
  GFR-binding peptide
  MOD_RES (5), (6), (40): Xaa is C or S
  MOD_RES (20), (21), (22), (23), (24): Xaa is A or G
  MOD_RES (25), (26), (27), (28): Xaa is A or G or is absent
IPKAXXVPTELEPLTMLYYXXXXXXXXXEQLSNDMVVEGXG

SEQ ID NO: 15982 - protein, 39 aa, Artificial Sequence
  GFR-binding peptide
  MOD_RES (3), (4), (38): Xaa is C or S
  MOD_RES (18), (19), (20), (21), (22): Xaa is A or G
  MOD_RES (23), (24), (25), (26): Xaa is A or G or is absent
PTXXVPTRLNAISILYFXXXXXXXXXLKKYRDMVVESXG

SEQ ID NO: 15983 - protein, 38 aa, Artificial Sequence
  GFR-binding peptide
  MOD_RES (1), (35), (37): Xaa is C or S
  MOD_RES (15), (16), (17), (18), (19): Xaa is A or G
  MOD_RES (20), (21), (22), (23): Xaa is A or G or is absent
XVPTRLEPLPIVYYXXXXXXXXXEQLSNDMVVESXGXR

SEQ ID NO: 15984 - protein, 38 aa, Artificial Sequence
  GFR-binding peptide
  MOD_RES (3), (4), (36), (38): Xaa is C or S
KAXXVPTELEPLTMLYYDENEKVVEQLSNDMVVEGXGX

SEQ ID NO: 15985 - protein, 39 aa, Artificial Sequence
  GFR-binding peptide
  MOD_RES (4), (5), (37), (39): Xaa is C or S
PPTXXVPTRLNAISILYFDSANNVVLKKYRDMVVESXGX

SEQ ID NO: 15986 - protein, 38 aa, Artificial Sequence; identical to SEQ ID NO: 8680
  GFR-binding peptide
  MOD_RES (5), (6), (37): Xaa is C or S

SEQ ID NO: 15987 - protein, 36 aa, Artificial Sequence
  GFR-binding peptide
  MOD_RES (2), (3): Xaa is C or S
  MOD_RES (17), (18), (19), (20), (21): Xaa is A or G
  MOD_RES (22), (23), (24), (25): Xaa is A or G or is absent
TXXVPTRLSPISILFIXXXXXXXXXYKQYEDMVVES

SEQ ID NO: 15988 - protein, 32 aa, Artificial Sequence
  GFR-binding peptide
  MOD_RES (1), (1): Xaa is C or S
XAPTKLEPLTVLYYDDSSNVIEQLSNNMVVRS

SEQ ID NO: 15989 - protein, 40 aa, Artificial Sequence
  GFR-binding peptide
  MOD_RES (6), (7), (39): Xaa is C or S
YVPKPXXAPTKLSPISVLFIDDSSNVIYKQYENMVVRSXG

SEQ ID NO: 15990 - protein, 41 aa, Artificial Sequence
  GFR-binding peptide
  MOD_RES (3), (4), (38), (40): Xaa is C or S
  MOD_RES (18), (19), (20), (21), (22): Xaa is A or G
  MOD_RES (23), (24), (25), (26): Xaa is A or G or is absent
KAXXVPTELEPLTMLYYXXXXXXXXXEQLSNEMVVEGXGXR

SEQ ID NO: 15991 - protein, 36 aa, Artificial Sequence
  GFR-binding peptide
  MOD_RES (2), (3), (36): Xaa is C or S
  MOD_RES (17), (18), (19), (20), (21): Xaa is A or G
  MOD_RES (22), (23), (24), (25): Xaa is A or G or is absent
PXXVSQDLEPLPIVYYXXXXXXXXXEQLSNMIVKSX

SEQ ID NO: 15992 - protein, 35 aa, Artificial Sequence; identical to SEQ ID NO: 8688
  GFR-binding peptide
  MOD_RES (1), (2), (34): Xaa is C or S

SEQ ID NO: 15993 - protein, 34 aa, Artificial Sequence
  GFR-binding peptide
  MOD_RES (34), (34): Xaa is C or S
  MOD_RES (14), (15), (16), (17), (18): Xaa is A or G
  MOD_RES (19), (20), (21), (22): Xaa is A or G or is absent
APTKLEPLPVVYYXXXXXXXXXEQLSNNMVVRSX

SEQ ID NO: 15994 - protein, 37 aa, Artificial Sequence; identical to SEQ ID NO: 8693
  GFR-binding peptide
  MOD_RES (3), (4), (35), (37): Xaa is C or S

SEQ ID NO: 15995 - protein, 34 aa, Artificial Sequence
  GFR-binding peptide
  MOD_RES (1), (2): Xaa is C or S
  MOD_RES (16), (17), (18), (19), (20): Xaa is A or G
  MOD_RES (21), (22), (23), (24): Xaa is A or G or is absent
XXVPTRLEPLPIVYYXXXXXXXXXEQLSNDMVVE

SEQ ID NO: 15996 - protein, 33 aa, Artificial Sequence
  GFR-binding peptide
  MOD_RES (2), (3): Xaa is C or S
PXXVPQDLEPLPIVYYVGRTPKVEQLSNMVVKS

SEQ ID NO: 15997 - protein, 37 aa, Artificial Sequence; identical to SEQ ID NO: 8696
  GFR-binding peptide
  MOD_RES (1), (2), (35), (37): Xaa is C or S
  MOD_RES (16), (17), (18), (19), (20): Xaa is A or G
  MOD_RES (21), (22), (23), (24): Xaa is A or G or is absent

SEQ ID NO: 15998 - protein, 37 aa, Artificial Sequence
  GFR-binding peptide
  MOD_RES (2), (3), (37): Xaa is C or S
  MOD_RES (17), (18), (19), (20), (21): Xaa is A or G
  MOD_RES (22), (23), (24), (25): Xaa is A or G or is absent
PXXAPTKLEPLPVVYYXXXXXXXXXEQLSNNMVVRSX

SEQ ID NO: 15999 - protein, 34 aa, Artificial Sequence; identical to SEQ ID NO: 8697
  GFR-binding peptide
  MOD_RES (1), (34): Xaa is C or S
  MOD_RES (15), (16), (17), (18), (19): Xaa is A or G
  MOD_RES (20), (21), (22), (23): Xaa is A or G or is absent

SEQ ID NO: 16000 - protein, 37 aa, Artificial Sequence
  GFR-binding peptide
  MOD_RES (2), (3), (35), (37): Xaa is C or S
PXXAPTQLEPLPVVYYDDSSNVIEQLSNNMVVRAXGX

SEQ ID NO: 16001 - protein, 39 aa, Artificial Sequence
  GFR-binding peptide
  MOD_RES (5), (6), (38): Xaa is C or S
TPPTXXVPTRLEPLTILYYDSANNVVEQLSNDMVVESXG

SEQ ID NO: 16002 - protein, 37 aa, Artificial Sequence
  GFR-binding peptide
  MOD_RES (2), (3), (36): Xaa is C or S
  MOD_RES (17), (18), (19), (20), (21): Xaa is A or G
  MOD_RES (22), (23), (24), (25): Xaa is A or G or is absent
PXXVPQDLEPLPIVYYXXXXXXXXXEQLSNMVVKSXK

SEQ ID NO: 16003 - protein, 43 aa, Artificial Sequence; identical to SEQ ID NO: 8706
  GFR-binding peptide
  MOD_RES (5), (6), (40), (42): Xaa is C or S
  MOD_RES (20), (21), (22), (23), (24): Xaa is A or G
  MOD_RES (25), (26), (27), (28): Xaa is A or G or is absent

SEQ ID NO: 16004 - protein, 38 aa, Artificial Sequence
  GFR-binding peptide
  MOD_RES (2), (3), (35), (37): Xaa is C or S
AXXVPTELEPLTMLYYDENEKVVEQLSNDMVVEGXGXR

SEQ ID NO: 16005 - protein, 35 aa, Artificial Sequence
  GFR-binding peptide
  MOD_RES (34), (34): Xaa is C or S
  MOD_RES (14), (15), (16), (17), (18): Xaa is A or G
  MOD_RES (19), (20), (21), (22): Xaa is A or G or is absent
VPTELEPLTMLYYXXXXXXXXXEQLSNEMVVEGXG

SEQ ID NO: 16006 - protein, 34 aa, Artificial Sequence
  GFR-binding peptide
  MOD_RES (34), (34): Xaa is C or S
  MOD_RES (14), (15), (16), (17), (18): Xaa is A or G
  MOD_RES (19), (20), (21), (22): Xaa is A or G or is absent
APTKLSPISVLFIXXXXXXXXXYKQYENMVVRSX

SEQ ID NO: 16007 - protein, 36 aa, Artificial Sequence; identical to SEQ ID NO: 8711
  GFR-binding peptide
  MOD_RES (1), (2), (35): Xaa is C or S
  MOD_RES (16), (17), (18), (19), (20): Xaa is A or G
  MOD_RES (21), (22), (23), (24): Xaa is A or G or is absent

SEQ ID NO: 16008 - protein, 39 aa, Artificial Sequence
  GFR-binding peptide
  MOD_RES (5), (6), (39): Xaa is C or S
  MOD_RES (20), (21), (22), (23), (24): Xaa is A or G
  MOD_RES (25), (26), (27), (28): Xaa is A or G or is absent
SASPXXVSQDLSPISILFIXXXXXXXXXYKQYEMIVKSX

SEQ ID NO: 16009 - protein, 40 aa, Artificial Sequence
  GFR-binding peptide
  MOD_RES (2), (3), (37), (39): Xaa is C or S
  MOD_RES (17), (18), (19), (20), (21): Xaa is A or G
  MOD_RES (22), (23), (24), (25): Xaa is A or G or is absent
PXXAPTKLEPLPVVYYXXXXXXXXXEQLSNNMVVRSXGXH

SEQ ID NO: 16010 - protein, 37 aa, Artificial Sequence
  GFR-binding peptide
  MOD_RES (1), (35), (37): Xaa is C or S
  MOD_RES (15), (16), (17), (18), (19): Xaa is A or G
  MOD_RES (20), (21), (22), (23): Xaa is A or G or is absent
XVPTELSPISMLFIXXXXXXXXXYKQYEEMVVEGXGX

SEQ ID NO: 16011 - protein, 32 aa, Artificial Sequence; identical to SEQ ID NO: 8715
  GFR-binding peptide
  MOD_RES (1), (1): Xaa is C or S

SEQ ID NO: 16012 - protein, 36 aa, Artificial Sequence; identical to SEQ ID NO: 8716
  GFR-binding peptide
  MOD_RES (3), (4): Xaa is C or S
  MOD_RES (18), (19), (20), (21), (22): Xaa is A or G
  MOD_RES (23), (24), (25), (26): Xaa is A or G or is absent

SEQ ID NO: 16013 - protein, 38 aa, Artificial Sequence
  GFR-binding peptide
  MOD_RES (5), (37): Xaa is C or S
TKPTXAPTKLEPLPVVYYDDSSNVIEQLSNNMVVRSXG

SEQ ID NO: 16014 - protein, 41 aa, Artificial Sequence; identical to SEQ ID NO: 8719
  GFR-binding peptide
  MOD_RES (3), (4), (38), (40): Xaa is C or S
  MOD_RES (18), (19), (20), (21), (22): Xaa is A or G
  MOD_RES (23), (24), (25), (26): Xaa is A or G or is absent

SEQ ID NO: 16015 - protein, 33 aa, Artificial Sequence
  GFR-binding peptide
  MOD_RES (1), (1): Xaa is C or S
  MOD_RES (15), (16), (17), (18), (19): Xaa is A or G
  MOD_RES (20), (21), (22), (23): Xaa is A or G or is absent
XAPTQLSPISVLFIXXXXXXXXXYKQYENMVVR

SEQ ID NO: 16016 - protein, 33 aa, Artificial Sequence
  GFR-binding peptide
  MOD_RES (32), (32): Xaa is C or S
VPTELSPISMLFIDEYDKVVYKQYEEMVVEGXG

SEQ ID NO: 16017 - protein, 32 aa, Artificial Sequence
  GFR-binding peptide
  MOD_RES (32), (32): Xaa is C or S
APTQLSPISVLFIDDSSNVIYKQYENMVVRAX

SEQ ID NO: 16018 - protein, 38 aa, Artificial Sequence
  GFR-binding peptide
  MOD_RES (5), (6): Xaa is C or S
  MOD_RES (20), (21), (22), (23), (24): Xaa is A or G
  MOD_RES (25), (26), (27), (28): Xaa is A or G or is absent
VPKPXXAPTQLSPISVLFIXXXXXXXXXYKQYENMVVR

SEQ ID NO: 16019 - protein, 38 aa, Artificial Sequence
  GFR-binding peptide
  MOD_RES (4), (5), (37): Xaa is C or S
PKAXXVPTELEPLPMVYYDENEKVVEQLSNDMVVEGXG

SEQ ID NO: 16020 - protein, 38 aa, Artificial Sequence
  GFR-binding peptide
  MOD_RES (3), (37): Xaa is C or S
  MOD_RES (17), (18), (19), (20), (21): Xaa is A or G
  MOD_RES (22), (23), (24), (25): Xaa is A or G or is absent
PTXAPTKLEPLTVLYYXXXXXXXXXEQLSNNMVVRSXG

SEQ ID NO: 16021 - protein, 35 aa, Artificial Sequence
  GFR-binding peptide
  MOD_RES (3), (35): Xaa is C or S
PTXAPTKLEPLPVVYYDDSSNVIEQLSNNMVVRSX

SEQ ID NO: 16022 - protein, 33 aa, Artificial Sequence
  GFR-binding peptide
  MOD_RES (2), (3): Xaa is C or S
PXXAPTKLSPISVLFIDDSSNVIYKQYENMVVR

SEQ ID NO: 16023 - protein, 37 aa, Artificial Sequence; identical to SEQ ID NO: 8728
  GFR-binding peptide
  MOD_RES (5), (6): Xaa is C or S

SEQ ID NO: 16024 - protein, 32 aa, Artificial Sequence
  GFR-binding peptide
  MOD_RES (14), (15), (16), (17), (18): Xaa is A or G
  MOD_RES (19), (20), (21), (22): Xaa is A or G or is absent
VPTELEPLTMLYYXXXXXXXXXEQLSNDMVVE

SEQ ID NO: 16025 - protein, 38 aa, Artificial Sequence
  GFR-binding peptide
  MOD_RES (7), (7): Xaa is C or S
HVTKPTXAPTKLEPLPVVYYDDSSNVIEQLSNNMVVRS

SEQ ID NO: 16026 - protein, 40 aa, Artificial Sequence
  GFR-binding peptide
  MOD_RES (5), (6), (38), (40): Xaa is C or S
TPPTXXVPTRLEPLTILYYDSANNVVEQLSNDMVVESXGX

SEQ ID NO: 16027 - protein, 35 aa, Artificial Sequence
  GFR-binding peptide
  MOD_RES (3), (4): Xaa is C or S
KPXXAPTQLEPLTVLYYDDSSNVIEQLSNNMVVRA

SEQ ID NO: 16028 - protein, 35 aa, Artificial Sequence
  GFR-binding peptide
  MOD_RES (1), (34): Xaa is C or S
  MOD_RES (15), (16), (17), (18), (19): Xaa is A or G
  MOD_RES (20), (21), (22), (23): Xaa is A or G or is absent
XVPQDLSPISILFIXXXXXXXXXYKQYEMVVKSXK

SEQ ID NO: 16029 - protein, 35 aa, Artificial Sequence
  GFR-binding peptide
  MOD_RES (1), (35): Xaa is C or S
  MOD_RES (15), (16), (17), (18), (19): Xaa is A or G
  MOD_RES (20), (21), (22), (23): Xaa is A or G or is absent
XAPTKLSPISVLFIXXXXXXXXXYKQYENMVVRSX

SEQ ID NO: 16030 - protein, 35 aa, Artificial Sequence
  GFR-binding peptide
  MOD_RES (4), (5): Xaa is C or S
AAPXXVPQALEPLTILYYVGRKPKVEQLSNMIVRS

SEQ ID NO: 16031 - protein, 40 aa, Artificial Sequence; identical to SEQ ID NO: 8737
  GFR-binding peptide
  MOD_RES (6), (7), (39): Xaa is C or S

SEQ ID NO: 16032 - protein, 35 aa, Artificial Sequence
  GFR-binding peptide
  MOD_RES (2), (3), (34): Xaa is C or S
PXXVSQDLEPLPIVYYIGKTPKIEQLSNMIVKSXK

SEQ ID NO: 16033 - protein, 42 aa, Artificial Sequence; identical to SEQ ID NO: 8739
  GFR-binding peptide
  MOD_RES (6), (7), (41): Xaa is C or S
  MOD_RES (21), (22), (23), (24), (25): Xaa is A or G
  MOD_RES (26), (27), (28), (29): Xaa is A or G or is absent

SEQ ID NO: 16034 - protein, 35 aa, Artificial Sequence; identical to SEQ ID NO: 8740
  GFR-binding peptide
  MOD_RES (1), (33), (35): Xaa is C or S

SEQ ID NO: 16035 - protein, 44 aa, Artificial Sequence
  GFR-binding peptide
  MOD_RES (7), (41), (43): Xaa is C or S
  MOD_RES (21), (22), (23), (24), (25): Xaa is A or G
  MOD_RES (26), (27), (28), (29): Xaa is A or G or is absent
HVTKPTXAPTKLEPLTVLYYXXXXXXXXXEQLSNNMVVRSXGXH

SEQ ID NO: 16036 - protein, 39 aa, Artificial Sequence; identical to SEQ ID NO: 8741
  GFR-binding peptide
  MOD_RES (5), (6): Xaa is C or S
  MOD_RES (20), (21), (22), (23), (24): Xaa is A or G
  MOD_RES (25), (26), (27), (28): Xaa is A or G or is absent

SEQ ID NO: 16037 - protein, 40 aa, Artificial Sequence
  GFR-binding peptide
  MOD_RES (4), (5), (37), (39): Xaa is C or S
PPTXXVPTRLNAISILYFDSANNVVLKKYRDMVVESXGXR

SEQ ID NO: 16038 - protein, 41 aa, Artificial Sequence; identical to SEQ ID NO: 8743
  GFR-binding peptide
  MOD_RES (5), (6), (39), (41): Xaa is C or S
  MOD_RES (20), (21), (22), (23), (24): Xaa is A or G
  MOD_RES (25), (26), (27), (28): Xaa is A or G or is absent

SEQ ID NO: 16039 - protein, 36 aa, Artificial Sequence
  GFR-binding peptide
  MOD_RES (4), (5): Xaa is C or S
PPTXXVPTRLEPLTILYYDSANNVVEQLSNDMVVES

SEQ ID NO: 16040 - protein, 36 aa, Artificial Sequence; identical to SEQ ID NO: 8744
  GFR-binding peptide
  MOD_RES (5), (6): Xaa is C or S

SEQ ID NO: 16041 - protein, 42 aa, Artificial Sequence
  GFR-binding peptide
  MOD_RES (4), (5), (39), (41): Xaa is C or S
  MOD_RES (19), (20), (21), (22), (23): Xaa is A or G
  MOD_RES (24), (25), (26), (27): Xaa is A or G or is absent
PPTXXVPTRLEPLPIVYYXXXXXXXXXEQLSNDMVVESXGXR

SEQ ID NO: 16042 - protein, 36 aa, Artificial Sequence
  GFR-binding peptide
  MOD_RES (1), (2), (35): Xaa is C or S
  MOD_RES (16), (17), (18), (19), (20): Xaa is A or G
  MOD_RES (21), (22), (23), (24): Xaa is A or G or is absent
XXVPQDLSPISILFIXXXXXXXXXYKQYEMVVKSXK

SEQ ID NO: 16043 - protein, 35 aa, Artificial Sequence
  GFR-binding peptide
  MOD_RES (2), (3), (34): Xaa is C or S
PXXVPQALEPLTILYYVGRKPKVEQLSNMIVRSXK

SEQ ID NO: 16044 - protein, 36 aa, Artificial Sequence
  GFR-binding peptide
  MOD_RES (4), (5): Xaa is C or S
PKAXXVPTELSPISMLFIDENEKVVYKQYEDMVVEG

SEQ ID NO: 16045 - protein, 36 aa, Artificial Sequence
  GFR-binding peptide
  MOD_RES (6), (6): Xaa is C or S
VTKPTXAPTKLEPLTVLYYDDSSNVIEQLSNNMVVR

SEQ ID NO: 16046 - protein, 38 aa, Artificial Sequence
  GFR-binding peptide
  MOD_RES (1), (2), (36), (38): Xaa is C or S
  MOD_RES (16), (17), (18), (19), (20): Xaa is A or G
  MOD_RES (21), (22), (23), (24): Xaa is A or G or is absent
XXVPTRLEPLPIVYYXXXXXXXXXEQLSNDMVVESXGX

SEQ ID NO: 16047 - protein, 31 aa, Artificial Sequence
  GFR-binding peptide
  MOD_RES (1), (1): Xaa is C or S
XAPTKLSPISVLFIDDSSNVIYKQYENMVVR

SEQ ID NO: 16048 - protein, 38 aa, Artificial Sequence; identical to SEQ ID NO: 8750
  GFR-binding peptide
  MOD_RES (2), (3), (37): Xaa is C or S
  MOD_RES (17), (18), (19), (20), (21): Xaa is A or G
  MOD_RES (22), (23), (24), (25): Xaa is A or G or is absent

SEQ ID NO: 16049 - protein, 37 aa, Artificial Sequence
  GFR-binding peptide
  MOD_RES (6), (7): Xaa is C or S
ASASPXXVPQDLEPLPIVYYVGRTPKVEQLSNMVVKS

SEQ ID NO: 16050 - protein, 42 aa, Artificial Sequence
  GFR-binding peptide
  MOD_RES (6), (7), (41): Xaa is C or S
  MOD_RES (21), (22), (23), (24), (25): Xaa is A or G
  MOD_RES (26), (27), (28), (29): Xaa is A or G or is absent
TVPKPXXAPTQLEPLTVLYYXXXXXXXXXEQLSNNMVVRAXG

SEQ ID NO: 16051 - protein, 34 aa, Artificial Sequence
  GFR-binding peptide
  MOD_RES (1), (2), (34): Xaa is C or S
XXVPTRLNAISILYFDSANNVVLKKYRDMVVESX

SEQ ID NO: 16052 - protein, 35 aa, Artificial Sequence
  GFR-binding peptide
  MOD_RES (2), (3): Xaa is C or S
  MOD_RES (17), (18), (19), (20), (21): Xaa is A or G
  MOD_RES (22), (23), (24), (25): Xaa is A or G or is absent
PXXVPQDLEPLPIVYYXXXXXXXXXEQLSNMVVKS

SEQ ID NO: 16053 - protein, 33 aa, Artificial Sequence
  GFR-binding peptide
  MOD_RES (1), (33): Xaa is C or S
XVPTELSPISMLFIDENEKVVYKQYEDMVVEGX

SEQ ID NO: 16054 - protein, 35 aa, Artificial Sequence; identical to SEQ ID NO: 8757
  GFR-binding peptide
  MOD_RES (1), (2), (33), (35): Xaa is C or S

SEQ ID NO: 16055 - protein, 39 aa, Artificial Sequence
  GFR-binding peptide
  MOD_RES (3), (4), (38): Xaa is C or S
  MOD_RES (18), (19), (20), (21), (22): Xaa is A or G
  MOD_RES (23), (24), (25), (26): Xaa is A or G or is absent
KPXXAPTQLEPLTVLYYXXXXXXXXXEQLSNNMVVRAXG

SEQ ID NO: 16056 - protein, 32 aa, Artificial Sequence
  GFR-binding peptide
  MOD_RES (1), (32): Xaa is C or S
XVPQDLSPISILFIVGRTPKVYKQYEMVVKSX

SEQ ID NO: 16057 - protein, 41 aa, Artificial Sequence
  GFR-binding peptide
  MOD_RES (5), (6), (39), (41): Xaa is C or S
  MOD_RES (20), (21), (22), (23), (24): Xaa is A or G
  MOD_RES (25), (26), (27), (28): Xaa is A or G or is absent
SAAPXXVPQALEPLTILYYXXXXXXXXXEQLSNMIVRSXKX

SEQ ID NO: 16058 - protein, 35 aa, Artificial Sequence
  GFR-binding peptide
  MOD_RES (3), (3): Xaa is C or S
  MOD_RES (17), (18), (19), (20), (21): Xaa is A or G
  MOD_RES (22), (23), (24), (25): Xaa is A or G or is absent
PTXAPTKLEPLPVVYYXXXXXXXXXEQLSNNMVVR

SEQ ID NO: 16059 - protein, 40 aa, Artificial Sequence
  GFR-binding peptide
  MOD_RES (4), (5), (39): Xaa is C or S
  MOD_RES (19), (20), (21), (22), (23): Xaa is A or G
  MOD_RES (24), (25), (26), (27): Xaa is A or G or is absent
PKPXXAPTQLEPLTVLYYXXXXXXXXXEQLSNNMVVRAXG

SEQ ID NO: 16060 - protein, 37 aa, Artificial Sequence
  GFR-binding peptide
  MOD_RES (4), (5), (37): Xaa is C or S
PKPXXAPTQLSPISVLFIDDSSNVIYKQYENMVVRAX

SEQ ID NO: 16061 - protein, 39 aa, Artificial Sequence
  GFR-binding peptide
  MOD_RES (5), (6), (38): Xaa is C or S
IPKAXXVPTELSPISMLFIDEYDKVVYKQYEEMVVEGXG

SEQ ID NO: 16062 - protein, 33 aa, Artificial Sequence
  GFR-binding peptide
  MOD_RES (1), (1): Xaa is C or S
  MOD_RES (15), (16), (17), (18), (19): Xaa is A or G
  MOD_RES (20), (21), (22), (23): Xaa is A or G or is absent
XVPTELEPLPMVYYXXXXXXXXXEQLSNDMVVE

SEQ ID NO: 16063 - protein, 36 aa, Artificial Sequence
  GFR-binding peptide
  MOD_RES (5), (6): Xaa is C or S
SASPXXVSQDLEPLPIVYYIGKTPKIEQLSNMIVKS

SEQ ID NO: 16064 - protein, 37 aa, Artificial Sequence
  GFR-binding peptide
  MOD_RES (6), (7): Xaa is C or S
KIPKAXXVPTELSPISMLFIDENEKVVYKQYEDMVVE

SEQ ID NO: 16065 - protein, 39 aa, Artificial Sequence
  GFR-binding peptide
  MOD_RES (2), (3), (37), (39): Xaa is C or S
  MOD_RES (17), (18), (19), (20), (21): Xaa is A or G
  MOD_RES (22), (23), (24), (25): Xaa is A or G or is absent
TXXVPTRLEPLTILYYXXXXXXXXXEQLSNDMVVESXGX

SEQ ID NO: 16066 - protein, 38 aa, Artificial Sequence; identical to SEQ ID NO: 8772
  GFR-binding peptide
  MOD_RES (2), (3), (35), (37): Xaa is C or S

SEQ ID NO: 16067 - protein, 34 aa, Artificial Sequence
  GFR-binding peptide
  MOD_RES (1), (33): Xaa is C or S
XAPTKLSPISVLFIDDSSNVIYKQYENMVVRSXG

SEQ ID NO: 16068 - protein, 39 aa, Artificial Sequence
  GFR-binding peptide
  MOD_RES (5), (39): Xaa is C or S
  MOD_RES (19), (20), (21), (22), (23): Xaa is A or G
  MOD_RES (24), (25), (26), (27): Xaa is A or G or is absent
TKPTXAPTKLEPLPVVYYXXXXXXXXXEQLSNNMVVRSX

SEQ ID NO: 16069 - protein, 38 aa, Artificial Sequence
  GFR-binding peptide
  MOD_RES (4), (5), (38): Xaa is C or S
  MOD_RES (19), (20), (21), (22), (23): Xaa is A or G
  MOD_RES (24), (25), (26), (27): Xaa is A or G or is absent
AAPXXVPQALEPLPIVYYXXXXXXXXXEQLSNMIVRSX

SEQ ID NO: 16070 - protein, 36 aa, Artificial Sequence
  GFR-binding peptide
  MOD_RES (4), (5): Xaa is C or S
PPTXXVPTRLSAISILYLDSANNVVLKNYQDMVVES

SEQ ID NO: 16071 - protein, 36 aa, Artificial Sequence
  GFR-binding peptide
  MOD_RES (4), (5): Xaa is C or S
PKAXXVPTELSPISMLFIDEYDKVVYKQYEEMVVEG

SEQ ID NO: 16072 - protein, 42 aa, Artificial Sequence
  GFR-binding peptide
  MOD_RES (6), (7), (40), (42): Xaa is C or S
  MOD_RES (21), (22), (23), (24), (25): Xaa is A or G
  MOD_RES (26), (27), (28), (29): Xaa is A or G or is absent
ASASPXXVPQDLSPISILFIXXXXXXXXXYKQYEMVVKSXKX

SEQ ID NO: 16073 - protein, 36 aa, Artificial Sequence; identical to SEQ ID NO: 8778
  GFR-binding peptide
  MOD_RES (4), (5), (36): Xaa is C or S

SEQ ID NO: 16074 - protein, 35 aa, Artificial Sequence
  GFR-binding peptide
  MOD_RES (34), (34): Xaa is C or S
  MOD_RES (14), (15), (16), (17), (18): Xaa is A or G
  MOD_RES (19), (20), (21), (22): Xaa is A or G or is absent
VPTELEPLPMVYYXXXXXXXXXEQLSNEMVVEGXG

SEQ ID NO: 16075 - protein, 37 aa, Artificial Sequence
  GFR-binding peptide
  MOD_RES (4), (5): Xaa is C or S
  MOD_RES (19), (20), (21), (22), (23): Xaa is A or G
  MOD_RES (24), (25), (26), (27): Xaa is A or G or is absent
PKPXXAPTKLSPISVLFIXXXXXXXXXYKQYENMVVR

SEQ ID NO: 16076 - protein, 36 aa, Artificial Sequence
  GFR-binding peptide
  MOD_RES (34), (36): Xaa is C or S
  MOD_RES (14), (15), (16), (17), (18): Xaa is A or G
  MOD_RES (19), (20), (21), (22): Xaa is A or G or is absent
APTKLEPLTVLYYXXXXXXXXXEQLSNNMVVRSXGX

SEQ ID NO: 16077 - protein, 38 aa, Artificial Sequence; identical to SEQ ID NO: 8782
  GFR-binding peptide
  MOD_RES (3), (4), (38): Xaa is C or S
  MOD_RES (18), (19), (20), (21), (22): Xaa is A or G
  MOD_RES (23), (24), (25), (26): Xaa is A or G or is absent

SEQ ID NO: 16078 - protein, 37 aa, Artificial Sequence
  GFR-binding peptide
  MOD_RES (1), (35), (37): Xaa is C or S
  MOD_RES (15), (16), (17), (18), (19): Xaa is A or G
  MOD_RES (20), (21), (22), (23): Xaa is A or G or is absent
XAPTKLSPISVLFIXXXXXXXXXYKQYENMVVRSXGX

SEQ ID NO: 16079 - protein, 38 aa, Artificial Sequence; identical to SEQ ID NO: 8783
  GFR-binding peptide
  MOD_RES (5), (6): Xaa is C or S
  MOD_RES (20), (21), (22), (23), (24): Xaa is A or G
  MOD_RES (25), (26), (27), (28): Xaa is A or G or is absent

SEQ ID NO: 16080 - protein, 35 aa, Artificial Sequence; identical to SEQ ID NO: 8784
  GFR-binding peptide
  MOD_RES (5), (5): Xaa is C or S

SEQ ID NO: 16081 - protein, 30 aa, Artificial Sequence; identical to SEQ ID NO: 8785
  GFR-binding peptide

SEQ ID NO: 16082 - protein, 31 aa, Artificial Sequence
  GFR-binding peptide
  MOD_RES (1), (1): Xaa is C or S
XVPTRLEPLTILYYDSANNVVEQLSNDMVVE

SEQ ID NO: 16083 - protein, 34 aa, Artificial Sequence
  GFR-binding peptide
  MOD_RES (3), (4): Xaa is C or S
KPXXAPTQLSPISVLFIDDSSNVIYKQYENMVVR

SEQ ID NO: 16084 - protein, 40 aa, Artificial Sequence
  GFR-binding peptide
  MOD_RES (5), (6), (38), (40): Xaa is C or S
TPPTXXVPTRLSAISILYLDSANNVVLKNYQDMVVESXGX

SEQ ID NO: 16085 - protein, 34 aa, Artificial Sequence
  GFR-binding peptide
  MOD_RES (1), (33): Xaa is C or S
XAPTQLSPISVLFIDDSSNVIYKQYENMVVRAXG

SEQ ID NO: 16086 - protein, 36 aa, Artificial Sequence; identical to SEQ ID NO: 8793
  GFR-binding peptide
  MOD_RES (5), (6): Xaa is C or S

SEQ ID NO: 16087 - protein, 33 aa, Artificial Sequence
  GFR-binding peptide
  MOD_RES (1), (33): Xaa is C or S
XAPTKLEPLTVLYYDDSSNVIEQLSNNMVVRSX

SEQ ID NO: 16088 - protein, 32 aa, Artificial Sequence; identical to SEQ ID NO: 8795
  GFR-binding peptide
  MOD_RES (1), (2): Xaa is C or S

SEQ ID NO: 16089 - protein, 43 aa, Artificial Sequence
  GFR-binding peptide
  MOD_RES (5), (6), (40), (42): Xaa is C or S
  MOD_RES (20), (21), (22), (23), (24): Xaa is A or G
  MOD_RES (25), (26), (27), (28): Xaa is A or G or is absent
TPPTXXVPTRLSAISILYLXXXXXXXXXLKNYQDMVVESXGXR

SEQ ID NO: 16090 - protein, 39 aa, Artificial Sequence
  GFR-binding peptide
  MOD_RES (5), (6), (38): Xaa is C or S
TPPTXXVPTRLNAISILYFDSANNVVLKKYRDMVVESXG

SEQ ID NO: 16091 - protein, 35 aa, Artificial Sequence
  GFR-binding peptide
  MOD_RES (2), (3): Xaa is C or S
  MOD_RES (17), (18), (19), (20), (21): Xaa is A or G
  MOD_RES (22), (23), (24), (25): Xaa is A or G or is absent
PXXVPQDLEPLTILYYXXXXXXXXXEQLSNMVVKS

SEQ ID NO: 16092 - protein, 38 aa, Artificial Sequence
  GFR-binding peptide
  MOD_RES (4), (5), (37): Xaa is C or S
PKPXXAPTKLEPLPVVYYDDSSNVIEQLSNNMVVRSXG

SEQ ID NO: 16093 - protein, 43 aa, Artificial Sequence
  GFR-binding peptide
  MOD_RES (5), (6), (40), (42): Xaa is C or S
  MOD_RES (20), (21), (22), (23), (24): Xaa is A or G
  MOD_RES (25), (26), (27), (28): Xaa is A or G or is absent
VPKPXXAPTKLSPISVLFIXXXXXXXXXYKQYENMVVRSXGXH

SEQ ID NO: 16094 - protein, 34 aa, Artificial Sequence
  GFR-binding peptide
  MOD_RES (33), (33): Xaa is C or S
  MOD_RES (14), (15), (16), (17), (18): Xaa is A or G
  MOD_RES (19), (20), (21), (22): Xaa is A or G or is absent
VPQDLEPLPIVYYXXXXXXXXXEQLSNMVVKSXK

SEQ ID NO: 16095 - protein, 35 aa, Artificial Sequence
  GFR-binding peptide
  MOD_RES (3), (3): Xaa is C or S
  MOD_RES (17), (18), (19), (20), (21): Xaa is A or G
  MOD_RES (22), (23), (24), (25): Xaa is A or G or is absent
PTXAPTKLEPLTVLYYXXXXXXXXXEQLSNNMVVR

SEQ ID NO: 16096 - protein, 44 aa, Artificial Sequence
  GFR-binding peptide
  MOD_RES (6), (7), (41), (43): Xaa is C or S
  MOD_RES (21), (22), (23), (24), (25): Xaa is A or G
  MOD_RES (26), (27), (28), (29): Xaa is A or G or is absent
YVPKPXXAPTKLEPLPVVYYXXXXXXXXXEQLSNNMVVRSXGXH

SEQ ID NO: 16097 - protein, 31 aa, Artificial Sequence
  GFR-binding peptide
  MOD_RES (31), (31): Xaa is C or S
VPQDLSPISILFIVGRTPKVYKQYEMVVKSX

SEQ ID NO: 16098 - protein, 36 aa, Artificial Sequence; identical to SEQ ID NO: 8800
  GFR-binding peptide
  MOD_RES (3), (4): Xaa is C or S
  MOD_RES (18), (19), (20), (21), (22): Xaa is A or G
  MOD_RES (23), (24), (25), (26): Xaa is A or G or is absent

SEQ ID NO: 16099 - protein, 39 aa, Artificial Sequence
  GFR-binding peptide
  MOD_RES (4), (5), (39): Xaa is C or S
  MOD_RES (19), (20), (21), (22), (23): Xaa is A or G
  MOD_RES (24), (25), (26), (27): Xaa is A or G or is absent
PKPXXAPTQLEPLTVLYYXXXXXXXXXEQLSNNMVVRAX

SEQ ID NO: 16100 - protein, 35 aa, Artificial Sequence
  GFR-binding peptide
  MOD_RES (1), (33), (35): Xaa is C or S
XAPTQLEPLTVLYYDDSSNVIEQLSNNMVVRAXGX

SEQ ID NO: 16101 - protein, 34 aa, Artificial Sequence; identical to SEQ ID NO: 8802
  GFR-binding peptide
  MOD_RES (1), (2): Xaa is C or S
  MOD_RES (16), (17), (18), (19), (20): Xaa is A or G
  MOD_RES (21), (22), (23), (24): Xaa is A or G or is absent

SEQ ID NO: 16102 - protein, 38 aa, Artificial Sequence
  GFR-binding peptide
  MOD_RES (1), (2), (36), (38): Xaa is C or S
  MOD_RES (16), (17), (18), (19), (20): Xaa is A or G
  MOD_RES (21), (22), (23), (24): Xaa is A or G or is absent
XXVPTRLEPLTILYYXXXXXXXXXEQLSNDMVVESXGX

SEQ ID NO: 16103 - protein, 38 aa, Artificial Sequence
  GFR-binding peptide
  MOD_RES (5), (6), (38): Xaa is C or S
IPKAXXVPTELEPLTMLYYDEYDKVVEQLSNEMVVEGX

SEQ ID NO: 16104 - protein, 40 aa, Artificial Sequence
  GFR-binding peptide
  MOD_RES (6), (40): Xaa is C or S
  MOD_RES (20), (21), (22), (23), (24): Xaa is A or G
  MOD_RES (25), (26), (27), (28): Xaa is A or G or is absent
VTKPTXAPTKLEPLTVLYYXXXXXXXXXEQLSNNMVVRSX

SEQ ID NO: 16105 - protein, 37 aa, Artificial Sequence
  GFR-binding peptide
  MOD_RES (1), (2), (34), (36): Xaa is C or S
XXVPTELEPLPMVYYDENEKVVEQLSNDMVVEGXGXR

SEQ ID NO: 16106 - protein, 34 aa, Artificial Sequence
  GFR-binding peptide
  MOD_RES (33), (33): Xaa is C or S
  MOD_RES (14), (15), (16), (17), (18): Xaa is A or G
  MOD_RES (19), (20), (21), (22): Xaa is A or G or is absent
VSQDLSPISILFIXXXXXXXXXYKQYEMIVKSXK

SEQ ID NO: 16107 - protein, 32 aa, Artificial Sequence
  GFR-binding peptide
  MOD_RES (1), (32): Xaa is C or S
XVSQDLSPISILFIIGKTPKIYKQYEMIVKSX

SEQ ID NO: 16108 - protein, 44 aa, Artificial Sequence; identical to SEQ ID NO: 8808
  GFR-binding peptide
  MOD_RES (6), (7), (41), (43): Xaa is C or S
  MOD_RES (21), (22), (23), (24), (25): Xaa is A or G
  MOD_RES (26), (27), (28), (29): Xaa is A or G or is absent

SEQ ID NO: 16109 - protein, 42 aa, Artificial Sequence; identical to SEQ ID NO: 8809
  GFR-binding peptide
  MOD_RES (5), (6), (39), (41): Xaa is C or S
  MOD_RES (20), (21), (22), (23), (24): Xaa is A or G
  MOD_RES (25), (26), (27), (28): Xaa is A or G or is absent

SEQ ID NO: 16110 - protein, 37 aa, Artificial Sequence; identical to SEQ ID NO: 8810
  GFR-binding peptide
  MOD_RES (5), (6): Xaa is C or S

SEQ ID NO: 16111 - protein, 40 aa, Artificial Sequence; identical to SEQ ID NO: 8811
  GFR-binding peptide
  MOD_RES (6), (7): Xaa is C or S
  MOD_RES (21), (22), (23), (24), (25): Xaa is A or G
  MOD_RES (26), (27), (28), (29): Xaa is A or G or is absent

SEQ ID NO: 16112 - protein, 39 aa, Artificial Sequence
  GFR-binding peptide
  MOD_RES (3), (4), (38): Xaa is C or S
  MOD_RES (18), (19), (20), (21), (22): Xaa is A or G
  MOD_RES (23), (24), (25), (26): Xaa is A or G or is absent
KPXXAPTQLEPLPVVYYXXXXXXXXXEQLSNNMVVRAXG

SEQ ID NO: 16113 - protein, 43 aa, Artificial Sequence; identical to SEQ ID NO: 8813
  GFR-binding peptide
  MOD_RES (6), (7), (41), (43): Xaa is C or S
  MOD_RES (21), (22), (23), (24), (25): Xaa is A or G
  MOD_RES (26), (27), (28), (29): Xaa is A or G or is absent

SEQ ID NO: 16114 - protein, 32 aa, Artificial Sequence; identical to SEQ ID NO: 8814
  GFR-binding peptide
  MOD_RES (14), (15), (16), (17), (18): Xaa is A or G
  MOD_RES (19), (20), (21), (22): Xaa is A or G or is absent

SEQ ID NO: 16115 - protein, 42 aa, Artificial Sequence
  GFR-binding peptide
  MOD_RES (4), (5), (39), (41): Xaa is C or S
  MOD_RES (19), (20), (21), (22), (23): Xaa is A or G
  MOD_RES (24), (25), (26), (27): Xaa is A or G or is absent
PKPXXAPTKLSPISVLFIXXXXXXXXXYKQYENMVVRSXGXH

SEQ ID NO: 16116 - protein, 39 aa, Artificial Sequence
  GFR-binding peptide
  MOD_RES (6), (7), (39): Xaa is C or S
STPPTXXVPTRLSAISILYLDSANNVVLKNYQDMVVESX

SEQ ID NO: 16117 - protein, 38 aa, Artificial Sequence; identical to SEQ ID NO: 8816
  GFR-binding peptide
  MOD_RES (4), (5), (37): Xaa is C or S

SEQ ID NO: 16118 - protein, 33 aa, Artificial Sequence; identical to SEQ ID NO: 8817
  GFR-binding peptide
  MOD_RES (14), (15), (16), (17), (18): Xaa is A or G
  MOD_RES (19), (20), (21), (22): Xaa is A or G or is absent

SEQ ID NO: 16119 - protein, 40 aa, Artificial Sequence; identical to SEQ ID NO: 8819
  GFR-binding peptide
  MOD_RES (2), (3), (37), (39): Xaa is C or S
  MOD_RES (17), (18), (19), (20), (21): Xaa is A or G
  MOD_RES (22), (23), (24), (25): Xaa is A or G or is absent

SEQ ID NO: 16120 - protein, 36 aa, Artificial Sequence
  GFR-binding peptide
  MOD_RES (1), (34), (36): Xaa is C or S
  MOD_RES (15), (16), (17), (18), (19): Xaa is A or G
  MOD_RES (20), (21), (22), (23): Xaa is A or G or is absent
XVSQDLSPISILFIXXXXXXXXXYKQYEMIVKSXKX

SEQ ID NO: 16121 - protein, 35 aa, Artificial Sequence
  GFR-binding peptide
  MOD_RES (2), (3), (35): Xaa is C or S
AXXVPTELEPLTMLYYDEYDKVVEQLSNEMVVEGX

SEQ ID NO: 16122 - protein, 34 aa, Artificial Sequence
  GFR-binding peptide
  MOD_RES (1), (2), (34): Xaa is C or S
XXVPTELSPISMLFIDEYDKVVYKQYEEMVVEGX

SEQ ID NO: 16123 - protein, 33 aa, Artificial Sequence
  GFR-binding peptide
  MOD_RES (1), (1): Xaa is C or S
  MOD_RES (15), (16), (17), (18), (19): Xaa is A or G
  MOD_RES (20), (21), (22), (23): Xaa is A or G or is absent
XVPTRLSPISILFIXXXXXXXXXYKQYEDMVVE

SEQ ID NO: 16124 - protein, 40 aa, Artificial Sequence
  GFR-binding peptide
  MOD_RES (2), (3), (37), (39): Xaa is C or S
  MOD_RES (17), (18), (19), (20), (21): Xaa is A or G
  MOD_RES (22), (23), (24), (25): Xaa is A or G or is absent
PXXAPTKLSPISVLFIXXXXXXXXXYKQYENMVVRSXGXH

SEQ ID NO: 16125 - protein, 37 aa, Artificial Sequence; identical to SEQ ID NO: 8820
  GFR-binding peptide
  MOD_RES (6), (7): Xaa is C or S

SEQ ID NO: 16126 - protein, 41 aa, Artificial Sequence
  GFR-binding peptide
  MOD_RES (5), (39), (41): Xaa is C or S
  MOD_RES (19), (20), (21), (22), (23): Xaa is A or G
  MOD_RES (24), (25), (26), (27): Xaa is A or G or is absent
TKPTXAPTKLSPISVLFIXXXXXXXXXYKQYENMVVRSXGX

SEQ ID NO: 16127 - protein, 31 aa, Artificial Sequence
  GFR-binding peptide
  MOD_RES (1), (1): Xaa is C or S
XVPTELSPISMLFIDEYDKVVYKQYEEMVVE

SEQ ID NO: 16128 - protein, 40 aa, Artificial Sequence
  GFR-binding peptide
  MOD_RES (3), (4), (38), (40): Xaa is C or S
  MOD_RES (18), (19), (20), (21), (22): Xaa is A or G
  MOD_RES (23), (24), (25), (26): Xaa is A or G or is absent
PTXXVPTRLNAISILYFXXXXXXXXXLKKYRDMVVESXGX

SEQ ID NO: 16129 - protein, 38 aa, Artificial Sequence
  GFR-binding peptide
  MOD_RES (5), (6), (38): Xaa is C or S
IPKAXXVPTELEPLTMLYYDENEKVVEQLSNDMVVEGX

SEQ ID NO: 16130 - protein, 39 aa, Artificial Sequence; identical to SEQ ID NO: 8823
  GFR-binding peptide
  MOD_RES (6), (7), (39): Xaa is C or S

SEQ ID NO: 16131 - protein, 36 aa, Artificial Sequence; identical to SEQ ID NO: 8824
  GFR-binding peptide
  MOD_RES (1), (2), (33), (35): Xaa is C or S

SEQ ID NO: 16132 - protein, 37 aa, Artificial Sequence; identical to SEQ ID NO: 8825
  GFR-binding peptide
  MOD_RES (3), (4): Xaa is C or S
  MOD_RES (18), (19), (20), (21), (22): Xaa is A or G
  MOD_RES (23), (24), (25), (26): Xaa is A or G or is absent

SEQ ID NO: 16133 - protein, 41 aa, Artificial Sequence; identical to SEQ ID NO: 8826
  GFR-binding peptide
  MOD_RES (4), (5), (39), (41): Xaa is C or S
  MOD_RES (19), (20), (21), (22), (23): Xaa is A or G
  MOD_RES (24), (25), (26), (27): Xaa is A or G or is absent

SEQ ID NO: 16134 - protein, 41 aa, Artificial Sequence; identical to SEQ ID NO: 8827
  GFR-binding peptide
  MOD_RES (5), (6), (40): Xaa is C or S
  MOD_RES (20), (21), (22), (23), (24): Xaa is A or G
  MOD_RES (25), (26), (27), (28): Xaa is A or G or is absent

SEQ ID NO: 16135 - protein, 31 aa, Artificial Sequence; identical to SEQ ID NO: 8828
  GFR-binding peptide
  MOD_RES (1), (1): Xaa is C or S

SEQ ID NO: 16136 - protein, 38 aa, Artificial Sequence
  GFR-binding peptide
  MOD_RES (4), (5): Xaa is C or S
  MOD_RES (19), (20), (21), (22), (23): Xaa is A or G
  MOD_RES (24), (25), (26), (27): Xaa is A or G or is absent
PKAXXVPTELEPLTMLYYXXXXXXXXXEQLSNEMVVEG

SEQ ID NO: 16137 - protein, 33 aa, Artificial Sequence
  GFR-binding peptide
  MOD_RES (2), (3): Xaa is C or S
TXXVPTRLNAISILYFDSANNVVLKKYRDMVVE

SEQ ID NO: 16138 - protein, 35 aa, Artificial Sequence
  GFR-binding peptide
  MOD_RES (2), (3), (34): Xaa is C or S
PXXVPQDLSPISILFIVGRTPKVYKQYEMVVKSXK

SEQ ID NO: 16139 - protein, 38 aa, Artificial Sequence
  GFR-binding peptide
  MOD_RES (4), (36), (38): Xaa is C or S
KPTXAPTKLEPLTVLYYDDSSNVIEQLSNNMVVRSXGX

SEQ ID NO: 16140 - protein, 36 aa, Artificial Sequence; identical to SEQ ID NO: 8830
  GFR-binding peptide
  MOD_RES (2), (3), (35): Xaa is C or S

SEQ ID NO: 16141 - protein, 39 aa, Artificial Sequence
  GFR-binding peptide
  MOD_RES (3), (4), (38): Xaa is C or S
  MOD_RES (18), (19), (20), (21), (22): Xaa is A or G
  MOD_RES (23), (24), (25), (26): Xaa is A or G or is absent
PTXXVPTRLSPISILFIXXXXXXXXXYKQYEDMVVESXG

SEQ ID NO: 16142 - protein, 42 aa, Artificial Sequence; identical to SEQ ID NO: 8834
  GFR-binding peptide
  MOD_RES (7), (41): Xaa is C or S
  MOD_RES (21), (22), (23), (24), (25): Xaa is A or G
  MOD_RES (26), (27), (28), (29): Xaa is A or G or is absent

SEQ ID NO: 16143 - protein, 39 aa, Artificial Sequence
  GFR-binding peptide
  MOD_RES (5), (6): Xaa is C or S
  MOD_RES (20), (21), (22), (23), (24): Xaa is A or G
  MOD_RES (25), (26), (27), (28): Xaa is A or G or is absent
IPKAXXVPTELEPLPMVYYXXXXXXXXXEQLSNDMVVEG

SEQ ID NO: 16144 - protein, 38 aa, Artificial Sequence; identical to SEQ ID NO: 8838
  GFR-binding peptide
  MOD_RES (5), (6): Xaa is C or S
  MOD_RES (20), (21), (22), (23), (24): Xaa is A or G
  MOD_RES (25), (26), (27), (28): Xaa is A or G or is absent

SEQ ID NO: 16145 - protein, 43 aa, Artificial Sequence; identical to SEQ ID NO: 8839
  GFR-binding peptide
  MOD_RES (6), (40), (42): Xaa is C or S
  MOD_RES (20), (21), (22), (23), (24): Xaa is A or G
  MOD_RES (25), (26), (27), (28): Xaa is A or G or is absent

SEQ ID NO: 16146 - protein, 35 aa, Artificial Sequence
  GFR-binding peptide
  MOD_RES (3), (4): Xaa is C or S
KAXXVPTELEPLTMLYYDENEKVVEQLSNDMVVEG

SEQ ID NO: 16147 - protein, 39 aa, Artificial Sequence
  GFR-binding peptide
  MOD_RES (6), (7): Xaa is C or S
  MOD_RES (21), (22), (23), (24), (25): Xaa is A or G
  MOD_RES (26), (27), (28), (29): Xaa is A or G or is absent
ASAAPXXVPQALEPLPIVYYXXXXXXXXXEQLSNMIVRS

SEQ ID NO: 16148 - protein, 36 aa, Artificial Sequence
  GFR-binding peptide
  MOD_RES (3), (4), (35): Xaa is C or S
APXXVPQALEPLTILYYVGRKPKVEQLSNMIVRSXK

SEQ ID NO: 16149 - protein, 40 aa, Artificial Sequence
  GFR-binding peptide
  MOD_RES (5), (6), (40): Xaa is C or S
  MOD_RES (20), (21), (22), (23), (24): Xaa is A or G
  MOD_RES (25), (26), (27), (28): Xaa is A or G or is absent
IPKAXXVPTELEPLPMVYYXXXXXXXXXEQLSNEMVVEGX

SEQ ID NO: 16150 - protein, 41 aa, Artificial Sequence; identical to SEQ ID NO: 8841
  GFR-binding peptide
  MOD_RES (3), (4), (38), (40): Xaa is C or S
  MOD_RES (18), (19), (20), (21), (22): Xaa is A or G
  MOD_RES (23), (24), (25), (26): Xaa is A or G or is absent

SEQ ID NO: 16151 - protein, 37 aa, Artificial Sequence; identical to SEQ ID NO: 8842
  GFR-binding peptide
  MOD_RES (3), (4): Xaa is C or S
  MOD_RES (18), (19), (20), (21), (22): Xaa is A or G
  MOD_RES (23), (24), (25), (26): Xaa is A or G or is absent

SEQ ID NO: 16152 - protein, 34 aa, Artificial Sequence
  GFR-binding peptide
  MOD_RES (1), (2): Xaa is C or S
  MOD_RES (16), (17), (18), (19), (20): Xaa is A or G
  MOD_RES (21), (22), (23), (24): Xaa is A or G or is absent
XXAPTQLEPLPVVYYXXXXXXXXXEQLSNNMVVR

SEQ ID NO: 16153 - protein, 32 aa, Artificial Sequence; identical to SEQ ID NO: 8845
  GFR-binding peptide
  MOD_RES (1), (2): Xaa is C or S

SEQ ID NO: 16154 - protein, 33 aa, Artificial Sequence
  GFR-binding peptide
  MOD_RES (1), (33): Xaa is C or S
XVPTELSPISMLFIDEYDKVVYKQYEEMVVEGX

SEQ ID NO: 16155 - protein, 30 aa, Artificial Sequence; identical to SEQ ID NO: 8847
  GFR-binding peptide

SEQ ID NO: 16156 - protein, 36 aa, Artificial Sequence
  GFR-binding peptide
  MOD_RES (3), (4), (36): Xaa is C or S
KPXXAPTQLSPISVLFIDDSSNVIYKQYENMVVRAX

SEQ ID NO: 16157 - protein, 33 aa, Artificial Sequence
  GFR-binding peptide
  MOD_RES (1), (32): Xaa is C or S
XVSQDLSPISILFIIGKTPKIYKQYEMIVKSXK

SEQ ID NO: 16158 - protein, 34 aa, Artificial Sequence; identical to SEQ ID NO: 8851
  GFR-binding peptide
  MOD_RES (1), (2): Xaa is C or S
  MOD_RES (16), (17), (18), (19), (20): Xaa is A or G
  MOD_RES (21), (22), (23), (24): Xaa is A or G or is absent

SEQ ID NO: 16159 - protein, 40 aa, Artificial Sequence
  GFR-binding peptide
  MOD_RES (2), (3), (37), (39): Xaa is C or S
  MOD_RES (17), (18), (19), (20), (21): Xaa is A or G
  MOD_RES (22), (23), (24), (25): Xaa is A or G or is absent
AXXVPTELSPISMLFIXXXXXXXXXYKQYEDMVVEGXGXR

SEQ ID NO: 16160 - protein, 34 aa, Artificial Sequence
  GFR-binding peptide
  MOD_RES (2), (3): Xaa is C or S
TXXVPTRLEPLPIVYYDSANNVVEQLSNDMVVES

SEQ ID NO: 16161 - protein, 33 aa, Artificial Sequence; identical to SEQ ID NO: 8854
  GFR-binding peptide
  MOD_RES (14), (15), (16), (17), (18): Xaa is A or G
  MOD_RES (19), (20), (21), (22): Xaa is A or G or is absent

SEQ ID NO: 16162 - protein, 35 aa, Artificial Sequence
  GFR-binding peptide
  MOD_RES (4), (5): Xaa is C or S
PKPXXAPTKLSPISVLFIDDSSNVIYKQYENMVVR

SEQ ID NO: 16163 - protein, 35 aa, Artificial Sequence; identical to SEQ ID NO: 8857
  GFR-binding peptide
  MOD_RES (1), (35): Xaa is C or S
  MOD_RES (15), (16), (17), (18), (19): Xaa is A or G
  MOD_RES (20), (21), (22), (23): Xaa is A or G or is absent

SEQ ID NO: 16164 - protein, 36 aa, Artificial Sequence; identical to SEQ ID NO: 8858
  GFR-binding peptide
  MOD_RES (3), (4), (35): Xaa is C or S

SEQ ID NO: 16165 - protein, 39 aa, Artificial Sequence
  GFR-binding peptide
  MOD_RES (2), (3), (37), (39): Xaa is C or S
  MOD_RES (17), (18), (19), (20), (21): Xaa is A or G
  MOD_RES (22), (23), (24), (25): Xaa is A or G or is absent
PXXAPTKLEPLPVVYYXXXXXXXXXEQLSNNMVVRSXGX

SEQ ID NO: 16166 - protein, 33 aa, Artificial Sequence
  GFR-binding peptide
  MOD_RES (14), (15), (16), (17), (18): Xaa is A or G
  MOD_RES (19), (20), (21), (22): Xaa is A or G or is absent
VPTELSPISMLFIXXXXXXXXXYKQYEEMVVEG

SEQ ID NO: 16167 - protein, 40 aa, Artificial Sequence; identical to SEQ ID NO: 8863
  GFR-binding peptide
  MOD_RES (3), (4), (38), (40): Xaa is C or S
  MOD_RES (18), (19), (20), (21), (22): Xaa is A or G
  MOD_RES (23), (24), (25), (26): Xaa is A or G or is absent

SEQ ID NO: 16168 - protein, 42 aa, Artificial Sequence
  GFR-binding peptide
  MOD_RES (4), (5), (39), (41): Xaa is C or S
  MOD_RES (19), (20), (21), (22), (23): Xaa is A or G
  MOD_RES (24), (25), (26), (27): Xaa is A or G or is absent
PKAXXVPTELSPISMLFIXXXXXXXXXYKQYEDMVVEGXGXR

SEQ ID NO: 16169 - protein, 33 aa, Artificial Sequence; identical to SEQ ID NO: 8866
  GFR-binding peptide
  MOD_RES (1), (1): Xaa is C or S
  MOD_RES (15), (16), (17), (18), (19): Xaa is A or G
  MOD_RES (20), (21), (22), (23): Xaa is A or G or is absent

SEQ ID NO: 16170 - protein, 38 aa, Artificial Sequence
  GFR-binding peptide
  MOD_RES (5), (6): Xaa is C or S
  MOD_RES (20), (21), (22), (23), (24): Xaa is A or G
  MOD_RES (25), (26), (27), (28): Xaa is A or G or is absent
SAAPXXVPQALEPLPIVYYXXXXXXXXXEQLSNMIVRS

SEQ ID NO: 16171 - protein, 35 aa, Artificial Sequence; identical to SEQ ID NO: 8868
  GFR-binding peptide
  MOD_RES (3), (4), (35): Xaa is C or S

SEQ ID NO: 16172 - protein, 39 aa, Artificial Sequence
  GFR-binding peptide
  MOD_RES (6), (7): Xaa is C or S
  MOD_RES (21), (22), (23), (24), (25): Xaa is A or G
  MOD_RES (26), (27), (28), (29): Xaa is A or G or is absent
ASAAPXXVPQALEPLTILYYXXXXXXXXXEQLSNMIVRS

SEQ ID NO: 16173 - protein, 41 aa, Artificial Sequence
  GFR-binding peptide
  MOD_RES (6), (7), (39), (41): Xaa is C or S
KIPKAXXVPTELSPISMLFIDENEKVVYKQYEDMVVEGXGX

SEQ ID NO: 16174 - protein, 39 aa, Artificial Sequence
  GFR-binding peptide
  MOD_RES (3), (4), (36), (38): Xaa is C or S
KPXXAPTKLSPISVLFIDDSSNVIYKQYENMVVRSXGXH

SEQ ID NO: 16175 - protein, 39 aa, Artificial Sequence
  GFR-binding peptide
  MOD_RES (6), (7), (39): Xaa is C or S
KIPKAXXVPTELEPLTMLYYDENEKVVEQLSNDMVVEGX

SEQ ID NO: 16176 - protein, 35 aa, Artificial Sequence; identical to SEQ ID NO: 8875
  GFR-binding peptide
  MOD_RES (1), (35): Xaa is C or S
  MOD_RES (15), (16), (17), (18), (19): Xaa is A or G
  MOD_RES (20), (21), (22), (23): Xaa is A or G or is absent

SEQ ID NO: 16177 - protein, 43 aa, Artificial Sequence
  GFR-binding peptide
  MOD_RES (6), (7), (41), (43): Xaa is C or S
  MOD_RES (21), (22), (23), (24), (25): Xaa is A or G
  MOD_RES (26), (27), (28), (29): Xaa is A or G or is absent
YVPKPXXAPTKLEPLPVVYYXXXXXXXXXEQLSNNMVVRSXGX

SEQ ID NO: 16178 - protein, 35 aa, Artificial Sequence; identical to SEQ ID NO: 8881
  GFR-binding peptide
  MOD_RES (1), (2), (35): Xaa is C or S
  MOD_RES (16), (17), (18), (19), (20): Xaa is A or G
  MOD_RES (21), (22), (23), (24): Xaa is A or G or is absent

SEQ ID NO: 16179 - protein, 34 aa, Artificial Sequence
  GFR-binding peptide
  MOD_RES (31), (33): Xaa is C or S
VPQDLSPISILFIVGRTPKVYKQYEMVVKSXKXS

SEQ ID NO: 16180 - protein, 35 aa, Artificial Sequence
  GFR-binding peptide
  MOD_RES (1), (35): Xaa is C or S
  MOD_RES (15), (16), (17), (18), (19): Xaa is A or G
  MOD_RES (20), (21), (22), (23): Xaa is A or G or is absent
XVPTRLSPISILFIXXXXXXXXXYKQYEDMVVESX

SEQ ID NO: 16181 - protein, 43 aa, Artificial Sequence
  GFR-binding peptide
  MOD_RES (5), (6), (40), (42): Xaa is C or S
  MOD_RES (20), (21), (22), (23), (24): Xaa is A or G
  MOD_RES (25), (26), (27), (28): Xaa is A or G or is absent
TPPTXXVPTRLEPLPIVYYXXXXXXXXXEQLSNDMVVESXGXR

SEQ ID NO: 16182 - protein, 33 aa, Artificial Sequence
  GFR-binding peptide
  MOD_RES (33), (33): Xaa is C or S
  MOD_RES (14), (15), (16), (17), (18): Xaa is A or G
  MOD_RES (19), (20), (21), (22): Xaa is A or G or is absent
VSQDLSPISILFIXXXXXXXXXYKQYEMIVKSX

SEQ ID NO: 16183 - protein, 40 aa, Artificial Sequence
  GFR-binding peptide
  MOD_RES (4), (5), (37), (39): Xaa is C or S
PKPXXAPTKLEPLTVLYYDDSSNVIEQLSNNMVVRSXGXH

SEQ ID NO: 16184 - protein, 37 aa, Artificial Sequence
  GFR-binding peptide
  MOD_RES (4), (5), (37): Xaa is C or S
PKAXXVPTELSPISMLFIDEYDKVVYKQYEEMVVEGX

SEQ ID NO: 16185 - protein, 35 aa, Artificial Sequence
  GFR-binding peptide
  MOD_RES (1), (34): Xaa is C or S
  MOD_RES (15), (16), (17), (18), (19): Xaa is A or G
  MOD_RES (20), (21), (22), (23): Xaa is A or G or is absent
XVSQDLEPLPIVYYXXXXXXXXXEQLSNMIVKSXK

SEQ ID NO: 16186 - protein, 34 aa, Artificial Sequence
  GFR-binding peptide
  MOD_RES (1), (2), (34): Xaa is C or S
XXAPTKLSPISVLFIDDSSNVIYKQYENMVVRSX

SEQ ID NO: 16187 - protein, 40 aa, Artificial Sequence
  GFR-binding peptide
  MOD_RES (2), (3), (37), (39): Xaa is C or S
  MOD_RES (17), (18), (19), (20), (21): Xaa is A or G
  MOD_RES (22), (23), (24), (25): Xaa is A or G or is absent
PXXAPTKLEPLTVLYYXXXXXXXXXEQLSNNMVVRSXGXH

SEQ ID NO: 16188 - protein, 40 aa, Artificial Sequence
  GFR-binding peptide
  MOD_RES (4), (38), (40): Xaa is C or S
  MOD_RES (18), (19), (20), (21), (22): Xaa is A or G
  MOD_RES (23), (24), (25), (26): Xaa is A or G or is absent
KPTXAPTKLEPLTVLYYXXXXXXXXXEQLSNNMVVRSXGX

SEQ ID NO: 16189 - protein, 32 aa, Artificial Sequence; identical to SEQ ID NO: 8886
  GFR-binding peptide
  MOD_RES (1), (2): Xaa is C or S

SEQ ID NO: 16190 - protein, 34 aa, Artificial Sequence
  GFR-binding peptide
  MOD_RES (1), (2): Xaa is C or S
  MOD_RES (16), (17), (18), (19), (20): Xaa is A or G
  MOD_RES (21), (22), (23), (24): Xaa is A or G or is absent
XXAPTKLEPLPVVYYXXXXXXXXXEQLSNNMVVR

SEQ ID NO: 16191 - protein, 33 aa, Artificial Sequence
  GFR-binding peptide
  MOD_RES (1), (1): Xaa is C or S
  MOD_RES (15), (16), (17), (18), (19): Xaa is A or G
  MOD_RES (20), (21), (22), (23): Xaa is A or G or is absent
XVPQDLEPLTILYYXXXXXXXXXEQLSNMVVKS

SEQ ID NO: 16192 - protein, 37 aa, Artificial Sequence
  GFR-binding peptide
  MOD_RES (2), (3), (37): Xaa is C or S
  MOD_RES (17), (18), (19), (20), (21): Xaa is A or G
  MOD_RES (22), (23), (24), (25): Xaa is A or G or is absent
PXXAPTKLEPLTVLYYXXXXXXXXXEQLSNNMVVRSX

SEQ ID NO: 16193 - protein, 37 aa, Artificial Sequence; identical to SEQ ID NO: 8889
  GFR-binding peptide
  MOD_RES (1), (2), (35), (37): Xaa is C or S
  MOD_RES (16), (17), (18), (19), (20): Xaa is A or G
  MOD_RES (21), (22), (23), (24): Xaa is A or G or is absent

SEQ ID NO: 16194 - protein, 36 aa, Artificial Sequence
  GFR-binding peptide
  MOD_RES (4), (5), (36): Xaa is C or S
ASPXXVPQDLEPLPIVYYVGRTPKVEQLSNMVVKSX

SEQ ID NO: 16195 - protein, 40 aa, Artificial Sequence; identical to SEQ ID NO: 8892
  GFR-binding peptide
  MOD_RES (5), (6), (37), (39): Xaa is C or S

SEQ ID NO: 16196 - protein, 37 aa, Artificial Sequence
  GFR-binding peptide
  MOD_RES (2), (36): Xaa is C or S
  MOD_RES (16), (17), (18), (19), (20): Xaa is A or G
  MOD_RES (21), (22), (23), (24): Xaa is A or G or is absent
TXAPTKLEPLPVVYYXXXXXXXXXEQLSNNMVVRSXG

SEQ ID NO: 16197 - protein, 32 aa, Artificial Sequence
  GFR-binding peptide
  MOD_RES (1), (2): Xaa is C or S
XXVSQDLSPISILFIIGKTPKIYKQYEMIVKS

SEQ ID NO: 16198 - protein, 37 aa, Artificial Sequence; identical to SEQ ID NO: 8895
  GFR-binding peptide
  MOD_RES (6), (7): Xaa is C or S

SEQ ID NO: 16199 - protein, 37 aa, Artificial Sequence
  GFR-binding peptide
  MOD_RES (2), (3), (36): Xaa is C or S
  MOD_RES (17), (18), (19), (20), (21): Xaa is A or G
  MOD_RES (22), (23), (24), (25): Xaa is A or G or is absent
PXXVPQALSPISILFIXXXXXXXXXYKQYEMIVRSXK

SEQ ID NO: 16200 - protein, 32 aa, Artificial Sequence
  GFR-binding peptide
  MOD_RES (14), (15), (16), (17), (18): Xaa is A or G
  MOD_RES (19), (20), (21), (22): Xaa is A or G or is absent
VPQDLEPLPIVYYXXXXXXXXXEQLSNMVVKS

SEQ ID NO: 16201 - protein, 41 aa, Artificial Sequence; identical to SEQ ID NO: 8898
  GFR-binding peptide
  MOD_RES (6), (7), (38), (40): Xaa is C or S

SEQ ID NO: 16202 - protein, 35 aa, Artificial Sequence; identical to SEQ ID NO: 8901
  GFR-binding peptide
  MOD_RES (2), (3): Xaa is C or S
  MOD_RES (17), (18), (19), (20), (21): Xaa is A or G
  MOD_RES (22), (23), (24), (25): Xaa is A or G or is absent

SEQ ID NO: 16203 - protein, 39 aa, Artificial Sequence; identical to SEQ ID NO: 8902
  GFR-binding peptide
  MOD_RES (1), (2), (36), (38): Xaa is C or S
  MOD_RES (16), (17), (18), (19), (20): Xaa is A or G
  MOD_RES (21), (22), (23), (24): Xaa is A or G or is absent

SEQ ID NO: 16204 - protein, 36 aa, Artificial Sequence
  GFR-binding peptide
  MOD_RES (2), (3): Xaa is C or S
  MOD_RES (17), (18), (19), (20), (21): Xaa is A or G
  MOD_RES (22), (23), (24), (25): Xaa is A or G or is absent
TXXVPTRLEPLTILYYXXXXXXXXXEQLSNDMVVES

SEQ ID NO: 16205 - protein, 31 aa, Artificial Sequence
  GFR-binding peptide
APTQLEPLPVVYYDDSSNVIEQLSNNMVVRA

SEQ ID NO: 16206 - protein, 34 aa, Artificial Sequence
  GFR-binding peptide
  MOD_RES (32), (34): Xaa is C or S
APTKLEPLPVVYYDDSSNVIEQLSNNMVVRSXGX

SEQ ID NO: 16207 - protein, 37 aa, Artificial Sequence
  GFR-binding peptide
  MOD_RES (2), (3), (35), (37): Xaa is C or S
TXXVPTRLNAISILYFDSANNVVLKKYRDMVVESXGX

SEQ ID NO: 16208 - protein, 36 aa, Artificial Sequence; identical to SEQ ID NO: 8905
  GFR-binding peptide
  MOD_RES (4), (5), (36): Xaa is C or S

SEQ ID NO: 16209 - protein, 31 aa, Artificial Sequence; identical to SEQ ID NO: 8908
  GFR-binding peptide
  MOD_RES (1), (1): Xaa is C or S

SEQ ID NO: 16210 - protein, 38 aa, Artificial Sequence
  GFR-binding peptide
  MOD_RES (7), (7): Xaa is C or S
HVTKPTXAPTKLSPISVLFIDDSSNVIYKQYENMVVRS

SEQ ID NO: 16211 - protein, 40 aa, Artificial Sequence
  GFR-binding peptide
  MOD_RES (3), (4), (37), (39): Xaa is C or S
  MOD_RES (18), (19), (20), (21), (22): Xaa is A or G
  MOD_RES (23), (24), (25), (26): Xaa is A or G or is absent
SPXXVPQDLEPLTILYYXXXXXXXXXEQLSNMVVKSXKXS

SEQ ID NO: 16212 - protein, 42 aa, Artificial Sequence; identical to SEQ ID NO: 8910
  GFR-binding peptide
  MOD_RES (5), (6), (39), (41): Xaa is C or S
  MOD_RES (20), (21), (22), (23), (24): Xaa is A or G
  MOD_RES (25), (26), (27), (28): Xaa is A or G or is absent

SEQ ID NO: 16213 - protein, 39 aa, Artificial Sequence
  GFR-binding peptide
  MOD_RES (6), (7): Xaa is C or S
  MOD_RES (21), (22), (23), (24), (25): Xaa is A or G
  MOD_RES (26), (27), (28), (29): Xaa is A or G or is absent
YVPKPXXAPTKLEPLTVLYYXXXXXXXXXEQLSNNMVVR

SEQ ID NO: 16214 - protein, 41 aa, Artificial Sequence; identical to SEQ ID NO: 8912
  GFR-binding peptide
  MOD_RES (6), (7), (40): Xaa is C or S
  MOD_RES (21), (22), (23), (24), (25): Xaa is A or G
  MOD_RES (26), (27), (28), (29): Xaa is A or G or is absent

SEQ ID NO: 16215 - protein, 41 aa, Artificial Sequence; identical to SEQ ID NO: 8913
  GFR-binding peptide
  MOD_RES (6), (7), (40): Xaa is C or S
  MOD_RES (21), (22), (23), (24), (25): Xaa is A or G
  MOD_RES (26), (27), (28), (29): Xaa is A or G or is absent

SEQ ID NO: 16216 - protein, 39 aa, Artificial Sequence; identical to SEQ ID NO: 8915
  GFR-binding peptide
  MOD_RES (2), (3), (37), (39): Xaa is C or S
  MOD_RES (17), (18), (19), (20), (21): Xaa is A or G
  MOD_RES (22), (23), (24), (25): Xaa is A or G or is absent

SEQ ID NO: 16217 - protein, 35 aa, Artificial Sequence; identical to SEQ ID NO: 8916
  GFR-binding peptide
  MOD_RES (32), (34): Xaa is C or S

SEQ ID NO: 16218 - protein, 36 aa, Artificial Sequence
  GFR-binding peptide
  MOD_RES (34), (36): Xaa is C or S
  MOD_RES (14), (15), (16), (17), (18): Xaa is A or G
  MOD_RES (19), (20), (21), (22): Xaa is A or G or is absent
VPTRLNAISILYFXXXXXXXXXLKKYRDMVVESXGX

SEQ ID NO: 16219 - protein, 41 aa, Artificial Sequence
  GFR-binding peptide
  MOD_RES (3), (4), (38), (40): Xaa is C or S
  MOD_RES (18), (19), (20), (21), (22): Xaa is A or G
  MOD_RES (23), (24), (25), (26): Xaa is A or G or is absent
PTXXVPTRLEPLTILYYXXXXXXXXXEQLSNDMVVESXGXR

SEQ ID NO: 16220 - protein, 33 aa, Artificial Sequence
  GFR-binding peptide
  MOD_RES (32), (32): Xaa is C or S
VPTRLNAISILYFDSANNVVLKKYRDMVVESXG

SEQ ID NO: 16221 - protein, 38 aa, Artificial Sequence
  GFR-binding peptide
  MOD_RES (4), (5): Xaa is C or S
  MOD_RES (19), (20), (21), (22), (23): Xaa is A or G
  MOD_RES (24), (25), (26), (27): Xaa is A or G or is absent
PKAXXVPTELEPLTMLYYXXXXXXXXXEQLSNDMVVEG

SEQ ID NO: 16222 - protein, 38 aa, Artificial Sequence; identical to SEQ ID NO: 8920
  GFR-binding peptide
  MOD_RES (3), (4), (36), (38): Xaa is C or S

SEQ ID NO: 16223 - protein, 33 aa, Artificial Sequence
  GFR-binding peptide
  MOD_RES (1), (33): Xaa is C or S
XVPTELEPLPMVYYDENEKVVEQLSNDMVVEGX

SEQ ID NO: 16224 - protein, 33 aa, Artificial Sequence; identical to SEQ ID NO: 8925
  GFR-binding peptide
  MOD_RES (1), (1): Xaa is C or S
  MOD_RES (15), (16), (17), (18), (19): Xaa is A or G
  MOD_RES (20), (21), (22), (23): Xaa is A or G or is absent

SEQ ID NO: 16225 - protein, 40 aa, Artificial Sequence; identical to SEQ ID NO: 8926
  GFR-binding peptide
  MOD_RES (5), (6), (38), (40): Xaa is C or S

SEQ ID NO: 16226 - protein, 33 aa, Artificial Sequence
  GFR-binding peptide
  MOD_RES (31), (33): Xaa is C or S
VPQDLEPLPIVYYVGRTPKVEQLSNMVVKSXKX

SEQ ID NO: 16227 - protein, 39 aa, Artificial Sequence; identical to SEQ ID NO: 8927
  GFR-binding peptide
  MOD_RES (6), (7), (38): Xaa is C or S

SEQ ID NO: 16228 - protein, 40 aa, Artificial Sequence; identical to SEQ ID NO: 8928
  GFR-binding peptide
  MOD_RES (4), (5), (39): Xaa is C or S
  MOD_RES (19), (20), (21), (22), (23): Xaa is A or G
  MOD_RES (24), (25), (26), (27): Xaa is A or G or is absent

SEQ ID NO: 16229 - protein, 42 aa, Artificial Sequence
  GFR-binding peptide
  MOD_RES (6), (7), (41): Xaa is C or S
  MOD_RES (21), (22), (23), (24), (25): Xaa is A or G
  MOD_RES (26), (27), (28), (29): Xaa is A or G or is absent
STPPTXXVPTRLSAISILYLXXXXXXXXXLKNYQDMVVESXG

SEQ ID NO: 16230 - protein, 33 aa, Artificial Sequence
  GFR-binding peptide
  MOD_RES (2), (3): Xaa is C or S
PXXAPTKLEPLPVVYYDDSSNVIEQLSNNMVVR

SEQ ID NO: 16231 - protein, 34 aa, Artificial Sequence
  GFR-binding peptide
  MOD_RES (1), (2): Xaa is C or S
  MOD_RES (16), (17), (18), (19), (20): Xaa is A or G
  MOD_RES (21), (22), (23), (24): Xaa is A or G or is absent
XXVPQDLEPLTILYYXXXXXXXXXEQLSNMVVKS

SEQ ID NO: 16232 - protein, 43 aa, Artificial Sequence
  GFR-binding peptide
  MOD_RES (5), (6), (40), (42): Xaa is C or S
  MOD_RES (20), (21), (22), (23), (24): Xaa is A or G
  MOD_RES (25), (26), (27), (28): Xaa is A or G or is absent
IPKAXXVPTELEPLPMVYYXXXXXXXXXEQLSNDMVVEGXGXR

SEQ ID NO: 16233 - protein, 39 aa, Artificial Sequence; identical to SEQ ID NO: 8935
  GFR-binding peptide
  MOD_RES (3), (4), (37), (39): Xaa is C or S
  MOD_RES (18), (19), (20), (21), (22): Xaa is A or G
  MOD_RES (23), (24), (25), (26): Xaa is A or G or is absent

SEQ ID NO: 16234 - protein, 33 aa, Artificial Sequence
  GFR-binding peptide
  MOD_RES (32), (32): Xaa is C or S
VPTELSPISMLFIDENEKVVYKQYEDMVVEGXG

SEQ ID NO: 16235 - protein, 39 aa, Artificial Sequence
  GFR-binding peptide
  MOD_RES (4), (5), (39): Xaa is C or S
  MOD_RES (19), (20), (21), (22), (23): Xaa is A or G
  MOD_RES (24), (25), (26), (27): Xaa is A or G or is absent
PKPXXAPTKLEPLTVLYYXXXXXXXXXEQLSNNMVVRSX

SEQ ID NO: 16236 - protein, 38 aa, Artificial Sequence
  GFR-binding peptide
  MOD_RES (1), (35), (37): Xaa is C or S
  MOD_RES (15), (16), (17), (18), (19): Xaa is A or G
  MOD_RES (20), (21), (22), (23): Xaa is A or G or is absent
XVPTELEPLTMLYYXXXXXXXXXEQLSNEMVVEGXGXR

SEQ ID NO: 16237 - protein, 35 aa, Artificial Sequence; identical to SEQ ID NO: 8937
  GFR-binding peptide
  MOD_RES (1), (32), (34): Xaa is C or S

SEQ ID NO: 16238 - protein, 36 aa, Artificial Sequence
  GFR-binding peptide
  MOD_RES (4), (5): Xaa is C or S
PKPXXAPTKLEPLTVLYYDDSSNVIEQLSNNMVVRS

SEQ ID NO: 16239 - protein, 40 aa, Artificial Sequence; identical to SEQ ID NO: 8938
  GFR-binding peptide
  MOD_RES (6), (7): Xaa is C or S
  MOD_RES (21), (22), (23), (24), (25): Xaa is A or G
  MOD_RES (26), (27), (28), (29): Xaa is A or G or is absent

SEQ ID NO: 16240 - protein, 35 aa, Artificial Sequence
  GFR-binding peptide
  MOD_RES (3), (35): Xaa is C or S
PTXAPTKLEPLTVLYYDDSSNVIEQLSNNMVVRSX

SEQ ID NO: 16241 - protein, 39 aa, Artificial Sequence; identical to SEQ ID NO: 8944
  GFR-binding peptide
  MOD_RES (1), (2), (36), (38): Xaa is C or S
  MOD_RES (16), (17), (18), (19), (20): Xaa is A or G
  MOD_RES (21), (22), (23), (24): Xaa is A or G or is absent

SEQ ID NO: 16242 - protein, 42 aa, Artificial Sequence
  GFR-binding peptide
  MOD_RES (6), (7), (39), (41): Xaa is C or S
SIPKAXXVPTELEPLTMLYYDEYDKVVEQLSNEMVVEGXGXR

SEQ ID NO: 16243 - protein, 38 aa, Artificial Sequence
  GFR-binding peptide
  MOD_RES (6), (7): Xaa is C or S
YVPKPXXAPTKLSPISVLFIDDSSNVIYKQYENMVVRS

SEQ ID NO: 16244 - protein, 38 aa, Artificial Sequence
  GFR-binding peptide
  MOD_RES (1), (35), (37): Xaa is C or S
  MOD_RES (15), (16), (17), (18), (19): Xaa is A or G
  MOD_RES (20), (21), (22), (23): Xaa is A or G or is absent
XVPTELSPISMLFIXXXXXXXXXYKQYEDMVVEGXGXR

SEQ ID NO: 16245 - protein, 32 aa, Artificial Sequence
  GFR-binding peptide
  MOD_RES (14), (15), (16), (17), (18): Xaa is A or G
  MOD_RES (19), (20), (21), (22): Xaa is A or G or is absent
APTQLSPISVLFIXXXXXXXXXYKQYENMVVR

SEQ ID NO: 16246 - protein, 36 aa, Artificial Sequence; identical to SEQ ID NO: 8950
  GFR-binding peptide
  MOD_RES (2), (3): Xaa is C or S
  MOD_RES (17), (18), (19), (20), (21): Xaa is A or G
  MOD_RES (22), (23), (24), (25): Xaa is A or G or is absent

SEQ ID NO: 16247 - protein, 35 aa, Artificial Sequence; identical to SEQ ID NO: 8951
  GFR-binding peptide
  MOD_RES (2), (3), (35): Xaa is C or S

SEQ ID NO: 16248 - protein, 39 aa, Artificial Sequence
  GFR-binding peptide
  MOD_RES (3), (4), (36), (38): Xaa is C or S
KAXXVPTELEPLPMVYYDENEKVVEQLSNDMVVEGXGXR

SEQ ID NO: 16249 - protein, 34 aa, Artificial Sequence
  GFR-binding peptide
  MOD_RES (1), (2), (34): Xaa is C or S
XXVPTRLEPLTILYYDSANNVVEQLSNDMVVESX

SEQ ID NO: 16250 - protein, 42 aa, Artificial Sequence; identical to SEQ ID NO: 8955
  GFR-binding peptide
  MOD_RES (6), (7), (39), (41): Xaa is C or S

SEQ ID NO: 16251 - protein, 35 aa, Artificial Sequence; identical to SEQ ID NO: 8957
  GFR-binding peptide
  MOD_RES (1), (33), (35): Xaa is C or S

SEQ ID NO: 16252 - protein, 40 aa, Artificial Sequence; identical to SEQ ID NO: 8959
  GFR-binding peptide
  MOD_RES (3), (4), (37), (39): Xaa is C or S
  MOD_RES (18), (19), (20), (21), (22): Xaa is A or G
  MOD_RES (23), (24), (25), (26): Xaa is A or G or is absent

SEQ ID NO: 16253 - protein, 39 aa, Artificial Sequence; identical to SEQ ID NO: 8960
  GFR-binding peptide
  MOD_RES (6), (7), (38): Xaa is C or S

SEQ ID NO: 16254 - protein, 35 aa, Artificial Sequence
  GFR-binding peptide
  MOD_RES (2), (3): Xaa is C or S
  MOD_RES (17), (18), (19), (20), (21): Xaa is A or G
  MOD_RES (22), (23), (24), (25): Xaa is A or G or is absent
PXXVPQALSPISILFIXXXXXXXXXYKQYEMIVRS

SEQ ID NO: 16255 - protein, 38 aa, Artificial Sequence
  GFR-binding peptide
  MOD_RES (6), (7), (38): Xaa is C or S
ASASPXXVPQDLEPLPIVYYVGRTPKVEQLSNMVVKSX

SEQ ID NO: 16256 - protein, 34 aa, Artificial Sequence; identical to SEQ ID NO: 8964
  GFR-binding peptide
  MOD_RES (32), (34): Xaa is C or S

SEQ ID NO: 16257 - protein, 35 aa, Artificial Sequence; identical to SEQ ID NO: 8968
  GFR-binding peptide
  MOD_RES (32), (34): Xaa is C or S

SEQ ID NO: 16258 - protein, 43 aa, Artificial Sequence
  GFR-binding peptide
  MOD_RES (6), (7), (41), (43): Xaa is C or S
  MOD_RES (21), (22), (23), (24), (25): Xaa is A or G
  MOD_RES (26), (27), (28), (29): Xaa is A or G or is absent
STPPTXXVPTRLSPISILFIXXXXXXXXXYKQYEDMVVESXGX

SEQ ID NO: 16259 - protein, 36 aa, Artificial Sequence; identical to SEQ ID NO: 8971
  GFR-binding peptide
  MOD_RES (5), (6): Xaa is C or S

SEQ ID NO: 16260 - protein, 40 aa, Artificial Sequence
  GFR-binding peptide
  MOD_RES (5), (37), (39): Xaa is C or S
TKPTXAPTKLEPLTVLYYDDSSNVIEQLSNNMVVRSXGXH

SEQ ID NO: 16261 - protein, 41 aa, Artificial Sequence
  GFR-binding peptide
  MOD_RES (4), (5), (38), (40): Xaa is C or S
  MOD_RES (19), (20), (21), (22), (23): Xaa is A or G
  MOD_RES (24), (25), (26), (27): Xaa is A or G or is absent
ASPXXVPQDLEPLTILYYXXXXXXXXXEQLSNMVVKSXKXS

SEQ ID NO: 16262 - protein, 30 aa, Artificial Sequence
  GFR-binding peptide
APTQLSPISVLFIDDSSNVIYKQYENMVVR

SEQ ID NO: 16263 - protein, 41 aa, Artificial Sequence; identical to SEQ ID NO: 8972
  GFR-binding peptide
  MOD_RES (4), (5), (38), (40): Xaa is C or S
  MOD_RES (19), (20), (21), (22), (23): Xaa is A or G
  MOD_RES (24), (25), (26), (27): Xaa is A or G or is absent

SEQ ID NO: 16264 - protein, 37 aa, Artificial Sequence
  GFR-binding peptide
  MOD_RES (6), (7): Xaa is C or S
TVPKPXXAPTQLSPISVLFIDDSSNVIYKQYENMVVR

SEQ ID NO: 16265 - protein, 39 aa, Artificial Sequence
  GFR-binding peptide
  MOD_RES (4), (38): Xaa is C or S
  MOD_RES (18), (19), (20), (21), (22): Xaa is A or G
  MOD_RES (23), (24), (25), (26): Xaa is A or G or is absent
KPTXAPTKLSPISVLFIXXXXXXXXXYKQYENMVVRSXG

SEQ ID NO: 16266 - protein, 41 aa, Artificial Sequence
  GFR-binding peptide
  MOD_RES (6), (7), (39), (41): Xaa is C or S
YVPKPXXAPTKLEPLTVLYYDDSSNVIEQLSNNMVVRSXGX

SEQ ID NO: 16267 - protein, 34 aa, Artificial Sequence
  GFR-binding peptide
  MOD_RES (1), (33): Xaa is C or S
XVPTELSPISMLFIDENEKVVYKQYEDMVVEGXG

SEQ ID NO: 16268 - protein, 36 aa, Artificial Sequence
  GFR-binding peptide
  MOD_RES (3), (4): Xaa is C or S
  MOD_RES (18), (19), (20), (21), (22): Xaa is A or G
  MOD_RES (23), (24), (25), (26): Xaa is A or G or is absent
APXXVPQALSPISILFIXXXXXXXXXYKQYEMIVRS

SEQ ID NO: 16269 - protein, 42 aa, Artificial Sequence; identical to SEQ ID NO: 8979
  GFR-binding peptide
  MOD_RES (6), (7), (41): Xaa is C or S
  MOD_RES (21), (22), (23), (24), (25): Xaa is A or G
  MOD_RES (26), (27), (28), (29): Xaa is A or G or is absent

SEQ ID NO: 16270 - protein, 38 aa, Artificial Sequence; identical to SEQ ID NO: 8980
  GFR-binding peptide
  MOD_RES (5), (6), (38): Xaa is C or S

SEQ ID NO: 16271 - protein, 41 aa, Artificial Sequence
  GFR-binding peptide
  MOD_RES (6), (7), (39), (41): Xaa is C or S
YVPKPXXAPTKLSPISVLFIDDSSNVIYKQYENMVVRSXGX

SEQ ID NO: 16272 - protein, 32 aa, Artificial Sequence; identical to SEQ ID NO: 8981
  GFR-binding peptide
  MOD_RES (31), (31): Xaa is C or S

SEQ ID NO: 16273 - protein, 38 aa, Artificial Sequence
  GFR-binding peptide
  MOD_RES (2), (3), (36), (38): Xaa is C or S
  MOD_RES (17), (18), (19), (20), (21): Xaa is A or G
  MOD_RES (22), (23), (24), (25): Xaa is A or G or is absent
PXXVPQALEPLTILYYXXXXXXXXXEQLSNMIVRSXKX

SEQ ID NO: 16274 - protein, 37 aa, Artificial Sequence
  GFR-binding peptide
  MOD_RES (1), (34), (36): Xaa is C or S
  MOD_RES (15), (16), (17), (18), (19): Xaa is A or G
  MOD_RES (20), (21), (22), (23): Xaa is A or G or is absent
XVPQALEPLPIVYYXXXXXXXXXEQLSNMIVRSXKXS

SEQ ID NO: 16275 - protein, 42 aa, Artificial Sequence
  GFR-binding peptide
  MOD_RES (4), (5), (39), (41): Xaa is C or S
  MOD_RES (19), (20), (21), (22), (23): Xaa is A or G
  MOD_RES (24), (25), (26), (27): Xaa is A or G or is absent
PKAXXVPTELSPISMLFIXXXXXXXXXYKQYEEMVVEGXGXR

SEQ ID NO: 16276 - protein, 36 aa, Artificial Sequence
  GFR-binding peptide
  MOD_RES (34), (36): Xaa is C or S
  MOD_RES (14), (15), (16), (17), (18): Xaa is A or G
  MOD_RES (19), (20), (21), (22): Xaa is A or G or is absent
APTKLSPISVLFIXXXXXXXXXYKQYENMVVRSXGX

SEQ ID NO: 16277 - protein, 36 aa, Artificial Sequence
  GFR-binding peptide
  MOD_RES (3), (4): Xaa is C or S
  MOD_RES (18), (19), (20), (21), (22): Xaa is A or G
  MOD_RES (23), (24), (25), (26): Xaa is A or G or is absent
PTXXVPTRLNAISILYFXXXXXXXXXLKKYRDMVVE

SEQ ID NO: 16278 - protein, 33 aa, Artificial Sequence
  GFR-binding peptide
  MOD_RES (2), (3): Xaa is C or S
PXXVPQALSPISILFIVGRKPKVYKQYEMIVRS

SEQ ID NO: 16279 - protein, 30 aa, Artificial Sequence
  GFR-binding peptide
VPTRLNAISILYFDSANNVVLKKYRDMVVE

SEQ ID NO: 16280 - protein, 39 aa, Artificial Sequence
  GFR-binding peptide
  MOD_RES (5), (6), (37), (39): Xaa is C or S
SASPXXVSQDLEPLPIVYYIGKTPKIEQLSNMIVKSXKX

SEQ ID NO: 16281 - protein, 35 aa, Artificial Sequence; identical to SEQ ID NO: 8987
  GFR-binding peptide
  MOD_RES (3), (3): Xaa is C or S
  MOD_RES (17), (18), (19), (20), (21): Xaa is A or G
  MOD_RES (22), (23), (24), (25): Xaa is A or G or is absent

SEQ ID NO: 16282 - protein, 39 aa, Artificial Sequence
  GFR-binding peptide
  MOD_RES (2), (3), (36), (38): Xaa is C or S
  MOD_RES (17), (18), (19), (20), (21): Xaa is A or G
  MOD_RES (22), (23), (24), (25): Xaa is A or G or is absent
PXXVPQALEPLPIVYYXXXXXXXXXEQLSNMIVRSXKXS

SEQ ID NO: 16283 - protein, 41 aa, Artificial Sequence; identical to SEQ ID NO: 8991
  GFR-binding peptide
  MOD_RES (5), (6), (40): Xaa is C or S
  MOD_RES (20), (21), (22), (23), (24): Xaa is A or G
  MOD_RES (25), (26), (27), (28): Xaa is A or G or is absent

SEQ ID NO: 16284 - protein, 38 aa, Artificial Sequence
  GFR-binding peptide
  MOD_RES (3), (4), (38): Xaa is C or S
  MOD_RES (18), (19), (20), (21), (22): Xaa is A or G
  MOD_RES (23), (24), (25), (26): Xaa is A or G or is absent
KPXXAPTQLEPLTVLYYXXXXXXXXXEQLSNNMVVRAX

SEQ ID NO: 16285 - protein, 38 aa, Artificial Sequence
  GFR-binding peptide
  MOD_RES (4), (38): Xaa is C or S
  MOD_RES (18), (19), (20), (21), (22): Xaa is A or G
  MOD_RES (23), (24), (25), (26): Xaa is A or G or is absent
KPTXAPTKLSPISVLFIXXXXXXXXXYKQYENMVVRSX

SEQ ID NO: 16286 - protein, 35 aa, Artificial Sequence; identical to SEQ ID NO: 8995
  GFR-binding peptide
  MOD_RES (1), (34): Xaa is C or S
  MOD_RES (15), (16), (17), (18), (19): Xaa is A or G
  MOD_RES (20), (21), (22), (23): Xaa is A or G or is absent

SEQ ID NO: 16287 - protein, 36 aa, Artificial Sequence
  GFR-binding peptide
  MOD_RES (1), (35): Xaa is C or S
  MOD_RES (15), (16), (17), (18), (19): Xaa is A or G
  MOD_RES (20), (21), (22), (23): Xaa is A or G or is absent
XVPTELSPISMLFIXXXXXXXXXYKQYEDMVVEGXG

SEQ ID NO: 16288 - protein, 33 aa, Artificial Sequence; identical to SEQ ID NO: 8997
  GFR-binding peptide
  MOD_RES (1), (33): Xaa is C or S

SEQ ID NO: 16289 - protein, 41 aa, Artificial Sequence
  GFR-binding peptide
  MOD_RES (6), (7), (39), (41): Xaa is C or S
STPPTXXVPTRLEPLTILYYDSANNVVEQLSNDMVVESXGX

SEQ ID NO: 16290 - protein, 34 aa, Artificial Sequence
  GFR-binding peptide
  MOD_RES (33), (33): Xaa is C or S
  MOD_RES (14), (15), (16), (17), (18): Xaa is A or G
  MOD_RES (19), (20), (21), (22): Xaa is A or G or is absent
VPQALEPLTILYYXXXXXXXXXEQLSNMIVRSXK

SEQ ID NO: 16291 - protein, 36 aa, Artificial Sequence; identical to SEQ ID NO: 9001
  GFR-binding peptide
  MOD_RES (2), (3): Xaa is C or S
  MOD_RES (17), (18), (19), (20), (21): Xaa is A or G
  MOD_RES (22), (23), (24), (25): Xaa is A or G or is absent

SEQ ID NO: 16292 - protein, 37 aa, Artificial Sequence
  GFR-binding peptide
  MOD_RES (6), (7): Xaa is C or S
KIPKAXXVPTELEPLPMVYYDENEKVVEQLSNDMVVE

SEQ ID NO: 16293 - protein, 33 aa, Artificial Sequence
  GFR-binding peptide
  MOD_RES (1), (2): Xaa is C or S
XXVPTELEPLTMLYYDENEKVVEQLSNDMVVEG

SEQ ID NO: 16294 - protein, 38 aa, Artificial Sequence
  GFR-binding peptide
  MOD_RES (5), (5): Xaa is C or S
  MOD_RES (19), (20), (21), (22), (23): Xaa is A or G
  MOD_RES (24), (25), (26), (27): Xaa is A or G or is absent
TKPTXAPTKLEPLTVLYYXXXXXXXXXEQLSNNMVVRS

SEQ ID NO: 16295 - protein, 31 aa, Artificial Sequence; identical to SEQ ID NO: 9003
  GFR-binding peptide
  MOD_RES (1), (1): Xaa is C or S

SEQ ID NO: 16296 - protein, 35 aa, Artificial Sequence
  GFR-binding peptide
  MOD_RES (1), (2), (33), (35): Xaa is C or S
XXVPQDLSPISILFIVGRTPKVYKQYEMVVKSXKX

SEQ ID NO: 16297 - protein, 36 aa, Artificial Sequence
  GFR-binding peptide
  MOD_RES (1), (35): Xaa is C or S
  MOD_RES (15), (16), (17), (18), (19): Xaa is A or G
  MOD_RES (20), (21), (22), (23): Xaa is A or G or is absent
XAPTKLSPISVLFIXXXXXXXXXYKQYENMVVRSXG

SEQ ID NO: 16298 - protein, 38 aa, Artificial Sequence; identical to SEQ ID NO: 9005
  GFR-binding peptide
  MOD_RES (3), (4), (36), (38): Xaa is C or S

SEQ ID NO: 16299 - protein, 42 aa, Artificial Sequence; identical to SEQ ID NO: 9006
  GFR-binding peptide
  MOD_RES (5), (6), (40), (42): Xaa is C or S
  MOD_RES (20), (21), (22), (23), (24): Xaa is A or G
  MOD_RES (25), (26), (27), (28): Xaa is A or G or is absent

SEQ ID NO: 16300 - protein, 39 aa, Artificial Sequence; identical to SEQ ID NO: 9009
  GFR-binding peptide
  MOD_RES (1), (2), (36), (38): Xaa is C or S
  MOD_RES (16), (17), (18), (19), (20): Xaa is A or G
  MOD_RES (21), (22), (23), (24): Xaa is A or G or is absent

SEQ ID NO: 16301 - protein, 42 aa, Artificial Sequence
  GFR-binding peptide
  MOD_RES (4), (5), (39), (41): Xaa is C or S
  MOD_RES (19), (20), (21), (22), (23): Xaa is A or G
  MOD_RES (24), (25), (26), (27): Xaa is A or G or is absent
PPTXXVPTRLNAISILYFXXXXXXXXXLKKYRDMVVESXGXR

SEQ ID NO: 16302 - protein, 41 aa, Artificial Sequence
  GFR-binding peptide
  MOD_RES (6), (7), (41): Xaa is C or S
  MOD_RES (21), (22), (23), (24), (25): Xaa is A or G
  MOD_RES (26), (27), (28), (29): Xaa is A or G or is absent
YVPKPXXAPTKLEPLTVLYYXXXXXXXXXEQLSNNMVVRSX

SEQ ID NO: 16303 - protein, 35 aa, Artificial Sequence
  GFR-binding peptide
  MOD_RES (2), (3), (34): Xaa is C or S
PXXVPQALSPISILFIVGRKPKVYKQYEMIVRSXK

SEQ ID NO: 16304 - protein, 31 aa, Artificial Sequence
  GFR-binding peptide
VPTRLNAISILYFDSANNVVLKKYRDMVVES

SEQ ID NO: 16305 - protein, 36 aa, Artificial Sequence
  GFR-binding peptide
  MOD_RES (1), (2), (33), (35): Xaa is C or S
XXVPQDLEPLPIVYYVGRTPKVEQLSNMVVKSXKXS

SEQ ID NO: 16306 - protein, 32 aa, Artificial Sequence; identical to SEQ ID NO: 9012
  GFR-binding peptide
  MOD_RES (1), (2): Xaa is C or S

SEQ ID NO: 16307 - protein, 34 aa, Artificial Sequence
  GFR-binding peptide
  MOD_RES (1), (34): Xaa is C or S
  MOD_RES (15), (16), (17), (18), (19): Xaa is A or G
  MOD_RES (20), (21), (22), (23): Xaa is A or G or is absent
XVPQDLSPISILFIXXXXXXXXXYKQYEMVVKSX

SEQ ID NO: 16308 - protein, 44 aa, Artificial Sequence; identical to SEQ ID NO: 9014
  GFR-binding peptide
  MOD_RES (6), (7), (41), (43): Xaa is C or S
  MOD_RES (21), (22), (23), (24), (25): Xaa is A or G
  MOD_RES (26), (27), (28), (29): Xaa is A or G or is absent

SEQ ID NO: 16309 - protein, 34 aa, Artificial Sequence; identical to SEQ ID NO: 9015
  GFR-binding peptide
  MOD_RES (1), (32), (34): Xaa is C or S

SEQ ID NO: 16310 - protein, 33 aa, Artificial Sequence
  GFR-binding peptide
  MOD_RES (1), (33): Xaa is C or S
XAPTQLEPLTVLYYDDSSNVIEQLSNNMVVRAX

SEQ ID NO: 16311 - protein, 39 aa, Artificial Sequence
  GFR-binding peptide
  MOD_RES (7), (39): Xaa is C or S
HVTKPTXAPTKLEPLPVVYYDDSSNVIEQLSNNMVVRSX

SEQ ID NO: 16312 - protein, 39 aa, Artificial Sequence; identical to SEQ ID NO: 9017
  GFR-binding peptide
  MOD_RES (7), (7): Xaa is C or S
  MOD_RES (21), (22), (23), (24), (25): Xaa is A or G
  MOD_RES (26), (27), (28), (29): Xaa is A or G or is absent

SEQ ID NO: 16313 - protein, 39 aa, Artificial Sequence
  GFR-binding peptide
  MOD_RES (4), (5), (39): Xaa is C or S
  MOD_RES (19), (20), (21), (22), (23): Xaa is A or G
  MOD_RES (24), (25), (26), (27): Xaa is A or G or is absent
PKPXXAPTQLSPISVLFIXXXXXXXXXYKQYENMVVRAX

SEQ ID NO: 16314 - protein, 37 aa, Artificial Sequence; identical to SEQ ID NO: 9019
  GFR-binding peptide
  MOD_RES (6), (7): Xaa is C or S

SEQ ID NO: 16315 - protein, 40 aa, Artificial Sequence; identical to SEQ ID NO: 9020
  GFR-binding peptide
  MOD_RES (5), (6), (40): Xaa is C or S
  MOD_RES (20), (21), (22), (23), (24): Xaa is A or G
  MOD_RES (25), (26), (27), (28): Xaa is A or G or is absent

SEQ ID NO: 16316 - protein, 39 aa, Artificial Sequence
  GFR-binding peptide
  MOD_RES (5), (6): Xaa is C or S
  MOD_RES (20), (21), (22), (23), (24): Xaa is A or G
  MOD_RES (25), (26), (27), (28): Xaa is A or G or is absent
IPKAXXVPTELSPISMLFIXXXXXXXXXYKQYEDMVVEG

SEQ ID NO: 16317 - protein, 36 aa, Artificial Sequence
  GFR-binding peptide
  MOD_RES (5), (6): Xaa is C or S
VPKPXXAPTKLEPLTVLYYDDSSNVIEQLSNNMVVR

SEQ ID NO: 16318 - protein, 37 aa, Artificial Sequence
  GFR-binding peptide
  MOD_RES (5), (6): Xaa is C or S
TPPTXXVPTRLEPLTILYYDSANNVVEQLSNDMVVES

SEQ ID NO: 16319 - protein, 39 aa, Artificial Sequence
  GFR-binding peptide
  MOD_RES (5), (6): Xaa is C or S
  MOD_RES (20), (21), (22), (23), (24): Xaa is A or G
  MOD_RES (25), (26), (27), (28): Xaa is A or G or is absent
TPPTXXVPTRLSAISILYLXXXXXXXXXLKNYQDMVVES

SEQ ID NO: 16320 - protein, 38 aa, Artificial Sequence
  GFR-binding peptide
  MOD_RES (6), (7): Xaa is C or S
SIPKAXXVPTELEPLTMLYYDEYDKVVEQLSNEMVVEG

SEQ ID NO: 16321 - protein, 37 aa, Artificial Sequence
  GFR-binding peptide
  MOD_RES (3), (4), (36): Xaa is C or S
PTXXVPTRLEPLPIVYYDSANNVVEQLSNDMVVESXG

SEQ ID NO: 16322 - protein, 37 aa, Artificial Sequence
  GFR-binding peptide
  MOD_RES (4), (5), (37): Xaa is C or S
PKPXXAPTKLEPLTVLYYDDSSNVIEQLSNNMVVRSX

SEQ ID NO: 16323 - protein, 43 aa, Artificial Sequence
  GFR-binding peptide
  MOD_RES (6), (7), (41), (43): Xaa is C or S
  MOD_RES (21), (22), (23), (24), (25): Xaa is A or G
  MOD_RES (26), (27), (28), (29): Xaa is A or G or is absent
SIPKAXXVPTELSPISMLFIXXXXXXXXXYKQYEEMVVEGXGX

SEQ ID NO: 16324 - protein, 37 aa, Artificial Sequence
  GFR-binding peptide
  MOD_RES (3), (4), (35), (37): Xaa is C or S
SPXXVSQDLEPLPIVYYIGKTPKIEQLSNMIVKSXKX

SEQ ID NO: 16325 - protein, 38 aa, Artificial Sequence
  GFR-binding peptide
  MOD_RES (1), (2), (35), (37): Xaa is C or S
  MOD_RES (16), (17), (18), (19), (20): Xaa is A or G
  MOD_RES (21), (22), (23), (24): Xaa is A or G or is absent
XXVPQDLEPLTILYYXXXXXXXXXEQLSNMVVKSXKXS

SEQ ID NO: 16326 - protein, 41 aa, Artificial Sequence
  GFR-binding peptide
  MOD_RES (3), (4), (38), (40): Xaa is C or S
  MOD_RES (18), (19), (20), (21), (22): Xaa is A or G
  MOD_RES (23), (24), (25), (26): Xaa is A or G or is absent
KPXXAPTKLEPLPVVYYXXXXXXXXXEQLSNNMVVRSXGXH

SEQ ID NO: 16327 - protein, 33 aa, Artificial Sequence
  GFR-binding peptide
  MOD_RES (14), (15), (16), (17), (18): Xaa is A or G
  MOD_RES (19), (20), (21), (22): Xaa is A or G or is absent
VPTELEPLPMVYYXXXXXXXXXEQLSNEMVVEG

SEQ ID NO: 16328 - protein, 44 aa, Artificial Sequence
  GFR-binding peptide
  MOD_RES (6), (7), (41), (43): Xaa is C or S
  MOD_RES (21), (22), (23), (24), (25): Xaa is A or G
  MOD_RES (26), (27), (28), (29): Xaa is A or G or is absent
STPPTXXVPTRLEPLPIVYYXXXXXXXXXEQLSNDMVVESXGXR

SEQ ID NO: 16329 - protein, 39 aa, Artificial Sequence
  GFR-binding peptide
  MOD_RES (5), (6): Xaa is C or S
  MOD_RES (20), (21), (22), (23), (24): Xaa is A or G
  MOD_RES (25), (26), (27), (28): Xaa is A or G or is absent
TPPTXXVPTRLNAISILYFXXXXXXXXXLKKYRDMVVES

SEQ ID NO: 16330 - protein, 33 aa, Artificial Sequence; identical to SEQ ID NO: 9030
  GFR-binding peptide
  MOD_RES (2), (3): Xaa is C or S

SEQ ID NO: 16331 - protein, 39 aa, Artificial Sequence
  GFR-binding peptide
  MOD_RES (4), (36), (38): Xaa is C or S
KPTXAPTKLEPLPVVYYDDSSNVIEQLSNNMVVRSXGXH

SEQ ID NO: 16332 - protein, 36 aa, Artificial Sequence; identical to SEQ ID NO: 9036
  GFR-binding peptide
  MOD_RES (2), (34), (36): Xaa is C or S

SEQ ID NO: 16333 - protein, 41 aa, Artificial Sequence
  GFR-binding peptide
  MOD_RES (4), (5), (38), (40): Xaa is C or S
  MOD_RES (19), (20), (21), (22), (23): Xaa is A or G
  MOD_RES (24), (25), (26), (27): Xaa is A or G or is absent
ASPXXVPQDLSPISILFIXXXXXXXXXYKQYEMVVKSXKXS

SEQ ID NO: 16334 - protein, 36 aa, Artificial Sequence
  GFR-binding peptide
  MOD_RES (5), (6): Xaa is C or S
VPKPXXAPTQLEPLPVVYYDDSSNVIEQLSNNMVVR

SEQ ID NO: 16335 - protein, 35 aa, Artificial Sequence
  GFR-binding peptide
  MOD_RES (1), (2): Xaa is C or S
  MOD_RES (16), (17), (18), (19), (20): Xaa is A or G
  MOD_RES (21), (22), (23), (24): Xaa is A or G or is absent
XXAPTKLEPLTVLYYXXXXXXXXXEQLSNNMVVRS

SEQ ID NO: 16336 - protein, 36 aa, Artificial Sequence; identical to SEQ ID NO: 9038
  GFR-binding peptide
  MOD_RES (1), (34), (36): Xaa is C or S
  MOD_RES (15), (16), (17), (18), (19): Xaa is A or G
  MOD_RES (20), (21), (22), (23): Xaa is A or G or is absent

SEQ ID NO: 16337 - protein, 39 aa, Artificial Sequence
  GFR-binding peptide
  MOD_RES (4), (5), (36), (38): Xaa is C or S
ASPXXVSQDLSPISILFIIGKTPKIYKQYEMIVKSXKXS

SEQ ID NO: 16338 - protein, 36 aa, Artificial Sequence; identical to SEQ ID NO: 9040
  GFR-binding peptide
  MOD_RES (33), (35): Xaa is C or S
  MOD_RES (14), (15), (16), (17), (18): Xaa is A or G
  MOD_RES (19), (20), (21), (22): Xaa is A or G or is absent

SEQ ID NO: 16339 - protein, 35 aa, Artificial Sequence
  GFR-binding peptide
  MOD_RES (1), (2): Xaa is C or S
  MOD_RES (16), (17), (18), (19), (20): Xaa is A or G
  MOD_RES (21), (22), (23), (24): Xaa is A or G or is absent
XXVPTRLSAISILYLXXXXXXXXXLKNYQDMVVES

SEQ ID NO: 16340 - protein, 39 aa, Artificial Sequence; identical to SEQ ID NO: 9041
  GFR-binding peptide
  MOD_RES (3), (4), (37), (39): Xaa is C or S
  MOD_RES (18), (19), (20), (21), (22): Xaa is A or G
  MOD_RES (23), (24), (25), (26): Xaa is A or G or is absent

SEQ ID NO: 16341 - protein, 40 aa, Artificial Sequence
  GFR-binding peptide
  MOD_RES (3), (4), (38), (40): Xaa is C or S
  MOD_RES (18), (19), (20), (21), (22): Xaa is A or G
  MOD_RES (23), (24), (25), (26): Xaa is A or G or is absent
KPXXAPTKLEPLPVVYYXXXXXXXXXEQLSNNMVVRSXGX

SEQ ID NO: 16342 - protein, 32 aa, Artificial Sequence
  GFR-binding peptide
  MOD_RES (1), (2): Xaa is C or S
XXVPTELEPLTMLYYDEYDKVVEQLSNEMVVE

SEQ ID NO: 16343 - protein, 39 aa, Artificial Sequence
  GFR-binding peptide
  MOD_RES (1), (2), (36), (38): Xaa is C or S
  MOD_RES (16), (17), (18), (19), (20): Xaa is A or G
  MOD_RES (21), (22), (23), (24): Xaa is A or G or is absent
XXVPTELSPISMLFIXXXXXXXXXYKQYEEMVVEGXGXR

SEQ ID NO: 16344 - protein, 39 aa, Artificial Sequence; identical to SEQ ID NO: 9042
  GFR-binding peptide
  MOD_RES (3), (37), (39): Xaa is C or S
  MOD_RES (17), (18), (19), (20), (21): Xaa is A or G
  MOD_RES (22), (23), (24), (25): Xaa is A or G or is absent

SEQ ID NO: 16345 - protein, 39 aa, Artificial Sequence
  GFR-binding peptide
  MOD_RES (3), (4), (36), (38): Xaa is C or S
KAXXVPTELEPLPMVYYDEYDKVVEQLSNEMVVEGXGXR

SEQ ID NO: 16346 - protein, 41 aa, Artificial Sequence; identical to SEQ ID NO: 9043
  GFR-binding peptide
  MOD_RES (6), (38), (40): Xaa is C or S

SEQ ID NO: 16347 - protein, 35 aa, Artificial Sequence
  GFR-binding peptide
  MOD_RES (32), (34): Xaa is C or S
VPTELEPLTMLYYDEYDKVVEQLSNEMVVEGXGXR

SEQ ID NO: 16348 - protein, 39 aa, Artificial Sequence; identical to SEQ ID NO: 9044
  GFR-binding peptide
  MOD_RES (5), (6), (38): Xaa is C or S

SEQ ID NO: 16349 - protein, 38 aa, Artificial Sequence
  GFR-binding peptide
  MOD_RES (4), (5), (38): Xaa is C or S
  MOD_RES (19), (20), (21), (22), (23): Xaa is A or G
  MOD_RES (24), (25), (26), (27): Xaa is A or G or is absent
AAPXXVPQALEPLTILYYXXXXXXXXXEQLSNMIVRSX

SEQ ID NO: 16350 - protein, 36 aa, Artificial Sequence
  GFR-binding peptide
  MOD_RES (1), (35): Xaa is C or S
  MOD_RES (15), (16), (17), (18), (19): Xaa is A or G
  MOD_RES (20), (21), (22), (23): Xaa is A or G or is absent
XVPTELEPLTMLYYXXXXXXXXXEQLSNDMVVEGXG

SEQ ID NO: 16351 - protein, 40 aa, Artificial Sequence; identical to SEQ ID NO: 9050
  GFR-binding peptide
  MOD_RES (5), (6), (37), (39): Xaa is C or S

SEQ ID NO: 16352 - protein, 43 aa, Artificial Sequence; identical to SEQ ID NO: 9053
  GFR-binding peptide
  MOD_RES (5), (6), (40), (42): Xaa is C or S
  MOD_RES (20), (21), (22), (23), (24): Xaa is A or G
  MOD_RES (25), (26), (27), (28): Xaa is A or G or is absent

SEQ ID NO: 16353 - protein, 40 aa, Artificial Sequence; identical to SEQ ID NO: 9054
  GFR-binding peptide
  MOD_RES (6), (7): Xaa is C or S
  MOD_RES (21), (22), (23), (24), (25): Xaa is A or G
  MOD_RES (26), (27), (28), (29): Xaa is A or G or is absent

SEQ ID NO: 16354 - protein, 35 aa, Artificial Sequence; identical to SEQ ID NO: 9055
  GFR-binding peptide
  MOD_RES (4), (5): Xaa is C or S

SEQ ID NO: 16355 - protein, 42 aa, Artificial Sequence; identical to SEQ ID NO: 9056
  GFR-binding peptide
  MOD_RES (6), (7), (41): Xaa is C or S
  MOD_RES (21), (22), (23), (24), (25): Xaa is A or G
  MOD_RES (26), (27), (28), (29): Xaa is A or G or is absent

SEQ ID NO: 16356 - protein, 42 aa, Artificial Sequence
  GFR-binding peptide
  MOD_RES (6), (7), (39), (41): Xaa is C or S
STPPTXXVPTRLNAISILYFDSANNVVLKKYRDMVVESXGXR

SEQ ID NO: 16357 - protein, 36 aa, Artificial Sequence
  GFR-binding peptide
  MOD_RES (1), (33), (35): Xaa is C or S
XAPTQLEPLPVVYYDDSSNVIEQLSNNMVVRAXGXH

SEQ ID NO: 16358 - protein, 37 aa, Artificial Sequence
  GFR-binding peptide
  MOD_RES (5), (6), (37): Xaa is C or S
SASPXXVSQDLEPLPIVYYIGKTPKIEQLSNMIVKSX

SEQ ID NO: 16359 - protein, 31 aa, Artificial Sequence
  GFR-binding peptide
  MOD_RES (1), (1): Xaa is C or S
XVSQDLEPLPIVYYIGKTPKIEQLSNMIVKS

SEQ ID NO: 16360 - protein, 37 aa, Artificial Sequence
  GFR-binding peptide
  MOD_RES (1), (2), (36): Xaa is C or S
  MOD_RES (16), (17), (18), (19), (20): Xaa is A or G
  MOD_RES (21), (22), (23), (24): Xaa is A or G or is absent
XXVPTELEPLPMVYYXXXXXXXXXEQLSNEMVVEGXG

SEQ ID NO: 16361 - protein, 39 aa, Artificial Sequence
  GFR-binding peptide
  MOD_RES (5), (6), (38): Xaa is C or S
TPPTXXVPTRLSAISILYLDSANNVVLKNYQDMVVESXG

SEQ ID NO: 16362 - protein, 38 aa, Artificial Sequence
  GFR-binding peptide
  MOD_RES (5), (6): Xaa is C or S
  MOD_RES (20), (21), (22), (23), (24): Xaa is A or G
  MOD_RES (25), (26), (27), (28): Xaa is A or G or is absent
VPKPXXAPTQLEPLPVVYYXXXXXXXXXEQLSNNMVVR

SEQ ID NO: 16363 - protein, 35 aa, Artificial Sequence
  GFR-binding peptide
  MOD_RES (32), (34): Xaa is C or S
VPTELEPLTMLYYDENEKVVEQLSNDMVVEGXGXR

SEQ ID NO: 16364 - protein, 36 aa, Artificial Sequence
  GFR-binding peptide
  MOD_RES (2), (36): Xaa is C or S
  MOD_RES (16), (17), (18), (19), (20): Xaa is A or G
  MOD_RES (21), (22), (23), (24): Xaa is A or G or is absent
TXAPTKLSPISVLFIXXXXXXXXXYKQYENMVVRSX

SEQ ID NO: 16365 - protein, 32 aa, Artificial Sequence
  GFR-binding peptide
  MOD_RES (1), (2): Xaa is C or S
XXVSQDLEPLPIVYYIGKTPKIEQLSNMIVKS

SEQ ID NO: 16366 - protein, 39 aa, Artificial Sequence; identical to SEQ ID NO: 9070
  GFR-binding peptide
  MOD_RES (3), (4), (37), (39): Xaa is C or S
  MOD_RES (18), (19), (20), (21), (22): Xaa is A or G
  MOD_RES (23), (24), (25), (26): Xaa is A or G or is absent

SEQ ID NO: 16367 - protein, 38 aa, Artificial Sequence; identical to SEQ ID NO: 9071
  GFR-binding peptide
  MOD_RES (3), (4), (37): Xaa is C or S
  MOD_RES (18), (19), (20), (21), (22): Xaa is A or G
  MOD_RES (23), (24), (25), (26): Xaa is A or G or is absent

SEQ ID NO: 16368 - protein, 32 aa, Artificial Sequence
  GFR-binding peptide
  MOD_RES (32), (32): Xaa is C or S
VPTRLEPLPIVYYDSANNVVEQLSNDMVVESX

SEQ ID NO: 16369 - protein, 35 aa, Artificial Sequence
  GFR-binding peptide
  MOD_RES (3), (3): Xaa is C or S
  MOD_RES (17), (18), (19), (20), (21): Xaa is A or G
  MOD_RES (22), (23), (24), (25): Xaa is A or G or is absent
PTXAPTKLSPISVLFIXXXXXXXXXYKQYENMVVR

SEQ ID NO: 16370 - protein, 35 aa, Artificial Sequence; identical to SEQ ID NO: 9072
  GFR-binding peptide
  MOD_RES (1), (35): Xaa is C or S
  MOD_RES (15), (16), (17), (18), (19): Xaa is A or G
  MOD_RES (20), (21), (22), (23): Xaa is A or G or is absent

SEQ ID NO: 16371 - protein, 39 aa, Artificial Sequence
  GFR-binding peptide
  MOD_RES (4), (5), (37), (39): Xaa is C or S
PKPXXAPTQLEPLTVLYYDDSSNVIEQLSNNMVVRAXGX

SEQ ID NO: 16372 - protein, 36 aa, Artificial Sequence
  GFR-binding peptide
  MOD_RES (5), (5): Xaa is C or S
TKPTXAPTKLEPLTVLYYDDSSNVIEQLSNNMVVRS

SEQ ID NO: 16373 - protein, 37 aa, Artificial Sequence; identical to SEQ ID NO: 9075
  GFR-binding peptide
  MOD_RES (1), (2), (34), (36): Xaa is C or S

SEQ ID NO: 16374 - protein, 36 aa, Artificial Sequence; identical to SEQ ID NO: 9079
  GFR-binding peptide
  MOD_RES (1), (35): Xaa is C or S
  MOD_RES (15), (16), (17), (18), (19): Xaa is A or G
  MOD_RES (20), (21), (22), (23): Xaa is A or G or is absent

SEQ ID NO: 16375 - protein, 36 aa, Artificial Sequence; identical to SEQ ID NO: 9085
  GFR-binding peptide
  MOD_RES (3), (4): Xaa is C or S
  MOD_RES (18), (19), (20), (21), (22): Xaa is A or G
  MOD_RES (23), (24), (25), (26): Xaa is A or G or is absent

SEQ ID NO: 16376 - protein, 34 aa, Artificial Sequence
  GFR-binding peptide
  MOD_RES (2), (34): Xaa is C or S
TXAPTKLEPLPVVYYDDSSNVIEQLSNNMVVRSX

SEQ ID NO: 16377 - protein, 35 aa, Artificial Sequence
  GFR-binding peptide
  MOD_RES (4), (5): Xaa is C or S
PKAXXVPTELEPLPMVYYDEYDKVVEQLSNEMVVE

SEQ ID NO: 16378 - protein, 40 aa, Artificial Sequence
  GFR-binding peptide
  MOD_RES (3), (37), (39): Xaa is C or S
  MOD_RES (17), (18), (19), (20), (21): Xaa is A or G
  MOD_RES (22), (23), (24), (25): Xaa is A or G or is absent
PTXAPTKLSPISVLFIXXXXXXXXXYKQYENMVVRSXGXH

SEQ ID NO: 16379 - protein, 36 aa, Artificial Sequence; identical to SEQ ID NO: 9099
  GFR-binding peptide
  MOD_RES (1), (2), (36): Xaa is C or S
  MOD_RES (16), (17), (18), (19), (20): Xaa is A or G
  MOD_RES (21), (22), (23), (24): Xaa is A or G or is absent

SEQ ID NO: 16380 - protein, 33 aa, Artificial Sequence
  GFR-binding peptide
  MOD_RES (14), (15), (16), (17), (18): Xaa is A or G
  MOD_RES (19), (20), (21), (22): Xaa is A or G or is absent
APTKLEPLPVVYYXXXXXXXXXEQLSNNMVVRS

SEQ ID NO: 16381 - protein, 43 aa, Artificial Sequence
  GFR-binding peptide
  MOD_RES (6), (7), (41), (43): Xaa is C or S
  MOD_RES (21), (22), (23), (24), (25): Xaa is A or G
  MOD_RES (26), (27), (28), (29): Xaa is A or G or is absent
TVPKPXXAPTQLSPISVLFIXXXXXXXXXYKQYENMVVRAXGX

SEQ ID NO: 16382 - protein, 32 aa, Artificial Sequence; identical to SEQ ID NO: 9100
  GFR-binding peptide
  MOD_RES (1), (2): Xaa is C or S

SEQ ID NO: 16383 - protein, 37 aa, Artificial Sequence
  GFR-binding peptide
  MOD_RES (2), (3), (34), (36): Xaa is C or S
PXXVSQDLSPISILFIIGKTPKIYKQYEMIVKSXKXS

SEQ ID NO: 16384 - protein, 38 aa, Artificial Sequence; identical to SEQ ID NO: 9101
  GFR-binding peptide
  MOD_RES (1), (35), (37): Xaa is C or S
  MOD_RES (15), (16), (17), (18), (19): Xaa is A or G
  MOD_RES (20), (21), (22), (23): Xaa is A or G or is absent

SEQ ID NO: 16385 - protein, 39 aa, Artificial Sequence
  GFR-binding peptide
  MOD_RES (4), (5), (37), (39): Xaa is C or S
PKPXXAPTQLSPISVLFIDDSSNVIYKQYENMVVRAXGX

SEQ ID NO: 16386 - protein, 39 aa, Artificial Sequence
  GFR-binding peptide
  MOD_RES (2), (3), (37), (39): Xaa is C or S
  MOD_RES (17), (18), (19), (20), (21): Xaa is A or G
  MOD_RES (22), (23), (24), (25): Xaa is A or G or is absent
AXXVPTELEPLPMVYYXXXXXXXXXEQLSNEMVVEGXGX

SEQ ID NO: 16387 - protein, 37 aa, Artificial Sequence
  GFR-binding peptide
  MOD_RES (2), (3), (37): Xaa is C or S
  MOD_RES (17), (18), (19), (20), (21): Xaa is A or G
  MOD_RES (22), (23), (24), (25): Xaa is A or G or is absent
TXXVPTRLSAISILYLXXXXXXXXXLKNYQDMVVESX

SEQ ID NO: 16388 - protein, 35 aa, Artificial Sequence; identical to SEQ ID NO: 9104
  GFR-binding peptide
  MOD_RES (33), (35): Xaa is C or S
  MOD_RES (14), (15), (16), (17), (18): Xaa is A or G
  MOD_RES (19), (20), (21), (22): Xaa is A or G or is absent

SEQ ID NO: 16389 - protein, 33 aa, Artificial Sequence
  GFR-binding peptide
  MOD_RES (14), (15), (16), (17), (18): Xaa is A or G
  MOD_RES (19), (20), (21), (22): Xaa is A or G or is absent
VPTRLNAISILYFXXXXXXXXXLKKYRDMVVES

SEQ ID NO: 16390 - protein, 33 aa, Artificial Sequence; identical to SEQ ID NO: 9107
  GFR-binding peptide
  MOD_RES (14), (15), (16), (17), (18): Xaa is A or G
  MOD_RES (19), (20), (21), (22): Xaa is A or G or is absent

SEQ ID NO: 16391 - protein, 31 aa, Artificial Sequence
  GFR-binding peptide
  MOD_RES (1), (1): Xaa is C or S
XVPQDLSPISILFIVGRTPKVYKQYEMVVKS

SEQ ID NO: 16392 - protein, 41 aa, Artificial Sequence; identical to SEQ ID NO: 9110
  GFR-binding peptide
  MOD_RES (4), (5), (39), (41): Xaa is C or S
  MOD_RES (19), (20), (21), (22), (23): Xaa is A or G
  MOD_RES (24), (25), (26), (27): Xaa is A or G or is absent

SEQ ID NO: 16393 - protein, 31 aa, Artificial Sequence; identical to SEQ ID NO: 9111
  GFR-binding peptide
  MOD_RES (31), (31): Xaa is C or S

SEQ ID NO: 16394 - protein, 40 aa, Artificial Sequence; identical to SEQ ID NO: 9113
  GFR-binding peptide
  MOD_RES (5), (6), (39): Xaa is C or S
  MOD_RES (20), (21), (22), (23), (24): Xaa is A or G
  MOD_RES (25), (26), (27), (28): Xaa is A or G or is absent

SEQ ID NO: 16395 - protein, 36 aa, Artificial Sequence
  GFR-binding peptide
  MOD_RES (34), (36): Xaa is C or S
  MOD_RES (14), (15), (16), (17), (18): Xaa is A or G
  MOD_RES (19), (20), (21), (22): Xaa is A or G or is absent
VPTELEPLTMLYYXXXXXXXXXEQLSNEMVVEGXGX

SEQ ID NO: 16396 - protein, 36 aa, Artificial Sequence
  GFR-binding peptide
  MOD_RES (5), (6): Xaa is C or S
VPKPXXAPTQLEPLTVLYYDDSSNVIEQLSNNMVVR

SEQ ID NO: 16397 - protein, 33 aa, Artificial Sequence
  GFR-binding peptide
  MOD_RES (14), (15), (16), (17), (18): Xaa is A or G
  MOD_RES (19), (20), (21), (22): Xaa is A or G or is absent
VPTRLSAISILYLXXXXXXXXXLKNYQDMVVES

SEQ ID NO: 16398 - protein, 36 aa, Artificial Sequence; identical to SEQ ID NO: 9117
  GFR-binding peptide
  MOD_RES (34), (36): Xaa is C or S
  MOD_RES (14), (15), (16), (17), (18): Xaa is A or G
  MOD_RES (19), (20), (21), (22): Xaa is A or G or is absent

SEQ ID NO: 16399 - protein, 33 aa, Artificial Sequence
  GFR-binding peptide
  MOD_RES (2), (2): Xaa is C or S
TXAPTKLEPLTVLYYDDSSNVIEQLSNNMVVRS

SEQ ID NO: 16400 - protein, 36 aa, Artificial Sequence
  GFR-binding peptide
  MOD_RES (4), (36): Xaa is C or S
KPTXAPTKLEPLPVVYYDDSSNVIEQLSNNMVVRSX

SEQ ID NO: 16401 - protein, 37 aa, Artificial Sequence
  GFR-binding peptide
  MOD_RES (1), (2), (36): Xaa is C or S
  MOD_RES (16), (17), (18), (19), (20): Xaa is A or G
  MOD_RES (21), (22), (23), (24): Xaa is A or G or is absent
XXVPTRLEPLTILYYXXXXXXXXXEQLSNDMVVESXG

SEQ ID NO: 16402 - protein, 40 aa, Artificial Sequence
  GFR-binding peptide
  MOD_RES (6), (7): Xaa is C or S
  MOD_RES (21), (22), (23), (24), (25): Xaa is A or G
  MOD_RES (26), (27), (28), (29): Xaa is A or G or is absent
STPPTXXVPTRLNAISILYFXXXXXXXXXLKKYRDMVVES

SEQ ID NO: 16403 - protein, 37 aa, Artificial Sequence; identical to SEQ ID NO: 9128
  GFR-binding peptide
  MOD_RES (4), (5), (36): Xaa is C or S

SEQ ID NO: 16404 - protein, 38 aa, Artificial Sequence
  GFR-binding peptide
  MOD_RES (5), (37): Xaa is C or S
TKPTXAPTKLEPLTVLYYDDSSNVIEQLSNNMVVRSXG

SEQ ID NO: 16405 - protein, 44 aa, Artificial Sequence; identical to SEQ ID NO: 9131
  GFR-binding peptide
  MOD_RES (6), (7), (41), (43): Xaa is C or S
  MOD_RES (21), (22), (23), (24), (25): Xaa is A or G
  MOD_RES (26), (27), (28), (29): Xaa is A or G or is absent

SEQ ID NO: 16406 - protein, 38 aa, Artificial Sequence; identical to SEQ ID NO: 9133
  GFR-binding peptide
  MOD_RES (5), (6), (38): Xaa is C or S

SEQ ID NO: 16407 - protein, 37 aa, Artificial Sequence; identical to SEQ ID NO: 9134
  GFR-binding peptide
  MOD_RES (3), (4), (37): Xaa is C or S
  MOD_RES (18), (19), (20), (21), (22): Xaa is A or G
  MOD_RES (23), (24), (25), (26): Xaa is A or G or is absent

SEQ ID NO: 16408 - protein, 33 aa, Artificial Sequence
  GFR-binding peptide
  MOD_RES (2), (3): Xaa is C or S
PXXAPTQLSPISVLFIDDSSNVIYKQYENMVVR

SEQ ID NO: 16409 - protein, 36 aa, Artificial Sequence
  GFR-binding peptide
  MOD_RES (1), (35): Xaa is C or S
  MOD_RES (15), (16), (17), (18), (19): Xaa is A or G
  MOD_RES (20), (21), (22), (23): Xaa is A or G or is absent
XVPTRLSPISILFIXXXXXXXXXYKQYEDMVVESXG

SEQ ID NO: 16410 - protein, 40 aa, Artificial Sequence
  GFR-binding peptide
  MOD_RES (5), (6), (38), (40): Xaa is C or S
IPKAXXVPTELEPLTMLYYDEYDKVVEQLSNEMVVEGXGX

SEQ ID NO: 16411 - protein, 39 aa, Artificial Sequence; identical to SEQ ID NO: 9138
  GFR-binding peptide
  MOD_RES (4), (5), (38): Xaa is C or S
  MOD_RES (19), (20), (21), (22), (23): Xaa is A or G
  MOD_RES (24), (25), (26), (27): Xaa is A or G or is absent

SEQ ID NO: 16412 - protein, 32 aa, Artificial Sequence
  GFR-binding peptide
  MOD_RES (1), (1): Xaa is C or S
XVPTELSPISMLFIDENEKVVYKQYEDMVVEG

SEQ ID NO: 16413 - protein, 33 aa, Artificial Sequence
  GFR-binding peptide
  MOD_RES (14), (15), (16), (17), (18): Xaa is A or G
  MOD_RES (19), (20), (21), (22): Xaa is A or G or is absent
APTKLEPLTVLYYXXXXXXXXXEQLSNNMVVRS

SEQ ID NO: 16414 - protein, 43 aa, Artificial Sequence; identical to SEQ ID NO: 9141
  GFR-binding peptide
  MOD_RES (5), (6), (40), (42): Xaa is C or S
  MOD_RES (20), (21), (22), (23), (24): Xaa is A or G
  MOD_RES (25), (26), (27), (28): Xaa is A or G or is absent

SEQ ID NO: 16415 - protein, 32 aa, Artificial Sequence; identical to SEQ ID NO: 9146
  GFR-binding peptide
  MOD_RES (1), (2): Xaa is C or S

SEQ ID NO: 16416 - protein, 39 aa, Artificial Sequence
  GFR-binding peptide
  MOD_RES (5), (6), (39): Xaa is C or S
  MOD_RES (20), (21), (22), (23), (24): Xaa is A or G
  MOD_RES (25), (26), (27), (28): Xaa is A or G or is absent
SASPXXVSQDLEPLPIVYYXXXXXXXXXEQLSNMIVKSX

SEQ ID NO: 16417 - protein, 40 aa, Artificial Sequence; identical to SEQ ID NO: 9148
  GFR-binding peptide
  MOD_RES (3), (37), (39): Xaa is C or S
  MOD_RES (17), (18), (19), (20), (21): Xaa is A or G
  MOD_RES (22), (23), (24), (25): Xaa is A or G or is absent

SEQ ID NO: 16418 - protein, 35 aa, Artificial Sequence
  GFR-binding peptide
  MOD_RES (3), (4), (35): Xaa is C or S
SPXXVSQDLSPISILFIIGKTPKIYKQYEMIVKSX

SEQ ID NO: 16419 - protein, 38 aa, Artificial Sequence
  GFR-binding peptide
  MOD_RES (4), (5), (36), (38): Xaa is C or S
ASPXXVPQDLEPLPIVYYVGRTPKVEQLSNMVVKSXKX

SEQ ID NO: 16420 - protein, 35 aa, Artificial Sequence; identical to SEQ ID NO: 9152
  GFR-binding peptide
  MOD_RES (34), (34): Xaa is C or S
  MOD_RES (14), (15), (16), (17), (18): Xaa is A or G
  MOD_RES (19), (20), (21), (22): Xaa is A or G or is absent

SEQ ID NO: 16421 - protein, 35 aa, Artificial Sequence
  GFR-binding peptide
  MOD_RES (3), (4): Xaa is C or S
KPXXAPTQLSPISVLFIDDSSNVIYKQYENMVVRA

SEQ ID NO: 16422 - protein, 40 aa, Artificial Sequence
  GFR-binding peptide
  MOD_RES (5), (6), (39): Xaa is C or S
  MOD_RES (20), (21), (22), (23), (24): Xaa is A or G
  MOD_RES (25), (26), (27), (28): Xaa is A or G or is absent
SASPXXVSQDLSPISILFIXXXXXXXXXYKQYEMIVKSXK

SEQ ID NO: 16423 - protein, 34 aa, Artificial Sequence; identical to SEQ ID NO: 9153
  GFR-binding peptide
  MOD_RES (33), (33): Xaa is C or S
  MOD_RES (14), (15), (16), (17), (18): Xaa is A or G
  MOD_RES (19), (20), (21), (22): Xaa is A or G or is absent

SEQ ID NO: 16424 - protein, 37 aa, Artificial Sequence
  GFR-binding peptide
  MOD_RES (4), (5), (37): Xaa is C or S
PKPXXAPTKLEPLPVVYYDDSSNVIEQLSNNMVVRSX

SEQ ID NO: 16425 - protein, 39 aa, Artificial Sequence; identical to SEQ ID NO: 9155
  GFR-binding peptide
  MOD_RES (4), (5), (39): Xaa is C or S
  MOD_RES (19), (20), (21), (22), (23): Xaa is A or G
  MOD_RES (24), (25), (26), (27): Xaa is A or G or is absent

SEQ ID NO: 16426 - protein, 40 aa, Artificial Sequence
  GFR-binding peptide
  MOD_RES (3), (4), (38), (40): Xaa is C or S
  MOD_RES (18), (19), (20), (21), (22): Xaa is A or G
  MOD_RES (23), (24), (25), (26): Xaa is A or G or is absent
KPXXAPTQLSPISVLFIXXXXXXXXXYKQYENMVVRAXGX

SEQ ID NO: 16427 - protein, 36 aa, Artificial Sequence
  GFR-binding peptide
  MOD_RES (2), (3): Xaa is C or S
  MOD_RES (17), (18), (19), (20), (21): Xaa is A or G
  MOD_RES (22), (23), (24), (25): Xaa is A or G or is absent
AXXVPTELEPLTMLYYXXXXXXXXXEQLSNEMVVEG

SEQ ID NO: 16428 - protein, 35 aa, Artificial Sequence
  GFR-binding peptide
  MOD_RES (3), (35): Xaa is C or S
PTXAPTKLSPISVLFIDDSSNVIYKQYENMVVRSX

SEQ ID NO: 16429 - protein, 35 aa, Artificial Sequence
  GFR-binding peptide
  MOD_RES (34), (34): Xaa is C or S
  MOD_RES (14), (15), (16), (17), (18): Xaa is A or G
  MOD_RES (19), (20), (21), (22): Xaa is A or G or is absent
APTQLEPLPVVYYXXXXXXXXXEQLSNNMVVRAXG

SEQ ID NO: 16430 - protein, 35 aa, Artificial Sequence; identical to SEQ ID NO: 9157
  GFR-binding peptide
  MOD_RES (34), (34): Xaa is C or S
  MOD_RES (14), (15), (16), (17), (18): Xaa is A or G
  MOD_RES (19), (20), (21), (22): Xaa is A or G or is absent

SEQ ID NO: 16431 - protein, 42 aa, Artificial Sequence
  GFR-binding peptide
  MOD_RES (7), (41): Xaa is C or S
  MOD_RES (21), (22), (23), (24), (25): Xaa is A or G
  MOD_RES (26), (27), (28), (29): Xaa is A or G or is absent
HVTKPTXAPTKLEPLTVLYYXXXXXXXXXEQLSNNMVVRSXG

SEQ ID NO: 16432 - protein, 40 aa, Artificial Sequence
  GFR-binding peptide
  MOD_RES (5), (6), (38), (40): Xaa is C or S
IPKAXXVPTELSPISMLFIDEYDKVVYKQYEEMVVEGXGX

SEQ ID NO: 16433 - protein, 38 aa, Artificial Sequence
  GFR-binding peptide
  MOD_RES (6), (7): Xaa is C or S
SIPKAXXVPTELEPLPMVYYDEYDKVVEQLSNEMVVEG

SEQ ID NO: 16434 - protein, 39 aa, Artificial Sequence
  GFR-binding peptide
  MOD_RES (6), (7): Xaa is C or S
  MOD_RES (21), (22), (23), (24), (25): Xaa is A or G
  MOD_RES (26), (27), (28), (29): Xaa is A or G or is absent
YVPKPXXAPTKLEPLPVVYYXXXXXXXXXEQLSNNMVVR

SEQ ID NO: 16435 - protein, 40 aa, Artificial Sequence
  GFR-binding peptide
  MOD_RES (5), (6), (40): Xaa is C or S
  MOD_RES (20), (21), (22), (23), (24): Xaa is A or G
  MOD_RES (25), (26), (27), (28): Xaa is A or G or is absent
IPKAXXVPTELEPLTMLYYXXXXXXXXXEQLSNEMVVEGX

SEQ ID NO: 16436 - protein, 40 aa, Artificial Sequence; identical to SEQ ID NO: 9161
  GFR-binding peptide
  MOD_RES (4), (5), (38), (40): Xaa is C or S
  MOD_RES (19), (20), (21), (22), (23): Xaa is A or G
  MOD_RES (24), (25), (26), (27): Xaa is A or G or is absent

SEQ ID NO: 16437 - protein, 34 aa, Artificial Sequence
  GFR-binding peptide
  MOD_RES (1), (1): Xaa is C or S
  MOD_RES (15), (16), (17), (18), (19): Xaa is A or G
  MOD_RES (20), (21), (22), (23): Xaa is A or G or is absent
XVPTRLEPLPIVYYXXXXXXXXXEQLSNDMVVES

SEQ ID NO: 16438 - protein, 36 aa, Artificial Sequence; identical to SEQ ID NO: 9162
  GFR-binding peptide
  MOD_RES (1), (35): Xaa is C or S
  MOD_RES (15), (16), (17), (18), (19): Xaa is A or G
  MOD_RES (20), (21), (22), (23): Xaa is A or G or is absent

SEQ ID NO: 16439 - protein, 40 aa, Artificial Sequence
  GFR-binding peptide
  MOD_RES (6), (7): Xaa is C or S
  MOD_RES (21), (22), (23), (24), (25): Xaa is A or G
  MOD_RES (26), (27), (28), (29): Xaa is A or G or is absent
STPPTXXVPTRLSAISILYLXXXXXXXXXLKNYQDMVVES

SEQ ID NO: 16440 - protein, 37 aa, Artificial Sequence
  GFR-binding peptide
  MOD_RES (4), (5), (37): Xaa is C or S
PKAXXVPTELEPLTMLYYDEYDKVVEQLSNEMVVEGX

SEQ ID NO: 16441 - protein, 31 aa, Artificial Sequence
  GFR-binding peptide
VPTRLEPLTILYYDSANNVVEQLSNDMVVES

SEQ ID NO: 16442 - protein, 41 aa, Artificial Sequence; identical to SEQ ID NO: 9165
  GFR-binding peptide
  MOD_RES (6), (7), (41): Xaa is C or S
  MOD_RES (21), (22), (23), (24), (25): Xaa is A or G
  MOD_RES (26), (27), (28), (29): Xaa is A or G or is absent

SEQ ID NO: 16443 - protein, 38 aa, Artificial Sequence
  GFR-binding peptide
  MOD_RES (5), (6), (38): Xaa is C or S
IPKAXXVPTELEPLPMVYYDENEKVVEQLSNDMVVEGX

SEQ ID NO: 16444 - protein, 42 aa, Artificial Sequence
  GFR-binding peptide
  MOD_RES (6), (7), (39), (41): Xaa is C or S
TVPKPXXAPTQLSPISVLFIDDSSNVIYKQYENMVVRAXGXH

SEQ ID NO: 16445 - protein, 35 aa, Artificial Sequence
  GFR-binding peptide
  MOD_RES (4), (5): Xaa is C or S
AAPXXVPQALSPISILFIVGRKPKVYKQYEMIVRS

SEQ ID NO: 16446 - protein, 33 aa, Artificial Sequence
  GFR-binding peptide
  MOD_RES (2), (3): Xaa is C or S
TXXVPTRLEPLPIVYYDSANNVVEQLSNDMVVE

SEQ ID NO: 16447 - protein, 36 aa, Artificial Sequence
  GFR-binding peptide
  MOD_RES (2), (3), (35): Xaa is C or S
TXXVPTRLEPLPIVYYDSANNVVEQLSNDMVVESXG

SEQ ID NO: 16448 - protein, 38 aa, Artificial Sequence
  GFR-binding peptide
  MOD_RES (4), (5), (38): Xaa is C or S
  MOD_RES (19), (20), (21), (22), (23): Xaa is A or G
  MOD_RES (24), (25), (26), (27): Xaa is A or G or is absent
ASPXXVSQDLEPLPIVYYXXXXXXXXXEQLSNMIVKSX

SEQ ID NO: 16449 - protein, 37 aa, Artificial Sequence; identical to SEQ ID NO: 9172
  GFR-binding peptide
  MOD_RES (2), (3), (37): Xaa is C or S
  MOD_RES (17), (18), (19), (20), (21): Xaa is A or G
  MOD_RES (22), (23), (24), (25): Xaa is A or G or is absent

SEQ ID NO: 16450 - protein, 34 aa, Artificial Sequence
  GFR-binding peptide
  MOD_RES (1), (1): Xaa is C or S
  MOD_RES (15), (16), (17), (18), (19): Xaa is A or G
  MOD_RES (20), (21), (22), (23): Xaa is A or G or is absent
XVPTRLEPLTILYYXXXXXXXXXEQLSNDMVVES

SEQ ID NO: 16451 - protein, 35 aa, Artificial Sequence
  GFR-binding peptide
  MOD_RES (1), (2): Xaa is C or S
  MOD_RES (16), (17), (18), (19), (20): Xaa is A or G
  MOD_RES (21), (22), (23), (24): Xaa is A or G or is absent
XXVPTRLEPLPIVYYXXXXXXXXXEQLSNDMVVES

SEQ ID NO: 16452 - protein, 36 aa, Artificial Sequence
  GFR-binding peptide
  MOD_RES (2), (3), (35): Xaa is C or S
AXXVPTELEPLTMLYYDEYDKVVEQLSNEMVVEGXG

SEQ ID NO: 16453 - protein, 36 aa, Artificial Sequence
  GFR-binding peptide
  MOD_RES (3), (4): Xaa is C or S
  MOD_RES (18), (19), (20), (21), (22): Xaa is A or G
  MOD_RES (23), (24), (25), (26): Xaa is A or G or is absent
KAXXVPTELSPISMLFIXXXXXXXXXYKQYEEMVVE

SEQ ID NO: 16454 - protein, 36 aa, Artificial Sequence
  GFR-binding peptide
  MOD_RES (5), (5): Xaa is C or S
TKPTXAPTKLSPISVLFIDDSSNVIYKQYENMVVRS

SEQ ID NO: 16455 - protein, 40 aa, Artificial Sequence
  GFR-binding peptide
  MOD_RES (5), (6), (37), (39): Xaa is C or S
SASPXXVPQDLSPISILFIVGRTPKVYKQYEMVVKSXKXS

SEQ ID NO: 16456 - protein, 40 aa, Artificial Sequence
  GFR-binding peptide
  MOD_RES (6), (7), (39): Xaa is C or S
STPPTXXVPTRLEPLPIVYYDSANNVVEQLSNDMVVESXG

SEQ ID NO: 16457 - protein, 34 aa, Artificial Sequence
  GFR-binding peptide
  MOD_RES (1), (2): Xaa is C or S
  MOD_RES (16), (17), (18), (19), (20): Xaa is A or G
  MOD_RES (21), (22), (23), (24): Xaa is A or G or is absent
XXAPTKLEPLTVLYYXXXXXXXXXEQLSNNMVVR

SEQ ID NO: 16458 - protein, 34 aa, Artificial Sequence
  GFR-binding peptide
  MOD_RES (2), (3): Xaa is C or S
PXXAPTQLSPISVLFIDDSSNVIYKQYENMVVRA

SEQ ID NO: 16459 - protein, 38 aa, Artificial Sequence
  GFR-binding peptide
  MOD_RES (4), (5), (37): Xaa is C or S
PPTXXVPTRLNAISILYFDSANNVVLKKYRDMVVESXG

SEQ ID NO: 16460 - protein, 37 aa, Artificial Sequence
  GFR-binding peptide
  MOD_RES (1), (2), (34), (36): Xaa is C or S
XXVPTELSPISMLFIDENEKVVYKQYEDMVVEGXGXR

SEQ ID NO: 16461 - protein, 31 aa, Artificial Sequence
  GFR-binding peptide
VPTELEPLPMVYYDEYDKVVEQLSNEMVVEG

SEQ ID NO: 16462 - protein, 43 aa, Artificial Sequence
  GFR-binding peptide
  MOD_RES (6), (7), (40), (42): Xaa is C or S
  MOD_RES (21), (22), (23), (24), (25): Xaa is A or G
  MOD_RES (26), (27), (28), (29): Xaa is A or G or is absent
ASASPXXVPQDLEPLPIVYYXXXXXXXXXEQLSNMVVKSXKXS

SEQ ID NO: 16463 - protein, 39 aa, Artificial Sequence
  GFR-binding peptide
  MOD_RES (6), (7): Xaa is C or S
  MOD_RES (21), (22), (23), (24), (25): Xaa is A or G
  MOD_RES (26), (27), (28), (29): Xaa is A or G or is absent
SIPKAXXVPTELEPLPMVYYXXXXXXXXXEQLSNEMVVE

SEQ ID NO: 16464 - protein, 39 aa, Artificial Sequence
  GFR-binding peptide
  MOD_RES (6), (7): Xaa is C or S
  MOD_RES (21), (22), (23), (24), (25): Xaa is A or G
  MOD_RES (26), (27), (28), (29): Xaa is A or G or is absent
ASAAPXXVPQALSPISILFIXXXXXXXXXYKQYEMIVRS

SEQ ID NO: 16465 - protein, 38 aa, Artificial Sequence; identical to SEQ ID NO: 9184
  GFR-binding peptide
  MOD_RES (5), (6): Xaa is C or S
  MOD_RES (20), (21), (22), (23), (24): Xaa is A or G
  MOD_RES (25), (26), (27), (28): Xaa is A or G or is absent

SEQ ID NO: 16466 - protein, 39 aa, Artificial Sequence; identical to SEQ ID NO: 9186
  GFR-binding peptide
  MOD_RES (3), (4), (38): Xaa is C or S
  MOD_RES (18), (19), (20), (21), (22): Xaa is A or G
  MOD_RES (23), (24), (25), (26): Xaa is A or G or is absent

SEQ ID NO: 16467 - protein, 38 aa, Artificial Sequence; identical to SEQ ID NO: 9188
  GFR-binding peptide
  MOD_RES (2), (3), (37): Xaa is C or S
  MOD_RES (17), (18), (19), (20), (21): Xaa is A or G
  MOD_RES (22), (23), (24), (25): Xaa is A or G or is absent

SEQ ID NO: 16468 - protein, 34 aa, Artificial Sequence
  GFR-binding peptide
  MOD_RES (3), (4): Xaa is C or S
PTXXVPTRLSAISILYLDSANNVVLKNYQDMVVE

SEQ ID NO: 16469 - protein, 37 aa, Artificial Sequence
  GFR-binding peptide
  MOD_RES (5), (6): Xaa is C or S
IPKAXXVPTELSPISMLFIDENEKVVYKQYEDMVVEG

SEQ ID NO: 16470 - protein, 31 aa, Artificial Sequence
  GFR-binding peptide
  MOD_RES (1), (1): Xaa is C or S
XVPTELEPLTMLYYDENEKVVEQLSNDMVVE

SEQ ID NO: 16471 - protein, 38 aa, Artificial Sequence
  GFR-binding peptide
  MOD_RES (1), (2), (36), (38): Xaa is C or S
  MOD_RES (16), (17), (18), (19), (20): Xaa is A or G
  MOD_RES (21), (22), (23), (24): Xaa is A or G or is absent
XXVPTELEPLTMLYYXXXXXXXXXEQLSNDMVVEGXGX

SEQ ID NO: 16472 - protein, 36 aa, Artificial Sequence
  GFR-binding peptide
  MOD_RES (1), (2), (34), (36): Xaa is C or S
XXAPTKLEPLTVLYYDDSSNVIEQLSNNMVVRSXGX

SEQ ID NO: 16473 - protein, 41 aa, Artificial Sequence
  GFR-binding peptide
  MOD_RES (5), (39), (41): Xaa is C or S
  MOD_RES (19), (20), (21), (22), (23): Xaa is A or G
  MOD_RES (24), (25), (26), (27): Xaa is A or G or is absent
TKPTXAPTKLEPLTVLYYXXXXXXXXXEQLSNNMVVRSXGX

SEQ ID NO: 16474 - protein, 40 aa, Artificial Sequence; identical to SEQ ID NO: 9195
  GFR-binding peptide
  MOD_RES (3), (4), (38), (40): Xaa is C or S
  MOD_RES (18), (19), (20), (21), (22): Xaa is A or G
  MOD_RES (23), (24), (25), (26): Xaa is A or G or is absent

SEQ ID NO: 16475 - protein, 31 aa, Artificial Sequence; identical to SEQ ID NO: 9197
  GFR-binding peptide

SEQ ID NO: 16476 - protein, 36 aa, Artificial Sequence; identical to SEQ ID NO: 9198
  GFR-binding peptide
  MOD_RES (1), (34), (36): Xaa is C or S
  MOD_RES (15), (16), (17), (18), (19): Xaa is A or G
  MOD_RES (20), (21), (22), (23): Xaa is A or G or is absent

SEQ ID NO: 16477 - protein, 34 aa, Artificial Sequence; identical to SEQ ID NO: 9202
  GFR-binding peptide
  MOD_RES (31), (33): Xaa is C or S

SEQ ID NO: 16478 - protein, 42 aa, Artificial Sequence
  GFR-binding peptide
  MOD_RES (5), (6), (40), (42): Xaa is C or S
  MOD_RES (20), (21), (22), (23), (24): Xaa is A or G
  MOD_RES (25), (26), (27), (28): Xaa is A or G or is absent
TPPTXXVPTRLSPISILFIXXXXXXXXXYKQYEDMVVESXGX

SEQ ID NO: 16479 - protein, 34 aa, Artificial Sequence
  GFR-binding peptide
  MOD_RES (2), (3), (34): Xaa is C or S
PXXVSQDLEPLPIVYYIGKTPKIEQLSNMIVKSX

SEQ ID NO: 16480 - protein, 38 aa, Artificial Sequence
  GFR-binding peptide
  MOD_RES (3), (4), (37): Xaa is C or S
  MOD_RES (18), (19), (20), (21), (22): Xaa is A or G
  MOD_RES (23), (24), (25), (26): Xaa is A or G or is absent
SPXXVSQDLSPISILFIXXXXXXXXXYKQYEMIVKSXK

SEQ ID NO: 16481 - protein, 37 aa, Artificial Sequence
  GFR-binding peptide
  MOD_RES (6), (7): Xaa is C or S
ASASPXXVSQDLSPISILFIIGKTPKIYKQYEMIVKS

SEQ ID NO: 16482 - protein, 33 aa, Artificial Sequence
  GFR-binding peptide
  MOD_RES (1), (1): Xaa is C or S
  MOD_RES (15), (16), (17), (18), (19): Xaa is A or G
  MOD_RES (20), (21), (22), (23): Xaa is A or G or is absent
XVPTRLEPLPIVYYXXXXXXXXXEQLSNDMVVE

SEQ ID NO: 16483 - protein, 39 aa, Artificial Sequence
  GFR-binding peptide
  MOD_RES (5), (6), (39): Xaa is C or S
  MOD_RES (20), (21), (22), (23), (24): Xaa is A or G
  MOD_RES (25), (26), (27), (28): Xaa is A or G or is absent
SASPXXVPQDLEPLPIVYYXXXXXXXXXEQLSNMVVKSX

SEQ ID NO: 16484 - protein, 36 aa, Artificial Sequence
  GFR-binding peptide
  MOD_RES (1), (35): Xaa is C or S
  MOD_RES (15), (16), (17), (18), (19): Xaa is A or G
  MOD_RES (20), (21), (22), (23): Xaa is A or G or is absent
XAPTKLEPLPVVYYXXXXXXXXXEQLSNNMVVRSXG

SEQ ID NO: 16485 - protein, 35 aa, Artificial Sequence
  GFR-binding peptide
  MOD_RES (2), (3): Xaa is C or S
  MOD_RES (17), (18), (19), (20), (21): Xaa is A or G
  MOD_RES (22), (23), (24), (25): Xaa is A or G or is absent
PXXAPTKLSPISVLFIXXXXXXXXXYKQYENMVVR

SEQ ID NO: 16486 - protein, 37 aa, Artificial Sequence
  GFR-binding peptide
  MOD_RES (1), (2), (34), (36): Xaa is C or S
XXVPTELEPLTMLYYDENEKVVEQLSNDMVVEGXGXR

SEQ ID NO: 16487 - protein, 36 aa, Artificial Sequence; identical to SEQ ID NO: 9213
  GFR-binding peptide
  MOD_RES (1), (35): Xaa is C or S
  MOD_RES (15), (16), (17), (18), (19): Xaa is A or G
  MOD_RES (20), (21), (22), (23): Xaa is A or G or is absent

SEQ ID NO: 16488 - protein, 36 aa, Artificial Sequence
  GFR-binding peptide
  MOD_RES (1), (2), (34), (36): Xaa is C or S
XXAPTKLSPISVLFIDDSSNVIYKQYENMVVRSXGX

SEQ ID NO: 16489 - protein, 37 aa, Artificial Sequence
  GFR-binding peptide
  MOD_RES (1), (2), (36): Xaa is C or S
  MOD_RES (16), (17), (18), (19), (20): Xaa is A or G
  MOD_RES (21), (22), (23), (24): Xaa is A or G or is absent
XXAPTQLEPLPVVYYXXXXXXXXXEQLSNNMVVRAXG

SEQ ID NO: 16490 - protein, 38 aa, Artificial Sequence
  GFR-binding peptide
  MOD_RES (5), (6), (37): Xaa is C or S
SAAPXXVPQALSPISILFIVGRKPKVYKQYEMIVRSXK

SEQ ID NO: 16491 - protein, 38 aa, Artificial Sequence
  GFR-binding peptide
  MOD_RES (5), (6), (38): Xaa is C or S
VPKPXXAPTQLEPLTVLYYDDSSNVIEQLSNNMVVRAX

SEQ ID NO: 16492 - protein, 36 aa, Artificial Sequence; identical to SEQ ID NO: 9218
  GFR-binding peptide
  MOD_RES (2), (3): Xaa is C or S
  MOD_RES (17), (18), (19), (20), (21): Xaa is A or G
  MOD_RES (22), (23), (24), (25): Xaa is A or G or is absent

SEQ ID NO: 16493 - protein, 39 aa, Artificial Sequence
  GFR-binding peptide
  MOD_RES (2), (3), (36), (38): Xaa is C or S
  MOD_RES (17), (18), (19), (20), (21): Xaa is A or G
  MOD_RES (22), (23), (24), (25): Xaa is A or G or is absent
PXXVPQDLEPLPIVYYXXXXXXXXXEQLSNMVVKSXKXS

SEQ ID NO: 16494 - protein, 34 aa, Artificial Sequence
  GFR-binding peptide
  MOD_RES (1), (33): Xaa is C or S
XVPTELEPLPMVYYDEYDKVVEQLSNEMVVEGXG

SEQ ID NO: 16495 - protein, 37 aa, Artificial Sequence
  GFR-binding peptide
  MOD_RES (5), (6), (37): Xaa is C or S
SAAPXXVPQALSPISILFIVGRKPKVYKQYEMIVRSX

SEQ ID NO: 16496 - protein, 38 aa, Artificial Sequence; identical to SEQ ID NO: 9220
  GFR-binding peptide
  MOD_RES (6), (6): Xaa is C or S
  MOD_RES (20), (21), (22), (23), (24): Xaa is A or G
  MOD_RES (25), (26), (27), (28): Xaa is A or G or is absent

SEQ ID NO: 16497 - protein, 35 aa, Artificial Sequence; identical to SEQ ID NO: 9222
  GFR-binding peptide
  MOD_RES (2), (3), (34): Xaa is C or S

SEQ ID NO: 16498 - protein, 36 aa, Artificial Sequence
  GFR-binding peptide
  MOD_RES (2), (3): Xaa is C or S
  MOD_RES (17), (18), (19), (20), (21): Xaa is A or G
  MOD_RES (22), (23), (24), (25): Xaa is A or G or is absent
AXXVPTELSPISMLFIXXXXXXXXXYKQYEEMVVEG

SEQ ID NO: 16499 - protein, 36 aa, Artificial Sequence; identical to SEQ ID NO: 9223
  GFR-binding peptide
  MOD_RES (2), (3): Xaa is C or S
  MOD_RES (17), (18), (19), (20), (21): Xaa is A or G
  MOD_RES (22), (23), (24), (25): Xaa is A or G or is absent

SEQ ID NO: 16500 - protein, 42 aa, Artificial Sequence; identical to SEQ ID NO: 9225
  GFR-binding peptide
  MOD_RES (5), (6), (40), (42): Xaa is C or S
  MOD_RES (20), (21), (22), (23), (24): Xaa is A or G
  MOD_RES (25), (26), (27), (28): Xaa is A or G or is absent

SEQ ID NO: 16501 - protein, 34 aa, Artificial Sequence
  GFR-binding peptide
  MOD_RES (1), (2): Xaa is C or S
  MOD_RES (16), (17), (18), (19), (20): Xaa is A or G
  MOD_RES (21), (22), (23), (24): Xaa is A or G or is absent
XXVPTELSPISMLFIXXXXXXXXXYKQYEEMVVE

SEQ ID NO: 16502 - protein, 38 aa, Artificial Sequence; identical to SEQ ID NO: 9228
  GFR-binding peptide
  MOD_RES (1), (2), (36), (38): Xaa is C or S
  MOD_RES (16), (17), (18), (19), (20): Xaa is A or G
  MOD_RES (21), (22), (23), (24): Xaa is A or G or is absent

SEQ ID NO: 16503 - protein, 34 aa, Artificial Sequence
  GFR-binding peptide
  MOD_RES (3), (4): Xaa is C or S
SPXXVSQDLSPISILFIIGKTPKIYKQYEMIVKS

SEQ ID NO: 16504 - protein, 36 aa, Artificial Sequence
  GFR-binding peptide
  MOD_RES (2), (3): Xaa is C or S
  MOD_RES (17), (18), (19), (20), (21): Xaa is A or G
  MOD_RES (22), (23), (24), (25): Xaa is A or G or is absent
AXXVPTELEPLPMVYYXXXXXXXXXEQLSNEMVVEG

SEQ ID NO: 16505 - protein, 36 aa, Artificial Sequence
  GFR-binding peptide
  MOD_RES (34), (36): Xaa is C or S
  MOD_RES (14), (15), (16), (17), (18): Xaa is A or G
  MOD_RES (19), (20), (21), (22): Xaa is A or G or is absent
VPTELSPISMLFIXXXXXXXXXYKQYEEMVVEGXGX

SEQ ID NO: 16506 - protein, 39 aa, Artificial Sequence
  GFR-binding peptide
  MOD_RES (3), (4), (38): Xaa is C or S
  MOD_RES (18), (19), (20), (21), (22): Xaa is A or G
  MOD_RES (23), (24), (25), (26): Xaa is A or G or is absent
KAXXVPTELEPLTMLYYXXXXXXXXXEQLSNDMVVEGXG

SEQ ID NO: 16507 - protein, 43 aa, Artificial Sequence
  GFR-binding peptide
  MOD_RES (6), (40), (42): Xaa is C or S
  MOD_RES (20), (21), (22), (23), (24): Xaa is A or G
  MOD_RES (25), (26), (27), (28): Xaa is A or G or is absent
VTKPTXAPTKLEPLTVLYYXXXXXXXXXEQLSNNMVVRSXGXH

SEQ ID NO: 16508 - protein, 40 aa, Artificial Sequence
  GFR-binding peptide
  MOD_RES (5), (6), (40): Xaa is C or S
  MOD_RES (20), (21), (22), (23), (24): Xaa is A or G
  MOD_RES (25), (26), (27), (28): Xaa is A or G or is absent
TPPTXXVPTRLEPLTILYYXXXXXXXXXEQLSNDMVVESX

SEQ ID NO: 16509 - protein, 35 aa, Artificial Sequence; identical to SEQ ID NO: 9233
  GFR-binding peptide
  MOD_RES (2), (3): Xaa is C or S
  MOD_RES (17), (18), (19), (20), (21): Xaa is A or G
  MOD_RES (22), (23), (24), (25): Xaa is A or G or is absent

SEQ ID NO: 16510 - protein, 37 aa, Artificial Sequence; identical to SEQ ID NO: 9235
  GFR-binding peptide
  MOD_RES (2), (3), (36): Xaa is C or S
  MOD_RES (17), (18), (19), (20), (21): Xaa is A or G
  MOD_RES (22), (23), (24), (25): Xaa is A or G or is absent

SEQ ID NO: 16511 - protein, 40 aa, Artificial Sequence
  GFR-binding peptide
  MOD_RES (4), (5), (39): Xaa is C or S
  MOD_RES (19), (20), (21), (22), (23): Xaa is A or G
  MOD_RES (24), (25), (26), (27): Xaa is A or G or is absent
PKPXXAPTKLSPISVLFIXXXXXXXXXYKQYENMVVRSXG

SEQ ID NO: 16512 - protein, 39 aa, Artificial Sequence
  GFR-binding peptide
  MOD_RES (5), (6), (38): Xaa is C or S
VPKPXXAPTQLEPLTVLYYDDSSNVIEQLSNNMVVRAXG

SEQ ID NO: 16513 - protein, 38 aa, Artificial Sequence
  GFR-binding peptide
  MOD_RES (4), (5): Xaa is C or S
  MOD_RES (19), (20), (21), (22), (23): Xaa is A or G
  MOD_RES (24), (25), (26), (27): Xaa is A or G or is absent
PKAXXVPTELEPLPMVYYXXXXXXXXXEQLSNDMVVEG

SEQ ID NO: 16514 - protein, 37 aa, Artificial Sequence; identical to SEQ ID NO: 9238
  GFR-binding peptide
  MOD_RES (1), (2), (35), (37): Xaa is C or S
  MOD_RES (16), (17), (18), (19), (20): Xaa is A or G
  MOD_RES (21), (22), (23), (24): Xaa is A or G or is absent

SEQ ID NO: 16515 - protein, 38 aa, Artificial Sequence
  GFR-binding peptide
  MOD_RES (4), (5), (37): Xaa is C or S
PPTXXVPTRLEPLPIVYYDSANNVVEQLSNDMVVESXG

SEQ ID NO: 16516 - protein, 39 aa, Artificial Sequence; identical to SEQ ID NO: 9242
  GFR-binding peptide
  MOD_RES (2), (3), (37), (39): Xaa is C or S
  MOD_RES (17), (18), (19), (20), (21): Xaa is A or G
  MOD_RES (22), (23), (24), (25): Xaa is A or G or is absent

SEQ ID NO: 16517 - protein, 40 aa, Artificial Sequence
  GFR-binding peptide
  MOD_RES (6), (40): Xaa is C or S
  MOD_RES (20), (21), (22), (23), (24): Xaa is A or G
  MOD_RES (25), (26), (27), (28): Xaa is A or G or is absent
VTKPTXAPTKLSPISVLFIXXXXXXXXXYKQYENMVVRSX

SEQ ID NO: 16518 - protein, 38 aa, Artificial Sequence
  GFR-binding peptide
  MOD_RES (1), (2), (36), (38): Xaa is C or S
  MOD_RES (16), (17), (18), (19), (20): Xaa is A or G
  MOD_RES (21), (22), (23), (24): Xaa is A or G or is absent
XXVPTELEPLTMLYYXXXXXXXXXEQLSNEMVVEGXGX

SEQ ID NO: 16519 - protein, 37 aa, Artificial Sequence; identical to SEQ ID NO: 9244
  GFR-binding peptide
  MOD_RES (3), (4), (37): Xaa is C or S
  MOD_RES (18), (19), (20), (21), (22): Xaa is A or G
  MOD_RES (23), (24), (25), (26): Xaa is A or G or is absent

SEQ ID NO: 16520 - protein, 34 aa, Artificial Sequence
  GFR-binding peptide
  MOD_RES (1), (33): Xaa is C or S
XVPTRLNAISILYFDSANNVVLKKYRDMVVESXG

SEQ ID NO: 16521 - protein, 37 aa, Artificial Sequence
  GFR-binding peptide
  MOD_RES (2), (3), (37): Xaa is C or S
  MOD_RES (17), (18), (19), (20), (21): Xaa is A or G
  MOD_RES (22), (23), (24), (25): Xaa is A or G or is absent
PXXAPTQLSPISVLFIXXXXXXXXXYKQYENMVVRAX

SEQ ID NO: 16522 - protein, 37 aa, Artificial Sequence
  GFR-binding peptide
  MOD_RES (1), (35), (37): Xaa is C or S
  MOD_RES (15), (16), (17), (18), (19): Xaa is A or G
  MOD_RES (20), (21), (22), (23): Xaa is A or G or is absent
XVPTRLEPLTILYYXXXXXXXXXEQLSNDMVVESXGX

SEQ ID NO: 16523 - protein, 35 aa, Artificial Sequence
  GFR-binding peptide
  MOD_RES (1), (34): Xaa is C or S
  MOD_RES (15), (16), (17), (18), (19): Xaa is A or G
  MOD_RES (20), (21), (22), (23): Xaa is A or G or is absent
XVPQDLEPLTILYYXXXXXXXXXEQLSNMVVKSXK

SEQ ID NO: 16524 - protein, 35 aa, Artificial Sequence
  GFR-binding peptide
  MOD_RES (3), (4): Xaa is C or S
KAXXVPTELSPISMLFIDEYDKVVYKQYEEMVVEG

SEQ ID NO: 16525 - protein, 39 aa, Artificial Sequence
  GFR-binding peptide
  MOD_RES (6), (7): Xaa is C or S
  MOD_RES (21), (22), (23), (24), (25): Xaa is A or G
  MOD_RES (26), (27), (28), (29): Xaa is A or G or is absent
SIPKAXXVPTELEPLTMLYYXXXXXXXXXEQLSNEMVVE

SEQ ID NO: 16526 - protein, 41 aa, Artificial Sequence
  GFR-binding peptide
  MOD_RES (4), (5), (39), (41): Xaa is C or S
  MOD_RES (19), (20), (21), (22), (23): Xaa is A or G
  MOD_RES (24), (25), (26), (27): Xaa is A or G or is absent
PKAXXVPTELSPISMLFIXXXXXXXXXYKQYEEMVVEGXGX

SEQ ID NO: 16527 - protein, 39 aa, Artificial Sequence; identical to SEQ ID NO: 9252
  GFR-binding peptide
  MOD_RES (6), (7): Xaa is C or S
  MOD_RES (21), (22), (23), (24), (25): Xaa is A or G
  MOD_RES (26), (27), (28), (29): Xaa is A or G or is absent

SEQ ID NO: 16528 - protein, 35 aa, Artificial Sequence
  GFR-binding peptide
  MOD_RES (1), (35): Xaa is C or S
  MOD_RES (15), (16), (17), (18), (19): Xaa is A or G
  MOD_RES (20), (21), (22), (23): Xaa is A or G or is absent
XVPTELEPLPMVYYXXXXXXXXXEQLSNEMVVEGX

SEQ ID NO: 16529 - protein, 42 aa, Artificial Sequence
  GFR-binding peptide
  MOD_RES (7), (41): Xaa is C or S
  MOD_RES (21), (22), (23), (24), (25): Xaa is A or G
  MOD_RES (26), (27), (28), (29): Xaa is A or G or is absent
HVTKPTXAPTKLSPISVLFIXXXXXXXXXYKQYENMVVRSXG

SEQ ID NO: 16530 - protein, 36 aa, Artificial Sequence; identical to SEQ ID NO: 9253
  GFR-binding peptide
  MOD_RES (1), (34), (36): Xaa is C or S
  MOD_RES (15), (16), (17), (18), (19): Xaa is A or G
  MOD_RES (20), (21), (22), (23): Xaa is A or G or is absent

SEQ ID NO: 16531 - protein, 34 aa, Artificial Sequence
  GFR-binding peptide
  MOD_RES (1), (2), (34): Xaa is C or S
XXAPTQLEPLPVVYYDDSSNVIEQLSNNMVVRAX

SEQ ID NO: 16532 - protein, 36 aa, Artificial Sequence; identical to SEQ ID NO: 9254
  GFR-binding peptide
  MOD_RES (2), (3): Xaa is C or S
  MOD_RES (17), (18), (19), (20), (21): Xaa is A or G
  MOD_RES (22), (23), (24), (25): Xaa is A or G or is absent

SEQ ID NO: 16533 - protein, 39 aa, Artificial Sequence
  GFR-binding peptide
  MOD_RES (2), (3), (37), (39): Xaa is C or S
  MOD_RES (17), (18), (19), (20), (21): Xaa is A or G
  MOD_RES (22), (23), (24), (25): Xaa is A or G or is absent
TXXVPTRLSAISILYLXXXXXXXXXLKNYQDMVVESXGX

SEQ ID NO: 16534 - protein, 38 aa, Artificial Sequence; identical to SEQ ID NO: 9255
  GFR-binding peptide
  MOD_RES (5), (6), (37): Xaa is C or S

SEQ ID NO: 16535 - protein, 36 aa, Artificial Sequence; identical to SEQ ID NO: 9257
  GFR-binding peptide
  MOD_RES (1), (33), (35): Xaa is C or S

SEQ ID NO: 16536 - protein, 43 aa, Artificial Sequence
  GFR-binding peptide
  MOD_RES (6), (7), (41), (43): Xaa is C or S
  MOD_RES (21), (22), (23), (24), (25): Xaa is A or G
  MOD_RES (26), (27), (28), (29): Xaa is A or G or is absent
TVPKPXXAPTQLEPLTVLYYXXXXXXXXXEQLSNNMVVRAXGX

SEQ ID NO: 16537 - protein, 37 aa, Artificial Sequence; identical to SEQ ID NO: 9258
  GFR-binding peptide
  MOD_RES (4), (5), (36): Xaa is C or S

SEQ ID NO: 16538 - protein, 41 aa, Artificial Sequence
  GFR-binding peptide
  MOD_RES (4), (5), (39), (41): Xaa is C or S
  MOD_RES (19), (20), (21), (22), (23): Xaa is A or G
  MOD_RES (24), (25), (26), (27): Xaa is A or G or is absent
PKAXXVPTELSPISMLFIXXXXXXXXXYKQYEDMVVEGXGX

SEQ ID NO: 16539 - protein, 34 aa, Artificial Sequence; identical to SEQ ID NO: 9261
  GFR-binding peptide
  MOD_RES (3), (4): Xaa is C or S

SEQ ID NO: 16540 - protein, 41 aa, Artificial Sequence
  GFR-binding peptide
  MOD_RES (6), (7), (39), (41): Xaa is C or S
KIPKAXXVPTELEPLTMLYYDENEKVVEQLSNDMVVEGXGX

SEQ ID NO: 16541 - protein, 34 aa, Artificial Sequence; identical to SEQ ID NO: 9262
  GFR-binding peptide
  MOD_RES (34), (34): Xaa is C or S
  MOD_RES (14), (15), (16), (17), (18): Xaa is A or G
  MOD_RES (19), (20), (21), (22): Xaa is A or G or is absent

SEQ ID NO: 16542 - protein, 40 aa, Artificial Sequence; identical to SEQ ID NO: 9264
  GFR-binding peptide
  MOD_RES (4), (5), (37), (39): Xaa is C or S

SEQ ID NO: 16543 - protein, 37 aa, Artificial Sequence; identical to SEQ ID NO: 9265
  GFR-binding peptide
  MOD_RES (4), (5): Xaa is C or S
  MOD_RES (19), (20), (21), (22), (23): Xaa is A or G
  MOD_RES (24), (25), (26), (27): Xaa is A or G or is absent

SEQ ID NO: 16544 - protein, 32 aa, Artificial Sequence
  GFR-binding peptide
  MOD_RES (1), (2): Xaa is C or S
XXVPQALEPLTILYYVGRKPKVEQLSNMIVRS

SEQ ID NO: 16545 - protein, 38 aa, Artificial Sequence
  GFR-binding peptide
  MOD_RES (6), (38): Xaa is C or S
VTKPTXAPTKLEPLTVLYYDDSSNVIEQLSNNMVVRSX

SEQ ID NO: 16546 - protein, 35 aa, Artificial Sequence
  GFR-binding peptide
  MOD_RES (2), (3), (35): Xaa is C or S
TXXVPTRLSAISILYLDSANNVVLKNYQDMVVESX

SEQ ID NO: 16547 - protein, 36 aa, Artificial Sequence
  GFR-binding peptide
  MOD_RES (5), (6): Xaa is C or S
VPKPXXAPTQLSPISVLFIDDSSNVIYKQYENMVVR

SEQ ID NO: 16548 - protein, 40 aa, Artificial Sequence
  GFR-binding peptide
  MOD_RES (4), (5), (39): Xaa is C or S
  MOD_RES (19), (20), (21), (22), (23): Xaa is A or G
  MOD_RES (24), (25), (26), (27): Xaa is A or G or is absent
PKPXXAPTKLEPLTVLYYXXXXXXXXXEQLSNNMVVRSXG

SEQ ID NO: 16549 - protein, 38 aa, Artificial Sequence
  GFR-binding peptide
  MOD_RES (2), (3), (35), (37): Xaa is C or S
TXXVPTRLEPLPIVYYDSANNVVEQLSNDMVVESXGXR

SEQ ID NO: 16550 - protein, 36 aa, Artificial Sequence; identical to SEQ ID NO: 9273
  GFR-binding peptide
  MOD_RES (2), (3): Xaa is C or S
  MOD_RES (17), (18), (19), (20), (21): Xaa is A or G
  MOD_RES (22), (23), (24), (25): Xaa is A or G or is absent

SEQ ID NO: 16551 - protein, 41 aa, Artificial Sequence; identical to SEQ ID NO: 9276
  GFR-binding peptide
  MOD_RES (6), (7), (38), (40): Xaa is C or S

SEQ ID NO: 16552 - protein, 36 aa, Artificial Sequence
  GFR-binding peptide
  MOD_RES (3), (4), (36): Xaa is C or S
KAXXVPTELEPLTMLYYDEYDKVVEQLSNEMVVEGX

SEQ ID NO: 16553 - protein, 30 aa, Artificial Sequence
  GFR-binding peptide
APTKLEPLPVVYYDDSSNVIEQLSNNMVVR

SEQ ID NO: 16554 - protein, 33 aa, Artificial Sequence
  GFR-binding peptide
  MOD_RES (14), (15), (16), (17), (18): Xaa is A or G
  MOD_RES (19), (20), (21), (22): Xaa is A or G or is absent
APTKLSPISVLFIXXXXXXXXXYKQYENMVVRS

SEQ ID NO: 16555 - protein, 44 aa, Artificial Sequence
  GFR-binding peptide
  MOD_RES (6), (7), (41), (43): Xaa is C or S
  MOD_RES (21), (22), (23), (24), (25): Xaa is A or G
  MOD_RES (26), (27), (28), (29): Xaa is A or G or is absent
KIPKAXXVPTELEPLPMVYYXXXXXXXXXEQLSNDMVVEGXGXR

SEQ ID NO: 16556 - protein, 36 aa, Artificial Sequence
  GFR-binding peptide
  MOD_RES (1), (2), (35): Xaa is C or S
  MOD_RES (16), (17), (18), (19), (20): Xaa is A or G
  MOD_RES (21), (22), (23), (24): Xaa is A or G or is absent
XXVPQALSPISILFIXXXXXXXXXYKQYEMIVRSXK

SEQ ID NO: 16557 - protein, 39 aa, Artificial Sequence; identical to SEQ ID NO: 9279
  GFR-binding peptide
  MOD_RES (4), (5), (36), (38): Xaa is C or S

SEQ ID NO: 16558 - protein, 37 aa, Artificial Sequence; identical to SEQ ID NO: 9280
  GFR-binding peptide
  MOD_RES (1), (2), (36): Xaa is C or S
  MOD_RES (16), (17), (18), (19), (20): Xaa is A or G
  MOD_RES (21), (22), (23), (24): Xaa is A or G or is absent

SEQ ID NO: 16559 - protein, 42 aa, Artificial Sequence; identical to SEQ ID NO: 9281
  GFR-binding peptide
  MOD_RES (6), (7), (41): Xaa is C or S
  MOD_RES (21), (22), (23), (24), (25): Xaa is A or G
  MOD_RES (26), (27), (28), (29): Xaa is A or G or is absent

SEQ ID NO: 16560 - protein, 40 aa, Artificial Sequence
  GFR-binding peptide
  MOD_RES (5), (6), (39): Xaa is C or S
  MOD_RES (20), (21), (22), (23), (24): Xaa is A or G
  MOD_RES (25), (26), (27), (28): Xaa is A or G or is absent
SASPXXVPQDLEPLPIVYYXXXXXXXXXEQLSNMVVKSXK

SEQ ID NO: 16561 - protein, 37 aa, Artificial Sequence
  GFR-binding peptide
  MOD_RES (1), (2), (34), (36): Xaa is C or S
XXAPTKLSPISVLFIDDSSNVIYKQYENMVVRSXGXH

SEQ ID NO: 16562 - protein, 33 aa, Artificial Sequence
  GFR-binding peptide
  MOD_RES (1), (33): Xaa is C or S
XAPTQLEPLPVVYYDDSSNVIEQLSNNMVVRAX

SEQ ID NO: 16563 - protein, 36 aa, Artificial Sequence
  GFR-binding peptide
  MOD_RES (1), (2), (34), (36): Xaa is C or S
XXVPTRLEPLPIVYYDSANNVVEQLSNDMVVESXGX

SEQ ID NO: 16564 - protein, 38 aa, Artificial Sequence
  GFR-binding peptide
  MOD_RES (6), (7), (38): Xaa is C or S
ASAAPXXVPQALSPISILFIVGRKPKVYKQYEMIVRSX

SEQ ID NO: 16565 - protein, 33 aa, Artificial Sequence
  GFR-binding peptide
  MOD_RES (31), (33): Xaa is C or S
VSQDLEPLPIVYYIGKTPKIEQLSNMIVKSXKX

SEQ ID NO: 16566 - protein, 33 aa, Artificial Sequence; identical to SEQ ID NO: 9284
  GFR-binding peptide
  MOD_RES (32), (32): Xaa is C or S

SEQ ID NO: 16567 - protein, 31 aa, Artificial Sequence
  GFR-binding peptide
VPTELEPLTMLYYDEYDKVVEQLSNEMVVEG

SEQ ID NO: 16568 - protein, 37 aa, Artificial Sequence; identical to SEQ ID NO: 9285
  GFR-binding peptide
  MOD_RES (4), (5): Xaa is C or S
  MOD_RES (19), (20), (21), (22), (23): Xaa is A or G
  MOD_RES (24), (25), (26), (27): Xaa is A or G or is absent

SEQ ID NO: 16569 - protein, 34 aa, Artificial Sequence
  GFR-binding peptide
  MOD_RES (34), (34): Xaa is C or S
  MOD_RES (14), (15), (16), (17), (18): Xaa is A or G
  MOD_RES (19), (20), (21), (22): Xaa is A or G or is absent
VPTELEPLPMVYYXXXXXXXXXEQLSNEMVVEGX

SEQ ID NO: 16570 - protein, 37 aa, Artificial Sequence
  GFR-binding peptide
  MOD_RES (2), (3), (34), (36): Xaa is C or S
PXXVPQDLEPLPIVYYVGRTPKVEQLSNMVVKSXKXS

SEQ ID NO: 16571 - protein, 41 aa, Artificial Sequence
  GFR-binding peptide
  MOD_RES (5), (39), (41): Xaa is C or S
  MOD_RES (19), (20), (21), (22), (23): Xaa is A or G
  MOD_RES (24), (25), (26), (27): Xaa is A or G or is absent
TKPTXAPTKLEPLPVVYYXXXXXXXXXEQLSNNMVVRSXGX

SEQ ID NO: 16572 - protein, 36 aa, Artificial Sequence
  GFR-binding peptide
  MOD_RES (2), (3), (36): Xaa is C or S
  MOD_RES (17), (18), (19), (20), (21): Xaa is A or G
  MOD_RES (22), (23), (24), (25): Xaa is A or G or is absent
PXXVPQDLSPISILFIXXXXXXXXXYKQYEMVVKSX

SEQ ID NO: 16573 - protein, 35 aa, Artificial Sequence
  GFR-binding peptide
  MOD_RES (4), (5): Xaa is C or S
PKAXXVPTELSPISMLFIDEYDKVVYKQYEEMVVE

SEQ ID NO: 16574 - protein, 40 aa, Artificial Sequence
  GFR-binding peptide
  MOD_RES (4), (5), (37), (39): Xaa is C or S
PPTXXVPTRLEPLPIVYYDSANNVVEQLSNDMVVESXGXR

SEQ ID NO: 16575 - protein, 40 aa, Artificial Sequence; identical to SEQ ID NO: 9287
  GFR-binding peptide
  MOD_RES (5), (6), (38), (40): Xaa is C or S

SEQ ID NO: 16576 - protein, 33 aa, Artificial Sequence
  GFR-binding peptide
  MOD_RES (33), (33): Xaa is C or S
  MOD_RES (14), (15), (16), (17), (18): Xaa is A or G
  MOD_RES (19), (20), (21), (22): Xaa is A or G or is absent
VPQDLSPISILFIXXXXXXXXXYKQYEMVVKSX

SEQ ID NO: 16577 - protein, 35 aa, Artificial Sequence
  GFR-binding peptide
  MOD_RES (1), (2): Xaa is C or S
  MOD_RES (16), (17), (18), (19), (20): Xaa is A or G
  MOD_RES (21), (22), (23), (24): Xaa is A or G or is absent
XXVPTRLSPISILFIXXXXXXXXXYKQYEDMVVES

SEQ ID NO: 16578 - protein, 34 aa, Artificial Sequence
  GFR-binding peptide
  MOD_RES (34), (34): Xaa is C or S
  MOD_RES (14), (15), (16), (17), (18): Xaa is A or G
  MOD_RES (19), (20), (21), (22): Xaa is A or G or is absent
VPTRLNAISILYFXXXXXXXXXLKKYRDMVVESX

SEQ ID NO: 16579 - protein, 34 aa, Artificial Sequence
  GFR-binding peptide
  MOD_RES (34), (34): Xaa is C or S
  MOD_RES (14), (15), (16), (17), (18): Xaa is A or G
  MOD_RES (19), (20), (21), (22): Xaa is A or G or is absent
APTQLEPLPVVYYXXXXXXXXXEQLSNNMVVRAX

SEQ ID NO: 16580 - protein, 37 aa, Artificial Sequence
  GFR-binding peptide
  MOD_RES (4), (5), (36): Xaa is C or S
ASPXXVSQDLEPLPIVYYIGKTPKIEQLSNMIVKSXK

SEQ ID NO: 16581 - protein, 31 aa, Artificial Sequence
  GFR-binding peptide
  MOD_RES (1), (1): Xaa is C or S
XVSQDLSPISILFIIGKTPKIYKQYEMIVKS

SEQ ID NO: 16582 - protein, 42 aa, Artificial Sequence; identical to SEQ ID NO: 9291
  GFR-binding peptide
  MOD_RES (4), (5), (39), (41): Xaa is C or S
  MOD_RES (19), (20), (21), (22), (23): Xaa is A or G
  MOD_RES (24), (25), (26), (27): Xaa is A or G or is absent

SEQ ID NO: 16583 - protein, 39 aa, Artificial Sequence; identical to SEQ ID NO: 9292
  GFR-binding peptide
  MOD_RES (6), (7): Xaa is C or S
  MOD_RES (21), (22), (23), (24), (25): Xaa is A or G
  MOD_RES (26), (27), (28), (29): Xaa is A or G or is absent

SEQ ID NO: 16584 - protein, 44 aa, Artificial Sequence; identical to SEQ ID NO: 9294
  GFR-binding peptide
  MOD_RES (6), (7), (41), (43): Xaa is C or S
  MOD_RES (21), (22), (23), (24), (25): Xaa is A or G
  MOD_RES (26), (27), (28), (29): Xaa is A or G or is absent

SEQ ID NO: 16585 - protein, 35 aa, Artificial Sequence
  GFR-binding peptide
  MOD_RES (32), (34): Xaa is C or S
APTKLSPISVLFIDDSSNVIYKQYENMVVRSXGXH

SEQ ID NO: 16586 - protein, 34 aa, Artificial Sequence
  GFR-binding peptide
  MOD_RES (2), (3): Xaa is C or S
AXXVPTELSPISMLFIDEYDKVVYKQYEEMVVEG

SEQ ID NO: 16587 - protein, 40 aa, Artificial Sequence
  GFR-binding peptide
  MOD_RES (5), (6), (38), (40): Xaa is C or S
IPKAXXVPTELSPISMLFIDENEKVVYKQYEDMVVEGXGX

SEQ ID NO: 16588 - protein, 38 aa, Artificial Sequence
  GFR-binding peptide
  MOD_RES (3), (4), (38): Xaa is C or S
  MOD_RES (18), (19), (20), (21), (22): Xaa is A or G
  MOD_RES (23), (24), (25), (26): Xaa is A or G or is absent
KPXXAPTKLSPISVLFIXXXXXXXXXYKQYENMVVRSX

SEQ ID NO: 16589 - protein, 40 aa, Artificial Sequence
  GFR-binding peptide
  MOD_RES (5), (6), (38), (40): Xaa is C or S
IPKAXXVPTELEPLTMLYYDENEKVVEQLSNDMVVEGXGX

SEQ ID NO: 16590 - protein, 41 aa, Artificial Sequence; identical to SEQ ID NO: 9299
  GFR-binding peptide
  MOD_RES (4), (5), (39), (41): Xaa is C or S
  MOD_RES (19), (20), (21), (22), (23): Xaa is A or G
  MOD_RES (24), (25), (26), (27): Xaa is A or G or is absent

SEQ ID NO: 16591 - protein, 34 aa, Artificial Sequence
  GFR-binding peptide
  MOD_RES (1), (2), (33): Xaa is C or S
XXVPQDLSPISILFIVGRTPKVYKQYEMVVKSXK

SEQ ID NO: 16592 - protein, 42 aa, Artificial Sequence; identical to SEQ ID NO: 9302
  GFR-binding peptide
  MOD_RES (6), (7), (40), (42): Xaa is C or S
  MOD_RES (21), (22), (23), (24), (25): Xaa is A or G
  MOD_RES (26), (27), (28), (29): Xaa is A or G or is absent

SEQ ID NO: 16593 - protein, 39 aa, Artificial Sequence
  GFR-binding peptide
  MOD_RES (7), (7): Xaa is C or S
  MOD_RES (21), (22), (23), (24), (25): Xaa is A or G
  MOD_RES (26), (27), (28), (29): Xaa is A or G or is absent
HVTKPTXAPTKLSPISVLFIXXXXXXXXXYKQYENMVVR

SEQ ID NO: 16594 - protein, 36 aa, Artificial Sequence
  GFR-binding peptide
  MOD_RES (1), (2), (36): Xaa is C or S
  MOD_RES (16), (17), (18), (19), (20): Xaa is A or G
  MOD_RES (21), (22), (23), (24): Xaa is A or G or is absent
XXVPTRLEPLPIVYYXXXXXXXXXEQLSNDMVVESX

SEQ ID NO: 16595 - protein, 37 aa, Artificial Sequence
  GFR-binding peptide
  MOD_RES (3), (4), (37): Xaa is C or S
  MOD_RES (18), (19), (20), (21), (22): Xaa is A or G
  MOD_RES (23), (24), (25), (26): Xaa is A or G or is absent
APXXVPQALSPISILFIXXXXXXXXXYKQYEMIVRSX

SEQ ID NO: 16596 - protein, 43 aa, Artificial Sequence; identical to SEQ ID NO: 9303
  GFR-binding peptide
  MOD_RES (6), (7), (40), (42): Xaa is C or S
  MOD_RES (21), (22), (23), (24), (25): Xaa is A or G
  MOD_RES (26), (27), (28), (29): Xaa is A or G or is absent

SEQ ID NO: 16597 - protein, 33 aa, Artificial Sequence; identical to SEQ ID NO: 9304
  GFR-binding peptide
  MOD_RES (31), (33): Xaa is C or S

SEQ ID NO: 16598 - protein, 37 aa, Artificial Sequence
  GFR-binding peptide
  MOD_RES (3), (37): Xaa is C or S
  MOD_RES (17), (18), (19), (20), (21): Xaa is A or G
  MOD_RES (22), (23), (24), (25): Xaa is A or G or is absent
PTXAPTKLEPLTVLYYXXXXXXXXXEQLSNNMVVRSX

SEQ ID NO: 16599 - protein, 40 aa, Artificial Sequence; identical to SEQ ID NO: 9305
  GFR-binding peptide
  MOD_RES (6), (40): Xaa is C or S
  MOD_RES (20), (21), (22), (23), (24): Xaa is A or G
  MOD_RES (25), (26), (27), (28): Xaa is A or G or is absent

SEQ ID NO: 16600 - protein, 38 aa, Artificial Sequence
  GFR-binding peptide
  MOD_RES (5), (6): Xaa is C or S
  MOD_RES (20), (21), (22), (23), (24): Xaa is A or G
  MOD_RES (25), (26), (27), (28): Xaa is A or G or is absent
IPKAXXVPTELEPLTMLYYXXXXXXXXXEQLSNDMVVE

SEQ ID NO: 16601 - protein, 37 aa, Artificial Sequence
  GFR-binding peptide
  MOD_RES (5), (6): Xaa is C or S
VPKPXXAPTKLSPISVLFIDDSSNVIYKQYENMVVRS

SEQ ID NO: 16602 - protein, 34 aa, Artificial Sequence
  GFR-binding peptide
  MOD_RES (1), (2), (34): Xaa is C or S
XXVPTELEPLPMVYYDENEKVVEQLSNDMVVEGX

SEQ ID NO: 16603 - protein, 41 aa, Artificial Sequence
  GFR-binding peptide
  MOD_RES (6), (38), (40): Xaa is C or S
VTKPTXAPTKLSPISVLFIDDSSNVIYKQYENMVVRSXGXH

SEQ ID NO: 16604 - protein, 39 aa, Artificial Sequence
  GFR-binding peptide
  MOD_RES (5), (6), (38): Xaa is C or S
VPKPXXAPTQLSPISVLFIDDSSNVIYKQYENMVVRAXG

SEQ ID NO: 16605 - protein, 41 aa, Artificial Sequence
  GFR-binding peptide
  MOD_RES (6), (7), (41): Xaa is C or S
  MOD_RES (21), (22), (23), (24), (25): Xaa is A or G
  MOD_RES (26), (27), (28), (29): Xaa is A or G or is absent
TVPKPXXAPTQLSPISVLFIXXXXXXXXXYKQYENMVVRAX

SEQ ID NO: 16606 - protein, 39 aa, Artificial Sequence
  GFR-binding peptide
  MOD_RES (5), (6), (38): Xaa is C or S
VPKPXXAPTKLEPLPVVYYDDSSNVIEQLSNNMVVRSXG

SEQ ID NO: 16607 - protein, 38 aa, Artificial Sequence
  GFR-binding peptide
  MOD_RES (2), (3), (35), (37): Xaa is C or S
PXXAPTKLEPLTVLYYDDSSNVIEQLSNNMVVRSXGXH

SEQ ID NO: 16608 - protein, 39 aa, Artificial Sequence; identical to SEQ ID NO: 9309
  GFR-binding peptide
  MOD_RES (5), (37), (39): Xaa is C or S

SEQ ID NO: 16609 - protein, 38 aa, Artificial Sequence
  GFR-binding peptide
  MOD_RES (1), (2), (36), (38): Xaa is C or S
  MOD_RES (16), (17), (18), (19), (20): Xaa is A or G
  MOD_RES (21), (22), (23), (24): Xaa is A or G or is absent
XXAPTKLSPISVLFIXXXXXXXXXYKQYENMVVRSXGX

SEQ ID NO: 16610 - protein, 38 aa, Artificial Sequence
  GFR-binding peptide
  MOD_RES (5), (6): Xaa is C or S
  MOD_RES (20), (21), (22), (23), (24): Xaa is A or G
  MOD_RES (25), (26), (27), (28): Xaa is A or G or is absent
IPKAXXVPTELEPLPMVYYXXXXXXXXXEQLSNDMVVE

SEQ ID NO: 16611 - protein, 33 aa, Artificial Sequence; identical to SEQ ID NO: 9313
  GFR-binding peptide
  MOD_RES (32), (32): Xaa is C or S

SEQ ID NO: 16612 - protein, 36 aa, Artificial Sequence
  GFR-binding peptide
  MOD_RES (5), (6): Xaa is C or S
TPPTXXVPTRLEPLPIVYYDSANNVVEQLSNDMVVE

SEQ ID NO: 16613 - protein, 34 aa, Artificial Sequence
  GFR-binding peptide
  MOD_RES (1), (1): Xaa is C or S
  MOD_RES (15), (16), (17), (18), (19): Xaa is A or G
  MOD_RES (20), (21), (22), (23): Xaa is A or G or is absent
XVPTRLSPISILFIXXXXXXXXXYKQYEDMVVES

SEQ ID NO: 16614 - protein, 34 aa, Artificial Sequence
  GFR-binding peptide
  MOD_RES (1), (2): Xaa is C or S
  MOD_RES (16), (17), (18), (19), (20): Xaa is A or G
  MOD_RES (21), (22), (23), (24): Xaa is A or G or is absent
XXVPQALSPISILFIXXXXXXXXXYKQYEMIVRS

SEQ ID NO: 16615 - protein, 40 aa, Artificial Sequence
  GFR-binding peptide
  MOD_RES (4), (5), (38), (40): Xaa is C or S
  MOD_RES (19), (20), (21), (22), (23): Xaa is A or G
  MOD_RES (24), (25), (26), (27): Xaa is A or G or is absent
ASPXXVPQDLEPLTILYYXXXXXXXXXEQLSNMVVKSXKX

SEQ ID NO: 16616 - protein, 36 aa, Artificial Sequence; identical to SEQ ID NO: 9316
  GFR-binding peptide
  MOD_RES (3), (4): Xaa is C or S
  MOD_RES (18), (19), (20), (21), (22): Xaa is A or G
  MOD_RES (23), (24), (25), (26): Xaa is A or G or is absent

SEQ ID NO: 16617 - protein, 36 aa, Artificial Sequence
  GFR-binding peptide
  MOD_RES (1), (2), (34), (36): Xaa is C or S
XXVPTRLSAISILYLDSANNVVLKNYQDMVVESXGX

SEQ ID NO: 16618 - protein, 37 aa, Artificial Sequence
  GFR-binding peptide
  MOD_RES (34), (36): Xaa is C or S
  MOD_RES (14), (15), (16), (17), (18): Xaa is A or G
  MOD_RES (19), (20), (21), (22): Xaa is A or G or is absent
VPTELSPISMLFIXXXXXXXXXYKQYEDMVVEGXGXR

SEQ ID NO: 16619 - protein, 37 aa, Artificial Sequence; identical to SEQ ID NO: 9317
  GFR-binding peptide
  MOD_RES (3), (4), (37): Xaa is C or S
  MOD_RES (18), (19), (20), (21), (22): Xaa is A or G
  MOD_RES (23), (24), (25), (26): Xaa is A or G or is absent

SEQ ID NO: 16620 - protein, 39 aa, Artificial Sequence
  GFR-binding peptide
  MOD_RES (4), (38): Xaa is C or S
  MOD_RES (18), (19), (20), (21), (22): Xaa is A or G
  MOD_RES (23), (24), (25), (26): Xaa is A or G or is absent
KPTXAPTKLEPLPVVYYXXXXXXXXXEQLSNNMVVRSXG

SEQ ID NO: 16621 - protein, 41 aa, Artificial Sequence
  GFR-binding peptide
  MOD_RES (4), (5), (39), (41): Xaa is C or S
  MOD_RES (19), (20), (21), (22), (23): Xaa is A or G
  MOD_RES (24), (25), (26), (27): Xaa is A or G or is absent
PKPXXAPTKLEPLTVLYYXXXXXXXXXEQLSNNMVVRSXGX

SEQ ID NO: 16622 - protein, 33 aa, Artificial Sequence; identical to SEQ ID NO: 9322
  GFR-binding peptide
  MOD_RES (1), (32): Xaa is C or S

SEQ ID NO: 16623 - protein, 40 aa, Artificial Sequence; identical to SEQ ID NO: 9323
  GFR-binding peptide
  MOD_RES (5), (6), (40): Xaa is C or S
  MOD_RES (20), (21), (22), (23), (24): Xaa is A or G
  MOD_RES (25), (26), (27), (28): Xaa is A or G or is absent

SEQ ID NO: 16624 - protein, 35 aa, Artificial Sequence
  GFR-binding peptide
  MOD_RES (32), (34): Xaa is C or S
VPTELSPISMLFIDENEKVVYKQYEDMVVEGXGXR

SEQ ID NO: 16625 - protein, 41 aa, Artificial Sequence
  GFR-binding peptide
  MOD_RES (7), (41): Xaa is C or S
  MOD_RES (21), (22), (23), (24), (25): Xaa is A or G
  MOD_RES (26), (27), (28), (29): Xaa is A or G or is absent
HVTKPTXAPTKLSPISVLFIXXXXXXXXXYKQYENMVVRSX

SEQ ID NO: 16626 - protein, 35 aa, Artificial Sequence; identical to SEQ ID NO: 9324
  GFR-binding peptide
  MOD_RES (1), (33), (35): Xaa is C or S

SEQ ID NO: 16627 - protein, 37 aa, Artificial Sequence; identical to SEQ ID NO: 9327
  GFR-binding peptide
  MOD_RES (1), (2), (35), (37): Xaa is C or S
  MOD_RES (16), (17), (18), (19), (20): Xaa is A or G
  MOD_RES (21), (22), (23), (24): Xaa is A or G or is absent

SEQ ID NO: 16628 - protein, 35 aa, Artificial Sequence
  GFR-binding peptide
  MOD_RES (33), (35): Xaa is C or S
  MOD_RES (14), (15), (16), (17), (18): Xaa is A or G
  MOD_RES (19), (20), (21), (22): Xaa is A or G or is absent
VPQDLEPLTILYYXXXXXXXXXEQLSNMVVKSXKX

SEQ ID NO: 16629 - protein, 37 aa, Artificial Sequence; identical to SEQ ID NO: 9328
  GFR-binding peptide
  MOD_RES (3), (4), (36): Xaa is C or S

SEQ ID NO: 16630 - protein, 35 aa, Artificial Sequence
  GFR-binding peptide
  MOD_RES (2), (3): Xaa is C or S
  MOD_RES (17), (18), (19), (20), (21): Xaa is A or G
  MOD_RES (22), (23), (24), (25): Xaa is A or G or is absent
PXXAPTKLEPLPVVYYXXXXXXXXXEQLSNNMVVR

SEQ ID NO: 16631 - protein, 32 aa, Artificial Sequence
  GFR-binding peptide
  MOD_RES (32), (32): Xaa is C or S
VPTRLEPLTILYYDSANNVVEQLSNDMVVESX

SEQ ID NO: 16632 - protein, 36 aa, Artificial Sequence; identical to SEQ ID NO: 9330
  GFR-binding peptide
  MOD_RES (34), (36): Xaa is C or S
  MOD_RES (14), (15), (16), (17), (18): Xaa is A or G
  MOD_RES (19), (20), (21), (22): Xaa is A or G or is absent

SEQ ID NO: 16633 - protein, 33 aa, Artificial Sequence; identical to SEQ ID NO: 9331
  GFR-binding peptide
  MOD_RES (14), (15), (16), (17), (18): Xaa is A or G
  MOD_RES (19), (20), (21), (22): Xaa is A or G or is absent

SEQ ID NO: 16634 - protein, 35 aa, Artificial Sequence; identical to SEQ ID NO: 9332
  GFR-binding peptide
  MOD_RES (3), (4), (35): Xaa is C or S

SEQ ID NO: 16635 - protein, 38 aa, Artificial Sequence
  GFR-binding peptide
  MOD_RES (5), (6): Xaa is C or S
  MOD_RES (20), (21), (22), (23), (24): Xaa is A or G
  MOD_RES (25), (26), (27), (28): Xaa is A or G or is absent
TPPTXXVPTRLEPLPIVYYXXXXXXXXXEQLSNDMVVE

SEQ ID NO: 16636 - protein, 39 aa, Artificial Sequence
  GFR-binding peptide
  MOD_RES (5), (6): Xaa is C or S
  MOD_RES (20), (21), (22), (23), (24): Xaa is A or G
  MOD_RES (25), (26), (27), (28): Xaa is A or G or is absent
VPKPXXAPTKLSPISVLFIXXXXXXXXXYKQYENMVVRS

SEQ ID NO: 16637 - protein, 43 aa, Artificial Sequence; identical to SEQ ID NO: 9334
  GFR-binding peptide
  MOD_RES (6), (7), (41), (43): Xaa is C or S
  MOD_RES (21), (22), (23), (24), (25): Xaa is A or G
  MOD_RES (26), (27), (28), (29): Xaa is A or G or is absent

SEQ ID NO: 16638 - protein, 35 aa, Artificial Sequence; identical to SEQ ID NO: 9335
  GFR-binding peptide
  MOD_RES (2), (3), (34): Xaa is C or S

SEQ ID NO: 16639 - protein, 37 aa, Artificial Sequence
  GFR-binding peptide
  MOD_RES (6), (7): Xaa is C or S
STPPTXXVPTRLNAISILYFDSANNVVLKKYRDMVVE

SEQ ID NO: 16640 - protein, 36 aa, Artificial Sequence; identical to SEQ ID NO: 9337
  GFR-binding peptide
  MOD_RES (2), (3): Xaa is C or S
  MOD_RES (17), (18), (19), (20), (21): Xaa is A or G
  MOD_RES (22), (23), (24), (25): Xaa is A or G or is absent

SEQ ID NO: 16641 - protein, 35 aa, Artificial Sequence
  GFR-binding peptide
  MOD_RES (1), (35): Xaa is C or S
  MOD_RES (15), (16), (17), (18), (19): Xaa is A or G
  MOD_RES (20), (21), (22), (23): Xaa is A or G or is absent
XVPTELSPISMLFIXXXXXXXXXYKQYEDMVVEGX

SEQ ID NO: 16642 - protein, 33 aa, Artificial Sequence
  GFR-binding peptide
  MOD_RES (1), (1): Xaa is C or S
  MOD_RES (15), (16), (17), (18), (19): Xaa is A or G
  MOD_RES (20), (21), (22), (23): Xaa is A or G or is absent
XAPTQLEPLPVVYYXXXXXXXXXEQLSNNMVVR

SEQ ID NO: 16643 - protein, 33 aa, Artificial Sequence; identical to SEQ ID NO: 9341
  GFR-binding peptide
  MOD_RES (14), (15), (16), (17), (18): Xaa is A or G
  MOD_RES (19), (20), (21), (22): Xaa is A or G or is absent

SEQ ID NO: 16644 - protein, 31 aa, Artificial Sequence; identical to SEQ ID NO: 9343
  GFR-binding peptide

SEQ ID NO: 16645 - protein, 38 aa, Artificial Sequence
  GFR-binding peptide
  MOD_RES (2), (3), (37): Xaa is C or S
  MOD_RES (17), (18), (19), (20), (21): Xaa is A or G
  MOD_RES (22), (23), (24), (25): Xaa is A or G or is absent
PXXAPTQLEPLPVVYYXXXXXXXXXEQLSNNMVVRAXG

SEQ ID NO: 16646 - protein, 41 aa, Artificial Sequence
  GFR-binding peptide
  MOD_RES (6), (7), (39), (41): Xaa is C or S
TVPKPXXAPTQLEPLPVVYYDDSSNVIEQLSNNMVVRAXGX

SEQ ID NO: 16647 - protein, 40 aa, Artificial Sequence
  GFR-binding peptide
  MOD_RES (5), (6), (40): Xaa is C or S
  MOD_RES (20), (21), (22), (23), (24): Xaa is A or G
  MOD_RES (25), (26), (27), (28): Xaa is A or G or is absent
VPKPXXAPTQLEPLTVLYYXXXXXXXXXEQLSNNMVVRAX

SEQ ID NO: 16648 - protein, 40 aa, Artificial Sequence
  GFR-binding peptide
  MOD_RES (5), (6), (38), (40): Xaa is C or S
VPKPXXAPTKLSPISVLFIDDSSNVIYKQYENMVVRSXGX

SEQ ID NO: 16649 - protein, 39 aa, Artificial Sequence
  GFR-binding peptide
  MOD_RES (3), (4), (36), (38): Xaa is C or S
KPXXAPTKLEPLTVLYYDDSSNVIEQLSNNMVVRSXGXH

SEQ ID NO: 16650 - protein, 37 aa, Artificial Sequence; identical to SEQ ID NO: 9347
  GFR-binding peptide
  MOD_RES (34), (36): Xaa is C or S
  MOD_RES (14), (15), (16), (17), (18): Xaa is A or G
  MOD_RES (19), (20), (21), (22): Xaa is A or G or is absent

SEQ ID NO: 16651 - protein, 35 aa, Artificial Sequence; identical to SEQ ID NO: 9350
  GFR-binding peptide
  MOD_RES (1), (35): Xaa is C or S
  MOD_RES (15), (16), (17), (18), (19): Xaa is A or G
  MOD_RES (20), (21), (22), (23): Xaa is A or G or is absent

SEQ ID NO: 16652 - protein, 33 aa, Artificial Sequence
  GFR-binding peptide
  MOD_RES (2), (3): Xaa is C or S
PXXAPTQLEPLPVVYYDDSSNVIEQLSNNMVVR

SEQ ID NO: 16653 - protein, 39 aa, Artificial Sequence; identical to SEQ ID NO: 9352
  GFR-binding peptide
  MOD_RES (5), (6), (38): Xaa is C or S

SEQ ID NO: 16654 - protein, 36 aa, Artificial Sequence; identical to SEQ ID NO: 9354
  GFR-binding peptide
  MOD_RES (3), (4): Xaa is C or S
  MOD_RES (18), (19), (20), (21), (22): Xaa is A or G
  MOD_RES (23), (24), (25), (26): Xaa is A or G or is absent

SEQ ID NO: 16655 - protein, 40 aa, Artificial Sequence
  GFR-binding peptide
  MOD_RES (5), (6), (38), (40): Xaa is C or S
VPKPXXAPTQLEPLTVLYYDDSSNVIEQLSNNMVVRAXGX

SEQ ID NO: 16656 - protein, 39 aa, Artificial Sequence
  GFR-binding peptide
  MOD_RES (6), (7), (39): Xaa is C or S
YVPKPXXAPTKLEPLPVVYYDDSSNVIEQLSNNMVVRSX

SEQ ID NO: 16657 - protein, 39 aa, Artificial Sequence
  GFR-binding peptide
  MOD_RES (5), (6), (38): Xaa is C or S
VPKPXXAPTKLSPISVLFIDDSSNVIYKQYENMVVRSXG

SEQ ID NO: 16658 - protein, 35 aa, Artificial Sequence; identical to SEQ ID NO: 9359
  GFR-binding peptide
  MOD_RES (4), (5): Xaa is C or S

SEQ ID NO: 16659 - protein, 36 aa, Artificial Sequence
  GFR-binding peptide
  MOD_RES (1), (2), (33), (35): Xaa is C or S
XXVPQALEPLTILYYVGRKPKVEQLSNMIVRSXKXS

SEQ ID NO: 16660 - protein, 38 aa, Artificial Sequence; identical to SEQ ID NO: 9361
  GFR-binding peptide
  MOD_RES (3), (4), (38): Xaa is C or S
  MOD_RES (18), (19), (20), (21), (22): Xaa is A or G
  MOD_RES (23), (24), (25), (26): Xaa is A or G or is absent

SEQ ID NO: 16661 - protein, 36 aa, Artificial Sequence
  GFR-binding peptide
  MOD_RES (1), (33), (35): Xaa is C or S
XVPTELEPLPMVYYDENEKVVEQLSNDMVVEGXGXR

SEQ ID NO: 16662 - protein, 38 aa, Artificial Sequence; identical to SEQ ID NO: 9364
  GFR-binding peptide
  MOD_RES (5), (6), (37): Xaa is C or S

SEQ ID NO: 16663 - protein, 42 aa, Artificial Sequence
  GFR-binding peptide
  MOD_RES (4), (5), (39), (41): Xaa is C or S
  MOD_RES (19), (20), (21), (22), (23): Xaa is A or G
  MOD_RES (24), (25), (26), (27): Xaa is A or G or is absent
PKPXXAPTQLEPLPVVYYXXXXXXXXXEQLSNNMVVRAXGXH

SEQ ID NO: 16664 - protein, 36 aa, Artificial Sequence
  GFR-binding peptide
  MOD_RES (1), (2), (33), (35): Xaa is C or S
XXVSQDLSPISILFIIGKTPKIYKQYEMIVKSXKXS

SEQ ID NO: 16665 - protein, 40 aa, Artificial Sequence; identical to SEQ ID NO: 9366
  GFR-binding peptide
  MOD_RES (2), (3), (37), (39): Xaa is C or S
  MOD_RES (17), (18), (19), (20), (21): Xaa is A or G
  MOD_RES (22), (23), (24), (25): Xaa is A or G or is absent

SEQ ID NO: 16666 - protein, 38 aa, Artificial Sequence
  GFR-binding peptide
  MOD_RES (3), (4), (36), (38): Xaa is C or S
PTXXVPTRLEPLTILYYDSANNVVEQLSNDMVVESXGX

SEQ ID NO: 16667 - protein, 38 aa, Artificial Sequence
  GFR-binding peptide
  MOD_RES (5), (6): Xaa is C or S
  MOD_RES (20), (21), (22), (23), (24): Xaa is A or G
  MOD_RES (25), (26), (27), (28): Xaa is A or G or is absent
VPKPXXAPTQLEPLTVLYYXXXXXXXXXEQLSNNMVVR

SEQ ID NO: 16668 - protein, 39 aa, Artificial Sequence
  GFR-binding peptide
  MOD_RES (4), (5), (37), (39): Xaa is C or S
PPTXXVPTRLEPLTILYYDSANNVVEQLSNDMVVESXGX

SEQ ID NO: 16669 - protein, 40 aa, Artificial Sequence
  GFR-binding peptide
  MOD_RES (2), (3), (37), (39): Xaa is C or S
  MOD_RES (17), (18), (19), (20), (21): Xaa is A or G
  MOD_RES (22), (23), (24), (25): Xaa is A or G or is absent
PXXAPTQLSPISVLFIXXXXXXXXXYKQYENMVVRAXGXH

SEQ ID NO: 16670 - protein, 44 aa, Artificial Sequence
  GFR-binding peptide
  MOD_RES (7), (41), (43): Xaa is C or S
  MOD_RES (21), (22), (23), (24), (25): Xaa is A or G
  MOD_RES (26), (27), (28), (29): Xaa is A or G or is absent
HVTKPTXAPTKLSPISVLFIXXXXXXXXXYKQYENMVVRSXGXH

SEQ ID NO: 16671 - protein, 33 aa, Artificial Sequence
  GFR-binding peptide
  MOD_RES (32), (32): Xaa is C or S
VPTELEPLTMLYYDENEKVVEQLSNDMVVEGXG

SEQ ID NO: 16672 - protein, 39 aa, Artificial Sequence; identical to SEQ ID NO: 9373
  GFR-binding peptide
  MOD_RES (4), (5), (36), (38): Xaa is C or S

SEQ ID NO: 16673 - protein, 41 aa, Artificial Sequence
  GFR-binding peptide
  MOD_RES (3), (4), (38), (40): Xaa is C or S
  MOD_RES (18), (19), (20), (21), (22): Xaa is A or G
  MOD_RES (23), (24), (25), (26): Xaa is A or G or is absent
KPXXAPTKLSPISVLFIXXXXXXXXXYKQYENMVVRSXGXH

SEQ ID NO: 16674 - protein, 42 aa, Artificial Sequence
  GFR-binding peptide
  MOD_RES (4), (5), (39), (41): Xaa is C or S
  MOD_RES (19), (20), (21), (22), (23): Xaa is A or G
  MOD_RES (24), (25), (26), (27): Xaa is A or G or is absent
PKAXXVPTELEPLTMLYYXXXXXXXXXEQLSNDMVVEGXGXR

SEQ ID NO: 16675 - protein, 40 aa, Artificial Sequence
  GFR-binding peptide
  MOD_RES (5), (6), (40): Xaa is C or S
  MOD_RES (20), (21), (22), (23), (24): Xaa is A or G
  MOD_RES (25), (26), (27), (28): Xaa is A or G or is absent
IPKAXXVPTELSPISMLFIXXXXXXXXXYKQYEDMVVEGX

SEQ ID NO: 16676 - protein, 36 aa, Artificial Sequence
  GFR-binding peptide
  MOD_RES (33), (35): Xaa is C or S
  MOD_RES (14), (15), (16), (17), (18): Xaa is A or G
  MOD_RES (19), (20), (21), (22): Xaa is A or G or is absent
VPQDLEPLTILYYXXXXXXXXXEQLSNMVVKSXKXS

SEQ ID NO: 16677 - protein, 33 aa, Artificial Sequence
  GFR-binding peptide
  MOD_RES (1), (2): Xaa is C or S
XXVPTELSPISMLFIDENEKVVYKQYEDMVVEG

SEQ ID NO: 16678 - protein, 33 aa, Artificial Sequence
  GFR-binding peptide
  MOD_RES (1), (2), (33): Xaa is C or S
XXVPQDLEPLPIVYYVGRTPKVEQLSNMVVKSX

SEQ ID NO: 16679 - protein, 35 aa, Artificial Sequence
  GFR-binding peptide
  MOD_RES (3), (4), (35): Xaa is C or S
SPXXVPQDLSPISILFIVGRTPKVYKQYEMVVKSX

SEQ ID NO: 16680 - protein, 41 aa, Artificial Sequence
  GFR-binding peptide
  MOD_RES (5), (6), (38), (40): Xaa is C or S
IPKAXXVPTELEPLPMVYYDEYDKVVEQLSNEMVVEGXGXR

SEQ ID NO: 16681 - protein, 37 aa, Artificial Sequence; identical to SEQ ID NO: 9377
  GFR-binding peptide
  MOD_RES (1), (34), (36): Xaa is C or S
  MOD_RES (15), (16), (17), (18), (19): Xaa is A or G
  MOD_RES (20), (21), (22), (23): Xaa is A or G or is absent

SEQ ID NO: 16682 - protein, 37 aa, Artificial Sequence; identical to SEQ ID NO: 9380
  GFR-binding peptide
  MOD_RES (3), (4), (37): Xaa is C or S
  MOD_RES (18), (19), (20), (21), (22): Xaa is A or G
  MOD_RES (23), (24), (25), (26): Xaa is A or G or is absent

SEQ ID NO: 16683 - protein, 42 aa, Artificial Sequence; identical to SEQ ID NO: 9382
  GFR-binding peptide
  MOD_RES (5), (6), (39), (41): Xaa is C or S
  MOD_RES (20), (21), (22), (23), (24): Xaa is A or G
  MOD_RES (25), (26), (27), (28): Xaa is A or G or is absent

SEQ ID NO: 16684 - protein, 32 aa, Artificial Sequence
  GFR-binding peptide
  MOD_RES (14), (15), (16), (17), (18): Xaa is A or G
  MOD_RES (19), (20), (21), (22): Xaa is A or G or is absent
VPTRLEPLPIVYYXXXXXXXXXEQLSNDMVVE

SEQ ID NO: 16685 - protein, 38 aa, Artificial Sequence
  GFR-binding peptide
  MOD_RES (5), (5): Xaa is C or S
  MOD_RES (19), (20), (21), (22), (23): Xaa is A or G
  MOD_RES (24), (25), (26), (27): Xaa is A or G or is absent
TKPTXAPTKLSPISVLFIXXXXXXXXXYKQYENMVVRS

SEQ ID NO: 16686 - protein, 32 aa, Artificial Sequence; identical to SEQ ID NO: 9383
  GFR-binding peptide
  MOD_RES (14), (15), (16), (17), (18): Xaa is A or G
  MOD_RES (19), (20), (21), (22): Xaa is A or G or is absent

SEQ ID NO: 16687 - protein, 32 aa, Artificial Sequence
  GFR-binding peptide
  MOD_RES (1), (2): Xaa is C or S
XXVPTRLSAISILYLDSANNVVLKNYQDMVVE

SEQ ID NO: 16688 - protein, 40 aa, Artificial Sequence
  GFR-binding peptide
  MOD_RES (5), (39): Xaa is C or S
  MOD_RES (19), (20), (21), (22), (23): Xaa is A or G
  MOD_RES (24), (25), (26), (27): Xaa is A or G or is absent
TKPTXAPTKLEPLPVVYYXXXXXXXXXEQLSNNMVVRSXG

SEQ ID NO: 16689 - protein, 39 aa, Artificial Sequence; identical to SEQ ID NO: 9387
  GFR-binding peptide
  MOD_RES (4), (5), (39): Xaa is C or S
  MOD_RES (19), (20), (21), (22), (23): Xaa is A or G
  MOD_RES (24), (25), (26), (27): Xaa is A or G or is absent

SEQ ID NO: 16690 - protein, 38 aa, Artificial Sequence; identical to SEQ ID NO: 9390
  GFR-binding peptide
  MOD_RES (1), (2), (35), (37): Xaa is C or S
  MOD_RES (16), (17), (18), (19), (20): Xaa is A or G
  MOD_RES (21), (22), (23), (24): Xaa is A or G or is absent

SEQ ID NO: 16691 - protein, 40 aa, Artificial Sequence
  GFR-binding peptide
  MOD_RES (5), (6), (38), (40): Xaa is C or S
VPKPXXAPTQLSPISVLFIDDSSNVIYKQYENMVVRAXGX

SEQ ID NO: 16692 - protein, 35 aa, Artificial Sequence
  GFR-binding peptide
  MOD_RES (2), (3): Xaa is C or S
  MOD_RES (17), (18), (19), (20), (21): Xaa is A or G
  MOD_RES (22), (23), (24), (25): Xaa is A or G or is absent
PXXVSQDLSPISILFIXXXXXXXXXYKQYEMIVKS

SEQ ID NO: 16693 - protein, 33 aa, Artificial Sequence
  GFR-binding peptide
  MOD_RES (2), (3): Xaa is C or S
PXXAPTKLEPLTVLYYDDSSNVIEQLSNNMVVR

SEQ ID NO: 16694 - protein, 39 aa, Artificial Sequence
  GFR-binding peptide
  MOD_RES (6), (7), (39): Xaa is C or S
TVPKPXXAPTQLSPISVLFIDDSSNVIYKQYENMVVRAX

SEQ ID NO: 16695 - protein, 38 aa, Artificial Sequence; identical to SEQ ID NO: 9397
  GFR-binding peptide
  MOD_RES (5), (6): Xaa is C or S
  MOD_RES (20), (21), (22), (23), (24): Xaa is A or G
  MOD_RES (25), (26), (27), (28): Xaa is A or G or is absent

SEQ ID NO: 16696 - protein, 39 aa, Artificial Sequence
  GFR-binding peptide
  MOD_RES (6), (7): Xaa is C or S
  MOD_RES (21), (22), (23), (24), (25): Xaa is A or G
  MOD_RES (26), (27), (28), (29): Xaa is A or G or is absent
TVPKPXXAPTQLEPLTVLYYXXXXXXXXXEQLSNNMVVR

SEQ ID NO: 16697 - protein, 34 aa, Artificial Sequence; identical to SEQ ID NO: 9398
  GFR-binding peptide
  MOD_RES (1), (2): Xaa is C or S
  MOD_RES (16), (17), (18), (19), (20): Xaa is A or G
  MOD_RES (21), (22), (23), (24): Xaa is A or G or is absent

SEQ ID NO: 16698 - protein, 33 aa, Artificial Sequence
  GFR-binding peptide
  MOD_RES (1), (33): Xaa is C or S
XAPTKLSPISVLFIDDSSNVIYKQYENMVVRSX

SEQ ID NO: 16699 - protein, 39 aa, Artificial Sequence; identical to SEQ ID NO: 9400
  GFR-binding peptide
  MOD_RES (4), (5), (39): Xaa is C or S
  MOD_RES (19), (20), (21), (22), (23): Xaa is A or G
  MOD_RES (24), (25), (26), (27): Xaa is A or G or is absent

SEQ ID NO: 16700 - protein, 37 aa, Artificial Sequence
  GFR-binding peptide
  MOD_RES (2), (3), (35), (37): Xaa is C or S
AXXVPTELEPLTMLYYDENEKVVEQLSNDMVVEGXGX

SEQ ID NO: 16701 - protein, 35 aa, Artificial Sequence
  GFR-binding peptide
  MOD_RES (34), (34): Xaa is C or S
  MOD_RES (14), (15), (16), (17), (18): Xaa is A or G
  MOD_RES (19), (20), (21), (22): Xaa is A or G or is absent
APTQLSPISVLFIXXXXXXXXXYKQYENMVVRAXG

SEQ ID NO: 16702 - protein, 38 aa, Artificial Sequence; identical to SEQ ID NO: 9401
  GFR-binding peptide
  MOD_RES (4), (5), (38): Xaa is C or S
  MOD_RES (19), (20), (21), (22), (23): Xaa is A or G
  MOD_RES (24), (25), (26), (27): Xaa is A or G or is absent

SEQ ID NO: 16703 - protein, 39 aa, Artificial Sequence
  GFR-binding peptide
  MOD_RES (5), (6), (39): Xaa is C or S
  MOD_RES (20), (21), (22), (23), (24): Xaa is A or G
  MOD_RES (25), (26), (27), (28): Xaa is A or G or is absent
SAAPXXVPQALEPLTILYYXXXXXXXXXEQLSNMIVRSX

SEQ ID NO: 16704 - protein, 40 aa, Artificial Sequence
  GFR-binding peptide
  MOD_RES (4), (5), (37), (39): Xaa is C or S
PKPXXAPTQLSPISVLFIDDSSNVIYKQYENMVVRAXGXH

SEQ ID NO: 16705 - protein, 38 aa, Artificial Sequence
  GFR-binding peptide
  MOD_RES (3), (4), (38): Xaa is C or S
  MOD_RES (18), (19), (20), (21), (22): Xaa is A or G
  MOD_RES (23), (24), (25), (26): Xaa is A or G or is absent
PTXXVPTRLSAISILYLXXXXXXXXXLKNYQDMVVESX

SEQ ID NO: 16706 - protein, 35 aa, Artificial Sequence
  GFR-binding peptide
  MOD_RES (3), (4): Xaa is C or S
KAXXVPTELEPLPMVYYDEYDKVVEQLSNEMVVEG

SEQ ID NO: 16707 - protein, 34 aa, Artificial Sequence; identical to SEQ ID NO: 9404
  GFR-binding peptide
  MOD_RES (1), (2), (34): Xaa is C or S

SEQ ID NO: 16708 - protein, 33 aa, Artificial Sequence
  GFR-binding peptide
  MOD_RES (32), (32): Xaa is C or S
APTKLEPLTVLYYDDSSNVIEQLSNNMVVRSXG

SEQ ID NO: 16709 - protein, 35 aa, Artificial Sequence
  GFR-binding peptide
  MOD_RES (2), (3): Xaa is C or S
  MOD_RES (17), (18), (19), (20), (21): Xaa is A or G
  MOD_RES (22), (23), (24), (25): Xaa is A or G or is absent
AXXVPTELSPISMLFIXXXXXXXXXYKQYEDMVVE

SEQ ID NO: 16710 - protein, 41 aa, Artificial Sequence
  GFR-binding peptide
  MOD_RES (5), (6), (38), (40): Xaa is C or S
TPPTXXVPTRLSAISILYLDSANNVVLKNYQDMVVESXGXR

SEQ ID NO: 16711 - protein, 42 aa, Artificial Sequence
  GFR-binding peptide
  MOD_RES (6), (7), (39), (41): Xaa is C or S
SIPKAXXVPTELSPISMLFIDEYDKVVYKQYEEMVVEGXGXR

SEQ ID NO: 16712 - protein, 37 aa, Artificial Sequence; identical to SEQ ID NO: 9406
  GFR-binding peptide
  MOD_RES (4), (5), (36): Xaa is C or S

SEQ ID NO: 16713 - protein, 38 aa, Artificial Sequence
  GFR-binding peptide
  MOD_RES (5), (6): Xaa is C or S
  MOD_RES (20), (21), (22), (23), (24): Xaa is A or G
  MOD_RES (25), (26), (27), (28): Xaa is A or G or is absent
SASPXXVSQDLEPLPIVYYXXXXXXXXXEQLSNMIVKS

SEQ ID NO: 16714 - protein, 37 aa, Artificial Sequence
  GFR-binding peptide
  MOD_RES (2), (3), (37): Xaa is C or S
  MOD_RES (17), (18), (19), (20), (21): Xaa is A or G
  MOD_RES (22), (23), (24), (25): Xaa is A or G or is absent
TXXVPTRLEPLTILYYXXXXXXXXXEQLSNDMVVESX

SEQ ID NO: 16715 - protein, 40 aa, Artificial Sequence
  GFR-binding peptide
  MOD_RES (6), (7), (39): Xaa is C or S
STPPTXXVPTRLSAISILYLDSANNVVLKNYQDMVVESXG

SEQ ID NO: 16716 - protein, 43 aa, Artificial Sequence
  GFR-binding peptide
  MOD_RES (6), (7), (41), (43): Xaa is C or S
  MOD_RES (21), (22), (23), (24), (25): Xaa is A or G
  MOD_RES (26), (27), (28), (29): Xaa is A or G or is absent
KIPKAXXVPTELSPISMLFIXXXXXXXXXYKQYEDMVVEGXGX

SEQ ID NO: 16717 - protein, 36 aa, Artificial Sequence
  GFR-binding peptide
  MOD_RES (3), (4): Xaa is C or S
  MOD_RES (18), (19), (20), (21), (22): Xaa is A or G
  MOD_RES (23), (24), (25), (26): Xaa is A or G or is absent
KAXXVPTELSPISMLFIXXXXXXXXXYKQYEDMVVE

SEQ ID NO: 16718 - protein, 32 aa, Artificial Sequence; identical to SEQ ID NO: 9416
  GFR-binding peptide
  MOD_RES (1), (32): Xaa is C or S

SEQ ID NO: 16719 - protein, 40 aa, Artificial Sequence; identical to SEQ ID NO: 9419
  GFR-binding peptide
  MOD_RES (6), (38), (40): Xaa is C or S

SEQ ID NO: 16720 - protein, 33 aa, Artificial Sequence
  GFR-binding peptide
  MOD_RES (1), (1): Xaa is C or S
  MOD_RES (15), (16), (17), (18), (19): Xaa is A or G
  MOD_RES (20), (21), (22), (23): Xaa is A or G or is absent
XVPTRLEPLTILYYXXXXXXXXXEQLSNDMVVE

SEQ ID NO: 16721 - protein, 36 aa, Artificial Sequence; identical to SEQ ID NO: 9420
  GFR-binding peptide
  MOD_RES (2), (3): Xaa is C or S
  MOD_RES (17), (18), (19), (20), (21): Xaa is A or G
  MOD_RES (22), (23), (24), (25): Xaa is A or G or is absent

SEQ ID NO: 16722 - protein, 32 aa, Artificial Sequence
  GFR-binding peptide
  MOD_RES (32), (32): Xaa is C or S
APTKLSPISVLFIDDSSNVIYKQYENMVVRSX

SEQ ID NO: 16723 - protein, 43 aa, Artificial Sequence
  GFR-binding peptide
  MOD_RES (5), (6), (40), (42): Xaa is C or S
  MOD_RES (20), (21), (22), (23), (24): Xaa is A or G
  MOD_RES (25), (26), (27), (28): Xaa is A or G or is absent
VPKPXXAPTQLEPLTVLYYXXXXXXXXXEQLSNNMVVRAXGXH

SEQ ID NO: 16724 - protein, 37 aa, Artificial Sequence
  GFR-binding peptide
  MOD_RES (3), (35), (37): Xaa is C or S
PTXAPTKLEPLPVVYYDDSSNVIEQLSNNMVVRSXGX

SEQ ID NO: 16725 - protein, 34 aa, Artificial Sequence
  GFR-binding peptide
  MOD_RES (1), (2), (34): Xaa is C or S
XXAPTQLEPLTVLYYDDSSNVIEQLSNNMVVRAX

SEQ ID NO: 16726 - protein, 39 aa, Artificial Sequence
  GFR-binding peptide
  MOD_RES (5), (6), (39): Xaa is C or S
  MOD_RES (20), (21), (22), (23), (24): Xaa is A or G
  MOD_RES (25), (26), (27), (28): Xaa is A or G or is absent
SAAPXXVPQALSPISILFIXXXXXXXXXYKQYEMIVRSX

SEQ ID NO: 16727 - protein, 41 aa, Artificial Sequence
  GFR-binding peptide
  MOD_RES (7), (39), (41): Xaa is C or S
HVTKPTXAPTKLSPISVLFIDDSSNVIYKQYENMVVRSXGX

SEQ ID NO: 16728 - protein, 37 aa, Artificial Sequence
  GFR-binding peptide
  MOD_RES (1), (2), (36): Xaa is C or S
  MOD_RES (16), (17), (18), (19), (20): Xaa is A or G
  MOD_RES (21), (22), (23), (24): Xaa is A or G or is absent
XXAPTKLEPLTVLYYXXXXXXXXXEQLSNNMVVRSXG

SEQ ID NO: 16729 - protein, 32 aa, Artificial Sequence; identical to SEQ ID NO: 9429
  GFR-binding peptide
  MOD_RES (1), (32): Xaa is C or S

SEQ ID NO: 16730 - protein, 40 aa, Artificial Sequence
  GFR-binding peptide
  MOD_RES (6), (7), (40): Xaa is C or S
  MOD_RES (21), (22), (23), (24), (25): Xaa is A or G
  MOD_RES (26), (27), (28), (29): Xaa is A or G or is absent
ASASPXXVSQDLSPISILFIXXXXXXXXXYKQYEMIVKSX

SEQ ID NO: 16731 - protein, 38 aa, Artificial Sequence; identical to SEQ ID NO: 9431
  GFR-binding peptide
  MOD_RES (1), (35), (37): Xaa is C or S
  MOD_RES (15), (16), (17), (18), (19): Xaa is A or G
  MOD_RES (20), (21), (22), (23): Xaa is A or G or is absent

SEQ ID NO: 16732 - protein, 31 aa, Artificial Sequence
  GFR-binding peptide
APTQLEPLTVLYYDDSSNVIEQLSNNMVVRA

SEQ ID NO: 16733 - protein, 38 aa, Artificial Sequence
  GFR-binding peptide
  MOD_RES (6), (7): Xaa is C or S
YVPKPXXAPTKLEPLTVLYYDDSSNVIEQLSNNMVVRS

SEQ ID NO: 16734 - protein, 39 aa, Artificial Sequence
  GFR-binding peptide
  MOD_RES (4), (5), (39): Xaa is C or S
  MOD_RES (19), (20), (21), (22), (23): Xaa is A or G
  MOD_RES (24), (25), (26), (27): Xaa is A or G or is absent
PKPXXAPTKLEPLPVVYYXXXXXXXXXEQLSNNMVVRSX

SEQ ID NO: 16735 - protein, 38 aa, Artificial Sequence; identical to SEQ ID NO: 9433
  GFR-binding peptide
  MOD_RES (1), (2), (35), (37): Xaa is C or S
  MOD_RES (16), (17), (18), (19), (20): Xaa is A or G
  MOD_RES (21), (22), (23), (24): Xaa is A or G or is absent

SEQ ID NO: 16736 - protein, 36 aa, Artificial Sequence; identical to SEQ ID NO: 9434
  GFR-binding peptide
  MOD_RES (1), (2), (36): Xaa is C or S
  MOD_RES (16), (17), (18), (19), (20): Xaa is A or G
  MOD_RES (21), (22), (23), (24): Xaa is A or G or is absent

SEQ ID NO: 16737 - protein, 38 aa, Artificial Sequence
  GFR-binding peptide
  MOD_RES (3), (4), (37): Xaa is C or S
  MOD_RES (18), (19), (20), (21), (22): Xaa is A or G
  MOD_RES (23), (24), (25), (26): Xaa is A or G or is absent
SPXXVPQDLEPLPIVYYXXXXXXXXXEQLSNMVVKSXK

SEQ ID NO: 16738 - protein, 41 aa, Artificial Sequence
  GFR-binding peptide
  MOD_RES (6), (7), (39), (41): Xaa is C or S
STPPTXXVPTRLNAISILYFDSANNVVLKKYRDMVVESXGX

SEQ ID NO: 16739 - protein, 43 aa, Artificial Sequence
  GFR-binding peptide
  MOD_RES (5), (6), (40), (42): Xaa is C or S
  MOD_RES (20), (21), (22), (23), (24): Xaa is A or G
  MOD_RES (25), (26), (27), (28): Xaa is A or G or is absent
TPPTXXVPTRLSPISILFIXXXXXXXXXYKQYEDMVVESXGXR

SEQ ID NO: 16740 - protein, 31 aa, Artificial Sequence; identical to SEQ ID NO: 9440
  GFR-binding peptide
  MOD_RES (31), (31): Xaa is C or S

SEQ ID NO: 16741 - protein, 34 aa, Artificial Sequence; identical to SEQ ID NO: 9443
  GFR-binding peptide
  MOD_RES (31), (33): Xaa is C or S

SEQ ID NO: 16742 - protein, 37 aa, Artificial Sequence
  GFR-binding peptide
  MOD_RES (1), (2), (34), (36): Xaa is C or S
XXAPTQLSPISVLFIDDSSNVIYKQYENMVVRAXGXH

SEQ ID NO: 16743 - protein, 30 aa, Artificial Sequence; identical to SEQ ID NO: 9444
  GFR-binding peptide

SEQ ID NO: 16744 - protein, 35 aa, Artificial Sequence
  GFR-binding peptide
  MOD_RES (34), (34): Xaa is C or S
  MOD_RES (14), (15), (16), (17), (18): Xaa is A or G
  MOD_RES (19), (20), (21), (22): Xaa is A or G or is absent
VPTRLEPLPIVYYXXXXXXXXXEQLSNDMVVESXG

SEQ ID NO: 16745 - protein, 41 aa, Artificial Sequence; identical to SEQ ID NO: 9445
  GFR-binding peptide
  MOD_RES (3), (4), (38), (40): Xaa is C or S
  MOD_RES (18), (19), (20), (21), (22): Xaa is A or G
  MOD_RES (23), (24), (25), (26): Xaa is A or G or is absent

SEQ ID NO: 16746 - protein, 36 aa, Artificial Sequence
  GFR-binding peptide
  MOD_RES (2), (3), (35): Xaa is C or S
AXXVPTELSPISMLFIDEYDKVVYKQYEEMVVEGXG

SEQ ID NO: 16747 - protein, 38 aa, Artificial Sequence; identical to SEQ ID NO: 9446
  GFR-binding peptide
  MOD_RES (5), (6), (37): Xaa is C or S

SEQ ID NO: 16748 - protein, 35 aa, Artificial Sequence
  GFR-binding peptide
  MOD_RES (32), (34): Xaa is C or S
VPTRLSAISILYLDSANNVVLKNYQDMVVESXGXR

SEQ ID NO: 16749 - protein, 38 aa, Artificial Sequence; identical to SEQ ID NO: 9448
  GFR-binding peptide
  MOD_RES (4), (5), (36), (38): Xaa is C or S

SEQ ID NO: 16750 - protein, 39 aa, Artificial Sequence; identical to SEQ ID NO: 9450
  GFR-binding peptide
  MOD_RES (3), (4), (38): Xaa is C or S
  MOD_RES (18), (19), (20), (21), (22): Xaa is A or G
  MOD_RES (23), (24), (25), (26): Xaa is A or G or is absent

SEQ ID NO: 16751 - protein, 37 aa, Artificial Sequence
  GFR-binding peptide
  MOD_RES (3), (4): Xaa is C or S
  MOD_RES (18), (19), (20), (21), (22): Xaa is A or G
  MOD_RES (23), (24), (25), (26): Xaa is A or G or is absent
KPXXAPTQLSPISVLFIXXXXXXXXXYKQYENMVVRA

SEQ ID NO: 16752 - protein, 35 aa, Artificial Sequence; identical to SEQ ID NO: 9452
  GFR-binding peptide
  MOD_RES (3), (4), (35): Xaa is C or S

SEQ ID NO: 16753 - protein, 39 aa, Artificial Sequence; identical to SEQ ID NO: 9453
  GFR-binding peptide
  MOD_RES (5), (6): Xaa is C or S
  MOD_RES (20), (21), (22), (23), (24): Xaa is A or G
  MOD_RES (25), (26), (27), (28): Xaa is A or G or is absent

SEQ ID NO: 16754 - protein, 31 aa, Artificial Sequence
  GFR-binding peptide
  MOD_RES (1), (1): Xaa is C or S
XVPTELEPLTMLYYDEYDKVVEQLSNEMVVE

SEQ ID NO: 16755 - protein, 42 aa, Artificial Sequence
  GFR-binding peptide
  MOD_RES (5), (6), (40), (42): Xaa is C or S
  MOD_RES (20), (21), (22), (23), (24): Xaa is A or G
  MOD_RES (25), (26), (27), (28): Xaa is A or G or is absent
VPKPXXAPTKLEPLPVVYYXXXXXXXXXEQLSNNMVVRSXGX

SEQ ID NO: 16756 - protein, 33 aa, Artificial Sequence
  GFR-binding peptide
  MOD_RES (32), (32): Xaa is C or S
APTQLSPISVLFIDDSSNVIYKQYENMVVRAXG

SEQ ID NO: 16757 - protein, 38 aa, Artificial Sequence
  GFR-binding peptide
  MOD_RES (3), (4), (35), (37): Xaa is C or S
SPXXVPQDLEPLPIVYYVGRTPKVEQLSNMVVKSXKXS

SEQ ID NO: 16758 - protein, 34 aa, Artificial Sequence
  GFR-binding peptide
  MOD_RES (1), (1): Xaa is C or S
  MOD_RES (15), (16), (17), (18), (19): Xaa is A or G
  MOD_RES (20), (21), (22), (23): Xaa is A or G or is absent
XVPTRLSAISILYLXXXXXXXXXLKNYQDMVVES

SEQ ID NO: 16759 - protein, 38 aa, Artificial Sequence
  GFR-binding peptide
  MOD_RES (5), (6), (37): Xaa is C or S
SASPXXVPQDLSPISILFIVGRTPKVYKQYEMVVKSXK

SEQ ID NO: 16760 - protein, 41 aa, Artificial Sequence
  GFR-binding peptide
  MOD_RES (5), (6), (38), (40): Xaa is C or S
VPKPXXAPTKLEPLTVLYYDDSSNVIEQLSNNMVVRSXGXH

SEQ ID NO: 16761 - protein, 36 aa, Artificial Sequence
  GFR-binding peptide
  MOD_RES (1), (33), (35): Xaa is C or S
XVPTRLEPLPIVYYDSANNVVEQLSNDMVVESXGXR

SEQ ID NO: 16762 - protein, 36 aa, Artificial Sequence
  GFR-binding peptide
  MOD_RES (3), (4): Xaa is C or S
  MOD_RES (18), (19), (20), (21), (22): Xaa is A or G
  MOD_RES (23), (24), (25), (26): Xaa is A or G or is absent
KPXXAPTKLSPISVLFIXXXXXXXXXYKQYENMVVR

SEQ ID NO: 16763 - protein, 39 aa, Artificial Sequence
  GFR-binding peptide
  MOD_RES (4), (5), (39): Xaa is C or S
  MOD_RES (19), (20), (21), (22), (23): Xaa is A or G
  MOD_RES (24), (25), (26), (27): Xaa is A or G or is absent
PPTXXVPTRLSPISILFIXXXXXXXXXYKQYEDMVVESX

SEQ ID NO: 16764 - protein, 35 aa, Artificial Sequence
  GFR-binding peptide
  MOD_RES (1), (2), (35): Xaa is C or S
  MOD_RES (16), (17), (18), (19), (20): Xaa is A or G
  MOD_RES (21), (22), (23), (24): Xaa is A or G or is absent
XXVPQALEPLTILYYXXXXXXXXXEQLSNMIVRSX

SEQ ID NO: 16765 - protein, 37 aa, Artificial Sequence; identical to SEQ ID NO: 9463
  GFR-binding peptide
  MOD_RES (2), (3), (36): Xaa is C or S
  MOD_RES (17), (18), (19), (20), (21): Xaa is A or G
  MOD_RES (22), (23), (24), (25): Xaa is A or G or is absent

SEQ ID NO: 16766 - protein, 34 aa, Artificial Sequence
  GFR-binding peptide
  MOD_RES (3), (4): Xaa is C or S
SPXXVSQDLEPLPIVYYIGKTPKIEQLSNMIVKS

SEQ ID NO: 16767 - protein, 34 aa, Artificial Sequence
  GFR-binding peptide
  MOD_RES (1), (1): Xaa is C or S
  MOD_RES (15), (16), (17), (18), (19): Xaa is A or G
  MOD_RES (20), (21), (22), (23): Xaa is A or G or is absent
XVPTRLNAISILYFXXXXXXXXXLKKYRDMVVES

SEQ ID NO: 16768 - protein, 33 aa, Artificial Sequence
  GFR-binding peptide
  MOD_RES (1), (33): Xaa is C or S
XVPTRLEPLTILYYDSANNVVEQLSNDMVVESX

SEQ ID NO: 16769 - protein, 34 aa, Artificial Sequence; identical to SEQ ID NO: 9466
  GFR-binding peptide
  MOD_RES (3), (4): Xaa is C or S

SEQ ID NO: 16770 - protein, 41 aa, Artificial Sequence; identical to SEQ ID NO: 9467
  GFR-binding peptide
  MOD_RES (5), (6), (39), (41): Xaa is C or S
  MOD_RES (20), (21), (22), (23), (24): Xaa is A or G
  MOD_RES (25), (26), (27), (28): Xaa is A or G or is absent

SEQ ID NO: 16771 - protein, 36 aa, Artificial Sequence; identical to SEQ ID NO: 9468
  GFR-binding peptide
  MOD_RES (3), (4), (35): Xaa is C or S

SEQ ID NO: 16772 - protein, 39 aa, Artificial Sequence
  GFR-binding peptide
  MOD_RES (6), (7), (39): Xaa is C or S
STPPTXXVPTRLNAISILYFDSANNVVLKKYRDMVVESX

SEQ ID NO: 16773 - protein, 35 aa, Artificial Sequence
  GFR-binding peptide
  MOD_RES (2), (3): Xaa is C or S
  MOD_RES (17), (18), (19), (20), (21): Xaa is A or G
  MOD_RES (22), (23), (24), (25): Xaa is A or G or is absent
AXXVPTELEPLTMLYYXXXXXXXXXEQLSNDMVVE

SEQ ID NO: 16774 - protein, 40 aa, Artificial Sequence
  GFR-binding peptide
  MOD_RES (6), (38), (40): Xaa is C or S
VTKPTXAPTKLEPLPVVYYDDSSNVIEQLSNNMVVRSXGX

SEQ ID NO: 16775 - protein, 39 aa, Artificial Sequence; identical to SEQ ID NO: 9473
  GFR-binding peptide
  MOD_RES (6), (7): Xaa is C or S
  MOD_RES (21), (22), (23), (24), (25): Xaa is A or G
  MOD_RES (26), (27), (28), (29): Xaa is A or G or is absent

SEQ ID NO: 16776 - protein, 35 aa, Artificial Sequence; identical to SEQ ID NO: 9474
  GFR-binding peptide
  MOD_RES (2), (3), (34): Xaa is C or S

SEQ ID NO: 16777 - protein, 39 aa, Artificial Sequence
  GFR-binding peptide
  MOD_RES (4), (5), (39): Xaa is C or S
  MOD_RES (19), (20), (21), (22), (23): Xaa is A or G
  MOD_RES (24), (25), (26), (27): Xaa is A or G or is absent
PKAXXVPTELSPISMLFIXXXXXXXXXYKQYEEMVVEGX

SEQ ID NO: 16778 - protein, 34 aa, Artificial Sequence
  GFR-binding peptide
  MOD_RES (1), (33): Xaa is C or S
XVPTELEPLTMLYYDEYDKVVEQLSNEMVVEGXG

SEQ ID NO: 16779 - protein, 37 aa, Artificial Sequence
  GFR-binding peptide
  MOD_RES (3), (4), (37): Xaa is C or S
  MOD_RES (18), (19), (20), (21), (22): Xaa is A or G
  MOD_RES (23), (24), (25), (26): Xaa is A or G or is absent
APXXVPQALEPLTILYYXXXXXXXXXEQLSNMIVRSX

SEQ ID NO: 16780 - protein, 42 aa, Artificial Sequence
  GFR-binding peptide
  MOD_RES (5), (6), (40), (42): Xaa is C or S
  MOD_RES (20), (21), (22), (23), (24): Xaa is A or G
  MOD_RES (25), (26), (27), (28): Xaa is A or G or is absent
VPKPXXAPTKLEPLTVLYYXXXXXXXXXEQLSNNMVVRSXGX

SEQ ID NO: 16781 - protein, 40 aa, Artificial Sequence
  GFR-binding peptide
  MOD_RES (5), (37), (39): Xaa is C or S
TKPTXAPTKLSPISVLFIDDSSNVIYKQYENMVVRSXGXH

SEQ ID NO: 16782 - protein, 38 aa, Artificial Sequence
  GFR-binding peptide
  MOD_RES (3), (4), (38): Xaa is C or S
  MOD_RES (18), (19), (20), (21), (22): Xaa is A or G
  MOD_RES (23), (24), (25), (26): Xaa is A or G or is absent
PTXXVPTRLEPLTILYYXXXXXXXXXEQLSNDMVVESX

SEQ ID NO: 16783 - protein, 30 aa, Artificial Sequence
  GFR-binding peptide
APTKLSPISVLFIDDSSNVIYKQYENMVVR

SEQ ID NO: 16784 - protein, 37 aa, Artificial Sequence
  GFR-binding peptide
  MOD_RES (4), (5): Xaa is C or S
  MOD_RES (19), (20), (21), (22), (23): Xaa is A or G
  MOD_RES (24), (25), (26), (27): Xaa is A or G or is absent
ASPXXVPQDLEPLTILYYXXXXXXXXXEQLSNMVVKS

SEQ ID NO: 16785 - protein, 35 aa, Artificial Sequence
  GFR-binding peptide
  MOD_RES (32), (34): Xaa is C or S
VPTRLEPLTILYYDSANNVVEQLSNDMVVESXGXR

SEQ ID NO: 16786 - protein, 41 aa, Artificial Sequence; identical to SEQ ID NO: 9485
  GFR-binding peptide
  MOD_RES (3), (4), (38), (40): Xaa is C or S
  MOD_RES (18), (19), (20), (21), (22): Xaa is A or G
  MOD_RES (23), (24), (25), (26): Xaa is A or G or is absent

SEQ ID NO: 16787 - protein, 36 aa, Artificial Sequence; identical to SEQ ID NO: 9488
  GFR-binding peptide
  MOD_RES (5), (5): Xaa is C or S

SEQ ID NO: 16788 - protein, 34 aa, Artificial Sequence
  GFR-binding peptide
  MOD_RES (32), (34): Xaa is C or S
VPTRLEPLTILYYDSANNVVEQLSNDMVVESXGX

SEQ ID NO: 16789 - protein, 36 aa, Artificial Sequence
  GFR-binding peptide
  MOD_RES (1), (2), (36): Xaa is C or S
  MOD_RES (16), (17), (18), (19), (20): Xaa is A or G
  MOD_RES (21), (22), (23), (24): Xaa is A or G or is absent
XXVPTELEPLTMLYYXXXXXXXXXEQLSNDMVVEGX

SEQ ID NO: 16790 - protein, 34 aa, Artificial Sequence; identical to SEQ ID NO: 9490
  GFR-binding peptide
  MOD_RES (2), (3): Xaa is C or S

SEQ ID NO: 16791 - protein, 40 aa, Artificial Sequence; identical to SEQ ID NO: 9492
  GFR-binding peptide
  MOD_RES (2), (3), (37), (39): Xaa is C or S
  MOD_RES (17), (18), (19), (20), (21): Xaa is A or G
  MOD_RES (22), (23), (24), (25): Xaa is A or G or is absent

SEQ ID NO: 16792 - protein, 39 aa, Artificial Sequence
  GFR-binding peptide
  MOD_RES (3), (37), (39): Xaa is C or S
  MOD_RES (17), (18), (19), (20), (21): Xaa is A or G
  MOD_RES (22), (23), (24), (25): Xaa is A or G or is absent
PTXAPTKLEPLPVVYYXXXXXXXXXEQLSNNMVVRSXGX

SEQ ID NO: 16793 - protein, 37 aa, Artificial Sequence
  GFR-binding peptide
  MOD_RES (3), (4): Xaa is C or S
  MOD_RES (18), (19), (20), (21), (22): Xaa is A or G
  MOD_RES (23), (24), (25), (26): Xaa is A or G or is absent
KAXXVPTELEPLTMLYYXXXXXXXXXEQLSNDMVVEG

SEQ ID NO: 16794 - protein, 40 aa, Artificial Sequence; identical to SEQ ID NO: 9493
  GFR-binding peptide
  MOD_RES (3), (4), (38), (40): Xaa is C or S
  MOD_RES (18), (19), (20), (21), (22): Xaa is A or G
  MOD_RES (23), (24), (25), (26): Xaa is A or G or is absent

SEQ ID NO: 16795 - protein, 38 aa, Artificial Sequence
  GFR-binding peptide
  MOD_RES (5), (37): Xaa is C or S
TKPTXAPTKLSPISVLFIDDSSNVIYKQYENMVVRSXG

SEQ ID NO: 16796 - protein, 34 aa, Artificial Sequence; identical to SEQ ID NO: 9496
  GFR-binding peptide
  MOD_RES (1), (2): Xaa is C or S
  MOD_RES (16), (17), (18), (19), (20): Xaa is A or G
  MOD_RES (21), (22), (23), (24): Xaa is A or G or is absent

SEQ ID NO: 16797 - protein, 34 aa, Artificial Sequence
  GFR-binding peptide
  MOD_RES (3), (4): Xaa is C or S
SPXXVPQDLSPISILFIVGRTPKVYKQYEMVVKS

SEQ ID NO: 16798 - protein, 34 aa, Artificial Sequence; identical to SEQ ID NO: 9499
  GFR-binding peptide
  MOD_RES (34), (34): Xaa is C or S
  MOD_RES (14), (15), (16), (17), (18): Xaa is A or G
  MOD_RES (19), (20), (21), (22): Xaa is A or G or is absent

SEQ ID NO: 16799 - protein, 36 aa, Artificial Sequence; identical to SEQ ID NO: 9501
  GFR-binding peptide
  MOD_RES (3), (4): Xaa is C or S
  MOD_RES (18), (19), (20), (21), (22): Xaa is A or G
  MOD_RES (23), (24), (25), (26): Xaa is A or G or is absent

SEQ ID NO: 16800 - protein, 43 aa, Artificial Sequence; identical to SEQ ID NO: 9503
  GFR-binding peptide
  MOD_RES (6), (7), (40), (42): Xaa is C or S
  MOD_RES (21), (22), (23), (24), (25): Xaa is A or G
  MOD_RES (26), (27), (28), (29): Xaa is A or G or is absent

SEQ ID NO: 16801 - protein, 35 aa, Artificial Sequence
  GFR-binding peptide
  MOD_RES (2), (3): Xaa is C or S
  MOD_RES (17), (18), (19), (20), (21): Xaa is A or G
  MOD_RES (22), (23), (24), (25): Xaa is A or G or is absent
AXXVPTELEPLPMVYYXXXXXXXXXEQLSNDMVVE

SEQ ID NO: 16802 - protein, 41 aa, Artificial Sequence; identical to SEQ ID NO: 9504
  GFR-binding peptide
  MOD_RES (6), (7), (38), (40): Xaa is C or S

SEQ ID NO: 16803 - protein, 35 aa, Artificial Sequence; identical to SEQ ID NO: 9505
  GFR-binding peptide
  MOD_RES (4), (5): Xaa is C or S

SEQ ID NO: 16804 - protein, 41 aa, Artificial Sequence
  GFR-binding peptide
  MOD_RES (7), (39), (41): Xaa is C or S
HVTKPTXAPTKLEPLTVLYYDDSSNVIEQLSNNMVVRSXGX

SEQ ID NO: 16805 - protein, 37 aa, Artificial Sequence
  GFR-binding peptide
  MOD_RES (1), (35), (37): Xaa is C or S
  MOD_RES (15), (16), (17), (18), (19): Xaa is A or G
  MOD_RES (20), (21), (22), (23): Xaa is A or G or is absent
XAPTQLEPLPVVYYXXXXXXXXXEQLSNNMVVRAXGX

SEQ ID NO: 16806 - protein, 38 aa, Artificial Sequence
  GFR-binding peptide
  MOD_RES (3), (4), (38): Xaa is C or S
  MOD_RES (18), (19), (20), (21), (22): Xaa is A or G
  MOD_RES (23), (24), (25), (26): Xaa is A or G or is absent
KPXXAPTQLEPLPVVYYXXXXXXXXXEQLSNNMVVRAX

SEQ ID NO: 16807 - protein, 35 aa, Artificial Sequence; identical to SEQ ID NO: 9506
  GFR-binding peptide
  MOD_RES (1), (2), (34): Xaa is C or S

SEQ ID NO: 16808 - protein, 34 aa, Artificial Sequence
  GFR-binding peptide
  MOD_RES (33), (33): Xaa is C or S
  MOD_RES (14), (15), (16), (17), (18): Xaa is A or G
  MOD_RES (19), (20), (21), (22): Xaa is A or G or is absent
VPQALEPLPIVYYXXXXXXXXXEQLSNMIVRSXK

SEQ ID NO: 16809 - protein, 39 aa, Artificial Sequence; identical to SEQ ID NO: 9509
  GFR-binding peptide
  MOD_RES (5), (6), (39): Xaa is C or S
  MOD_RES (20), (21), (22), (23), (24): Xaa is A or G
  MOD_RES (25), (26), (27), (28): Xaa is A or G or is absent

SEQ ID NO: 16810 - protein, 41 aa, Artificial Sequence
  GFR-binding peptide
  MOD_RES (4), (5), (39), (41): Xaa is C or S
  MOD_RES (19), (20), (21), (22), (23): Xaa is A or G
  MOD_RES (24), (25), (26), (27): Xaa is A or G or is absent
PPTXXVPTRLNAISILYFXXXXXXXXXLKKYRDMVVESXGX

SEQ ID NO: 16811 - protein, 32 aa, Artificial Sequence
  GFR-binding peptide
  MOD_RES (1), (1): Xaa is C or S
XAPTKLSPISVLFIDDSSNVIYKQYENMVVRS

SEQ ID NO: 16812 - protein, 33 aa, Artificial Sequence; identical to SEQ ID NO: 9515
  GFR-binding peptide
  MOD_RES (33), (33): Xaa is C or S
  MOD_RES (14), (15), (16), (17), (18): Xaa is A or G
  MOD_RES (19), (20), (21), (22): Xaa is A or G or is absent

SEQ ID NO: 16813 - protein, 40 aa, Artificial Sequence
  GFR-binding peptide
  MOD_RES (5), (6), (38), (40): Xaa is C or S
VPKPXXAPTKLEPLTVLYYDDSSNVIEQLSNNMVVRSXGX

SEQ ID NO: 16814 - protein, 38 aa, Artificial Sequence
  GFR-binding peptide
  MOD_RES (2), (3), (37): Xaa is C or S
  MOD_RES (17), (18), (19), (20), (21): Xaa is A or G
  MOD_RES (22), (23), (24), (25): Xaa is A or G or is absent
TXXVPTRLSAISILYLXXXXXXXXXLKNYQDMVVESXG

SEQ ID NO: 16815 - protein, 38 aa, Artificial Sequence
  GFR-binding peptide
  MOD_RES (4), (5): Xaa is C or S
  MOD_RES (19), (20), (21), (22), (23): Xaa is A or G
  MOD_RES (24), (25), (26), (27): Xaa is A or G or is absent
PKPXXAPTQLEPLTVLYYXXXXXXXXXEQLSNNMVVRA

SEQ ID NO: 16816 - protein, 35 aa, Artificial Sequence
  GFR-binding peptide
  MOD_RES (32), (34): Xaa is C or S
APTKLEPLTVLYYDDSSNVIEQLSNNMVVRSXGXH

SEQ ID NO: 16817 - protein, 36 aa, Artificial Sequence; identical to SEQ ID NO: 9520
  GFR-binding peptide
  MOD_RES (34), (36): Xaa is C or S
  MOD_RES (14), (15), (16), (17), (18): Xaa is A or G
  MOD_RES (19), (20), (21), (22): Xaa is A or G or is absent

SEQ ID NO: 16818 - protein, 42 aa, Artificial Sequence; identical to SEQ ID NO: 9522
  GFR-binding peptide
  MOD_RES (4), (5), (39), (41): Xaa is C or S
  MOD_RES (19), (20), (21), (22), (23): Xaa is A or G
  MOD_RES (24), (25), (26), (27): Xaa is A or G or is absent

SEQ ID NO: 16819 - protein, 33 aa, Artificial Sequence
  GFR-binding peptide
  MOD_RES (1), (33): Xaa is C or S
XVPTELEPLTMLYYDENEKVVEQLSNDMVVEGX

SEQ ID NO: 16820 - protein, 32 aa, Artificial Sequence; identical to SEQ ID NO: 9523
  GFR-binding peptide
  MOD_RES (31), (31): Xaa is C or S

SEQ ID NO: 16821 - protein, 34 aa, Artificial Sequence
  GFR-binding peptide
  MOD_RES (2), (3): Xaa is C or S
PXXAPTQLEPLTVLYYDDSSNVIEQLSNNMVVRA

SEQ ID NO: 16822 - protein, 36 aa, Artificial Sequence
  GFR-binding peptide
  MOD_RES (34), (36): Xaa is C or S
  MOD_RES (14), (15), (16), (17), (18): Xaa is A or G
  MOD_RES (19), (20), (21), (22): Xaa is A or G or is absent
VPTELEPLTMLYYXXXXXXXXXEQLSNDMVVEGXGX

SEQ ID NO: 16823 - protein, 39 aa, Artificial Sequence; identical to SEQ ID NO: 9525
  GFR-binding peptide
  MOD_RES (2), (3), (36), (38): Xaa is C or S
  MOD_RES (17), (18), (19), (20), (21): Xaa is A or G
  MOD_RES (22), (23), (24), (25): Xaa is A or G or is absent

SEQ ID NO: 16824 - protein, 38 aa, Artificial Sequence; identical to SEQ ID NO: 9526
  GFR-binding peptide
  MOD_RES (3), (4), (38): Xaa is C or S
  MOD_RES (18), (19), (20), (21), (22): Xaa is A or G
  MOD_RES (23), (24), (25), (26): Xaa is A or G or is absent

SEQ ID NO: 16825 - protein, 33 aa, Artificial Sequence
  GFR-binding peptide
  MOD_RES (14), (15), (16), (17), (18): Xaa is A or G
  MOD_RES (19), (20), (21), (22): Xaa is A or G or is absent
VPTRLSPISILFIXXXXXXXXXYKQYEDMVVES

SEQ ID NO: 16826 - protein, 38 aa, Artificial Sequence; identical to SEQ ID NO: 9529
  GFR-binding peptide
  MOD_RES (3), (37): Xaa is C or S
  MOD_RES (17), (18), (19), (20), (21): Xaa is A or G
  MOD_RES (22), (23), (24), (25): Xaa is A or G or is absent

SEQ ID NO: 16827 - protein, 35 aa, Artificial Sequence
  GFR-binding peptide
  MOD_RES (3), (4): Xaa is C or S
KPXXAPTQLEPLPVVYYDDSSNVIEQLSNNMVVRA

SEQ ID NO: 16828 - protein, 39 aa, Artificial Sequence
  GFR-binding peptide
  MOD_RES (6), (7): Xaa is C or S
  MOD_RES (21), (22), (23), (24), (25): Xaa is A or G
  MOD_RES (26), (27), (28), (29): Xaa is A or G or is absent
ASASPXXVSQDLSPISILFIXXXXXXXXXYKQYEMIVKS

SEQ ID NO: 16829 - protein, 40 aa, Artificial Sequence; identical to SEQ ID NO: 9532
  GFR-binding peptide
  MOD_RES (2), (3), (37), (39): Xaa is C or S
  MOD_RES (17), (18), (19), (20), (21): Xaa is A or G
  MOD_RES (22), (23), (24), (25): Xaa is A or G or is absent

SEQ ID NO: 16830 - protein, 38 aa, Artificial Sequence; identical to SEQ ID NO: 9536
  GFR-binding peptide
  MOD_RES (6), (7): Xaa is C or S

SEQ ID NO: 16831 - protein, 39 aa, Artificial Sequence; identical to SEQ ID NO: 9537
  GFR-binding peptide
  MOD_RES (5), (6): Xaa is C or S
  MOD_RES (20), (21), (22), (23), (24): Xaa is A or G
  MOD_RES (25), (26), (27), (28): Xaa is A or G or is absent

SEQ ID NO: 16832 - protein, 37 aa, Artificial Sequence
  GFR-binding peptide
  MOD_RES (2), (3), (34), (36): Xaa is C or S
PXXVPQALSPISILFIVGRKPKVYKQYEMIVRSXKXS

SEQ ID NO: 16833 - protein, 38 aa, Artificial Sequence
  GFR-binding peptide
  MOD_RES (5), (6): Xaa is C or S
  MOD_RES (20), (21), (22), (23), (24): Xaa is A or G
  MOD_RES (25), (26), (27), (28): Xaa is A or G or is absent
SASPXXVSQDLSPISILFIXXXXXXXXXYKQYEMIVKS

SEQ ID NO: 16834 - protein, 33 aa, Artificial Sequence
  GFR-binding peptide
  MOD_RES (1), (2): Xaa is C or S
XXVPTELEPLPMVYYDENEKVVEQLSNDMVVEG

SEQ ID NO: 16835 - protein, 40 aa, Artificial Sequence; identical to SEQ ID NO: 9538
  GFR-binding peptide
  MOD_RES (5), (6), (37), (39): Xaa is C or S

SEQ ID NO: 16836 - protein, 37 aa, Artificial Sequence; identical to SEQ ID NO: 9539
  GFR-binding peptide
  MOD_RES (4), (36): Xaa is C or S

SEQ ID NO: 16837 - protein, 40 aa, Artificial Sequence; identical to SEQ ID NO: 9541
  GFR-binding peptide
  MOD_RES (4), (5), (39): Xaa is C or S
  MOD_RES (19), (20), (21), (22), (23): Xaa is A or G
  MOD_RES (24), (25), (26), (27): Xaa is A or G or is absent

SEQ ID NO: 16838 - protein, 38 aa, Artificial Sequence
  GFR-binding peptide
  MOD_RES (6), (7): Xaa is C or S
SIPKAXXVPTELSPISMLFIDEYDKVVYKQYEEMVVEG

SEQ ID NO: 16839 - protein, 37 aa, Artificial Sequence
  GFR-binding peptide
  MOD_RES (6), (7): Xaa is C or S
YVPKPXXAPTKLSPISVLFIDDSSNVIYKQYENMVVR

SEQ ID NO: 16840 - protein, 41 aa, Artificial Sequence
  GFR-binding peptide
  MOD_RES (3), (4), (38), (40): Xaa is C or S
  MOD_RES (18), (19), (20), (21), (22): Xaa is A or G
  MOD_RES (23), (24), (25), (26): Xaa is A or G or is absent
KAXXVPTELEPLPMVYYXXXXXXXXXEQLSNDMVVEGXGXR

SEQ ID NO: 16841 - protein, 39 aa, Artificial Sequence; identical to SEQ ID NO: 9546
  GFR-binding peptide
  MOD_RES (6), (7), (38): Xaa is C or S

SEQ ID NO: 16842 - protein, 36 aa, Artificial Sequence
  GFR-binding peptide
  MOD_RES (4), (4): Xaa is C or S
  MOD_RES (18), (19), (20), (21), (22): Xaa is A or G
  MOD_RES (23), (24), (25), (26): Xaa is A or G or is absent
KPTXAPTKLEPLTVLYYXXXXXXXXXEQLSNNMVVR

SEQ ID NO: 16843 - protein, 37 aa, Artificial Sequence
  GFR-binding peptide
  MOD_RES (5), (37): Xaa is C or S
TKPTXAPTKLSPISVLFIDDSSNVIYKQYENMVVRSX

SEQ ID NO: 16844 - protein, 41 aa, Artificial Sequence; identical to SEQ ID NO: 9549
  GFR-binding peptide
  MOD_RES (4), (5), (38), (40): Xaa is C or S
  MOD_RES (19), (20), (21), (22), (23): Xaa is A or G
  MOD_RES (24), (25), (26), (27): Xaa is A or G or is absent

SEQ ID NO: 16845 - protein, 35 aa, Artificial Sequence
  GFR-binding peptide
  MOD_RES (5), (5): Xaa is C or S
TKPTXAPTKLEPLTVLYYDDSSNVIEQLSNNMVVR

SEQ ID NO: 16846 - protein, 36 aa, Artificial Sequence
  GFR-binding peptide
  MOD_RES (3), (4), (36): Xaa is C or S
PTXXVPTRLNAISILYFDSANNVVLKKYRDMVVESX

SEQ ID NO: 16847 - protein, 38 aa, Artificial Sequence
  GFR-binding peptide
  MOD_RES (1), (35), (37): Xaa is C or S
  MOD_RES (15), (16), (17), (18), (19): Xaa is A or G
  MOD_RES (20), (21), (22), (23): Xaa is A or G or is absent
XAPTQLEPLTVLYYXXXXXXXXXEQLSNNMVVRAXGXH

SEQ ID NO: 16848 - protein, 42 aa, Artificial Sequence
  GFR-binding peptide
  MOD_RES (6), (40), (42): Xaa is C or S
  MOD_RES (20), (21), (22), (23), (24): Xaa is A or G
  MOD_RES (25), (26), (27), (28): Xaa is A or G or is absent
VTKPTXAPTKLSPISVLFIXXXXXXXXXYKQYENMVVRSXGX

SEQ ID NO: 16849 - protein, 40 aa, Artificial Sequence
  GFR-binding peptide
  MOD_RES (4), (5), (39): Xaa is C or S
  MOD_RES (19), (20), (21), (22), (23): Xaa is A or G
  MOD_RES (24), (25), (26), (27): Xaa is A or G or is absent
PPTXXVPTRLEPLPIVYYXXXXXXXXXEQLSNDMVVESXG

SEQ ID NO: 16850 - protein, 39 aa, Artificial Sequence
  GFR-binding peptide
  MOD_RES (5), (6), (38): Xaa is C or S
TPPTXXVPTRLEPLPIVYYDSANNVVEQLSNDMVVESXG

SEQ ID NO: 16851 - protein, 35 aa, Artificial Sequence
  GFR-binding peptide
  MOD_RES (1), (2), (34): Xaa is C or S
XXAPTKLSPISVLFIDDSSNVIYKQYENMVVRSXG

SEQ ID NO: 16852 - protein, 34 aa, Artificial Sequence
  GFR-binding peptide
  MOD_RES (34), (34): Xaa is C or S
  MOD_RES (14), (15), (16), (17), (18): Xaa is A or G
  MOD_RES (19), (20), (21), (22): Xaa is A or G or is absent
APTQLEPLTVLYYXXXXXXXXXEQLSNNMVVRAX

SEQ ID NO: 16853 - protein, 34 aa, Artificial Sequence; identical to SEQ ID NO: 9559
  GFR-binding peptide
  MOD_RES (1), (32), (34): Xaa is C or S

SEQ ID NO: 16854 - protein, 33 aa, Artificial Sequence; identical to SEQ ID NO: 9560
  GFR-binding peptide
  MOD_RES (14), (15), (16), (17), (18): Xaa is A or G
  MOD_RES (19), (20), (21), (22): Xaa is A or G or is absent

SEQ ID NO: 16855 - protein, 36 aa, Artificial Sequence
  GFR-binding peptide
  MOD_RES (34), (36): Xaa is C or S
  MOD_RES (14), (15), (16), (17), (18): Xaa is A or G
  MOD_RES (19), (20), (21), (22): Xaa is A or G or is absent
VPTELEPLPMVYYXXXXXXXXXEQLSNDMVVEGXGX

SEQ ID NO: 16856 - protein, 37 aa, Artificial Sequence
  GFR-binding peptide
  MOD_RES (5), (6): Xaa is C or S
TPPTXXVPTRLSAISILYLDSANNVVLKNYQDMVVES

SEQ ID NO: 16857 - protein, 37 aa, Artificial Sequence
  GFR-binding peptide
  MOD_RES (6), (7): Xaa is C or S
KIPKAXXVPTELEPLTMLYYDENEKVVEQLSNDMVVE

SEQ ID NO: 16858 - protein, 40 aa, Artificial Sequence; identical to SEQ ID NO: 9562
  GFR-binding peptide
  MOD_RES (5), (6), (39): Xaa is C or S
  MOD_RES (20), (21), (22), (23), (24): Xaa is A or G
  MOD_RES (25), (26), (27), (28): Xaa is A or G or is absent

SEQ ID NO: 16859 - protein, 33 aa, Artificial Sequence
  GFR-binding peptide
  MOD_RES (1), (33): Xaa is C or S
XVPTRLEPLPIVYYDSANNVVEQLSNDMVVESX

SEQ ID NO: 16860 - protein, 33 aa, Artificial Sequence
  GFR-binding peptide
  MOD_RES (1), (2), (33): Xaa is C or S
XXVSQDLEPLPIVYYIGKTPKIEQLSNMIVKSX

SEQ ID NO: 16861 - protein, 43 aa, Artificial Sequence
  GFR-binding peptide
  MOD_RES (5), (6), (40), (42): Xaa is C or S
  MOD_RES (20), (21), (22), (23), (24): Xaa is A or G
  MOD_RES (25), (26), (27), (28): Xaa is A or G or is absent
TPPTXXVPTRLNAISILYFXXXXXXXXXLKKYRDMVVESXGXR

SEQ ID NO: 16862 - protein, 41 aa, Artificial Sequence
  GFR-binding peptide
  MOD_RES (6), (7), (39), (41): Xaa is C or S
SIPKAXXVPTELEPLPMVYYDEYDKVVEQLSNEMVVEGXGX

SEQ ID NO: 16863 - protein, 40 aa, Artificial Sequence
  GFR-binding peptide
  MOD_RES (3), (4), (37), (39): Xaa is C or S
  MOD_RES (18), (19), (20), (21), (22): Xaa is A or G
  MOD_RES (23), (24), (25), (26): Xaa is A or G or is absent
SPXXVPQDLEPLPIVYYXXXXXXXXXEQLSNMVVKSXKXS

SEQ ID NO: 16864 - protein, 36 aa, Artificial Sequence
  GFR-binding peptide
  MOD_RES (1), (2), (34), (36): Xaa is C or S
XXVPTELEPLTMLYYDENEKVVEQLSNDMVVEGXGX

SEQ ID NO: 16865 - protein, 36 aa, Artificial Sequence; identical to SEQ ID NO: 9571
  GFR-binding peptide
  MOD_RES (33), (35): Xaa is C or S
  MOD_RES (14), (15), (16), (17), (18): Xaa is A or G
  MOD_RES (19), (20), (21), (22): Xaa is A or G or is absent

SEQ ID NO: 16866 - protein, 31 aa, Artificial Sequence
  GFR-binding peptide
  MOD_RES (1), (1): Xaa is C or S
XVPTRLSAISILYLDSANNVVLKNYQDMVVE

SEQ ID NO: 16867 - protein, 35 aa, Artificial Sequence
  GFR-binding peptide
  MOD_RES (1), (2), (35): Xaa is C or S
  MOD_RES (16), (17), (18), (19), (20): Xaa is A or G
  MOD_RES (21), (22), (23), (24): Xaa is A or G or is absent
XXVSQDLSPISILFIXXXXXXXXXYKQYEMIVKSX

SEQ ID NO: 16868 - protein, 35 aa, Artificial Sequence
  GFR-binding peptide
  MOD_RES (1), (2), (35): Xaa is C or S
  MOD_RES (16), (17), (18), (19), (20): Xaa is A or G
  MOD_RES (21), (22), (23), (24): Xaa is A or G or is absent
XXVPQDLEPLTILYYXXXXXXXXXEQLSNMVVKSX

SEQ ID NO: 16869 - protein, 33 aa, Artificial Sequence; identical to SEQ ID NO: 9572
  GFR-binding peptide
  MOD_RES (1), (1): Xaa is C or S
  MOD_RES (15), (16), (17), (18), (19): Xaa is A or G
  MOD_RES (20), (21), (22), (23): Xaa is A or G or is absent

SEQ ID NO: 16870 - protein, 38 aa, Artificial Sequence
  GFR-binding peptide
  MOD_RES (5), (6), (38): Xaa is C or S
TPPTXXVPTRLNAISILYFDSANNVVLKKYRDMVVESX

SEQ ID NO: 16871 - protein, 38 aa, Artificial Sequence
  GFR-binding peptide
  MOD_RES (3), (4), (36), (38): Xaa is C or S
KPXXAPTQLSPISVLFIDDSSNVIYKQYENMVVRAXGX

SEQ ID NO: 16872 - protein, 38 aa, Artificial Sequence
  GFR-binding peptide
  MOD_RES (6), (38): Xaa is C or S
VTKPTXAPTKLEPLPVVYYDDSSNVIEQLSNNMVVRSX

SEQ ID NO: 16873 - protein, 34 aa, Artificial Sequence
  GFR-binding peptide
  MOD_RES (34), (34): Xaa is C or S
  MOD_RES (14), (15), (16), (17), (18): Xaa is A or G
  MOD_RES (19), (20), (21), (22): Xaa is A or G or is absent
VPTELEPLTMLYYXXXXXXXXXEQLSNEMVVEGX

SEQ ID NO: 16874 - protein, 36 aa, Artificial Sequence
  GFR-binding peptide
  MOD_RES (3), (4): Xaa is C or S
  MOD_RES (18), (19), (20), (21), (22): Xaa is A or G
  MOD_RES (23), (24), (25), (26): Xaa is A or G or is absent
APXXVPQALEPLPIVYYXXXXXXXXXEQLSNMIVRS

SEQ ID NO: 16875 - protein, 40 aa, Artificial Sequence
  GFR-binding peptide
  MOD_RES (3), (4), (38), (40): Xaa is C or S
  MOD_RES (18), (19), (20), (21), (22): Xaa is A or G
  MOD_RES (23), (24), (25), (26): Xaa is A or G or is absent
KPXXAPTKLEPLTVLYYXXXXXXXXXEQLSNNMVVRSXGX

SEQ ID NO: 16876 - protein, 41 aa, Artificial Sequence; identical to SEQ ID NO: 9576
  GFR-binding peptide
  MOD_RES (3), (4), (38), (40): Xaa is C or S
  MOD_RES (18), (19), (20), (21), (22): Xaa is A or G
  MOD_RES (23), (24), (25), (26): Xaa is A or G or is absent

SEQ ID NO: 16877 - protein, 38 aa, Artificial Sequence; identical to SEQ ID NO: 9577
  GFR-binding peptide
  MOD_RES (4), (5), (37): Xaa is C or S

SEQ ID NO: 16878 - protein, 37 aa, Artificial Sequence
  GFR-binding peptide
  MOD_RES (5), (6): Xaa is C or S
VPKPXXAPTKLEPLPVVYYDDSSNVIEQLSNNMVVRS

SEQ ID NO: 16879 - protein, 41 aa, Artificial Sequence; identical to SEQ ID NO: 9580
  GFR-binding peptide
  MOD_RES (6), (7), (41): Xaa is C or S
  MOD_RES (21), (22), (23), (24), (25): Xaa is A or G
  MOD_RES (26), (27), (28), (29): Xaa is A or G or is absent

SEQ ID NO: 16880 - protein, 37 aa, Artificial Sequence; identical to SEQ ID NO: 9581
  GFR-binding peptide
  MOD_RES (4), (5): Xaa is C or S
  MOD_RES (19), (20), (21), (22), (23): Xaa is A or G
  MOD_RES (24), (25), (26), (27): Xaa is A or G or is absent

SEQ ID NO: 16881 - protein, 32 aa, Artificial Sequence
  GFR-binding peptide
  MOD_RES (14), (15), (16), (17), (18): Xaa is A or G
  MOD_RES (19), (20), (21), (22): Xaa is A or G or is absent
APTQLEPLPVVYYXXXXXXXXXEQLSNNMVVR

SEQ ID NO: 16882 - protein, 35 aa, Artificial Sequence; identical to SEQ ID NO: 9586
  GFR-binding peptide
  MOD_RES (1), (2), (34): Xaa is C or S

SEQ ID NO: 16883 - protein, 43 aa, Artificial Sequence
  GFR-binding peptide
  MOD_RES (6), (7), (41), (43): Xaa is C or S
  MOD_RES (21), (22), (23), (24), (25): Xaa is A or G
  MOD_RES (26), (27), (28), (29): Xaa is A or G or is absent
YVPKPXXAPTKLEPLTVLYYXXXXXXXXXEQLSNNMVVRSXGX

SEQ ID NO: 16884 - protein, 36 aa, Artificial Sequence; identical to SEQ ID NO: 9591
  GFR-binding peptide
  MOD_RES (1), (34), (36): Xaa is C or S
  MOD_RES (15), (16), (17), (18), (19): Xaa is A or G
  MOD_RES (20), (21), (22), (23): Xaa is A or G or is absent

SEQ ID NO: 16885 - protein, 32 aa, Artificial Sequence; identical to SEQ ID NO: 9595
  GFR-binding peptide
  MOD_RES (14), (15), (16), (17), (18): Xaa is A or G
  MOD_RES (19), (20), (21), (22): Xaa is A or G or is absent

SEQ ID NO: 16886 - protein, 39 aa, Artificial Sequence
  GFR-binding peptide
  MOD_RES (4), (5), (39): Xaa is C or S
  MOD_RES (19), (20), (21), (22), (23): Xaa is A or G
  MOD_RES (24), (25), (26), (27): Xaa is A or G or is absent
PKAXXVPTELEPLPMVYYXXXXXXXXXEQLSNDMVVEGX

SEQ ID NO: 16887 - protein, 38 aa, Artificial Sequence
  GFR-binding peptide
  MOD_RES (3), (4), (35), (37): Xaa is C or S
APXXVPQALEPLTILYYVGRKPKVEQLSNMIVRSXKXS

SEQ ID NO: 16888 - protein, 36 aa, Artificial Sequence; identical to SEQ ID NO: 9596
  GFR-binding peptide
  MOD_RES (6), (6): Xaa is C or S

SEQ ID NO: 16889 - protein, 42 aa, Artificial Sequence; identical to SEQ ID NO: 9598
  GFR-binding peptide
  MOD_RES (6), (7), (40), (42): Xaa is C or S
  MOD_RES (21), (22), (23), (24), (25): Xaa is A or G
  MOD_RES (26), (27), (28), (29): Xaa is A or G or is absent

SEQ ID NO: 16890 - protein, 40 aa, Artificial Sequence; identical to SEQ ID NO: 9600
  GFR-binding peptide
  MOD_RES (6), (7), (40): Xaa is C or S
  MOD_RES (21), (22), (23), (24), (25): Xaa is A or G
  MOD_RES (26), (27), (28), (29): Xaa is A or G or is absent

SEQ ID NO: 16891 - protein, 38 aa, Artificial Sequence
  GFR-binding peptide
  MOD_RES (2), (3), (36), (38): Xaa is C or S
  MOD_RES (17), (18), (19), (20), (21): Xaa is A or G
  MOD_RES (22), (23), (24), (25): Xaa is A or G or is absent
PXXVPQALSPISILFIXXXXXXXXXYKQYEMIVRSXKX

SEQ ID NO: 16892 - protein, 33 aa, Artificial Sequence
  GFR-binding peptide
  MOD_RES (1), (1): Xaa is C or S
  MOD_RES (15), (16), (17), (18), (19): Xaa is A or G
  MOD_RES (20), (21), (22), (23): Xaa is A or G or is absent
XAPTQLEPLTVLYYXXXXXXXXXEQLSNNMVVR

SEQ ID NO: 16893 - protein, 37 aa, Artificial Sequence
  GFR-binding peptide
  MOD_RES (2), (3), (35), (37): Xaa is C or S
AXXVPTELSPISMLFIDEYDKVVYKQYEEMVVEGXGX

SEQ ID NO: 16894 - protein, 41 aa, Artificial Sequence
  GFR-binding peptide
  MOD_RES (5), (6), (40): Xaa is C or S
  MOD_RES (20), (21), (22), (23), (24): Xaa is A or G
  MOD_RES (25), (26), (27), (28): Xaa is A or G or is absent
TPPTXXVPTRLSPISILFIXXXXXXXXXYKQYEDMVVESXG

SEQ ID NO: 16895 - protein, 37 aa, Artificial Sequence
  GFR-binding peptide
  MOD_RES (2), (3), (35), (37): Xaa is C or S
AXXVPTELEPLTMLYYDEYDKVVEQLSNEMVVEGXGX

SEQ ID NO: 16896 - protein, 33 aa, Artificial Sequence
  GFR-binding peptide
  MOD_RES (32), (32): Xaa is C or S
VPTELEPLPMVYYDEYDKVVEQLSNEMVVEGXG

SEQ ID NO: 16897 - protein, 32 aa, Artificial Sequence
  GFR-binding peptide
  MOD_RES (14), (15), (16), (17), (18): Xaa is A or G
  MOD_RES (19), (20), (21), (22): Xaa is A or G or is absent
VPQDLEPLTILYYXXXXXXXXXEQLSNMVVKS

SEQ ID NO: 16898 - protein, 37 aa, Artificial Sequence
  GFR-binding peptide
  MOD_RES (1), (2), (36): Xaa is C or S
  MOD_RES (16), (17), (18), (19), (20): Xaa is A or G
  MOD_RES (21), (22), (23), (24): Xaa is A or G or is absent
XXVPTRLSAISILYLXXXXXXXXXLKNYQDMVVESXG

SEQ ID NO: 16899 - protein, 42 aa, Artificial Sequence; identical to SEQ ID NO: 9614
  GFR-binding peptide
  MOD_RES (6), (7), (41): Xaa is C or S
  MOD_RES (21), (22), (23), (24), (25): Xaa is A or G
  MOD_RES (26), (27), (28), (29): Xaa is A or G or is absent

SEQ ID NO: 16900 - protein, 37 aa, Artificial Sequence
  GFR-binding peptide
  MOD_RES (4), (36): Xaa is C or S
KPTXAPTKLEPLTVLYYDDSSNVIEQLSNNMVVRSXG

SEQ ID NO: 16901 - protein, 36 aa, Artificial Sequence
  GFR-binding peptide
  MOD_RES (2), (3): Xaa is C or S
  MOD_RES (17), (18), (19), (20), (21): Xaa is A or G
  MOD_RES (22), (23), (24), (25): Xaa is A or G or is absent
PXXAPTKLSPISVLFIXXXXXXXXXYKQYENMVVRS

SEQ ID NO: 16902 - protein, 35 aa, Artificial Sequence
  GFR-binding peptide
  MOD_RES (1), (2): Xaa is C or S
  MOD_RES (16), (17), (18), (19), (20): Xaa is A or G
  MOD_RES (21), (22), (23), (24): Xaa is A or G or is absent
XXVPTRLNAISILYFXXXXXXXXXLKKYRDMVVES

SEQ ID NO: 16903 - protein, 38 aa, Artificial Sequence
  GFR-binding peptide
  MOD_RES (5), (6), (38): Xaa is C or S
VPKPXXAPTKLSPISVLFIDDSSNVIYKQYENMVVRSX

SEQ ID NO: 16904 - protein, 40 aa, Artificial Sequence; identical to SEQ ID NO: 9622
  GFR-binding peptide
  MOD_RES (4), (5), (38), (40): Xaa is C or S
  MOD_RES (19), (20), (21), (22), (23): Xaa is A or G
  MOD_RES (24), (25), (26), (27): Xaa is A or G or is absent

SEQ ID NO: 16905 - protein, 42 aa, Artificial Sequence
  GFR-binding peptide
  MOD_RES (7), (39), (41): Xaa is C or S
HVTKPTXAPTKLEPLPVVYYDDSSNVIEQLSNNMVVRSXGXH

SEQ ID NO: 16906 - protein, 39 aa, Artificial Sequence
  GFR-binding peptide
  MOD_RES (1), (2), (36), (38): Xaa is C or S
  MOD_RES (16), (17), (18), (19), (20): Xaa is A or G
  MOD_RES (21), (22), (23), (24): Xaa is A or G or is absent
XXAPTKLEPLPVVYYXXXXXXXXXEQLSNNMVVRSXGXH

SEQ ID NO: 16907 - protein, 41 aa, Artificial Sequence
  GFR-binding peptide
  MOD_RES (6), (7), (41): Xaa is C or S
  MOD_RES (21), (22), (23), (24), (25): Xaa is A or G
  MOD_RES (26), (27), (28), (29): Xaa is A or G or is absent
SIPKAXXVPTELEPLTMLYYXXXXXXXXXEQLSNEMVVEGX

SEQ ID NO: 16908 - protein, 37 aa, Artificial Sequence; identical to SEQ ID NO: 9624
  GFR-binding peptide
  MOD_RES (2), (3), (37): Xaa is C or S
  MOD_RES (17), (18), (19), (20), (21): Xaa is A or G
  MOD_RES (22), (23), (24), (25): Xaa is A or G or is absent

SEQ ID NO: 16909 - protein, 38 aa, Artificial Sequence
  GFR-binding peptide
  MOD_RES (5), (6): Xaa is C or S
  MOD_RES (20), (21), (22), (23), (24): Xaa is A or G
  MOD_RES (25), (26), (27), (28): Xaa is A or G or is absent
TPPTXXVPTRLEPLTILYYXXXXXXXXXEQLSNDMVVE

SEQ ID NO: 16910 - protein, 39 aa, Artificial Sequence
  GFR-binding peptide
  MOD_RES (4), (5), (39): Xaa is C or S
  MOD_RES (19), (20), (21), (22), (23): Xaa is A or G
  MOD_RES (24), (25), (26), (27): Xaa is A or G or is absent
PPTXXVPTRLNAISILYFXXXXXXXXXLKKYRDMVVESX

SEQ ID NO: 16911 - protein, 39 aa, Artificial Sequence
  GFR-binding peptide
  MOD_RES (4), (5), (37), (39): Xaa is C or S
PKPXXAPTKLSPISVLFIDDSSNVIYKQYENMVVRSXGX

SEQ ID NO: 16912 - protein, 37 aa, Artificial Sequence
  GFR-binding peptide
  MOD_RES (6), (7): Xaa is C or S
STPPTXXVPTRLSAISILYLDSANNVVLKNYQDMVVE

SEQ ID NO: 16913 - protein, 38 aa, Artificial Sequence
  GFR-binding peptide
  MOD_RES (3), (4), (36), (38): Xaa is C or S
KPXXAPTQLEPLTVLYYDDSSNVIEQLSNNMVVRAXGX

SEQ ID NO: 16914 - protein, 42 aa, Artificial Sequence
  GFR-binding peptide
  MOD_RES (4), (5), (39), (41): Xaa is C or S
  MOD_RES (19), (20), (21), (22), (23): Xaa is A or G
  MOD_RES (24), (25), (26), (27): Xaa is A or G or is absent
PPTXXVPTRLSAISILYLXXXXXXXXXLKNYQDMVVESXGXR

SEQ ID NO: 16915 - protein, 33 aa, Artificial Sequence
  GFR-binding peptide
  MOD_RES (1), (1): Xaa is C or S
  MOD_RES (15), (16), (17), (18), (19): Xaa is A or G
  MOD_RES (20), (21), (22), (23): Xaa is A or G or is absent
XVPQDLEPLPIVYYXXXXXXXXXEQLSNMVVKS

SEQ ID NO: 16916 - protein, 37 aa, Artificial Sequence
  GFR-binding peptide
  MOD_RES (2), (3), (35), (37): Xaa is C or S
AXXVPTELSPISMLFIDENEKVVYKQYEDMVVEGXGX

SEQ ID NO: 16917 - protein, 41 aa, Artificial Sequence
  GFR-binding peptide
  MOD_RES (4), (38), (40): Xaa is C or S
  MOD_RES (18), (19), (20), (21), (22): Xaa is A or G
  MOD_RES (23), (24), (25), (26): Xaa is A or G or is absent
KPTXAPTKLEPLPVVYYXXXXXXXXXEQLSNNMVVRSXGXH

SEQ ID NO: 16918 - protein, 32 aa, Artificial Sequence; identical to SEQ ID NO: 9635
  GFR-binding peptide
  MOD_RES (1), (32): Xaa is C or S

SEQ ID NO: 16919 - protein, 36 aa, Artificial Sequence
  GFR-binding peptide
  MOD_RES (1), (2), (34), (36): Xaa is C or S
XXVPTELSPISMLFIDENEKVVYKQYEDMVVEGXGX

SEQ ID NO: 16920 - protein, 34 aa, Artificial Sequence; identical to SEQ ID NO: 9638
  GFR-binding peptide
  MOD_RES (1), (1): Xaa is C or S
  MOD_RES (15), (16), (17), (18), (19): Xaa is A or G
  MOD_RES (20), (21), (22), (23): Xaa is A or G or is absent

SEQ ID NO: 16921 - protein, 36 aa, Artificial Sequence
  GFR-binding peptide
  MOD_RES (4), (36): Xaa is C or S
KPTXAPTKLEPLTVLYYDDSSNVIEQLSNNMVVRSX

SEQ ID NO: 16922 - protein, 36 aa, Artificial Sequence; identical to SEQ ID NO: 9641
  GFR-binding peptide
  MOD_RES (4), (5): Xaa is C or S

SEQ ID NO: 16923 - protein, 39 aa, Artificial Sequence
  GFR-binding peptide
  MOD_RES (3), (4), (38): Xaa is C or S
  MOD_RES (18), (19), (20), (21), (22): Xaa is A or G
  MOD_RES (23), (24), (25), (26): Xaa is A or G or is absent
PTXXVPTRLEPLPIVYYXXXXXXXXXEQLSNDMVVESXG

SEQ ID NO: 16924 - protein, 36 aa, Artificial Sequence
  GFR-binding peptide
  MOD_RES (1), (35): Xaa is C or S
  MOD_RES (15), (16), (17), (18), (19): Xaa is A or G
  MOD_RES (20), (21), (22), (23): Xaa is A or G or is absent
XVPTELEPLTMLYYXXXXXXXXXEQLSNEMVVEGXG

SEQ ID NO: 16925 - protein, 37 aa, Artificial Sequence
  GFR-binding peptide
  MOD_RES (6), (7): Xaa is C or S
ASAAPXXVPQALEPLTILYYVGRKPKVEQLSNMIVRS

SEQ ID NO: 16926 - protein, 39 aa, Artificial Sequence; identical to SEQ ID NO: 9646
  GFR-binding peptide
  MOD_RES (2), (3), (37), (39): Xaa is C or S
  MOD_RES (17), (18), (19), (20), (21): Xaa is A or G
  MOD_RES (22), (23), (24), (25): Xaa is A or G or is absent

SEQ ID NO: 16927 - protein, 41 aa, Artificial Sequence; identical to SEQ ID NO: 9649
  GFR-binding peptide
  MOD_RES (5), (6), (38), (40): Xaa is C or S

SEQ ID NO: 16928 - protein, 32 aa, Artificial Sequence; identical to SEQ ID NO: 9650
  GFR-binding peptide
  MOD_RES (31), (31): Xaa is C or S

SEQ ID NO: 16929 - protein, 42 aa, Artificial Sequence; identical to SEQ ID NO: 9652
  GFR-binding peptide
  MOD_RES (6), (7), (40), (42): Xaa is C or S
  MOD_RES (21), (22), (23), (24), (25): Xaa is A or G
  MOD_RES (26), (27), (28), (29): Xaa is A or G or is absent

SEQ ID NO: 16930 - protein, 37 aa, Artificial Sequence
  GFR-binding peptide
  MOD_RES (4), (5), (37): Xaa is C or S
PPTXXVPTRLNAISILYFDSANNVVLKKYRDMVVESX

SEQ ID NO: 16931 - protein, 41 aa, Artificial Sequence
  GFR-binding peptide
  MOD_RES (4), (5), (38), (40): Xaa is C or S
  MOD_RES (19), (20), (21), (22), (23): Xaa is A or G
  MOD_RES (24), (25), (26), (27): Xaa is A or G or is absent
AAPXXVPQALEPLTILYYXXXXXXXXXEQLSNMIVRSXKXS

SEQ ID NO: 16932 - protein, 37 aa, Artificial Sequence
  GFR-binding peptide
  MOD_RES (3), (4), (35), (37): Xaa is C or S
SPXXVPQDLEPLPIVYYVGRTPKVEQLSNMVVKSXKX

SEQ ID NO: 16933 - protein, 34 aa, Artificial Sequence
  GFR-binding peptide
  MOD_RES (31), (33): Xaa is C or S
VSQDLEPLPIVYYIGKTPKIEQLSNMIVKSXKXS

SEQ ID NO: 16934 - protein, 41 aa, Artificial Sequence; identical to SEQ ID NO: 9655
  GFR-binding peptide
  MOD_RES (6), (7), (41): Xaa is C or S
  MOD_RES (21), (22), (23), (24), (25): Xaa is A or G
  MOD_RES (26), (27), (28), (29): Xaa is A or G or is absent

SEQ ID NO: 16935 - protein, 37 aa, Artificial Sequence; identical to SEQ ID NO: 9656
  GFR-binding peptide
  MOD_RES (1), (2), (34), (36): Xaa is C or S

SEQ ID NO: 16936 - protein, 42 aa, Artificial Sequence
  GFR-binding peptide
  MOD_RES (5), (6), (40), (42): Xaa is C or S
  MOD_RES (20), (21), (22), (23), (24): Xaa is A or G
  MOD_RES (25), (26), (27), (28): Xaa is A or G or is absent
IPKAXXVPTELSPISMLFIXXXXXXXXXYKQYEDMVVEGXGX

SEQ ID NO: 16937 - protein, 37 aa, Artificial Sequence
  GFR-binding peptide
  MOD_RES (1), (35), (37): Xaa is C or S
  MOD_RES (15), (16), (17), (18), (19): Xaa is A or G
  MOD_RES (20), (21), (22), (23): Xaa is A or G or is absent
XAPTQLEPLTVLYYXXXXXXXXXEQLSNNMVVRAXGX

SEQ ID NO: 16938 - protein, 33 aa, Artificial Sequence
  GFR-binding peptide
  MOD_RES (33), (33): Xaa is C or S
  MOD_RES (14), (15), (16), (17), (18): Xaa is A or G
  MOD_RES (19), (20), (21), (22): Xaa is A or G or is absent
VPQALEPLTILYYXXXXXXXXXEQLSNMIVRSX

SEQ ID NO: 16939 - protein, 40 aa, Artificial Sequence
  GFR-binding peptide
  MOD_RES (3), (4), (38), (40): Xaa is C or S
  MOD_RES (18), (19), (20), (21), (22): Xaa is A or G
  MOD_RES (23), (24), (25), (26): Xaa is A or G or is absent
KAXXVPTELSPISMLFIXXXXXXXXXYKQYEDMVVEGXGX

SEQ ID NO: 16940 - protein, 41 aa, Artificial Sequence
  GFR-binding peptide
  MOD_RES (3), (4), (38), (40): Xaa is C or S
  MOD_RES (18), (19), (20), (21), (22): Xaa is A or G
  MOD_RES (23), (24), (25), (26): Xaa is A or G or is absent
KAXXVPTELSPISMLFIXXXXXXXXXYKQYEDMVVEGXGXR

SEQ ID NO: 16941 - protein, 35 aa, Artificial Sequence
  GFR-binding peptide
  MOD_RES (1), (35): Xaa is C or S
  MOD_RES (15), (16), (17), (18), (19): Xaa is A or G
  MOD_RES (20), (21), (22), (23): Xaa is A or G or is absent
XVPTELEPLTMLYYXXXXXXXXXEQLSNEMVVEGX

SEQ ID NO: 16942 - protein, 36 aa, Artificial Sequence; identical to SEQ ID NO: 9661
  GFR-binding peptide
  MOD_RES (3), (4), (36): Xaa is C or S

SEQ ID NO: 16943 - protein, 35 aa, Artificial Sequence
  GFR-binding peptide
  MOD_RES (1), (2), (34): Xaa is C or S
XXVPTELEPLPMVYYDENEKVVEQLSNDMVVEGXG

SEQ ID NO: 16944 - protein, 35 aa, Artificial Sequence
  GFR-binding peptide
  MOD_RES (1), (34): Xaa is C or S
  MOD_RES (15), (16), (17), (18), (19): Xaa is A or G
  MOD_RES (20), (21), (22), (23): Xaa is A or G or is absent
XVPQALEPLTILYYXXXXXXXXXEQLSNMIVRSXK

SEQ ID NO: 16945 - protein, 35 aa, Artificial Sequence
  GFR-binding peptide
  MOD_RES (1), (35): Xaa is C or S
  MOD_RES (15), (16), (17), (18), (19): Xaa is A or G
  MOD_RES (20), (21), (22), (23): Xaa is A or G or is absent
XAPTQLEPLTVLYYXXXXXXXXXEQLSNNMVVRAX

SEQ ID NO: 16946 - protein, 43 aa, Artificial Sequence; identical to SEQ ID NO: 9667
  GFR-binding peptide
  MOD_RES (6), (7), (41), (43): Xaa is C or S
  MOD_RES (21), (22), (23), (24), (25): Xaa is A or G
  MOD_RES (26), (27), (28), (29): Xaa is A or G or is absent

SEQ ID NO: 16947 - protein, 43 aa, Artificial Sequence; identical to SEQ ID NO: 9668
  GFR-binding peptide
  MOD_RES (5), (6), (40), (42): Xaa is C or S
  MOD_RES (20), (21), (22), (23), (24): Xaa is A or G
  MOD_RES (25), (26), (27), (28): Xaa is A or G or is absent

SEQ ID NO: 16948 - protein, 34 aa, Artificial Sequence
  GFR-binding peptide
  MOD_RES (2), (3): Xaa is C or S
AXXVPTELEPLTMLYYDEYDKVVEQLSNEMVVEG

SEQ ID NO: 16949 - protein, 42 aa, Artificial Sequence
  GFR-binding peptide
  MOD_RES (5), (6), (40), (42): Xaa is C or S
  MOD_RES (20), (21), (22), (23), (24): Xaa is A or G
  MOD_RES (25), (26), (27), (28): Xaa is A or G or is absent
VPKPXXAPTQLSPISVLFIXXXXXXXXXYKQYENMVVRAXGX

SEQ ID NO: 16950 - protein, 31 aa, Artificial Sequence
  GFR-binding peptide
VPTELSPISMLFIDEYDKVVYKQYEEMVVEG

SEQ ID NO: 16951 - protein, 37 aa, Artificial Sequence; identical to SEQ ID NO: 9673
  GFR-binding peptide
  MOD_RES (34), (36): Xaa is C or S
  MOD_RES (14), (15), (16), (17), (18): Xaa is A or G
  MOD_RES (19), (20), (21), (22): Xaa is A or G or is absent

SEQ ID NO: 16952 - protein, 39 aa, Artificial Sequence; identical to SEQ ID NO: 9676
  GFR-binding peptide
  MOD_RES (2), (3), (36), (38): Xaa is C or S
  MOD_RES (17), (18), (19), (20), (21): Xaa is A or G
  MOD_RES (22), (23), (24), (25): Xaa is A or G or is absent

SEQ ID NO: 16953 - protein, 43 aa, Artificial Sequence
  GFR-binding peptide
  MOD_RES (7), (41), (43): Xaa is C or S
  MOD_RES (21), (22), (23), (24), (25): Xaa is A or G
  MOD_RES (26), (27), (28), (29): Xaa is A or G or is absent
HVTKPTXAPTKLSPISVLFIXXXXXXXXXYKQYENMVVRSXGX

SEQ ID NO: 16954 - protein, 38 aa, Artificial Sequence
  GFR-binding peptide
  MOD_RES (2), (3), (36), (38): Xaa is C or S
  MOD_RES (17), (18), (19), (20), (21): Xaa is A or G
  MOD_RES (22), (23), (24), (25): Xaa is A or G or is absent
PXXVPQDLEPLTILYYXXXXXXXXXEQLSNMVVKSXKX

SEQ ID NO: 16955 - protein, 35 aa, Artificial Sequence; identical to SEQ ID NO: 9679
  GFR-binding peptide
  MOD_RES (2), (3): Xaa is C or S
  MOD_RES (17), (18), (19), (20), (21): Xaa is A or G
  MOD_RES (22), (23), (24), (25): Xaa is A or G or is absent

SEQ ID NO: 16956 - protein, 37 aa, Artificial Sequence
  GFR-binding peptide
  MOD_RES (4), (5): Xaa is C or S
  MOD_RES (19), (20), (21), (22), (23): Xaa is A or G
  MOD_RES (24), (25), (26), (27): Xaa is A or G or is absent
PPTXXVPTRLEPLTILYYXXXXXXXXXEQLSNDMVVE

SEQ ID NO: 16957 - protein, 36 aa, Artificial Sequence; identical to SEQ ID NO: 9680
  GFR-binding peptide
  MOD_RES (3), (3): Xaa is C or S
  MOD_RES (17), (18), (19), (20), (21): Xaa is A or G
  MOD_RES (22), (23), (24), (25): Xaa is A or G or is absent

SEQ ID NO: 16958 - protein, 40 aa, Artificial Sequence
  GFR-binding peptide
  MOD_RES (3), (4), (38), (40): Xaa is C or S
  MOD_RES (18), (19), (20), (21), (22): Xaa is A or G
  MOD_RES (23), (24), (25), (26): Xaa is A or G or is absent
PTXXVPTRLEPLTILYYXXXXXXXXXEQLSNDMVVESXGX

SEQ ID NO: 16959 - protein, 33 aa, Artificial Sequence
  GFR-binding peptide
  MOD_RES (14), (15), (16), (17), (18): Xaa is A or G
  MOD_RES (19), (20), (21), (22): Xaa is A or G or is absent
VPTRLEPLPIVYYXXXXXXXXXEQLSNDMVVES

SEQ ID NO: 16960 - protein, 38 aa, Artificial Sequence
  GFR-binding peptide
  MOD_RES (7), (7): Xaa is C or S
HVTKPTXAPTKLEPLTVLYYDDSSNVIEQLSNNMVVRS

SEQ ID NO: 16961 - protein, 35 aa, Artificial Sequence
  GFR-binding peptide
  MOD_RES (1), (2), (34): Xaa is C or S
XXAPTQLEPLTVLYYDDSSNVIEQLSNNMVVRAXG

SEQ ID NO: 16962 - protein, 32 aa, Artificial Sequence
  GFR-binding peptide
  MOD_RES (1), (1): Xaa is C or S
XAPTKLEPLPVVYYDDSSNVIEQLSNNMVVRS

SEQ ID NO: 16963 - protein, 36 aa, Artificial Sequence
  GFR-binding peptide
  MOD_RES (1), (34), (36): Xaa is C or S
  MOD_RES (15), (16), (17), (18), (19): Xaa is A or G
  MOD_RES (20), (21), (22), (23): Xaa is A or G or is absent
XVPQALEPLPIVYYXXXXXXXXXEQLSNMIVRSXKX

SEQ ID NO: 16964 - protein, 39 aa, Artificial Sequence
  GFR-binding peptide
  MOD_RES (4), (5), (38): Xaa is C or S
  MOD_RES (19), (20), (21), (22), (23): Xaa is A or G
  MOD_RES (24), (25), (26), (27): Xaa is A or G or is absent
ASPXXVPQDLEPLPIVYYXXXXXXXXXEQLSNMVVKSXK

SEQ ID NO: 16965 - protein, 36 aa, Artificial Sequence; identical to SEQ ID NO: 9683
  GFR-binding peptide
  MOD_RES (5), (6): Xaa is C or S

SEQ ID NO: 16966 - protein, 39 aa, Artificial Sequence
  GFR-binding peptide
  MOD_RES (6), (7): Xaa is C or S
  MOD_RES (21), (22), (23), (24), (25): Xaa is A or G
  MOD_RES (26), (27), (28), (29): Xaa is A or G or is absent
TVPKPXXAPTQLEPLPVVYYXXXXXXXXXEQLSNNMVVR

SEQ ID NO: 16967 - protein, 38 aa, Artificial Sequence
  GFR-binding peptide
  MOD_RES (1), (2), (36), (38): Xaa is C or S
  MOD_RES (16), (17), (18), (19), (20): Xaa is A or G
  MOD_RES (21), (22), (23), (24): Xaa is A or G or is absent
XXVPTRLNAISILYFXXXXXXXXXLKKYRDMVVESXGX

SEQ ID NO: 16968 - protein, 34 aa, Artificial Sequence; identical to SEQ ID NO: 9684
  GFR-binding peptide
  MOD_RES (1), (2), (33): Xaa is C or S

SEQ ID NO: 16969 - protein, 39 aa, Artificial Sequence
  GFR-binding peptide
  MOD_RES (6), (7), (39): Xaa is C or S
YVPKPXXAPTKLEPLTVLYYDDSSNVIEQLSNNMVVRSX

SEQ ID NO: 16970 - protein, 40 aa, Artificial Sequence; identical to SEQ ID NO: 9686
  GFR-binding peptide
  MOD_RES (5), (37), (39): Xaa is C or S

SEQ ID NO: 16971 - protein, 34 aa, Artificial Sequence
  GFR-binding peptide
  MOD_RES (34), (34): Xaa is C or S
  MOD_RES (14), (15), (16), (17), (18): Xaa is A or G
  MOD_RES (19), (20), (21), (22): Xaa is A or G or is absent
VPTRLSPISILFIXXXXXXXXXYKQYEDMVVESX

SEQ ID NO: 16972 - protein, 42 aa, Artificial Sequence
  GFR-binding peptide
  MOD_RES (6), (7), (41): Xaa is C or S
  MOD_RES (21), (22), (23), (24), (25): Xaa is A or G
  MOD_RES (26), (27), (28), (29): Xaa is A or G or is absent
KIPKAXXVPTELEPLPMVYYXXXXXXXXXEQLSNDMVVEGXG

SEQ ID NO: 16973 - protein, 40 aa, Artificial Sequence
  GFR-binding peptide
  MOD_RES (6), (7), (40): Xaa is C or S
  MOD_RES (21), (22), (23), (24), (25): Xaa is A or G
  MOD_RES (26), (27), (28), (29): Xaa is A or G or is absent
ASASPXXVPQDLEPLTILYYXXXXXXXXXEQLSNMVVKSX

SEQ ID NO: 16974 - protein, 41 aa, Artificial Sequence; identical to SEQ ID NO: 9689
  GFR-binding peptide
  MOD_RES (6), (7), (40): Xaa is C or S
  MOD_RES (21), (22), (23), (24), (25): Xaa is A or G
  MOD_RES (26), (27), (28), (29): Xaa is A or G or is absent

SEQ ID NO: 16975 - protein, 34 aa, Artificial Sequence
  GFR-binding peptide
  MOD_RES (1), (2), (34): Xaa is C or S
XXVPTRLEPLPIVYYDSANNVVEQLSNDMVVESX

SEQ ID NO: 16976 - protein, 37 aa, Artificial Sequence; identical to SEQ ID NO: 9690
  GFR-binding peptide
  MOD_RES (4), (5): Xaa is C or S
  MOD_RES (19), (20), (21), (22), (23): Xaa is A or G
  MOD_RES (24), (25), (26), (27): Xaa is A or G or is absent

SEQ ID NO: 16977 - protein, 35 aa, Artificial Sequence; identical to SEQ ID NO: 9691
  GFR-binding peptide
  MOD_RES (1), (2), (35): Xaa is C or S
  MOD_RES (16), (17), (18), (19), (20): Xaa is A or G
  MOD_RES (21), (22), (23), (24): Xaa is A or G or is absent

SEQ ID NO: 16978 - protein, 38 aa, Artificial Sequence
  GFR-binding peptide
  MOD_RES (3), (4), (35), (37): Xaa is C or S
APXXVPQALSPISILFIVGRKPKVYKQYEMIVRSXKXS

SEQ ID NO: 16979 - protein, 40 aa, Artificial Sequence
  GFR-binding peptide
  MOD_RES (5), (6), (40): Xaa is C or S
  MOD_RES (20), (21), (22), (23), (24): Xaa is A or G
  MOD_RES (25), (26), (27), (28): Xaa is A or G or is absent
TPPTXXVPTRLEPLPIVYYXXXXXXXXXEQLSNDMVVESX

SEQ ID NO: 16980 - protein, 37 aa, Artificial Sequence
  GFR-binding peptide
  MOD_RES (1), (2), (35), (37): Xaa is C or S
  MOD_RES (16), (17), (18), (19), (20): Xaa is A or G
  MOD_RES (21), (22), (23), (24): Xaa is A or G or is absent
XXVSQDLEPLPIVYYXXXXXXXXXEQLSNMIVKSXKX

SEQ ID NO: 16981 - protein, 39 aa, Artificial Sequence
  GFR-binding peptide
  MOD_RES (6), (7), (39): Xaa is C or S
SIPKAXXVPTELSPISMLFIDEYDKVVYKQYEEMVVEGX

SEQ ID NO: 16982 - protein, 36 aa, Artificial Sequence
  GFR-binding peptide
  MOD_RES (1), (2), (34), (36): Xaa is C or S
XXVPTELEPLTMLYYDEYDKVVEQLSNEMVVEGXGX

SEQ ID NO: 16983 - protein, 36 aa, Artificial Sequence
  GFR-binding peptide
  MOD_RES (3), (4): Xaa is C or S
  MOD_RES (18), (19), (20), (21), (22): Xaa is A or G
  MOD_RES (23), (24), (25), (26): Xaa is A or G or is absent
KAXXVPTELEPLPMVYYXXXXXXXXXEQLSNEMVVE

SEQ ID NO: 16984 - protein, 42 aa, Artificial Sequence
  GFR-binding peptide
  MOD_RES (5), (6), (39), (41): Xaa is C or S
  MOD_RES (20), (21), (22), (23), (24): Xaa is A or G
  MOD_RES (25), (26), (27), (28): Xaa is A or G or is absent
SAAPXXVPQALSPISILFIXXXXXXXXXYKQYEMIVRSXKXS

SEQ ID NO: 16985 - protein, 30 aa, Artificial Sequence; identical to SEQ ID NO: 9695
  GFR-binding peptide

SEQ ID NO: 16986 - protein, 39 aa, Artificial Sequence
  GFR-binding peptide
  MOD_RES (4), (5), (38): Xaa is C or S
  MOD_RES (19), (20), (21), (22), (23): Xaa is A or G
  MOD_RES (24), (25), (26), (27): Xaa is A or G or is absent
ASPXXVSQDLSPISILFIXXXXXXXXXYKQYEMIVKSXK

SEQ ID NO: 16987 - protein, 37 aa, Artificial Sequence
  GFR-binding peptide
  MOD_RES (5), (6): Xaa is C or S
TPPTXXVPTRLNAISILYFDSANNVVLKKYRDMVVES

SEQ ID NO: 16988 - protein, 34 aa, Artificial Sequence
  GFR-binding peptide
  MOD_RES (32), (34): Xaa is C or S
APTQLEPLPVVYYDDSSNVIEQLSNNMVVRAXGX

SEQ ID NO: 16989 - protein, 42 aa, Artificial Sequence
  GFR-binding peptide
  MOD_RES (4), (5), (39), (41): Xaa is C or S
  MOD_RES (19), (20), (21), (22), (23): Xaa is A or G
  MOD_RES (24), (25), (26), (27): Xaa is A or G or is absent
PKPXXAPTQLSPISVLFIXXXXXXXXXYKQYENMVVRAXGXH

SEQ ID NO: 16990 - protein, 37 aa, Artificial Sequence
  GFR-binding peptide
  MOD_RES (2), (34), (36): Xaa is C or S
TXAPTKLEPLPVVYYDDSSNVIEQLSNNMVVRSXGXH

SEQ ID NO: 16991 - protein, 40 aa, Artificial Sequence
  GFR-binding peptide
  MOD_RES (3), (4), (38), (40): Xaa is C or S
  MOD_RES (18), (19), (20), (21), (22): Xaa is A or G
  MOD_RES (23), (24), (25), (26): Xaa is A or G or is absent
PTXXVPTRLEPLPIVYYXXXXXXXXXEQLSNDMVVESXGX

SEQ ID NO: 16992 - protein, 37 aa, Artificial Sequence
  GFR-binding peptide
  MOD_RES (4), (36): Xaa is C or S
KPTXAPTKLSPISVLFIDDSSNVIYKQYENMVVRSXG

SEQ ID NO: 16993 - protein, 33 aa, Artificial Sequence; identical to SEQ ID NO: 9706
  GFR-binding peptide
  MOD_RES (31), (33): Xaa is C or S

SEQ ID NO: 16994 - protein, 39 aa, Artificial Sequence
  GFR-binding peptide
  MOD_RES (6), (7), (38): Xaa is C or S
ASAAPXXVPQALSPISILFIVGRKPKVYKQYEMIVRSXK

SEQ ID NO: 16995 - protein, 39 aa, Artificial Sequence; identical to SEQ ID NO: 9708
  GFR-binding peptide
  MOD_RES (6), (7): Xaa is C or S
  MOD_RES (21), (22), (23), (24), (25): Xaa is A or G
  MOD_RES (26), (27), (28), (29): Xaa is A or G or is absent

SEQ ID NO: 16996 - protein, 40 aa, Artificial Sequence; identical to SEQ ID NO: 9709
  GFR-binding peptide
  MOD_RES (5), (6), (39): Xaa is C or S
  MOD_RES (20), (21), (22), (23), (24): Xaa is A or G
  MOD_RES (25), (26), (27), (28): Xaa is A or G or is absent

SEQ ID NO: 16997 - protein, 43 aa, Artificial Sequence
  GFR-binding peptide
  MOD_RES (6), (7), (40), (42): Xaa is C or S
  MOD_RES (21), (22), (23), (24), (25): Xaa is A or G
  MOD_RES (26), (27), (28), (29): Xaa is A or G or is absent
ASASPXXVSQDLSPISILFIXXXXXXXXXYKQYEMIVKSXKXS

SEQ ID NO: 16998 - protein, 35 aa, Artificial Sequence
  GFR-binding peptide
  MOD_RES (34), (34): Xaa is C or S
  MOD_RES (14), (15), (16), (17), (18): Xaa is A or G
  MOD_RES (19), (20), (21), (22): Xaa is A or G or is absent
VPTELSPISMLFIXXXXXXXXXYKQYEEMVVEGXG

SEQ ID NO: 16999 - protein, 37 aa, Artificial Sequence
  GFR-binding peptide
  MOD_RES (1), (35), (37): Xaa is C or S
  MOD_RES (15), (16), (17), (18), (19): Xaa is A or G
  MOD_RES (20), (21), (22), (23): Xaa is A or G or is absent
XVPTRLSAISILYLXXXXXXXXXLKNYQDMVVESXGX

SEQ ID NO: 17000 - protein, 35 aa, Artificial Sequence; identical to SEQ ID NO: 9713
  GFR-binding peptide
  MOD_RES (4), (5): Xaa is C or S

SEQ ID NO: 17001 - protein, 37 aa, Artificial Sequence
  GFR-binding peptide
  MOD_RES (1), (2), (34), (36): Xaa is C or S
XXAPTQLEPLTVLYYDDSSNVIEQLSNNMVVRAXGXH

SEQ ID NO: 17002 - protein, 34 aa, Artificial Sequence
  GFR-binding peptide
  MOD_RES (1), (2): Xaa is C or S
  MOD_RES (16), (17), (18), (19), (20): Xaa is A or G
  MOD_RES (21), (22), (23), (24): Xaa is A or G or is absent
XXAPTKLSPISVLFIXXXXXXXXXYKQYENMVVR

SEQ ID NO: 17003 - protein, 34 aa, Artificial Sequence; identical to SEQ ID NO: 9718
  GFR-binding peptide
  MOD_RES (2), (3): Xaa is C or S

SEQ ID NO: 17004 - protein, 35 aa, Artificial Sequence
  GFR-binding peptide
  MOD_RES (1), (2), (34): Xaa is C or S
XXAPTKLEPLTVLYYDDSSNVIEQLSNNMVVRSXG

SEQ ID NO: 17005 - protein, 38 aa, Artificial Sequence
  GFR-binding peptide
  MOD_RES (3), (4), (36), (38): Xaa is C or S
KPXXAPTKLSPISVLFIDDSSNVIYKQYENMVVRSXGX

SEQ ID NO: 17006 - protein, 35 aa, Artificial Sequence; identical to SEQ ID NO: 9720
  GFR-binding peptide
  MOD_RES (1), (34): Xaa is C or S
  MOD_RES (15), (16), (17), (18), (19): Xaa is A or G
  MOD_RES (20), (21), (22), (23): Xaa is A or G or is absent

SEQ ID NO: 17007 - protein, 36 aa, Artificial Sequence
  GFR-binding peptide
  MOD_RES (4), (4): Xaa is C or S
  MOD_RES (18), (19), (20), (21), (22): Xaa is A or G
  MOD_RES (23), (24), (25), (26): Xaa is A or G or is absent
KPTXAPTKLEPLPVVYYXXXXXXXXXEQLSNNMVVR

SEQ ID NO: 17008 - protein, 37 aa, Artificial Sequence; identical to SEQ ID NO: 9721
  GFR-binding peptide
  MOD_RES (4), (5), (37): Xaa is C or S

SEQ ID NO: 17009 - protein, 42 aa, Artificial Sequence
  GFR-binding peptide
  MOD_RES (6), (7), (41): Xaa is C or S
  MOD_RES (21), (22), (23), (24), (25): Xaa is A or G
  MOD_RES (26), (27), (28), (29): Xaa is A or G or is absent
TVPKPXXAPTQLSPISVLFIXXXXXXXXXYKQYENMVVRAXG

SEQ ID NO: 17010 - protein, 34 aa, Artificial Sequence; identical to SEQ ID NO: 9724
  GFR-binding peptide
  MOD_RES (1), (2): Xaa is C or S
  MOD_RES (16), (17), (18), (19), (20): Xaa is A or G
  MOD_RES (21), (22), (23), (24): Xaa is A or G or is absent

SEQ ID NO: 17011 - protein, 30 aa, Artificial Sequence; identical to SEQ ID NO: 9729
  GFR-binding peptide

SEQ ID NO: 17012 - protein, 40 aa, Artificial Sequence; identical to SEQ ID NO: 9731
  GFR-binding peptide
  MOD_RES (6), (7), (39): Xaa is C or S

SEQ ID NO: 17013 - protein, 36 aa, Artificial Sequence
  GFR-binding peptide
  MOD_RES (2), (3): Xaa is C or S
  MOD_RES (17), (18), (19), (20), (21): Xaa is A or G
  MOD_RES (22), (23), (24), (25): Xaa is A or G or is absent
PXXAPTKLEPLPVVYYXXXXXXXXXEQLSNNMVVRS

SEQ ID NO: 17014 - protein, 43 aa, Artificial Sequence
  GFR-binding peptide
  MOD_RES (5), (6), (40), (42): Xaa is C or S
  MOD_RES (20), (21), (22), (23), (24): Xaa is A or G
  MOD_RES (25), (26), (27), (28): Xaa is A or G or is absent
IPKAXXVPTELSPISMLFIXXXXXXXXXYKQYEDMVVEGXGXR

SEQ ID NO: 17015 - protein, 37 aa, Artificial Sequence; identical to SEQ ID NO: 9733
  GFR-binding peptide
  MOD_RES (3), (4), (35), (37): Xaa is C or S

SEQ ID NO: 17016 - protein, 37 aa, Artificial Sequence
  GFR-binding peptide
  MOD_RES (3), (37): Xaa is C or S
  MOD_RES (17), (18), (19), (20), (21): Xaa is A or G
  MOD_RES (22), (23), (24), (25): Xaa is A or G or is absent
PTXAPTKLEPLPVVYYXXXXXXXXXEQLSNNMVVRSX

SEQ ID NO: 17017 - protein, 41 aa, Artificial Sequence
  GFR-binding peptide
  MOD_RES (4), (5), (38), (40): Xaa is C or S
  MOD_RES (19), (20), (21), (22), (23): Xaa is A or G
  MOD_RES (24), (25), (26), (27): Xaa is A or G or is absent
AAPXXVPQALEPLPIVYYXXXXXXXXXEQLSNMIVRSXKXS

SEQ ID NO: 17018 - protein, 40 aa, Artificial Sequence; identical to SEQ ID NO: 9735
  GFR-binding peptide
  MOD_RES (5), (6), (40): Xaa is C or S
  MOD_RES (20), (21), (22), (23), (24): Xaa is A or G
  MOD_RES (25), (26), (27), (28): Xaa is A or G or is absent

SEQ ID NO: 17019 - protein, 36 aa, Artificial Sequence
  GFR-binding peptide
  MOD_RES (1), (2), (36): Xaa is C or S
  MOD_RES (16), (17), (18), (19), (20): Xaa is A or G
  MOD_RES (21), (22), (23), (24): Xaa is A or G or is absent
XXVPTRLEPLTILYYXXXXXXXXXEQLSNDMVVESX

SEQ ID NO: 17020 - protein, 37 aa, Artificial Sequence
  GFR-binding peptide
  MOD_RES (4), (5): Xaa is C or S
  MOD_RES (19), (20), (21), (22), (23): Xaa is A or G
  MOD_RES (24), (25), (26), (27): Xaa is A or G or is absent
PPTXXVPTRLEPLPIVYYXXXXXXXXXEQLSNDMVVE

SEQ ID NO: 17021 - protein, 36 aa, Artificial Sequence
  GFR-binding peptide
  MOD_RES (3), (4): Xaa is C or S
  MOD_RES (18), (19), (20), (21), (22): Xaa is A or G
  MOD_RES (23), (24), (25), (26): Xaa is A or G or is absent
KAXXVPTELEPLTMLYYXXXXXXXXXEQLSNEMVVE

SEQ ID NO: 17022 - protein, 40 aa, Artificial Sequence; identical to SEQ ID NO: 9741
  GFR-binding peptide
  MOD_RES (4), (5), (38), (40): Xaa is C or S
  MOD_RES (19), (20), (21), (22), (23): Xaa is A or G
  MOD_RES (24), (25), (26), (27): Xaa is A or G or is absent

SEQ ID NO: 17023 - protein, 39 aa, Artificial Sequence
  GFR-binding peptide
  MOD_RES (4), (5), (38): Xaa is C or S
  MOD_RES (19), (20), (21), (22), (23): Xaa is A or G
  MOD_RES (24), (25), (26), (27): Xaa is A or G or is absent
AAPXXVPQALSPISILFIXXXXXXXXXYKQYEMIVRSXK

SEQ ID NO: 17024 - protein, 37 aa, Artificial Sequence; identical to SEQ ID NO: 9745
  GFR-binding peptide
  MOD_RES (34), (36): Xaa is C or S
  MOD_RES (14), (15), (16), (17), (18): Xaa is A or G
  MOD_RES (19), (20), (21), (22): Xaa is A or G or is absent

SEQ ID NO: 17025 - protein, 39 aa, Artificial Sequence
  GFR-binding peptide
  MOD_RES (6), (7), (39): Xaa is C or S
KIPKAXXVPTELEPLPMVYYDENEKVVEQLSNDMVVEGX

SEQ ID NO: 17026 - protein, 34 aa, Artificial Sequence; identical to SEQ ID NO: 9746
  GFR-binding peptide
  MOD_RES (1), (1): Xaa is C or S
  MOD_RES (15), (16), (17), (18), (19): Xaa is A or G
  MOD_RES (20), (21), (22), (23): Xaa is A or G or is absent

SEQ ID NO: 17027 - protein, 36 aa, Artificial Sequence
  GFR-binding peptide
  MOD_RES (1), (2), (33), (35): Xaa is C or S
XXVPQALSPISILFIVGRKPKVYKQYEMIVRSXKXS

SEQ ID NO: 17028 - protein, 40 aa, Artificial Sequence; identical to SEQ ID NO: 9748
  GFR-binding peptide
  MOD_RES (4), (5), (39): Xaa is C or S
  MOD_RES (19), (20), (21), (22), (23): Xaa is A or G
  MOD_RES (24), (25), (26), (27): Xaa is A or G or is absent

SEQ ID NO: 17029 - protein, 35 aa, Artificial Sequence; identical to SEQ ID NO: 9754
  GFR-binding peptide
  MOD_RES (1), (2), (34): Xaa is C or S

SEQ ID NO: 17030 - protein, 38 aa, Artificial Sequence
  GFR-binding peptide
  MOD_RES (2), (3), (37): Xaa is C or S
  MOD_RES (17), (18), (19), (20), (21): Xaa is A or G
  MOD_RES (22), (23), (24), (25): Xaa is A or G or is absent
PXXAPTKLEPLTVLYYXXXXXXXXXEQLSNNMVVRSXG

SEQ ID NO: 17031 - protein, 39 aa, Artificial Sequence; identical to SEQ ID NO: 9755
  GFR-binding peptide
  MOD_RES (3), (4), (36), (38): Xaa is C or S

SEQ ID NO: 17032 - protein, 38 aa, Artificial Sequence; identical to SEQ ID NO: 9756
  GFR-binding peptide
  MOD_RES (1), (35), (37): Xaa is C or S
  MOD_RES (15), (16), (17), (18), (19): Xaa is A or G
  MOD_RES (20), (21), (22), (23): Xaa is A or G or is absent

SEQ ID NO: 17033 - protein, 32 aa, Artificial Sequence
  GFR-binding peptide
  MOD_RES (1), (1): Xaa is C or S
XVPTELEPLPMVYYDENEKVVEQLSNDMVVEG

SEQ ID NO: 17034 - protein, 41 aa, Artificial Sequence
  GFR-binding peptide
  MOD_RES (4), (38), (40): Xaa is C or S
  MOD_RES (18), (19), (20), (21), (22): Xaa is A or G
  MOD_RES (23), (24), (25), (26): Xaa is A or G or is absent
KPTXAPTKLSPISVLFIXXXXXXXXXYKQYENMVVRSXGXH

SEQ ID NO: 17035 - protein, 41 aa, Artificial Sequence
  GFR-binding peptide
  MOD_RES (5), (6), (40): Xaa is C or S
  MOD_RES (20), (21), (22), (23), (24): Xaa is A or G
  MOD_RES (25), (26), (27), (28): Xaa is A or G or is absent
TPPTXXVPTRLNAISILYFXXXXXXXXXLKKYRDMVVESXG

SEQ ID NO: 17036 - protein, 33 aa, Artificial Sequence
  GFR-binding peptide
  MOD_RES (1), (2): Xaa is C or S
XXAPTKLSPISVLFIDDSSNVIYKQYENMVVRS

SEQ ID NO: 17037 - protein, 34 aa, Artificial Sequence
  GFR-binding peptide
  MOD_RES (3), (4): Xaa is C or S
SPXXVPQDLEPLPIVYYVGRTPKVEQLSNMVVKS

SEQ ID NO: 17038 - protein, 37 aa, Artificial Sequence
  GFR-binding peptide
  MOD_RES (1), (2), (34), (36): Xaa is C or S
XXVPTELEPLPMVYYDEYDKVVEQLSNEMVVEGXGXR

SEQ ID NO: 17039 - protein, 37 aa, Artificial Sequence; identical to SEQ ID NO: 9764
  GFR-binding peptide
  MOD_RES (3), (4), (35), (37): Xaa is C or S

SEQ ID NO: 17040 - protein, 35 aa, Artificial Sequence; identical to SEQ ID NO: 9767
  GFR-binding peptide
  MOD_RES (1), (2): Xaa is C or S
  MOD_RES (16), (17), (18), (19), (20): Xaa is A or G
  MOD_RES (21), (22), (23), (24): Xaa is A or G or is absent

SEQ ID NO: 17041 - protein, 39 aa, Artificial Sequence
  GFR-binding peptide
  MOD_RES (1), (2), (36), (38): Xaa is C or S
  MOD_RES (16), (17), (18), (19), (20): Xaa is A or G
  MOD_RES (21), (22), (23), (24): Xaa is A or G or is absent
XXAPTKLSPISVLFIXXXXXXXXXYKQYENMVVRSXGXH

SEQ ID NO: 17042 - protein, 35 aa, Artificial Sequence; identical to SEQ ID NO: 9770
  GFR-binding peptide
  MOD_RES (1), (32), (34): Xaa is C or S

SEQ ID NO: 17043 - protein, 38 aa, Artificial Sequence
  GFR-binding peptide
  MOD_RES (5), (5): Xaa is C or S
  MOD_RES (19), (20), (21), (22), (23): Xaa is A or G
  MOD_RES (24), (25), (26), (27): Xaa is A or G or is absent
TKPTXAPTKLEPLPVVYYXXXXXXXXXEQLSNNMVVRS

SEQ ID NO: 17044 - protein, 38 aa, Artificial Sequence
  GFR-binding peptide
  MOD_RES (3), (4), (36), (38): Xaa is C or S
KPXXAPTKLEPLTVLYYDDSSNVIEQLSNNMVVRSXGX

SEQ ID NO: 17045 - protein, 33 aa, Artificial Sequence; identical to SEQ ID NO: 9775
  GFR-binding peptide
  MOD_RES (2), (3): Xaa is C or S

SEQ ID NO: 17046 - protein, 33 aa, Artificial Sequence; identical to SEQ ID NO: 9776
  GFR-binding peptide
  MOD_RES (1), (32): Xaa is C or S

SEQ ID NO: 17047 - protein, 42 aa, Artificial Sequence
  GFR-binding peptide
  MOD_RES (2), (36): Xaa is C or S
  MOD_RES (14), (15), (16), (17), (18): Xaa is A or G
  MOD_RES (19), (20), (21), (22): Xaa is A or G or is absent
EXKNHQLFVQVEKXXXXXXXXXVKAMKVSREETPVXELGEDN

SEQ ID NO: 17048 - protein, 37 aa, Artificial Sequence
  GFR-binding peptide
  MOD_RES (1), (1): Xaa is C or S
  MOD_RES (14), (15), (16), (17), (18): Xaa is A or G
  MOD_RES (19), (20), (21), (22): Xaa is A or G or is absent
XELHEELRSMEGLXXXXXXXXXMIQVTINSHHVRSPQ

SEQ ID NO: 17049 - protein, 36 aa, Artificial Sequence
  GFR-binding peptide
  MOD_RES (1), (3): Xaa is C or S
XEXQSHEELSMEGIHQGQHPKIRMIQMTINSQGTPV

SEQ ID NO: 17050 - protein, 40 aa, Artificial Sequence
  GFR-binding peptide
  MOD_RES (1), (35): Xaa is C or S
  MOD_RES (13), (14), (15), (16), (17): Xaa is A or G
  MOD_RES (18), (19), (20), (21): Xaa is A or G or is absent
XQSHEELSMEGLXXXXXXXXXMIQMTINSQGTPVXELGED

SEQ ID NO: 17051 - protein, 43 aa, Artificial Sequence
  GFR-binding peptide
  MOD_RES (1), (3), (37): Xaa is C or S
XEXKNHQLFSMEGLHQGQHPKIRMIQMTINSEETPVXELGEDN

SEQ ID NO: 17052 - protein, 35 aa, Artificial Sequence
  GFR-binding peptide
  MOD_RES (1), (35): Xaa is C or S
XQSHEELSMEGIHQGQHPKIRMIQMTINSQGTPVX

SEQ ID NO: 17053 - protein, 42 aa, Artificial Sequence
  GFR-binding peptide
  MOD_RES (2), (4), (41): Xaa is C or S
  MOD_RES (17), (18), (19), (20), (21): Xaa is A or G
  MOD_RES (22), (23), (24), (25): Xaa is A or G or is absent
AXAXELHEELRSMEGIXXXXXXXXXMIQVTINSHHVRSPQXK

SEQ ID NO: 17054 - protein, 38 aa, Artificial Sequence
  GFR-binding peptide
  MOD_RES (1), (3): Xaa is C or S
  MOD_RES (16), (17), (18), (19), (20): Xaa is A or G
  MOD_RES (21), (22), (23), (24): Xaa is A or G or is absent
XAXELHEELRSMEGIXXXXXXXXXMIQVTINSHHVRSP

SEQ ID NO: 17055 - protein, 41 aa, Artificial Sequence
  GFR-binding peptide
  MOD_RES (1), (3), (40): Xaa is C or S
  MOD_RES (16), (17), (18), (19), (20): Xaa is A or G
  MOD_RES (21), (22), (23), (24): Xaa is A or G or is absent
XKXALHDELTSMEGIXXXXXXXXXMIQVTINSLQVQTPRXQ

SEQ ID NO: 17056 - protein, 39 aa, Artificial Sequence
  GFR-binding peptide
  MOD_RES (2), (36): Xaa is C or S
  MOD_RES (14), (15), (16), (17), (18): Xaa is A or G
  MOD_RES (19), (20), (21), (22): Xaa is A or G or is absent
EXKNHQLFVQVEKXXXXXXXXXVKAMKVSREETPVXELG

SEQ ID NO: 17057 - protein, 32 aa, Artificial Sequence
  GFR-binding peptide
NHQLFVTAKKHQGQHPKIRIKRMQVPREETPV

SEQ ID NO: 17058 - protein, 42 aa, Artificial Sequence
  GFR-binding peptide
  MOD_RES (1), (38): Xaa is C or S
XELHEELRVTAKKLKPKKRVYEIKRVQVPRHHVRSPQXKVSS

SEQ ID NO: 17059 - protein, 34 aa, Artificial Sequence
  GFR-binding peptide
  MOD_RES (33), (33): Xaa is C or S
  MOD_RES (11), (12), (13), (14), (15): Xaa is A or G
  MOD_RES (16), (17), (18), (19): Xaa is A or G or is absent
SHEELVTAKKXXXXXXXXXIKRMQVPRQGTPVXE

SEQ ID NO: 17060 - protein, 35 aa, Artificial Sequence
  GFR-binding peptide
  MOD_RES (35), (35): Xaa is C or S
  MOD_RES (11), (12), (13), (14), (15): Xaa is A or G
  MOD_RES (16), (17), (18), (19): Xaa is A or G or is absent
HDELTVTAKKXXXXXXXXXIKRVQVPRLQVQTPRX

SEQ ID NO: 17061 - protein, 36 aa, Artificial Sequence
  GFR-binding peptide
  MOD_RES (35), (35): Xaa is C or S
  MOD_RES (11), (12), (13), (14), (15): Xaa is A or G
  MOD_RES (16), (17), (18), (19): Xaa is A or G or is absent
HEELRSMEGLXXXXXXXXXMIQVTINSHHVRSPQXK

SEQ ID NO: 17062 - protein, 43 aa, Artificial Sequence
  GFR-binding peptide
  MOD_RES (1), (3), (37): Xaa is C or S
  MOD_RES (15), (16), (17), (18), (19): Xaa is A or G
  MOD_RES (20), (21), (22), (23): Xaa is A or G or is absent
XEXQSHEELVQVEKXXXXXXXXXVKAMKVSRQGTPVXELGEDN

SEQ ID NO: 17063 - protein, 40 aa, Artificial Sequence
  GFR-binding peptide
  MOD_RES (34), (34): Xaa is C or S
  MOD_RES (12), (13), (14), (15), (16): Xaa is A or G
  MOD_RES (17), (18), (19), (20): Xaa is A or G or is absent
QSHEELVQVEKXXXXXXXXXVKAMKVSRQGTPVXELGEDN

SEQ ID NO: 17064 - protein, 38 aa, Artificial Sequence
  GFR-binding peptide
  MOD_RES (37), (37): Xaa is C or S
  MOD_RES (13), (14), (15), (16), (17): Xaa is A or G
  MOD_RES (18), (19), (20), (21): Xaa is A or G or is absent
ALHDELTVQVEKXXXXXXXXXVKAVKVSRLQVQTPRXQ

SEQ ID NO: 17065 - protein, 41 aa, Artificial Sequence
  GFR-binding peptide
  MOD_RES (2), (4), (38): Xaa is C or S
  MOD_RES (16), (17), (18), (19), (20): Xaa is A or G
  MOD_RES (21), (22), (23), (24): Xaa is A or G or is absent
RXEXQSHEELVQVEKXXXXXXXXXVKAMKVSRQGTPVXELG

SEQ ID NO: 17066 - protein, 36 aa, Artificial Sequence
  GFR-binding peptide
  MOD_RES (2), (36): Xaa is C or S
  MOD_RES (14), (15), (16), (17), (18): Xaa is A or G
  MOD_RES (19), (20), (21), (22): Xaa is A or G or is absent
EXQSHEELVQVEKXXXXXXXXXVKAMKVSRQGTPVX

SEQ ID NO: 17067 - protein, 36 aa, Artificial Sequence
  GFR-binding peptide
  MOD_RES (2), (36): Xaa is C or S
  MOD_RES (14), (15), (16), (17), (18): Xaa is A or G
  MOD_RES (19), (20), (21), (22): Xaa is A or G or is absent
EXKNHQLFSMEGIXXXXXXXXXMIQMTINSEETPVX

SEQ ID NO: 17068 - protein, 35 aa, Artificial Sequence
  GFR-binding peptide
  MOD_RES (2), (2): Xaa is C or S
EXKNHQLFSMEGLHQGQHPKIRMIQMTINSEETPV

SEQ ID NO: 17069 - protein, 39 aa, Artificial Sequence
  GFR-binding peptide
  MOD_RES (1), (38): Xaa is C or S
XELHEELRSMEGILKPKKRVYEMIQVTINSHHVRSPQXK

SEQ ID NO: 17070 - protein, 38 aa, Artificial Sequence
  GFR-binding peptide
  MOD_RES (1), (35): Xaa is C or S
  MOD_RES (13), (14), (15), (16), (17): Xaa is A or G
  MOD_RES (18), (19), (20), (21): Xaa is A or G or is absent
XKNHQLFSMEGIXXXXXXXXXMIQMTINSEETPVXELG

SEQ ID NO: 17071 - protein, 36 aa, Artificial Sequence
  GFR-binding peptide
  MOD_RES (1), (3): Xaa is C or S
XEXKNHQLFVQVEKHQGQHPKIRVKAMKVSREETPV

SEQ ID NO: 17072 - protein, 40 aa, Artificial Sequence
  GFR-binding peptide
  MOD_RES (2), (39): Xaa is C or S
  MOD_RES (15), (16), (17), (18), (19): Xaa is A or G
  MOD_RES (20), (21), (22), (23): Xaa is A or G or is absent
KXALHDELTVQVEKXXXXXXXXXVKAVKVSRLQVQTPRXQ

SEQ ID NO: 17073 - protein, 37 aa, Artificial Sequence
  GFR-binding peptide
  MOD_RES (34), (34): Xaa is C or S
  MOD_RES (12), (13), (14), (15), (16): Xaa is A or G
  MOD_RES (17), (18), (19), (20): Xaa is A or G or is absent
QSHEELVQVEKXXXXXXXXXVKAMKVSRQGTPVXELG

SEQ ID NO: 17074 - protein, 37 aa, Artificial Sequence
  GFR-binding peptide
  MOD_RES (36), (36): Xaa is C or S
  MOD_RES (12), (13), (14), (15), (16): Xaa is A or G
  MOD_RES (17), (18), (19), (20): Xaa is A or G or is absent
LHEELRVQVEKXXXXXXXXXVKAVKVSRHHVRSPQXK

SEQ ID NO: 17075 - protein, 40 aa, Artificial Sequence
  GFR-binding peptide
  MOD_RES (2), (4): Xaa is C or S
  MOD_RES (17), (18), (19), (20), (21): Xaa is A or G
  MOD_RES (22), (23), (24), (25): Xaa is A or G or is absent
EXKXALHDELTVQVEKXXXXXXXXXVKAVKVSRLQVQTPR

SEQ ID NO: 17076 - protein, 37 aa, Artificial Sequence
  GFR-binding peptide
  MOD_RES (37), (37): Xaa is C or S
ALHDELTVQVEKFIPKKRVIEVKAVKVSRLQVQTPRX

SEQ ID NO: 17077 - protein, 42 aa, Artificial Sequence
  GFR-binding peptide
  MOD_RES (1), (38): Xaa is C or S
  MOD_RES (14), (15), (16), (17), (18): Xaa is A or G
  MOD_RES (19), (20), (21), (22): Xaa is A or G or is absent
XALHDELTSMEGIXXXXXXXXXMIQVTINSLQVQTPRXQVNR

SEQ ID NO: 17078 - protein, 36 aa, Artificial Sequence
  GFR-binding peptide
  MOD_RES (2), (2): Xaa is C or S
  MOD_RES (15), (16), (17), (18), (19): Xaa is A or G
  MOD_RES (20), (21), (22), (23): Xaa is A or G or is absent
AXELHEELRVTAKKXXXXXXXXXIKRVQVPRHHVRS

SEQ ID NO: 17079 - protein, 36 aa, Artificial Sequence
  GFR-binding peptide
  MOD_RES (36), (36): Xaa is C or S
LHEELRSMEGILKPKKRVYEMIQVTINSHHVRSPQX

SEQ ID NO: 17080 - protein, 45 aa, Artificial Sequence
  GFR-binding peptide
  MOD_RES (2), (4), (41): Xaa is C or S
AXAXELHEELRSMEGILKPKKRVYEMIQVTINSHHVRSPQXKVSS

SEQ ID NO: 17081 - protein, 34 aa, Artificial Sequence
  GFR-binding peptide
ELHEELRVTAKKLKPKKRVYEIKRVQVPRHHVRS

SEQ ID NO: 17082 - protein, 37 aa, Artificial Sequence
  GFR-binding peptide
  MOD_RES (2), (4): Xaa is C or S
RXEXQSHEELVTAKKHQGQHPKIRIKRMQVPRQGTPV

SEQ ID NO: 17083 - protein, 35 aa, Artificial Sequence
  GFR-binding peptide
  MOD_RES (35), (35): Xaa is C or S
HDELTSMEGIFIPKKRVIEMIQVTINSLQVQTPRX

SEQ ID NO: 17084 - protein, 37 aa, Artificial Sequence
  GFR-binding peptide
  MOD_RES (1), (1): Xaa is C or S
  MOD_RES (14), (15), (16), (17), (18): Xaa is A or G
  MOD_RES (19), (20), (21), (22): Xaa is A or G or is absent
XELHEELRVQVEKXXXXXXXXXVKAVKVSRHHVRSPQ

SEQ ID NO: 17085 - protein, 34 aa, Artificial Sequence
  GFR-binding peptide
  MOD_RES (1), (1): Xaa is C or S
  MOD_RES (13), (14), (15), (16), (17): Xaa is A or G
  MOD_RES (18), (19), (20), (21): Xaa is A or G or is absent
XKNHQLFSMEGLXXXXXXXXXMIQMTINSEETPV

SEQ ID NO: 17086 - protein, 33 aa, Artificial Sequence
  GFR-binding peptide
KNHQLFSMEGLHQGQHPKIRMIQMTINSEETPV

SEQ ID NO: 17087 - protein, 44 aa, Artificial Sequence
  GFR-binding peptide
  MOD_RES (2), (4), (41): Xaa is C or S
EXKXALHDELTSMEGIFIPKKRVIEMIQVTINSLQVQTPRXQVN

SEQ ID NO: 17088 - protein, 40 aa, Artificial Sequence
  GFR-binding peptide
  MOD_RES (1), (3), (37): Xaa is C or S
  MOD_RES (15), (16), (17), (18), (19): Xaa is A or G
  MOD_RES (20), (21), (22), (23): Xaa is A or G or is absent
XEXKNHQLFVQVEKXXXXXXXXXVKAMKVSREETPVXELG

SEQ ID NO: 17089 - protein, 39 aa, Artificial Sequence
  GFR-binding peptide
  MOD_RES (2), (36): Xaa is C or S
  MOD_RES (14), (15), (16), (17), (18): Xaa is A or G
  MOD_RES (19), (20), (21), (22): Xaa is A or G or is absent
EXKNHQLFSMEGLXXXXXXXXXMIQMTINSEETPVXELG

SEQ ID NO: 17090 - protein, 38 aa, Artificial Sequence
  GFR-binding peptide
  MOD_RES (1), (3), (37): Xaa is C or S
  MOD_RES (15), (16), (17), (18), (19): Xaa is A or G
  MOD_RES (20), (21), (22), (23): Xaa is A or G or is absent
XEXQSHEELSMEGLXXXXXXXXXMIQMTINSQGTPVXE

SEQ ID NO: 17091 - protein, 41 aa, Artificial Sequence
  GFR-binding peptide
  MOD_RES (1), (35): Xaa is C or S
  MOD_RES (13), (14), (15), (16), (17): Xaa is A or G
  MOD_RES (18), (19), (20), (21): Xaa is A or G or is absent
XQSHEELVQVEKXXXXXXXXXVKAMKVSRQGTPVXELGEDN

SEQ ID NO: 17092 - protein, 40 aa, Artificial Sequence
  GFR-binding peptide
  MOD_RES (2), (39): Xaa is C or S
AXELHEELRVQVEKLKPKKRVYEVKAVKVSRHHVRSPQXK

SEQ ID NO: 17093 - protein, 42 aa, Artificial Sequence
  GFR-binding peptide
  MOD_RES (2), (39): Xaa is C or S
  MOD_RES (15), (16), (17), (18), (19): Xaa is A or G
  MOD_RES (20), (21), (22), (23): Xaa is A or G or is absent
KXALHDELTSMEGIXXXXXXXXXMIQVTINSLQVQTPRXQVN

SEQ ID NO: 17094 - protein, 36 aa, Artificial Sequence
  GFR-binding peptide
  MOD_RES (33), (33): Xaa is C or S
  MOD_RES (11), (12), (13), (14), (15): Xaa is A or G
  MOD_RES (16), (17), (18), (19): Xaa is A or G or is absent
SHEELVQVEKXXXXXXXXXVKAMKVSRQGTPVXELG

SEQ ID NO: 17095 - protein, 38 aa, Artificial Sequence
  GFR-binding peptide
  MOD_RES (2), (36): Xaa is C or S
EXQSHEELVQVEKHQGQHPKIRVKAMKVSRQGTPVXEL

SEQ ID NO: 17096 - protein, 38 aa, Artificial Sequence
  GFR-binding peptide
  MOD_RES (2), (2): Xaa is C or S
AXELHEELRVTAKKLKPKKRVYEIKRVQVPRHHVRSPQ

SEQ ID NO: 17097 - protein, 40 aa, Artificial Sequence
  GFR-binding peptide
  MOD_RES (1), (35): Xaa is C or S
XQSHEELSMEGIHQGQHPKIRMIQMTINSQGTPVXELGED

SEQ ID NO: 17098 - protein, 37 aa, Artificial Sequence
  GFR-binding peptide
  MOD_RES (2), (4): Xaa is C or S
  MOD_RES (16), (17), (18), (19), (20): Xaa is A or G
  MOD_RES (21), (22), (23), (24): Xaa is A or G or is absent
RXEXQSHEELSMEGIXXXXXXXXXMIQMTINSQGTPV

SEQ ID NO: 17099 - protein, 39 aa, Artificial Sequence
  GFR-binding peptide
  MOD_RES (35), (35): Xaa is C or S
  MOD_RES (11), (12), (13), (14), (15): Xaa is A or G
  MOD_RES (16), (17), (18), (19): Xaa is A or G or is absent
HEELRVTAKKXXXXXXXXXIKRVQVPRHHVRSPQXKVSS

SEQ ID NO: 17100 - protein, 37 aa, Artificial Sequence
  GFR-binding peptide
  MOD_RES (35), (35): Xaa is C or S
HDELTSMEGIFIPKKRVIEMIQVTINSLQVQTPRXQV

SEQ ID NO: 17101 - protein, 38 aa, Artificial Sequence
  GFR-binding peptide
  MOD_RES (36), (36): Xaa is C or S
LHEELRVQVEKLKPKKRVYEVKAVKVSRHHVRSPQXKV

SEQ ID NO: 17102 - protein, 39 aa, Artificial Sequence
  GFR-binding peptide
  MOD_RES (37), (37): Xaa is C or S
ELHEELRVQVEKLKPKKRVYEVKAVKVSRHHVRSPQXKV

SEQ ID NO: 17103 - protein, 43 aa, Artificial Sequence
  GFR-binding peptide
  MOD_RES (2), (39): Xaa is C or S
  MOD_RES (15), (16), (17), (18), (19): Xaa is A or G
  MOD_RES (20), (21), (22), (23): Xaa is A or G or is absent
AXELHEELRVQVEKXXXXXXXXXVKAVKVSRHHVRSPQXKVSS

SEQ ID NO: 17104 - protein, 42 aa, Artificial Sequence
  GFR-binding peptide
  MOD_RES (1), (3), (37): Xaa is C or S
XEXKNHQLFVTAKKHQGQHPKIRIKRMQVPREETPVXELGED

SEQ ID NO: 17105 - protein, 41 aa, Artificial Sequence
  GFR-binding peptide
  MOD_RES (1), (38): Xaa is C or S
XELHEELRSMEGILKPKKRVYEMIQVTINSHHVRSPQXKVS

SEQ ID NO: 17106 - protein, 35 aa, Artificial Sequence
  GFR-binding peptide
  MOD_RES (13), (14), (15), (16), (17): Xaa is A or G
  MOD_RES (18), (19), (20), (21): Xaa is A or G or is absent
ALHDELTVQVEKXXXXXXXXXVKAVKVSRLQVQTP

SEQ ID NO: 17107 - protein, 38 aa, Artificial Sequence
  GFR-binding peptide
  MOD_RES (35), (35): Xaa is C or S
HEELRVTAKKLKPKKRVYEIKRVQVPRHHVRSPQXKVS

SEQ ID NO: 17108 - protein, 37 aa, Artificial Sequence
  GFR-binding peptide
  MOD_RES (33), (33): Xaa is C or S
NHQLFVQVEKHQGQHPKIRVKAMKVSREETPVXELGE

SEQ ID NO: 17109 - protein, 38 aa, Artificial Sequence
  GFR-binding peptide
  MOD_RES (2), (4), (38): Xaa is C or S
RXEXQSHEELVTAKKHQGQHPKIRIKRMQVPRQGTPVX

SEQ ID NO: 17110 - protein, 40 aa, Artificial Sequence
  GFR-binding peptide
  MOD_RES (1), (3), (37): Xaa is C or S
  MOD_RES (15), (16), (17), (18), (19): Xaa is A or G
  MOD_RES (20), (21), (22), (23): Xaa is A or G or is absent
XEXQSHEELSMEGIXXXXXXXXXMIQMTINSQGTPVXELG

SEQ ID NO: 17111 - protein, 43 aa, Artificial Sequence
  GFR-binding peptide
  MOD_RES (2), (4), (38): Xaa is C or S
  MOD_RES (16), (17), (18), (19), (20): Xaa is A or G
  MOD_RES (21), (22), (23), (24): Xaa is A or G or is absent
RXEXQSHEELSMEGLXXXXXXXXXMIQMTINSQGTPVXELGED

SEQ ID NO: 17112 - protein, 35 aa, Artificial Sequence
  GFR-binding peptide
  MOD_RES (35), (35): Xaa is C or S
HEELRVTAKKLKPKKRVYEIKRVQVPRHHVRSPQX

SEQ ID NO: 17113 - protein, 39 aa, Artificial Sequence
  GFR-binding peptide
  MOD_RES (2), (4), (38): Xaa is C or S
RXEXQSHEELSMEGIHQGQHPKIRMIQMTINSQGTPVXE

SEQ ID NO: 17114 - protein, 35 aa, Artificial Sequence
  GFR-binding peptide
  MOD_RES (33), (33): Xaa is C or S
NHQLFVQVEKHQGQHPKIRVKAMKVSREETPVXEL

SEQ ID NO: 17115 - protein, 40 aa, Artificial Sequence
  GFR-binding peptide
  MOD_RES (37), (37): Xaa is C or S
  MOD_RES (13), (14), (15), (16), (17): Xaa is A or G
  MOD_RES (18), (19), (20), (21): Xaa is A or G or is absent
ELHEELRVTAKKXXXXXXXXXIKRVQVPRHHVRSPQXKVS

SEQ ID NO: 17116 - protein, 34 aa, Artificial Sequence
  GFR-binding peptide
  MOD_RES (34), (34): Xaa is C or S
  MOD_RES (12), (13), (14), (15), (16): Xaa is A or G
  MOD_RES (17), (18), (19), (20): Xaa is A or G or is absent
QSHEELSMEGLXXXXXXXXXMIQMTINSQGTPVX

SEQ ID NO: 17117 - protein, 40 aa, Artificial Sequence
  GFR-binding peptide
  MOD_RES (37), (37): Xaa is C or S
ALHDELTSMEGLFIPKKRVIEMIQVTINSLQVQTPRXQVN

SEQ ID NO: 17118 - protein, 38 aa, Artificial Sequence
  GFR-binding peptide
  MOD_RES (2), (4), (38): Xaa is C or S
RXEXQSHEELVQVEKHQGQHPKIRVKAMKVSRQGTPVX

SEQ ID NO: 17119 - protein, 42 aa, Artificial Sequence
  GFR-binding peptide
  MOD_RES (2), (36): Xaa is C or S
  MOD_RES (14), (15), (16), (17), (18): Xaa is A or G
  MOD_RES (19), (20), (21), (22): Xaa is A or G or is absent
EXKNHQLFSMEGLXXXXXXXXXMIQMTINSEETPVXELGEDN

SEQ ID NO: 17120 - protein, 39 aa, Artificial Sequence
  GFR-binding peptide
  MOD_RES (1), (3), (37): Xaa is C or S
XEXKNHQLFSMEGIHQGQHPKIRMIQMTINSEETPVXEL

SEQ ID NO: 17121 - protein, 45 aa, Artificial Sequence
  GFR-binding peptide
  MOD_RES (2), (4), (41): Xaa is C or S
EXKXALHDELTSMEGLFIPKKRVIEMIQVTINSLQVQTPRXQVNR

SEQ ID NO: 17122 - protein, 42 aa, Artificial Sequence
  GFR-binding peptide
  MOD_RES (2), (4), (38): Xaa is C or S
  MOD_RES (16), (17), (18), (19), (20): Xaa is A or G
  MOD_RES (21), (22), (23), (24): Xaa is A or G or is absent
RXEXQSHEELVQVEKXXXXXXXXXVKAMKVSRQGTPVXELGE

SEQ ID NO: 17123 - protein, 39 aa, Artificial Sequence
  GFR-binding peptide
  MOD_RES (34), (34): Xaa is C or S
KNHQLFSMEGIHQGQHPKIRMIQMTINSEETPVXELGED

SEQ ID NO: 17124 - protein, 39 aa, Artificial Sequence
  GFR-binding peptide
  MOD_RES (1), (35): Xaa is C or S
XKNHQLFSMEGLHQGQHPKIRMIQMTINSEETPVXELGE

SEQ ID NO: 17125 - protein, 36 aa, Artificial Sequence
  GFR-binding peptide
  MOD_RES (1), (35): Xaa is C or S
  MOD_RES (13), (14), (15), (16), (17): Xaa is A or G
  MOD_RES (18), (19), (20), (21): Xaa is A or G or is absent
XKNHQLFSMEGIXXXXXXXXXMIQMTINSEETPVXE

SEQ ID NO: 17126 - protein, 32 aa, Artificial Sequence
  GFR-binding peptide
HEELRVQVEKLKPKKRVYEVKAVKVSRHHVRS

SEQ ID NO: 17127 - protein, 42 aa, Artificial Sequence
  GFR-binding peptide
  MOD_RES (1), (38): Xaa is C or S
XALHDELTSMEGIFIPKKRVIEMIQVTINSLQVQTPRXQVNR

SEQ ID NO: 17128 - protein, 37 aa, Artificial Sequence
  GFR-binding peptide
  MOD_RES (2), (36): Xaa is C or S
  MOD_RES (14), (15), (16), (17), (18): Xaa is A or G
  MOD_RES (19), (20), (21), (22): Xaa is A or G or is absent
EXQSHEELSMEGIXXXXXXXXXMIQMTINSQGTPVXE

SEQ ID NO: 17129 - protein, 41 aa, Artificial Sequence
  GFR-binding peptide
  MOD_RES (2), (4), (38): Xaa is C or S
  MOD_RES (16), (17), (18), (19), (20): Xaa is A or G
  MOD_RES (21), (22), (23), (24): Xaa is A or G or is absent
RXEXQSHEELVTAKKXXXXXXXXXIKRMQVPRQGTPVXELG

SEQ ID NO: 17130 - protein, 35 aa, Artificial Sequence
  GFR-binding peptide
  MOD_RES (34), (34): Xaa is C or S
  MOD_RES (12), (13), (14), (15), (16): Xaa is A or G
  MOD_RES (17), (18), (19), (20): Xaa is A or G or is absent
KNHQLFVTAKKXXXXXXXXXIKRMQVPREETPVXE

SEQ ID NO: 17131 - protein, 38 aa, Artificial Sequence
  GFR-binding peptide
  MOD_RES (34), (34): Xaa is C or S
  MOD_RES (12), (13), (14), (15), (16): Xaa is A or G
  MOD_RES (17), (18), (19), (20): Xaa is A or G or is absent
QSHEELSMEGIXXXXXXXXXMIQMTINSQGTPVXELGE

SEQ ID NO: 17132 - protein, 37 aa, Artificial Sequence
  GFR-binding peptide
  MOD_RES (1), (3), (37): Xaa is C or S
  MOD_RES (15), (16), (17), (18), (19): Xaa is A or G
  MOD_RES (20), (21), (22), (23): Xaa is A or G or is absent
XEXQSHEELSMEGLXXXXXXXXXMIQMTINSQGTPVX

SEQ ID NO: 17133 - protein, 39 aa, Artificial Sequence
  GFR-binding peptide
  MOD_RES (2), (4): Xaa is C or S
  MOD_RES (17), (18), (19), (20), (21): Xaa is A or G
  MOD_RES (22), (23), (24), (25): Xaa is A or G or is absent
EXKXALHDELTSMEGIXXXXXXXXXMIQVTINSLQVQTP

SEQ ID NO: 17134 - protein, 33 aa, Artificial Sequence
  GFR-binding peptide
QSHEELVTAKKHQGQHPKIRIKRMQVPRQGTPV

SEQ ID NO: 17135 - protein, 36 aa, Artificial Sequence
  GFR-binding peptide
  MOD_RES (34), (34): Xaa is C or S
  MOD_RES (12), (13), (14), (15), (16): Xaa is A or G
  MOD_RES (17), (18), (19), (20): Xaa is A or G or is absent
KNHQLFVQVEKXXXXXXXXXVKAMKVSREETPVXEL

SEQ ID NO: 17136 - protein, 38 aa, Artificial Sequence
  GFR-binding peptide
  MOD_RES (2), (36): Xaa is C or S
EXKNHQLFSMEGIHQGQHPKIRMIQMTINSEETPVXEL

SEQ ID NO: 17137 - protein, 40 aa, Artificial Sequence
  GFR-binding peptide
  MOD_RES (36), (36): Xaa is C or S
LHDELTSMEGLFIPKKRVIEMIQVTINSLQVQTPRXQVNR

SEQ ID NO: 17138 - protein, 35 aa, Artificial Sequence
  GFR-binding peptide
LHDELTVQVEKFIPKKRVIEVKAVKVSRLQVQTPR

SEQ ID NO: 17139 - protein, 39 aa, Artificial Sequence
  GFR-binding peptide
  MOD_RES (1), (3), (37): Xaa is C or S
XEXQSHEELVTAKKHQGQHPKIRIKRMQVPRQGTPVXEL

SEQ ID NO: 17140 - protein, 41 aa, Artificial Sequence
  GFR-binding peptide
  MOD_RES (37), (37): Xaa is C or S
ALHDELTVQVEKFIPKKRVIEVKAVKVSRLQVQTPRXQVNR

SEQ ID NO: 17141 - protein, 35 aa, Artificial Sequence
  GFR-binding peptide
  MOD_RES (2), (2): Xaa is C or S
EXKNHQLFVQVEKHQGQHPKIRVKAMKVSREETPV

SEQ ID NO: 17142 - protein, 37 aa, Artificial Sequence
  GFR-binding peptide
  MOD_RES (2), (36): Xaa is C or S
  MOD_RES (14), (15), (16), (17), (18): Xaa is A or G
  MOD_RES (19), (20), (21), (22): Xaa is A or G or is absent
EXKNHQLFVTAKKXXXXXXXXXIKRMQVPREETPVXE

SEQ ID NO: 17143 - protein, 38 aa, Artificial Sequence
  GFR-binding peptide
  MOD_RES (37), (37): Xaa is C or S
  MOD_RES (13), (14), (15), (16), (17): Xaa is A or G
  MOD_RES (18), (19), (20), (21): Xaa is A or G or is absent
ELHEELRVTAKKXXXXXXXXXIKRVQVPRHHVRSPQXK

SEQ ID NO: 17144 - protein, 39 aa, Artificial Sequence
  GFR-binding peptide
  MOD_RES (2), (39): Xaa is C or S
  MOD_RES (15), (16), (17), (18), (19): Xaa is A or G
  MOD_RES (20), (21), (22), (23): Xaa is A or G or is absent
KXALHDELTSMEGIXXXXXXXXXMIQVTINSLQVQTPRX

SEQ ID NO: 17145 - protein, 34 aa, Artificial Sequence
  GFR-binding peptide
  MOD_RES (11), (12), (13), (14), (15): Xaa is A or G
  MOD_RES (16), (17), (18), (19): Xaa is A or G or is absent
HDELTVTAKKXXXXXXXXXIKRVQVPRLQVQTPR

SEQ ID NO: 17146 - protein, 44 aa, Artificial Sequence
  GFR-binding peptide
  MOD_RES (1), (3), (40): Xaa is C or S
  MOD_RES (16), (17), (18), (19), (20): Xaa is A or G
  MOD_RES (21), (22), (23), (24): Xaa is A or G or is absent
XKXALHDELTSMEGLXXXXXXXXXMIQVTINSLQVQTPRXQVNR

SEQ ID NO: 17147 - protein, 42 aa, Artificial Sequence
  GFR-binding peptide
  MOD_RES (2), (4), (38): Xaa is C or S
  MOD_RES (16), (17), (18), (19), (20): Xaa is A or G
  MOD_RES (21), (22), (23), (24): Xaa is A or G or is absent
RXEXQSHEELVTAKKXXXXXXXXXIKRMQVPRQGTPVXELGE

SEQ ID NO: 17148 - protein, 41 aa, Artificial Sequence
  GFR-binding peptide
  MOD_RES (1), (38): Xaa is C or S
XALHDELTSMEGIFIPKKRVIEMIQVTINSLQVQTPRXQVN

SEQ ID NO: 17149 - protein, 38 aa, Artificial Sequence
  GFR-binding peptide
  MOD_RES (33), (33): Xaa is C or S
  MOD_RES (11), (12), (13), (14), (15): Xaa is A or G
  MOD_RES (16), (17), (18), (19): Xaa is A or G or is absent
NHQLFVQVEKXXXXXXXXXVKAMKVSREETPVXELGED

SEQ ID NO: 17150 - protein, 40 aa, Artificial Sequence
  GFR-binding peptide
  MOD_RES (2), (4): Xaa is C or S
  MOD_RES (17), (18), (19), (20), (21): Xaa is A or G
  MOD_RES (22), (23), (24), (25): Xaa is A or G or is absent
AXAXELHEELRSMEGLXXXXXXXXXMIQVTINSHHVRSPQ

SEQ ID NO: 17151 - protein, 36 aa, Artificial Sequence
  GFR-binding peptide
  MOD_RES (13), (14), (15), (16), (17): Xaa is A or G
  MOD_RES (18), (19), (20), (21): Xaa is A or G or is absent
ALHDELTSMEGIXXXXXXXXXMIQVTINSLQVQTPR

SEQ ID NO: 17152 - protein, 36 aa, Artificial Sequence
  GFR-binding peptide
  MOD_RES (1), (35): Xaa is C or S
XKNHQLFVTAKKHQGQHPKIRIKRMQVPREETPVXE

SEQ ID NO: 17153 - protein, 37 aa, Artificial Sequence
  GFR-binding peptide
  MOD_RES (37), (37): Xaa is C or S
ELHEELRVTAKKLKPKKRVYEIKRVQVPRHHVRSPQX

SEQ ID NO: 17154 - protein, 40 aa, Artificial Sequence
  GFR-binding peptide
  MOD_RES (1), (38): Xaa is C or S
XALHDELTVQVEKFIPKKRVIEVKAVKVSRLQVQTPRXQV

SEQ ID NO: 17155 - protein, 45 aa, Artificial Sequence
  GFR-binding peptide
  MOD_RES (2), (4), (41): Xaa is C or S
  MOD_RES (17), (18), (19), (20), (21): Xaa is A or G
  MOD_RES (22), (23), (24), (25): Xaa is A or G or is absent
EXKXALHDELTVQVEKXXXXXXXXXVKAVKVSRLQVQTPRXQVNR

SEQ ID NO: 17156 - protein, 39 aa, Artificial Sequence
  GFR-binding peptide
  MOD_RES (1), (3): Xaa is C or S
XKXALHDELTVTAKKFIPKKRVIEIKRVQVPRLQVQTPR

SEQ ID NO: 17157 - protein, 43 aa, Artificial Sequence
  GFR-binding peptide
  MOD_RES (2), (4), (38): Xaa is C or S
RXEXKNHQLFVTAKKHQGQHPKIRIKRMQVPREETPVXELGED

SEQ ID NO: 17158 - protein, 39 aa, Artificial Sequence
  GFR-binding peptide
  MOD_RES (1), (3): Xaa is C or S
  MOD_RES (16), (17), (18), (19), (20): Xaa is A or G
  MOD_RES (21), (22), (23), (24): Xaa is A or G or is absent
XAXELHEELRVTAKKXXXXXXXXXIKRVQVPRHHVRSPQ

SEQ ID NO: 17159 - protein, 40 aa, Artificial Sequence
  GFR-binding peptide
  MOD_RES (1), (3), (37): Xaa is C or S
XEXQSHEELSMEGLHQGQHPKIRMIQMTINSQGTPVXELG

SEQ ID NO: 17160 - protein, 33 aa, Artificial Sequence
  GFR-binding peptide
  MOD_RES (11), (12), (13), (14), (15): Xaa is A or G
  MOD_RES (16), (17), (18), (19): Xaa is A or G or is absent
HDELTSMEGIXXXXXXXXXMIQVTINSLQVQTP

SEQ ID NO: 17161 - protein, 40 aa, Artificial Sequence
  GFR-binding peptide
  MOD_RES (2), (39): Xaa is C or S
KXALHDELTVQVEKFIPKKRVIEVKAVKVSRLQVQTPRXQ

SEQ ID NO: 17162 - protein, 35 aa, Artificial Sequence
  GFR-binding peptide
  MOD_RES (34), (34): Xaa is C or S
KNHQLFVQVEKHQGQHPKIRVKAMKVSREETPVXE

SEQ ID NO: 17163 - protein, 37 aa, Artificial Sequence
  GFR-binding peptide
  MOD_RES (37), (37): Xaa is C or S
ELHEELRSMEGLLKPKKRVYEMIQVTINSHHVRSPQX

SEQ ID NO: 17164 - protein, 40 aa, Artificial Sequence
  GFR-binding peptide
  MOD_RES (2), (4): Xaa is C or S
  MOD_RES (17), (18), (19), (20), (21): Xaa is A or G
  MOD_RES (22), (23), (24), (25): Xaa is A or G or is absent
EXKXALHDELTSMEGLXXXXXXXXXMIQVTINSLQVQTPR

SEQ ID NO: 17165 - protein, 35 aa, Artificial Sequence
  GFR-binding peptide
LHEELRVTAKKLKPKKRVYEIKRVQVPRHHVRSPQ

SEQ ID NO: 17166 - protein, 36 aa, Artificial Sequence
  GFR-binding peptide
  MOD_RES (1), (35): Xaa is C or S
XKNHQLFSMEGLHQGQHPKIRMIQMTINSEETPVXE

SEQ ID NO: 17167 - protein, 38 aa, Artificial Sequence
  GFR-binding peptide
  MOD_RES (36), (36): Xaa is C or S
  MOD_RES (12), (13), (14), (15), (16): Xaa is A or G
  MOD_RES (17), (18), (19), (20): Xaa is A or G or is absent
LHDELTSMEGIXXXXXXXXXMIQVTINSLQVQTPRXQV

SEQ ID NO: 17168 - protein, 39 aa, Artificial Sequence
  GFR-binding peptide
  MOD_RES (1), (3): Xaa is C or S
XAXELHEELRVQVEKLKPKKRVYEVKAVKVSRHHVRSPQ

SEQ ID NO: 17169 - protein, 40 aa, Artificial Sequence
  GFR-binding peptide
  MOD_RES (2), (4): Xaa is C or S
  MOD_RES (17), (18), (19), (20), (21): Xaa is A or G
  MOD_RES (22), (23), (24), (25): Xaa is A or G or is absent
AXAXELHEELRVTAKKXXXXXXXXXIKRVQVPRHHVRSPQ

SEQ ID NO: 17170 - protein, 36 aa, Artificial Sequence
  GFR-binding peptide
  MOD_RES (2), (36): Xaa is C or S
  MOD_RES (14), (15), (16), (17), (18): Xaa is A or G
  MOD_RES (19), (20), (21), (22): Xaa is A or G or is absent
EXQSHEELVTAKKXXXXXXXXXIKRMQVPRQGTPVX

SEQ ID NO: 17171 - protein, 44 aa, Artificial Sequence
  GFR-binding peptide
  MOD_RES (2), (4), (41): Xaa is C or S
AXAXELHEELRSMEGILKPKKRVYEMIQVTINSHHVRSPQXKVS

SEQ ID NO: 17172 - protein, 43 aa, Artificial Sequence
  GFR-binding peptide
  MOD_RES (2), (39): Xaa is C or S
AXELHEELRSMEGILKPKKRVYEMIQVTINSHHVRSPQXKVSS

SEQ ID NO: 17173 - protein, 40 aa, Artificial Sequence
  GFR-binding peptide
  MOD_RES (2), (36): Xaa is C or S
EXQSHEELSMEGLHQGQHPKIRMIQMTINSQGTPVXELGE

SEQ ID NO: 17174 - protein, 40 aa, Artificial Sequence
  GFR-binding peptide
  MOD_RES (34), (34): Xaa is C or S
KNHQLFSMEGIHQGQHPKIRMIQMTINSEETPVXELGEDN

SEQ ID NO: 17175 - protein, 34 aa, Artificial Sequence
  GFR-binding peptide
  MOD_RES (1), (1): Xaa is C or S
  MOD_RES (13), (14), (15), (16), (17): Xaa is A or G
  MOD_RES (18), (19), (20), (21): Xaa is A or G or is absent
XQSHEELVTAKKXXXXXXXXXIKRMQVPRQGTPV

SEQ ID NO: 17176 - protein, 38 aa, Artificial Sequence
  GFR-binding peptide
  MOD_RES (34), (34): Xaa is C or S
QSHEELSMEGLHQGQHPKIRMIQMTINSQGTPVXELGE

SEQ ID NO: 17177 - protein, 36 aa, Artificial Sequence
  GFR-binding peptide
  MOD_RES (36), (36): Xaa is C or S
LHDELTVTAKKFIPKKRVIEIKRVQVPRLQVQTPRX

SEQ ID NO: 17178 - protein, 38 aa, Artificial Sequence
  GFR-binding peptide
  MOD_RES (34), (34): Xaa is C or S
KNHQLFVQVEKHQGQHPKIRVKAMKVSREETPVXELGE

SEQ ID NO: 17179 - protein, 35 aa, Artificial Sequence
  GFR-binding peptide
ELHEELRSMEGILKPKKRVYEMIQVTINSHHVRSP

SEQ ID NO: 17180 - protein, 36 aa, Artificial Sequence
  GFR-binding peptide
  MOD_RES (1), (3): Xaa is C or S
  MOD_RES (15), (16), (17), (18), (19): Xaa is A or G
  MOD_RES (20), (21), (22), (23): Xaa is A or G or is absent
XEXKNHQLFSMEGIXXXXXXXXXMIQMTINSEETPV

SEQ ID NO: 17181 - protein, 38 aa, Artificial Sequence
  GFR-binding peptide
  MOD_RES (1), (35): Xaa is C or S
XKNHQLFVTAKKHQGQHPKIRIKRMQVPREETPVXELG

SEQ ID NO: 17182 - protein, 37 aa, Artificial Sequence
  GFR-binding peptide
  MOD_RES (35), (35): Xaa is C or S
HEELRVTAKKLKPKKRVYEIKRVQVPRHHVRSPQXKV

SEQ ID NO: 17183 - protein, 41 aa, Artificial Sequence
  GFR-binding peptide
  MOD_RES (2), (39): Xaa is C or S
AXELHEELRVQVEKLKPKKRVYEVKAVKVSRHHVRSPQXKV

SEQ ID NO: 17184 - protein, 37 aa, Artificial Sequence
  GFR-binding peptide
  MOD_RES (1), (1): Xaa is C or S
  MOD_RES (14), (15), (16), (17), (18): Xaa is A or G
  MOD_RES (19), (20), (21), (22): Xaa is A or G or is absent
XELHEELRVTAKKXXXXXXXXXIKRVQVPRHHVRSPQ

SEQ ID NO: 17185 - protein, 39 aa, Artificial Sequence
  GFR-binding peptide
  MOD_RES (2), (4), (38): Xaa is C or S
  MOD_RES (16), (17), (18), (19), (20): Xaa is A or G
  MOD_RES (21), (22), (23), (24): Xaa is A or G or is absent
RXEXKNHQLFSMEGLXXXXXXXXXMIQMTINSEETPVXE

SEQ ID NO: 17186 - protein, 34 aa, Artificial Sequence
  GFR-binding peptide
HEELRSMEGILKPKKRVYEMIQVTINSHHVRSPQ

SEQ ID NO: 17187 - protein, 38 aa, Artificial Sequence
  GFR-binding peptide
  MOD_RES (2), (4), (38): Xaa is C or S
  MOD_RES (16), (17), (18), (19), (20): Xaa is A or G
  MOD_RES (21), (22), (23), (24): Xaa is A or G or is absent
RXEXQSHEELVQVEKXXXXXXXXXVKAMKVSRQGTPVX

SEQ ID NO: 17188 - protein, 39 aa, Artificial Sequence
  GFR-binding peptide
  MOD_RES (2), (36): Xaa is C or S
EXQSHEELVTAKKHQGQHPKIRIKRMQVPRQGTPVXELG

SEQ ID NO: 17189 - protein, 40 aa, Artificial Sequence
  GFR-binding peptide
  MOD_RES (37), (37): Xaa is C or S
  MOD_RES (13), (14), (15), (16), (17): Xaa is A or G
  MOD_RES (18), (19), (20), (21): Xaa is A or G or is absent
ELHEELRSMEGLXXXXXXXXXMIQVTINSHHVRSPQXKVS

SEQ ID NO: 17190 - protein, 36 aa, Artificial Sequence
  GFR-binding peptide
  MOD_RES (33), (33): Xaa is C or S
  MOD_RES (11), (12), (13), (14), (15): Xaa is A or G
  MOD_RES (16), (17), (18), (19): Xaa is A or G or is absent
SHEELVTAKKXXXXXXXXXIKRMQVPRQGTPVXELG

SEQ ID NO: 17191 - protein, 36 aa, Artificial Sequence
  GFR-binding peptide
  MOD_RES (1), (3): Xaa is C or S
  MOD_RES (15), (16), (17), (18), (19): Xaa is A or G
  MOD_RES (20), (21), (22), (23): Xaa is A or G or is absent
XEXQSHEELVTAKKXXXXXXXXXIKRMQVPRQGTPV

SEQ ID NO: 17192 - protein, 40 aa, Artificial Sequence
  GFR-binding peptide
  MOD_RES (34), (34): Xaa is C or S
QSHEELSMEGIHQGQHPKIRMIQMTINSQGTPVXELGEDN

SEQ ID NO: 17193 - protein, 36 aa, Artificial Sequence
  GFR-binding peptide
  MOD_RES (1), (1): Xaa is C or S
  MOD_RES (14), (15), (16), (17), (18): Xaa is A or G
  MOD_RES (19), (20), (21), (22): Xaa is A or G or is absent
XALHDELTSMEGIXXXXXXXXXMIQVTINSLQVQTP

SEQ ID NO: 17194 - protein, 35 aa, Artificial Sequence
  GFR-binding peptide
  MOD_RES (1), (35): Xaa is C or S
  MOD_RES (13), (14), (15), (16), (17): Xaa is A or G
  MOD_RES (18), (19), (20), (21): Xaa is A or G or is absent
XQSHEELSMEGLXXXXXXXXXMIQMTINSQGTPVX

SEQ ID NO: 17195 - protein, 41 aa, Artificial Sequence
  GFR-binding peptide
  MOD_RES (2), (39): Xaa is C or S
  MOD_RES (15), (16), (17), (18), (19): Xaa is A or G
  MOD_RES (20), (21), (22), (23): Xaa is A or G or is absent
KXALHDELTVQVEKXXXXXXXXXVKAVKVSRLQVQTPRXQV

SEQ ID NO: 17196 - protein, 40 aa, Artificial Sequence
  GFR-binding peptide
  MOD_RES (2), (39): Xaa is C or S
  MOD_RES (15), (16), (17), (18), (19): Xaa is A or G
  MOD_RES (20), (21), (22), (23): Xaa is A or G or is absent
AXELHEELRVTAKKXXXXXXXXXIKRVQVPRHHVRSPQXK

SEQ ID NO: 17197 - protein, 43 aa, Artificial Sequence
  GFR-binding peptide
  MOD_RES (2), (39): Xaa is C or S
KXALHDELTVQVEKFIPKKRVIEVKAVKVSRLQVQTPRXQVNR

SEQ ID NO: 17198 - protein, 39 aa, Artificial Sequence
  GFR-binding peptide
  MOD_RES (1), (35): Xaa is C or S
XQSHEELVQVEKHQGQHPKIRVKAMKVSRQGTPVXELGE

SEQ ID NO: 17199 - protein, 37 aa, Artificial Sequence
  GFR-binding peptide
  MOD_RES (35), (35): Xaa is C or S
HDELTVTAKKFIPKKRVIEIKRVQVPRLQVQTPRXQV

SEQ ID NO: 17200 - protein, 35 aa, Artificial Sequence
  GFR-binding peptide
  MOD_RES (1), (1): Xaa is C or S
  MOD_RES (14), (15), (16), (17), (18): Xaa is A or G
  MOD_RES (19), (20), (21), (22): Xaa is A or G or is absent
XALHDELTVQVEKXXXXXXXXXVKAVKVSRLQVQT

SEQ ID NO: 17201 - protein, 38 aa, Artificial Sequence
  GFR-binding peptide
  MOD_RES (1), (38): Xaa is C or S
XELHEELRVTAKKLKPKKRVYEIKRVQVPRHHVRSPQX

SEQ ID NO: 17202 - protein, 37 aa, Artificial Sequence
  GFR-binding peptide
  MOD_RES (34), (34): Xaa is C or S
QSHEELSMEGIHQGQHPKIRMIQMTINSQGTPVXELG

SEQ ID NO: 17203 - protein, 34 aa, Artificial Sequence
  GFR-binding peptide
  MOD_RES (34), (34): Xaa is C or S
  MOD_RES (12), (13), (14), (15), (16): Xaa is A or G
  MOD_RES (17), (18), (19), (20): Xaa is A or G or is absent
KNHQLFSMEGLXXXXXXXXXMIQMTINSEETPVX

SEQ ID NO: 17204 - protein, 41 aa, Artificial Sequence
  GFR-binding peptide
  MOD_RES (2), (39): Xaa is C or S
  MOD_RES (15), (16), (17), (18), (19): Xaa is A or G
  MOD_RES (20), (21), (22), (23): Xaa is A or G or is absent
AXELHEELRVTAKKXXXXXXXXXIKRVQVPRHHVRSPQXKV

SEQ ID NO: 17205 - protein, 36 aa, Artificial Sequence
  GFR-binding peptide
  MOD_RES (36), (36): Xaa is C or S
  MOD_RES (12), (13), (14), (15), (16): Xaa is A or G
  MOD_RES (17), (18), (19), (20): Xaa is A or G or is absent
LHEELRVQVEKXXXXXXXXXVKAVKVSRHHVRSPQX

SEQ ID NO: 17206 - protein, 35 aa, Artificial Sequence
  GFR-binding peptide
  MOD_RES (1), (1): Xaa is C or S
XALHDELTSMEGLFIPKKRVIEMIQVTINSLQVQT

SEQ ID NO: 17207 - protein, 43 aa, Artificial Sequence
  GFR-binding peptide
  MOD_RES (1), (3), (37): Xaa is C or S
  MOD_RES (15), (16), (17), (18), (19): Xaa is A or G
  MOD_RES (20), (21), (22), (23): Xaa is A or G or is absent
XEXKNHQLFSMEGIXXXXXXXXXMIQMTINSEETPVXELGEDN

SEQ ID NO: 17208 - protein, 33 aa, Artificial Sequence
  GFR-binding peptide
  MOD_RES (33), (33): Xaa is C or S
NHQLFVQVEKHQGQHPKIRVKAMKVSREETPVX

SEQ ID NO: 17209 - protein, 37 aa, Artificial Sequence
  GFR-binding peptide
  MOD_RES (37), (37): Xaa is C or S
  MOD_RES (13), (14), (15), (16), (17): Xaa is A or G
  MOD_RES (18), (19), (20), (21): Xaa is A or G or is absent
ELHEELRVQVEKXXXXXXXXXVKAVKVSRHHVRSPQX

SEQ ID NO: 17210 - protein, 34 aa, Artificial Sequence
  GFR-binding peptide
  MOD_RES (33), (33): Xaa is C or S
  MOD_RES (11), (12), (13), (14), (15): Xaa is A or G
  MOD_RES (16), (17), (18), (19): Xaa is A or G or is absent
NHQLFSMEGLXXXXXXXXXMIQMTINSEETPVXE

SEQ ID NO: 17211 - protein, 42 aa, Artificial Sequence
  GFR-binding peptide
  MOD_RES (1), (38): Xaa is C or S
XELHEELRVQVEKLKPKKRVYEVKAVKVSRHHVRSPQXKVSS

SEQ ID NO: 17212 - protein, 41 aa, Artificial Sequence
  GFR-binding peptide
  MOD_RES (2), (36): Xaa is C or S
EXKNHQLFVTAKKHQGQHPKIRIKRMQVPREETPVXELGED

SEQ ID NO: 17213 - protein, 34 aa, Artificial Sequence
  GFR-binding peptide
ELHEELRSMEGLLKPKKRVYEMIQVTINSHHVRS

SEQ ID NO: 17214 - protein, 43 aa, Artificial Sequence
  GFR-binding peptide
  MOD_RES (2), (39): Xaa is C or S
AXELHEELRSMEGLLKPKKRVYEMIQVTINSHHVRSPQXKVSS

SEQ ID NO: 17215 - protein, 42 aa, Artificial Sequence
  GFR-binding peptide
  MOD_RES (2), (36): Xaa is C or S
EXQSHEELVTAKKHQGQHPKIRIKRMQVPRQGTPVXELGEDN

SEQ ID NO: 17216 - protein, 40 aa, Artificial Sequence
  GFR-binding peptide
  MOD_RES (2), (36): Xaa is C or S
EXKNHQLFSMEGIHQGQHPKIRMIQMTINSEETPVXELGE

SEQ ID NO: 17217 - protein, 37 aa, Artificial Sequence
  GFR-binding peptide
  MOD_RES (34), (34): Xaa is C or S
KNHQLFSMEGIHQGQHPKIRMIQMTINSEETPVXELG

SEQ ID NO: 17218 - protein, 38 aa, Artificial Sequence
  GFR-binding peptide
  MOD_RES (37), (37): Xaa is C or S
  MOD_RES (13), (14), (15), (16), (17): Xaa is A or G
  MOD_RES (18), (19), (20), (21): Xaa is A or G or is absent
ELHEELRSMEGLXXXXXXXXXMIQVTINSHHVRSPQXK

SEQ ID NO: 17219 - protein, 43 aa, Artificial Sequence
  GFR-binding peptide
  MOD_RES (2), (4), (38): Xaa is C or S
  MOD_RES (16), (17), (18), (19), (20): Xaa is A or G
  MOD_RES (21), (22), (23), (24): Xaa is A or G or is absent
RXEXKNHQLFVQVEKXXXXXXXXXVKAMKVSREETPVXELGED

SEQ ID NO: 17220 - protein, 44 aa, Artificial Sequence
  GFR-binding peptide
  MOD_RES (2), (4), (41): Xaa is C or S
  MOD_RES (17), (18), (19), (20), (21): Xaa is A or G
  MOD_RES (22), (23), (24), (25): Xaa is A or G or is absent
AXAXELHEELRVQVEKXXXXXXXXXVKAVKVSRHHVRSPQXKVS

SEQ ID NO: 17221 - protein, 36 aa, Artificial Sequence
  GFR-binding peptide
  MOD_RES (1), (3): Xaa is C or S
XEXKNHQLFVTAKKHQGQHPKIRIKRMQVPREETPV

SEQ ID NO: 17222 - protein, 38 aa, Artificial Sequence
  GFR-binding peptide
  MOD_RES (37), (37): Xaa is C or S
ALHDELTSMEGIFIPKKRVIEMIQVTINSLQVQTPRXQ

SEQ ID NO: 17223 - protein, 32 aa, Artificial Sequence
  GFR-binding peptide
  MOD_RES (11), (12), (13), (14), (15): Xaa is A or G
  MOD_RES (16), (17), (18), (19): Xaa is A or G or is absent
SHEELSMEGLXXXXXXXXXMIQMTINSQGTPV

SEQ ID NO: 17224 - protein, 37 aa, Artificial Sequence
  GFR-binding peptide
  MOD_RES (36), (36): Xaa is C or S
LHDELTSMEGLFIPKKRVIEMIQVTINSLQVQTPRXQ

SEQ ID NO: 17225 - protein, 43 aa, Artificial Sequence
  GFR-binding peptide
  MOD_RES (1), (3), (37): Xaa is C or S
  MOD_RES (15), (16), (17), (18), (19): Xaa is A or G
  MOD_RES (20), (21), (22), (23): Xaa is A or G or is absent
XEXQSHEELVTAKKXXXXXXXXXIKRMQVPRQGTPVXELGEDN

SEQ ID NO: 17226 - protein, 35 aa, Artificial Sequence
  GFR-binding peptide
  MOD_RES (12), (13), (14), (15), (16): Xaa is A or G
  MOD_RES (17), (18), (19), (20): Xaa is A or G or is absent
LHDELTSMEGLXXXXXXXXXMIQVTINSLQVQTPR

SEQ ID NO: 17227 - protein, 38 aa, Artificial Sequence
  GFR-binding peptide
  MOD_RES (2), (2): Xaa is C or S
  MOD_RES (15), (16), (17), (18), (19): Xaa is A or G
  MOD_RES (20), (21), (22), (23): Xaa is A or G or is absent
KXALHDELTSMEGIXXXXXXXXXMIQVTINSLQVQTPR

SEQ ID NO: 17228 - protein, 37 aa, Artificial Sequence
  GFR-binding peptide
  MOD_RES (35), (35): Xaa is C or S
  MOD_RES (11), (12), (13), (14), (15): Xaa is A or G
  MOD_RES (16), (17), (18), (19): Xaa is A or G or is absent
HDELTVQVEKXXXXXXXXXVKAVKVSRLQVQTPRXQV

SEQ ID NO: 17229 - protein, 38 aa, Artificial Sequence
  GFR-binding peptide
  MOD_RES (1), (38): Xaa is C or S
XELHEELRSMEGLLKPKKRVYEMIQVTINSHHVRSPQX

SEQ ID NO: 17230 - protein, 37 aa, Artificial Sequence
  GFR-binding peptide
  MOD_RES (35), (35): Xaa is C or S
  MOD_RES (11), (12), (13), (14), (15): Xaa is A or G
  MOD_RES (16), (17), (18), (19): Xaa is A or G or is absent
HDELTVTAKKXXXXXXXXXIKRVQVPRLQVQTPRXQV

SEQ ID NO: 17231 - protein, 33 aa, Artificial Sequence
  GFR-binding peptide
HEELRSMEGLLKPKKRVYEMIQVTINSHHVRSP
